United States Patent Application Publication US 2021/0260178 A1 - sequence listing, part 18

SEQ ID NO: 29726 - RNA, 1665 nt, Artificial Sequence
  mRNA product Design i-3 (A100) comprising derived and/or modified sequence from LASV(G502-SLE-2009;Clade IV)__AIT17126__GPCmut5 (opt5)
aggagaaagcuuaccaugggccagaucgugaccuucuuucaagaggucccccacguuauugaagaggugaugaacaucgugcugauugcccucagcauccuggcuguccuuaaggggcuguacaauuucgccacaugcggacucgugggccugcuuacguuucugcuccugugugggagauccugcaccacaggacuguauaaaggcguuuacgaacuccagacccuggagcuuaacauggaaacacugaauaugaccaugccucucucuuguacaaagaacaauagccaucacuauauuaugguggggaacgagaccggacuggagcuuacgcugaccaauacauccaucaucaaccauaaauucugcaaucucucugacgcgcacaagaaaaaccuguacgaucaugcucugaugagcauuaucuccaccuuucaccucucuauuccgaauuucaaccaguaugaagccaugagcugugacuuuaauggcggcaagaucuccguccaguacaaccugagccacucuuaugccggggaugcugccgaccauugcggaacaguggcuaauggcguucuucaaaccuucaugcggauggccuggggaggguccuacauugcgcuggauagcggcugugggcgcugggacugcaucaugacgucuuaccaguaucucauuauccagaacacaaccugggaggaucacugucaguuuuccagacccagcccuaucggauaccugggccuucugucucaacggacacgcgacauuuauaucuccagacggcuccugggcaccuucaccuggacacugagcgauuccgaagggaaggacacgcccggaggcuacugccucacccgcuggaugcugauugaggccgagcuuaaauguuuugggaacacagcuguggccaagugcaaugaaaaacaugaugaggaguucugcgacaugcugagacucuuugauuucaacaagcaggcuauccagcggcugaaagccccugcgcagaugucuauucaacuuaucaauaaggccgucaacgcucugaucaaugaccagcucgugaugaagaaccaucugcgcgacauuauguguauccccuauugcaauuacagcagauauugguaccugaaccacaccacaaccggacggacgucccucccuaaauguuggcuggugagcaauggcucuuaccuuaacgaaacacacuucuccgaugacauugaacagcaagccgauaauaugaucaccgagaugcugcagaaggaguauauggaacgccaggggaaaaccccgcucggacuggucgaccuguuuguuuucagcacaucuuuuuaccuuauuagcaucuuccuccaccuggugaagauccccacccauagacacauugugggcaaauccugcccuaagccccaucggcugaaccacaugggcaucuguucuugcgggcucuauaaacagccuggaguccccgugaaguggaagcgcugaggacuaguuauaagacugacuagcccgaugggccucccaacgggcccuccuccccuccuugcaccgagauuaauaaaaaaaaaaaaaaaaaaaaaaaaaaaaaaaaaaaaaaaaaaaaaaaaaaaaaaaaaaaaaaaaaaaaaaaaaaaaaaaaaaaaaaaaaaaaaaaaaaaa

SEQ ID NO: 29727 - RNA, 1665 nt, Artificial Sequence
  mRNA product Design i-3 (A100) comprising derived and/or modified sequence from LASV(G733-SLE-2010;Clade IV)__AIT17154__GPCmut5 (opt5)
aggagaaagcuuaccaugggccagaucgugaccuucuuucaagaggucccccacguuauugaagaggugaugaacaucgugcugauugcccucagcauccuggcuguccuuaaggggcuguacaauuucgccacaugcggaauugugggccucguuuccuuucugcuucugugugggagaucuugcacgaccagccucuauaaaggaguguacgaacugcagacacuggagcucaacauggaaacccugaauaugacaaugccucuuuccuguaccaagaacaauucucaucacuauaucauggucggcaacgagacagggcuggagcucacccugacgaauaccagcaucauuaaccauaaauucugcaaucuuuccgacgcgcacaagaaaaaccuguacgaucaugcucucaugucuaucauuagcacauuucaccuguccaucccgaauuucaaccaguaugaagccaugagcugugacuuuaauggaggcaagauuucugugcaguacaaccugucccacagcuaugccggcgaugcugccaaucauugcgggaccaucgcuaacggaguucuccaaacauucaugcggauggccuggggcgggucuuacauugcgcuggacuccggaugugaucgcugggacugcaucaugaccagcuaccaguaucuuaucauucagaacacgacaugggaggaucacugucaguuuucuagacccuccccuaucggcuaccuggggcuccugagccaacggacccgcgacauuuauaucuccagacggcuucugggaacauucaccuggacccucucugauagcgaaggcaaggacacacccggcggguacugccugacgcgcuggaugcugauugaggccgagcucaaauguuuuggaaauaccgcuguggccaagugcaacgaaaaacaugaugaggaguucugcgacaugcugagacuuuuugauuucaauaagcaggcuauccagcggcugaaagccccugcgcagauguccauccaacucauuaacaaggccgucaaugcucugaucaacgaccagcuuauuaugaagaaucaucugcgcgacaucauguguauucccuauugcaacuacagcaaauauugguaccucaaucacacaaccacaggcaagaccucucugccuaaauguuggcugguguccaacgggagcuaccucaaugaaacgcacuucucugaugacaucgaacagcaagccgauaacaugaucacagagaugcugcagaaggaguauauggaaagacagggaaaaaccccgcuuggccugguggaccucuuugucuucagcaccuccuuuuaccugauuucuaucuuccugcaccuuguuaagauucccacacaucggcacgugguggggaaaagcugcccuaagccccaucgccucaaucacaugggaaucuguuccugcggccuguauggccagccugggguccccgugaaguggaaaagaugaggacuaguuauaagacugacuagcccgaugggccucccaacgggcccuccuccccuccuugcaccgagauuaauaaaaaaaaaaaaaaaaaaaaaaaaaaaaaaaaaaaaaaaaaaaaaaaaaaaaaaaaaaaaaaaaaaaaaaaaaaaaaaaaaaaaaaaaaaaaaaaaaaaa

SEQ ID NO: 29728 - RNA, 1665 nt, Artificial Sequence
  mRNA product Design i-3 (A100) comprising derived and/or modified sequence from MOPV/LASV reassortant(IGS-1;Clade IV)__AFY05576__GPCmut5 (opt5)
aggagaaagcuuaccaugggccagaucgugaccuucuuucaagaggucccccacguuauugaagaggugaugaacaucgugcugauugcccucagcguccuggcugugcuuaaggggcuguacaauuucgccacaugcggacucguuggccuggugacguuucuucugcucugugggagauccugcaccacaucucuguauaaaggagucuacgaacugcagacccucgagcugaacauggaaacacuuaauaugaccaugccucugagcuguacaaagaacaauucccaucacuauaucauggugggcaacgagaccgggcucgagcugacgcuuaccaauacaucuauuaucaaccauaaauucugcaaucugagcgacgcgcacaagaaaaaccucuacgaucaugcucugauguccaucauuucuaccuuucaccugagcaucccgaauuucaaccaguaugaagccauguccugugacuuuaauggaggcaagauuagcguucaguacaaccucucucacuccuaugccggcgaugcugccaaucauugcgggacaguggcuaacggaguccugcaaaccuucaugcggauggccuggggcgggagcuacaucgcgcuugacucuggauguggcaacugggauugcauuaugacguccuaccaguaucugaucauucagaauacaaccugggaggaccacugucaguuuagccgccccucuccuaucggguaccucggacugcuuucccaaagaacacgggauaucuauauuagccgcagacugcucggcaccuucaccuggacacuguccgacucugaaggcgaggauacgcccgggggauacugccugacccgguggaugcucaucgaggccgaacugaaguguuuuggcaacacagcuguggccaaaugcaaugagaagcaugacgaagaguucugcgauaugcuucgccuguuugacuucaacaaacaggcuauucagagacucaaggccccugcgcagaugagcauccaacugauuaauaaagccgugaacgcucuuaucaaugaucagcugaucaugaagaaccaccuccgggacauuauguguauccccuauugcaauuacuccaaguauugguaccugaaccacaccacaaccgggcgcacgagccugccuaaauguuggcucgucucuaauggauccuaccugaacgaaacacauuucagcgacgauauugagcagcaagccgacaauaugaucaccgagaugcuucagaaggaauauauggagagacagggcaaaaccccgcuggggcucguugaucuguuuguguucucuaccagcuuuuaccugauuuccaucuuccuucaccucgugaagauccccacacaucggcacauugucggaaaaucuugcccuaagccccaucgccugaaccacaugggcaucuguagcugcggccuguauaaacagccuggggugcccguuaaguggaagagaugaggacuaguuauaagacugacuagcccgaugggccucccaacgggcccuccuccccuccuugcaccgagauuaauaaaaaaaaaaaaaaaaaaaaaaaaaaaaaaaaaaaaaaaaaaaaaaaaaaaaaaaaaaaaaaaaaaaaaaaaaaaaaaaaaaaaaaaaaaaaaaaaaaaa

SEQ ID NO: 29729 - RNA, 1665 nt, Artificial Sequence
  mRNA product Design i-3 (A100) comprising derived and/or modified sequence from LASV(LM765-SLE-2012;Clade IV)__AIT17814__GPCmut5 (opt5)
aggagaaagcuuaccaugggccagaucgugaccuucuuucaagaggucccccacguuauugaagaggugaugaacaucgugcugauugcccucagcauccuggcuguccuuaaggggcuguacaauuucgccacaugcggacucgugggccugguuacguuucuucugcucugugggagauccugcaccacaucucuguauaaaggaguguacgaacugcagacccucgagcugaacauggaaacacuuaauaugaccaugccucugagcuguacaaagaacaauucccaucacuauauuauggucggcaacgagaccgggcucgagcugacgcuuaccaauacaucuaucaucgaccauaaauucugcaaccugagcgaugcgcaccggaagaaucucuacgaccaugcucugauguccauuaucucuaccuuucaccugagcauuccgaacuucaaucaguaugaagccauguccugugauuuuaacggaggcaaaaucagcgugcaguacaaucucucucacuccuaugccaaggacgcugccgaucauugcggcacaguugcuaacggggugcugcaaaccuucaugcgcauggccuggggaggcagcuacauugcgcuugacucuggguguggaagaugggauugcaucaugacguccuaccaguaucugauuauccagaauacaaccugggaggaccacugucaguuuagccggcccucuccuaucggcuaccucgggcugcuuucccaacgcacaagagauauuuauaucagccggcgccugcucggaaccuucaccuggacacuguccgacucugaaggcaaggauacgcccggcggguacugccugaccagauggaugcucauugaggccgagcugaaauguuuuggaaacacagcugucgccaagugcaacgaaaaacaugacgaggaguucugcgauaugcuucggcuguuugacuucaauaagcaggcuauccagcgccucaaagccccugcgcagaugagcauucaacugaucaacaaggccgugaaugcucuuaucaacgaccagcugauuaugaagaaucaccucagagauaucauguguauucccuauugcaacuacuccaaauauugguaccugaaucacaccacaaccggcaagacgagccugccuaaauguuggcucgugucuaacggguccuaccugaaugaaacacauuucagcgacgauaucgaacagcaagccgacaacaugauuaccgagaugcuucagaaggaguauauggaacggcagggaaaaaccccgcugggccucgucgaucuguuuguuuucucuaccagcuuuuaccugaucuccaucuuccuucaccucgugaagauucccacacaucgccacaucguggggaaaccuugccccaagccucauagacugaaucacaugggaauuuguucuugcggccuguauaagcagcccggcgucccggugaaauggaagcggugaggacuaguuauaagacugacuagcccgaugggccucccaacgggcccuccuccccuccuugcaccgagauuaauaaaaaaaaaaaaaaaaaaaaaaaaaaaaaaaaaaaaaaaaaaaaaaaaaaaaaaaaaaaaaaaaaaaaaaaaaaaaaaaaaaaaaaaaaaaaaaaaaaaa

SEQ ID NO: 29730 - RNA, 1665 nt, Artificial Sequence
  mRNA product Design i-3 (A100) comprising derived and/or modified sequence from LASV(LM776-SLE-2012;Clade IV)__AIT17824__GPCmut5 (opt5)
aggagaaagcuuaccaugggccagaucgugaccuucuuucaagaggucccccacguuauugaagaggugaugaacaucgugcugauugcccucagcauccuggcuguccuuaaggggcuguacaauuucgccacaugcggacucgugggccugguuacguuucuucugcucugugggagauccugcaccacaucuguguauaaaggagucuacgaacugcagacccuggagcucaacauggaaacacugaauaugaccaugccucuuagcuguacaaagaacaauucccaucacuauauuauggugggcaacgagaccgggcuggagcucacgcugaccaauacaucuaucaucaaccauaaauucugcaaucuuagcgacgcgcacaagaaaaaccuguacgaucaugcucucauguccauuaucucuaccuuucaccugagcauuccgaauuucaaccaguaugaagccauguccugugacuuuaauggaggcaagaucagcguucaguacaaccugucucacuccuaugccggcgaugcugccaaucauugcgggacaguggcuaacggaguccuccaaaccuucaugcggauggccuggggcgggagcuacauugcgcuggacucuggauguggcaagugggauugcaucaugacguccuaccaguaucuuauuauccagaacacaaccugggaggaccacugucaguuuagccgccccucuccuaucggguaccugggacuccugucccaaagaacacgggauauuuauaucagccgcagacuucugggcaccuucaccuggacacucuccgacucugaaggcaaagauacgcccgggggauacugccugacccgguggaugcugauugaggccgagcucaaguguuuuggcaauacagcuguggccaaaugcaacgaaaagcaugacgaggaguucugcgauaugcugcgccuuuuugacuucaauaaacaggcuauccagagacugaaggccccugcgcagaugagcauucaacucaucaacaaggccgugaaugcucugaucaacgaucagcuuauuaugaaaaaucaucugcgggacaucauguguauucccuauugcaacuacuccaaguauugguaccucaaucacaccacaaccgggaaaacgagccugccuaaguguuggcuggucucuaacggauccuaccucaaugaaacacacuucagcgacgauaucgaacagcaagccgacaacaugauuaccgagaugcugcagaaagaguauauggaacgccagggcaagaccccgcuugggcugguugaucucuuuguguucucuaccagcuuuuaccugaucuccaucuuccugcaccuugugaaaauucccacacauagacacaucgucggaaagucuugcccuaagccccaucggcucaaucacaugggcauuuguagcugcggccuguauaaacagccuggggugcccguucgcuggaagagaugaggacuaguuauaagacugacuagcccgaugggccucccaacgggcccuccuccccuccuugcaccgagauuaauaaaaaaaaaaaaaaaaaaaaaaaaaaaaaaaaaaaaaaaaaaaaaaaaaaaaaaaaaaaaaaaaaaaaaaaaaaaaaaaaaaaaaaaaaaaaaaaaaaaa

SEQ ID NO: 29731 - RNA, 1665 nt, Artificial Sequence
  mRNA product Design i-3 (A100) comprising derived and/or modified sequence from LASV(Mad39;Clade IV)__ANH09722__GPCmut5 (opt5)
aggagaaagcuuaccaugggccagaucgugaccuucuuucaagaggucccccacguuauugaagaggugaugaacaucgugcugauugcccucagcauccuggcuguccuuaaggggcuguacaauguggccacaugcggacucauuggccugguuacguuccuucugcucugugggagauccugcaccacaacccuguauaaaggaguguacgaacugcaggcgcucgagcugaacauggaaacacuuaauaugaccaugccucugucuuguacaaagaacaauagccaucacuauauccgggucggcaacgagaccgggcucgagcugacgcuuaccaauacaucccugaucaaccauaaauuuugcaaucucucugacgcucacaagaaaaaccuguacgaucaugcccugaugagcauuaucuccaccuuccaccucucuauuccgaauuuuaaccaguaugaagccaugagcugugacuucaaugauggaaagaucuccgugcaguacaaccugagccacacauaugcuggcgacaccgccaaucauugcggcacgguugcuaacggggugcuucaaacauuuaugcgcauggccuggggaggcucuuacauugcgcuggauuccggguguggaggcugggacugcaucaugaccagcuaccaguaucucauuauccagaacacaaccugggaggaucacugucaguucucuagacccuccccuaucggguaccugggacuucugagccaacggacccgcgacauuuauaucucuagacggcuccugggcacauuuacguggacccuguccgauagcgaaggcaaggacacacccgggggauacugccucacccgcuggaugcugauugaggccgagcuuaaauguuucggcaauacagcugucgccaagugcaacgaaaaacaugaugaggaauuuugcgacaugcugagacucuucgauuuuaauaagcaggcuauccagcggcugaaagccccugcgcagauguccauucaacuuaucaacaaggccgugaaugcucugaucaacgaccagcucauuaugaagaaucaucugcgcgacaucauguguauucccuauugcaacuacucuaaauauugguaccugaaucacaccgugacggggaagacaagccucccuaaauguuggcuggucuccaacggaagcuaccuuaaugagacccacuucucugaugacaucgaacagcaagccgauaacaugauuaccgagaugcugcagaaggaguauauggaaagacagggcaaaacaccgcucgggcugguugaccuguucguguuuuccaccagcuucuaccuuaucucuaucuuucuccaccuggugaagauucccacacaucggcacgucgugggaaaaccuugccccaagccucaucgccugaaucacaugggcaucuguagcugcggcuucuauaagcagcccgggguuccggugagauggaaacggugaggacuaguuauaagacugacuagcccgaugggccucccaacgggcccuccuccccuccuugcaccgagauuaauaaaaaaaaaaaaaaaaaaaaaaaaaaaaaaaaaaaaaaaaaaaaaaaaaaaaaaaaaaaaaaaaaaaaaaaaaaaaaaaaaaaaaaaaaaaaaaaaaaaa

SEQ ID NO: 29732 - RNA, 1665 nt, Artificial Sequence
  mRNA product Design i-3 (A100) comprising derived and/or modified sequence from LASV(Z0947-SLE-2011;Clade IV)__AIT17840__GPCmut5 (opt5)
aggagaaagcuuaccaugggccagaucgugaccuucuuucaagaggucccccacguuauugaagaggugaugaacaucgugcugauugcccucagcauccuggcuguccuuaaggggcuguacaauuucgccacaugcggacucgugggccugguuacguuucuucugcucugugggagauccugcaccauuucucuguauaaaggaguguacgaacugcagacacucgagcugaacauggaaacccuuaauaugacaaugccucugagcuguaccaagaacaauucccaucacuauaucauggucggcaacgagacagggcucgagcugacccuuacgaauaccucuaucauuaaccauaaauucugcaaucugagcgacgcgcacaagaaaaaccucuacgaucaugcucugauguccaucauuucuacauuucaccugagcaucccgaauuucaaccaguaugaagccauguccugugacuuuaauggaggcaagauuagcgugcaguacaaccucucucacuccuaugccggcgaugcugccaaucauugcgggaccguugcuaacggagugcugcaaacauucaugcggauggccuggggcgggagcuacaucgcgcuugacucuggaugugaucgcugggacugcauuaugaccuccuaccaguaucugaucauccagaacacgacaugggaggaucacugucaguuuagcagacccucuccuauuggcuaccucgggcugcuuucccaacggacccgcgacaucuauauuagcagacggcugcucggaacauucaccuggacccuguccgauucugaaggcaaggacacacccggcggguacugccugacgcgcuggaugcucaucgaggccgagcugaaauguuuuggaaauaccgcugucgccaagugcaacgaaaaacaugaugaggaguucugcgacaugcuuagacuguuugauuucaauaagcaggcuauucagcggcucaaagccccugcgcagaugagcauccaacugaucaacaaggccgugaaugcucuuauuaacgaccagcugaucaugaagaaucaccuccgcgacauuauguguauccccuauugcaacuacuccaaauauugguaccugaaucacacaaccacaggcaagaccagccugccuaaauguuggcucgugucuaacggguccuaccugaaugaaacgcauuucagcgaugacauugaacagcaagccgauaacaugaucacagagaugcuucagaaggaguauauggaaagacagggaaaaaccccgcugggccucgucgaccuguuuguuuucucuaccagcuuuuaccugaucuccauuuuccuucaccucgugaagauccccacacaucggcacauuguggggaaaccuugccccaagccucaucgccugaaucacaugggaaucuguucuugcggccuguauaagcagcccggcgucccggugaaauggaagagaugaggacuaguuauaagacugacuagcccgaugggccucccaacgggcccuccuccccuccuugcaccgagauuaauaaaaaaaaaaaaaaaaaaaaaaaaaaaaaaaaaaaaaaaaaaaaaaaaaaaaaaaaaaaaaaaaaaaaaaaaaaaaaaaaaaaaaaaaaaaaaaaaaaaa

SEQ ID NO: 29733 - protein, 491 aa, Artificial Sequence
  derived and/or modified protein sequence (artificial) from LASV(Josiah;Clade IV)__NP_694870__GPCmut6
MGQIVTFFQEVPHVIEEVMNIVLIALSVLAVLKGLYNFATCGLVGLVTFLLLCGRSCTTSLYKGVYELQTLELNMETLNMCMPLSCTKNNSHHYIMVGNETGLELTLTNTSIINHKFCNLSDAHKKNLYDHALMSIISTFHLSIPNFNQYEAMSCDFNGGKISVQYNLSHSYAGDAANHCGTVANGVLQTFMRMAWGGSYIALDSGRGNWDCIMTSYQYLIIQNTTWEDHCQFSRPSPIGYLGLLSQRTRDIYISRRLLGTFTWTLSDSEGKDTPGGYCLTRWMLIEAELKCFGNTAVAKCNEKHDEEFCDMLRLFDFCKQAIQRLKAPAQMSIQLINKAVNALINDQLIMKNHLRDIMGIPYCNYSKYWYLNHTTTGRTSLPKCWLVSNGSYLNETHFSDDIEQQADNMITEMLQKEYMERQGKTPLGLVDLFVFSTSFYLISIFLHLVKIPTHRHIVGKSCPKPHRLNHMGICSCGLYKQPGVPVKWKR

SEQ ID NO: 29734 - protein, 490 aa, Artificial Sequence
  derived and/or modified protein sequence (artificial) from LASV(LP;Clade I)__AAF86701__GPCmut6
MGQIITFFQEVPHVIEEVMNIVLIALSLLAILKGLYNIATCGIIGLVAFLFLCGKSCSLTLKGGYELQTLELNMETLNMCMPLSCTKNSSHHYIRVGNETGLELTLTNTSIINHKFCNLSDAHKKNLYDHALMSIISTFHLSIPNFNQYEAMSCDFNGGKISVQYNLSHSYAGDAAEHCGTVANGVLQTFMRMAWGGRYIALDSGKGNWDCIMTSYQYLIIQNTTWEDHCQFSRPSPIGYLGLLSQRTRDIYISRRLLGTFTWTLSDSEGNETPGGYCLTRWMLIEAELKCFGNTAVAKCNEKHDEEFCDMLRLFDFCKQAIRRLKAPAQMSIQLINKAVNALINDQLIMKNHLRDIMGIPYCNYSKYWYLNHTSSGRTSLPKCWLISNGSYLNETQFSDDIEQQADNMITEMLQKEYIERQGKTPLGLVDIFIFSTSFYLISIFLHLIKIPTHRHIVGKPCPKPHRLNHMGVCSCGLYKHPGVPTKWKR

SEQ ID NO: 29735 - protein, 490 aa, Artificial Sequence
  derived and/or modified protein sequence (artificial) from LASV(803213;Clade II)__AAF86703__GPCmut6
MGQIITFFQEVPHVIEEVMNIVLIALSLLAILKGIYNVATCGLFGLISFLLLCGRSCSVTYKGVYELQTLELNMANLNMCMPLSCTKNNSHHYIMVGNETGLELTLTNTSIINHKFCNLSDAHKKNLYDHALMSIISTFHLSIPNFNQYEAMSCDFNGGKISVQYNLSHSFAVDAANHCGTIANGVLQTFMRMAWGGSYIALDSGKGNWDCIMTSYQYLIIQNTTWEDHCQFSRPSPIGYLGLLSQRTRDIYISRRLLGTFTWTLSDSEGNEAPGGYCLTRWMLIEAELKCFGNTAVAKCNEKHDEEFCDMLRLFDFCKQAIKRLKTPAQMSIQLINKAVNALINDQLIMKNHLRDIMGIPYCNYSRYWYLNHTVTGKTSLPRCWLVSNGSYLNETHFSDDIEQQADNMITEMLQKEYMDRQGKTPLGLVDLFVFSTSFYLISIFLHLVKIPTHRHIVGKPCPKPHRLNHMGICSCGLYKHPGVPVKWKR

SEQ ID NO: 29736 - protein, 490 aa, Artificial Sequence
  derived and/or modified protein sequence (artificial) from LASV(GA391;Clade III)__CAA36645__GPCmut6
MGQIVTFFQEVPHVIEEVMNIVLIALSILAILKGLYNVATCGLIGLVTFLLLSGRSCSLIYKGTYELQTLELNMETLNMCMPLSCTKNNSHHYIRVGNETGLELTLTNTSILNHKFCNLSDAHKRNLYDHSLMSIISTFHLSIPNFNQYEAMSCDFNGGKITVQYNLSHSFAVDAAGHCGTLANGVLQTFMRMAWGGSYIALDSGRGNWDCIMTSYQYLIIQNTTWDDHCQFSRPSPIGYLGLLSQRTRDIYISRRLLGTFTWTLSDSEGNETPGGYCLTRWMLIEAELKCFGNTAVAKCNEKHDEEFCDMLRLFDFCKQAIRRLKTPAQMSIQLINKAVNALINDQLIMKNHLRDIMGIPYCNYSRYWYLNHTSTGKTSLPRCWLISNGSYLNETKFSDDIEQQADNMITEMLQKEYIDRQGKTPLGLVDLFVFSTSFYLISIFLHLVKIPTHRHIVGKPCPKPHRLNHMGICSCGLYKQPGVPVRWKR

SEQ ID NO: 29737 - protein, 491 aa, Artificial Sequence
  derived and/or modified protein sequence (artificial) from LASV(AV;Clade V)__CCA30314__GPCmut6
MGQIVTFFQEVPHVIEEVMNIVLIALSILAVLKGLYNIATCGLIGLITFLLLCGRSCSSNLYKGVYELQSLDLNMETLNMCMPLSCTKNNSHHYIRVGNDTGLELTLTNTSILNHKFCNLSDAHKKDLYDHALMSIISTFHLSIPNFNQYEAMSCDFNGGKISVQYNLSHSYAIDAANHCGTVANGILQTFMRMAWGGSYIALDSGRGNWDCIMTSYQYLIIQNTTWENHCQFSRPSPIGYLGLLSQRTRDIYISRRLLGTFTWTLSDSEGNATPGGYCLTRWMLIEAELKCFGNTAVAKCNEKHDEEFCDMLRLFDFCKQAISRLKSPAQMSIQLINKAVNALINDQLIMKNHLRDIMGIPYCNYSKYWYLNHTITGKTSLPKCWLVSNGSYLNETHFSDDIEQQADNMITEMLQKEYMERQGKTPLGLVDLFVFSTSFYLISIFLRLVKIPTHRHIVGKPCPKPHRLNHMGICSCGLYKQPGVPVRWKR

SEQ ID NO: 29738 - protein, 490 aa, Artificial Sequence
  derived and/or modified protein sequence (artificial) from LASV(Togo/2016/7082;Clade VI)__AMR44577__GPCmut6
MGQIITFFQEVPHVIEEVMNIVLIALSLLAILKGVYNVATCGIIGLVTFLFLCGRSCSLIYKGSYELQTLELNMETLNMCMPLSCTKNSSHHYIRVGNETGLELTLTNTSIINHKFCNLSDAHKRNLYDHALMSILSTFHLSIPNFNQYEAMSCDFNGGKISVQYNLSHAYAVDAAEHCGTVANGVLQTFMRMAWGGSYIALDSGRGNWDCIMTSYQYLIIQNTTWEDHCQFSRPSPIGYLGLLSQRTRDIYISRRLLGTFTWTLSDSEGNETPGGYCLTRWMLIEAELKCFGNTAVAKCNEKHDEEFCDMLRLFDFCKQAIQRLKSPAQMSIQLINKAVNALINDQLIMKNHLRDMMGIPYCNYSKYWYLNHTSSGRTSLPKCWLVSNGSYLNETHFSDDIEQQADNMITEMLQKEYIDRQGKTPLGLVDLFVFSTSFYLISIFLHLIKIPTHRHIVGKPCPKPHRLNHMGICSCGLYKQPGVPTRWKR

SEQ ID NO: 29739 - protein, 490 aa, Artificial Sequence
  derived and/or modified protein sequence (artificial) from LASV(KAK-428;Clade n.d. (VII))__ANH09740__GPCmut6
MGQIVTFFQEVPHVIEEVMNIVLIALSLLAILKGLYNFATCGVIGLITFLLLCGRSCSATYKGQYELQTLELNMESLNMCMPLSCTKNNSHHYIRAGNNTGLELTLTNTSIISHKFCNLSDAHKKNLYDHTLMSIITTFHLSIPNFNQYEAMSCDFNGGKISIQYNLSHSYAGDAAQHCGTVANGVLQTFMRMAWGGSYLALDSGRRGWDCIISSYQYLIIQNTTWDDHCQFSRPSPIGYLGFVSQKTRDIYISRRLLGTFTWTLSDSEGHDMPGGYCLTRWMLIEADLKCFGNTAVAKCNEKHDEEFCDMWRLFDFCKQAIQRLKAPAQMNIQLINKAVNALINDQLMMKNHLRDIMGIPYCNYSKFWYLNNTTTGRTSLPRCWLISNGSYLNETHFSDDIEQQADNMITEMLQKEYMDRQGKTPLGLVDLFVFSTSFYLITIFLHLVKIPTHRHIVGKPCPKPHRLNHMGICSCGLYKQPGVPVRWKR

SEQ ID NO: 29740 - protein, 490 aa, Artificial Sequence; identical to SEQ ID NO: 29734
  derived and/or modified protein sequence (artificial) from LASV(Pinneo-NIG-1969;Clade I)__AIT17836__GPCmut6

SEQ ID NO: 29741 - protein, 490 aa, Artificial Sequence
  derived and/or modified protein sequence (artificial) from LASV(ISTH0009-NIG-2011;Clade II)__AIT17404__GPCmut6
MGQIITFFQEVPHVIEEVMNIVLIALSLLAILKGIYNVATCGLFGLVSFLLLCGRSCSTTYKGVYELQTLELDMASLNMCMPLSCTKNNSHHYIMVGNETGLELTLTNTSIINHKFCNLSDAHKKNLYDHALMSIISTFHLSIPNFNQYEAMSCDFNGGKISVQYNLSHAYAVDAANHCGTIANGVLQTFMRMAWGGSYIALDSGKGSWDCIMTSYQYLIIQNTTWEDHCQFSRPSPIGYLGLLSQRTRDIYISRRLLGTFTWTLSDSEGNETPGGYCLTRWMLIEAELKCFGNTAVAKCNEKHDEEFCDMLRLFDFCKQAIRRLKTPAQMSIQLINKAVNALINDQLIMKNHLRDIMGIPYCNYSKYWYLNHTVTGKTSLPRCWLVSNGSYLNETHFSDDIEQQADNMITELLQKEYMDRQGKTPLGLVDLFVFSTSFYLISIFLHLIKIPTHRHITGKPCPKPHRLNHMGICSCGLYKHPGVPVKWKR

SEQ ID NO: 29742 - protein, 490 aa, Artificial Sequence
  derived and/or modified protein sequence (artificial) from LASV(ISTH2010-NIG-2012;Clade II)__AIT17482__GPCmut6
MGQIITFFQEVPHVIEEVMNIVLIALSLLAILKGIYNVATCGLFGLVSFLLLCGRSCSTTYKGVYELQTLELDMASLNMCMPLSCTKNNSHHYIMVGNETGLELTLTNTSIINHKFCNLSDAHKKNLYDHALMSIISTFHLSIPNFNQYEAMSCDFNGGKISVQYNLSHAYAVDAANHCGTIANGVLQTFMRMAWGGSYIALDSGKGSWDCIMTSYQYLIIQNITWEDHCQFSRPSPIGYLGLLSQRTRDIYISRRLLGTFTWTLSDSEGNETPGGYCLTRWMLIEAELKCFGNTAVAKCNEKHDEEFCDMLRLFDFCKQAIRRLKTPAQMSIQLINKAVNALINDQLIMKNHLRDIMGIPYCNYSKYWYLNHTVTGKTSLPRCWLVSNGSYLNETHFSDDIEQQADNMITELLQKEYIDRQGKTPLGLVDLFVFSTSFYLISIFLHLVKIPTHRHVVGKPCPKPHRLNHMGICSCGLYKHPGVPVKWKR

SEQ ID NO: 29743 - protein, 490 aa, Artificial Sequence
  derived and/or modified protein sequence (artificial) from LASV(Lassa virus/H.sapiens-wt/NGA/2015/ISTH_0543;Clade II)__AVO03639__GPCmut6
MGQIITFFQEVPHVIEEVMNIVLIALSLLAILKGIYNVATCGLFGLVSFLLLCGRSCSTTYKGVYELQTLELDMANLNMCMPLSCTKNNSHHYIMVGNETGLELTLTNTSIINHKFCNLSDAHKKNLYDHALMSIISTFHLSIPNFNQYEAMSCDFNGGKISVQYNLSHTYAVDAANHCGTIANGVLQTFMRMAWGGSYIALDSGKGSWDCIMTSYQYLVIQNTTWEDHCQFSRPSPIGYLGLLSQRTRDIYISRRLLGTFTWTLSDSEGNETPGGYCLTRWMLIEAELKCFGNTAVAKCNEKHDEEFCDMLRLFDFCKQAIRRLKTPAQMSIQLINKAVNALINDQLIMKNHLRDIMGIPYCNYSKYWYLNHTVTGKTSLPRCWLVSNGSYLNETHFSDDIEQQADNMITELLQKEYIDRQGKTPLGLVDLFVFSTSFYLISIFLHLVKIPTHRHITGKPCPKPHRLNHMGICSCGLYKHPGVPVKWKR

SEQ ID NO: 29744 - protein, 490 aa, Artificial Sequence
  derived and/or modified protein sequence (artificial) from LASV(Lassa virus/H.sapiens-wt/NGA/2016/ISTH_0009;Clade II)__AVO03571__GPCmut6
MGQIITFFQEVPHVIEEVMNIVLIALSLLAILKGIYNVATCGLLGLVSFLLLCGRSCSTTYKGVYELQTLELDMASLNMCMPLSCTKNNSHHYIMVGNETGLELTLTNTSIINHKFCNLSDAHKKNLYDHALMSIISTFHLSIPNFNQYEAMSCDFNGGRISVQYNLSHSYAVDAANHCGTIANGVLQTFMRMAWGGSYIALDSGKGSWDCIMTSYQYLIIQNTTWEDHCQFSRPSPIGYLGLLSQRTRDIYISRRLLGTFTWTLSDSEGNETPGGYCLTRWMLIEAELKCFGNTAVAKCNEKHDEEFCDMLRLFDFCKQAIRRLKTPAQMSIQLINKAVNALINDQLIMKNHLRDIMGIPYCNYSKYWYLNHTVTGKTSLPRCWLVSNGSYLNETHFSDDIEQQADNMITELLQKEYIDRQGKTPLGLVDLFVFSTSFYLISIFLHLVKIPTHRHITGKPCPKPHRLNHMGICSCGLYNHPGVPVKWKR

SEQ ID NO: 29745 - protein, 490 aa, Artificial Sequence
  derived and/or modified protein sequence (artificial) from LASV(Lassa virus/H.sapiens-wt/NGA/2016/ISTH_0017;Clade II)__AVO03567__GPCmut6
MGQIITFFQEVPHVIEEVMNIVLIALSLLAILKGIYNVATCGLFGLVSFLLLCGRSCSTTYKGVYELQTLELDMASLNMCMPLSCTKNNSHHYIMVGNETGLELTLTNTSIINHKFCNLSDAHKKNLYDHALMSIISTFHLSIPNFNQYEAMSCDFNGGKISVQYNLSHTYAIDAANHCGTIANGVLQTFMRMAWGGSYIALDSGKGSWDCIMTSYQYLIIQNTTWEDHCQFSRPSPIGYLGLLSQRTRDIYISRRLLGTFTWTLSDSEGNETPGGYCLTRWMLIEAELKCFGNTAVAKCNEKHDEEFCDMLRLFDFCKQAIRRLKTPAQMSIQLINKAVNALINDQLIMKNHLRDIMGIPYCNYSKYWYLNHTVTGKTSLPRCWLVSNGSYLNETHFSDDIEQQADNMITELLQKEYMDRQGKTPLGLVDLFVFSTSFYLISIFLHLVRIPTHRHVIGKPCPKPHRLNHMGICSCGLYKHPGVPVKWKR

SEQ ID NO: 29746 - protein, 490 aa, Artificial Sequence
  derived and/or modified protein sequence (artificial) from LASV(Lassa virus/H.sapiens-wt/NGA/2018/ISTH_0959;Clade II)__AVV65099__GPCmut6
MGQIITFFQEVPHVIEEVMNIVLIALSLLAILKGIYNVVTCGLFGLVSFLLLCGRSCSTTYKGVYELQTLELDMASLNMCMPLSCTKNNSHHYIMVGNETGLELTLTNTSIINHKFCNLSDAHKKNLYDHALMSIISTFHLSIPNFNQYEAMSCDFNGGKISVQYNLSHAYAIDAANHCGTIANGVLQTFMRMAWGGSYIALDSGKGSWDCIMTSYQYLIIQNTTWEDHCQFSRPSPIGYLGLLSQRTRDIYISRRLLGTFTWTLSDSEGNETPGGYCLTRWMLIEAELKCFGNTAVAKCNEKHDEEFCDMLRLFDFCKQAIRRLKTPAQMSIQLINKAVNALINDQLIMKNHLRDIMGIPYCNYSKYWYLNHTVTGKTSLPRCWLVSNGSYLNETHFSDDIEQQADNMITELLQKEYIDRQGKTPLGLVDLFVFSTSFYLISIFLHLVKIPTHRHVIGKPCPKPHRLNHMGICSCGLYKHPGVPVKWKR

SEQ ID NO: 29747 - protein, 490 aa, Artificial Sequence
  derived and/or modified protein sequence (artificial) from LASV(LASV003-NIG-2008;Clade II)__AIT17580__GPCmut6
MGQIITFFQEVPHVIEEVMNIVLIALSLLAILKGIYNVATCGLFGLVSFLLLCGRSCSTTYKGVYELQTLELDMASLNMCMPLSCTKNNSHHYIMVGNETGLELTLTNTSIINHKFCNLSDAHKKNLYDHALMSIISTFHLSIPNFNQYEAMSCDFNGGKISVQYNLSHTYAVDAANHCGTIANGVLQTFMRMAWGGSYIALDSGKGSWDCIMTSYQYLIIQNTTWEDHCQFSRPSPIGYLGLLSQRTRDIYISRRLLGTFTWTLSDSESNETPGGYCLTRWMLIEAELKCFGNTAVAKCNEKHDEEFCDMLRLFDFCKQAIRRLKAPAQMSIQLINKAVNALINDQLIMKNHLRDIMGIPYCNYSKYWYLNHTVTGRTSLPRCWLVSNGSYLNETHFSDDIEQQADNMITELLQKEYMDRQGKTPLGLVDLFVFSTSFYLISIFLHLVKIPTHRHVIGKPCPKPHRLNHMGICSCGLYKHPGVPVKWKR

SEQ ID NO: 29748 - protein, 490 aa, Artificial Sequence
  derived and/or modified protein sequence (artificial) from LASV(LASV035-NIG-2009;Clade II)__AIT17588__GPCmut6
MGQIITFFQEVPHVIEEVMNIVLIALSLLAILKGIYNVATCGLFGLVSFLLLCGRSCSTTYKGVYELQTLELDMASLNMCMPLSCTKNNSHHYIMVGNETGLELTLTNTSIINHKFCNLSDAHKKNLYDHALMSIISTFHLSIPNFNQYEAMSCDFNGGKISVQYNLSHAYAVDAANHCGTIANGVLQTFMRMAWGGSYIALDSGKGSWDCIMTSYQYLIIQNTTWEDHCQFSRPSPIGYLGLLSQRTRDIYISRRLLGTFTWTLSDSEGNETPGGYCLTRWMLIEAELKCFGNTAVAKCNEKHDEEFCDMLRLFDFCKQAIRRLKAPAQMSIQLINKAVNALINDQLIMKNHLRDIMGIPYCNYSKYWYLNHTVTGKTSLPRCWLVSNGSYLNETHFSDDIEQQADNMITELLQKEYIDRQGKTPLGLVDLFVFSTSFYLISIFLHLVKIPTHRHVIGKPCPKPHRLNHMGICSCGLYKHPGVPVKWKR

SEQ ID NO: 29749 - protein, 490 aa, Artificial Sequence
  derived and/or modified protein sequence (artificial) from LASV(LASV1000-NIG-2009;Clade II)__AIT17782__GPCmut6
MGQIITFFQEVPHVIEEVMNIVLIALSLLAILKGIYNVATCGLFGLVSFLLLCGRSCSTTYKGVYELQTLELDMASLNMCMPLSCTKNNSHHYIMVGNETGLELTLTNTSIINHKFCNLSDAHKKNLYDHALMSIISTFHLSIPNFNQYEAMSCDFNGGKISVQYNLSHTYAVDAANHCGTIANGVLQTFMRMAWGGSYIALDSGKGSWDCIMTSYQYLIIQNTTWEDHCQFSRPSPIGYLGLLSQRTRDIYISRRLLGTFTWTLSDSEGNETPGGYCLTRWMLIEAELKCFGNTAVAKCNEKHDEEFCDMLRLFDFCKQAIKRLKTPAQMSIQLINKAVNALINDQLIMKNHLRDIMGIPYCNYSKYWYLNHTVTGKTSLPRCWLVSNGSYLNETHFSDDIEQQADNMITELLQKEYIDRQGKTPLGLVDLFVFSTSFYLISIFLHLVKIPTHRHVVGKPCPKPHRLNHMGICSCGLYKHPGVPVKWKR

SEQ ID NO: 29750 - protein, 490 aa, Artificial Sequence
  derived and/or modified protein sequence (artificial) from LASV(LASV221-NIG-2010;Clade II)__AIT17624__GPCmut6
MGQIITFFQEVPHVIEEVMNIVLIALSLLAILKGIYNVATCGLFGLVSFLLLCGRSCSTTYKGVYELQTLELDMASLNMCMPLSCTKNNSHHYIMVGNETGLELTLTNTSIINHKFCNLSDAHKKNLYDHALMSIISTFHLSIPNFNQYEAMSCDFNGGKISVQYNLSHTYAIDAANHCGTIANGVLQTFMRMAWGGSYIALDSGKGSWDCIMTSYQYLIIQNTTWEDHCQFSRPSPIGYLGLLSQRTRDIYISRRLLGTFTWTLSDSEGNETPGGYCLTRWMLIEAELKCFGNTAVAKCNEKHDEEFCDMLRLFDFCKQAIRRLKTPAQMSIQLINKAVNALINDQLIMKNHLRDIMGIPYCNYSKYWYLNHTVTGKTSLPRCWLVSNGSYLNETHFSDDIEQQADNMITEMLQKEYMDRQGKTPLGLVDLFVFSTSFYLISIFLHLVKIPTHRHVIGKPCPKPHRLNHMGICSCGLYKHPGVPVKWKR

SEQ ID NO: 29751 - protein, 490 aa, Artificial Sequence
  derived and/or modified protein sequence (artificial) from LASV(LASV237-NIG-2010;Clade II)__AIT17638__GPCmut6
MGQIITFFQEVPHVIEEVMNIVLIALSLLAILKGIYNVATCGLFGLVSFLLLCGRSCSTTYKGVYELQTLELDMASLNMCMPLSCTKNNSHHYIMVGNETGLELTLTNTSIINHKFCNLSDAHKKDLYDHALMSIISTFHLSIPNFNQYEAMSCDFNGGKISVQYNLSHTYAVDAANHCGTIANGVLQTFMRMAWGGSYIALDSGKGSWDCIMTSYQYLIIQNTTWEDHCQFSRPSPIGYLGLLSQRTRDIYISRRLLGTFTWTLSDSEGNETPGGYCLTRWMLIEAELKCFGNTAVAKCNEKHDEEFCDMLRLFDFCKQAIRRLKTPAQMSIQLINKAVNALINDQLIMKNHLRDIMGIPYCNYSKYWYLNHTVTGKTSLPRCWLVSNGSYLNETHFSDDIEQQADNMITELLQKEYMDRQGKTPLGLVDLFVFSTSFYLISIFLHLIKIPTHRHITGKPCPKPHRLNHMGICSCGLYKHPGVPVKWKR

SEQ ID NO: 29752 - protein, 490 aa, Artificial Sequence
  derived and/or modified protein sequence (artificial) from LASV(LASV253-NIG-2011;Clade II)__AIT17670__GPCmut6
MGQIITFFQEVPHVIEEVMNIVLIALSLLAILKGIYNVATCGLFGLVSFLLLCGRSCSTTYKGVYELQTLELDMASLNMCMPLSCTKNNSHHYIMVGNETGLELTLTNTSIINHKFCNLSDAHKKNLYDHALMSIISTFHLSIPNFNQYEAMSCDFNGGKISVQYNLSHTYAVDAANHCGTIANGVLQTFMRMAWGGSYIALDSGKGSWDCIMTSYQYLIIQNTTWEDHCQFSRPSPIGYLGLLSQRTRDIYISRRLLGTFTWTLSDSEGNETPGGYCLTRWMLIEAELKCFGNTAVAKCNEKHDEEFCDMLRLFDFCKQAIRRLKAPAQMSIQLINKAVNALINDQLIMKNHLRDIMGIPYCNYSKYWYLNHTVTGRTSLPRCWLVSNGSYLNETHFSDDIEQQADNMITELLQKEYIDRQGKTPLGLVDLFVFSTSFYLISIFLHLVKIPTHRHIIGKPCPKPHRLNHMGICSCGLYKHPGVPVKWKR

SEQ ID NO: 29753 - protein, 490 aa, Artificial Sequence
  derived and/or modified protein sequence (artificial) from LASV(LASV254-NIG-2011;Clade II)__AIT17674__GPCmut6
MGQIITFFQEVPHVIEEVMNIVLIALSLLAILKGIYNVATCGLFGLVSFLLLCGRSCSTTYKGVYELQTLELDMTNLNMCMPLSCTKNNSHHYIMVGNETGLELTLTNTSIINHKFCNLSDAHKKNLYNHALMSIISTFHLSIPNFNQYEAMSCDFNGGKISVQYNLSHSYAVDAANHCGTIANGVLQTFMRMAWGGSYIALDSGKGNWDCIMTSYQYLIIQNTTWEDHCQFSRPSPIGYLGLLSQRTRDIYISRRLLGTFTWTLSDSEGNETPGGYCLTRWMLIEAELKCFGNTAVAKCNEKHDEEFCDMLRLFDFCKQAIRRLKTPAQANIQLINKAVNALINDQLIMKNHLRDIMGIPYCNYSKYWYLNHTVTGKTSLPRCWLVSNGSYLNETHFSDDIEQQADNMITELLQKEYMDRQGKTPLGLVDLFVFSTSFYLISIFLHLVKIPTHRHVIGKPCPKPHRLNHMGICSCGLYKHPGVPVKWKR

SEQ ID NO: 29754 - protein, 490 aa, Artificial Sequence
  derived and/or modified protein sequence (artificial) from LASV(Nig08-A19;Clade III)__ADU56618__GPCmut6
MGQIVTFFQEVPHVIEEVMNIVLIALSILAILKGLYNIATCGLIGLVTFLLLSGRSCSMTYKGVYELQTLELNMNTLNMCMPLSCTKNNSHHYIMVGNETGLELTLTNTSLLHHKFCNLSDAHKKNLYDHTLMSIISTFHLSIPNFNQYEAMSCDFNGGKITVQYNLSHSYAIDAANHCGTVANGVLQTFMRMAWGGSYIALDSGRGKWDCIMTSYQYLIIQNTTWEDHCQFSRPSPIGYLGLLSQRTRDIYISRRLLGTFTWTLSDSEGNETPGGYCLTRWMLIEAELKCFGNTAVAKCNEKHDEEFCDMLRLFDFCKQAIRRLKAPAQMSIQLINKAVNALINDQLIMKNHLRDIMGIPYCNYSKYWYLNHTSTGRTSLPRCWLVSNGSYLNETHFSDDIEQQADNMITEMLQKEYLDRQGKTPLGLVDLFVFSTSFYLISIFLHLVKIPTHRHIVGKPCPKPHRLNHMGICSCGLYKQPGVPVRWKR

SEQ ID NO: 29755 - protein, 491 aa, Artificial Sequence
  derived and/or modified protein sequence (artificial) from LASV(G1180-SLE-2010;Clade IV)__AIT17168__GPCmut6
MGQIVTFFQEVPHVIEEVMNIVLIALSILAVLKGLYNFATCGLVGLLTFLLLCGRSCTASRYKGVYELQTLELNMETLNMCMPLSCTKNNSHHYIMVGNETGLELTLTNTSIINHKFCNLSDAHKKNLYDHALMSIISTFHLSIPNFNQYEAMSCDFNGGKISVQYNLSHSYAGDAANHCGTVANGVLQTFMRMAWGGSYIALDSGHGSWDCIMTSYQYLIIQNTTWEDHCQFSRPSPIGYLGLLSQRTRDIYISRRLLGTFTWTLSDSEGKDTPGGYCLTRWMLIEAELKCFGNTAVAKCNEKHDEEFCDMLRLFDFCKQAIQRLKAPAQMSIQLINKAVNALINDQLIMKNHLRDIMGIPYCNYSKYWYLNHTTTGKTSLPKCWLVSNGSYLNETHFSDDIEQQADNMITEMLQKEYMERQGKTPLGLVDLFVFSTSFYLISIFLHLVKIPTHRHIVGKSCPKPHRLNHMGICSCGLYKQPGVPVKWKR

SEQ ID NO: 29756 - protein, 491 aa, Artificial Sequence
  derived and/or modified protein sequence (artificial) from LASV(G1442-SLE-2011;Clade IV)__AIT17180__GPCmut6
MGQIVTFFQEVPHVIEEVMNIVLIALSILAVLKGLYNVATCGLIGLVTFLLLCGRSCTTTLYKGVYELQTLELNMETLNMCMPLSCTKNNSHHYIRVGNETGLELTLTNTSIINHKFCNLSDAHKKNLYDHALMSIISTFHLSIPNFNQYEAMSCDFNGGKISVQYNLSHSYAGDAANHCGTVANGVLQTFMRMAWGGSYIALDSGRGNWDCIMTSYQYLIIQNTTWDDHCQFSRPSPIGYLGLLSQRTRDVYISRRLLGTFTWTLSDSEGKDTPGGYCLTRWMLIEAELKCFGNTAVAKCNEKHDEEFCDMLRLFDFCKQAIQRLKAPAQMSIQLINKAVNALINDQLIMKNHLRDIMGIPYCNYSKYWYLNNTATGKTSLPKCWLISNGSYLNETHFSDDIEQEADNMITEMLQKEYMERQGKTPLGLVDLFVFSTSFYLISIFLHLVKIPTHRHIVGKSCPKPHRLNHMGICSCGLYKQPGVPVRWKR

SEQ ID NO: 29757 - protein, 491 aa, Artificial Sequence
  derived and/or modified protein sequence (artificial) from LASV(G3010-SLE-2013;Clade IV)__AIT17344__GPCmut6
MGQIVTFFQEVPHVIEEVMNIVLIALSILAVLKGLYNFATCGLVGLVTFLLLCGRSCTTSLYKGVYELQTLELNMETLNMCMPLSCTKNNSHHYIMVGNETGLELTLTNTSIINHKFCNLSDAHKKNLYNHALMSIISTFHLSIPNFNQYEAMSCDFNGGKISVQYNLSHSYAGDAASHCGTVANGVLQTFMRMAWGGSYIALDSGYGKWDCIMTSYQYLIIQNTTWEDHCQFSRPSPIGYLGLLSQRTRDIYISRRLLGTFTWTLSDSEGKDTPGGYCLTRWMLIEAELKCFGNTAVAKCNEKHDEEFCDMLRLFDFCKQAIQRLKTPAQMSIQLINKAVNALINDQLIMKNHLRDIMGIPYCNYSKYWYLNHTTTGKTSLPKCWLVSNGSYLNETHFSDDIEQQADNMITEMLQKEYMERQGKTPLGLVDLFVFSTSFYLISIFLHLVKIPTHRHIVGKSCPKPHRLNHMGICSCGLYKQPGVPVRWKR

SEQ ID NO: 29758 - protein, 491 aa, Artificial Sequence
  derived and/or modified protein sequence (artificial) from LASV(G502-SLE-2009;Clade IV)__AIT17126__GPCmut6
MGQIVTFFQEVPHVIEEVMNIVLIALSILAVLKGLYNFATCGLVGLLTFLLLCGRSCTTGLYKGVYELQTLELNMETLNMCMPLSCTKNNSHHYIMVGNETGLELTLTNTSIINHKFCNLSDAHKKNLYDHALMSIISTFHLSIPNFNQYEAMSCDFNGGKISVQYNLSHSYAGDAADHCGTVANGVLQTFMRMAWGGSYIALDSGRGRWDCIMTSYQYLIIQNTTWEDHCQFSRPSPIGYLGLLSQRTRDIYISRRLLGTFTWTLSDSEGKDTPGGYCLTRWMLIEAELKCFGNTAVAKCNEKHDEEFCDMLRLFDFCKQAIQRLKAPAQMSIQLINKAVNALINDQLVMKNHLRDIMGIPYCNYSRYWYLNHTTTGRTSLPKCWLVSNGSYLNETHFSDDIEQQADNMITEMLQKEYMERQGKTPLGLVDLFVFSTSFYLISIFLHLVKIPTHRHIVGKSCPKPHRLNHMGICSCGLYKQPGVPVKWKR

SEQ ID NO: 29759 - protein, 491 aa, Artificial Sequence
  derived and/or modified protein sequence (artificial) from LASV(G733-SLE-2010;Clade IV)__AIT17154__GPCmut6
MGQIVTFFQEVPHVIEEVMNIVLIALSILAVLKGLYNFATCGIVGLVSFLLLCGRSCTTSLYKGVYELQTLELNMETLNMCMPLSCTKNNSHHYIMVGNETGLELTLTNTSIINHKFCNLSDAHKKNLYDHALMSIISTFHLSIPNFNQYEAMSCDFNGGKISVQYNLSHSYAGDAANHCGTIANGVLQTFMRMAWGGSYIALDSGRDRWDCIMTSYQYLIIQNTTWEDHCQFSRPSPIGYLGLLSQRTRDIYISRRLLGTFTWTLSDSEGKDTPGGYCLTRWMLIEAELKCFGNTAVAKCNEKHDEEFCDMLRLFDFCKQAIQRLKAPAQMSIQLINKAVNALINDQLIMKNHLRDIMGIPYCNYSKYWYLNHTTTGKTSLPKCWLVSNGSYLNETHFSDDIEQQADNMITEMLQKEYMERQGKTPLGLVDLFVFSTSFYLISIFLHLVKIPTHRHVVGKSCPKPHRLNHMGICSCGLYGQPGVPVKWKR

SEQ ID NO: 29760 - protein, 491 aa, Artificial Sequence
  derived and/or modified protein sequence (artificial) from MOPV/LASV reassortant(IGS-1;Clade IV)__AFY05576__GPCmut6
MGQIVTFFQEVPHVIEEVMNIVLIALSVLAVLKGLYNFATCGLVGLVTFLLLCGRSCTTSLYKGVYELQTLELNMETLNMCMPLSCTKNNSHHYIMVGNETGLELTLTNTSIINHKFCNLSDAHKKNLYDHALMSIISTFHLSIPNFNQYEAMSCDFNGGKISVQYNLSHSYAGDAANHCGTVANGVLQTFMRMAWGGSYIALDSGRGNWDCIMTSYQYLIIQNTTWEDHCQFSRPSPIGYLGLLSQRTRDIYISRRLLGTFTWTLSDSEGEDTPGGYCLTRWMLIEAELKCFGNTAVAKCNEKHDEEFCDMLRLFDFCKQAIQRLKAPAQMSIQLINKAVNALINDQLIMKNHLRDIMGIPYCNYSKYWYLNHTTTGRTSLPKCWLVSNGSYLNETHFSDDIEQQADNMITEMLQKEYMERQGKTPLGLVDLFVFSTSFYLISIFLHLVKIPTHRHIVGKSCPKPHRLNHMGICSCGLYKQPGVPVKWKR

SEQ ID NO: 29761 - protein, 491 aa, Artificial Sequence
  derived and/or modified protein sequence (artificial) from LASV(LM765-SLE-2012;Clade IV)__AIT17814__GPCmut6
MGQIVTFFQEVPHVIEEVMNIVLIALSILAVLKGLYNFATCGLVGLVTFLLLCGRSCTTSLYKGVYELQTLELNMETLNMCMPLSCTKNNSHHYIMVGNETGLELTLTNTSIIDHKFCNLSDAHRKNLYDHALMSIISTFHLSIPNFNQYEAMSCDFNGGKISVQYNLSHSYAKDAADHCGTVANGVLQTFMRMAWGGSYIALDSGRGRWDCIMTSYQYLIIQNTTWEDHCQFSRPSPIGYLGLLSQRTRDIYISRRLLGTFTWTLSDSEGKDTPGGYCLTRWMLIEAELKCFGNTAVAKCNEKHDEEFCDMLRLFDFCKQAIQRLKAPAQMSIQLINKAVNALINDQLIMKNHLRDIMGIPYCNYSKYWYLNHTTTGKTSLPKCWLVSNGSYLNETHFSDDIEQQADNMITEMLQKEYMERQGKTPLGLVDLFVFSTSFYLISIFLHLVKIPTHRHIVGKPCPKPHRLNHMGICSCGLYKQPGVPVKWKR

SEQ ID NO: 29762 - protein, 491 aa, Artificial Sequence
  derived and/or modified protein sequence (artificial) from LASV(LM776-SLE-2012;Clade IV)__AIT17824__GPCmut6
MGQIVTFFQEVPHVIEEVMNIVLIALSILAVLKGLYNFATCGLVGLVTFLLLCGRSCTTSVYKGVYELQTLELNMETLNMCMPLSCTKNNSHHYIMVGNETGLELTLTNTSIINHKFCNLSDAHKKNLYDHALMSIISTFHLSIPNFNQYEAMSCDFNGGKISVQYNLSHSYAGDAANHCGTVANGVLQTFMRMAWGGSYIALDSGHGKWDCIMTSYQYLIIQNTTWEDHCQFSRPSPIGYLGLLSQRTRDIYISRRLLGTFTWTLSDSEGKDTPGGYCLTRWMLIEAELKCFGNTAVAKCNEKHDEEFCDMLRLFDFCKQAIQRLKAPAQMSIQLINKAVNALINDQLIMKNHLRDIMGIPYCNYSKYWYLNHTTTGKTSLPKCWLVSNGSYLNETHFSDDIEQQADNMITEMLQKEYMERQGKTPLGLVDLFVFSTSFYLISIFLHLVKIPTHRHIVGKSCPKPHRLNHMGICSCGLYKQPGVPVRWKR

SEQ ID NO: 29763 - protein, 491 aa, Artificial Sequence
  derived and/or modified protein sequence (artificial) from LASV(Mad39;Clade IV)__ANH09722__GPCmut6
MGQIVTFFQEVPHVIEEVMNIVLIALSILAVLKGLYNVATCGLIGLVTFLLLCGRSCTTTLYKGVYELQALELNMETLNMCMPLSCTKNNSHHYIRVGNETGLELTLTNTSLINHKFCNLSDAHKKNLYDHALMSIISTFHLSIPNFNQYEAMSCDFNDGKISVQYNLSHTYAGDTANHCGTVANGVLQTFMRMAWGGSYIALDSGRGGWDCIMTSYQYLIIQNTTWEDHCQFSRPSPIGYLGLLSQRTRDIYISRRLLGTFTWTLSDSEGKDTPGGYCLTRWMLIEAELKCFGNTAVAKCNEKHDEEFCDMLRLFDFCKQAIQRLKAPAQMSIQLINKAVNALINDQLIMKNHLRDIMGIPYCNYSKYWYLNHTVTGKTSLPKCWLVSNGSYLNETHFSDDIEQQADNMITEMLQKEYMERQGKTPLGLVDLFVFSTSFYLISIFLHLVKIPTHRHVVGKPCPKPHRLNHMGICSCGFYKQPGVPVRWKR

SEQ ID NO: 29764 - protein, 491 aa, Artificial Sequence
  derived and/or modified protein sequence (artificial) from LASV(Z0947-SLE-2011;Clade IV)__AIT17840__GPCmut6
MGQIVTFFQEVPHVIEEVMNIVLIALSILAVLKGLYNFATCGLVGLVTFLLLCGRSCTISLYKGVYELQTLELNMETLNMCMPLSCTKNNSHHYIMVGNETGLELTLTNTSIINHKFCNLSDAHKKNLYDHALMSIISTFHLSIPNFNQYEAMSCDFNGGKISVQYNLSHSYAGDAANHCGTVANGVLQTFMRMAWGGSYIALDSGRDRWDCIMTSYQYLIIQNTTWEDHCQFSRPSPIGYLGLLSQRTRDIYISRRLLGTFTWTLSDSEGKDTPGGYCLTRWMLIEAELKCFGNTAVAKCNEKHDEEFCDMLRLFDFCKQAIQRLKAPAQMSIQLINKAVNALINDQLIMKNHLRDIMGIPYCNYSKYWYLNHTTTGKTSLPKCWLVSNGSYLNETHFSDDIEQQADNMITEMLQKEYMERQGKTPLGLVDLFVFSTSFYLISIFLHLVKIPTHRHIVGKPCPKPHRLNHMGICSCGLYKQPGVPVKWKR

SEQ ID NO: 29765 - RNA, 1476 nt, Artificial Sequence
  derived and/or modified CDS sequence (opt1) from LASV(Josiah;Clade IV)__NP_694870__GPCmut6
augggccagaucgugaccuucuuccaggaggucccccacgugaucgaggaggugaugaacaucguccugaucgcccucagcgugcuggccgugcugaaggggcucuacaacuucgcgaccugcggccuggucgggcuggugacguuccuccugcugugcggccgcuccugcaccaccagccucuacaaggggguguacgagcugcagacccuggagcucaacauggagacgcugaacaugugcaugccgcuguccugcaccaagaacaacagccaccacuacaucauggucggcaacgagaccggccucgagcugacgcugaccaacaccuccaucaucaaccacaaguucugcaaccucagcgacgcccacaagaagaaccuguacgaccacgcccugauguccaucaucagcaccuuccaccucuccauccccaacuucaaccaguacgaggccaugagcugcgacuucaacgggggcaagaucuccgugcaguacaaccugagccacuccuacgccggggacgcggccaaccacugcggcacgguggccaacgggguccugcagaccuucaugcggauggccuggggcggcagcuacaucgcgcucgacuccgggcgcggcaacugggacugcaucaugaccagcuaccaguaccugaucauccagaacaccacgugggaggaccacugccaguucucccggcccagccccaucggguaccugggccuccugucccagcgcacccgggacaucuacaucagccgccggcugcucggcaccuucaccuggacgcugagcgacuccgaggggaaggacaccccgggcggguacugccugacccgcuggaugcucaucgaggccgagcugaagugcuucggcaacaccgccguggccaagugcaacgagaagcacgacgaggaguucugcgacaugcugcggcuguucgacuucugcaagcaggccauccagcgccugaaggcgcccgcccagaugagcauccagcugaucaacaaggccgugaacgcccucaucaacgaccagcugaucaugaagaaccaccuccgggacaucauggggauccccuacugcaacuacuccaaguacugguaccucaaccacacgaccaccggccgcaccagccugcccaagugcuggcuggucuccaacggcagcuaccucaacgagacgcacuucuccgacgacaucgagcagcaggccgacaacaugaucaccgagaugcugcagaaggaguacauggagcggcaggggaagacgccccugggccucguggaccuguucguguucagcaccuccuucuaccugaucagcaucuuccugcaccucgucaagaucccgacccaccgccacaucguggggaaguccugccccaagccccaccggcugaaccacaugggcaucugcagcugcgggcuguacaagcagcccggcgugccggucaaguggaagcgcuga

SEQ ID NO: 29766 - RNA, 1473 nt, Artificial Sequence
  derived and/or modified CDS sequence (opt1) from LASV(LP;Clade I)__AAF86701__GPCmut6
augggccagaucaucaccuucuuccaggaggugccccacgucaucgaggaggugaugaacaucgugcugaucgcccucagccugcuggccauccucaaggggcuguacaacaucgcgaccugcggcaucaucgggcuggucgccuuccucuuccugugcggcaaguccugcagccugacgcucaagggcggguacgagcugcagacccuggagcucaacauggagacccugaacaugugcaugccgcuguccugcacgaagaacagcucccaccacuacauccgcgugggcaacgagaccgggcucgagcugacccugaccaacacgagcaucaucaaccacaaguucugcaaccucuccgacgcccacaagaagaaccuguacgaccacgcccugaugagcaucaucuccaccuuccaccucagcauccccaacuucaaccaguacgaggccauguccugcgacuucaacggcgggaagaucagcgugcaguacaaccugucccacagcuacgcgggcgacgccgccgagcacugcgggaccgucgccaacggcgugcugcagaccuucaugcggauggcguggggcgggcgcuacaucgcccucgacuccggcaaggggaacugggacugcaucaugacgagcuaccaguaccugaucauccagaacaccaccugggaggaccacugccaguucucccggcccagccccaucggcuaccugggccuccugucccagcgcacccgggacaucuacaucagccgccggcugcucgggacguucaccuggacccugagcgacuccgagggcaacgagacccccgggggcuacugccugacgcgcuggaugcucaucgaggccgagcugaagugcuucgggaacaccgccguggccaagugcaacgagaagcacgacgaggaguucugcgacaugcugcggcuguucgacuucugcaagcaggcgauccgccggcugaaggcccccgcccagaugagcauccagcugaucaacaaggccgucaacgcccucaucaacgaccagcugaucaugaagaaccaccuccgcgacaucaugggcauccccuacugcaacuacuccaaguacugguaccucaaccacaccagcuccggccggaccagccugcccaagugcuggcugaucuccaacgggagcuaccucaacgagacgcaguucuccgacgacaucgagcagcaggcggacaacaugaucaccgagaugcugcagaaggaguacaucgagcgccagggcaagaccccgcuggggcucguggacaucuucaucuucagcaccuccuucuaccugaucagcaucuuccugcaccugaucaagaucccgacgcaccggcacaucgugggcaagcccugccccaagccccaccgccucaaccacaugggggucugcuccugcggccuguacaagcacccgggcgugcccaccaaguggaagcgguga

SEQ ID NO: 29767 - RNA, 1473 nt, Artificial Sequence
  derived and/or modified CDS sequence (opt1) from LASV(803213;Clade II)__AAF86703__GPCmut6
augggccagaucaucaccuucuuccaggaggugccccacgucaucgaggaggugaugaacaucgugcugaucgcccucagccugcuggccauccucaaggggaucuacaacgucgcgaccugcggccuguucgggcugaucuccuuccuccugcugugcggccgcagcugcuccgugacguacaaggggguguacgagcuccagacccuggagcugaacauggccaaccucaacaugugcaugccgcugagcugcaccaagaacaacucccaccacuacaucauggucggcaacgagacgggccuggagcucacccugaccaacaccagcaucaucaaccacaaguucugcaaccuguccgacgcccacaagaagaaccucuacgaccacgcccugaugagcaucaucuccacguuccaccugagcauccccaacuucaaccaguacgaggccauguccugcgacuucaacgggggcaagaucagcgugcaguacaaccucucccacagcuucgcgguggacgccgccaaccacugcgggaccaucgccaacggcguccugcagaccuucaugcggauggcguggggcggguccuacaucgcccuggacagcggcaaggggaacugggacugcaucaugaccuccuaccaguaccucaucauccagaacacgaccugggaggaccacugccaguucagccgccccucccccaucggcuaccuggggcugcucagccagcggacccgcgacaucuacaucagccggcgccugcugggcaccuucacguggacccucuccgacagcgagggcaacgaggcccccgggggcuacugccugacccgguggaugcugaucgaggccgagcucaagugcuucgggaacaccgccguggcgaagugcaacgagaagcacgacgaggaguucugcgacaugcugcgccuguucgacuucugcaagcaggccaucaagcggcucaagacgcccgcccagauguccauccagcugaucaacaaggccgugaacgcccugaucaacgaccagcucaucaugaagaaccaccuccgcgacaucaugggcauccccuacugcaacuacagccgguacugguaccugaaccacaccgucaccgggaagaccucccugccccgcugcuggcuggugagcaacggcuccuaccugaacgagacgcacuucagcgacgacaucgagcagcaggcggacaacaugaucaccgagaugcuccagaaggaguacauggaccggcagggcaagaccccgcuggggcugguggaccucuucgucuucuccaccagcuucuaccugaucuccaucuuccugcaccuggugaagaucccgacgcaccgccacaucgugggcaagcccugccccaagccccaccggcucaaccacauggggaucugcagcugcggccuguacaagcacccggggguccccgugaaguggaagcgcuga

SEQ ID NO: 29768 - RNA, 1473 nt, Artificial Sequence
  derived and/or modified CDS sequence (opt1) from LASV(GA391;Clade III)__CAA36645__GPCmut6
augggccagaucgugaccuucuuccaggaggucccccacgugaucgaggaggugaugaacaucguccugaucgcccucagcauccuggccauccugaaggggcucuacaacguggcgaccugcggccugaucgggcuggugacguuccuccugcuguccggccgcagcugcucccucaucuacaaggggaccuacgagcugcagacccuggagcucaacauggagacccugaacaugugcaugccgcugagcugcaccaagaacaacucccaccacuacauccgggucggcaacgagaccggccucgagcugacccugacgaacaccagcauccucaaccacaaguucugcaaccuguccgacgcccacaagcgcaaccuguacgaccacagccucauguccaucaucagcaccuuccaccuguccauccccaacuucaaccaguacgaggccaugagcugcgacuucaacgggggcaagaucaccgugcaguacaaccugucccacagcuucgccguggacgccgcggggcacugcggcacgcucgccaacgggguccugcagaccuucaugcggauggccuggggcggcuccuacaucgcccuggacagcgggcgcggcaacugggacugcaucaugaccuccuaccaguaccucaucauccagaacaccacgugggacgaccacugccaguucagccggcccucccccaucggguaccugggccugcucagccagcgcacccgggacaucuacaucagccgccggcugcugggcaccuucaccuggacgcucuccgacagcgaggggaacgagaccccgggcggguacugccugacccgcuggaugcugaucgaggcggagcucaagugcuucggcaacaccgccguggccaagugcaacgagaagcacgacgaggaguucugcgacaugcugcggcuguucgacuucugcaagcaggccauccgccggcucaagacgcccgcccagauguccauccagcugaucaacaaggcggugaacgcccugaucaacgaccagcucaucaugaagaaccaccuccgcgacaucauggggauccccuacugcaacuacagccgguacugguaccugaaccacaccuccaccggcaagaccagccugccccgcugcuggcugaucuccaacggcagcuaccugaacgagacgaaguucuccgacgacaucgagcagcaggccgacaacaugaucaccgagaugcuccagaaggaguacaucgaccggcaggggaagacgccccugggccuggucgaccuguucguguucagcaccuccuucuaccucaucagcaucuuccugcaccuggugaagaucccgacccaccgccacaucgucgggaagcccugccccaagccccaccggcucaaccacaugggcaucugcuccugcgggcuguacaagcagccgggcgugcccgugcgcuggaagcgguga

SEQ ID NO: 29769 - RNA, 1476 nt, Artificial Sequence
  derived and/or modified CDS sequence (opt1) from LASV(AV;Clade V)__CCA30314__GPCmut6
augggccagaucgugaccuucuuccaggaggucccccacgugaucgaggaggugaugaacaucguccugaucgcccucagcauccuggccgugcugaaggggcucuacaacaucgcgaccugcggccugaucgggcugaucacguuccuccugcugugcggccgcuccugcagcuccaaccucuacaaggggguguacgagcugcagagccuggaccucaacauggagacccugaacaugugcaugccgcuguccugcaccaagaacaacagccaccacuacauccgggucggcaacgacacgggccucgagcugacccugaccaacaccuccauccucaaccacaaguucugcaaccugagcgacgcccacaagaaggaccuguacgaccacgcccucauguccaucaucagcacguuccaccuguccauccccaacuucaaccaguacgaggccaugagcugcgacuucaacgggggcaagaucuccgugcaguacaaccugagccacuccuacgccaucgacgcggccaaccacugcgggaccguggccaacggcauccuccagaccuucaugcgcauggccuggggcgggagcuacaucgcgcuggacuccggccgggggaacugggacugcaucaugaccagcuaccaguaccugaucauccagaacacgaccugggagaaccacugccaguucucccgccccagccccaucggcuaccucgggcugcugagccagcggacccgcgacaucuacaucucccggcgccuccugggcaccuucacguggacccugagcgacuccgagggcaacgccacccccgggggcuacugccucacccgguggaugcugaucgaggccgagcugaagugcuucgggaacacggccgucgccaagugcaacgagaagcacgacgaggaguucugcgacaugcuccgccuguucgacuucugcaagcaggcgaucagccggcugaagucccccgcccagaugagcauccagcucaucaacaaggccgugaacgcccugaucaacgaccagcugaucaugaagaaccaccuccgcgacaucaugggcauccccuacugcaacuacuccaaguacugguaccugaaccacaccaucaccgggaagaccagccugcccaagugcuggcucguguccaacggcagcuaccugaacgagacgcacuucuccgacgacaucgagcagcaggccgacaacaugaucaccgagaugcugcagaaggaguacauggagcggcagggcaagaccccgcucgggcuggucgaccuguucguguucagcaccuccuucuaccugaucagcaucuuccuccgccuggugaagaucccgacgcaccggcacaucgucggcaagcccugccccaagccccaccgccugaaccacauggggaucugcuccugcggccucuacaagcagccgggggugcccgugcgguggaagcgcuga

SEQ ID NO: 29770 - RNA, 1473 nt, Artificial Sequence
  derived and/or modified CDS sequence (opt1) from LASV(Togo/2016/7082;Clade VI)__AMR44577__GPCmut6
augggccagaucaucaccuucuuccaggaggugccccacgucaucgaggaggugaugaacaucgugcugaucgcccucagccugcuggccauccucaagggggucuacaacguggcgaccugcggcaucaucgggcuggugacguuccuguuccucugcggccgcuccugcagccugaucuacaagggguccuacgagcugcagacccucgagcugaacauggagacccugaacaugugcaugccgcucagcugcacgaagaacuccagccaccacuacauccgggucggcaacgagaccggccuggagcugacccucaccaacacguccaucaucaaccacaaguucugcaaccugagcgacgcccacaagcgcaaccuguacgaccacgcccucauguccauccugagcaccuuccaccuguccauccccaacuucaaccaguacgaggccaugagcugcgacuucaacgggggcaagaucuccgugcaguacaaccucagccacgccuacgcgguggacgccgccgagcacugcgggaccgucgccaacggcgugcugcagaccuucaugcggauggcguggggcggguccuacaucgcccuggacagcggccgcgggaacugggacugcaucaugacguccuaccaguaccucaucauccagaacaccaccugggaggaccacugccaguucagccggcccucccccaucggcuaccuggggcugcucagccagcgcacccgggacaucuacaucagccgccggcugcugggcacguucaccuggacccucuccgacagcgagggcaacgagacccccgggggcuacugccugacgcgcuggaugcugaucgaggccgagcucaagugcuucgggaacaccgccguggccaagugcaacgagaagcacgacgaggaguucugcgacaugcugcggcuguucgacuucugcaagcaggcgauccagcgccucaagucccccgcccagaugagcauccagcugaucaacaaggccgucaacgcccugaucaacgaccagcucaucaugaagaaccaccuccgggacaugaugggcauccccuacugcaacuacuccaaguacugguaccugaaccacaccagcuccgggcgcaccagccugcccaagugcuggcugguguccaacggcagcuaccugaacgagacgcacuucuccgacgacaucgagcagcaggccgacaacaugaucaccgagaugcuccagaaggaguacaucgaccggcagggcaagaccccgcuggggcugguggaccucuucgucuucagcaccuccuucuaccugaucagcaucuuccugcaccugaucaagaucccgacgcaccgccacaucgugggcaagcccugccccaagccccaccggcucaaccacauggggaucugcuccugcggccuguacaagcagccgggggugcccacccgcuggaagcgguga

SEQ ID NO: 29771 - RNA, 1473 nt, Artificial Sequence
  derived and/or modified CDS sequence (opt1) from LASV(KAK-428;Clade n.d. (VII))__ANH09740__GPCmut6
augggccagaucgugaccuucuuccaggaggucccccacgugaucgaggaggugaugaacaucguccugaucgcccucagccugcuggccauccucaaggggcuguacaacuucgcgaccugcggcgugaucgggcugaucacguuccuccugcugugcggccgcuccugcagcgccaccuacaaggggcaguacgagcuccagacccuggagcugaacauggagucccucaacaugugcaugccgcugagcugcacgaagaacaacucccaccacuacauccgggccggcaacaacaccggccuggagcucacccugaccaacacgagcaucaucucccacaaguucugcaaccugagcgacgcccacaagaagaaccucuacgaccacacccugauguccaucaucaccaccuuccaccugagcauccccaacuucaaccaguacgaggccauguccugcgacuucaacgggggcaagaucagcauccaguacaaccucucccacagcuacgcgggggacgccgcccagcacugcggcacgguggccaacgggguccugcagaccuucaugcgcauggcguggggcggcuccuaccuggcccucgacagcgggcggcgcggcugggacugcaucaucuccagcuaccaguaccugaucauccagaacaccaccugggacgaccacugccaguucucccggcccagccccaucggguaccugggcuucgugagccagaagacgcgcgacaucuacaucucccggcgccuccugggcaccuucaccuggacccugagcgacuccgaggggcacgacaugccgggcggguacugccucacgcgguggaugcugaucgaggccgaccugaagugcuucggcaacaccgccguggccaagugcaacgagaagcacgacgaggaguucugcgacauguggcgccucuucgacuucugcaagcaggcgauccagcggcugaaggcccccgcccagaugaacauccagcugaucaacaaggccgucaacgcccucaucaacgaccagcugaugaugaagaaccaccuccgcgacaucauggggauccccuacugcaacuacagcaaguucugguaccugaacaacaccaccacgggccggaccucccugccccgcugcuggcugaucagcaacggcuccuaccucaacgagacccacuucagcgacgacaucgagcagcaggcggacaacaugaucaccgagaugcugcagaaggaguacauggaccggcaggggaagacgccccugggccucguggaccuguucguguucuccaccagcuucuaccugaucaccaucuuccuccaccuggucaagaucccgacccaccgccacaucguggggaagcccugccccaagccccaccggcugaaccacaugggcaucugcuccugcgggcuguacaagcagccgggcgugcccguccgcuggaagcgguga

SEQ ID NO: 29772 - RNA, 1473 nt, Artificial Sequence; identical to SEQ ID NO: 29766
  derived and/or modified CDS sequence (opt1) from LASV(Pinneo-NIG-1969;Clade I)__AIT17836__GPCmut6

SEQ ID NO: 29773 - RNA, 1473 nt, Artificial Sequence
  derived and/or modified CDS sequence (opt1) from LASV(ISTH0009-NIG-2011;Clade II)__AIT17404__GPCmut6
augggccagaucaucaccuucuuccaggaggugccccacgucaucgaggaggugaugaacaucgugcugaucgcccucagccugcuggccauccucaaggggaucuacaacgucgcgaccugcggccuguucgggcugguguccuuccuccugcugugcggccgcagcugcuccacgaccuacaaggggguguacgagcuccagacccuggagcuggacauggccagccucaacaugugcaugccgcuguccugcacgaagaacaacagccaccacuacaucauggucggcaacgagaccggccuggagcucacccugaccaacacguccaucaucaaccacaaguucugcaaccugagcgacgcccacaagaagaaccucuacgaccacgcccugauguccaucaucagcaccuuccaccuguccauccccaacuucaaccaguacgaggccaugagcugcgacuucaacgggggcaagaucuccgugcaguacaaccucagccacgcguacgccguggacgccgccaaccacugcgggaccaucgcgaacggcguccugcagaccuucaugcggauggccuggggcggguccuacaucgcccuggacagcggcaagggguccugggacugcaucaugacgagcuaccaguaccucaucauccagaacaccaccugggaggaccacugccaguucucccgccccagccccaucggcuaccuggggcugcucagccagcggacccgcgacaucuacaucucccggcgccugcugggcacguucaccuggacccucagcgacuccgagggcaacgagacccccgggggcuacugccugacgcgguggaugcugaucgaggccgagcucaagugcuucgggaacaccgccguggcgaagugcaacgagaagcacgacgaggaguucugcgacaugcugcgccuguucgacuucugcaagcaggccauccggcgccucaagacccccgcccagaugagcauccagcugaucaacaaggccgugaacgcccugaucaacgaccagcucaucaugaagaaccaccuccgggacaucaugggcaucccguacugcaacuacuccaaguacugguaccugaaccacaccgucacggggaagaccagccugccccgcugcuggcugguguccaacggcagcuaccugaacgagacccacuucuccgacgacaucgagcagcaggcggacaacaugaucaccgagcuccugcagaaggaguacauggaccggcagggcaagacgccccuggggcucguggaccuguucgucuucagcaccuccuucuaccugaucagcaucuuccugcaccucaucaagaucccgacccaccgccacaucaccggcaagcccugccccaagccccaccggcugaaccacauggggaucugcuccugcggccuguacaagcacccgggggugcccgugaaguggaagcgcuga

SEQ ID NO: 29774 - RNA, 1473 nt, Artificial Sequence
  derived and/or modified CDS sequence (opt1) from LASV(ISTH2010-NIG-2012;Clade II)__AIT17482__GPCmut6
augggccagaucaucaccuucuuccaggaggugccccacgucaucgaggaggugaugaacaucgugcugaucgcccucagccugcuggccauccucaaggggaucuacaacgucgcgaccugcggccuguucgggcugguguccuuccuccugcugugcggccgcagcugcuccacgaccuacaaggggguguacgagcuccagacccuggagcuggacauggccagccucaacaugugcaugccgcuguccugcacgaagaacaacagccaccacuacaucauggucggcaacgagaccggccuggagcucacccugaccaacacguccaucaucaaccacaaguucugcaaccugagcgacgcccacaagaagaaccucuacgaccacgcccugauguccaucaucagcaccuuccaccuguccauccccaacuucaaccaguacgaggccaugagcugcgacuucaacgggggcaagaucuccgugcaguacaaccucagccacgcguacgccguggacgccgccaaccacugcgggaccaucgcgaacggcguccugcagaccuucaugcggauggccuggggcggguccuacaucgcccuggacagcggcaagggguccugggacugcaucaugacgagcuaccaguaccucaucauccagaacaucaccugggaggaccacugccaguucucccgccccagccccaucggcuaccuggggcugcucagccagcggacccgcgacaucuacaucucccggcgccugcugggcaccuucacguggacccucagcgacuccgagggcaacgagacccccgggggcuacugccugacccgguggaugcugaucgaggccgagcucaagugcuucgggaacacggccguggcgaagugcaacgagaagcacgacgaggaguucugcgacaugcugcgccuguucgacuucugcaagcaggccauccggcgccucaagacccccgcccagaugagcauccagcugaucaacaaggccgugaacgcccugaucaacgaccagcucaucaugaagaaccaccuccgggacaucaugggcauccccuacugcaacuacuccaaguacugguaccugaaccacaccgucaccgggaagacgagccugccccgcugcuggcugguguccaacggcagcuaccugaacgagacccacuucuccgacgacaucgagcagcaggcggacaacaugaucaccgagcuccugcagaaggaguacaucgaccggcagggcaagaccccgcuggggcucguggaccuguucgucuucagcacguccuucuaccugaucagcaucuuccugcaccucgugaagaucccgacccaccgccacguggucggcaagcccugccccaagccccaccggcugaaccacauggggaucugcuccugcggccuguacaagcacccgggggugcccgugaaguggaagcgcuga

SEQ ID NO: 29775 - RNA, 1473 nt, Artificial Sequence
  derived and/or modified CDS sequence (opt1) from LASV(Lassa virus/H.sapiens-wt/NGA/2015/ISTH_0543;Clade II)__AVO03639__GPCmut6
augggccagaucaucaccuucuuccaggaggugccccacgucaucgaggaggugaugaacaucgugcugaucgcccucagccugcuggccauccucaaggggaucuacaacgucgcgaccugcggccuguucgggcugguguccuuccuccugcugugcggccgcagcugcuccacgaccuacaaggggguguacgagcuccagacccuggagcuggacauggccaaccucaacaugugcaugccgcugagcugcacgaagaacaacucccaccacuacaucauggucggcaacgagaccggccuggagcucacccugaccaacacgagcaucaucaaccacaaguucugcaaccuguccgacgcccacaagaagaaccucuacgaccacgcccugaugagcaucaucuccaccuuccaccugagcauccccaacuucaaccaguacgaggccauguccugcgacuucaacgggggcaagaucagcgugcaguacaaccucucccacaccuacgcgguggacgccgccaaccacugcgggaccaucgccaacggcguccugcagacguucaugcggauggcguggggcgggagcuacaucgcccuggacuccggcaaggggagcugggacugcaucaugaccuccuaccaguaccucgugauccagaacaccaccugggaggaccacugccaguucagccgccccucccccaucggcuaccuggggcugcucagccagcggacgcgcgacaucuacaucagccggcgccugcugggcaccuucaccuggacccucuccgacagcgagggcaacgagacgcccgggggcuacugccugacccgguggaugcugaucgaggccgagcucaagugcuucgggaacaccgccguggccaagugcaacgagaagcacgacgaggaguucugcgacaugcugcgccuguucgacuucugcaagcaggcgauccggcgccucaagacccccgcccagauguccauccagcugaucaacaaggccgucaacgcccugaucaacgaccagcucaucaugaagaaccaccuccgggacaucaugggcauccccuacugcaacuacagcaaguacugguaccugaaccacacggugaccgggaagaccucccugccccgcugcuggcuggugagcaacggcuccuaccugaacgagacccacuucagcgacgacaucgagcagcaggccgacaacaugaucacggagcuccugcagaaggaguacaucgaccggcagggcaagaccccgcuggggcucgucgaccuguucguguucuccaccagcuucuaccugaucuccaucuuccugcaccucgugaagaucccgacccaccgccacaucacgggcaagcccugccccaagccccaccggcugaaccacauggggaucugcagcugcggccuguacaagcacccggggguccccgugaaguggaagcgcuga

SEQ ID NO: 29776 - RNA, 1473 nt, Artificial Sequence
  derived and/or modified CDS sequence (opt1) from LASV(Lassa virus/H.sapiens-wt/NGA/2016/ISTH_0009;Clade II)__AVO03571__GPCmut6
augggccagaucaucaccuucuuccaggaggugccccacgucaucgaggaggugaugaacaucgugcugaucgcccucagccugcuggccauccucaaggggaucuacaacgucgcgaccugcggccugcuggggcucguguccuuccugcugcucugcggccgcagcugcuccacgaccuacaaggggguguacgagcugcagacccuggagcucgacauggccagccugaacaugugcaugccgcuguccugcacgaagaacaacagccaccacuacaucauggucggcaacgagaccggccucgagcugacccugaccaacacguccaucaucaaccacaaguucugcaaccucagcgacgcccacaagaagaaccuguacgaccacgcccugauguccaucaucagcaccuuccaccucuccauccccaacuucaaccaguacgaggccaugagcugcgacuucaacgggggccggaucuccgugcaguacaaccugagccacuccuacgcgguggacgccgccaaccacugcgggaccaucgccaacggcguccugcagaccuucaugcgcauggcguggggcgggagcuacaucgcccucgacuccggcaaggggagcugggacugcaucaugacguccuaccaguaccugaucauccagaacaccaccugggaggaccacugccaguucagccggcccagccccaucggcuaccuggggcuccugucccagcgcacccgggacaucuacaucagccgccggcugcucggcacguucaccuggacccuguccgacagcgagggcaacgagacccccgggggcuacugccugacgcgcuggaugcucaucgaggccgagcugaagugcuucgggaacaccgccguggccaagugcaacgagaagcacgacgaggaguucugcgacaugcugcggcuguucgacuucugcaagcaggcgauccgccggcugaagacccccgcccagauguccauccagcugaucaacaaggccgugaacgcccucaucaacgaccagcugaucaugaagaaccaccuccgcgacaucaugggcaucccguacugcaacuacagcaaguacugguaccucaaccacaccgucacggggaagaccucccugccccggugcuggcuggugagcaacggcuccuaccucaacgagacccacuucagcgacgacaucgagcagcaggccgacaacaugaucaccgagcugcugcagaaggaguacaucgaccgccagggcaagacgccccucgggcugguggaccuguucgucuucuccaccagcuucuaccugaucuccaucuuccuccaccuggugaagaucccgacccaccggcacaucaccggcaagcccugccccaagccccaccgccugaaccacauggggaucugcagcugcggccucuacaaccacccgggggugcccgucaaguggaagcgguga

SEQ ID NO: 29777 - RNA, 1473 nt, Artificial Sequence
  derived and/or modified CDS sequence (opt1) from LASV(Lassa virus/H.sapiens-wt/NGA/2016/ISTH_0017;Clade II)__AVO03567__GPCmut6
augggccagaucaucaccuucuuccaggaggugccccacgucaucgaggaggugaugaacaucgugcugaucgcccucagccugcuggccauccucaaggggaucuacaacgucgcgaccugcggccuguucgggcugguguccuuccuccugcugugcggccgcagcugcuccacgaccuacaaggggguguacgagcuccagacccuggagcuggacauggccagccucaacaugugcaugccgcuguccugcacgaagaacaacagccaccacuacaucauggucggcaacgagaccggccuggagcucacccugaccaacacguccaucaucaaccacaaguucugcaaccugagcgacgcccacaagaagaaccucuacgaccacgcccugauguccaucaucagcaccuuccaccuguccauccccaacuucaaccaguacgaggccaugagcugcgacuucaacgggggcaagaucuccgugcaguacaaccucagccacaccuacgcgaucgacgccgccaaccacugcgggaccaucgccaacggcgugcugcagacguucaugcggauggcguggggcggguccuacaucgcccuggacagcggcaagggguccugggacugcaucaugaccagcuaccaguaccucaucauccagaacaccaccugggaggaccacugccaguucucccgccccagccccaucggcuaccuggggcugcucagccagcggacgcgcgacaucuacaucucccggcgccugcugggcaccuucaccuggacccucagcgacuccgagggcaacgagacgcccgggggcuacugccugacccgguggaugcugaucgaggccgagcucaagugcuucgggaacaccgccgucgccaagugcaacgagaagcacgacgaggaguucugcgacaugcugcgccuguucgacuucugcaagcaggcgauccggcgccucaagacccccgcccagaugagcauccagcugaucaacaaggccgugaacgcccugaucaacgaccagcucaucaugaagaaccaccuccgggacaucaugggcauccccuacugcaacuacuccaaguacugguaccugaaccacacggugaccgggaagaccagccugccccgcugcuggcuggucuccaacggcagcuaccugaacgagacccacuucuccgacgacaucgagcagcaggccgacaacaugaucacggagcuccugcagaaggaguacauggaccggcagggcaagaccccgcuggggcucguggaccuguucguguucagcaccuccuucuaccugaucagcaucuuccugcaccucguccgcaucccgacccaccggcacgugaucggcaagcccugccccaagccccaccgccugaaccacauggggaucugcuccugcggccuguacaagcacccgggggugcccgucaaguggaagcgguga

SEQ ID NO: 29778 - RNA, 1473 nt, Artificial Sequence
  derived and/or modified CDS sequence (opt1) from LASV(Lassa virus/H.sapiens-wt/NGA/2018/ISTH_0959;Clade II)__AVV65099__GPCmut6
augggccagaucaucaccuucuuccaggaggugccccacgucaucgaggaggugaugaacaucgugcugaucgcccucagccugcuggccauccucaaggggaucuacaacgucgugaccugcggccuguucgggcugguguccuuccuccugcugugcggccgcagcugcuccacgaccuacaagggggucuacgagcuccagacccuggagcuggacauggcgagccucaacaugugcaugccgcuguccugcacgaagaacaacagccaccacuacaucauggugggcaacgagaccggccuggagcucacccugaccaacacguccaucaucaaccacaaguucugcaaccugagcgacgcccacaagaagaaccucuacgaccacgcccugauguccaucaucagcaccuuccaccuguccauccccaacuucaaccaguacgaggccaugagcugcgacuucaacgggggcaagaucuccgugcaguacaaccucagccacgccuacgcgaucgacgccgccaaccacugcgggaccaucgccaacggcguccugcagaccuucaugcggauggcguggggcggguccuacaucgcccuggacagcggcaagggguccugggacugcaucaugacgagcuaccaguaccucaucauccagaacaccaccugggaggaccacugccaguucucccgccccagccccaucggcuaccuggggcugcucagccagcggacccgcgacaucuacaucucccggcgccugcugggcacguucaccuggacccucagcgacuccgagggcaacgagacccccgggggcuacugccugacgcgguggaugcugaucgaggccgagcucaagugcuucgggaacaccgccguggccaagugcaacgagaagcacgacgaggaguucugcgacaugcugcgccuguucgacuucugcaagcaggcgauccggcgccucaagacccccgcccagaugagcauccagcugaucaacaaggccgugaacgcccugaucaacgaccagcucaucaugaagaaccaccuccgggacaucaugggcaucccguacugcaacuacuccaaguacugguaccugaaccacaccgucacggggaagaccagccugccccgcugcuggcugguguccaacggcagcuaccugaacgagacccacuucuccgacgacaucgagcagcaggccgacaacaugaucaccgagcuccugcagaaggaguacaucgaccggcagggcaagacgccccuggggcucguggaccuguucgucuucagcaccuccuucuaccugaucagcaucuuccugcaccucgugaagaucccgacccaccgccacgugaucggcaagcccugccccaagccccaccggcugaaccacauggggaucugcuccugcggccuguacaagcacccggggguccccgugaaguggaagcgcuga

SEQ ID NO: 29779 - RNA, 1473 nt, Artificial Sequence
  derived and/or modified CDS sequence (opt1) from LASV(LASV003-NIG-2008;Clade II)__AIT17580__GPCmut6
augggccagaucaucaccuucuuccaggaggugccccacgucaucgaggaggugaugaacaucgugcugaucgcccucagccugcuggccauccucaaggggaucuacaacgucgcgaccugcggccuguucgggcugguguccuuccuccugcugugcggccgcagcugcuccacgaccuacaaggggguguacgagcuccagacccuggagcuggacauggccagccucaacaugugcaugccgcuguccugcacgaagaacaacagccaccacuacaucauggucggcaacgagaccggccuggagcucacccugaccaacacguccaucaucaaccacaaguucugcaaccugagcgacgcccacaagaagaaccucuacgaccacgcccugauguccaucaucagcaccuuccaccuguccauccccaacuucaaccaguacgaggccaugagcugcgacuucaacgggggcaagaucuccgugcaguacaaccucagccacaccuacgcgguggacgccgccaaccacugcgggaccaucgccaacggcguccugcagacguucaugcggauggcguggggcggguccuacaucgcccuggacagcggcaagggguccugggacugcaucaugaccagcuaccaguaccucaucauccagaacaccaccugggaggaccacugccaguucucccgccccagccccaucggcuaccuggggcugcucagccagcggacgcgcgacaucuacaucucccggcgccugcugggcaccuucaccuggacccucagcgacuccgagagcaacgagacgccgggcggguacugccugacccgguggaugcugaucgaggccgagcucaagugcuucggcaacaccgccguggccaagugcaacgagaagcacgacgaggaguucugcgacaugcugcgccuguucgacuucugcaagcaggcgauccggcgccucaaggcccccgcccagauguccauccagcugaucaacaaggccgugaacgcccugaucaacgaccagcucaucaugaagaaccaccuccgggacaucauggggauccccuacugcaacuacagcaaguacugguaccugaaccacaccgucacgggccgcaccucccugccccggugcuggcuggugagcaacggguccuaccugaacgagacccacuucagcgacgacaucgagcagcaggcggacaacaugaucaccgagcuccugcagaaggaguacauggaccgccagggcaagacgccccugggccucguggaccuguucgucuucuccaccagcuucuaccugaucuccaucuuccugcaccucgugaagaucccgacccaccggcacgugaucgggaagcccugccccaagccccaccgccugaaccacaugggcaucugcagcugcgggcuguacaagcacccgggcguccccgugaaguggaagcgguga

SEQ ID NO: 29780 - RNA, 1473 nt, Artificial Sequence
  derived and/or modified CDS sequence (opt1) from LASV(LASV035-NIG-2009;Clade II)__AIT17588__GPCmut6
augggccagaucaucaccuucuuccaggaggugccccacgucaucgaggaggugaugaacaucgugcugaucgcccucagccugcuggccauccucaaggggaucuacaacgucgcgaccugcggccuguucgggcugguguccuuccuccugcugugcggccgcagcugcuccacgaccuacaaggggguguacgagcuccagacccuggagcuggacauggccagccucaacaugugcaugccgcuguccugcacgaagaacaacagccaccacuacaucauggucggcaacgagaccggccuggagcucacccugaccaacacguccaucaucaaccacaaguucugcaaccugagcgacgcccacaagaagaaccucuacgaccacgcccugauguccaucaucagcaccuuccaccuguccauccccaacuucaaccaguacgaggccaugagcugcgacuucaacgggggcaagaucuccgugcaguacaaccucagccacgcguacgccguggacgccgccaaccacugcgggaccaucgcgaacggcguccugcagaccuucaugcggauggccuggggcggguccuacaucgcccuggacagcggcaagggguccugggacugcaucaugacgagcuaccaguaccucaucauccagaacaccaccugggaggaccacugccaguucucccgccccagccccaucggcuaccuggggcugcucagccagcggacccgcgacaucuacaucucccggcgccugcugggcacguucaccuggacccucagcgacuccgagggcaacgagacccccgggggcuacugccugacgcgguggaugcugaucgaggccgagcucaagugcuucgggaacaccgccguggcgaagugcaacgagaagcacgacgaggaguucugcgacaugcugcgccuguucgacuucugcaagcaggccauccggcgccucaaggcccccgcccagaugagcauccagcugaucaacaaggccgugaacgcgcugaucaacgaccagcucaucaugaagaaccaccuccgggacaucaugggcauccccuacugcaacuacuccaaguacugguaccugaaccacaccgucaccgggaagacgagccugccccgcugcuggcugguguccaacggcagcuaccugaacgagacccacuucuccgacgacaucgagcagcaggccgacaacaugaucaccgagcuccugcagaaggaguacaucgaccggcagggcaagaccccgcuggggcucguggaccuguucgucuucagcacguccuucuaccugaucagcaucuuccugcaccucgugaagaucccgacccaccgccacgugaucggcaagcccugccccaagccccaccggcugaaccacauggggaucugcuccugcggccuguacaagcacccggggguccccgugaaguggaagcgcuga

SEQ ID NO: 29781 - RNA, 1473 nt, Artificial Sequence
  derived and/or modified CDS sequence (opt1) from LASV(LASV1000-NIG-2009;Clade II)__AIT17782__GPCmut6
augggccagaucaucaccuucuuccaggaggugccccacgucaucgaggaggugaugaacaucgugcugaucgcccucagccugcuggccauccucaaggggaucuacaacgucgcgaccugcggccuguucgggcugguguccuuccuccugcugugcggccgcagcugcuccacgaccuacaaggggguguacgagcuccagacccuggagcuggacauggccagccucaacaugugcaugccgcuguccugcacgaagaacaacagccaccacuacaucauggucggcaacgagaccggccuggagcucacccugaccaacacguccaucaucaaccacaaguucugcaaccugagcgacgcccacaagaagaaccucuacgaccacgcccugauguccaucaucagcaccuuccaccuguccauccccaacuucaaccaguacgaggccaugagcugcgacuucaacgggggcaagaucuccgugcaguacaaccucagccacaccuacgcgguggacgccgccaaccacugcgggaccaucgccaacggcguccugcagacguucaugcggauggcguggggcggguccuacaucgcccuggacagcggcaagggguccugggacugcaucaugaccagcuaccaguaccucaucauccagaacaccaccugggaggaccacugccaguucucccgccccagccccaucggcuaccuggggcugcucagccagcggacgcgcgacaucuacaucucccggcgccugcugggcaccuucaccuggacccucagcgacuccgagggcaacgagacgcccgggggcuacugccugacccgguggaugcugaucgaggccgagcucaagugcuucgggaacaccgccguggccaagugcaacgagaagcacgacgaggaguucugcgacaugcugcgccuguucgacuucugcaagcaggcgaucaagcggcucaagacccccgcccagaugagcauccagcugaucaacaaggccgugaacgcccugaucaacgaccagcucaucaugaagaaccaccuccgcgacaucaugggcauccccuacugcaacuacuccaaguacugguaccugaaccacacggucaccgggaagaccagccugccccggugcuggcugguguccaacggcagcuaccugaacgagacccacuucuccgacgacaucgagcagcaggccgacaacaugaucacggagcuccugcagaaggaguacaucgaccgccagggcaagaccccgcuggggcucguggaccuguucgucuucagcaccuccuucuaccugaucagcaucuuccugcaccucgugaagaucccgacccaccggcacguggucggcaagcccugccccaagccccaccgccugaaccacauggggaucugcuccugcggccuguacaagcacccgggggugcccgugaaguggaagcgguga

SEQ ID NO: 29782 - RNA, 1473 nt, Artificial Sequence
  derived and/or modified CDS sequence (opt1) from LASV(LASV221-NIG-2010;Clade II)__AIT17624__GPCmut6
augggccagaucaucaccuucuuccaggaggugccccacgucaucgaggaggugaugaacaucgugcugaucgcccucagccugcuggccauccucaaggggaucuacaacgucgcgaccugcggccuguucgggcugguguccuuccuccugcugugcggccgcagcugcuccacgaccuacaaggggguguacgagcuccagacccuggagcuggacauggccagccucaacaugugcaugccgcuguccugcacgaagaacaacagccaccacuacaucauggucggcaacgagaccggccuggagcucacccugaccaacacguccaucaucaaccacaaguucugcaaccugagcgacgcccacaagaagaaccucuacgaccacgcccugauguccaucaucagcaccuuccaccuguccauccccaacuucaaccaguacgaggccaugagcugcgacuucaacgggggcaagaucuccgugcaguacaaccucagccacaccuacgcgaucgacgccgccaaccacugcgggaccaucgccaacggcgugcugcagacguucaugcggauggcguggggcggguccuacaucgcccuggacagcggcaagggguccugggacugcaucaugaccagcuaccaguaccucaucauccagaacaccaccugggaggaccacugccaguucucccgccccagccccaucggcuaccuggggcugcucagccagcggacgcgcgacaucuacaucucccggcgccugcugggcaccuucaccuggacccucagcgacuccgagggcaacgagacgcccgggggcuacugccugacccgguggaugcugaucgaggccgagcucaagugcuucgggaacaccgccgucgccaagugcaacgagaagcacgacgaggaguucugcgacaugcugcgccuguucgacuucugcaagcaggcgauccggcgccucaagacccccgcccagaugagcauccagcugaucaacaaggccgugaacgcccugaucaacgaccagcucaucaugaagaaccaccuccgggacaucaugggcauccccuacugcaacuacuccaaguacugguaccugaaccacacggugaccgggaagaccagccugccccgcugcuggcuggucuccaacggcagcuaccugaacgagacccacuucuccgacgacaucgagcagcaggccgacaacaugaucacggagaugcuccagaaggaguacauggaccggcagggcaagaccccgcuggggcugguggaccucuucguguucagcaccuccuucuaccugaucagcaucuuccugcaccuggucaagaucccgacccaccgccacgugaucggcaagcccugccccaagccccaccggcucaaccacauggggaucugcuccugcggccuguacaagcacccgggggugcccgucaaguggaagcgcuga

SEQ ID NO: 29783 - RNA, 1473 nt, Artificial Sequence
  derived and/or modified CDS sequence (opt1) from LASV(LASV237-NIG-2010;Clade II)__AIT17638__GPCmut6
augggccagaucaucaccuucuuccaggaggugccccacgucaucgaggaggugaugaacaucgugcugaucgcccucagccugcuggccauccucaaggggaucuacaacgucgcgaccugcggccuguucgggcugguguccuuccuccugcugugcggccgcagcugcuccacgaccuacaaggggguguacgagcuccagacccuggagcuggacauggccagccucaacaugugcaugccgcuguccugcacgaagaacaacagccaccacuacaucauggucggcaacgagaccggccuggagcucacccugaccaacacguccaucaucaaccacaaguucugcaaccugagcgacgcccacaagaaggaccucuacgaccacgcccugauguccaucaucagcaccuuccaccuguccauccccaacuucaaccaguacgaggccaugagcugcgacuucaacgggggcaagaucuccgugcaguacaaccucagccacaccuacgcgguggacgccgccaaccacugcgggaccaucgccaacggcguccugcagacguucaugcggauggcguggggcggguccuacaucgcccuggacagcggcaagggguccugggacugcaucaugaccagcuaccaguaccucaucauccagaacaccaccugggaggaccacugccaguucucccgccccagccccaucggcuaccuggggcugcucagccagcggacgcgcgacaucuacaucucccggcgccugcugggcaccuucaccuggacccucagcgacuccgagggcaacgagacgcccgggggcuacugccugacccgguggaugcugaucgaggccgagcucaagugcuucgggaacaccgccguggccaagugcaacgagaagcacgacgaggaguucugcgacaugcugcgccuguucgacuucugcaagcaggcgauccggcgccucaagacccccgcccagaugagcauccagcugaucaacaaggccgugaacgcccugaucaacgaccagcucaucaugaagaaccaccuccgggacaucaugggcauccccuacugcaacuacuccaaguacugguaccugaaccacacggucaccgggaagaccagccugccccgcugcuggcugguguccaacggcagcuaccugaacgagacccacuucuccgacgacaucgagcagcaggccgacaacaugaucacggagcuccugcagaaggaguacauggaccggcagggcaagaccccgcuggggcucguggaccuguucgucuucagcaccuccuucuaccugaucagcaucuuccugcaccucaucaagaucccgacccaccgccacaucacgggcaagcccugccccaagccccaccggcugaaccacauggggaucugcuccugcggccuguacaagcacccgggggugcccgugaaguggaagcgcuga

SEQ ID NO: 29784 - RNA, 1473 nt, Artificial Sequence
  derived and/or modified CDS sequence (opt1) from LASV(LASV253-NIG-2011;Clade II)__AIT17670__GPCmut6
augggccagaucaucaccuucuuccaggaggugccccacgucaucgaggaggugaugaacaucgugcugaucgcccucagccugcuggccauccucaaggggaucuacaacgucgcgaccugcggccuguucgggcugguguccuuccuccugcugugcggccgcagcugcuccacgaccuacaaggggguguacgagcuccagacccuggagcuggacauggccagccucaacaugugcaugccgcuguccugcacgaagaacaacagccaccacuacaucauggucggcaacgagaccggccuggagcucacccugaccaacacguccaucaucaaccacaaguucugcaaccugagcgacgcccacaagaagaaccucuacgaccacgcccugauguccaucaucagcaccuuccaccuguccauccccaacuucaaccaguacgaggccaugagcugcgacuucaacgggggcaagaucuccgugcaguacaaccucagccacaccuacgcgguggacgccgccaaccacugcgggaccaucgccaacggcguccugcagacguucaugcggauggcguggggcggguccuacaucgcccuggacagcggcaagggguccugggacugcaucaugaccagcuaccaguaccucaucauccagaacaccaccugggaggaccacugccaguucucccgccccagccccaucggcuaccuggggcugcucagccagcggacgcgcgacaucuacaucucccggcgccugcugggcaccuucaccuggacccucagcgacuccgagggcaacgagacgcccgggggcuacugccugacccgguggaugcugaucgaggccgagcucaagugcuucgggaacaccgccguggccaagugcaacgagaagcacgacgaggaguucugcgacaugcugcgccuguucgacuucugcaagcaggcgauccggcgccucaaggcccccgcccagaugagcauccagcugaucaacaaggccgugaacgcccugaucaacgaccagcucaucaugaagaaccaccuccgggacaucaugggcaucccguacugcaacuacuccaaguacugguaccugaaccacaccgucacggggcgcaccagccugccccggugcuggcugguguccaacggcagcuaccugaacgagacccacuucuccgacgacaucgagcagcaggcggacaacaugaucaccgagcuccugcagaaggaguacaucgaccgccagggcaagacgccccuggggcucguggaccuguucgucuucagcaccuccuucuaccugaucagcaucuuccugcaccucgugaagaucccgacccaccggcacaucaucggcaagcccugccccaagccccaccgccugaaccacauggggaucugcuccugcggccuguacaagcacccgggggugcccgucaaguggaagcgguga

SEQ ID NO: 29785 - RNA, 1473 nt, Artificial Sequence
  derived and/or modified CDS sequence (opt1) from LASV(LASV254-NIG-2011;Clade II)__AIT17674__GPCmut6
augggccagaucaucaccuucuuccaggaggugccccacgucaucgaggaggugaugaacaucgugcugaucgcccucagccugcuggccauccucaaggggaucuacaacgucgcgaccugcggccuguucgggcugguguccuuccuccugcugugcggccgcagcugcuccacgaccuacaaggggguguacgagcuccagacccuggagcuggacaugaccaaccucaacaugugcaugccgcugagcugcaccaagaacaacucccaccacuacaucauggucggcaacgagaccggccuggagcucacccugacgaacaccagcaucaucaaccacaaguucugcaaccuguccgacgcccacaagaagaaccucuacaaccacgcccugaugagcaucaucuccaccuuccaccugagcauccccaacuucaaccaguacgaggccauguccugcgacuucaacgggggcaagaucagcgugcaguacaaccucucccacagcuacgccguggacgcggccaaccacugcgggaccaucgccaacggcguccugcagacguucaugcggauggccuggggcggguccuacaucgcgcuggacagcggcaaggggaacugggacugcaucaugaccuccuaccaguaccucaucauccagaacaccaccugggaggaccacugccaguucagccgccccucccccaucggcuaccuggggcugcucagccagcggacgcgcgacaucuacaucagccggcgccugcugggcaccuucaccuggacccucuccgacagcgagggcaacgagacgcccgggggcuacugccugacccgguggaugcugaucgaggccgagcucaagugcuucgggaacaccgccguggccaagugcaacgagaagcacgacgaggaguucugcgacaugcugcgccuguucgacuucugcaagcaggccauccggcgccucaagacccccgcgcaggccaacauccagcugaucaacaaggccgugaacgcccugaucaacgaccagcucaucaugaagaaccaccuccgggacaucaugggcauccccuacugcaacuacuccaaguacugguaccugaaccacacggucaccgggaagaccagccugccccgcugcuggcugguguccaacggcagcuaccugaacgagacccacuucuccgacgacaucgagcagcaggccgacaacaugaucacggagcuccugcagaaggaguacauggaccggcagggcaagaccccgcuggggcucguggaccuguucgucuucagcaccuccuucuaccugaucagcaucuuccugcaccucgugaagaucccgacccaccgccacgugaucggcaagcccugccccaagccccaccggcugaaccacauggggaucugcuccugcggccuguacaagcacccggggguccccgugaaguggaagcgcuga

SEQ ID NO: 29786 - RNA, 1473 nt, Artificial Sequence
  derived and/or modified CDS sequence (opt1) from LASV(Nig08-A19;Clade III)__ADU56618__GPCmut6
augggccagaucgugaccuucuuccaggaggucccccacgugaucgaggaggugaugaacaucguccugaucgcccucagcauccuggccauccugaaggggcucuacaacaucgcgaccugcggccugaucgggcuggugacguuccuccugcuguccggccgcagcugcuccaugaccuacaaggggguguacgagcuccagacccuggagcugaacaugaacacccucaacaugugcaugccgcugagcugcaccaagaacaacucccaccacuacaucauggucggcaacgagaccggccuggagcucacccugacgaacaccagccugcuccaccacaaguucugcaaccuguccgacgcccacaagaagaaccuguacgaccacacccucaugagcaucaucuccaccuuccaccugagcauccccaacuucaaccaguacgaggccauguccugcgacuucaacgggggcaagaucacggugcaguacaaccugagccacuccuacgccaucgacgccgcgaaccacugcgggaccguggccaacggcguccuccagaccuucaugcggauggccuggggcgggagcuacaucgcccuggacuccggccgcgggaagugggacugcaucaugaccagcuaccaguaccugaucauccagaacacgaccugggaggaccacugccaguucucccggcccagccccaucggcuaccucgggcugcugucccagcgcacccgggacaucuacaucagccgccggcuccugggcaccuucacguggacccugagcgacuccgagggcaacgagacccccgggggcuacugccucacccgcuggaugcugaucgaggcggagcugaagugcuucgggaacacggccguggccaagugcaacgagaagcacgacgaggaguucugcgacaugcuccggcuguucgacuucugcaagcaggccauccgccggcugaaggcccccgcgcagaugagcauccagcucaucaacaaggccgugaacgcccugaucaacgaccagcugaucaugaagaaccaccuccgcgacaucaugggcauccccuacugcaacuacuccaaguacugguaccugaaccacaccagcaccgggcggaccucccugccccgcugcuggcucgucagcaacggcuccuaccugaacgagacgcacuucagcgacgacaucgagcagcaggccgacaacaugaucaccgagaugcugcagaaggaguaccucgaccggcagggcaagaccccgcuggggcugguggaccuguucguguucuccaccagcuucuaccucaucuccaucuuccugcaccuggucaagaucccgacgcaccgccacaucgugggcaagcccugccccaagccccaccggcucaaccacauggggaucugcagcugcggccuguacaagcagccgggggugcccguccgcuggaagcgguga

SEQ ID NO: 29787 - RNA, 1476 nt, Artificial Sequence
  derived and/or modified CDS sequence (opt1) from LASV(G1180-SLE-2010;Clade IV)__AIT17168__GPCmut6
augggccagaucgugaccuucuuccaggaggucccccacgugaucgaggaggugaugaacaucguccugaucgcccucagcauccuggccgugcugaaggggcucuacaacuucgcgaccugcggccugguggggcugcucaccuuccugcugcucugcggccgcuccugcaccgccagccgguacaagggggucuacgagcugcagacccuggagcucaacauggagacccugaacaugugcaugccgcuguccugcaccaagaacaacagccaccacuacaucauggugggcaacgagaccggccucgagcugacccugacgaacaccuccaucaucaaccacaaguucugcaaccucagcgacgcccacaagaagaaccuguacgaccacgcccugauguccaucaucagcaccuuccaccucuccauccccaacuucaaccaguacgaggccaugagcugcgacuucaacgggggcaagaucuccgugcaguacaaccugagccacuccuacgcgggggacgccgccaaccacugcggcaccgucgccaacggggugcugcagacguucaugcgcauggcguggggcggcagcuacaucgcccucgacuccgggcacggcagcugggacugcaucaugaccuccuaccaguaccugaucauccagaacaccaccugggaggaccacugccaguucagccggcccucccccaucggguaccugggccuccugagccagcgcacgcgggacaucuacaucagccgccggcugcucggcaccuucaccuggacccuguccgacagcgaggggaaggacacgccgggcggguacugccugacccgcuggaugcucaucgaggccgagcugaagugcuucggcaacaccgccguggccaagugcaacgagaagcacgacgaggaguucugcgacaugcugcggcuguucgacuucugcaagcaggcgauccagcgccugaaggcccccgcccagauguccauccagcugaucaacaaggccgucaacgcccucaucaacgaccagcugaucaugaagaaccaccuccgggacaucauggggauccccuacugcaacuacagcaaguacugguaccucaaccacaccacgaccggcaagaccucccugcccaagugcuggcuggugagcaacggcuccuaccucaacgagacccacuucagcgacgacaucgagcagcaggcggacaacaugaucacggagaugcugcagaaggaguacauggagcgccaggggaagacgccccugggccucguggaccuguucgucuucuccaccagcuucuaccugaucuccaucuuccugcaccucgugaagaucccgacccaccggcacaucgugggcaagagcugccccaagccccaccgccugaaccacauggggaucugcuccugcgggcuguacaagcagcccggcgucccggugaaguggaagcgguga

SEQ ID NO: 29788 - RNA, 1476 nt, Artificial Sequence
  derived and/or modified CDS sequence (opt1) from LASV(G1442-SLE-2011;Clade IV)__AIT17180__GPCmut6
augggccagaucgugaccuucuuccaggaggucccccacgugaucgaggaggugaugaacaucguccugaucgcccucagcauccuggccgugcugaaggggcucuacaacguggcgaccugcggccugaucgggcuggucacguuccuccugcugugcggccgcuccugcaccaccacccucuacaaggggguguacgagcugcagacgcuggagcucaacauggagacccugaacaugugcaugccgcugagcugcaccaagaacaacucccaccacuacauccgggugggcaacgagacgggccucgagcugacccugaccaacaccagcaucaucaaccacaaguucugcaaccucuccgacgcccacaagaagaaccuguacgaccacgcccugaugagcaucaucuccacguuccaccucagcauccccaacuucaaccaguacgaggccauguccugcgacuucaacgggggcaagaucagcguccaguacaaccugucccacagcuacgccggggacgcggccaaccacugcggcaccguggccaacggggugcugcagaccuucaugcgcauggccuggggcggcuccuacaucgcgcucgacagcgggcggggcaacugggacugcaucaugaccuccuaccaguaccugaucauccagaacacgaccugggacgaccacugccaguucagccgccccucccccaucggguaccugggccuccugagccagcggacccgcgacgucuacaucucccggcgccugcucggcaccuucacguggacccugagcgacagcgaggggaaggacaccccgggcggguacugccugacccgguggaugcucaucgaggccgagcugaagugcuucggcaacacggccguggccaagugcaacgagaagcacgacgaggaguucugcgacaugcugcgccucuucgacuucugcaagcaggccauccagcggcugaaggcgcccgcccagauguccauccagcugaucaacaaggccgugaacgcccucaucaacgaccagcugaucaugaagaaccaccuccgcgacaucauggggauccccuacugcaacuacagcaaguacugguaccugaacaacaccgccaccggcaagaccucccugcccaagugcuggcugaucagcaacggcuccuaccucaacgagacgcacuucagcgacgacaucgagcaggaggcggacaacaugaucaccgagaugcugcagaaggaguacauggagcggcaggggaagacgccccugggccucgucgaccuguucguguucuccaccagcuucuaccugaucuccaucuuccugcaccucgugaagaucccgacccaccgccacaucgucggcaagagcugccccaagccccaccggcugaaccacauggggaucugcuccugcgggcuguacaagcagcccggcgugccggugcgcuggaagcgguga

SEQ ID NO: 29789 - RNA, 1476 nt, Artificial Sequence
  derived and/or modified CDS sequence (opt1) from LASV(G3010-SLE-2013;Clade IV)__AIT17344__GPCmut6
augggccagaucgugaccuucuuccaggaggucccccacgugaucgaggaggugaugaacaucguccugaucgcccucagcauccuggccgugcugaaggggcucuacaacuucgcgaccugcggccugguggggcuggucacguuccuccugcugugcggccgcuccugcaccaccagccucuacaaggggguguacgagcugcagacccuggagcucaacauggagacgcugaacaugugcaugccgcuguccugcaccaagaacaacagccaccacuacaucauggugggcaacgagaccggccucgagcugacgcugaccaacaccuccaucaucaaccacaaguucugcaaccucagcgacgcccacaagaagaaccuguacaaccacgcccugauguccaucaucagcaccuuccaccucuccauccccaacuucaaccaguacgaggccaugagcugcgacuucaacgggggcaagaucuccguccaguacaaccugagccacuccuacgccggggacgcggccagccacugcggcacgguggccaacggggugcugcagaccuucaugcggauggccuggggcggcuccuacaucgcgcucgacagcggguacggcaagugggacugcaucaugaccuccuaccaguaccugaucauccagaacaccacgugggaggaccacugccaguucagccgccccucccccaucggguaccugggccuccugagccagcggacccgcgacaucuacaucagccggcgccugcucggcaccuucaccuggacgcuguccgacagcgaggggaaggacaccccgggcggguacugccugacccgguggaugcucaucgaggccgagcugaagugcuucggcaacaccgccgucgccaagugcaacgagaagcacgacgaggaguucugcgacaugcugcgccucuucgacuucugcaagcaggccauccagcggcugaagacgcccgcgcagauguccauccagcugaucaacaaggccgugaacgcccucaucaacgaccagcugaucaugaagaaccaccuccgcgacaucauggggauccccuacugcaacuacagcaaguacugguaccugaaccacaccaccaccggcaagacgucccugcccaagugcuggcuggugagcaacggcuccuaccucaacgagacccacuucagcgacgacaucgagcagcaggccgacaacaugaucaccgagaugcugcagaaggaguacauggagcggcaggggaagacgccccugggccucgucgaccuguucguguucuccaccagcuucuaccugaucuccaucuuccugcaccucgugaagaucccgacccaccgccacaucgucggcaagagcugccccaagccccaccggcugaaccacauggggaucugcuccugcgggcuguacaagcagcccggcgugccggugcgcuggaagcgguga

SEQ ID NO: 29790 - RNA, 1476 nt, Artificial Sequence
  derived and/or modified CDS sequence (opt1) from LASV(G502-SLE-2009;Clade IV)__AIT17126__GPCmut6
augggccagaucgugaccuucuuccaggaggucccccacgugaucgaggaggugaugaacaucguccugaucgcccucagcauccuggccgugcugaaggggcucuacaacuucgcgaccugcggccugguggggcugcucacguuccugcugcucugcggccgcuccugcaccaccgggcuguacaagggcgucuacgagcugcagacccucgagcugaacauggagacgcugaacaugugcaugccgcucagcugcaccaagaacaacucccaccacuacaucauggugggcaacgagaccgggcuggagcugacgcucaccaacaccagcaucaucaaccacaaguucugcaaccuguccgacgcccacaagaagaaccuguacgaccacgcccucaugagcaucaucuccaccuuccaccugagcauccccaacuucaaccaguacgaggccauguccugcgacuucaacggcgggaagaucagcgugcaguacaaccugucccacagcuacgccggcgacgcggccgaccacugcgggacggucgccaacggcgugcuccagaccuucaugcggauggccuggggcggguccuacaucgcgcuggacagcggccgcgggcggugggacugcaucaugaccuccuaccaguaccugaucauccagaacaccacgugggaggaccacugccaguucagccgccccucccccaucggcuaccucggccugcugagccagcggacccgcgacaucuacaucucccggcgccuccuggggaccuucaccuggacgcugagcgacagcgagggcaaggacacccccgggggcuacugccucacccgguggaugcugaucgaggccgagcugaagugcuucgggaacaccgccguggccaagugcaacgagaagcacgacgaggaguucugcgacaugcuccgccuguucgacuucugcaagcaggccauccagcggcugaaggcgcccgcccagauguccauccagcucaucaacaaggccgucaacgcccugaucaacgaccagcuggugaugaagaaccaccuccgcgacaucaugggcauccccuacugcaacuacagccgguacugguaccugaaccacacgaccaccggccgcaccucccugcccaagugcuggcucgugagcaacggguccuaccugaacgagacgcacuucagcgacgacaucgagcagcaggccgacaacaugaucaccgagaugcugcagaaggaguacauggagcggcagggcaagaccccgcucgggcuggucgaccuguucguguucuccaccagcuucuaccugaucuccaucuuccuccaccuggugaagaucccgacgcaccgccacaucgucggcaagagcugccccaagccccaccggcugaaccacauggggaucugcuccugcggccucuacaagcagcccggcgugccggugaaguggaagcgcuga

SEQ ID NO: 29791 - RNA, 1476 nt, Artificial Sequence
  derived and/or modified CDS sequence (opt1) from LASV(G733-SLE-2010;Clade IV)__AIT17154__GPCmut6
augggccagaucgugaccuucuuccaggaggucccccacgugaucgaggaggugaugaacaucguccugaucgcccucagcauccuggccgugcugaaggggcucuacaacuucgcgaccugcggcaucguggggcuggucuccuuccugcuccugugcggccgcagcugcacgaccucccuguacaaggggguguacgagcuccagacccuggagcugaacauggagacccucaacaugugcaugccgcugagcugcaccaagaacaacucccaccacuacaucauggugggcaacgagaccggccuggagcucacccugacgaacaccagcaucaucaaccacaaguucugcaaccuguccgacgcccacaagaagaaccucuacgaccacgcccugaugagcaucaucuccaccuuccaccugagcauccccaacuucaaccaguacgaggccauguccugcgacuucaacgggggcaagaucagcguccaguacaaccucucccacagcuacgccggggacgcggccaaccacugcggcaccaucgccaacggggugcugcagacguucaugcggauggccuggggcggcuccuacaucgcgcuggacagcgggcgcgaccggugggacugcaucaugaccuccuaccaguaccucaucauccagaacaccaccugggaggaccacugccaguucagccgccccucccccaucggcuaccuggggcugcucagccagcggacgcgcgacaucuacaucagccggcgccugcugggcaccuucaccuggacccucuccgacagcgagggcaaggacacgcccgggggcuacugccugacccgguggaugcugaucgaggccgagcucaagugcuucgggaacaccgccguggccaagugcaacgagaagcacgacgaggaguucugcgacaugcugcgccuguucgacuucugcaagcaggccauccagcggcucaaggcgcccgcccagauguccauccagcugaucaacaaggccgucaacgcccugaucaacgaccagcucaucaugaagaaccaccuccgcgacaucaugggcauccccuacugcaacuacagcaaguacugguaccugaaccacaccacgaccgggaagaccucccugcccaagugcuggcuggugagcaacggcuccuaccugaacgagacccacuucagcgacgacaucgagcagcaggccgacaacaugaucacggagaugcuccagaaggaguacauggagcggcagggcaagaccccgcuggggcugguggaccucuucgucuucuccaccagcuucuaccugaucuccaucuuccugcaccuggugaagaucccgacccaccgccacguggucggcaagagcugccccaagccccaccggcucaaccacauggggaucugcuccugcggccuguacgggcagcccggcgugccggugaaguggaagcgcuga

SEQ ID NO: 29792 - RNA, 1476 nt, Artificial Sequence
  derived and/or modified CDS sequence (opt1) from MOPV/LASV reassortant(IGS-1;Clade IV)__AFY05576__GPCmut6
augggccagaucgugaccuucuuccaggaggucccccacgugaucgaggaggugaugaacaucguccugaucgcccucagcgugcuggccgugcugaaggggcucuacaacuucgcgaccugcggccuggucgggcuggugacguuccuccugcugugcggccgcuccugcaccaccagccucuacaaggggguguacgagcugcagacccuggagcucaacauggagacgcugaacaugugcaugccgcuguccugcaccaagaacaacagccaccacuacaucauggucggcaacgagaccggccucgagcugacgcugaccaacaccuccaucaucaaccacaaguucugcaaccucagcgacgcccacaagaagaaccuguacgaccacgcccugauguccaucaucagcaccuuccaccucuccauccccaacuucaaccaguacgaggccaugagcugcgacuucaacgggggcaagaucuccgugcaguacaaccugagccacuccuacgccggggacgcggccaaccacugcggcacgguggccaacgggguccugcagaccuucaugcggauggccuggggcggcagcuacaucgcgcucgacuccgggcgcggcaacugggacugcaucaugaccagcuaccaguaccugaucauccagaacaccacgugggaggaccacugccaguucucccggcccagccccaucggguaccugggccuccugucccagcgcacccgggacaucuacaucagccgccggcugcucggcaccuucaccuggacgcugagcgacuccgagggggaggacaccccgggcggguacugccugacccgcuggaugcucaucgaggccgagcugaagugcuucggcaacaccgccguggccaagugcaacgagaagcacgacgaggaguucugcgacaugcugcggcuguucgacuucugcaagcaggccauccagcgccugaaggcgcccgcccagaugagcauccagcugaucaacaaggccgugaacgcccucaucaacgaccagcugaucaugaagaaccaccuccgggacaucauggggauccccuacugcaacuacuccaaguacugguaccucaaccacacgaccaccggccgcaccagccugcccaagugcuggcuggucuccaacggcagcuaccucaacgagacgcacuucuccgacgacaucgagcagcaggccgacaacaugaucaccgagaugcugcagaaggaguacauggagcggcaggggaagacgccccugggccucguggaccuguucguguucagcaccuccuucuaccugaucagcaucuuccugcaccucgucaagaucccgacccaccgccacaucguggggaaguccugccccaagccccaccggcugaaccacaugggcaucugcagcugcgggcuguacaagcagcccggcgugccggucaaguggaagcgcuga

SEQ ID NO: 29793 - RNA, 1476 nt, Artificial Sequence
  derived and/or modified CDS sequence (opt1) from LASV(LM765-SLE-2012;Clade IV)__AIT17814__GPCmut6
augggccagaucgugaccuucuuccaggaggucccccacgugaucgaggaggugaugaacaucguccugaucgcccucagcauccuggccgugcugaaggggcucuacaacuucgcgaccugcggccugguggggcuggucacguuccuccugcugugcggccgcuccugcaccaccagccucuacaaggggguguacgagcugcagacccuggagcucaacauggagacgcugaacaugugcaugccgcuguccugcaccaagaacaacagccaccacuacaucauggugggcaacgagaccggccucgagcugacgcugaccaacaccuccaucaucgaccacaaguucugcaaccucagcgacgcccaccggaagaaccuguacgaccacgcccugauguccaucaucagcaccuuccaccucuccauccccaacuucaaccaguacgaggccaugagcugcgacuucaacgggggcaagaucuccguccaguacaaccugagccacuccuacgccaaggacgcggccgaccacugcgggacgguggccaacggcgugcugcagaccuucaugcgcauggccuggggcgggagcuacaucgcgcucgacuccggccgggggcgcugggacugcaucaugaccagcuaccaguaccugaucauccagaacaccacgugggaggaccacugccaguucucccggcccagccccaucggcuaccuggggcuccugucccagcgcacccgggacaucuacaucagccgccggcugcucggcaccuucaccuggacgcugagcgacuccgagggcaaggacacccccgggggcuacugccugacccgcuggaugcucaucgaggccgagcugaagugcuucgggaacaccgccgucgccaagugcaacgagaagcacgacgaggaguucugcgacaugcugcggcuguucgacuucugcaagcaggccauccagcgccugaaggcgcccgcccagaugagcauccagcugaucaacaaggccgugaacgcccucaucaacgaccagcugaucaugaagaaccaccuccgggacaucaugggcauccccuacugcaacuacuccaaguacugguaccucaaccacacgaccaccgggaagaccagccugcccaagugcuggcugguguccaacggcagcuaccucaacgagacgcacuucuccgacgacaucgagcagcaggccgacaacaugaucaccgagaugcugcagaaggaguacauggagcgccagggcaagaccccgcuggggcucgucgaccuguucguguucagcaccuccuucuaccugaucagcaucuuccugcaccucgugaagaucccgacgcaccggcacaucgucggcaagcccugccccaagccccaccgccugaaccacauggggaucugcuccugcggccuguacaagcagccgggggugcccgugaaguggaagcgguga

SEQ ID NO: 29794 - RNA, 1476 nt, Artificial Sequence
  derived and/or modified CDS sequence (opt1) from LASV(LM776-SLE-2012;Clade IV)__AIT17824__GPCmut6
augggccagaucgugaccuucuuccaggaggucccccacgugaucgaggaggugaugaacaucguccugaucgcccucagcauccuggccgugcugaaggggcucuacaacuucgcgaccugcggccugguggggcuggucacguuccuccugcugugcggccgcuccugcaccaccagcguguacaaggggguguacgagcuccagacccuggagcugaacauggagacgcucaacaugugcaugccgcuguccugcaccaagaacaacagccaccacuacaucauggucggcaacgagaccggccuggagcucacgcugaccaacaccuccaucaucaaccacaaguucugcaaccugagcgacgcccacaagaagaaccucuacgaccacgcccugauguccaucaucagcaccuuccaccuguccauccccaacuucaaccaguacgaggccaugagcugcgacuucaacgggggcaagaucuccgugcaguacaaccucagccacuccuacgccggggacgcggccaaccacugcggcacgguggccaacgggguccugcagaccuucaugcggauggccuggggcggcagcuacaucgcgcuggacuccgggcacggcaagugggacugcaucaugaccagcuaccaguaccucaucauccagaacaccacgugggaggaccacugccaguucucccgccccagccccaucggguaccugggccugcucucccagcggacccgcgacaucuacaucagccggcgccugcugggcaccuucaccuggacgcucagcgacuccgaggggaaggacaccccgggcggguacugccugacccgguggaugcugaucgaggccgagcucaagugcuucggcaacaccgccguggccaagugcaacgagaagcacgacgaggaguucugcgacaugcugcgccuguucgacuucugcaagcaggccauccagcggcucaaggcgcccgcccagaugagcauccagcugaucaacaaggccgugaacgcccugaucaacgaccagcucaucaugaagaaccaccuccgcgacaucauggggauccccuacugcaacuacuccaaguacugguaccugaaccacacgaccaccggcaagaccagccugcccaagugcuggcuggucuccaacggcagcuaccugaacgagacgcacuucuccgacgacaucgagcagcaggccgacaacaugaucaccgagaugcuccagaaggaguacauggagcggcaggggaagacgccccugggccugguggaccucuucguguucagcaccuccuucuaccugaucagcaucuuccugcaccuggucaagaucccgacccaccgccacaucguggggaaguccugccccaagccccaccggcucaaccacaugggcaucugcagcugcgggcuguacaagcagcccggcgugccgguccgcuggaagcgguga

SEQ ID NO: 29795 - RNA, 1476 nt, Artificial Sequence
  derived and/or modified CDS sequence (opt1) from LASV(Mad39;Clade IV)__ANH09722__GPCmut6
augggccagaucgugaccuucuuccaggaggucccccacgugaucgaggaggugaugaacaucguccugaucgcccucagcauccuggccgugcugaaggggcucuacaacguggcgaccugcggccugaucgggcuggucacguuccuccugcugugcggccgcuccugcaccaccacccucuacaaggggguguacgagcugcaggcccuggagcucaacauggagacgcugaacaugugcaugccgcugagcugcaccaagaacaacucccaccacuacauccgggugggcaacgagaccggccucgagcugacgcugaccaacaccagccucaucaaccacaaguucugcaaccuguccgacgcccacaagaagaaccuguacgaccacgcccucaugagcaucaucuccaccuuccaccugagcauccccaacuucaaccaguacgaggccauguccugcgacuucaacgacgggaagaucagcguccaguacaaccugucccacacguacgcgggcgacaccgccaaccacugcgggaccguggccaacggcgugcuccagaccuucaugcgcauggccuggggcgggagcuacaucgcgcuggacuccggccgcgggggcugggacugcaucaugacgagcuaccaguaccugaucauccagaacaccaccugggaggaccacugccaguucucccggcccagccccaucggguaccucggccugcugucccagcggacccgcgacaucuacaucagccggcgccuccugggcacguucaccuggacccuguccgacagcgaggggaaggacaccccgggcggguacugccucacgcgguggaugcugaucgaggccgagcugaagugcuucggcaacaccgccgucgccaagugcaacgagaagcacgacgaggaguucugcgacaugcuccgccuguucgacuucugcaagcaggccauccagcggcugaaggcgcccgcccagaugagcauccagcucaucaacaaggccgugaacgcccugaucaacgaccagcugaucaugaagaaccaccuccgcgacaucauggggauccccuacugcaacuacuccaaguacugguaccugaaccacaccgugaccggcaagacgagccugcccaagugcuggcucgucuccaacggcagcuaccugaacgagacccacuucuccgacgacaucgagcagcaggccgacaacaugaucaccgagaugcugcagaaggaguacauggagcggcaggggaagacgccccucggccugguggaccuguucguguucagcaccuccuucuaccugaucagcaucuuccuccaccuggucaagaucccgacccaccgccacgugguggggaagcccugccccaagccccaccggcugaaccacaugggcaucugcuccugcggguucuacaagcagccgggcguccccgugcgcuggaagcgguga

SEQ ID NO: 29796 - RNA, 1476 nt, Artificial Sequence
  derived and/or modified CDS sequence (opt1) from LASV(Z0947-SLE-2011;Clade IV)__AIT17840__GPCmut6
augggccagaucgugaccuucuuccaggaggucccccacgugaucgaggaggugaugaacaucguccugaucgcccucagcauccuggccgugcugaaggggcucuacaacuucgcgaccugcggccugguggggcuggucacguuccuccugcugugcggccgcuccugcaccaucagccucuacaaggggguguacgagcugcagacccuggagcucaacauggagacccugaacaugugcaugccgcuguccugcaccaagaacaacagccaccacuacaucauggugggcaacgagaccggccucgagcugacccugacgaacaccuccaucaucaaccacaaguucugcaaccucagcgacgcccacaagaagaaccuguacgaccacgcccugauguccaucaucagcaccuuccaccucuccauccccaacuucaaccaguacgaggccaugagcugcgacuucaacgggggcaagaucuccguccaguacaaccugagccacuccuacgccggggacgcggccaaccacugcggcaccguggccaacggggugcugcagacguucaugcggauggccuggggcggcagcuacaucgcgcucgacuccgggcgcgaccggugggacugcaucaugaccagcuaccaguaccugaucauccagaacaccaccugggaggaccacugccaguucucccgccccagccccaucggcuaccuggggcuccugucccagcggacgcgcgacaucuacaucagccggcgccugcucggcaccuucaccuggacccugagcgacuccgagggcaaggacacgcccgggggcuacugccugacccgguggaugcucaucgaggccgagcugaagugcuucgggaacaccgccgucgccaagugcaacgagaagcacgacgaggaguucugcgacaugcugcgccucuucgacuucugcaagcaggccauccagcggcugaaggcgcccgcccagaugagcauccagcugaucaacaaggccgugaacgcccucaucaacgaccagcugaucaugaagaaccaccuccgcgacaucaugggcauccccuacugcaacuacuccaaguacugguaccugaaccacaccacgaccgggaagaccagccugcccaagugcuggcugguguccaacggcagcuaccucaacgagacccacuucuccgacgacaucgagcagcaggccgacaacaugaucacggagaugcugcagaaggaguacauggagcggcagggcaagaccccgcuggggcucgucgaccuguucguguucagcaccuccuucuaccugaucagcaucuuccugcaccucgugaagaucccgacccaccgccacaucgucggcaagcccugccccaagccccaccggcugaaccacauggggaucugcuccugcggccuguacaagcagccgggggugcccgugaaguggaagcgcuga

SEQ ID NO: 29797 - RNA, 1476 nt, Artificial Sequence
  derived and/or modified CDS sequence (opt1) from LASV(Josiah;Clade IV)__NP_694870__GPCmut6
augggccagaucgugaccuucuuccaggaggucccccacgugaucgaggaggugaugaacaucguccugaucgcccucagcgugcuggccgugcugaaggggcucuacaacuucgcgaccugcggccuggucgggcuggugacguuccuccugcugugcggccgcuccugcaccaccagccucuacaaggggguguacgagcugcagacccuggagcucaacauggagacgcugaacaugugcaugccgcuguccugcaccaagaacaacagccaccacuacaucauggucggcaacgagaccggccucgagcugacccugacgaacaccuccaucaucaaccacaaguucugcaaccucagcgacgcccacaagaagaaccuguacgaccacgcccugauguccaucaucagcaccuuccaccucuccauccccaacuucaaccaguacgaggccaugagcugcgacuucaacgggggcaagaucuccgugcaguacaaccugagccacuccuacgccggggacgcggccaaccacugcggcaccguggccaacgggguccugcagacguucaugcggauggccuggggcggcagcuacaucgcgcucgacuccgggcgcggcaacugggacugcaucaugaccagcuaccaguaccugaucauccagaacaccaccugggaggaccacugccaguucucccggcccagccccaucggguaccugggccuccugucccagcgcacgcgggacaucuacaucagccgccggcugcucggcaccuucaccuggacccugagcgacuccgaggggaaggacacgccgggcggguacugccugacccgcuggaugcucaucgaggccgagcugaagugcuucggcaacaccgccguggccaagugcaacgagaagcacgacgaggaguucugcgacaugcugcggcuguucgacuucugcaagcaggccauccagcgccugaaggcgcccgcccagaugagcauccagcugaucaacaaggccgugaacgcccucaucaacgaccagcugaucaugaagaaccaccuccgggacaucauggggauccccuacugcaacuacuccaaguacugguaccucaaccacaccacgaccggccgcaccagccugcccaagugcuggcuggucuccaacggcagcuaccucaacgagacccacuucuccgacgacaucgagcagcaggccgacaacaugaucacggagaugcugcagaaggaguacauggagcggcaggggaagaccccgcugggccugguggaccucuucguguucagcaccuccuucuaccugaucagcaucuuccugcaccucgucaagauccccacccaccgccacaucguggggaaguccugccccaagccccaccggcugaaccacaugggcaucugcagcugcgggcuguacaagcagccgggcgugcccgucaaguggaagcgcuga

SEQ ID NO: 29798 - RNA, 1473 nt, Artificial Sequence
  derived and/or modified CDS sequence (opt1) from LASV(LP;Clade I)__AAF86701__GPCmut6
augggccagaucaucaccuucuuccaggaggugccccacgucaucgaggaggugaugaacaucgugcugaucgcccucagccugcuggccauccucaaggggcuguacaacaucgcgaccugcggcaucaucgggcuggucgccuuccucuuccugugcggcaaguccugcagccugacgcucaagggcggguacgagcugcagacccuggagcucaacauggagacccugaacaugugcaugccgcuguccugcaccaagaacagcucccaccacuacauccgcgugggcaacgagacggggcucgagcugacccugaccaacaccagcaucaucaaccacaaguucugcaaccucuccgacgcccacaagaagaaccuguacgaccacgcccugaugagcaucaucuccacguuccaccucagcauccccaacuucaaccaguacgaggccauguccugcgacuucaacggcgggaagaucagcgugcaguacaaccugucccacagcuacgcgggcgacgccgccgagcacugcgggaccgucgccaacggcgugcugcagaccuucaugcggauggcguggggcgggcgcuacaucgcccucgacuccggcaaggggaacugggacugcaucaugaccagcuaccaguaccugaucauccagaacacgaccugggaggaccacugccaguucucccggcccagccccaucggcuaccugggccuccugucccagcgcacccgggacaucuacaucagccgccggcugcucgggaccuucacguggacccugagcgacuccgagggcaacgagacccccgggggcuacugccugacccgcuggaugcucaucgaggccgagcugaagugcuucgggaacacggccguggccaagugcaacgagaagcacgacgaggaguucugcgacaugcugcggcuguucgacuucugcaagcaggcgauccgccggcugaaggccccggcccagaugagcauccagcugaucaacaaggccgucaacgcccucaucaacgaccagcugaucaugaagaaccaccuccgcgacaucaugggcauccccuacugcaacuacuccaaguacugguaccucaaccacaccagcuccggccggaccagccugcccaagugcuggcugaucuccaacgggagcuaccucaacgagacccaguucuccgacgacaucgagcagcaggcggacaacaugaucacggagaugcugcagaaggaguacaucgagcgccagggcaagaccccgcuggggcugguggacaucuucaucuucagcaccuccuucuaccucaucagcaucuuccugcaccugaucaagauccccacccaccggcacaucgugggcaagcccugccccaagccgcaccgccucaaccacaugggggucugcuccugcggccuguacaagcaccccggcgugcccacgaaguggaagcgguga

SEQ ID NO: 29799 - RNA, 1473 nt, Artificial Sequence
  derived and/or modified CDS sequence (opt1) from LASV(803213;Clade II)__AAF86703__GPCmut6
augggccagaucaucaccuucuuccaggaggugccccacgucaucgaggaggugaugaacaucgugcugaucgcccucagccugcuggccauccucaaggggaucuacaacgucgcgaccugcggccuguucgggcugaucuccuuccuccugcugugcggccgcagcugcuccgugacguacaaggggguguacgagcuccagacccuggagcugaacauggccaaccucaacaugugcaugccgcugagcugcaccaagaacaacucccaccacuacaucauggucggcaacgagaccggccuggagcucacgcugaccaacaccagcaucaucaaccacaaguucugcaaccuguccgacgcccacaagaagaaccucuacgaccacgcccugaugagcaucaucuccaccuuccaccugagcauccccaacuucaaccaguacgaggccauguccugcgacuucaacgggggcaagaucagcgugcaguacaaccucucccacagcuucgcgguggacgccgccaaccacugcgggacgaucgccaacggcguccugcagaccuucaugcggauggcguggggcggguccuacaucgcccuggacagcggcaaggggaacugggacugcaucaugaccuccuaccaguaccucaucauccagaacaccacgugggaggaccacugccaguucagccgccccucccccaucggcuaccuggggcugcucagccagcggacccgcgacaucuacaucagccggcgccugcugggcaccuucaccuggacgcucuccgacagcgagggcaacgaggcccccgggggcuacugccugacccgguggaugcugaucgaggccgagcucaagugcuucgggaacaccgccguggcgaagugcaacgagaagcacgacgaggaguucugcgacaugcugcgccuguucgacuucugcaagcaggccaucaagcggcucaagaccccggcccagauguccauccagcugaucaacaaggccgugaacgcccugaucaacgaccagcucaucaugaagaaccaccuccgcgacaucaugggcauccccuacugcaacuacagccgguacugguaccugaaccacacggucaccgggaagaccucccugccccgcugcuggcuggugagcaacggcuccuaccugaacgagacccacuucagcgacgacaucgagcagcaggcggacaacaugaucacggagaugcuccagaaggaguacauggaccggcagggcaagaccccgcuggggcugguggaccuguucgucuucuccaccagcuucuaccucaucuccaucuuccugcaccuggugaagauccccacccaccgccacaucgugggcaagcccugccccaagccgcaccggcucaaccacauggggaucugcagcugcggccuguacaagcaccccgggguccccgugaaguggaagcgcuga

SEQ ID NO: 29800 - RNA, 1473 nt, Artificial Sequence
  derived and/or modified CDS sequence (opt1) from LASV(GA391;Clade III)__CAA36645__GPCmut6
augggccagaucgugaccuucuuccaggaggucccccacgugaucgaggaggugaugaacaucguccugaucgcccucagcauccuggccauccugaaggggcucuacaacguggcgaccugcggccugaucgggcuggugacguuccuccugcuguccggccgcagcugcucccucaucuacaaggggaccuacgagcugcagacccuggagcucaacauggagacccugaacaugugcaugccgcugagcugcacgaagaacaacucccaccacuacauccgggucggcaacgagaccggccucgagcugacccugaccaacacgagcauccucaaccacaaguucugcaaccuguccgacgcccacaagcgcaaccuguacgaccacagccucauguccaucaucagcaccuuccaccuguccauccccaacuucaaccaguacgaggccaugagcugcgacuucaacgggggcaagaucaccgugcaguacaaccugucccacagcuucgccguggacgccgcggggcacugcggcacccucgccaacgggguccugcagacguucaugcggauggccuggggcggcuccuacaucgcccuggacagcgggcgcggcaacugggacugcaucaugaccuccuaccaguaccucaucauccagaacaccaccugggacgaccacugccaguucagccggcccucccccaucggguaccugggccugcucagccagcgcacgcgggacaucuacaucagccgccggcugcugggcaccuucaccuggacccucuccgacagcgaggggaacgagacgccgggcggguacugccugacccgcuggaugcugaucgaggcggagcucaagugcuucggcaacaccgccguggccaagugcaacgagaagcacgacgaggaguucugcgacaugcugcggcuguucgacuucugcaagcaggccauccgccggcucaagacccccgcccagauguccauccagcugaucaacaaggcggugaacgcccugaucaacgaccagcucaucaugaagaaccaccuccgcgacaucauggggauccccuacugcaacuacagccgguacugguaccugaaccacacguccaccggcaagaccagccugccccgcugcuggcugaucuccaacggcagcuaccugaacgagaccaaguucuccgacgacaucgagcagcaggccgacaacaugaucacggagaugcugcagaaggaguacaucgaccggcaggggaagaccccgcucggccuggucgaccuguucguguucagcaccuccuucuaccucaucagcaucuuccugcaccuggugaagauccccacccaccgccacaucgucgggaagcccugccccaagccgcaccggcucaaccacaugggcaucugcuccugcgggcuguacaagcagcccggcgugcccgugcgcuggaagcgguga

SEQ ID NO: 29801 - RNA, 1476 nt, Artificial Sequence
  derived and/or modified CDS sequence (opt1) from LASV(AV;Clade V)__CCA30314__GPCmut6
augggccagaucgugaccuucuuccaggaggucccccacgugaucgaggaggugaugaacaucguccugaucgcccucagcauccuggccgugcugaaggggcucuacaacaucgcgaccugcggccugaucgggcugaucacguuccuccugcugugcggccgcuccugcagcuccaaccucuacaaggggguguacgagcugcagagccuggaccucaacauggagacccugaacaugugcaugccgcuguccugcaccaagaacaacagccaccacuacauccgggucggcaacgacaccggccucgagcugacgcugaccaacaccuccauccucaaccacaaguucugcaaccugagcgacgcccacaagaaggaccuguacgaccacgcccucauguccaucaucagcaccuuccaccuguccauccccaacuucaaccaguacgaggccaugagcugcgacuucaacgggggcaagaucuccgugcaguacaaccugagccacuccuacgccaucgacgcggccaaccacugcgggacgguggccaacggcauccuccagaccuucaugcgcauggccuggggcgggagcuacaucgcgcuggacuccggccgggggaacugggacugcaucaugaccagcuaccaguaccugaucauccagaacaccacgugggagaaccacugccaguucucccgccccagccccaucggcuaccucgggcugcugagccagcggacccgcgacaucuacaucucccggcgccuccugggcaccuucaccuggacgcugagcgacuccgagggcaacgccacccccgggggcuacugccucacccgguggaugcugaucgaggccgagcugaagugcuucgggaacaccgccgucgccaagugcaacgagaagcacgacgaggaguucugcgacaugcuccgccuguucgacuucugcaagcaggcgaucagccggcugaaguccccggcccagaugagcauccagcucaucaacaaggccgugaacgcccugaucaacgaccagcugaucaugaagaaccaccuccgcgacaucaugggcauccccuacugcaacuacuccaaguacugguaccugaaccacacgaucaccgggaagaccagccugcccaagugcuggcucguguccaacggcagcuaccugaacgagacccacuucuccgacgacaucgagcagcaggccgacaacaugaucacggagaugcugcagaaggaguacauggagcggcagggcaagaccccgcuggggcucgucgaccuguucguguucagcaccuccuucuaccugaucagcaucuuccuccgccuggugaagauccccacccaccggcacaucgucggcaagcccugccccaagccgcaccgccugaaccacauggggaucugcuccugcggccucuacaagcagcccggggugcccgugcgguggaagcgcuga

SEQ ID NO: 29802 - RNA, 1473 nt, Artificial Sequence
  derived and/or modified CDS sequence (opt1) from LASV(Togo/2016/7082;Clade VI)__AMR44577__GPCmut6
augggccagaucaucaccuucuuccaggaggugccccacgucaucgaggaggugaugaacaucgugcugaucgcccucagccugcuggccauccucaagggggucuacaacguggcgaccugcggcaucaucgggcuggugacguuccuguuccucugcggccgcuccugcagccugaucuacaagggguccuacgagcugcagacccucgagcugaacauggagacccugaacaugugcaugccgcucagcugcaccaagaacuccagccaccacuacauccgggucggcaacgagacgggccuggagcugacccucaccaacaccuccaucaucaaccacaaguucugcaaccugagcgacgcccacaagcgcaaccuguacgaccacgcccucauguccauccugagcacguuccaccuguccauccccaacuucaaccaguacgaggccaugagcugcgacuucaacgggggcaagaucuccgugcaguacaaccucagccacgccuacgcgguggacgccgccgagcacugcgggaccgucgccaacggcgugcugcagaccuucaugcggauggcguggggcggguccuacaucgcccuggacagcggccgcgggaacugggacugcaucaugaccuccuaccaguaccucaucauccagaacacgaccugggaggaccacugccaguucagccggcccucccccaucggcuaccuggggcugcucagccagcgcacccgggacaucuacaucagccgccggcugcugggcaccuucacguggacccucuccgacagcgagggcaacgagacccccgggggcuacugccugacccgcuggaugcugaucgaggccgagcucaagugcuucgggaacacggccguggccaagugcaacgagaagcacgacgaggaguucugcgacaugcugcggcuguucgacuucugcaagcaggcgauccagcgccucaaguccccggcccagaugagcauccagcugaucaacaaggccgucaacgcccugaucaacgaccagcucaucaugaagaaccaccuccgggacaugaugggcauccccuacugcaacuacuccaaguacugguaccugaaccacaccagcuccgggcgcaccagccugcccaagugcuggcugguguccaacggcagcuaccugaacgagacccacuucuccgacgacaucgagcagcaggccgacaacaugaucacggagaugcuccagaaggaguacaucgaccggcagggcaagaccccgcuggggcugguggaccuguucgucuucagcaccuccuucuaccucaucagcaucuuccugcaccugaucaagauccccacccaccgccacaucgugggcaagcccugccccaagccgcaccggcucaaccacauggggaucugcuccugcggccuguacaagcagcccggggugcccacgcgcuggaagcgguga

SEQ ID NO: 29803 - RNA, 1473 nt, Artificial Sequence
  derived and/or modified CDS sequence (opt1) from LASV(KAK-428;Clade n.d. (VII))__ANH09740__GPCmut6
augggccagaucgugaccuucuuccaggaggucccccacgugaucgaggaggugaugaacaucguccugaucgcccucagccugcuggccauccucaaggggcuguacaacuucgcgaccugcggcgugaucgggcugaucacguuccuccugcugugcggccgcuccugcagcgccaccuacaaggggcaguacgagcuccagacccuggagcugaacauggagucccucaacaugugcaugccgcugagcugcaccaagaacaacucccaccacuacauccgggccggcaacaacacgggccuggagcucacccugaccaacaccagcaucaucucccacaaguucugcaaccugagcgacgcccacaagaagaaccucuacgaccacacgcugauguccaucaucaccaccuuccaccugagcauccccaacuucaaccaguacgaggccauguccugcgacuucaacgggggcaagaucagcauccaguacaaccucucccacagcuacgcgggggacgccgcccagcacugcggcaccguggccaacgggguccugcagacguucaugcgcauggcguggggcggcuccuaccuggcccucgacagcgggcggcgcggcugggacugcaucaucuccagcuaccaguaccugaucauccagaacaccaccugggacgaccacugccaguucucccggcccagccccaucggguaccugggcuucgugagccagaagacccgcgacaucuacaucucccggcgccuccugggcacguucaccuggacccugagcgacuccgaggggcacgacaugccgggcggguacugccucacccgguggaugcugaucgaggccgaccugaagugcuucggcaacacggccguggccaagugcaacgagaagcacgacgaggaguucugcgacauguggcgccucuucgacuucugcaagcaggcgauccagcggcugaaggcccccgcccagaugaacauccagcugaucaacaaggccgucaacgcccucaucaacgaccagcugaugaugaagaaccaccuccgcgacaucauggggauccccuacugcaacuacagcaaguucugguaccugaacaacaccaccaccggccggacgucccugccccgcugcuggcugaucagcaacggcuccuaccucaacgagacccacuucagcgacgacaucgagcagcaggcggacaacaugaucaccgagaugcugcagaaggaguacauggaccggcaggggaagaccccgcugggccucguggaccuguucguguucuccacgagcuucuaccugaucaccaucuuccugcaccucgucaagauccccacccaccgccacaucguggggaagcccugccccaagccgcaccggcugaaccacaugggcaucugcuccugcgggcuguacaagcagcccggcgugcccguccgcuggaagcgguga

SEQ ID NO: 29804 - RNA, 1473 nt, Artificial Sequence; identical to SEQ ID NO: 29798
  derived and/or modified CDS sequence (opt1) from LASV(Pinneo-NIG-1969;Clade I)__AIT17836__GPCmut6

SEQ ID NO: 29805 - RNA, 1473 nt, Artificial Sequence
  derived and/or modified CDS sequence (opt1) from LASV(ISTH0009-NIG-2011;Clade II)__AIT17404__GPCmut6
augggccagaucaucaccuucuuccaggaggugccccacgucaucgaggaggugaugaacaucgugcugaucgcccucagccugcuggccauccucaaggggaucuacaacgucgcgaccugcggccuguucgggcugguguccuuccuccugcugugcggccgcagcugcuccacgaccuacaaggggguguacgagcuccagacccuggagcuggacauggccagccucaacaugugcaugccgcuguccugcaccaagaacaacagccaccacuacaucauggucggcaacgagacgggccuggagcucacccugaccaacaccuccaucaucaaccacaaguucugcaaccugagcgacgcccacaagaagaaccucuacgaccacgcccugauguccaucaucagcacguuccaccuguccauccccaacuucaaccaguacgaggccaugagcugcgacuucaacgggggcaagaucuccgugcaguacaaccucagccacgcguacgccguggacgccgccaaccacugcgggaccaucgcgaacggcguccugcagaccuucaugcggauggccuggggcggguccuacaucgcccuggacagcggcaagggguccugggacugcaucaugaccagcuaccaguaccucaucauccagaacacgaccugggaggaccacugccaguucucccgccccagccccaucggcuaccuggggcugcucagccagcggacccgcgacaucuacaucucccggcgccugcugggcaccuucacguggacccucagcgacuccgagggcaacgagacccccgggggcuacugccugacccgguggaugcugaucgaggccgagcucaagugcuucgggaacacggccguggcgaagugcaacgagaagcacgacgaggaguucugcgacaugcugcgccuguucgacuucugcaagcaggccauccggcgccucaagaccccggcccagaugagcauccagcugaucaacaaggccgugaacgcccugaucaacgaccagcucaucaugaagaaccaccuccgggacaucaugggcauccccuacugcaacuacuccaaguacugguaccugaaccacaccgucaccgggaagacgagccugccccgcugcuggcugguguccaacggcagcuaccugaacgagacccacuucuccgacgacaucgagcagcaggcggacaacaugaucaccgagcuccugcagaaggaguacauggaccggcagggcaagaccccgcuggggcugguggaccucuucgucuucagcacguccuucuaccugaucagcaucuuccugcaccucaucaagauccccacccaccgccacaucaccggcaagcccugccccaagccgcaccggcugaaccacauggggaucugcuccugcggccuguacaagcaccccggggugcccgugaaguggaagcgcuga

SEQ ID NO: 29806 - RNA, 1473 nt, Artificial Sequence
  derived and/or modified CDS sequence (opt1) from LASV(ISTH2010-NIG-2012;Clade II)__AIT17482__GPCmut6
augggccagaucaucaccuucuuccaggaggugccccacgucaucgaggaggugaugaacaucgugcugaucgcccucagccugcuggccauccucaaggggaucuacaacgucgcgaccugcggccuguucgggcugguguccuuccuccugcugugcggccgcagcugcuccacgaccuacaaggggguguacgagcuccagacccuggagcuggacauggccagccucaacaugugcaugccgcuguccugcaccaagaacaacagccaccacuacaucauggucggcaacgagacgggccuggagcucacccugaccaacaccuccaucaucaaccacaaguucugcaaccugagcgacgcccacaagaagaaccucuacgaccacgcccugauguccaucaucagcacguuccaccuguccauccccaacuucaaccaguacgaggccaugagcugcgacuucaacgggggcaagaucuccgugcaguacaaccucagccacgcguacgccguggacgccgccaaccacugcgggaccaucgcgaacggcguccugcagaccuucaugcggauggccuggggcggguccuacaucgcccuggacagcggcaagggguccugggacugcaucaugaccagcuaccaguaccucaucauccagaacaucacgugggaggaccacugccaguucucccgccccagccccaucggcuaccuggggcugcucagccagcggacccgcgacaucuacaucucccggcgccugcugggcaccuucaccuggacgcucagcgacuccgagggcaacgagacccccgggggcuacugccugacccgguggaugcugaucgaggccgagcucaagugcuucgggaacaccgccguggcgaagugcaacgagaagcacgacgaggaguucugcgacaugcugcgccuguucgacuucugcaagcaggccauccggcgccucaagacgccggcccagaugagcauccagcugaucaacaaggccgugaacgcccugaucaacgaccagcucaucaugaagaaccaccuccgggacaucaugggcauccccuacugcaacuacuccaaguacugguaccugaaccacaccgucaccgggaagaccagccugccccgcugcuggcugguguccaacggcagcuaccugaacgagacgcacuucuccgacgacaucgagcagcaggcggacaacaugaucaccgagcuccugcagaaggaguacaucgaccggcagggcaagaccccgcuggggcugguggaccucuucgucuucagcaccuccuucuaccugaucagcaucuuccugcaccucgugaagauccccacgcaccgccacguggucggcaagcccugccccaagccgcaccggcugaaccacauggggaucugcuccugcggccuguacaagcaccccggggugcccgugaaguggaagcgcuga

SEQ ID NO: 29807 - RNA, 1473 nt, Artificial Sequence
  derived and/or modified CDS sequence (opt1) from LASV(Lassa virus/H.sapiens-wt/NGA/2015/ISTH_0543;Clade II)__AVO03639__GPCmut6
augggccagaucaucaccuucuuccaggaggugccccacgucaucgaggaggugaugaacaucgugcugaucgcccucagccugcuggccauccucaaggggaucuacaacgucgcgaccugcggccuguucgggcugguguccuuccuccugcugugcggccgcagcugcuccacgaccuacaaggggguguacgagcuccagacccuggagcuggacauggccaaccucaacaugugcaugccgcugagcugcaccaagaacaacucccaccacuacaucauggucggcaacgagacgggccuggagcucacccugaccaacaccagcaucaucaaccacaaguucugcaaccuguccgacgcccacaagaagaaccucuacgaccacgcccugaugagcaucaucuccacguuccaccugagcauccccaacuucaaccaguacgaggccauguccugcgacuucaacgggggcaagaucagcgugcaguacaaccucucccacaccuacgcgguggacgccgccaaccacugcgggaccaucgccaacggcguccugcagaccuucaugcggauggcguggggcgggagcuacaucgcccuggacuccggcaaggggagcugggacugcaucaugacguccuaccaguaccucgugauccagaacaccaccugggaggaccacugccaguucagccgccccucccccaucggcuaccuggggcugcucagccagcggacccgcgacaucuacaucagccggcgccugcugggcacguucaccuggacccucuccgacagcgagggcaacgagacccccgggggcuacugccugacgcgguggaugcugaucgaggccgagcucaagugcuucgggaacaccgccguggccaagugcaacgagaagcacgacgaggaguucugcgacaugcugcgccuguucgacuucugcaagcaggcgauccggcgccucaagaccccggcccagauguccauccagcugaucaacaaggccgucaacgcccugaucaacgaccagcucaucaugaagaaccaccuccgggacaucaugggcauccccuacugcaacuacagcaaguacugguaccugaaccacaccgugacggggaagaccucccugccccgcugcuggcuggugagcaacggcuccuaccugaacgagacccacuucagcgacgacaucgagcagcaggccgacaacaugaucaccgagcuccugcagaaggaguacaucgaccggcagggcaagacgccgcuggggcuggucgaccucuucguguucuccaccagcuucuaccugaucuccaucuuccugcaccucgugaagauccccacccaccgccacaucaccggcaagcccugccccaagccgcaccggcugaaccacauggggaucugcagcugcggccuguacaagcaccccgggguccccgugaaguggaagcgcuga

SEQ ID NO: 29808 - RNA, 1473 nt, Artificial Sequence
  derived and/or modified CDS sequence (opt1) from LASV(Lassa virus/H.sapiens-wt/NGA/2016/ISTH_0009;Clade II)__AVO03571__GPCmut6
augggccagaucaucaccuucuuccaggaggugccccacgucaucgaggaggugaugaacaucgugcugaucgcccucagccugcuggccauccucaaggggaucuacaacgucgcgaccugcggccugcuggggcucguguccuuccugcugcucugcggccgcagcugcuccacgaccuacaaggggguguacgagcugcagacccuggagcucgacauggccagccugaacaugugcaugccgcuguccugcaccaagaacaacagccaccacuacaucauggucggcaacgagacgggccucgagcugacccugaccaacaccuccaucaucaaccacaaguucugcaaccucagcgacgcccacaagaagaaccuguacgaccacgcccugauguccaucaucagcacguuccaccucuccauccccaacuucaaccaguacgaggccaugagcugcgacuucaacgggggccggaucuccgugcaguacaaccugagccacuccuacgcgguggacgccgccaaccacugcgggaccaucgccaacggcguccugcagaccuucaugcgcauggcguggggcgggagcuacaucgcccucgacuccggcaaggggagcugggacugcaucaugaccuccuaccaguaccugaucauccagaacacgaccugggaggaccacugccaguucagccggcccagccccaucggcuaccuggggcuccugucccagcgcacccgggacaucuacaucagccgccggcugcucggcaccuucacguggacccuguccgacagcgagggcaacgagacccccgggggcuacugccugacccgcuggaugcucaucgaggccgagcugaagugcuucgggaacacggccguggccaagugcaacgagaagcacgacgaggaguucugcgacaugcugcggcuguucgacuucugcaagcaggcgauccgccggcugaagaccccggcccagauguccauccagcugaucaacaaggccgugaacgcccucaucaacgaccagcugaucaugaagaaccaccuccgcgacaucaugggcauccccuacugcaacuacagcaaguacugguaccucaaccacaccgucaccgggaagacgucccugccccggugcuggcuggugagcaacggcuccuaccucaacgagacccacuucagcgacgacaucgagcagcaggccgacaacaugaucaccgagcugcugcagaaggaguacaucgaccgccagggcaagaccccgcuggggcucguggaccuguucgucuucuccacgagcuucuaccugaucuccaucuuccuccaccuggugaagauccccacccaccggcacaucaccggcaagcccugccccaagccgcaccgccugaaccacauggggaucugcagcugcggccucuacaaccaccccggggugcccgucaaguggaagcgguga

SEQ ID NO: 29809 - RNA, 1473 nt, Artificial Sequence
  derived and/or modified CDS sequence (opt1) from LASV(Lassa virus/H.sapiens-wt/NGA/2016/ISTH_0017;Clade II)__AVO03567__GPCmut6
augggccagaucaucaccuucuuccaggaggugccccacgucaucgaggaggugaugaacaucgugcugaucgcccucagccugcuggccauccucaaggggaucuacaacgucgcgaccugcggccuguucgggcugguguccuuccuccugcugugcggccgcagcugcuccacgaccuacaaggggguguacgagcuccagacccuggagcuggacauggccagccucaacaugugcaugccgcuguccugcaccaagaacaacagccaccacuacaucauggucggcaacgagacgggccuggagcucacccugaccaacaccuccaucaucaaccacaaguucugcaaccugagcgacgcccacaagaagaaccucuacgaccacgcccugauguccaucaucagcacguuccaccuguccauccccaacuucaaccaguacgaggccaugagcugcgacuucaacgggggcaagaucuccgugcaguacaaccucagccacaccuacgcgaucgacgccgccaaccacugcgggaccaucgccaacggcgugcugcagaccuucaugcggauggcguggggcggguccuacaucgcccuggacagcggcaagggguccugggacugcaucaugacgagcuaccaguaccucaucauccagaacaccaccugggaggaccacugccaguucucccgccccagccccaucggcuaccuggggcugcucagccagcggacccgcgacaucuacaucucccggcgccugcugggcacguucaccuggacccucagcgacuccgagggcaacgagacccccgggggcuacugccugacgcgguggaugcugaucgaggccgagcucaagugcuucgggaacaccgccgucgccaagugcaacgagaagcacgacgaggaguucugcgacaugcugcgccuguucgacuucugcaagcaggcgauccggcgccucaagaccccggcccagaugagcauccagcugaucaacaaggccgugaacgcccugaucaacgaccagcucaucaugaagaaccaccuccgggacaucaugggcauccccuacugcaacuacuccaaguacugguaccugaaccacaccgugacggggaagaccagccugccccgcugcuggcuggucuccaacggcagcuaccugaacgagacccacuucuccgacgacaucgagcagcaggccgacaacaugaucaccgagcuccugcagaaggaguacauggaccggcagggcaagacgccgcuggggcugguggaccucuucguguucagcaccuccuucuaccugaucagcaucuuccugcaccucguccgcauccccacccaccggcacgugaucggcaagcccugccccaagccgcaccgccugaaccacauggggaucugcuccugcggccuguacaagcaccccggggugcccgucaaguggaagcgguga

SEQ ID NO: 29810 - RNA, 1473 nt, Artificial Sequence
  derived and/or modified CDS sequence (opt1) from LASV(Lassa virus/H.sapiens-wt/NGA/2018/ISTH_0959;Clade II)__AVV65099__GPCmut6
augggccagaucaucaccuucuuccaggaggugccccacgucaucgaggaggugaugaacaucgugcugaucgcccucagccugcuggccauccucaaggggaucuacaacgucgugaccugcggccuguucgggcugguguccuuccuccugcugugcggccgcagcugcuccacgaccuacaagggggucuacgagcuccagacccuggagcuggacauggcgagccucaacaugugcaugccgcuguccugcaccaagaacaacagccaccacuacaucauggugggcaacgagacgggccuggagcucacccugaccaacaccuccaucaucaaccacaaguucugcaaccugagcgacgcccacaagaagaaccucuacgaccacgcccugauguccaucaucagcacguuccaccuguccauccccaacuucaaccaguacgaggccaugagcugcgacuucaacgggggcaagaucuccgugcaguacaaccucagccacgccuacgcgaucgacgccgccaaccacugcgggaccaucgccaacggcguccugcagaccuucaugcggauggcguggggcggguccuacaucgcccuggacagcggcaagggguccugggacugcaucaugaccagcuaccaguaccucaucauccagaacacgaccugggaggaccacugccaguucucccgccccagccccaucggcuaccuggggcugcucagccagcggacccgcgacaucuacaucucccggcgccugcugggcaccuucacguggacccucagcgacuccgagggcaacgagacccccgggggcuacugccugacccgguggaugcugaucgaggccgagcucaagugcuucgggaacacggccguggccaagugcaacgagaagcacgacgaggaguucugcgacaugcugcgccuguucgacuucugcaagcaggcgauccggcgccucaagaccccggcccagaugagcauccagcugaucaacaaggccgugaacgcccugaucaacgaccagcucaucaugaagaaccaccuccgggacaucaugggcauccccuacugcaacuacuccaaguacugguaccugaaccacaccgucaccgggaagacgagccugccccgcugcuggcugguguccaacggcagcuaccugaacgagacccacuucuccgacgacaucgagcagcaggccgacaacaugaucaccgagcuccugcagaaggaguacaucgaccggcagggcaagaccccgcuggggcugguggaccucuucgucuucagcacguccuucuaccugaucagcaucuuccugcaccucgugaagauccccacccaccgccacgugaucggcaagcccugccccaagccgcaccggcugaaccacauggggaucugcuccugcggccuguacaagcaccccgggguccccgugaaguggaagcgcuga

SEQ ID NO: 29811 - RNA, 1473 nt, Artificial Sequence
  derived and/or modified CDS sequence (opt1) from LASV(LASV003-NIG-2008;Clade II)__AIT17580__GPCmut6
augggccagaucaucaccuucuuccaggaggugccccacgucaucgaggaggugaugaacaucgugcugaucgcccucagccugcuggccauccucaaggggaucuacaacgucgcgaccugcggccuguucgggcugguguccuuccuccugcugugcggccgcagcugcuccacgaccuacaaggggguguacgagcuccagacccuggagcuggacauggccagccucaacaugugcaugccgcuguccugcaccaagaacaacagccaccacuacaucauggucggcaacgagacgggccuggagcucacccugaccaacaccuccaucaucaaccacaaguucugcaaccugagcgacgcccacaagaagaaccucuacgaccacgcccugauguccaucaucagcacguuccaccuguccauccccaacuucaaccaguacgaggccaugagcugcgacuucaacgggggcaagaucuccgugcaguacaaccucagccacaccuacgcgguggacgccgccaaccacugcgggaccaucgccaacggcguccugcagaccuucaugcggauggcguggggcggguccuacaucgcccuggacagcggcaagggguccugggacugcaucaugacgagcuaccaguaccucaucauccagaacaccaccugggaggaccacugccaguucucccgccccagccccaucggcuaccuggggcugcucagccagcggacccgcgacaucuacaucucccggcgccugcugggcacguucaccuggacccucagcgacuccgagagcaacgagaccccgggcggguacugccugacgcgguggaugcugaucgaggccgagcucaagugcuucggcaacaccgccguggccaagugcaacgagaagcacgacgaggaguucugcgacaugcugcgccuguucgacuucugcaagcaggcgauccggcgccucaaggcccccgcccagauguccauccagcugaucaacaaggccgugaacgcccugaucaacgaccagcucaucaugaagaaccaccuccgggacaucauggggauccccuacugcaacuacagcaaguacugguaccugaaccacaccgucaccggccgcacgucccugccccggugcuggcuggugagcaacggguccuaccugaacgagacccacuucagcgacgacaucgagcagcaggcggacaacaugaucaccgagcuccugcagaaggaguacauggaccgccagggcaagaccccgcugggccugguggaccucuucgucuucuccacgagcuucuaccugaucuccaucuuccugcaccucgugaagauccccacccaccggcacgugaucgggaagcccugccccaagccgcaccgccugaaccacaugggcaucugcagcugcgggcuguacaagcaccccggcguccccgugaaguggaagcgguga

SEQ ID NO: 29812 - RNA, 1473 nt, Artificial Sequence
  derived and/or modified CDS sequence (opt1) from LASV(LASV035-NIG-2009;Clade II)__AIT17588__GPCmut6
augggccagaucaucaccuucuuccaggaggugccccacgucaucgaggaggugaugaacaucgugcugaucgcccucagccugcuggccauccucaaggggaucuacaacgucgcgaccugcggccuguucgggcugguguccuuccuccugcugugcggccgcagcugcuccacgaccuacaaggggguguacgagcuccagacccuggagcuggacauggccagccucaacaugugcaugccgcuguccugcaccaagaacaacagccaccacuacaucauggucggcaacgagacgggccuggagcucacccugaccaacaccuccaucaucaaccacaaguucugcaaccugagcgacgcccacaagaagaaccucuacgaccacgcccugauguccaucaucagcacguuccaccuguccauccccaacuucaaccaguacgaggccaugagcugcgacuucaacgggggcaagaucuccgugcaguacaaccucagccacgcguacgccguggacgccgccaaccacugcgggaccaucgcgaacggcguccugcagaccuucaugcggauggccuggggcggguccuacaucgcccuggacagcggcaagggguccugggacugcaucaugaccagcuaccaguaccucaucauccagaacacgaccugggaggaccacugccaguucucccgccccagccccaucggcuaccuggggcugcucagccagcggacccgcgacaucuacaucucccggcgccugcugggcaccuucacguggacccucagcgacuccgagggcaacgagacccccgggggcuacugccugacccgguggaugcugaucgaggccgagcucaagugcuucgggaacacggccguggcgaagugcaacgagaagcacgacgaggaguucugcgacaugcugcgccuguucgacuucugcaagcaggccauccggcgccucaaggccccggcccagaugagcauccagcugaucaacaaggccgugaacgcgcugaucaacgaccagcucaucaugaagaaccaccuccgggacaucaugggcauccccuacugcaacuacuccaaguacugguaccugaaccacaccgucaccgggaagaccagccugccccgcugcuggcugguguccaacggcagcuaccugaacgagacgcacuucuccgacgacaucgagcagcaggccgacaacaugaucaccgagcuccugcagaaggaguacaucgaccggcagggcaagaccccgcuggggcugguggaccucuucgucuucagcaccuccuucuaccugaucagcaucuuccugcaccucgugaagauccccacgcaccgccacgugaucggcaagcccugccccaagccgcaccggcugaaccacauggggaucugcuccugcggccuguacaagcaccccgggguccccgugaaguggaagcgcuga

SEQ ID NO: 29813 - RNA, 1473 nt, Artificial Sequence
  derived and/or modified CDS sequence (opt1) from LASV(LASV1000-NIG-2009;Clade II)__AIT17782__GPCmut6
augggccagaucaucaccuucuuccaggaggugccccacgucaucgaggaggugaugaacaucgugcugaucgcccucagccugcuggccauccucaaggggaucuacaacgucgcgaccugcggccuguucgggcugguguccuuccuccugcugugcggccgcagcugcuccacgaccuacaaggggguguacgagcuccagacccuggagcuggacauggccagccucaacaugugcaugccgcuguccugcaccaagaacaacagccaccacuacaucauggucggcaacgagacgggccuggagcucacccugaccaacaccuccaucaucaaccacaaguucugcaaccugagcgacgcccacaagaagaaccucuacgaccacgcccugauguccaucaucagcacguuccaccuguccauccccaacuucaaccaguacgaggccaugagcugcgacuucaacgggggcaagaucuccgugcaguacaaccucagccacaccuacgcgguggacgccgccaaccacugcgggaccaucgccaacggcguccugcagaccuucaugcggauggcguggggcggguccuacaucgcccuggacagcggcaagggguccugggacugcaucaugacgagcuaccaguaccucaucauccagaacaccaccugggaggaccacugccaguucucccgccccagccccaucggcuaccuggggcugcucagccagcggacccgcgacaucuacaucucccggcgccugcugggcacguucaccuggacccucagcgacuccgagggcaacgagacccccgggggcuacugccugacgcgguggaugcugaucgaggccgagcucaagugcuucgggaacaccgccguggccaagugcaacgagaagcacgacgaggaguucugcgacaugcugcgccuguucgacuucugcaagcaggcgaucaagcggcucaagaccccggcccagaugagcauccagcugaucaacaaggccgugaacgcccugaucaacgaccagcucaucaugaagaaccaccuccgcgacaucaugggcauccccuacugcaacuacuccaaguacugguaccugaaccacaccgucacggggaagaccagccugccccggugcuggcugguguccaacggcagcuaccugaacgagacccacuucuccgacgacaucgagcagcaggccgacaacaugaucaccgagcuccugcagaaggaguacaucgaccgccagggcaagacgccgcuggggcugguggaccucuucgucuucagcaccuccuucuaccugaucagcaucuuccugcaccucgugaagauccccacccaccggcacguggucggcaagcccugccccaagccgcaccgccugaaccacauggggaucugcuccugcggccuguacaagcaccccggggugcccgugaaguggaagcgguga

SEQ ID NO: 29814 - RNA, 1473 nt, Artificial Sequence
  derived and/or modified CDS sequence (opt1) from LASV(LASV221-NIG-2010;Clade II)__AIT17624__GPCmut6
augggccagaucaucaccuucuuccaggaggugccccacgucaucgaggaggugaugaacaucgugcugaucgcccucagccugcuggccauccucaaggggaucuacaacgucgcgaccugcggccuguucgggcugguguccuuccuccugcugugcggccgcagcugcuccacgaccuacaaggggguguacgagcuccagacccuggagcuggacauggccagccucaacaugugcaugccgcuguccugcaccaagaacaacagccaccacuacaucauggucggcaacgagacgggccuggagcucacccugaccaacaccuccaucaucaaccacaaguucugcaaccugagcgacgcccacaagaagaaccucuacgaccacgcccugauguccaucaucagcacguuccaccuguccauccccaacuucaaccaguacgaggccaugagcugcgacuucaacgggggcaagaucuccgugcaguacaaccucagccacaccuacgcgaucgacgccgccaaccacugcgggaccaucgccaacggcgugcugcagaccuucaugcggauggcguggggcggguccuacaucgcccuggacagcggcaagggguccugggacugcaucaugacgagcuaccaguaccucaucauccagaacaccaccugggaggaccacugccaguucucccgccccagccccaucggcuaccuggggcugcucagccagcggacccgcgacaucuacaucucccggcgccugcugggcacguucaccuggacccucagcgacuccgagggcaacgagacccccgggggcuacugccugacgcgguggaugcugaucgaggccgagcucaagugcuucgggaacaccgccgucgccaagugcaacgagaagcacgacgaggaguucugcgacaugcugcgccuguucgacuucugcaagcaggcgauccggcgccucaagaccccggcccagaugagcauccagcugaucaacaaggccgugaacgcccugaucaacgaccagcucaucaugaagaaccaccuccgggacaucaugggcauccccuacugcaacuacuccaaguacugguaccugaaccacaccgugacggggaagaccagccugccccgcugcuggcuggucuccaacggcagcuaccugaacgagacccacuucuccgacgacaucgagcagcaggccgacaacaugaucaccgagaugcuccagaaggaguacauggaccggcagggcaagacgccgcuggggcugguggaccuguucguguucagcaccuccuucuaccucaucagcaucuuccugcaccuggucaagauccccacccaccgccacgugaucggcaagcccugccccaagccgcaccggcucaaccacauggggaucugcuccugcggccuguacaagcaccccggggugcccgucaaguggaagcgcuga

SEQ ID NO: 29815 - RNA, 1473 nt, Artificial Sequence
  derived and/or modified CDS sequence (opt1) from LASV(LASV237-NIG-2010;Clade II)__AIT17638__GPCmut6
augggccagaucaucaccuucuuccaggaggugccccacgucaucgaggaggugaugaacaucgugcugaucgcccucagccugcuggccauccucaaggggaucuacaacgucgcgaccugcggccuguucgggcugguguccuuccuccugcugugcggccgcagcugcuccacgaccuacaaggggguguacgagcuccagacccuggagcuggacauggccagccucaacaugugcaugccgcuguccugcaccaagaacaacagccaccacuacaucauggucggcaacgagacgggccuggagcucacccugaccaacaccuccaucaucaaccacaaguucugcaaccugagcgacgcccacaagaaggaccucuacgaccacgcccugauguccaucaucagcacguuccaccuguccauccccaacuucaaccaguacgaggccaugagcugcgacuucaacgggggcaagaucuccgugcaguacaaccucagccacaccuacgcgguggacgccgccaaccacugcgggaccaucgccaacggcguccugcagaccuucaugcggauggcguggggcggguccuacaucgcccuggacagcggcaagggguccugggacugcaucaugacgagcuaccaguaccucaucauccagaacaccaccugggaggaccacugccaguucucccgccccagccccaucggcuaccuggggcugcucagccagcggacccgcgacaucuacaucucccggcgccugcugggcacguucaccuggacccucagcgacuccgagggcaacgagacccccgggggcuacugccugacgcgguggaugcugaucgaggccgagcucaagugcuucgggaacaccgccguggccaagugcaacgagaagcacgacgaggaguucugcgacaugcugcgccuguucgacuucugcaagcaggcgauccggcgccucaagaccccggcccagaugagcauccagcugaucaacaaggccgugaacgcccugaucaacgaccagcucaucaugaagaaccaccuccgggacaucaugggcauccccuacugcaacuacuccaaguacugguaccugaaccacaccgucacggggaagaccagccugccccgcugcuggcugguguccaacggcagcuaccugaacgagacccacuucuccgacgacaucgagcagcaggccgacaacaugaucaccgagcuccugcagaaggaguacauggaccggcagggcaagacgccgcuggggcugguggaccucuucgucuucagcaccuccuucuaccugaucagcaucuuccugcaccucaucaagauccccacccaccgccacaucaccggcaagcccugccccaagccgcaccggcugaaccacauggggaucugcuccugcggccuguacaagcaccccggggugcccgugaaguggaagcgcuga

SEQ ID NO: 29816 - RNA, 1473 nt, Artificial Sequence
  derived and/or modified CDS sequence (opt1) from LASV(LASV253-NIG-2011;Clade II)__AIT17670__GPCmut6
augggccagaucaucaccuucuuccaggaggugccccacgucaucgaggaggugaugaacaucgugcugaucgcccucagccugcuggccauccucaaggggaucuacaacgucgcgaccugcggccuguucgggcugguguccuuccuccugcugugcggccgcagcugcuccacgaccuacaaggggguguacgagcuccagacccuggagcuggacauggccagccucaacaugugcaugccgcuguccugcaccaagaacaacagccaccacuacaucauggucggcaacgagacgggccuggagcucacccugaccaacaccuccaucaucaaccacaaguucugcaaccugagcgacgcccacaagaagaaccucuacgaccacgcccugauguccaucaucagcacguuccaccuguccauccccaacuucaaccaguacgaggccaugagcugcgacuucaacgggggcaagaucuccgugcaguacaaccucagccacaccuacgcgguggacgccgccaaccacugcgggaccaucgccaacggcguccugcagaccuucaugcggauggcguggggcggguccuacaucgcccuggacagcggcaagggguccugggacugcaucaugacgagcuaccaguaccucaucauccagaacaccaccugggaggaccacugccaguucucccgccccagccccaucggcuaccuggggcugcucagccagcggacccgcgacaucuacaucucccggcgccugcugggcacguucaccuggacccucagcgacuccgagggcaacgagacccccgggggcuacugccugacgcgguggaugcugaucgaggccgagcucaagugcuucgggaacaccgccguggccaagugcaacgagaagcacgacgaggaguucugcgacaugcugcgccuguucgacuucugcaagcaggcgauccggcgccucaaggccccggcccagaugagcauccagcugaucaacaaggccgugaacgcccugaucaacgaccagcucaucaugaagaaccaccuccgggacaucaugggcauccccuacugcaacuacuccaaguacugguaccugaaccacaccgucaccgggcgcacgagccugccccggugcuggcugguguccaacggcagcuaccugaacgagacccacuucuccgacgacaucgagcagcaggcggacaacaugaucaccgagcuccugcagaaggaguacaucgaccgccagggcaagaccccgcuggggcugguggaccucuucgucuucagcacguccuucuaccugaucagcaucuuccugcaccucgugaagauccccacccaccggcacaucaucggcaagcccugccccaagccgcaccgccugaaccacauggggaucugcuccugcggccuguacaagcaccccggggugcccgucaaguggaagcgguga

SEQ ID NO: 29817 - RNA, 1473 nt, Artificial Sequence
  derived and/or modified CDS sequence (opt1) from LASV(LASV254-NIG-2011;Clade II)__AIT17674__GPCmut6
augggccagaucaucaccuucuuccaggaggugccccacgucaucgaggaggugaugaacaucgugcugaucgcccucagccugcuggccauccucaaggggaucuacaacgucgcgaccugcggccuguucgggcugguguccuuccuccugcugugcggccgcagcugcuccacgaccuacaaggggguguacgagcuccagacccuggagcuggacaugaccaaccucaacaugugcaugccgcugagcugcacgaagaacaacucccaccacuacaucauggucggcaacgagaccggccuggagcucacccugaccaacacgagcaucaucaaccacaaguucugcaaccuguccgacgcccacaagaagaaccucuacaaccacgcccugaugagcaucaucuccaccuuccaccugagcauccccaacuucaaccaguacgaggccauguccugcgacuucaacgggggcaagaucagcgugcaguacaaccucucccacagcuacgccguggacgcggccaaccacugcgggaccaucgccaacggcguccugcagaccuucaugcggauggccuggggcggguccuacaucgcgcuggacagcggcaaggggaacugggacugcaucaugacguccuaccaguaccucaucauccagaacaccaccugggaggaccacugccaguucagccgccccucccccaucggcuaccuggggcugcucagccagcggacccgcgacaucuacaucagccggcgccugcugggcacguucaccuggacccucuccgacagcgagggcaacgagacccccgggggcuacugccugacgcgguggaugcugaucgaggccgagcucaagugcuucgggaacaccgccguggccaagugcaacgagaagcacgacgaggaguucugcgacaugcugcgccuguucgacuucugcaagcaggccauccggcgccucaagaccccggcgcaggccaacauccagcugaucaacaaggccgugaacgcccugaucaacgaccagcucaucaugaagaaccaccuccgggacaucaugggcauccccuacugcaacuacuccaaguacugguaccugaaccacaccgucacggggaagaccagccugccccgcugcuggcugguguccaacggcagcuaccugaacgagacccacuucuccgacgacaucgagcagcaggccgacaacaugaucaccgagcuccugcagaaggaguacauggaccggcagggcaagacgccgcuggggcugguggaccucuucgucuucagcaccuccuucuaccugaucagcaucuuccugcaccucgugaagauccccacccaccgccacgugaucggcaagcccugccccaagccgcaccggcugaaccacauggggaucugcuccugcggccuguacaagcaccccgggguccccgugaaguggaagcgcuga

SEQ ID NO: 29818 - RNA, 1473 nt, Artificial Sequence
  derived and/or modified CDS sequence (opt1) from LASV(Nig08-A19;Clade III)__ADU56618__GPCmut6
augggccagaucgugaccuucuuccaggaggucccccacgugaucgaggaggugaugaacaucguccugaucgcccucagcauccuggccauccugaaggggcucuacaacaucgcgaccugcggccugaucgggcuggugacguuccuccugcuguccggccgcagcugcuccaugaccuacaaggggguguacgagcuccagacccuggagcugaacaugaacacccucaacaugugcaugccgcugagcugcacgaagaacaacucccaccacuacaucauggucggcaacgagaccggccuggagcucacccugaccaacacgagccugcuccaccacaaguucugcaaccuguccgacgcccacaagaagaaccuguacgaccacacccucaugagcaucaucuccaccuuccaccugagcauccccaacuucaaccaguacgaggccauguccugcgacuucaacgggggcaagaucaccgugcaguacaaccugagccacuccuacgccaucgacgccgcgaaccacugcgggacgguggccaacggcguccuccagaccuucaugcggauggccuggggcgggagcuacaucgcccuggacuccggccgcgggaagugggacugcaucaugaccagcuaccaguaccugaucauccagaacaccacgugggaggaccacugccaguucucccggcccagccccaucggcuaccucgggcugcugucccagcgcacccgggacaucuacaucagccgccggcuccugggcaccuucaccuggacgcugagcgacuccgagggcaacgagacccccgggggcuacugccucacccgcuggaugcugaucgaggcggagcugaagugcuucgggaacaccgccguggccaagugcaacgagaagcacgacgaggaguucugcgacaugcuccggcuguucgacuucugcaagcaggccauccgccggcugaaggccccggcgcagaugagcauccagcucaucaacaaggccgugaacgcccugaucaacgaccagcugaucaugaagaaccaccuccgcgacaucaugggcauccccuacugcaacuacuccaaguacugguaccugaaccacacgagcaccgggcggaccucccugccccgcugcuggcucgucagcaacggcuccuaccugaacgagacccacuucagcgacgacaucgagcagcaggccgacaacaugaucacggagaugcugcagaaggaguaccuggaccggcagggcaagaccccgcucgggcugguggaccuguucguguucuccaccagcuucuaccucaucuccaucuuccugcaccuggucaagauccccacccaccgccacaucgugggcaagcccugccccaagccgcaccggcucaaccacauggggaucugcagcugcggccuguacaagcagcccggggugcccguccgcuggaagcgguga

SEQ ID NO: 29819 - RNA, 1476 nt, Artificial Sequence
  derived and/or modified CDS sequence (opt1) from LASV(G1180-SLE-2010;Clade IV)__AIT17168__GPCmut6
augggccagaucgugaccuucuuccaggaggucccccacgugaucgaggaggugaugaacaucguccugaucgcccucagcauccuggccgugcugaaggggcucuacaacuucgcgaccugcggccugguggggcugcucacguuccugcugcucugcggccgcuccugcaccgccagccgguacaagggggucuacgagcugcagacccuggagcucaacauggagacccugaacaugugcaugccgcuguccugcacgaagaacaacagccaccacuacaucauggugggcaacgagaccggccucgagcugacccugaccaacacguccaucaucaaccacaaguucugcaaccucagcgacgcccacaagaagaaccuguacgaccacgcccugauguccaucaucagcaccuuccaccucuccauccccaacuucaaccaguacgaggccaugagcugcgacuucaacgggggcaagaucuccgugcaguacaaccugagccacuccuacgcgggggacgccgccaaccacugcggcaccgucgccaacggggugcugcagaccuucaugcgcauggcguggggcggcagcuacaucgcccucgacuccgggcacggcagcugggacugcaucaugacguccuaccaguaccugaucauccagaacaccaccugggaggaccacugccaguucagccggcccucccccaucggguaccugggccuccugagccagcgcacccgggacaucuacaucagccgccggcugcucggcacguucaccuggacccuguccgacagcgaggggaaggacaccccgggcggguacugccugacgcgcuggaugcucaucgaggccgagcugaagugcuucggcaacaccgccguggccaagugcaacgagaagcacgacgaggaguucugcgacaugcugcggcuguucgacuucugcaagcaggcgauccagcgccugaaggcccccgcccagauguccauccagcugaucaacaaggccgucaacgcccucaucaacgaccagcugaucaugaagaaccaccuccgggacaucauggggauccccuacugcaacuacagcaaguacugguaccucaaccacaccaccacgggcaagaccucccugcccaagugcuggcuggugagcaacggcuccuaccucaacgagacccacuucagcgacgacaucgagcagcaggcggacaacaugaucaccgagaugcugcagaaggaguacauggagcgccaggggaagacgccgcugggccugguggaccucuucgucuucuccaccagcuucuaccugaucuccaucuuccugcaccucgugaagauccccacccaccggcacaucgugggcaagagcugccccaagccccaccgccugaaccacauggggaucugcuccugcgggcuguacaagcagccgggcguccccgugaaguggaagcgguga

SEQ ID NO: 29820 - RNA, 1476 nt, Artificial Sequence
  derived and/or modified CDS sequence (opt1) from LASV(G1442-SLE-2011;Clade IV)__AIT17180__GPCmut6
augggccagaucgugaccuucuuccaggaggucccccacgugaucgaggaggugaugaacaucguccugaucgcccucagcauccuggccgugcugaaggggcucuacaacguggcgaccugcggccugaucgggcuggucacguuccuccugcugugcggccgcuccugcaccaccacccucuacaaggggguguacgagcugcagacgcuggagcucaacauggagacccugaacaugugcaugccgcugagcugcaccaagaacaacucccaccacuacauccgggugggcaacgagaccggccucgagcugacgcugaccaacaccagcaucaucaaccacaaguucugcaaccucuccgacgcccacaagaagaaccuguacgaccacgcccugaugagcaucaucuccaccuuccaccucagcauccccaacuucaaccaguacgaggccauguccugcgacuucaacgggggcaagaucagcguccaguacaaccugucccacagcuacgccggggacgcggccaaccacugcggcacgguggccaacggggugcugcagaccuucaugcgcauggccuggggcggcuccuacaucgcgcucgacagcgggcggggcaacugggacugcaucaugaccuccuaccaguaccugaucauccagaacaccacgugggacgaccacugccaguucagccgccccucccccaucggguaccugggccuccugagccagcggacccgcgacgucuacaucucccggcgccugcucggcaccuucaccuggacgcugagcgacagcgaggggaaggacaccccgggcggguacugccugacccgguggaugcucaucgaggccgagcugaagugcuucggcaacaccgccguggccaagugcaacgagaagcacgacgaggaguucugcgacaugcugcgccucuucgacuucugcaagcaggccauccagcggcugaaggcgcccgcccagauguccauccagcugaucaacaaggccgugaacgcccucaucaacgaccagcugaucaugaagaaccaccuccgcgacaucauggggauccccuacugcaacuacagcaaguacugguaccugaacaacacggccaccggcaagaccucccugcccaagugcuggcugaucagcaacggcuccuaccucaacgagacccacuucagcgacgacaucgagcaggaggcggacaacaugaucacggagaugcugcagaaggaguacauggagcggcaggggaagaccccgcugggccuggucgaccucuucguguucuccaccagcuucuaccugaucuccaucuuccugcaccucgugaagauccccacccaccgccacaucgucggcaagagcugccccaagccccaccggcugaaccacauggggaucugcuccugcgggcuguacaagcagccgggcgugcccgugcgcuggaagcgguga

SEQ ID NO: 29821 - RNA, 1476 nt, Artificial Sequence
  derived and/or modified CDS sequence (opt1) from LASV(G3010-SLE-2013;Clade IV)__AIT17344__GPCmut6
augggccagaucgugaccuucuuccaggaggucccccacgugaucgaggaggugaugaacaucguccugaucgcccucagcauccuggccgugcugaaggggcucuacaacuucgcgaccugcggccugguggggcuggucacguuccuccugcugugcggccgcuccugcaccaccagccucuacaaggggguguacgagcugcagacccuggagcucaacauggagacgcugaacaugugcaugccgcuguccugcaccaagaacaacagccaccacuacaucauggugggcaacgagaccggccucgagcugacccugacgaacaccuccaucaucaaccacaaguucugcaaccucagcgacgcccacaagaagaaccuguacaaccacgcccugauguccaucaucagcaccuuccaccucuccauccccaacuucaaccaguacgaggccaugagcugcgacuucaacgggggcaagaucuccguccaguacaaccugagccacuccuacgccggggacgcggccagccacugcggcaccguggccaacggggugcugcagacguucaugcggauggccuggggcggcuccuacaucgcgcucgacagcggguacggcaagugggacugcaucaugaccuccuaccaguaccugaucauccagaacaccaccugggaggaccacugccaguucagccgccccucccccaucggguaccugggccuccugagccagcggacgcgcgacaucuacaucagccggcgccugcucggcaccuucaccuggacccuguccgacagcgaggggaaggacacgccgggcggguacugccugacccgguggaugcucaucgaggccgagcugaagugcuucggcaacaccgccgucgccaagugcaacgagaagcacgacgaggaguucugcgacaugcugcgccucuucgacuucugcaagcaggccauccagcggcugaagacccccgcgcagauguccauccagcugaucaacaaggccgugaacgcccucaucaacgaccagcugaucaugaagaaccaccuccgcgacaucauggggauccccuacugcaacuacagcaaguacugguaccugaaccacacgaccaccggcaagaccucccugcccaagugcuggcuggugagcaacggcuccuaccucaacgagacgcacuucagcgacgacaucgagcagcaggccgacaacaugaucaccgagaugcugcagaaggaguacauggagcggcaggggaagaccccgcugggccuggucgaccucuucguguucuccaccagcuucuaccugaucuccaucuuccugcaccucgugaagauccccacgcaccgccacaucgucggcaagagcugccccaagccccaccggcugaaccacauggggaucugcuccugcgggcuguacaagcagccgggcgugcccgugcgcuggaagcgguga

SEQ ID NO: 29822 - RNA, 1476 nt, Artificial Sequence
  derived and/or modified CDS sequence (opt1) from LASV(G502-SLE-2009;Clade IV)__AIT17126__GPCmut6
augggccagaucgugaccuucuuccaggaggucccccacgugaucgaggaggugaugaacaucguccugaucgcccucagcauccuggccgugcugaaggggcucuacaacuucgcgaccugcggccugguggggcugcucacguuccugcugcucugcggccgcuccugcaccaccgggcuguacaagggcgucuacgagcugcagacccucgagcugaacauggagacgcugaacaugugcaugccgcucagcugcaccaagaacaacucccaccacuacaucauggugggcaacgagaccgggcuggagcugacccucacgaacaccagcaucaucaaccacaaguucugcaaccuguccgacgcccacaagaagaaccuguacgaccacgcccucaugagcaucaucuccaccuuccaccugagcauccccaacuucaaccaguacgaggccauguccugcgacuucaacggcgggaagaucagcgugcaguacaaccugucccacagcuacgccggcgacgcggccgaccacugcgggaccgucgccaacggcgugcuccagacguucaugcggauggccuggggcggguccuacaucgcgcuggacagcggccgcgggcggugggacugcaucaugaccuccuaccaguaccugaucauccagaacaccaccugggaggaccacugccaguucagccgccccucccccaucggcuaccucggccugcugagccagcggacgcgcgacaucuacaucucccggcgccuccuggggaccuucaccuggacccugagcgacagcgagggcaaggacacgcccgggggcuacugccucacccgguggaugcugaucgaggccgagcugaagugcuucgggaacaccgccguggccaagugcaacgagaagcacgacgaggaguucugcgacaugcuccgccuguucgacuucugcaagcaggccauccagcggcugaaggcgccggcccagauguccauccagcucaucaacaaggccgucaacgcccugaucaacgaccagcuggugaugaagaaccaccuccgcgacaucaugggcauccccuacugcaacuacagccgguacugguaccugaaccacaccacgaccggccgcaccucccugcccaagugcuggcucgugagcaacggguccuaccugaacgagacccacuucagcgacgacaucgagcagcaggccgacaacaugaucacggagaugcugcagaaggaguacauggagcggcagggcaagaccccgcuggggcucgucgaccuguucguguucuccaccagcuucuaccugaucuccaucuuccuccaccuggugaagauccccacccaccgccacaucgucggcaagagcugccccaagccccaccggcugaaccacauggggaucugcuccugcggccucuacaagcagccgggcgugcccgugaaguggaagcgcuga

SEQ ID NO: 29823 - RNA, 1476 nt, Artificial Sequence
  derived and/or modified CDS sequence (opt1) from LASV(G733-SLE-2010;Clade IV)__AIT17154__GPCmut6
augggccagaucgugaccuucuuccaggaggucccccacgugaucgaggaggugaugaacaucguccugaucgcccucagcauccuggccgugcugaaggggcucuacaacuucgcgaccugcggcaucguggggcuggucuccuuccugcuccugugcggccgcagcugcacgaccucccuguacaaggggguguacgagcuccagacccuggagcugaacauggagacccucaacaugugcaugccgcugagcugcacgaagaacaacucccaccacuacaucauggugggcaacgagaccggccuggagcucacccugaccaacacgagcaucaucaaccacaaguucugcaaccuguccgacgcccacaagaagaaccucuacgaccacgcccugaugagcaucaucuccaccuuccaccugagcauccccaacuucaaccaguacgaggccauguccugcgacuucaacgggggcaagaucagcguccaguacaaccucucccacagcuacgccggggacgcggccaaccacugcggcaccaucgccaacggggugcugcagaccuucaugcggauggccuggggcggcuccuacaucgcgcuggacagcgggcgcgaccggugggacugcaucaugacguccuaccaguaccucaucauccagaacaccaccugggaggaccacugccaguucagccgccccucccccaucggcuaccuggggcugcucagccagcggacccgcgacaucuacaucagccggcgccugcugggcacguucaccuggacccucuccgacagcgagggcaaggacacccccgggggcuacugccugacgcgguggaugcugaucgaggccgagcucaagugcuucgggaacaccgccguggccaagugcaacgagaagcacgacgaggaguucugcgacaugcugcgccuguucgacuucugcaagcaggccauccagcggcucaaggcgccggcccagauguccauccagcugaucaacaaggccgucaacgcccugaucaacgaccagcucaucaugaagaaccaccuccgcgacaucaugggcauccccuacugcaacuacagcaaguacugguaccugaaccacaccaccacggggaagaccucccugcccaagugcuggcuggugagcaacggcuccuaccugaacgagacccacuucagcgacgacaucgagcagcaggccgacaacaugaucaccgagaugcuccagaaggaguacauggagcggcagggcaagacgccgcuggggcugguggaccuguucgucuucuccaccagcuucuaccucaucuccaucuuccugcaccuggugaagauccccacccaccgccacguggucggcaagagcugccccaagccccaccggcucaaccacauggggaucugcuccugcggccuguacgggcagccgggcgugcccgugaaguggaagcgcuga

SEQ ID NO: 29824 - RNA, 1476 nt, Artificial Sequence
  derived and/or modified CDS sequence (opt1) from MOPV/LASV reassortant(IGS-1;Clade IV)__AFY05576__GPCmut6
augggccagaucgugaccuucuuccaggaggucccccacgugaucgaggaggugaugaacaucguccugaucgcccucagcgugcuggccgugcugaaggggcucuacaacuucgcgaccugcggccuggucgggcuggugacguuccuccugcugugcggccgcuccugcaccaccagccucuacaaggggguguacgagcugcagacccuggagcucaacauggagacgcugaacaugugcaugccgcuguccugcaccaagaacaacagccaccacuacaucauggucggcaacgagaccggccucgagcugacccugacgaacaccuccaucaucaaccacaaguucugcaaccucagcgacgcccacaagaagaaccuguacgaccacgcccugauguccaucaucagcaccuuccaccucuccauccccaacuucaaccaguacgaggccaugagcugcgacuucaacgggggcaagaucuccgugcaguacaaccugagccacuccuacgccggggacgcggccaaccacugcggcaccguggccaacgggguccugcagacguucaugcggauggccuggggcggcagcuacaucgcgcucgacuccgggcgcggcaacugggacugcaucaugaccagcuaccaguaccugaucauccagaacaccaccugggaggaccacugccaguucucccggcccagccccaucggguaccugggccuccugucccagcgcacgcgggacaucuacaucagccgccggcugcucggcaccuucaccuggacccugagcgacuccgagggggaggacacgccgggcggguacugccugacccgcuggaugcucaucgaggccgagcugaagugcuucggcaacaccgccguggccaagugcaacgagaagcacgacgaggaguucugcgacaugcugcggcuguucgacuucugcaagcaggccauccagcgccugaaggcgcccgcccagaugagcauccagcugaucaacaaggccgugaacgcccucaucaacgaccagcugaucaugaagaaccaccuccgggacaucauggggauccccuacugcaacuacuccaaguacugguaccucaaccacaccacgaccggccgcaccagccugcccaagugcuggcuggucuccaacggcagcuaccucaacgagacccacuucuccgacgacaucgagcagcaggccgacaacaugaucacggagaugcugcagaaggaguacauggagcggcaggggaagaccccgcugggccugguggaccucuucguguucagcaccuccuucuaccugaucagcaucuuccugcaccucgucaagauccccacccaccgccacaucguggggaaguccugccccaagccccaccggcugaaccacaugggcaucugcagcugcgggcuguacaagcagccgggcgugcccgucaaguggaagcgcuga

SEQ ID NO: 29825 - RNA, 1476 nt, Artificial Sequence
  derived and/or modified CDS sequence (opt1) from LASV(LM765-SLE-2012;Clade IV)__AIT17814__GPCmut6
augggccagaucgugaccuucuuccaggaggucccccacgugaucgaggaggugaugaacaucguccugaucgcccucagcauccuggccgugcugaaggggcucuacaacuucgcgaccugcggccugguggggcuggucacguuccuccugcugugcggccgcuccugcaccaccagccucuacaaggggguguacgagcugcagacccuggagcucaacauggagacgcugaacaugugcaugccgcuguccugcaccaagaacaacagccaccacuacaucauggugggcaacgagaccggccucgagcugacccugacgaacaccuccaucaucgaccacaaguucugcaaccucagcgacgcccaccggaagaaccuguacgaccacgcccugauguccaucaucagcaccuuccaccucuccauccccaacuucaaccaguacgaggccaugagcugcgacuucaacgggggcaagaucuccguccaguacaaccugagccacuccuacgccaaggacgcggccgaccacugcgggaccguggccaacggcgugcugcagacguucaugcgcauggccuggggcgggagcuacaucgcgcucgacuccggccgggggcgcugggacugcaucaugaccagcuaccaguaccugaucauccagaacaccaccugggaggaccacugccaguucucccggcccagccccaucggcuaccuggggcuccugucccagcgcacgcgggacaucuacaucagccgccggcugcucggcaccuucaccuggacccugagcgacuccgagggcaaggacacgcccgggggcuacugccugacccgcuggaugcucaucgaggccgagcugaagugcuucgggaacaccgccgucgccaagugcaacgagaagcacgacgaggaguucugcgacaugcugcggcuguucgacuucugcaagcaggccauccagcgccugaaggcgccggcccagaugagcauccagcugaucaacaaggccgugaacgcccucaucaacgaccagcugaucaugaagaaccaccuccgggacaucaugggcauccccuacugcaacuacuccaaguacugguaccucaaccacaccacgaccgggaagaccagccugcccaagugcuggcugguguccaacggcagcuaccucaacgagacccacuucuccgacgacaucgagcagcaggccgacaacaugaucacggagaugcugcagaaggaguacauggagcgccagggcaagaccccgcuggggcuggucgaccucuucguguucagcaccuccuucuaccugaucagcaucuuccugcaccucgugaagauccccacccaccggcacaucgucggcaagcccugccccaagccgcaccgccugaaccacauggggaucugcuccugcggccuguacaagcagcccggggugcccgugaaguggaagcgguga

SEQ ID NO: 29826 - RNA, 1476 nt, Artificial Sequence
  derived and/or modified CDS sequence (opt1) from LASV(LM776-SLE-2012;Clade IV)__AIT17824__GPCmut6
augggccagaucgugaccuucuuccaggaggucccccacgugaucgaggaggugaugaacaucguccugaucgcccucagcauccuggccgugcugaaggggcucuacaacuucgcgaccugcggccugguggggcuggucacguuccuccugcugugcggccgcuccugcaccaccagcguguacaaggggguguacgagcuccagacccuggagcugaacauggagacgcucaacaugugcaugccgcuguccugcaccaagaacaacagccaccacuacaucauggucggcaacgagaccggccuggagcucacccugacgaacaccuccaucaucaaccacaaguucugcaaccugagcgacgcccacaagaagaaccucuacgaccacgcccugauguccaucaucagcaccuuccaccuguccauccccaacuucaaccaguacgaggccaugagcugcgacuucaacgggggcaagaucuccgugcaguacaaccucagccacuccuacgccggggacgcggccaaccacugcggcaccguggccaacgggguccugcagacguucaugcggauggccuggggcggcagcuacaucgcgcuggacuccgggcacggcaagugggacugcaucaugaccagcuaccaguaccucaucauccagaacaccaccugggaggaccacugccaguucucccgccccagccccaucggguaccugggccugcucucccagcggacgcgcgacaucuacaucagccggcgccugcugggcaccuucaccuggacccucagcgacuccgaggggaaggacacgccgggcggguacugccugacccgguggaugcugaucgaggccgagcucaagugcuucggcaacaccgccguggccaagugcaacgagaagcacgacgaggaguucugcgacaugcugcgccuguucgacuucugcaagcaggccauccagcggcucaaggcgcccgcccagaugagcauccagcugaucaacaaggccgugaacgcccugaucaacgaccagcucaucaugaagaaccaccuccgcgacaucauggggauccccuacugcaacuacuccaaguacugguaccugaaccacaccacgaccggcaagaccagccugcccaagugcuggcuggucuccaacggcagcuaccugaacgagacccacuucuccgacgacaucgagcagcaggccgacaacaugaucacggagaugcuccagaaggaguacauggagcggcaggggaagaccccgcugggccugguggaccuguucguguucagcaccuccuucuaccucaucagcaucuuccugcaccuggucaagauccccacccaccgccacaucguggggaaguccugccccaagccccaccggcucaaccacaugggcaucugcagcugcgggcuguacaagcagccgggcgugcccguccgcuggaagcgguga

SEQ ID NO: 29827 - RNA, 1476 nt, Artificial Sequence
  derived and/or modified CDS sequence (opt1) from LASV(Mad39;Clade IV)__ANH09722__GPCmut6
augggccagaucgugaccuucuuccaggaggucccccacgugaucgaggaggugaugaacaucguccugaucgcccucagcauccuggccgugcugaaggggcucuacaacguggcgaccugcggccugaucgggcuggucacguuccuccugcugugcggccgcuccugcaccaccacccucuacaaggggguguacgagcugcaggcccuggagcucaacauggagacgcugaacaugugcaugccgcugagcugcaccaagaacaacucccaccacuacauccgggugggcaacgagaccggccucgagcugacccugacgaacaccagccucaucaaccacaaguucugcaaccuguccgacgcccacaagaagaaccuguacgaccacgcccucaugagcaucaucuccaccuuccaccugagcauccccaacuucaaccaguacgaggccauguccugcgacuucaacgacgggaagaucagcguccaguacaaccugucccacaccuacgcgggcgacacggccaaccacugcgggaccguggccaacggcgugcuccagaccuucaugcgcauggccuggggcgggagcuacaucgcgcuggacuccggccgcgggggcugggacugcaucaugaccagcuaccaguaccugaucauccagaacacgaccugggaggaccacugccaguucucccggcccagccccaucggguaccucggccugcugucccagcggacccgcgacaucuacaucagccggcgccuccugggcaccuucacguggacccuguccgacagcgaggggaaggacaccccgggcggguacugccucacccgguggaugcugaucgaggccgagcugaagugcuucggcaacacggccgucgccaagugcaacgagaagcacgacgaggaguucugcgacaugcuccgccuguucgacuucugcaagcaggccauccagcggcugaaggcgcccgcccagaugagcauccagcucaucaacaaggccgugaacgcccugaucaacgaccagcugaucaugaagaaccaccuccgcgacaucauggggauccccuacugcaacuacuccaaguacugguaccugaaccacaccgugaccggcaagaccagccugcccaagugcuggcucgucuccaacggcagcuaccugaacgagacgcacuucuccgacgacaucgagcagcaggccgacaacaugaucaccgagaugcugcagaaggaguacauggagcggcaggggaagaccccgcugggccucguggaccuguucguguucagcaccuccuucuaccugaucagcaucuuccuccaccuggucaagauccccacgcaccgccacgugguggggaagcccugccccaagccgcaccggcugaaccacaugggcaucugcuccugcggguucuacaagcagcccggcguccccgugcgcuggaagcgguga

SEQ ID NO: 29828 - RNA, 1476 nt, Artificial Sequence
  derived and/or modified CDS sequence (opt1) from LASV(Z0947-SLE-2011;Clade IV)__AIT17840__GPCmut6
augggccagaucgugaccuucuuccaggaggucccccacgugaucgaggaggugaugaacaucguccugaucgcccucagcauccuggccgugcugaaggggcucuacaacuucgcgaccugcggccugguggggcuggucacguuccuccugcugugcggccgcuccugcaccaucagccucuacaaggggguguacgagcugcagacccuggagcucaacauggagacccugaacaugugcaugccgcuguccugcacgaagaacaacagccaccacuacaucauggugggcaacgagaccggccucgagcugacccugaccaacacguccaucaucaaccacaaguucugcaaccucagcgacgcccacaagaagaaccuguacgaccacgcccugauguccaucaucagcaccuuccaccucuccauccccaacuucaaccaguacgaggccaugagcugcgacuucaacgggggcaagaucuccguccaguacaaccugagccacuccuacgccggggacgcggccaaccacugcggcaccguggccaacggggugcugcagaccuucaugcggauggccuggggcggcagcuacaucgcgcucgacuccgggcgcgaccggugggacugcaucaugacgagcuaccaguaccugaucauccagaacaccaccugggaggaccacugccaguucucccgccccagccccaucggcuaccuggggcuccugucccagcggacccgcgacaucuacaucagccggcgccugcucggcacguucaccuggacccugagcgacuccgagggcaaggacacccccgggggcuacugccugacgcgguggaugcucaucgaggccgagcugaagugcuucgggaacaccgccgucgccaagugcaacgagaagcacgacgaggaguucugcgacaugcugcgccucuucgacuucugcaagcaggccauccagcggcugaaggcgccggcccagaugagcauccagcugaucaacaaggccgugaacgcccucaucaacgaccagcugaucaugaagaaccaccuccgcgacaucaugggcauccccuacugcaacuacuccaaguacugguaccugaaccacaccaccacggggaagaccagccugcccaagugcuggcugguguccaacggcagcuaccucaacgagacccacuucuccgacgacaucgagcagcaggccgacaacaugaucaccgagaugcugcagaaggaguacauggagcggcagggcaagacgccgcuggggcuggucgaccucuucguguucagcaccuccuucuaccugaucagcaucuuccugcaccucgugaagauccccacccaccgccacaucgucggcaagcccugccccaagccgcaccggcugaaccacauggggaucugcuccugcggccuguacaagcagcccggggugcccgugaaguggaagcgcuga

SEQ ID NO: 29829 - RNA, 1476 nt, Artificial Sequence
  derived and/or modified CDS sequence (opt4) from LASV(Josiah;Clade IV)__NP_694870__GPCmut6
augggccagaucgugaccuucuuccaggaggugccccacgugaucgaggaggugaugaacaucgugcugaucgcccugagcgugcuggccgugcugaagggccuguacaacuucgccaccugcggccuggugggccuggugaccuuccugcugcugugcggcagaagcugcaccaccagccuguacaagggcguguacgagcugcagacccuggagcugaacauggagacccugaacaugugcaugccccugagcugcaccaagaacaacagccaccacuacaucauggugggcaacgagaccggccuggagcugacccugaccaacaccagcaucaucaaccacaaguucugcaaccugagcgacgcccacaagaagaaccuguacgaccacgcccugaugagcaucaucagcaccuuccaccugagcauccccaacuucaaccaguacgaggccaugagcugcgacuucaacggcggcaagaucagcgugcaguacaaccugagccacagcuacgccggcgacgccgccaaccacugcggcaccguggccaacggcgugcugcagaccuucaugagaauggccuggggcggcagcuacaucgcccuggacagcggcagaggcaacugggacugcaucaugaccagcuaccaguaccugaucauccagaacaccaccugggaggaccacugccaguucagcagacccagccccaucggcuaccugggccugcugagccagagaaccagagacaucuacaucagcagaagacugcugggcaccuucaccuggacccugagcgacagcgagggcaaggacacccccggcggcuacugccugaccagauggaugcugaucgaggccgagcugaagugcuucggcaacaccgccguggccaagugcaacgagaagcacgacgaggaguucugcgacaugcugagacuguucgacuucugcaagcaggccauccagagacugaaggcccccgcccagaugagcauccagcugaucaacaaggccgugaacgcccugaucaacgaccagcugaucaugaagaaccaccugagagacaucaugggcauccccuacugcaacuacagcaaguacugguaccugaaccacaccaccaccggcagaaccagccugcccaagugcuggcuggugagcaacggcagcuaccugaacgagacccacuucagcgacgacaucgagcagcaggccgacaacaugaucaccgagaugcugcagaaggaguacauggagagacagggcaagaccccccugggccugguggaccuguucguguucagcaccagcuucuaccugaucagcaucuuccugcaccuggugaagauccccacccacagacacaucgugggcaagagcugccccaagccccacagacugaaccacaugggcaucugcagcugcggccuguacaagcagcccggcgugcccgugaaguggaagagauga

SEQ ID NO: 29830 - RNA, 1473 nt, Artificial Sequence
  derived and/or modified CDS sequence (opt4) from LASV(LP;Clade I)__AAF86701__GPCmut6
augggccagaucaucaccuucuuccaggaggugccccacgugaucgaggaggugaugaacaucgugcugaucgcccugagccugcuggccauccugaagggccuguacaacaucgccaccugcggcaucaucggccugguggccuuccuguuccugugcggcaagagcugcagccugacccugaagggcggcuacgagcugcagacccuggagcugaacauggagacccugaacaugugcaugccccugagcugcaccaagaacagcagccaccacuacaucagagugggcaacgagaccggccuggagcugacccugaccaacaccagcaucaucaaccacaaguucugcaaccugagcgacgcccacaagaagaaccuguacgaccacgcccugaugagcaucaucagcaccuuccaccugagcauccccaacuucaaccaguacgaggccaugagcugcgacuucaacggcggcaagaucagcgugcaguacaaccugagccacagcuacgccggcgacgccgccgagcacugcggcaccguggccaacggcgugcugcagaccuucaugagaauggccuggggcggcagauacaucgcccuggacagcggcaagggcaacugggacugcaucaugaccagcuaccaguaccugaucauccagaacaccaccugggaggaccacugccaguucagcagacccagccccaucggcuaccugggccugcugagccagagaaccagagacaucuacaucagcagaagacugcugggcaccuucaccuggacccugagcgacagcgagggcaacgagacccccggcggcuacugccugaccagauggaugcugaucgaggccgagcugaagugcuucggcaacaccgccguggccaagugcaacgagaagcacgacgaggaguucugcgacaugcugagacuguucgacuucugcaagcaggccaucagaagacugaaggcccccgcccagaugagcauccagcugaucaacaaggccgugaacgcccugaucaacgaccagcugaucaugaagaaccaccugagagacaucaugggcauccccuacugcaacuacagcaaguacugguaccugaaccacaccagcagcggcagaaccagccugcccaagugcuggcugaucagcaacggcagcuaccugaacgagacccaguucagcgacgacaucgagcagcaggccgacaacaugaucaccgagaugcugcagaaggaguacaucgagagacagggcaagaccccccugggccugguggacaucuucaucuucagcaccagcuucuaccugaucagcaucuuccugcaccugaucaagauccccacccacagacacaucgugggcaagcccugccccaagccccacagacugaaccacaugggcgugugcagcugcggccuguacaagcaccccggcgugcccaccaaguggaagagauga

SEQ ID NO: 29831 - RNA, 1473 nt, Artificial Sequence
  derived and/or modified CDS sequence (opt4) from LASV(803213;Clade II)__AAF86703__GPCmut6
augggccagaucaucaccuucuuccaggaggugccccacgugaucgaggaggugaugaacaucgugcugaucgcccugagccugcuggccauccugaagggcaucuacaacguggccaccugcggccuguucggccugaucagcuuccugcugcugugcggcagaagcugcagcgugaccuacaagggcguguacgagcugcagacccuggagcugaacauggccaaccugaacaugugcaugccccugagcugcaccaagaacaacagccaccacuacaucauggugggcaacgagaccggccuggagcugacccugaccaacaccagcaucaucaaccacaaguucugcaaccugagcgacgcccacaagaagaaccuguacgaccacgcccugaugagcaucaucagcaccuuccaccugagcauccccaacuucaaccaguacgaggccaugagcugcgacuucaacggcggcaagaucagcgugcaguacaaccugagccacagcuucgccguggacgccgccaaccacugcggcaccaucgccaacggcgugcugcagaccuucaugagaauggccuggggcggcagcuacaucgcccuggacagcggcaagggcaacugggacugcaucaugaccagcuaccaguaccugaucauccagaacaccaccugggaggaccacugccaguucagcagacccagccccaucggcuaccugggccugcugagccagagaaccagagacaucuacaucagcagaagacugcugggcaccuucaccuggacccugagcgacagcgagggcaacgaggcccccggcggcuacugccugaccagauggaugcugaucgaggccgagcugaagugcuucggcaacaccgccguggccaagugcaacgagaagcacgacgaggaguucugcgacaugcugagacuguucgacuucugcaagcaggccaucaagagacugaagacccccgcccagaugagcauccagcugaucaacaaggccgugaacgcccugaucaacgaccagcugaucaugaagaaccaccugagagacaucaugggcauccccuacugcaacuacagcagauacugguaccugaaccacaccgugaccggcaagaccagccugcccagaugcuggcuggugagcaacggcagcuaccugaacgagacccacuucagcgacgacaucgagcagcaggccgacaacaugaucaccgagaugcugcagaaggaguacauggacagacagggcaagaccccccugggccugguggaccuguucguguucagcaccagcuucuaccugaucagcaucuuccugcaccuggugaagauccccacccacagacacaucgugggcaagcccugccccaagccccacagacugaaccacaugggcaucugcagcugcggccuguacaagcaccccggcgugcccgugaaguggaagagauga

SEQ ID NO: 29832 - RNA, 1473 nt, Artificial Sequence
  derived and/or modified CDS sequence (opt4) from LASV(GA391;Clade III)__CAA36645__GPCmut6
augggccagaucgugaccuucuuccaggaggugccccacgugaucgaggaggugaugaacaucgugcugaucgcccugagcauccuggccauccugaagggccuguacaacguggccaccugcggccugaucggccuggugaccuuccugcugcugagcggcagaagcugcagccugaucuacaagggcaccuacgagcugcagacccuggagcugaacauggagacccugaacaugugcaugccccugagcugcaccaagaacaacagccaccacuacaucagagugggcaacgagaccggccuggagcugacccugaccaacaccagcauccugaaccacaaguucugcaaccugagcgacgcccacaagagaaaccuguacgaccacagccugaugagcaucaucagcaccuuccaccugagcauccccaacuucaaccaguacgaggccaugagcugcgacuucaacggcggcaagaucaccgugcaguacaaccugagccacagcuucgccguggacgccgccggccacugcggcacccuggccaacggcgugcugcagaccuucaugagaauggccuggggcggcagcuacaucgcccuggacagcggcagaggcaacugggacugcaucaugaccagcuaccaguaccugaucauccagaacaccaccugggacgaccacugccaguucagcagacccagccccaucggcuaccugggccugcugagccagagaaccagagacaucuacaucagcagaagacugcugggcaccuucaccuggacccugagcgacagcgagggcaacgagacccccggcggcuacugccugaccagauggaugcugaucgaggccgagcugaagugcuucggcaacaccgccguggccaagugcaacgagaagcacgacgaggaguucugcgacaugcugagacuguucgacuucugcaagcaggccaucagaagacugaagacccccgcccagaugagcauccagcugaucaacaaggccgugaacgcccugaucaacgaccagcugaucaugaagaaccaccugagagacaucaugggcauccccuacugcaacuacagcagauacugguaccugaaccacaccagcaccggcaagaccagccugcccagaugcuggcugaucagcaacggcagcuaccugaacgagaccaaguucagcgacgacaucgagcagcaggccgacaacaugaucaccgagaugcugcagaaggaguacaucgacagacagggcaagaccccccugggccugguggaccuguucguguucagcaccagcuucuaccugaucagcaucuuccugcaccuggugaagauccccacccacagacacaucgugggcaagcccugccccaagccccacagacugaaccacaugggcaucugcagcugcggccuguacaagcagcccggcgugcccgugagauggaagagauga

SEQ ID NO: 29833 - RNA, 1476 nt, Artificial Sequence
  derived and/or modified CDS sequence (opt4) from LASV(AV;Clade V)__CCA30314__GPCmut6
augggccagaucgugaccuucuuccaggaggugccccacgugaucgaggaggugaugaacaucgugcugaucgcccugagcauccuggccgugcugaagggccuguacaacaucgccaccugcggccugaucggccugaucaccuuccugcugcugugcggcagaagcugcagcagcaaccuguacaagggcguguacgagcugcagagccuggaccugaacauggagacccugaacaugugcaugccccugagcugcaccaagaacaacagccaccacuacaucagagugggcaacgacaccggccuggagcugacccugaccaacaccagcauccugaaccacaaguucugcaaccugagcgacgcccacaagaaggaccuguacgaccacgcccugaugagcaucaucagcaccuuccaccugagcauccccaacuucaaccaguacgaggccaugagcugcgacuucaacggcggcaagaucagcgugcaguacaaccugagccacagcuacgccaucgacgccgccaaccacugcggcaccguggccaacggcauccugcagaccuucaugagaauggccuggggcggcagcuacaucgcccuggacagcggcagaggcaacugggacugcaucaugaccagcuaccaguaccugaucauccagaacaccaccugggagaaccacugccaguucagcagacccagccccaucggcuaccugggccugcugagccagagaaccagagacaucuacaucagcagaagacugcugggcaccuucaccuggacccugagcgacagcgagggcaacgccacccccggcggcuacugccugaccagauggaugcugaucgaggccgagcugaagugcuucggcaacaccgccguggccaagugcaacgagaagcacgacgaggaguucugcgacaugcugagacuguucgacuucugcaagcaggccaucagcagacugaagagccccgcccagaugagcauccagcugaucaacaaggccgugaacgcccugaucaacgaccagcugaucaugaagaaccaccugagagacaucaugggcauccccuacugcaacuacagcaaguacugguaccugaaccacaccaucaccggcaagaccagccugcccaagugcuggcuggugagcaacggcagcuaccugaacgagacccacuucagcgacgacaucgagcagcaggccgacaacaugaucaccgagaugcugcagaaggaguacauggagagacagggcaagaccccccugggccugguggaccuguucguguucagcaccagcuucuaccugaucagcaucuuccugagacuggugaagauccccacccacagacacaucgugggcaagcccugccccaagccccacagacugaaccacaugggcaucugcagcugcggccuguacaagcagcccggcgugcccgugagauggaagagauga

SEQ ID NO: 29834 - RNA, 1473 nt, Artificial Sequence
  derived and/or modified CDS sequence (opt4) from LASV(Togo/2016/7082;Clade VI)__AMR44577__GPCmut6
augggccagaucaucaccuucuuccaggaggugccccacgugaucgaggaggugaugaacaucgugcugaucgcccugagccugcuggccauccugaagggcguguacaacguggccaccugcggcaucaucggccuggugaccuuccuguuccugugcggcagaagcugcagccugaucuacaagggcagcuacgagcugcagacccuggagcugaacauggagacccugaacaugugcaugccccugagcugcaccaagaacagcagccaccacuacaucagagugggcaacgagaccggccuggagcugacccugaccaacaccagcaucaucaaccacaaguucugcaaccugagcgacgcccacaagagaaaccuguacgaccacgcccugaugagcauccugagcaccuuccaccugagcauccccaacuucaaccaguacgaggccaugagcugcgacuucaacggcggcaagaucagcgugcaguacaaccugagccacgccuacgccguggacgccgccgagcacugcggcaccguggccaacggcgugcugcagaccuucaugagaauggccuggggcggcagcuacaucgcccuggacagcggcagaggcaacugggacugcaucaugaccagcuaccaguaccugaucauccagaacaccaccugggaggaccacugccaguucagcagacccagccccaucggcuaccugggccugcugagccagagaaccagagacaucuacaucagcagaagacugcugggcaccuucaccuggacccugagcgacagcgagggcaacgagacccccggcggcuacugccugaccagauggaugcugaucgaggccgagcugaagugcuucggcaacaccgccguggccaagugcaacgagaagcacgacgaggaguucugcgacaugcugagacuguucgacuucugcaagcaggccauccagagacugaagagccccgcccagaugagcauccagcugaucaacaaggccgugaacgcccugaucaacgaccagcugaucaugaagaaccaccugagagacaugaugggcauccccuacugcaacuacagcaaguacugguaccugaaccacaccagcagcggcagaaccagccugcccaagugcuggcuggugagcaacggcagcuaccugaacgagacccacuucagcgacgacaucgagcagcaggccgacaacaugaucaccgagaugcugcagaaggaguacaucgacagacagggcaagaccccccugggccugguggaccuguucguguucagcaccagcuucuaccugaucagcaucuuccugcaccugaucaagauccccacccacagacacaucgugggcaagcccugccccaagccccacagacugaaccacaugggcaucugcagcugcggccuguacaagcagcccggcgugcccaccagauggaagagauga

SEQ ID NO: 29835 - RNA, 1473 nt, Artificial Sequence
  derived and/or modified CDS sequence (opt4) from LASV(KAK-428;Clade n.d. (VII))__ANH09740__GPCmut6
augggccagaucgugaccuucuuccaggaggugccccacgugaucgaggaggugaugaacaucgugcugaucgcccugagccugcuggccauccugaagggccuguacaacuucgccaccugcggcgugaucggccugaucaccuuccugcugcugugcggcagaagcugcagcgccaccuacaagggccaguacgagcugcagacccuggagcugaacauggagagccugaacaugugcaugccccugagcugcaccaagaacaacagccaccacuacaucagagccggcaacaacaccggccuggagcugacccugaccaacaccagcaucaucagccacaaguucugcaaccugagcgacgcccacaagaagaaccuguacgaccacacccugaugagcaucaucaccaccuuccaccugagcauccccaacuucaaccaguacgaggccaugagcugcgacuucaacggcggcaagaucagcauccaguacaaccugagccacagcuacgccggcgacgccgcccagcacugcggcaccguggccaacggcgugcugcagaccuucaugagaauggccuggggcggcagcuaccuggcccuggacagcggcagaagaggcugggacugcaucaucagcagcuaccaguaccugaucauccagaacaccaccugggacgaccacugccaguucagcagacccagccccaucggcuaccugggcuucgugagccagaagaccagagacaucuacaucagcagaagacugcugggcaccuucaccuggacccugagcgacagcgagggccacgacaugcccggcggcuacugccugaccagauggaugcugaucgaggccgaccugaagugcuucggcaacaccgccguggccaagugcaacgagaagcacgacgaggaguucugcgacauguggagacuguucgacuucugcaagcaggccauccagagacugaaggcccccgcccagaugaacauccagcugaucaacaaggccgugaacgcccugaucaacgaccagcugaugaugaagaaccaccugagagacaucaugggcauccccuacugcaacuacagcaaguucugguaccugaacaacaccaccaccggcagaaccagccugcccagaugcuggcugaucagcaacggcagcuaccugaacgagacccacuucagcgacgacaucgagcagcaggccgacaacaugaucaccgagaugcugcagaaggaguacauggacagacagggcaagaccccccugggccugguggaccuguucguguucagcaccagcuucuaccugaucaccaucuuccugcaccuggugaagauccccacccacagacacaucgugggcaagcccugccccaagccccacagacugaaccacaugggcaucugcagcugcggccuguacaagcagcccggcgugcccgugagauggaagagauga

SEQ ID NO: 29836 - RNA, 1473 nt, Artificial Sequence; identical to SEQ ID NO: 29830
  derived and/or modified CDS sequence (opt4) from LASV(Pinneo-NIG-1969;Clade I)__AIT17836__GPCmut6

SEQ ID NO: 29837 - RNA, 1473 nt, Artificial Sequence
  derived and/or modified CDS sequence (opt4) from LASV(ISTH0009-NIG-2011;Clade II)__AIT17404__GPCmut6
augggccagaucaucaccuucuuccaggaggugccccacgugaucgaggaggugaugaacaucgugcugaucgcccugagccugcuggccauccugaagggcaucuacaacguggccaccugcggccuguucggccuggugagcuuccugcugcugugcggcagaagcugcagcaccaccuacaagggcguguacgagcugcagacccuggagcuggacauggccagccugaacaugugcaugccccugagcugcaccaagaacaacagccaccacuacaucauggugggcaacgagaccggccuggagcugacccugaccaacaccagcaucaucaaccacaaguucugcaaccugagcgacgcccacaagaagaaccuguacgaccacgcccugaugagcaucaucagcaccuuccaccugagcauccccaacuucaaccaguacgaggccaugagcugcgacuucaacggcggcaagaucagcgugcaguacaaccugagccacgccuacgccguggacgccgccaaccacugcggcaccaucgccaacggcgugcugcagaccuucaugagaauggccuggggcggcagcuacaucgcccuggacagcggcaagggcagcugggacugcaucaugaccagcuaccaguaccugaucauccagaacaccaccugggaggaccacugccaguucagcagacccagccccaucggcuaccugggccugcugagccagagaaccagagacaucuacaucagcagaagacugcugggcaccuucaccuggacccugagcgacagcgagggcaacgagacccccggcggcuacugccugaccagauggaugcugaucgaggccgagcugaagugcuucggcaacaccgccguggccaagugcaacgagaagcacgacgaggaguucugcgacaugcugagacuguucgacuucugcaagcaggccaucagaagacugaagacccccgcccagaugagcauccagcugaucaacaaggccgugaacgcccugaucaacgaccagcugaucaugaagaaccaccugagagacaucaugggcauccccuacugcaacuacagcaaguacugguaccugaaccacaccgugaccggcaagaccagccugcccagaugcuggcuggugagcaacggcagcuaccugaacgagacccacuucagcgacgacaucgagcagcaggccgacaacaugaucaccgagcugcugcagaaggaguacauggacagacagggcaagaccccccugggccugguggaccuguucguguucagcaccagcuucuaccugaucagcaucuuccugcaccugaucaagauccccacccacagacacaucaccggcaagcccugccccaagccccacagacugaaccacaugggcaucugcagcugcggccuguacaagcaccccggcgugcccgugaaguggaagagauga

SEQ ID NO: 29838 - RNA, 1473 nt, Artificial Sequence
  derived and/or modified CDS sequence (opt4) from LASV(ISTH2010-NIG-2012;Clade II)__AIT17482__GPCmut6
augggccagaucaucaccuucuuccaggaggugccccacgugaucgaggaggugaugaacaucgugcugaucgcccugagccugcuggccauccugaagggcaucuacaacguggccaccugcggccuguucggccuggugagcuuccugcugcugugcggcagaagcugcagcaccaccuacaagggcguguacgagcugcagacccuggagcuggacauggccagccugaacaugugcaugccccugagcugcaccaagaacaacagccaccacuacaucauggugggcaacgagaccggccuggagcugacccugaccaacaccagcaucaucaaccacaaguucugcaaccugagcgacgcccacaagaagaaccuguacgaccacgcccugaugagcaucaucagcaccuuccaccugagcauccccaacuucaaccaguacgaggccaugagcugcgacuucaacggcggcaagaucagcgugcaguacaaccugagccacgccuacgccguggacgccgccaaccacugcggcaccaucgccaacggcgugcugcagaccuucaugagaauggccuggggcggcagcuacaucgcccuggacagcggcaagggcagcugggacugcaucaugaccagcuaccaguaccugaucauccagaacaucaccugggaggaccacugccaguucagcagacccagccccaucggcuaccugggccugcugagccagagaaccagagacaucuacaucagcagaagacugcugggcaccuucaccuggacccugagcgacagcgagggcaacgagacccccggcggcuacugccugaccagauggaugcugaucgaggccgagcugaagugcuucggcaacaccgccguggccaagugcaacgagaagcacgacgaggaguucugcgacaugcugagacuguucgacuucugcaagcaggccaucagaagacugaagacccccgcccagaugagcauccagcugaucaacaaggccgugaacgcccugaucaacgaccagcugaucaugaagaaccaccugagagacaucaugggcauccccuacugcaacuacagcaaguacugguaccugaaccacaccgugaccggcaagaccagccugcccagaugcuggcuggugagcaacggcagcuaccugaacgagacccacuucagcgacgacaucgagcagcaggccgacaacaugaucaccgagcugcugcagaaggaguacaucgacagacagggcaagaccccccugggccugguggaccuguucguguucagcaccagcuucuaccugaucagcaucuuccugcaccuggugaagauccccacccacagacacguggugggcaagcccugccccaagccccacagacugaaccacaugggcaucugcagcugcggccuguacaagcaccccggcgugcccgugaaguggaagagauga

SEQ ID NO: 29839 - RNA, 1473 nt, Artificial Sequence
  derived and/or modified CDS sequence (opt4) from LASV(Lassa virus/H.sapiens-wt/NGA/2015/ISTH_0543;Clade II)__AVO03639__GPCmut6
augggccagaucaucaccuucuuccaggaggugccccacgugaucgaggaggugaugaacaucgugcugaucgcccugagccugcuggccauccugaagggcaucuacaacguggccaccugcggccuguucggccuggugagcuuccugcugcugugcggcagaagcugcagcaccaccuacaagggcguguacgagcugcagacccuggagcuggacauggccaaccugaacaugugcaugccccugagcugcaccaagaacaacagccaccacuacaucauggugggcaacgagaccggccuggagcugacccugaccaacaccagcaucaucaaccacaaguucugcaaccugagcgacgcccacaagaagaaccuguacgaccacgcccugaugagcaucaucagcaccuuccaccugagcauccccaacuucaaccaguacgaggccaugagcugcgacuucaacggcggcaagaucagcgugcaguacaaccugagccacaccuacgccguggacgccgccaaccacugcggcaccaucgccaacggcgugcugcagaccuucaugagaauggccuggggcggcagcuacaucgcccuggacagcggcaagggcagcugggacugcaucaugaccagcuaccaguaccuggugauccagaacaccaccugggaggaccacugccaguucagcagacccagccccaucggcuaccugggccugcugagccagagaaccagagacaucuacaucagcagaagacugcugggcaccuucaccuggacccugagcgacagcgagggcaacgagacccccggcggcuacugccugaccagauggaugcugaucgaggccgagcugaagugcuucggcaacaccgccguggccaagugcaacgagaagcacgacgaggaguucugcgacaugcugagacuguucgacuucugcaagcaggccaucagaagacugaagacccccgcccagaugagcauccagcugaucaacaaggccgugaacgcccugaucaacgaccagcugaucaugaagaaccaccugagagacaucaugggcauccccuacugcaacuacagcaaguacugguaccugaaccacaccgugaccggcaagaccagccugcccagaugcuggcuggugagcaacggcagcuaccugaacgagacccacuucagcgacgacaucgagcagcaggccgacaacaugaucaccgagcugcugcagaaggaguacaucgacagacagggcaagaccccccugggccugguggaccuguucguguucagcaccagcuucuaccugaucagcaucuuccugcaccuggugaagauccccacccacagacacaucaccggcaagcccugccccaagccccacagacugaaccacaugggcaucugcagcugcggccuguacaagcaccccggcgugcccgugaaguggaagagauga

SEQ ID NO: 29840 - RNA, 1473 nt, Artificial Sequence
  derived and/or modified CDS sequence (opt4) from LASV(Lassa virus/H.sapiens-wt/NGA/2016/ISTH_0009;Clade II)__AVO03571__GPCmut6
augggccagaucaucaccuucuuccaggaggugccccacgugaucgaggaggugaugaacaucgugcugaucgcccugagccugcuggccauccugaagggcaucuacaacguggccaccugcggccugcugggccuggugagcuuccugcugcugugcggcagaagcugcagcaccaccuacaagggcguguacgagcugcagacccuggagcuggacauggccagccugaacaugugcaugccccugagcugcaccaagaacaacagccaccacuacaucauggugggcaacgagaccggccuggagcugacccugaccaacaccagcaucaucaaccacaaguucugcaaccugagcgacgcccacaagaagaaccuguacgaccacgcccugaugagcaucaucagcaccuuccaccugagcauccccaacuucaaccaguacgaggccaugagcugcgacuucaacggcggcagaaucagcgugcaguacaaccugagccacagcuacgccguggacgccgccaaccacugcggcaccaucgccaacggcgugcugcagaccuucaugagaauggccuggggcggcagcuacaucgcccuggacagcggcaagggcagcugggacugcaucaugaccagcuaccaguaccugaucauccagaacaccaccugggaggaccacugccaguucagcagacccagccccaucggcuaccugggccugcugagccagagaaccagagacaucuacaucagcagaagacugcugggcaccuucaccuggacccugagcgacagcgagggcaacgagacccccggcggcuacugccugaccagauggaugcugaucgaggccgagcugaagugcuucggcaacaccgccguggccaagugcaacgagaagcacgacgaggaguucugcgacaugcugagacuguucgacuucugcaagcaggccaucagaagacugaagacccccgcccagaugagcauccagcugaucaacaaggccgugaacgcccugaucaacgaccagcugaucaugaagaaccaccugagagacaucaugggcauccccuacugcaacuacagcaaguacugguaccugaaccacaccgugaccggcaagaccagccugcccagaugcuggcuggugagcaacggcagcuaccugaacgagacccacuucagcgacgacaucgagcagcaggccgacaacaugaucaccgagcugcugcagaaggaguacaucgacagacagggcaagaccccccugggccugguggaccuguucguguucagcaccagcuucuaccugaucagcaucuuccugcaccuggugaagauccccacccacagacacaucaccggcaagcccugccccaagccccacagacugaaccacaugggcaucugcagcugcggccuguacaaccaccccggcgugcccgugaaguggaagagauga

SEQ ID NO: 29841 - RNA, 1473 nt, Artificial Sequence
  derived and/or modified CDS sequence (opt4) from LASV(Lassa virus/H.sapiens-wt/NGA/2016/ISTH_0017;Clade II)__AVO03567__GPCmut6
augggccagaucaucaccuucuuccaggaggugccccacgugaucgaggaggugaugaacaucgugcugaucgcccugagccugcuggccauccugaagggcaucuacaacguggccaccugcggccuguucggccuggugagcuuccugcugcugugcggcagaagcugcagcaccaccuacaagggcguguacgagcugcagacccuggagcuggacauggccagccugaacaugugcaugccccugagcugcaccaagaacaacagccaccacuacaucauggugggcaacgagaccggccuggagcugacccugaccaacaccagcaucaucaaccacaaguucugcaaccugagcgacgcccacaagaagaaccuguacgaccacgcccugaugagcaucaucagcaccuuccaccugagcauccccaacuucaaccaguacgaggccaugagcugcgacuucaacggcggcaagaucagcgugcaguacaaccugagccacaccuacgccaucgacgccgccaaccacugcggcaccaucgccaacggcgugcugcagaccuucaugagaauggccuggggcggcagcuacaucgcccuggacagcggcaagggcagcugggacugcaucaugaccagcuaccaguaccugaucauccagaacaccaccugggaggaccacugccaguucagcagacccagccccaucggcuaccugggccugcugagccagagaaccagagacaucuacaucagcagaagacugcugggcaccuucaccuggacccugagcgacagcgagggcaacgagacccccggcggcuacugccugaccagauggaugcugaucgaggccgagcugaagugcuucggcaacaccgccguggccaagugcaacgagaagcacgacgaggaguucugcgacaugcugagacuguucgacuucugcaagcaggccaucagaagacugaagacccccgcccagaugagcauccagcugaucaacaaggccgugaacgcccugaucaacgaccagcugaucaugaagaaccaccugagagacaucaugggcauccccuacugcaacuacagcaaguacugguaccugaaccacaccgugaccggcaagaccagccugcccagaugcuggcuggugagcaacggcagcuaccugaacgagacccacuucagcgacgacaucgagcagcaggccgacaacaugaucaccgagcugcugcagaaggaguacauggacagacagggcaagaccccccugggccugguggaccuguucguguucagcaccagcuucuaccugaucagcaucuuccugcaccuggugagaauccccacccacagacacgugaucggcaagcccugccccaagccccacagacugaaccacaugggcaucugcagcugcggccuguacaagcaccccggcgugcccgugaaguggaagagauga

SEQ ID NO: 29842 - RNA, 1473 nt, Artificial Sequence
  derived and/or modified CDS sequence (opt4) from LASV(Lassa virus/H.sapiens-wt/NGA/2018/ISTH_0959;Clade II)__AVV65099__GPCmut6
augggccagaucaucaccuucuuccaggaggugccccacgugaucgaggaggugaugaacaucgugcugaucgcccugagccugcuggccauccugaagggcaucuacaacguggugaccugcggccuguucggccuggugagcuuccugcugcugugcggcagaagcugcagcaccaccuacaagggcguguacgagcugcagacccuggagcuggacauggccagccugaacaugugcaugccccugagcugcaccaagaacaacagccaccacuacaucauggugggcaacgagaccggccuggagcugacccugaccaacaccagcaucaucaaccacaaguucugcaaccugagcgacgcccacaagaagaaccuguacgaccacgcccugaugagcaucaucagcaccuuccaccugagcauccccaacuucaaccaguacgaggccaugagcugcgacuucaacggcggcaagaucagcgugcaguacaaccugagccacgccuacgccaucgacgccgccaaccacugcggcaccaucgccaacggcgugcugcagaccuucaugagaauggccuggggcggcagcuacaucgcccuggacagcggcaagggcagcugggacugcaucaugaccagcuaccaguaccugaucauccagaacaccaccugggaggaccacugccaguucagcagacccagccccaucggcuaccugggccugcugagccagagaaccagagacaucuacaucagcagaagacugcugggcaccuucaccuggacccugagcgacagcgagggcaacgagacccccggcggcuacugccugaccagauggaugcugaucgaggccgagcugaagugcuucggcaacaccgccguggccaagugcaacgagaagcacgacgaggaguucugcgacaugcugagacuguucgacuucugcaagcaggccaucagaagacugaagacccccgcccagaugagcauccagcugaucaacaaggccgugaacgcccugaucaacgaccagcugaucaugaagaaccaccugagagacaucaugggcauccccuacugcaacuacagcaaguacugguaccugaaccacaccgugaccggcaagaccagccugcccagaugcuggcuggugagcaacggcagcuaccugaacgagacccacuucagcgacgacaucgagcagcaggccgacaacaugaucaccgagcugcugcagaaggaguacaucgacagacagggcaagaccccccugggccugguggaccuguucguguucagcaccagcuucuaccugaucagcaucuuccugcaccuggugaagauccccacccacagacacgugaucggcaagcccugccccaagccccacagacugaaccacaugggcaucugcagcugcggccuguacaagcaccccggcgugcccgugaaguggaagagauga

SEQ ID NO: 29843 - RNA, 1473 nt, Artificial Sequence
  derived and/or modified CDS sequence (opt4) from LASV(LASV003-NIG-2008;Clade II)__AIT17580__GPCmut6
augggccagaucaucaccuucuuccaggaggugccccacgugaucgaggaggugaugaacaucgugcugaucgcccugagccugcuggccauccugaagggcaucuacaacguggccaccugcggccuguucggccuggugagcuuccugcugcugugcggcagaagcugcagcaccaccuacaagggcguguacgagcugcagacccuggagcuggacauggccagccugaacaugugcaugccccugagcugcaccaagaacaacagccaccacuacaucauggugggcaacgagaccggccuggagcugacccugaccaacaccagcaucaucaaccacaaguucugcaaccugagcgacgcccacaagaagaaccuguacgaccacgcccugaugagcaucaucagcaccuuccaccugagcauccccaacuucaaccaguacgaggccaugagcugcgacuucaacggcggcaagaucagcgugcaguacaaccugagccacaccuacgccguggacgccgccaaccacugcggcaccaucgccaacggcgugcugcagaccuucaugagaauggccuggggcggcagcuacaucgcccuggacagcggcaagggcagcugggacugcaucaugaccagcuaccaguaccugaucauccagaacaccaccugggaggaccacugccaguucagcagacccagccccaucggcuaccugggccugcugagccagagaaccagagacaucuacaucagcagaagacugcugggcaccuucaccuggacccugagcgacagcgagagcaacgagacccccggcggcuacugccugaccagauggaugcugaucgaggccgagcugaagugcuucggcaacaccgccguggccaagugcaacgagaagcacgacgaggaguucugcgacaugcugagacuguucgacuucugcaagcaggccaucagaagacugaaggcccccgcccagaugagcauccagcugaucaacaaggccgugaacgcccugaucaacgaccagcugaucaugaagaaccaccugagagacaucaugggcauccccuacugcaacuacagcaaguacugguaccugaaccacaccgugaccggcagaaccagccugcccagaugcuggcuggugagcaacggcagcuaccugaacgagacccacuucagcgacgacaucgagcagcaggccgacaacaugaucaccgagcugcugcagaaggaguacauggacagacagggcaagaccccccugggccugguggaccuguucguguucagcaccagcuucuaccugaucagcaucuuccugcaccuggugaagauccccacccacagacacgugaucggcaagcccugccccaagccccacagacugaaccacaugggcaucugcagcugcggccuguacaagcaccccggcgugcccgugaaguggaagagauga

SEQ ID NO: 29844 - RNA, 1473 nt, Artificial Sequence
  derived and/or modified CDS sequence (opt4) from LASV(LASV035-NIG-2009;Clade II)__AIT17588__GPCmut6
augggccagaucaucaccuucuuccaggaggugccccacgugaucgaggaggugaugaacaucgugcugaucgcccugagccugcuggccauccugaagggcaucuacaacguggccaccugcggccuguucggccuggugagcuuccugcugcugugcggcagaagcugcagcaccaccuacaagggcguguacgagcugcagacccuggagcuggacauggccagccugaacaugugcaugccccugagcugcaccaagaacaacagccaccacuacaucauggugggcaacgagaccggccuggagcugacccugaccaacaccagcaucaucaaccacaaguucugcaaccugagcgacgcccacaagaagaaccuguacgaccacgcccugaugagcaucaucagcaccuuccaccugagcauccccaacuucaaccaguacgaggccaugagcugcgacuucaacggcggcaagaucagcgugcaguacaaccugagccacgccuacgccguggacgccgccaaccacugcggcaccaucgccaacggcgugcugcagaccuucaugagaauggccuggggcggcagcuacaucgcccuggacagcggcaagggcagcugggacugcaucaugaccagcuaccaguaccugaucauccagaacaccaccugggaggaccacugccaguucagcagacccagccccaucggcuaccugggccugcugagccagagaaccagagacaucuacaucagcagaagacugcugggcaccuucaccuggacccugagcgacagcgagggcaacgagacccccggcggcuacugccugaccagauggaugcugaucgaggccgagcugaagugcuucggcaacaccgccguggccaagugcaacgagaagcacgacgaggaguucugcgacaugcugagacuguucgacuucugcaagcaggccaucagaagacugaaggcccccgcccagaugagcauccagcugaucaacaaggccgugaacgcccugaucaacgaccagcugaucaugaagaaccaccugagagacaucaugggcauccccuacugcaacuacagcaaguacugguaccugaaccacaccgugaccggcaagaccagccugcccagaugcuggcuggugagcaacggcagcuaccugaacgagacccacuucagcgacgacaucgagcagcaggccgacaacaugaucaccgagcugcugcagaaggaguacaucgacagacagggcaagaccccccugggccugguggaccuguucguguucagcaccagcuucuaccugaucagcaucuuccugcaccuggugaagauccccacccacagacacgugaucggcaagcccugccccaagccccacagacugaaccacaugggcaucugcagcugcggccuguacaagcaccccggcgugcccgugaaguggaagagauga

SEQ ID NO: 29845 - RNA, 1473 nt, Artificial Sequence
  derived and/or modified CDS sequence (opt4) from LASV(LASV1000-NIG-2009;Clade II)__AIT17782__GPCmut6
augggccagaucaucaccuucuuccaggaggugccccacgugaucgaggaggugaugaacaucgugcugaucgcccugagccugcuggccauccugaagggcaucuacaacguggccaccugcggccuguucggccuggugagcuuccugcugcugugcggcagaagcugcagcaccaccuacaagggcguguacgagcugcagacccuggagcuggacauggccagccugaacaugugcaugccccugagcugcaccaagaacaacagccaccacuacaucauggugggcaacgagaccggccuggagcugacccugaccaacaccagcaucaucaaccacaaguucugcaaccugagcgacgcccacaagaagaaccuguacgaccacgcccugaugagcaucaucagcaccuuccaccugagcauccccaacuucaaccaguacgaggccaugagcugcgacuucaacggcggcaagaucagcgugcaguacaaccugagccacaccuacgccguggacgccgccaaccacugcggcaccaucgccaacggcgugcugcagaccuucaugagaauggccuggggcggcagcuacaucgcccuggacagcggcaagggcagcugggacugcaucaugaccagcuaccaguaccugaucauccagaacaccaccugggaggaccacugccaguucagcagacccagccccaucggcuaccugggccugcugagccagagaaccagagacaucuacaucagcagaagacugcugggcaccuucaccuggacccugagcgacagcgagggcaacgagacccccggcggcuacugccugaccagauggaugcugaucgaggccgagcugaagugcuucggcaacaccgccguggccaagugcaacgagaagcacgacgaggaguucugcgacaugcugagacuguucgacuucugcaagcaggccaucaagagacugaagacccccgcccagaugagcauccagcugaucaacaaggccgugaacgcccugaucaacgaccagcugaucaugaagaaccaccugagagacaucaugggcauccccuacugcaacuacagcaaguacugguaccugaaccacaccgugaccggcaagaccagccugcccagaugcuggcuggugagcaacggcagcuaccugaacgagacccacuucagcgacgacaucgagcagcaggccgacaacaugaucaccgagcugcugcagaaggaguacaucgacagacagggcaagaccccccugggccugguggaccuguucguguucagcaccagcuucuaccugaucagcaucuuccugcaccuggugaagauccccacccacagacacguggugggcaagcccugccccaagccccacagacugaaccacaugggcaucugcagcugcggccuguacaagcaccccggcgugcccgugaaguggaagagauga

SEQ ID NO: 29846 - RNA, 1473 nt, Artificial Sequence
  derived and/or modified CDS sequence (opt4) from LASV(LASV221-NIG-2010;Clade II)__AIT17624__GPCmut6
augggccagaucaucaccuucuuccaggaggugccccacgugaucgaggaggugaugaacaucgugcugaucgcccugagccugcuggccauccugaagggcaucuacaacguggccaccugcggccuguucggccuggugagcuuccugcugcugugcggcagaagcugcagcaccaccuacaagggcguguacgagcugcagacccuggagcuggacauggccagccugaacaugugcaugccccugagcugcaccaagaacaacagccaccacuacaucauggugggcaacgagaccggccuggagcugacccugaccaacaccagcaucaucaaccacaaguucugcaaccugagcgacgcccacaagaagaaccuguacgaccacgcccugaugagcaucaucagcaccuuccaccugagcauccccaacuucaaccaguacgaggccaugagcugcgacuucaacggcggcaagaucagcgugcaguacaaccugagccacaccuacgccaucgacgccgccaaccacugcggcaccaucgccaacggcgugcugcagaccuucaugagaauggccuggggcggcagcuacaucgcccuggacagcggcaagggcagcugggacugcaucaugaccagcuaccaguaccugaucauccagaacaccaccugggaggaccacugccaguucagcagacccagccccaucggcuaccugggccugcugagccagagaaccagagacaucuacaucagcagaagacugcugggcaccuucaccuggacccugagcgacagcgagggcaacgagacccccggcggcuacugccugaccagauggaugcugaucgaggccgagcugaagugcuucggcaacaccgccguggccaagugcaacgagaagcacgacgaggaguucugcgacaugcugagacuguucgacuucugcaagcaggccaucagaagacugaagacccccgcccagaugagcauccagcugaucaacaaggccgugaacgcccugaucaacgaccagcugaucaugaagaaccaccugagagacaucaugggcauccccuacugcaacuacagcaaguacugguaccugaaccacaccgugaccggcaagaccagccugcccagaugcuggcuggugagcaacggcagcuaccugaacgagacccacuucagcgacgacaucgagcagcaggccgacaacaugaucaccgagaugcugcagaaggaguacauggacagacagggcaagaccccccugggccugguggaccuguucguguucagcaccagcuucuaccugaucagcaucuuccugcaccuggugaagauccccacccacagacacgugaucggcaagcccugccccaagccccacagacugaaccacaugggcaucugcagcugcggccuguacaagcaccccggcgugcccgugaaguggaagagauga

SEQ ID NO: 29847 - RNA, 1473 nt, Artificial Sequence
  derived and/or modified CDS sequence (opt4) from LASV(LASV237-NIG-2010;Clade II)__AIT17638__GPCmut6
augggccagaucaucaccuucuuccaggaggugccccacgugaucgaggaggugaugaacaucgugcugaucgcccugagccugcuggccauccugaagggcaucuacaacguggccaccugcggccuguucggccuggugagcuuccugcugcugugcggcagaagcugcagcaccaccuacaagggcguguacgagcugcagacccuggagcuggacauggccagccugaacaugugcaugccccugagcugcaccaagaacaacagccaccacuacaucauggugggcaacgagaccggccuggagcugacccugaccaacaccagcaucaucaaccacaaguucugcaaccugagcgacgcccacaagaaggaccuguacgaccacgcccugaugagcaucaucagcaccuuccaccugagcauccccaacuucaaccaguacgaggccaugagcugcgacuucaacggcggcaagaucagcgugcaguacaaccugagccacaccuacgccguggacgccgccaaccacugcggcaccaucgccaacggcgugcugcagaccuucaugagaauggccuggggcggcagcuacaucgcccuggacagcggcaagggcagcugggacugcaucaugaccagcuaccaguaccugaucauccagaacaccaccugggaggaccacugccaguucagcagacccagccccaucggcuaccugggccugcugagccagagaaccagagacaucuacaucagcagaagacugcugggcaccuucaccuggacccugagcgacagcgagggcaacgagacccccggcggcuacugccugaccagauggaugcugaucgaggccgagcugaagugcuucggcaacaccgccguggccaagugcaacgagaagcacgacgaggaguucugcgacaugcugagacuguucgacuucugcaagcaggccaucagaagacugaagacccccgcccagaugagcauccagcugaucaacaaggccgugaacgcccugaucaacgaccagcugaucaugaagaaccaccugagagacaucaugggcauccccuacugcaacuacagcaaguacugguaccugaaccacaccgugaccggcaagaccagccugcccagaugcuggcuggugagcaacggcagcuaccugaacgagacccacuucagcgacgacaucgagcagcaggccgacaacaugaucaccgagcugcugcagaaggaguacauggacagacagggcaagaccccccugggccugguggaccuguucguguucagcaccagcuucuaccugaucagcaucuuccugcaccugaucaagauccccacccacagacacaucaccggcaagcccugccccaagccccacagacugaaccacaugggcaucugcagcugcggccuguacaagcaccccggcgugcccgugaaguggaagagauga

SEQ ID NO: 29848 - RNA, 1473 nt, Artificial Sequence
  derived and/or modified CDS sequence (opt4) from LASV(LASV253-NIG-2011;Clade II)__AIT17670__GPCmut6
augggccagaucaucaccuucuuccaggaggugccccacgugaucgaggaggugaugaacaucgugcugaucgcccugagccugcuggccauccugaagggcaucuacaacguggccaccugcggccuguucggccuggugagcuuccugcugcugugcggcagaagcugcagcaccaccuacaagggcguguacgagcugcagacccuggagcuggacauggccagccugaacaugugcaugccccugagcugcaccaagaacaacagccaccacuacaucauggugggcaacgagaccggccuggagcugacccugaccaacaccagcaucaucaaccacaaguucugcaaccugagcgacgcccacaagaagaaccuguacgaccacgcccugaugagcaucaucagcaccuuccaccugagcauccccaacuucaaccaguacgaggccaugagcugcgacuucaacggcggcaagaucagcgugcaguacaaccugagccacaccuacgccguggacgccgccaaccacugcggcaccaucgccaacggcgugcugcagaccuucaugagaauggccuggggcggcagcuacaucgcccuggacagcggcaagggcagcugggacugcaucaugaccagcuaccaguaccugaucauccagaacaccaccugggaggaccacugccaguucagcagacccagccccaucggcuaccugggccugcugagccagagaaccagagacaucuacaucagcagaagacugcugggcaccuucaccuggacccugagcgacagcgagggcaacgagacccccggcggcuacugccugaccagauggaugcugaucgaggccgagcugaagugcuucggcaacaccgccguggccaagugcaacgagaagcacgacgaggaguucugcgacaugcugagacuguucgacuucugcaagcaggccaucagaagacugaaggcccccgcccagaugagcauccagcugaucaacaaggccgugaacgcccugaucaacgaccagcugaucaugaagaaccaccugagagacaucaugggcauccccuacugcaacuacagcaaguacugguaccugaaccacaccgugaccggcagaaccagccugcccagaugcuggcuggugagcaacggcagcuaccugaacgagacccacuucagcgacgacaucgagcagcaggccgacaacaugaucaccgagcugcugcagaaggaguacaucgacagacagggcaagaccccccugggccugguggaccuguucguguucagcaccagcuucuaccugaucagcaucuuccugcaccuggugaagauccccacccacagacacaucaucggcaagcccugccccaagccccacagacugaaccacaugggcaucugcagcugcggccuguacaagcaccccggcgugcccgugaaguggaagagauga

SEQ ID NO: 29849 - RNA, 1473 nt, Artificial Sequence
  derived and/or modified CDS sequence (opt4) from LASV(LASV254-NIG-2011;Clade II)__AIT17674__GPCmut6
augggccagaucaucaccuucuuccaggaggugccccacgugaucgaggaggugaugaacaucgugcugaucgcccugagccugcuggccauccugaagggcaucuacaacguggccaccugcggccuguucggccuggugagcuuccugcugcugugcggcagaagcugcagcaccaccuacaagggcguguacgagcugcagacccuggagcuggacaugaccaaccugaacaugugcaugccccugagcugcaccaagaacaacagccaccacuacaucauggugggcaacgagaccggccuggagcugacccugaccaacaccagcaucaucaaccacaaguucugcaaccugagcgacgcccacaagaagaaccuguacaaccacgcccugaugagcaucaucagcaccuuccaccugagcauccccaacuucaaccaguacgaggccaugagcugcgacuucaacggcggcaagaucagcgugcaguacaaccugagccacagcuacgccguggacgccgccaaccacugcggcaccaucgccaacggcgugcugcagaccuucaugagaauggccuggggcggcagcuacaucgcccuggacagcggcaagggcaacugggacugcaucaugaccagcuaccaguaccugaucauccagaacaccaccugggaggaccacugccaguucagcagacccagccccaucggcuaccugggccugcugagccagagaaccagagacaucuacaucagcagaagacugcugggcaccuucaccuggacccugagcgacagcgagggcaacgagacccccggcggcuacugccugaccagauggaugcugaucgaggccgagcugaagugcuucggcaacaccgccguggccaagugcaacgagaagcacgacgaggaguucugcgacaugcugagacuguucgacuucugcaagcaggccaucagaagacugaagacccccgcccaggccaacauccagcugaucaacaaggccgugaacgcccugaucaacgaccagcugaucaugaagaaccaccugagagacaucaugggcauccccuacugcaacuacagcaaguacugguaccugaaccacaccgugaccggcaagaccagccugcccagaugcuggcuggugagcaacggcagcuaccugaacgagacccacuucagcgacgacaucgagcagcaggccgacaacaugaucaccgagcugcugcagaaggaguacauggacagacagggcaagaccccccugggccugguggaccuguucguguucagcaccagcuucuaccugaucagcaucuuccugcaccuggugaagauccccacccacagacacgugaucggcaagcccugccccaagccccacagacugaaccacaugggcaucugcagcugcggccuguacaagcaccccggcgugcccgugaaguggaagagauga

SEQ ID NO: 29850 - RNA, 1473 nt, Artificial Sequence
  derived and/or modified CDS sequence (opt4) from LASV(Nig08-A19;Clade III)__ADU56618__GPCmut6
augggccagaucgugaccuucuuccaggaggugccccacgugaucgaggaggugaugaacaucgugcugaucgcccugagcauccuggccauccugaagggccuguacaacaucgccaccugcggccugaucggccuggugaccuuccugcugcugagcggcagaagcugcagcaugaccuacaagggcguguacgagcugcagacccuggagcugaacaugaacacccugaacaugugcaugccccugagcugcaccaagaacaacagccaccacuacaucauggugggcaacgagaccggccuggagcugacccugaccaacaccagccugcugcaccacaaguucugcaaccugagcgacgcccacaagaagaaccuguacgaccacacccugaugagcaucaucagcaccuuccaccugagcauccccaacuucaaccaguacgaggccaugagcugcgacuucaacggcggcaagaucaccgugcaguacaaccugagccacagcuacgccaucgacgccgccaaccacugcggcaccguggccaacggcgugcugcagaccuucaugagaauggccuggggcggcagcuacaucgcccuggacagcggcagaggcaagugggacugcaucaugaccagcuaccaguaccugaucauccagaacaccaccugggaggaccacugccaguucagcagacccagccccaucggcuaccugggccugcugagccagagaaccagagacaucuacaucagcagaagacugcugggcaccuucaccuggacccugagcgacagcgagggcaacgagacccccggcggcuacugccugaccagauggaugcugaucgaggccgagcugaagugcuucggcaacaccgccguggccaagugcaacgagaagcacgacgaggaguucugcgacaugcugagacuguucgacuucugcaagcaggccaucagaagacugaaggcccccgcccagaugagcauccagcugaucaacaaggccgugaacgcccugaucaacgaccagcugaucaugaagaaccaccugagagacaucaugggcauccccuacugcaacuacagcaaguacugguaccugaaccacaccagcaccggcagaaccagccugcccagaugcuggcuggugagcaacggcagcuaccugaacgagacccacuucagcgacgacaucgagcagcaggccgacaacaugaucaccgagaugcugcagaaggaguaccuggacagacagggcaagaccccccugggccugguggaccuguucguguucagcaccagcuucuaccugaucagcaucuuccugcaccuggugaagauccccacccacagacacaucgugggcaagcccugccccaagccccacagacugaaccacaugggcaucugcagcugcggccuguacaagcagcccggcgugcccgugagauggaagagauga

SEQ ID NO: 29851 - RNA, 1476 nt, Artificial Sequence
  derived and/or modified CDS sequence (opt4) from LASV(G1180-SLE-2010;Clade IV)__AIT17168__GPCmut6
augggccagaucgugaccuucuuccaggaggugccccacgugaucgaggaggugaugaacaucgugcugaucgcccugagcauccuggccgugcugaagggccuguacaacuucgccaccugcggccuggugggccugcugaccuuccugcugcugugcggcagaagcugcaccgccagcagauacaagggcguguacgagcugcagacccuggagcugaacauggagacccugaacaugugcaugccccugagcugcaccaagaacaacagccaccacuacaucauggugggcaacgagaccggccuggagcugacccugaccaacaccagcaucaucaaccacaaguucugcaaccugagcgacgcccacaagaagaaccuguacgaccacgcccugaugagcaucaucagcaccuuccaccugagcauccccaacuucaaccaguacgaggccaugagcugcgacuucaacggcggcaagaucagcgugcaguacaaccugagccacagcuacgccggcgacgccgccaaccacugcggcaccguggccaacggcgugcugcagaccuucaugagaauggccuggggcggcagcuacaucgcccuggacagcggccacggcagcugggacugcaucaugaccagcuaccaguaccugaucauccagaacaccaccugggaggaccacugccaguucagcagacccagccccaucggcuaccugggccugcugagccagagaaccagagacaucuacaucagcagaagacugcugggcaccuucaccuggacccugagcgacagcgagggcaaggacacccccggcggcuacugccugaccagauggaugcugaucgaggccgagcugaagugcuucggcaacaccgccguggccaagugcaacgagaagcacgacgaggaguucugcgacaugcugagacuguucgacuucugcaagcaggccauccagagacugaaggcccccgcccagaugagcauccagcugaucaacaaggccgugaacgcccugaucaacgaccagcugaucaugaagaaccaccugagagacaucaugggcauccccuacugcaacuacagcaaguacugguaccugaaccacaccaccaccggcaagaccagccugcccaagugcuggcuggugagcaacggcagcuaccugaacgagacccacuucagcgacgacaucgagcagcaggccgacaacaugaucaccgagaugcugcagaaggaguacauggagagacagggcaagaccccccugggccugguggaccuguucguguucagcaccagcuucuaccugaucagcaucuuccugcaccuggugaagauccccacccacagacacaucgugggcaagagcugccccaagccccacagacugaaccacaugggcaucugcagcugcggccuguacaagcagcccggcgugcccgugaaguggaagagauga

SEQ ID NO: 29852 - RNA, 1476 nt, Artificial Sequence
  derived and/or modified CDS sequence (opt4) from LASV(G1442-SLE-2011;Clade IV)__AIT17180__GPCmut6
augggccagaucgugaccuucuuccaggaggugccccacgugaucgaggaggugaugaacaucgugcugaucgcccugagcauccuggccgugcugaagggccuguacaacguggccaccugcggccugaucggccuggugaccuuccugcugcugugcggcagaagcugcaccaccacccuguacaagggcguguacgagcugcagacccuggagcugaacauggagacccugaacaugugcaugccccugagcugcaccaagaacaacagccaccacuacaucagagugggcaacgagaccggccuggagcugacccugaccaacaccagcaucaucaaccacaaguucugcaaccugagcgacgcccacaagaagaaccuguacgaccacgcccugaugagcaucaucagcaccuuccaccugagcauccccaacuucaaccaguacgaggccaugagcugcgacuucaacggcggcaagaucagcgugcaguacaaccugagccacagcuacgccggcgacgccgccaaccacugcggcaccguggccaacggcgugcugcagaccuucaugagaauggccuggggcggcagcuacaucgcccuggacagcggcagaggcaacugggacugcaucaugaccagcuaccaguaccugaucauccagaacaccaccugggacgaccacugccaguucagcagacccagccccaucggcuaccugggccugcugagccagagaaccagagacguguacaucagcagaagacugcugggcaccuucaccuggacccugagcgacagcgagggcaaggacacccccggcggcuacugccugaccagauggaugcugaucgaggccgagcugaagugcuucggcaacaccgccguggccaagugcaacgagaagcacgacgaggaguucugcgacaugcugagacuguucgacuucugcaagcaggccauccagagacugaaggcccccgcccagaugagcauccagcugaucaacaaggccgugaacgcccugaucaacgaccagcugaucaugaagaaccaccugagagacaucaugggcauccccuacugcaacuacagcaaguacugguaccugaacaacaccgccaccggcaagaccagccugcccaagugcuggcugaucagcaacggcagcuaccugaacgagacccacuucagcgacgacaucgagcaggaggccgacaacaugaucaccgagaugcugcagaaggaguacauggagagacagggcaagaccccccugggccugguggaccuguucguguucagcaccagcuucuaccugaucagcaucuuccugcaccuggugaagauccccacccacagacacaucgugggcaagagcugccccaagccccacagacugaaccacaugggcaucugcagcugcggccuguacaagcagcccggcgugcccgugagauggaagagauga

SEQ ID NO: 29853 - RNA, 1476 nt, Artificial Sequence
  derived and/or modified CDS sequence (opt4) from LASV(G3010-SLE-2013;Clade IV)__AIT17344__GPCmut6
augggccagaucgugaccuucuuccaggaggugccccacgugaucgaggaggugaugaacaucgugcugaucgcccugagcauccuggccgugcugaagggccuguacaacuucgccaccugcggccuggugggccuggugaccuuccugcugcugugcggcagaagcugcaccaccagccuguacaagggcguguacgagcugcagacccuggagcugaacauggagacccugaacaugugcaugccccugagcugcaccaagaacaacagccaccacuacaucauggugggcaacgagaccggccuggagcugacccugaccaacaccagcaucaucaaccacaaguucugcaaccugagcgacgcccacaagaagaaccuguacaaccacgcccugaugagcaucaucagcaccuuccaccugagcauccccaacuucaaccaguacgaggccaugagcugcgacuucaacggcggcaagaucagcgugcaguacaaccugagccacagcuacgccggcgacgccgccagccacugcggcaccguggccaacggcgugcugcagaccuucaugagaauggccuggggcggcagcuacaucgcccuggacagcggcuacggcaagugggacugcaucaugaccagcuaccaguaccugaucauccagaacaccaccugggaggaccacugccaguucagcagacccagccccaucggcuaccugggccugcugagccagagaaccagagacaucuacaucagcagaagacugcugggcaccuucaccuggacccugagcgacagcgagggcaaggacacccccggcggcuacugccugaccagauggaugcugaucgaggccgagcugaagugcuucggcaacaccgccguggccaagugcaacgagaagcacgacgaggaguucugcgacaugcugagacuguucgacuucugcaagcaggccauccagagacugaagacccccgcccagaugagcauccagcugaucaacaaggccgugaacgcccugaucaacgaccagcugaucaugaagaaccaccugagagacaucaugggcauccccuacugcaacuacagcaaguacugguaccugaaccacaccaccaccggcaagaccagccugcccaagugcuggcuggugagcaacggcagcuaccugaacgagacccacuucagcgacgacaucgagcagcaggccgacaacaugaucaccgagaugcugcagaaggaguacauggagagacagggcaagaccccccugggccugguggaccuguucguguucagcaccagcuucuaccugaucagcaucuuccugcaccuggugaagauccccacccacagacacaucgugggcaagagcugccccaagccccacagacugaaccacaugggcaucugcagcugcggccuguacaagcagcccggcgugcccgugagauggaagagauga

SEQ ID NO: 29854 - RNA, 1476 nt, Artificial Sequence
  derived and/or modified CDS sequence (opt4) from LASV(G502-SLE-2009;Clade IV)__AIT17126__GPCmut6
augggccagaucgugaccuucuuccaggaggugccccacgugaucgaggaggugaugaacaucgugcugaucgcccugagcauccuggccgugcugaagggccuguacaacuucgccaccugcggccuggugggccugcugaccuuccugcugcugugcggcagaagcugcaccaccggccuguacaagggcguguacgagcugcagacccuggagcugaacauggagacccugaacaugugcaugccccugagcugcaccaagaacaacagccaccacuacaucauggugggcaacgagaccggccuggagcugacccugaccaacaccagcaucaucaaccacaaguucugcaaccugagcgacgcccacaagaagaaccuguacgaccacgcccugaugagcaucaucagcaccuuccaccugagcauccccaacuucaaccaguacgaggccaugagcugcgacuucaacggcggcaagaucagcgugcaguacaaccugagccacagcuacgccggcgacgccgccgaccacugcggcaccguggccaacggcgugcugcagaccuucaugagaauggccuggggcggcagcuacaucgcccuggacagcggcagaggcagaugggacugcaucaugaccagcuaccaguaccugaucauccagaacaccaccugggaggaccacugccaguucagcagacccagccccaucggcuaccugggccugcugagccagagaaccagagacaucuacaucagcagaagacugcugggcaccuucaccuggacccugagcgacagcgagggcaaggacacccccggcggcuacugccugaccagauggaugcugaucgaggccgagcugaagugcuucggcaacaccgccguggccaagugcaacgagaagcacgacgaggaguucugcgacaugcugagacuguucgacuucugcaagcaggccauccagagacugaaggcccccgcccagaugagcauccagcugaucaacaaggccgugaacgcccugaucaacgaccagcuggugaugaagaaccaccugagagacaucaugggcauccccuacugcaacuacagcagauacugguaccugaaccacaccaccaccggcagaaccagccugcccaagugcuggcuggugagcaacggcagcuaccugaacgagacccacuucagcgacgacaucgagcagcaggccgacaacaugaucaccgagaugcugcagaaggaguacauggagagacagggcaagaccccccugggccugguggaccuguucguguucagcaccagcuucuaccugaucagcaucuuccugcaccuggugaagauccccacccacagacacaucgugggcaagagcugccccaagccccacagacugaaccacaugggcaucugcagcugcggccuguacaagcagcccggcgugcccgugaaguggaagagauga

SEQ ID NO: 29855 - RNA, 1476 nt, Artificial Sequence
  derived and/or modified CDS sequence (opt4) from LASV(G733-SLE-2010;Clade IV)__AIT17154__GPCmut6
augggccagaucgugaccuucuuccaggaggugccccacgugaucgaggaggugaugaacaucgugcugaucgcccugagcauccuggccgugcugaagggccuguacaacuucgccaccugcggcaucgugggccuggugagcuuccugcugcugugcggcagaagcugcaccaccagccuguacaagggcguguacgagcugcagacccuggagcugaacauggagacccugaacaugugcaugccccugagcugcaccaagaacaacagccaccacuacaucauggugggcaacgagaccggccuggagcugacccugaccaacaccagcaucaucaaccacaaguucugcaaccugagcgacgcccacaagaagaaccuguacgaccacgcccugaugagcaucaucagcaccuuccaccugagcauccccaacuucaaccaguacgaggccaugagcugcgacuucaacggcggcaagaucagcgugcaguacaaccugagccacagcuacgccggcgacgccgccaaccacugcggcaccaucgccaacggcgugcugcagaccuucaugagaauggccuggggcggcagcuacaucgcccuggacagcggcagagacagaugggacugcaucaugaccagcuaccaguaccugaucauccagaacaccaccugggaggaccacugccaguucagcagacccagccccaucggcuaccugggccugcugagccagagaaccagagacaucuacaucagcagaagacugcugggcaccuucaccuggacccugagcgacagcgagggcaaggacacccccggcggcuacugccugaccagauggaugcugaucgaggccgagcugaagugcuucggcaacaccgccguggccaagugcaacgagaagcacgacgaggaguucugcgacaugcugagacuguucgacuucugcaagcaggccauccagagacugaaggcccccgcccagaugagcauccagcugaucaacaaggccgugaacgcccugaucaacgaccagcugaucaugaagaaccaccugagagacaucaugggcauccccuacugcaacuacagcaaguacugguaccugaaccacaccaccaccggcaagaccagccugcccaagugcuggcuggugagcaacggcagcuaccugaacgagacccacuucagcgacgacaucgagcagcaggccgacaacaugaucaccgagaugcugcagaaggaguacauggagagacagggcaagaccccccugggccugguggaccuguucguguucagcaccagcuucuaccugaucagcaucuuccugcaccuggugaagauccccacccacagacacguggugggcaagagcugccccaagccccacagacugaaccacaugggcaucugcagcugcggccuguacggccagcccggcgugcccgugaaguggaagagauga

SEQ ID NO: 29856 - RNA, 1476 nt, Artificial Sequence
  derived and/or modified CDS sequence (opt4) from MOPV/LASV reassortant(IGS-1;Clade IV)__AFY05576__GPCmut6
augggccagaucgugaccuucuuccaggaggugccccacgugaucgaggaggugaugaacaucgugcugaucgcccugagcgugcuggccgugcugaagggccuguacaacuucgccaccugcggccuggugggccuggugaccuuccugcugcugugcggcagaagcugcaccaccagccuguacaagggcguguacgagcugcagacccuggagcugaacauggagacccugaacaugugcaugccccugagcugcaccaagaacaacagccaccacuacaucauggugggcaacgagaccggccuggagcugacccugaccaacaccagcaucaucaaccacaaguucugcaaccugagcgacgcccacaagaagaaccuguacgaccacgcccugaugagcaucaucagcaccuuccaccugagcauccccaacuucaaccaguacgaggccaugagcugcgacuucaacggcggcaagaucagcgugcaguacaaccugagccacagcuacgccggcgacgccgccaaccacugcggcaccguggccaacggcgugcugcagaccuucaugagaauggccuggggcggcagcuacaucgcccuggacagcggcagaggcaacugggacugcaucaugaccagcuaccaguaccugaucauccagaacaccaccugggaggaccacugccaguucagcagacccagccccaucggcuaccugggccugcugagccagagaaccagagacaucuacaucagcagaagacugcugggcaccuucaccuggacccugagcgacagcgagggcgaggacacccccggcggcuacugccugaccagauggaugcugaucgaggccgagcugaagugcuucggcaacaccgccguggccaagugcaacgagaagcacgacgaggaguucugcgacaugcugagacuguucgacuucugcaagcaggccauccagagacugaaggcccccgcccagaugagcauccagcugaucaacaaggccgugaacgcccugaucaacgaccagcugaucaugaagaaccaccugagagacaucaugggcauccccuacugcaacuacagcaaguacugguaccugaaccacaccaccaccggcagaaccagccugcccaagugcuggcuggugagcaacggcagcuaccugaacgagacccacuucagcgacgacaucgagcagcaggccgacaacaugaucaccgagaugcugcagaaggaguacauggagagacagggcaagaccccccugggccugguggaccuguucguguucagcaccagcuucuaccugaucagcaucuuccugcaccuggugaagauccccacccacagacacaucgugggcaagagcugccccaagccccacagacugaaccacaugggcaucugcagcugcggccuguacaagcagcccggcgugcccgugaaguggaagagauga

SEQ ID NO: 29857 - RNA, 1476 nt, Artificial Sequence
  derived and/or modified CDS sequence (opt4) from LASV(LM765-SLE-2012;Clade IV)__AIT17814__GPCmut6
augggccagaucgugaccuucuuccaggaggugccccacgugaucgaggaggugaugaacaucgugcugaucgcccugagcauccuggccgugcugaagggccuguacaacuucgccaccugcggccuggugggccuggugaccuuccugcugcugugcggcagaagcugcaccaccagccuguacaagggcguguacgagcugcagacccuggagcugaacauggagacccugaacaugugcaugccccugagcugcaccaagaacaacagccaccacuacaucauggugggcaacgagaccggccuggagcugacccugaccaacaccagcaucaucgaccacaaguucugcaaccugagcgacgcccacagaaagaaccuguacgaccacgcccugaugagcaucaucagcaccuuccaccugagcauccccaacuucaaccaguacgaggccaugagcugcgacuucaacggcggcaagaucagcgugcaguacaaccugagccacagcuacgccaaggacgccgccgaccacugcggcaccguggccaacggcgugcugcagaccuucaugagaauggccuggggcggcagcuacaucgcccuggacagcggcagaggcagaugggacugcaucaugaccagcuaccaguaccugaucauccagaacaccaccugggaggaccacugccaguucagcagacccagccccaucggcuaccugggccugcugagccagagaaccagagacaucuacaucagcagaagacugcugggcaccuucaccuggacccugagcgacagcgagggcaaggacacccccggcggcuacugccugaccagauggaugcugaucgaggccgagcugaagugcuucggcaacaccgccguggccaagugcaacgagaagcacgacgaggaguucugcgacaugcugagacuguucgacuucugcaagcaggccauccagagacugaaggcccccgcccagaugagcauccagcugaucaacaaggccgugaacgcccugaucaacgaccagcugaucaugaagaaccaccugagagacaucaugggcauccccuacugcaacuacagcaaguacugguaccugaaccacaccaccaccggcaagaccagccugcccaagugcuggcuggugagcaacggcagcuaccugaacgagacccacuucagcgacgacaucgagcagcaggccgacaacaugaucaccgagaugcugcagaaggaguacauggagagacagggcaagaccccccugggccugguggaccuguucguguucagcaccagcuucuaccugaucagcaucuuccugcaccuggugaagauccccacccacagacacaucgugggcaagcccugccccaagccccacagacugaaccacaugggcaucugcagcugcggccuguacaagcagcccggcgugcccgugaaguggaagagauga

SEQ ID NO: 29858 - RNA, 1476 nt, Artificial Sequence
  derived and/or modified CDS sequence (opt4) from LASV(LM776-SLE-2012;Clade IV)__AIT17824__GPCmut6
augggccagaucgugaccuucuuccaggaggugccccacgugaucgaggaggugaugaacaucgugcugaucgcccugagcauccuggccgugcugaagggccuguacaacuucgccaccugcggccuggugggccuggugaccuuccugcugcugugcggcagaagcugcaccaccagcguguacaagggcguguacgagcugcagacccuggagcugaacauggagacccugaacaugugcaugccccugagcugcaccaagaacaacagccaccacuacaucauggugggcaacgagaccggccuggagcugacccugaccaacaccagcaucaucaaccacaaguucugcaaccugagcgacgcccacaagaagaaccuguacgaccacgcccugaugagcaucaucagcaccuuccaccugagcauccccaacuucaaccaguacgaggccaugagcugcgacuucaacggcggcaagaucagcgugcaguacaaccugagccacagcuacgccggcgacgccgccaaccacugcggcaccguggccaacggcgugcugcagaccuucaugagaauggccuggggcggcagcuacaucgcccuggacagcggccacggcaagugggacugcaucaugaccagcuaccaguaccugaucauccagaacaccaccugggaggaccacugccaguucagcagacccagccccaucggcuaccugggccugcugagccagagaaccagagacaucuacaucagcagaagacugcugggcaccuucaccuggacccugagcgacagcgagggcaaggacacccccggcggcuacugccugaccagauggaugcugaucgaggccgagcugaagugcuucggcaacaccgccguggccaagugcaacgagaagcacgacgaggaguucugcgacaugcugagacuguucgacuucugcaagcaggccauccagagacugaaggcccccgcccagaugagcauccagcugaucaacaaggccgugaacgcccugaucaacgaccagcugaucaugaagaaccaccugagagacaucaugggcauccccuacugcaacuacagcaaguacugguaccugaaccacaccaccaccggcaagaccagccugcccaagugcuggcuggugagcaacggcagcuaccugaacgagacccacuucagcgacgacaucgagcagcaggccgacaacaugaucaccgagaugcugcagaaggaguacauggagagacagggcaagaccccccugggccugguggaccuguucguguucagcaccagcuucuaccugaucagcaucuuccugcaccuggugaagauccccacccacagacacaucgugggcaagagcugccccaagccccacagacugaaccacaugggcaucugcagcugcggccuguacaagcagcccggcgugcccgugagauggaagagauga

SEQ ID NO: 29859 - RNA, 1476 nt, Artificial Sequence
  derived and/or modified CDS sequence (opt4) from LASV(Mad39;Clade IV)__ANH09722__GPCmut6
augggccagaucgugaccuucuuccaggaggugccccacgugaucgaggaggugaugaacaucgugcugaucgcccugagcauccuggccgugcugaagggccuguacaacguggccaccugcggccugaucggccuggugaccuuccugcugcugugcggcagaagcugcaccaccacccuguacaagggcguguacgagcugcaggcccuggagcugaacauggagacccugaacaugugcaugccccugagcugcaccaagaacaacagccaccacuacaucagagugggcaacgagaccggccuggagcugacccugaccaacaccagccugaucaaccacaaguucugcaaccugagcgacgcccacaagaagaaccuguacgaccacgcccugaugagcaucaucagcaccuuccaccugagcauccccaacuucaaccaguacgaggccaugagcugcgacuucaacgacggcaagaucagcgugcaguacaaccugagccacaccuacgccggcgacaccgccaaccacugcggcaccguggccaacggcgugcugcagaccuucaugagaauggccuggggcggcagcuacaucgcccuggacagcggcagaggcggcugggacugcaucaugaccagcuaccaguaccugaucauccagaacaccaccugggaggaccacugccaguucagcagacccagccccaucggcuaccugggccugcugagccagagaaccagagacaucuacaucagcagaagacugcugggcaccuucaccuggacccugagcgacagcgagggcaaggacacccccggcggcuacugccugaccagauggaugcugaucgaggccgagcugaagugcuucggcaacaccgccguggccaagugcaacgagaagcacgacgaggaguucugcgacaugcugagacuguucgacuucugcaagcaggccauccagagacugaaggcccccgcccagaugagcauccagcugaucaacaaggccgugaacgcccugaucaacgaccagcugaucaugaagaaccaccugagagacaucaugggcauccccuacugcaacuacagcaaguacugguaccugaaccacaccgugaccggcaagaccagccugcccaagugcuggcuggugagcaacggcagcuaccugaacgagacccacuucagcgacgacaucgagcagcaggccgacaacaugaucaccgagaugcugcagaaggaguacauggagagacagggcaagaccccccugggccugguggaccuguucguguucagcaccagcuucuaccugaucagcaucuuccugcaccuggugaagauccccacccacagacacguggugggcaagcccugccccaagccccacagacugaaccacaugggcaucugcagcugcggcuucuacaagcagcccggcgugcccgugagauggaagagauga

SEQ ID NO: 29860 - RNA, 1476 nt, Artificial Sequence
  derived and/or modified CDS sequence (opt4) from LASV(Z0947-SLE-2011;Clade IV)__AIT17840__GPCmut6
augggccagaucgugaccuucuuccaggaggugccccacgugaucgaggaggugaugaacaucgugcugaucgcccugagcauccuggccgugcugaagggccuguacaacuucgccaccugcggccuggugggccuggugaccuuccugcugcugugcggcagaagcugcaccaucagccuguacaagggcguguacgagcugcagacccuggagcugaacauggagacccugaacaugugcaugccccugagcugcaccaagaacaacagccaccacuacaucauggugggcaacgagaccggccuggagcugacccugaccaacaccagcaucaucaaccacaaguucugcaaccugagcgacgcccacaagaagaaccuguacgaccacgcccugaugagcaucaucagcaccuuccaccugagcauccccaacuucaaccaguacgaggccaugagcugcgacuucaacggcggcaagaucagcgugcaguacaaccugagccacagcuacgccggcgacgccgccaaccacugcggcaccguggccaacggcgugcugcagaccuucaugagaauggccuggggcggcagcuacaucgcccuggacagcggcagagacagaugggacugcaucaugaccagcuaccaguaccugaucauccagaacaccaccugggaggaccacugccaguucagcagacccagccccaucggcuaccugggccugcugagccagagaaccagagacaucuacaucagcagaagacugcugggcaccuucaccuggacccugagcgacagcgagggcaaggacacccccggcggcuacugccugaccagauggaugcugaucgaggccgagcugaagugcuucggcaacaccgccguggccaagugcaacgagaagcacgacgaggaguucugcgacaugcugagacuguucgacuucugcaagcaggccauccagagacugaaggcccccgcccagaugagcauccagcugaucaacaaggccgugaacgcccugaucaacgaccagcugaucaugaagaaccaccugagagacaucaugggcauccccuacugcaacuacagcaaguacugguaccugaaccacaccaccaccggcaagaccagccugcccaagugcuggcuggugagcaacggcagcuaccugaacgagacccacuucagcgacgacaucgagcagcaggccgacaacaugaucaccgagaugcugcagaaggaguacauggagagacagggcaagaccccccugggccugguggaccuguucguguucagcaccagcuucuaccugaucagcaucuuccugcaccuggugaagauccccacccacagacacaucgugggcaagcccugccccaagccccacagacugaaccacaugggcaucugcagcugcggccuguacaagcagcccggcgugcccgugaaguggaagagauga

SEQ ID NO: 29861 - RNA, 1476 nt, Artificial Sequence
  derived and/or modified CDS sequence (opt5) from LASV(Josiah;Clade IV)__NP_694870__GPCmut6
augggccagaucgugaccuucuuucaagaggucccccacguuauugaagaggugaugaacaucgugcugauugcccucagcguccuggcugugcuuaaggggcuguacaauuucgccacaugcggacucguuggccuggugacguuucuucugcucugugggagauccugcaccacaucucuguauaaaggagucuacgaacugcagacccucgagcugaacauggaaacacuuaauauguguaugccucugagcugcaccaagaacaauucccaucacuauaucauggugggcaacgagacagggcucgagcugacccuuacgaauaccucuauuaucaaccauaaauucuguaaucugagcgacgcgcacaagaaaaaccucuacgaucaugcucugauguccaucauuucuacauuucaccugagcaucccgaauuucaaccaguaugaagccauguccugcgacuuuaauggaggcaagauuagcguucaguacaaccucucucacuccuaugccggcgaugcugccaaucauugugggaccguggcuaacggaguccugcaaacauucaugcggauggccuggggcgggagcuacaucgcgcuugacucuggacgcggcaacugggauugcauuaugaccuccuaccaguaucugaucauucagaauacgacaugggaggaccacugucaguuuagcagacccucuccuaucggguaccucggacugcuuucccaacggacccgcgauaucuauauuagcagacggcugcucggcacauucaccuggacccuguccgacucugaaggcaaggauacacccgggggauacugccugacgcgcuggaugcucaucgaggccgagcugaaauguuuuggcaacaccgcuguggccaagugcaaugaaaaacaugacgaggaguucugcgauaugcuuagacuguuugacuucuguaagcaggcuauucagcggcucaaagccccugcgcagaugagcauccaacugauuaacaaggccgugaaugcucuuaucaacgaucagcugaucaugaagaaucaccuccgcgacauuauggggauccccuauugcaacuacuccaaauauugguaccugaaucacacaaccacaggaagaaccagccugccuaaguguuggcucgucucuaacggcuccuaccugaaugaaacgcauuucagcgacgauauugaacagcaagccgacaacaugaucacagagaugcuucagaaagaguauauggaacggcaggggaagaccccgcugggacucguugaucuguuuguguucucuaccagcuuuuaccugauuuccaucuuccuucaccucgugaaaauccccacacaucgccacauugucggcaagucuugcccuaaaccccauagacugaaucacaugggcaucuguagcugcgggcuguauaagcagccuggagugcccguuaaguggaaacgguga

SEQ ID NO: 29862 - RNA, 1473 nt, Artificial Sequence
  derived and/or modified CDS sequence (opt5) from LASV(LP;Clade I)__AAF86701__GPCmut6
augggccagaucauuaccuucuuucaagaggugccccacgucaucgaagagguuaugaacauugugcugaucgcccucagccugcuugcuauucugaaggggcucuacaauaucgccacaugcggaaucauuggccugguggcguuccuuuuucugugugggaaauccugcucucucacgcugaagggaggcuaugaacugcagacccucgagcugaacauggaaacacuuaauauguguaugccucugagcugcaccaaaaacuccucucaucacuacaucagagucgggaaugagacaggacucgagcugacccuuacaaacaccagcauuaucaaucauaaguucuguaaccuguccgacgcucacaaaaagaaucucuaugaucaugcccugaugucuauuaucagcacguuucaccuguccauuccgaacuucaaucaguacgaagccaugagcugcgacuuuaacggcggcaagaucucugugcaguauaaucucucccacagcuacgcuggggaugccgcugagcauuguggaaccguugccaacggcgugcugcaaacauucaugcggauggcguggggagggcgcuauaucgcccuugacucuggcaaagggaauugggauugcauuaugaccuccuaccaguaccugaucauucagaacacaaccugggaagaccacugucaguuuagcagacccucuccuaucggauaucucggccugcuuucccaacggacgcgcgauauuuacaucagcagacggcugcucggcacauucaccuggacacuguccgacucugaggggaacgagacccccggaggcuauugccugacccgcuggaugcucaucgaagcugagcugaaguguuuugggaauacagccgucgcuaaaugcaacgaaaagcaugaugaggaguucugcgacaugcuuagacuguuugauuucuguaaacaggccauucggcgccucaaggcgccugcccagaugagcauccagcugauuaauaaggcugugaacgcccuuaucaaugaccaacugauuaugaaaaaccaccucagagauaucaugggaauccccuacugcaauuauuccaaguacugguaucugaaccacacgagcucuggccggaccucccugccuaaauguuggcucauuagcaaugggucuuaccugaacgaaacacaguucagcgacgacaucgagcagcaagcugauaauaugauuaccgaaaugcuucagaaggaguacaucgaacgccagggaaaaacaccgcugggccucguugacauuuuuaucuucuccaccucuuuuuaucugauuagcaucuuccugcaucuuaucaagauucccacgcacagacauaucgugggcaaaccuugccccaagccucaccggcucaaccauaugggggucuguuccugcggacuguacaagcaccccggcgugccgacaaaauggaagcgcuga

SEQ ID NO: 29863 - RNA, 1473 nt, Artificial Sequence
  derived and/or modified CDS sequence (opt5) from LASV(803213;Clade II)__AAF86703__GPCmut6
augggccagaucauuaccuucuuucaagaggugccccacgucaucgaagagguuaugaacauugugcugaucgcccucagccugcuugcuauucugaaggggaucuacaauguggccacaugcggacucuucggccugaucuccuuucuucugcucugugggagaucuugcagcgucacguauaaaggaguguacgaacugcagacccuggagcucaacauggcgaaucugaacauguguaugccucuuuccugcacaaagaauaacucucaucacuauauuaugguuggcaaugaaaccgggcuggagcucacacugaccaacacaagcaucauuaaucauaaauucuguaaccuuuccgacgcucacaagaaaaaucuguacgaucaugcccucaugucuaucauuagcaccuuucaccuguccaucccgaacuucaaucaguaugaggccaugagcugcgacuuuaacggaggcaagauuucugugcaguacaaucugucccacagcuucgcugucgaugccgcuaaccauuguggcacgaucgccaacggggugcuccaaaccuuuaugcggauggcguggggaggcucuuauaucgcccuggacuccgggaagggaaauugggauugcauuaugacaagcuaccaguaccuuaucauucagaacaccacaugggaagaccacugucaguucucucgccccuccccuaucggcuaucuggggcuccugagccaaagaacccgggauauuuacaucucccgcagacuucugggaacguuuacauggacccucucugacagcgagggcaaugaagcucccggcggguauugccugacacgguggaugcugaucgaggccgagcucaaauguuucggaaacaccgcuguugccaagugcaaugaaaaacaugaugaggaauuuugcgacaugcugcgccuuuucgauuucuguaagcaggcgauuaaaagacugaagaccccugcccagauguccauccagcucauuaacaaggcugugaaugcccugaucaacgaccaacuuauuaugaaaaaucaucugcgggauaucaugggcauccccuacugcaacuauagccgcuacugguaucucaaucacacagucacggggaagaccucucugccuagauguuggcugguguccaacggaagcuaccucaaugagacacacuuuucugacgacauugaacagcaggcugauaacaugaucaccgagaugcugcaaaaagaguacauggaccggcagggcaagacaccgcuugggcugguggaucucuucgucuuuagcaccuccuucuaucugauuucuaucuuucugcaccuuguuaaaauucccacgcaucgccacaucgugggaaagccuugccccaaaccucauagacucaaucacaugggcauuuguagcugcggccuguacaagcaccccggggugccggucaaguggaaacgguga

SEQ ID NO: 29864 - RNA, 1473 nt, Artificial Sequence
  derived and/or modified CDS sequence (opt5) from LASV(GA391;Clade III)__CAA36645__GPCmut6
augggccagaucgugaccuucuuucaagaggucccccacguuauugaagaggugaugaacaucgugcugauugcccucagcauccuggcuauucuuaaggggcuguacaaugucgccacaugcggacucaucggccuggugacguuccuucugcucuccgggagaucuuguagccugaucuauaaaggaaccuacgaacugcagacacucgagcugaacauggaaacccuuaauaugugcaugccucuguccuguacaaagaacaauucucaucacuauauucggguuggcaacgagaccgggcucgagcugacacuuaccaauacgagcauccugaaccauaaauuuugcaaucucuccgacgcgcacaagcgcaaccuguacgaucauucucugaugagcauuaucuccaccuuccaccucagcauuccgaauuuuaaccaguaugaagcuaugucuugugacuucaauggaggcaaaaucacagugcaguacaaccugucccacagcuuugccgucgaugccgcuggccauugcgggacccuugccaauggagugcugcaaacauucaugagaauggcuuggggcgggucuuauauugcccucgacuccggacggggcaacugggauuguaucaugaccagcuaccaguaccugaucauucagaacacgacaugggacgaucacugccaguuuucucgccccuccccuaucggguaucuuggacugcucagccaaagaacccgggacauuuacaucucccgcagacugcugggcacauucaccuggacccucucugauagcgagggcaaugaaacacccgggggauauugucugacgcgguggaugcuuauugaggcggagcugaagugcuuuggcaacaccgccguugcuaaguguaaugaaaaacaugacgaggaguucugcgauaugcuccgccuguuugacuucugcaagcaggccaucagacggcuuaaaaccccugcucagauguccauccagcugauuaacaaggccgugaaugcgcucaucaacgaucaacugauuaugaaaaaucaucugcgcgacaucauggggauucccuacuguaacuauagcagauacugguaucucaaucacacaucuacaggaaagaccucccugccucggugcuggcuuaucagcaacggcucuuaccugaaugaaacgaaguucagcgacgauaucgaacagcaggccgacaacaugauuacagagaugcuccaaaaagaguacaucgaucgccaggggaagaccccgcugggacuggucgaccuuuuuguguucuccaccucuuuuuaucucauuagcaucuuccugcaccuggugaaaauucccacacacagacauaucgucggcaagccuugucccaaaccucaccggcucaaucauaugggcauuugcuccugugggcuguacaagcagcccggaguuccggugagauggaaacgcuga

SEQ ID NO: 29865 - RNA, 1476 nt, Artificial Sequence
  derived and/or modified CDS sequence (opt5) from LASV(AV;Clade V)__CCA30314__GPCmut6
augggccagaucgugaccuucuuucaagaggucccccacguuauugaagaggugaugaacaucgugcugauugcccucagcauccuggcuguccuuaaggggcuguacaauauugccacaugcggacucaucggccugaucacguuccuucugcucugugggagauccugcucuagcaaccuguauaaaggaguguacgaacugcagucccucgaccugaauauggagacccuuaacauguguaugccucugucuugcacaaagaauaacagccaucacuauauucggguuggcaaugauaccgggcucgaacugacacuuaccaacacauccauccugaaucauaaauuuuguaaccucucugacgcgcacaagaaagaucuguacgaccaugcucugaugagcauuaucuccaccuuccaccucagcauuccgaauuuuaaccaguaugaggccaugucuugcgauuucaauggaggcaagaucuccgugcaguacaaccugagccacucuuaugccauugacgcugccaaucauuguggcacggucgcuaacgggauccuucaaaccuuuaugcgcauggccuggggaggcuccuacaucgcgcuggauagcgggagaggaaacugggacugcauuaugacaucuuaccaguaucucaucauucagaauaccacaugggagaaccacugucaguucucccggcccagcccuaucggcuaccuggggcuucugucccaacgcaccagagauauuuauaucucucggcgccuccugggaacguuuacauggacccugagcgacuccgaaggcaaugccacacccggcggguacugccucaccagauggaugcugaucgaggcugaacuuaaguguuucggaaacaccgccguggcuaaaugcaaugagaagcaugaugaggaauuuugcgacaugcugcgccucuucgauuuuuguaaacaggccauuagccggcugaagucuccugcgcagauguccauccagcuuauuaacaaagccguuaaugcucugaucaacgaccaacucauuaugaagaaucaccugagagacaucaugggcauccccuauugcaacuacagcaaguauugguaccugaaucacacaauuacggggaaaaccucucucccuaaguguuggcuggugagcaacggauccuaccuuaaugagacacauuucucugaugacaucgaacagcaggccgauaacaugauuaccgagaugcugcaaaaagaauauauggagcggcagggcaagacaccgcucgggcuggucgaccuguucguguuuagcaccuccuucuaccuuaucagcauuuuucuccgccuggugaaaauccccacgcacagacauauugucggaaagccuugccccaaaccucaccggcugaaucauaugggcaucuguucuugcggccucuauaagcagcccgggguuccggugcgcuggaagagauga

SEQ ID NO: 29866 - RNA, 1473 nt, Artificial Sequence
  derived and/or modified CDS sequence (opt5) from LASV(Togo/2016/7082;Clade VI)__AMR44577__GPCmut6
augggccagaucauuaccuucuuucaagaggugccccacgucaucgaagagguuaugaacauugugcugaucgcccucagccugcuugcuauucugaaggggguguacaaugucgccacaugcggaaucaucggccucgugacguuccuguuucuuugugggagauccugcucucugauuuauaaaggaagcuacgaacuccagacccuggagcugaacauggaaacacucaauauguguaugccucuguccugcaccaagaacucuagccaucacuauauccggguuggcaaugagacagggcuugagcugacccucacaaacaccuccauuaucaaucauaaauucuguaaccugucugacgcgcacaagcgcaaucuuuacgaucaugcucugaugagcauucucuccacguuucaccugagcaucccgaacuucaaucaguaugaagccaugucuugcgacuuuaacggaggcaaaauuuccgugcaguacaaucugagccacgccuaugcugucgaugccgcugagcauuguggcaccguggccaacgggguucuccaaacauucaugagaauggcguggggaggcucuuacaucgcccuggacuccgggcggggaaauugggauugcaucaugaccagcuaccaguaucuuauuauccagaacacaaccugggaagaccacugucaguuuucucgccccuccccuauuggcuaccuggggcuccugagccaaagaacgcgggauaucuauauuucccgcagacuucugggaacauucaccuggacacucucugacagcgagggcaacgagacccccggcggguacugccugacccgguggaugcugaucgaagcugagcucaaguguuuuggaaauacagccguggcuaagugcaacgaaaaacaugaugaggaguucugcgacaugcugcgccuuuuugauuucuguaagcaggccauccagagacugaaauccccugcgcagaugagcauucaacucaucaauaaggccgucaacgcucugauuaaugaccagcuuaucaugaaaaaccaucugcgggauaugaugggcauucccuauugcaauuacucuaaguauugguaccucaaccacacguccagcgggcgcaccucucugccuaaguguuggcuggugagcaauggauccuaccucaacgaaacacacuucucugacgacaucgagcagcaagccgauaauaugaucaccgaaaugcugcagaaagaguauauugacagacagggcaagacaccgcuugggcugguggaucucuuugucuucagcaccuccuuuuaccugaucagcauuuuccugcaccuuaucaaaauucccacgcaucggcacaucguuggaaagccuugccccaaaccucaucgccucaaccacaugggcauuuguucuugcggccuguauaagcagcccggggugccgacaagauggaaacgguga

SEQ ID NO: 29867 - RNA, 1473 nt, Artificial Sequence
  derived and/or modified CDS sequence (opt5) from LASV(KAK-428;Clade n.d. (VII))__ANH09740__GPCmut6
augggccagaucgugaccuucuuucaagaggucccccacguuauugaagaggugaugaacaucgugcugauugcccucagccugcuugcuauccugaaggggcucuacaauuucgccacaugcggagucauuggccugaucacguuucuucugcucugugggagauccugcucugcgaccuauaaaggacaguacgaacugcagacacuggagcucaacauggaaagccugaauauguguaugccucuuuccugcaccaagaacaauucucaucacuauauccgggcuggcaacaauacagggcuggagcucacccugacaaacaccagcauuaucucccauaaauucuguaaucuuucugacgcccacaagaaaaaccuguacgaucauacgcucaugagcauuaucaccacauuucaccuguccauuccgaauuucaaccaguaugaggccaugagcugcgacuuuaauggaggcaagaucucuauucaauacaaccugucccacagcuaugcuggcgaugccgcucagcauugugggaccguggccaauggaguucuccagacauucaugcgcauggcguggggcgggucuuaccuggcccuugacuccggaagacggggcugggauugcaucaucagcucuuaccaguaucugauuauccaaaacaccacgugggacgaucacugucaguuuucccgccccagcccuauuggguaccucggauucgugucccagaagacaagagacaucuauauuucucggcgccugcuuggcaccuuuacauggacccugagcgauuccgaaggccaugacaugcccgggggauacugccucaccagauggaugcugaucgaggcugaucugaaauguuucggcaacacagccgucgcuaagugcaaugaaaaacacgacgaggaguuuugcgauauguggcgccucuucgacuucuguaagcaggccauccaacggcugaaagcgccugcccagaugaacauucagcuuaucaauaaggcugugaacgcccugauuaaugaccaacucaugaugaagaaccaccugagagauaucauggggauucccuauugcaauuacagcaaauuuugguaucuuaacaauacgaccacaggacggaccucucugccucgcuguuggcucaucuccaacggcagcuaccugaaugaaacacauuucucugacgauaucgagcagcaggcugacaacaugauuaccgaaaugcugcagaaggaguacauggauagacaagggaaaacgccgcucggacugguugaccuuuuuguguucagcacauccuuuuaucugaucaccauuuuccuccaccuggucaagauccccacccaucggcacauugugggcaaaccuugccccaagccucaucgccugaaucacaugggcaucuguucuugcgggcuuuacaaacagcccggagugccggucagauggaagcgguga

SEQ ID NO: 29868 - RNA, 1473 nt, Artificial Sequence; identical to SEQ ID NO: 29862
  derived and/or modified CDS sequence (opt5) from LASV(Pinneo-NIG-1969;Clade I)__AIT17836__GPCmut6

SEQ ID NO: 29869 - RNA, 1473 nt, Artificial Sequence
  derived and/or modified CDS sequence (opt5) from LASV(ISTH0009-NIG-2011;Clade II)__AIT17404__GPCmut6
augggccagaucauuaccuucuuucaagaggugccccacgucaucgaagagguuaugaacauugugcugaucgcccucagccugcuugcuauucugaaggggaucuacaauguggccacaugcggacucuucggccuggucuccuuucuucugcucugugggagaucuugcagcacgaccuauaaaggaguguacgaacugcagacacuggagcucgacauggcgucccugaacauguguaugccucuuucuugcaccaagaauaacagccaucacuauaucaugguuggcaaugaaacagggcuggagcucacccugacaaacaccuccauuaucaaucauaaauucuguaaccuuucugaugcucacaagaaaaaucuguacgaccaugcccucaugagcauuaucuccacguuucaccugagcauuccgaacuucaaucaguaugaggccaugucuugcgauuuuaacggaggcaagaucuccgugcaguacaaucugagccacgcuuaugccgucgacgcugccaaccauuguggcaccauugcgaauggggugcuccaaacauucaugcggauggccuggggaggcucuuacaucgcucuggauuccgggaagggaagcugggacugcaucaugaccucuuaccaguaucuuauuauccagaacacaaccugggaagaucacugucaguuuucccgccccagcccuauuggcuaccuggggcuccugucccaaagaacgcgggacaucuauauuucucgcagacuucugggaacauucaccuggacacucagcgauuccgagggcaacgaaacccccggcggguacugccugacccgguggaugcugaucgaggccgagcucaaauguuuuggaaauacagcuguugccaagugcaacgaaaaacaugacgaggaguucugcgauaugcugcgccuuuuugacuucuguaagcaggcgaucagacggcugaaaacgccugcccagaugagcauucagcucaucaauaaggcugugaacgcccugauuaaugaucaacuuaucaugaagaaccaucugcgcgacauuaugggcauccccuauugcaauuacucuaaauauugguaccucaaccacaccgucacagggaagaccucccugccuagauguuggcuggugagcaauggaucuuaccucaacgaaacacacuucagcgacgauaucgaacagcaggcugacaauaugauuaccgagcugcuucaaaaagaguauauggaucggcagggcaagacgccgcuggggcucguggaccuguuugucuucuccacaucuuuuuaccugaucagcauuuuccuucaccucaucaaaauucccacccaucgccacaucaccggaaagccuugccccaaaccucauagacugaaccacaugggcauuuguuccugcggccuguauaagcaccccgggguuccggugaaguggaaacgguga

SEQ ID NO: 29870 - RNA, 1473 nt, Artificial Sequence
  derived and/or modified CDS sequence (opt5) from LASV(ISTH2010-NIG-2012;Clade II)__AIT17482__GPCmut6
augggccagaucauuaccuucuuucaagaggugccccacgucaucgaagagguuaugaacauugugcugaucgcccucagccugcuugcuauucugaaggggaucuacaauguggccacaugcggacucuucggccuggucuccuuucuucugcucugugggagaucuugcagcacgaccuauaaaggaguguacgaacugcagacacuggagcucgacauggcgucccugaacauguguaugccucuuucuugcaccaagaauaacagccaucacuauaucaugguuggcaaugaaacagggcuggagcucacccugacaaacaccuccauuaucaaucauaaauucuguaaccuuucugaugcucacaagaaaaaucuguacgaccaugcccucaugagcauuaucuccacguuucaccugagcauuccgaacuucaaucaguaugaggccaugucuugcgauuuuaacggaggcaagaucuccgugcaguacaaucugagccacgcuuaugccgucgacgcugccaaccauuguggcaccauugcgaauggggugcuccaaacauucaugcggauggccuggggaggcucuuacaucgcucuggauuccgggaagggaagcugggacugcaucaugaccucuuaccaguaucuuauuauccagaacauuacaugggaagaucacugucaguuuucccgccccagcccuaucggcuaccuggggcuccugucccaaagaacccgggacauuuauaucucucgcagacuucugggaacguucacauggacccucagcgauuccgagggcaacgaaacacccggcggguacugccugacccgguggaugcugaucgaggccgagcucaaauguuuuggaaauaccgcuguugccaagugcaacgaaaaacaugacgaggaguucugcgauaugcugcgccuuuuugacuucuguaagcaggcgauuagacggcugaaaacgccugcccagaugagcauccagcucauuaauaaggcugugaacgcccugaucaaugaucaacuuauuaugaagaaccaucugcgcgacaucaugggcauccccuauugcaauuacucuaaauauugguaccucaaccacacagucaccgggaagacaucccugccuagauguuggcuggugagcaauggaucuuaccucaacgaaacccacuucagcgacgauauugaacagcaggcugacaauaugaucacagagcugcuucaaaaagaguauauugaucggcagggcaagaccccgcuggggcucguggaccuguuugucuucuccacgucuuuuuaccugaucagcauuuuccuucaccucguuaaaauccccacacaucgccacguggugggaaagccuugccccaaaccucauagacugaaccacaugggcauuuguuccugcggccuguauaagcaccccggggucccggugaaguggaaacgguga

SEQ ID NO: 29871 - RNA, 1473 nt, Artificial Sequence
  derived and/or modified CDS sequence (opt5) from LASV(Lassa virus/H.sapiens-wt/NGA/2015/ISTH_0543;Clade II)__AVO03639__GPCmut6
augggccagaucauuaccuucuuucaagaggugccccacgucaucgaagagguuaugaacauugugcugaucgcccucagccugcuugcuauucugaaggggaucuacaauguggccacaugcggacucuucggccuggucuccuuucuucugcucugugggagaucuugcagcacgaccuauaaaggaguguacgaacugcagacacuggagcucgacauggcgaaccugaauauguguaugccucuuuccugcaccaagaacaauucucaucacuauaucaugguuggcaacgaaacagggcuggagcucacccugacaaauaccagcauuaucaaccauaaauucuguaaucuuuccgaugcucacaagaaaaaccuguacgaccaugcccucaugucuauuaucagcacguuucaccuguccauuccgaauuucaaccaguaugaggccaugagcugcgauuuuaauggaggcaagaucucugugcaguacaaccugucccacaccuaugcugucgacgccgcuaaucauuguggcacaauugccaacggggugcuccaaaccuucaugcggauggcguggggaggcagcuacaucgcccuggauucugggaagggauccugggacugcaucaugacaagcuaccaguaucuuguuauucagaacaccacgugggaagaucacugucaguuuucucgccccuccccuaucggcuaccuggggcuccugagccaaagaacacgggacauuuauaucucccgcagacuucugggaaccuucacauggacccucucugauagcgagggcaaugaaacccccggcggguacugccugacacgguggaugcugauugaggcugagcucaaauguuuuggaaacacggccguggcuaagugcaaugaaaaacaugacgaggaguucugcgauaugcugcgccuuuuugacuucuguaagcaggccaucagacggcugaaaaccccugcgcagauguccauccagcucauuaacaaggccgucaaugcucugaucaacgaucaacuuauuaugaagaaucaucugcgcgacaucaugggcauucccuauugcaacuacagcaaauauugguaccucaaucacacagugaccgggaagacaucucugccuagauguuggcugguguccaacggaagcuaccucaaugaaacccacuucucugacgauaucgaacagcaggccgacaacaugaucacggagcugcuucaaaaagaguauauugaucggcagggcaagacaccgcuggggcucgucgaccuguuuguuuucagcaccuccuuuuaccugaucucuauuuuccuucaccucgugaaaauccccacccaucgccacauuacaggaaagccuugccccaaaccucauagacugaaucacaugggcaucuguagcugcggccuguauaagcaccccggggugccggucaaguggaaacgguga

SEQ ID NO: 29872 - RNA, 1473 nt, Artificial Sequence
  derived and/or modified CDS sequence (opt5) from LASV(Lassa virus/H.sapiens-wt/NGA/2016/ISTH_0009;Clade II)__AVO03571__GPCmut6
augggccagaucauuaccuucuuucaagaggugccccacgucaucgaagagguuaugaacauugugcugaucgcccucagccugcuugcuauucugaaggggaucuacaauguggccacaugcggacuccugggccuugucuccuuccugcuccugugugggagaucuugcagcacgaccuauaaaggaguguacgaacugcagacacucgagcuggacauggcgucccuuaacauguguaugccucugucuugcaccaagaauaacagccaucacuauaucaugguuggcaaugaaacagggcucgagcugacccuuacaaacaccuccauuaucaaucauaaauuuuguaaccugucugaugcucacaagaaaaaucucuacgaccaugcccugaugagcauuaucuccacguuccaccugagcauuccgaacuuuaaucaguaugaggccaugucuugcgauuucaacggaggccggaucuccgugcaguacaaucucagccacucuuaugcugucgacgccgcuaaccauuguggcaccauugccaauggggugcugcaaacauuuaugcgcauggcguggggaggcuccuacaucgcccuugauagcgggaagggaucuugggacugcaucaugaccuccuaccaguaucugauuauccagaacacaaccugggaagaucacugucaguucagcagacccuccccuauuggcuaccucgggcugcuuucucaacggacgcgcgacaucuauauuagcagacggcugcucggaacauuuaccuggacacuguccgauagcgagggcaacgaaacccccggcggguacugccugacccgcuggaugcucaucgaggcugagcugaaguguuucggaaauacagccguugcuaaaugcaacgaaaagcaugacgaggaauuuugcgauaugcuuagacuguucgacuuuuguaaacaggccauccggcgccucaagacgccugcgcagaugucuauucagcugaucaauaaagccgugaacgcucuuauuaaugaucaacugaucaugaagaaccaccucagagacauuaugggcauccccuauugcaauuacuccaaguauugguaccugaaccacaccgucacagggaaaaccagccugccucgguguuggcucgugucuaauggaagcuaccugaacgagacacauuucuccgacgauaucgaacagcaggccgacaauaugauuaccgagcuucugcaaaaggaguauaucgaucgccagggcaaaacgccgcucgggcugguggaccuguucgucuuuucuaccagcuucuaccuuauuuccaucuuucuccaccugguuaagauucccacacauagacacaucaccggaaaaccuugccccaagccucaucggcugaaccacaugggcauuuguagcugcggccucuauaaucaccccggggugccggugaaauggaagcgcuga

SEQ ID NO: 29873 - RNA, 1473 nt, Artificial Sequence
  derived and/or modified CDS sequence (opt5) from LASV(Lassa virus/H.sapiens-wt/NGA/2016/ISTH_0017;Clade II)__AVO03567__GPCmut6
augggccagaucauuaccuucuuucaagaggugccccacgucaucgaagagguuaugaacauugugcugaucgcccucagccugcuugcuauucugaaggggaucuacaauguggccacaugcggacucuucggccuggucuccuuucuucugcucugugggagaucuugcagcacgaccuauaaaggaguguacgaacugcagacacuggagcucgacauggcgucccugaacauguguaugccucuuucuugcaccaagaauaacagccaucacuauaucaugguuggcaaugaaacagggcuggagcucacccugacaaacaccuccauuaucaaucauaaauucuguaaccuuucugaugcucacaagaaaaaucuguacgaccaugcccucaugagcauuaucuccacguuucaccugagcauuccgaacuucaaucaguaugaggccaugucuugcgauuuuaacggaggcaagaucuccgugcaguacaaucugagccacaccuaugcuauugacgccgcuaaccauuguggcacaaucgccaaugggguccuccaaaccuucaugcggauggcguggggaggcucuuacaucgcccuggauuccgggaagggaagcugggacugcauuaugacaucuuaccaguaucuuaucauucagaacaccacgugggaagaucacugucaguuuucccgccccagcccuaucggcuaccuggggcuccugucccaaagaacacgggacauuuauaucucucgcagacuucugggaaccuucacauggacccucagcgauuccgagggcaacgaaacccccggcggguacugccugacacgguggaugcugaucgaggcugagcucaaauguuuuggaaauacggccguggcuaagugcaacgaaaaacaugacgaggaguucugcgauaugcugcgccuuuuugacuucuguaagcaggccauuagacggcugaaaaccccugcgcagaugagcauccagcucauuaauaaggccguuaacgcucugaucaaugaucaacuuauuaugaagaaccaucugcgcgacaucaugggcauccccuauugcaauuacucuaaauauugguaccucaaccacacagugaccgggaagacaucccugccuagauguuggcuggucagcaauggaucuuaccucaacgaaacccacuucagcgacgauauugaacagcaggccgacaauaugaucacggagcugcuucaaaaagaguauauggaucggcagggcaagacaccgcuggggcucguggaccuguuuguguucuccaccucuuuuuaccugauuagcaucuuccuucaccucguccgcauucccacccauagacacguuaucggaaaaccuugccccaagccucaucggcugaaccacaugggcauuuguuccugcggccuguauaaacaccccggggugccggugaaguggaagcgcuga

SEQ ID NO: 29874 - RNA, 1473 nt, Artificial Sequence
  derived and/or modified CDS sequence (opt5) from LASV(Lassa virus/H.sapiens-wt/NGA/2018/ISTH_0959;Clade II)__AVV65099__GPCmut6
augggccagaucauuaccuucuuucaagaggugccccacgucaucgaagagguuaugaacauugugcugaucgcccucagccugcuugcuauucugaaggggaucuacaauguggucacaugcggacucuucggccugguguccuuucuucugcucugugggagaucuugcagcacgaccuauaaaggaguuuacgaacugcagacacuggagcucgacauggccucccugaacauguguaugccucuuucuugcaccaagaauaacagccaucacuauaucauggugggcaaugaaacagggcuggagcucacccugacaaacaccuccauuaucaaucauaaauucuguaaccuuucugaugcgcacaagaaaaaucuguacgaccaugcucucaugagcauuaucuccacguuucaccugagcauuccgaacuucaaucaguaugaggccaugucuugcgauuuuaacggaggcaagaucuccguccaguacaaucugagccacgccuaugcuauugacgccgcuaaccauuguggcaccaucgccaauggggugcuccaaacauucaugcggauggcguggggaggcucuuacaucgcccuggauuccgggaagggaagcugggacugcauuaugaccucuuaccaguaucuuaucauucagaacacaaccugggaagaucacugucaguuuucccgccccagcccuaucggcuaccuggggcuccugucccaaagaacgcgggacauuuauaucucucgcagacuucugggaacauucaccuggacacucagcgauuccgagggcaacgaaacccccggcggguacugccugacccgguggaugcugaucgaggcugagcucaaauguuuuggaaauacagccguugcuaagugcaacgaaaaacaugacgaggaguucugcgauaugcugcgccuuuuugacuucuguaagcaggccauuagacggcugaaaacgccugcgcagaugagcauccagcucauuaauaaggccgugaacgcucugaucaaugaucaacuuauuaugaagaaccaucugcgcgacaucaugggcauccccuauugcaauuacucuaaauauugguaccucaaccacaccgucacagggaagaccucccugccuagauguuggcuggugagcaauggaucuuaccucaacgaaacacacuucagcgacgauauugaacagcaggccgacaauaugaucaccgagcugcuucaaaaagaguauauugaucggcagggcaagacgccgcuggggcucguggaccuguuugucuucuccacaucuuuuuaccugaucagcauuuuccuucaccucguuaaaauccccacccaucgccacgugauuggaaagccuugccccaaaccucauagacugaaccacaugggcaucuguuccugcggccuguauaagcaccccggggugccggucaaguggaaacgguga

SEQ ID NO: 29875 - RNA, 1473 nt, Artificial Sequence
  derived and/or modified CDS sequence (opt5) from LASV(LASV003-NIG-2008;Clade II)__AIT17580__GPCmut6
augggccagaucauuaccuucuuucaagaggugccccacgucaucgaagagguuaugaacauugugcugaucgcccucagccugcuugcuauucugaaggggaucuacaauguggccacaugcggacucuucggccuggucuccuuucuucugcucugugggagaucuugcagcacgaccuauaaaggaguguacgaacugcagacacuggagcucgacauggcgucccugaacauguguaugccucuuucuugcaccaagaauaacagccaucacuauaucaugguuggcaaugaaacagggcuggagcucacccugacaaacaccuccauuaucaaucauaaauucuguaaccuuucugaugcucacaagaaaaaucuguacgaccaugcccucaugagcauuaucuccacguuucaccugagcauuccgaacuucaaucaguaugaggccaugucuugcgauuuuaacggaggcaagaucuccgugcaguacaaucugagccacaccuaugcugucgacgccgcuaaccauuguggcacaauugccaauggggugcuccaaaccuucaugcggauggcguggggaggcucuuacaucgcccuggauuccgggaagggaagcugggacugcaucaugacaucuuaccaguaucuuauuauccagaacaccacgugggaagaucacugucaguuuucccgccccagcccuauuggcuaccuggggcuccugucccaaagaacacgggacaucuauauuucucgcagacuucugggaaccuucacauggacccucagcgauuccgagagcaacgaaacccccggcggcuacugccugacacgguggaugcugaucgaggcugagcucaaauguuuugggaauacggccguugcuaagugcaacgaaaaacaugacgaggaguucugcgauaugcugcgccuuuuugacuucuguaagcaggccaucagacggcugaaagcgccugcccagaugucuauucagcucaucaauaaggcugugaacgcccugauuaaugaucaacuuaucaugaagaaccaucugcgcgacauuaugggaauccccuauugcaauuacuccaaauauugguaccucaaccacaccgucacaggcagaaccagccugccucgguguuggcuggugucuaaugggagcuaccucaacgaaacacacuucuccgacgauaucgaacagcaggcugacaauaugauuaccgagcugcuucaaaaggaguauauggaucgccagggaaaaacgccgcugggccucguggaccuguuugucuucucuaccagcuuuuaccugaucuccauuuuccuucaccucguuaagauccccacacauagacacgugauugggaaaccuugccccaagccucaucggcugaaccacaugggaaucuguagcugcggccuguauaaacaccccggcgugccggucaaguggaagcgcuga

SEQ ID NO: 29876 - RNA, 1473 nt, Artificial Sequence
  derived and/or modified CDS sequence (opt5) from LASV(LASV035-NIG-2009;Clade II)__AIT17588__GPCmut6
augggccagaucauuaccuucuuucaagaggugccccacgucaucgaagagguuaugaacauugugcugaucgcccucagccugcuugcuauucugaaggggaucuacaauguggccacaugcggacucuucggccuggucuccuuucuucugcucugugggagaucuugcagcacgaccuauaaaggaguguacgaacugcagacacuggagcucgacauggcgucccugaacauguguaugccucuuucuugcaccaagaauaacagccaucacuauaucaugguuggcaaugaaacagggcuggagcucacccugacaaacaccuccauuaucaaucauaaauucuguaaccuuucugaugcucacaagaaaaaucuguacgaccaugcccucaugagcauuaucuccacguuucaccugagcauuccgaacuucaaucaguaugaggccaugucuugcgauuuuaacggaggcaagaucuccgugcaguacaaucugagccacgcuuaugccgucgacgcugccaaccauuguggcaccauugcgaauggggugcuccaaacauucaugcggauggccuggggaggcucuuacaucgcucuggauuccgggaagggaagcugggacugcaucaugaccucuuaccaguaucuuauuauccagaacacaaccugggaagaucacugucaguuuucccgccccagcccuauuggcuaccuggggcuccugucccaaagaacgcgggacaucuauauuucucgcagacuucugggaacauucaccuggacacucagcgauuccgagggcaacgaaacccccggcggguacugccugacccgguggaugcugaucgaggccgagcucaaauguuuuggaaauacagcuguugccaagugcaacgaaaaacaugacgaggaguucugcgauaugcugcgccuuuuugacuucuguaagcaggcgaucagacggcugaaagccccugcucagaugagcauucagcucaucaauaaggccgugaacgcucugauuaaugaucaacuuaucaugaagaaccaucugcgcgacauuaugggcauccccuauugcaauuacucuaaauauugguaccucaaccacacggucaccgggaagacaucccugccuagauguuggcuggugagcaauggaucuuaccucaacgaaacccacuucagcgacgauaucgaacagcaggccgacaauaugauuacagagcugcuucaaaaagaguauaucgaucggcagggcaagaccccgcuggggcucguggaccuguuugucuucuccacgucuuuuuaccugauuagcaucuuccuucaccucguuaaaauucccacacaucgccacgugaucggaaagccuugccccaaaccucauagacugaaccacaugggcauuuguuccugcggccuguauaagcaccccggggugccggucaaguggaaacgguga

SEQ ID NO: 29877 - RNA, 1473 nt, Artificial Sequence
  derived and/or modified CDS sequence (opt5) from LASV(LASV1000-NIG-2009;Clade II)__AIT17782__GPCmut6
augggccagaucauuaccuucuuucaagaggugccccacgucaucgaagagguuaugaacauugugcugaucgcccucagccugcuugcuauucugaaggggaucuacaauguggccacaugcggacucuucggccuggucuccuuucuucugcucugugggagaucuugcagcacgaccuauaaaggaguguacgaacugcagacacuggagcucgacauggcgucccugaacauguguaugccucuuucuugcaccaagaauaacagccaucacuauaucaugguuggcaaugaaacagggcuggagcucacccugacaaacaccuccauuaucaaucauaaauucuguaaccuuucugaugcucacaagaaaaaucuguacgaccaugcccucaugagcauuaucuccacguuucaccugagcauuccgaacuucaaucaguaugaggccaugucuugcgauuuuaacggaggcaagaucuccgugcaguacaaucugagccacaccuaugcugucgacgccgcuaaccauuguggcacaauugccaauggggugcuccaaaccuucaugcggauggcguggggaggcucuuacaucgcccuggauuccgggaagggaagcugggacugcaucaugacaucuuaccaguaucuuauuauccagaacaccacgugggaagaucacugucaguuuucccgccccagcccuauuggcuaccuggggcuccugucccaaagaacacgggacaucuauauuucucgcagacuucugggaaccuucacauggacccucagcgauuccgagggcaacgaaacccccggcggguacugccugacacgguggaugcugaucgaggcugagcucaaauguuuuggaaauacggccguugcuaagugcaacgaaaaacaugacgaggaguucugcgauaugcugcgccuuuuugacuucuguaagcaggccaucaaaagacugaagaccccugcgcagaugagcauucagcucaucaauaaggccgugaacgcucugauuaaugaucaacuuaucaugaaaaaccaucugcgggacauuaugggcauccccuauugcaauuacucuaaguauugguaccucaaccacacagucaccgggaaaacaucccugccucgcuguuggcuggugagcaauggaucuuaccucaacgaaacccacuucagcgacgauaucgaacagcaggccgacaauaugauuacggagcugcuucaaaaggaguauaucgauagacagggcaaaacaccgcuggggcucguggaccuguuugucuucuccaccucuuuuuaccugauuagcaucuuccuucaccucguuaagauucccacccaucggcacguggugggaaaaccuugccccaagccucaucgccugaaccacaugggcaucuguuccugcggccuguauaagcaccccggggucccggugaaauggaagagauga

SEQ ID NO: 29878 - RNA, 1473 nt, Artificial Sequence
  derived and/or modified CDS sequence (opt5) from LASV(LASV221-NIG-2010;Clade II)__AIT17624__GPCmut6
augggccagaucauuaccuucuuucaagaggugccccacgucaucgaagagguuaugaacauugugcugaucgcccucagccugcuugcuauucugaaggggaucuacaauguggccacaugcggacucuucggccuggucuccuuucuucugcucugugggagaucuugcagcacgaccuauaaaggaguguacgaacugcagacacuggagcucgacauggcgucccugaacauguguaugccucuuucuugcaccaagaauaacagccaucacuauaucaugguuggcaaugaaacagggcuggagcucacccugacaaacaccuccauuaucaaucauaaauucuguaaccuuucugaugcucacaagaaaaaucuguacgaccaugcccucaugagcauuaucuccacguuucaccugagcauuccgaacuucaaucaguaugaggccaugucuugcgauuuuaacggaggcaagaucuccgugcaguacaaucugagccacaccuaugcuauugacgccgcuaaccauuguggcacaaucgccaaugggguccuccaaaccuucaugcggauggcguggggaggcucuuacaucgcccuggauuccgggaagggaagcugggacugcauuaugacaucuuaccaguaucuuaucauucagaacaccacgugggaagaucacugucaguuuucccgccccagcccuaucggcuaccuggggcuccugucccaaagaacacgggacauuuauaucucucgcagacuucugggaaccuucacauggacccucagcgauuccgagggcaacgaaacccccggcggguacugccugacacgguggaugcugaucgaggcugagcucaaauguuuuggaaauacggccguggcuaagugcaacgaaaaacaugacgaggaguucugcgauaugcugcgccuuuuugacuucuguaagcaggccauuagacggcugaaaaccccugcgcagaugagcauccagcucauuaauaaggccguuaacgcucugaucaaugaucaacuuauuaugaagaaccaucugcgcgacaucaugggcauccccuauugcaauuacucuaaauauugguaccucaaccacacagugaccgggaagacaucccugccuagauguuggcuggucagcaauggaucuuaccucaacgaaacccacuucagcgacgauauugaacagcaggccgacaauaugaucacggagaugcugcaaaaagaguauauggaucggcagggcaagacaccgcuugggcugguggaccucuuuguguucuccaccucuuuuuaccugauuagcaucuuccugcaccuugucaaaauucccacccaucgccacguuaucggaaagccuugccccaaaccucauagacucaaccacaugggcauuuguuccugcggccuguauaagcaccccggggugccggugaaguggaaacgguga

SEQ ID NO: 29879 - RNA, 1473 nt, Artificial Sequence
  derived and/or modified CDS sequence (opt5) from LASV(LASV237-NIG-2010;Clade II)__AIT17638__GPCmut6
augggccagaucauuaccuucuuucaagaggugccccacgucaucgaagagguuaugaacauugugcugaucgcccucagccugcuugcuauucugaaggggaucuacaauguggccacaugcggacucuucggccuggucuccuuucuucugcucugugggagaucuugcagcacgaccuauaaaggaguguacgaacugcagacacuggagcucgacauggcgucccugaacauguguaugccucuuucuugcaccaagaauaacagccaucacuauaucaugguuggcaaugaaacagggcuggagcucacccugacaaacaccuccauuaucaaucauaaauucuguaaccuuucugaugcucacaagaaagaccuguacgaucaugcccucaugagcauuaucuccacguuucaccugagcauuccgaauuucaaccaguaugaggccaugucuugcgacuuuaauggaggcaagaucuccgugcaguacaaccugagccacaccuaugcugucgaugccgcuaaucauuguggcacaauugccaacggggugcuccaaaccuucaugcggauggcguggggaggcucuuacaucgcccuggacuccgggaagggaagcugggauugcaucaugacaucuuaccaguaucuuauuauccagaauaccacgugggaagaccacugucaguuuucccgccccagcccuauuggcuaccuggggcuccugucccaaagaacacgggauaucuauauuucucgcagacuucugggaaccuucacauggacccucagcgacuccgagggcaacgaaacccccggcggguacugccugacacgguggaugcugaucgaggcugagcucaaauguuuuggaaacacggccguugcuaagugcaaugaaaaacaugaugaggaguucugcgacaugcugcgccuuuuugauuucuguaagcaggccaucagacggcugaaaaccccugcgcagaugagcauucagcucaucaacaaggccgugaaugcucugauuaacgaccaacuuaucaugaagaaucaucugcgcgacauuaugggcauccccuauugcaacuacucuaaauauugguaccucaaucacacagucaccgggaagacaucccugccuagauguuggcuggugagcaacggaucuuaccucaaugaaacccacuucagcgaugacaucgaacagcaggccgauaacaugauuacggagcugcuucaaaaagaguauauggaccggcagggcaagacaccgcuggggcucguggaucuguuugucuucuccaccucuuuuuaccugaucagcauuuuccuucaccucaucaaaauucccacccaucgccacaucacaggaaagccuugccccaaaccucauagacugaaucacaugggcauuuguuccugcggccuguauaagcaccccgggguuccggugaaguggaaacgguga

SEQ ID NO: 29880 - RNA, 1473 nt, Artificial Sequence
  derived and/or modified CDS sequence (opt5) from LASV(LASV253-NIG-2011;Clade II)__AIT17670__GPCmut6
augggccagaucauuaccuucuuucaagaggugccccacgucaucgaagagguuaugaacauugugcugaucgcccucagccugcuugcuauucugaaggggaucuacaauguggccacaugcggacucuucggccuggucuccuuucuucugcucugugggagaucuugcagcacgaccuauaaaggaguguacgaacugcagacacuggagcucgacauggcgucccugaacauguguaugccucuuucuugcaccaagaauaacagccaucacuauaucaugguuggcaaugaaacagggcuggagcucacccugacaaacaccuccauuaucaaucauaaauucuguaaccuuucugaugcucacaagaaaaaucuguacgaccaugcccucaugagcauuaucuccacguuucaccugagcauuccgaacuucaaucaguaugaggccaugucuugcgauuuuaacggaggcaagaucuccgugcaguacaaucugagccacaccuaugcugucgacgccgcuaaccauuguggcacaauugccaauggggugcuccaaaccuucaugcggauggcguggggaggcucuuacaucgcccuggauuccgggaagggaagcugggacugcaucaugacaucuuaccaguaucuuauuauccagaacaccacgugggaagaucacugucaguuuucccgccccagcccuauuggcuaccuggggcuccugucccaaagaacacgggacaucuauauuucucgcagacuucugggaaccuucacauggacccucagcgauuccgagggcaacgaaacccccggcggguacugccugacacgguggaugcugaucgaggcugagcucaaauguuuuggaaauacggccguugcuaagugcaacgaaaaacaugacgaggaguucugcgauaugcugcgccuuuuugacuucuguaagcaggccaucagacggcugaaagcgccugcccagaugagcauucagcucaucaauaaggcugugaacgcccugauuaaugaucaacuuaucaugaagaaccaucugcgcgacauuaugggcauccccuauugcaauuacucuaaauauugguaccucaaccacaccgucacagggagaaccucccugccucgguguuggcuggugagcaauggaucuuaccucaacgaaacacacuucagcgacgauaucgaacagcaggcugacaauaugauuaccgagcugcuucaaaaggaguauaucgaucgccagggcaaaacgccgcuggggcucguggaccuguuugucuucuccacaucuuuuuaccugauuagcaucuuccuucaccucguuaagauucccacccauagacacaucauuggaaaaccuugccccaagccucaucggcugaaccacaugggcaucuguuccugcggccuguauaaacaccccggggugccggugaaguggaagcgcuga

SEQ ID NO: 29881 - RNA, 1473 nt, Artificial Sequence
  derived and/or modified CDS sequence (opt5) from LASV(LASV254-NIG-2011;Clade II)__AIT17674__GPCmut6
augggccagaucauuaccuucuuucaagaggugccccacgucaucgaagagguuaugaacauugugcugaucgcccucagccugcuugcuauucugaaggggaucuacaauguggccacaugcggacucuucggccuggucuccuuucuucugcucugugggagaucuugcagcacgaccuauaaaggaguguacgaacugcagacacuggagcucgacaugaccaaccugaauauguguaugccucuuuccugcacaaagaacaauucucaucacuauaucaugguuggcaacgaaaccgggcuggagcucacacugaccaauacgagcauuaucaaccauaaauucuguaaucuuuccgaugcgcacaagaaaaaccuguacaaucaugcucucaugucuauuaucagcaccuuucaccuguccauuccgaacuucaaucaguaugaggccaugagcugcgacuuuaacggaggcaagaucucugugcaguacaaucugucccacagcuaugccgucgaugcugccaaccauuguggcacaauugcuaacggggugcuccaaaccuucaugcggauggccuggggaggcucuuacaucgcgcuggacuccgggaagggaaauugggauugcaucaugacaagcuaccaguaucuuauuauccagaacaccacgugggaagaccacugucaguuuucucgccccuccccuauuggcuaccuggggcuccugagccaaagaacacgggauaucuauauuucccgcagacuucugggaaccuucacauggacccucucugacagcgagggcaaugaaacccccggcggguacugccugacacgguggaugcugaucgaggccgagcucaaauguuuuggaaacacggcuguugccaagugcaaugaaaaacaugaugaggaguucugcgacaugcugcgccuuuuugauuucuguaagcaggcuaucagacggcugaaaaccccugcccaggcgaacauucagcucaucaauaaggccgugaacgcucugauuaaugaccaacuuaucaugaagaaccaucugcgcgauauuaugggcauccccuauugcaauuacuccaaauauugguaccucaaccacacagucaccgggaagacaagccugccuagauguuggcuggugucuaauggauccuaccucaacgaaacccacuucagcgacgacaucgaacagcaggccgauaauaugauuacggagcugcuucaaaaagaguauauggaccggcagggcaagacaccgcuggggcucguggaucuguuugucuucucuaccagcuuuuaccugaucuccauuuuccuucaccucguuaaaauccccacccaucgccacgugauuggaaagccuugccccaaaccucauagacugaaccacaugggcaucuguucuugcggccuguauaagcaccccggggugccggucaaguggaaacgguga

SEQ ID NO: 29882 - RNA, 1473 nt, Artificial Sequence
  derived and/or modified CDS sequence (opt5) from LASV(Nig08-A19;Clade III)__ADU56618__GPCmut6
augggccagaucgugaccuucuuucaagaggucccccacguuauugaagaggugaugaacaucgugcugauugcccucagcauccuggcuauucuuaaggggcuguacaauaucgccacaugcggacucaucggccuggucacguuccuucugcucuccgggagaucuuguagcaugaccuauaaaggaguguacgaacugcagacacuggagcucaacaugaauacccugaacaugugcaugccucuuuccuguacaaagaauaacucucaucacuauauuaugguuggcaaugaaaccgggcuggagcucacacugaccaacacgagccuucugcaucacaaauuuugcaaucucuccgacgcgcauaagaaaaaccuguacgaucacacccugaugucuaucauuagcacauuccaccucuccaucccgaauuuuaaccaguaugaggcuaugagcugugacuucaauggaggcaagauuaccgugcaguacaaccugucucauuccuaugccaucgaugccgcuaaucacugcggcacagucgccaacggggugcuucaaaccuuuaugcggauggcuuggggaggcagcuacauugcccuggacucugggcgcggaaagugggauuguaucaugacguccuaccaguaucucaucauucagaacacaaccugggaagaccauugccaguucagcagacccucuccuaucggcuaccuggggcuucugucccaacggacacgcgauauuuauaucagcagacggcuccugggaaccuuuaccuggacacuguccgacucugagggcaaugaaacgcccggcggguacugucucacccgcuggaugcugauugaggcggagcuuaaaugcuucggaaacacagccguugcuaaguguaaugaaaaacacgaugaggaauuuugcgacaugcugagacucuucgauuuuugcaagcaggccauccggcgccugaaagcuccugcccagaugagcauccagcuuauuaacaaggcggugaaugcccugaucaacgaccaacucauuaugaagaaucaccugagagauaucaugggcauucccuauuguaacuacuccaaauauugguaccugaaucauaccagcacagggcggaccucucucccucgcugcuggcuggucuccaacggaagcuaccuuaaugagacgcacuucucugacgacaucgaacagcaggcugauaacaugaucacagagaugcugcaaaaggaguaucucgacagacagggcaaaaccccgcuggggcugguggaucuuuucguguuuagcaccuccuucuaccucauuucuaucuuucugcaucuggucaagauucccacacaccggcauaucguuggaaaaccuugucccaagccucaccgccucaaucacaugggcauuugcagcuguggccuguauaaacagcccggggugccggugagauggaagcgguga

SEQ ID NO: 29883 - RNA, 1476 nt, Artificial Sequence
  derived and/or modified CDS sequence (opt5) from LASV(G1180-SLE-2010;Clade IV)__AIT17168__GPCmut6
augggccagaucgugaccuucuuucaagaggucccccacguuauugaagaggugaugaacaucgugcugauugcccucagcauccuggcuguccuuaaggggcuguacaauuucgccacaugcggacucgugggccugcuuacguuucugcuccugugugggagauccugcaccgcgucucgguauaaaggaguuuacgaacugcagacacucgagcugaacauggaaacccuuaauauguguaugccucugagcugcacaaagaacaauucccaucacuauauuauggugggcaacgagaccgggcucgagcugacacuuaccaauacgucuaucaucaaccauaaauucuguaaucugagcgacgcucacaagaaaaaccucuacgaucaugcccugauguccauuaucucuaccuuucaccugagcauuccgaauuucaaccaguaugaagccauguccugcgacuuuaauggaggcaagaucagcguccaguacaaccucucucacuccuaugcuggcgaugccgcuaaucauugugggacaguggccaacggaguucugcaaaccuucaugcgcauggcguggggcgggagcuacauugcccuugacucuggacacggcuccugggauugcaucaugacaagcuaccaguaucugauuauccagaacaccacgugggaggaccauugucaguuuucuagacccuccccuaucggguaccucggacugcuuagccaacggacacgcgauauuuauaucuccagacggcugcucggcaccuucacauggacccugucugacagcgaaggcaaggauacccccgggggauacugccugacacgcuggaugcucauugaggcugagcugaaauguuuuggcaauacggccguggcuaagugcaacgaaaaacacgacgaggaguucugcgauaugcuuagacuguuugacuucuguaagcaggccauccagcggcucaaagcgccugcccagauguccauucaacugaucaauaaggcugucaacgcccuuaucaaugaucagcugauuaugaagaaccaccuccgcgacaucauggggauucccuauugcaauuacagcaaauauugguaccugaaccauaccacaaccggaaagacaucucugccuaaauguuggcucguguccaauggcagcuaccugaacgaaacccacuucucugacgauaucgaacagcaagcugacaauaugauuacggagaugcuucagaaggaguauauggaaagacaggggaaaacaccgcugggacucguggaucuguuugucuucagcaccuccuuuuaccugaucucuaucuuccuucaucucguuaagauucccacccaccggcauaucgugggcaaaagcugcccuaagccccaccgccugaaccacaugggcauuuguuccugcgggcuguauaagcagccuggagugcccgucaaauggaagagauga

SEQ ID NO: 29884 - RNA, 1476 nt, Artificial Sequence
  derived and/or modified CDS sequence (opt5) from LASV(G1442-SLE-2011;Clade IV)__AIT17180__GPCmut6
augggccagaucgugaccuucuuucaagaggucccccacguuauugaagaggugaugaacaucgugcugauugcccucagcauccuggcuguccuuaaggggcuguacaauguggccacaugcggacucauuggccugguuacguuccuucugcucugugggagauccugcaccacaacccuguauaaaggaguguacgaacugcagacacucgagcugaacauggaaacccuuaauauguguaugccucugucuugcacaaagaacaauagccaucacuauauccgggucggcaacgagaccgggcucgagcugacgcuuaccaauacauccaucauuaaccauaaauuuuguaaucugucugacgcgcacaagaaaaaccucuacgaucaugcucugaugagcaucauuuccaccuuccaccugucuaucccgaauuuuaaccaguaugaagccaugagcugcgacuucaauggaggcaagauuuccgugcaguacaaccucagccacucuuaugccggcgaugcugccaaucauugugggacaguugcuaacggagugcugcaaaccuuuaugcgcauggccuggggcggguccuacaucgcgcuugacagcggaagaggcaacugggauugcauuaugacgucuuaccaguaucugaucauccagaauacaaccugggacgaucacugucaguucucccggcccagcccuauuggguaccucggacugcuuucucaacgcacaagagacgucuauaucucccggcgccugcucggcaccuuuaccuggacacugagcgauuccgagggcaaggacacgcccgggggauacugccugaccagauggaugcucauugaagccgagcugaaauguuucggcaacacagcuguggccaagugcaaugagaaacaugaugaagaguuuugcgacaugcuucggcuguucgauuuuuguaagcaggcuauccagcgccucaaagccccugcgcagaugucuauucaacugaucaacaaggccgugaaugcucuuaucaacgaccagcugauuaugaagaaucaccucagagacaucauggggauucccuauugcaacuacagcaaauauugguaccugaauaacaccgccacaggaaagaccucccugccuaaauguuggcucaucagcaauggcucuuaccugaacgaaacgcacuucuccgaugacauugagcaggaagcugauaauaugaucacagagaugcuucaaaaggaguauauggaacggcaggggaaaaccccgcugggacucgucgaccuguucguuuuuagcaccucuuucuaccugaucagcauuuuucuucaucucgugaagauccccacacaccgccauauugugggcaaauccugcccuaagccccacagacugaaccauaugggcaucuguucuugcgggcuguauaagcagccuggaguccccgugcgguggaaacgcuga

SEQ ID NO: 29885 - RNA, 1476 nt, Artificial Sequence
  derived and/or modified CDS sequence (opt5) from LASV(G3010-SLE-2013;Clade IV)__AIT17344__GPCmut6
augggccagaucgugaccuucuuucaagaggucccccacguuauugaagaggugaugaacaucgugcugauugcccucagcauccuggcuguccuuaaggggcuguacaauuucgccacaugcggacucgugggccugguuacguuucuucugcucugugggagauccugcaccacaucucuguauaaaggaguguacgaacugcagacccucgagcugaacauggaaacacuuaauauguguaugccucugagcugcaccaagaacaauucccaucacuauauuauggucggcaacgagacagggcucgagcugacccuuacgaauaccucuaucaucaaccauaaauucuguaaucugagcgacgcgcacaagaaaaaccucuacaaucaugcucugauguccauuaucucuacauuucaccugagcauuccgaacuucaaucaguaugaagccauguccugcgauuuuaacggaggcaagaucagcgugcaguacaaucucucucacuccuaugccggcgacgcugccagccauugugggaccguugcuaacggagugcugcaaacauucaugcggauggccuggggcgggucuuacauugcgcuugauuccggauacggcaagugggacugcaucaugaccagcuaucaguaccugauuauccagaacacgacaugggaggaucacugucaguuuucucgccccuccccuaucggguaucucggacugcuuagccaaagaacccgggacauuuacaucucccgcagacugcucggcacauucaccuggacccugucugauagcgaaggcaaagacacacccgggggauauugccugacgcgguggaugcucauugaggccgagcugaaguguuuuggcaauaccgcugucgccaaaugcaacgaaaagcaugaugaggaguucugcgacaugcuucgccuguuugauuucuguaaacaggcuauccagagacucaagaccccugcccagauguccauucaacugaucaauaaggcggugaacgcccuuaucaaugaccagcugauuaugaaaaaccaccuccgggauaucauggggauucccuacugcaauuauagcaaguacugguaccugaaccacacaacaaccggaaaaacgucucugccuaaguguuggcucguguccaauggcagcuaucugaacgaaacacauuucucugacgacaucgaacagcaagcugauaauaugauuaccgagaugcuucagaaagaguacauggaacgccaggggaagaccccgcugggacucgucgaccuguuuguuuucagcacauccuuuuaucugaucucuaucuuccuucaccucgugaaaauucccacccauagacacaucgugggcaagagcugcccuaagccccaucggcugaaccacaugggcauuuguuccugcgggcuguacaaacagccuggaguccccgugcgcuggaagagauga

SEQ ID NO: 29886 - RNA, 1476 nt, Artificial Sequence
  derived and/or modified CDS sequence (opt5) from LASV(G502-SLE-2009;Clade IV)__AIT17126__GPCmut6
augggccagaucgugaccuucuuucaagaggucccccacguuauugaagaggugaugaacaucgugcugauugcccucagcauccuggcuguccuuaaggggcuguacaauuucgccacaugcggacucgugggccugcuuacguuucugcuccugugugggagauccugcaccacaggacuguauaaaggcguuuacgaacuccagacccuggagcuuaacauggaaacacugaauauguguaugccucucucuugcaccaagaacaauagccaucacuauauuaugguggggaacgagacaggacuggagcuuacccugacgaauaccuccaucaucaaccauaaauucuguaaucucucugacgcgcacaagaaaaaccuguacgaucaugcucugaugagcauuaucuccacauuucaccucucuauuccgaauuucaaccaguaugaagccaugagcugcgacuuuaauggcggcaagaucuccguccaguacaaccugagccacucuuaugccggggaugcugccgaccauuguggaaccguggcuaauggcguucuucaaacauucaugcggauggccuggggaggguccuacauugcgcuggauagcggccgcgggagaugggacugcaucaugaccucuuaccaguaucucauuauccagaacacgacaugggaggaucacugucaguuuucccggcccagcccuaucggauaccugggccuucugucucaacgcaccagagacauuuauaucucccggcgccuccugggcacauucaccuggacccugagcgauuccgaagggaaggacacacccggaggcuacugccucacgagauggaugcugauugaggccgagcuuaaauguuuugggaacaccgcuguggccaagugcaaugaaaaacaugaugaggaguucugcgacaugcugcggcucuuugauuucuguaagcaggcuauccagcgccugaaagccccugcgcagaugucuauucaacuuaucaacaaggccgucaaugcucugaucaacgaccagcucgugaugaagaaucaccugagagacauuaugggaauccccuauugcaacuacagccgguauugguaccugaaucacacaaccacaggccgcaccucccucccuaaauguuggcuggugagcaacgggucuuaccuuaaugaaacgcauuucuccgaugacauugaacagcaagccgauaacaugaucacagagaugcugcagaaggaguauauggaaagacagggaaaaaccccgcucggccuggucgaccuguuuguuuucagcaccucuuuuuaccuuauuagcaucuuccuccaccuggugaagauccccacacaucggcacauugugggcaaauccugcccuaagccccaucgccugaaucacauggggaucuguucuugcggacucuauaaacagccuggcguccccgugaaguggaagagauga

SEQ ID NO: 29887 - RNA, 1476 nt, Artificial Sequence
  derived and/or modified CDS sequence (opt5) from LASV(G733-SLE-2010;Clade IV)__AIT17154__GPCmut6
augggccagaucgugaccuucuuucaagaggucccccacguuauugaagaggugaugaacaucgugcugauugcccucagcauccuggcuguccuuaaggggcuguacaauuucgccacaugcggaauugugggccucguuuccuuucugcuucugugugggagaucuugcacgaccagccucuauaaaggaguguacgaacugcagacacuggagcucaacauggaaacccugaauauguguaugccucuuuccugcacaaagaacaauucucaucacuauaucauggucggcaacgagaccgggcuggagcucacacugaccaauacgagcaucauuaaccauaaauucuguaaucuuuccgacgcgcacaagaaaaaccuguacgaucaugcucucaugucuaucauuagcaccuuucaccuguccaucccgaauuucaaccaguaugaagccaugagcugcgacuuuaauggaggcaagauuucugugcaguacaaccugucccacagcuaugccggcgaugcugccaaucauugugggacaaucgcuaacggaguucuccaaaccuucaugcggauggccuggggcgggucuuacauugcgcuggacuccggacgcgauagaugggacugcaucaugacaagcuaccaguaucuuaucauucagaacaccacgugggaggaucacugucaguuuucucggcccuccccuaucggcuaccuggggcuccugagccaacgcacaagagacauuuauaucucccggcgccuucugggaaccuucacauggacccucucugauagcgaaggcaaggacacccccggcggguacugccugacaagauggaugcugauugaggccgagcucaaauguuuuggaaauacggcuguggccaagugcaacgaaaaacaugaugaggaguucugcgacaugcugcggcuuuuugauuucuguaagcaggcuauccagcgccugaaagccccugcgcagauguccauccaacucauuaauaaggccgucaacgcucugaucaaugaccagcuuauuaugaagaaccaccugagagacaucaugggcauucccuauugcaauuacagcaaauauugguaccucaaccacaccacaaccgggaagacaucucugccuaaauguuggcugguguccaauggaagcuaccucaacgaaacccauuucucugaugacaucgaacagcaagccgauaauaugaucacggagaugcugcagaaggaguauauggaacggcagggcaaaacaccgcuugggcugguggaccucuuugucuucagcaccuccuuuuaccugauuucuaucuuccugcaccuuguuaagauucccacccaucgccacguggugggaaaaagcugcccuaagccccauagacucaaccacaugggcaucuguuccugcggccuguaugggcagccuggaguccccgugaaguggaaacgguga

SEQ ID NO: 29888 - RNA, 1476 nt, Artificial Sequence
  derived and/or modified CDS sequence (opt5) from MOPV/LASV reassortant(IGS-1;Clade IV)__AFY05576__GPCmut6
augggccagaucgugaccuucuuucaagaggucccccacguuauugaagaggugaugaacaucgugcugauugcccucagcguccuggcugugcuuaaggggcuguacaauuucgccacaugcggacucguuggccuggugacguuucuucugcucugugggagauccugcaccacaucucuguauaaaggagucuacgaacugcagacccucgagcugaacauggaaacacuuaauauguguaugccucugagcugcaccaagaacaauucccaucacuauaucauggugggcaacgagacagggcucgagcugacccuuacgaauaccucuauuaucaaccauaaauucuguaaucugagcgacgcgcacaagaaaaaccucuacgaucaugcucugauguccaucauuucuacauuucaccugagcaucccgaauuucaaccaguaugaagccauguccugcgacuuuaauggaggcaagauuagcguucaguacaaccucucucacuccuaugccggcgaugcugccaaucauugugggaccguggcuaacggaguccugcaaacauucaugcggauggccuggggcgggagcuacaucgcgcuugacucuggacgcggcaacugggauugcauuaugaccuccuaccaguaucugaucauucagaauacgacaugggaggaccacugucaguuuagcagacccucuccuaucggguaccucggacugcuuucccaacggacccgcgauaucuauauuagcagacggcugcucggcacauucaccuggacccuguccgacucugaaggcgaggauacacccgggggauacugccugacgcgcuggaugcucaucgaggccgaacugaaguguuuuggcaacaccgcuguggccaaaugcaaugagaagcaugacgaagaguucugcgauaugcuuagacuguuugacuucuguaaacaggcuauucagcggcucaaggccccugcgcagaugagcauccaacugauuaacaaagccgugaaugcucuuaucaacgaucagcugaucaugaagaaucaccuccgcgacauuauggggauccccuauugcaacuacuccaaguauugguaccugaaucacacaaccacaggaagaaccagccugccuaaauguuggcucgucucuaacggcuccuaccugaaugaaacgcauuucagcgacgauauugagcagcaagccgacaacaugaucacagagaugcuucagaaggaauauauggagcggcaggggaaaaccccgcugggacucguugaucuguuuguguucucuaccagcuuuuaccugauuuccaucuuccuucaccucgugaagauccccacacaucgccacauugucggcaaaucuugcccuaagccccauagacugaaucacaugggcaucuguagcugcgggcuguauaaacagccuggagugcccguuaaguggaagcgguga

SEQ ID NO: 29889 - RNA, 1476 nt, Artificial Sequence
  derived and/or modified CDS sequence (opt5) from LASV(LM765-SLE-2012;Clade IV)__AIT17814__GPCmut6
augggccagaucgugaccuucuuucaagaggucccccacguuauugaagaggugaugaacaucgugcugauugcccucagcauccuggcuguccuuaaggggcuguacaauuucgccacaugcggacucgugggccugguuacguuucuucugcucugugggagauccugcaccacaucucuguauaaaggaguguacgaacugcagacccucgagcugaacauggaaacacuuaauauguguaugccucugagcugcaccaagaacaauucccaucacuauauuauggucggcaacgagacagggcucgagcugacccuuacgaauaccucuaucaucgaccauaaauucuguaaccugagcgaugcgcaccggaagaaucucuacgaccaugcucugauguccauuaucucuacauuucaccugagcauuccgaacuucaaucaguaugaagccauguccugcgauuuuaacggaggcaaaaucagcgugcaguacaaucucucucacuccuaugccaaggacgcugccgaucauuguggcaccguugcuaacggggugcugcaaacauucaugcgcauggccuggggaggcagcuacauugcgcuugacucugggagaggacggugggauugcaucaugaccuccuaccaguaucugauuauccagaauacgacaugggaggaccacugucaguuuagccgccccucuccuaucggcuaccucgggcugcuuucccaaagaacccgggauauuuauaucagccgcagacugcucggaacauucaccuggacccuguccgacucugaaggcaaggauacacccggcggguacugccugacgcgguggaugcucauugaggccgagcugaaauguuuuggaaacaccgcugucgccaagugcaacgaaaaacaugacgaggaguucugcgauaugcuucgccuguuugacuucuguaagcaggcuauccagagacucaaagccccugcgcagaugagcauucaacugaucaauaaggccgugaacgcucuuaucaaugaccagcugauuaugaagaaccaccuccgggauaucaugggcauucccuauugcaauuacuccaaauauugguaccugaaccacacaaccacagggaagaccagccugccuaaauguuggcucgugucuaauggauccuaccugaacgaaacgcauuucagcgacgauaucgaacagcaagccgacaauaugauuacagagaugcuucagaaggaguauauggaacgccagggcaaaaccccgcuggggcucgucgaucuguuuguuuucucuaccagcuuuuaccugaucuccaucuuccuucaccucgugaagauucccacacauagacacaucgugggaaaaccuugccccaagccucaucggcugaaccacaugggcauuuguucuugcggccuguauaagcagcccggggucccggugaaauggaagcgcuga

SEQ ID NO: 29890 - RNA, 1476 nt, Artificial Sequence
  derived and/or modified CDS sequence (opt5) from LASV(LM776-SLE-2012;Clade IV)__AIT17824__GPCmut6
augggccagaucgugaccuucuuucaagaggucccccacguuauugaagaggugaugaacaucgugcugauugcccucagcauccuggcuguccuuaaggggcuguacaauuucgccacaugcggacucgugggccugguuacguuucuucugcucugugggagauccugcaccacaucuguguauaaaggagucuacgaacugcagacccuggagcucaacauggaaacacugaauauguguaugccucuuagcugcaccaagaacaauucccaucacuauauuauggugggcaacgagacagggcuggagcucacccugacgaauaccucuaucaucaaccauaaauucuguaaucuuagcgacgcgcacaagaaaaaccuguacgaucaugcucucauguccauuaucucuacauuucaccugagcauuccgaauuucaaccaguaugaagccauguccugcgacuuuaauggaggcaagaucagcguucaguacaaccugucucacuccuaugccggcgaugcugccaaucauugugggaccguggcuaacggaguccuccaaacauucaugcggauggccuggggcgggagcuacauugcgcuggacucuggacacggcaagugggauugcaucaugaccuccuaccaguaucuuauuauccagaacacgacaugggaggaccauugucaguuuagccgccccucuccuaucggguaccugggacuccugucccaaagaacccgggauauuuauaucagccgcagacuucugggcacauucaccuggacccucuccgacucugaaggcaaagauacacccgggggauacugccugacgcgguggaugcugauugaggccgagcucaaguguuuuggcaauaccgcuguggccaaaugcaacgaaaagcacgacgaggaguucugcgauaugcugcgccuuuuugacuucuguaaacaggcuauccagagacugaaggccccugcgcagaugagcauucaacucaucaauaaggccgugaacgcucugaucaaugaucagcuuauuaugaaaaaccaucugcgggacaucauggggauucccuauugcaauuacuccaaguauugguaccucaaccacacaaccacaggaaaaaccagccugccuaaguguuggcuggucucuaauggcuccuaccucaacgaaacgcacuucagcgacgauaucgaacagcaagccgacaauaugauuacagagaugcugcagaaagaguauauggaacgccaggggaagaccccgcuuggacugguugaucucuuuguguucucuaccagcuuuuaccugaucuccaucuuccugcaucuugugaaaauucccacacacagacauaucgucggcaagucuugcccuaagccccaccggcucaaccacaugggcauuuguagcugcgggcuguauaaacagccuggagugcccguucgcuggaagagauga

SEQ ID NO: 29891 - RNA, 1476 nt, Artificial Sequence
  derived and/or modified CDS sequence (opt5) from LASV(Mad39;Clade IV)__ANH09722__GPCmut6
augggccagaucgugaccuucuuucaagaggucccccacguuauugaagaggugaugaacaucgugcugauugcccucagcauccuggcuguccuuaaggggcuguacaauguggccacaugcggacucauuggccugguuacguuccuucugcucugugggagauccugcaccacaacccuguauaaaggaguguacgaacugcaggcgcucgagcugaacauggaaacacuuaauauguguaugccucugucuugcaccaagaacaauagccaucacuauauccgggucggcaacgagacagggcucgagcugacccuuacgaauaccucccugaucaaccauaaauuuuguaaucucucugacgcucacaagaaaaaccuguacgaucaugcccugaugagcauuaucuccacauuccaccucucuauuccgaauuuuaaccaguaugaagccaugagcugcgacuucaaugauggaaagaucuccgugcaguacaaccugagccacaccuaugcuggcgacacagccaaucauuguggcaccguugcuaacggggugcuucaaacguuuaugcgcauggccuggggaggcucuuacauugcgcuggauuccgggagaggaggcugggacugcaucaugacaagcuaccaguaucucauuauccagaacaccacaugggaggaucacugucaguucucucggcccuccccuaucggguaccugggacuucugagccaacgcaccagagacauuuauaucucucggcgccuccugggcaccuuuacauggacgcuguccgauagcgaaggcaaggacacccccgggggauacugccucacaagauggaugcugauugaggccgagcuuaaauguuucggcaauaccgcugucgccaagugcaacgaaaaacaugaugaggaauuuugcgacaugcugcgccucuucgauuuuuguaagcaggcuauccagcggcugaaagccccugcgcagauguccauucaacuuaucaauaaggccgugaacgcucugaucaaugaccagcucauuaugaagaaccaccugagagacaucauggggauucccuauugcaauuacucuaaauauugguaccugaaccacacagugaccggaaagacgagccucccuaaauguuggcuggucuccaauggcagcuaccuuaacgagacacauuucucugaugacaucgaacagcaagccgauaauaugauuaccgagaugcugcagaaggaguauauggaacggcaggggaaaaccccgcucggacugguugaccuguucguguuuuccaccagcuucuaccuuaucucuaucuuucuccaccuggugaagauucccacacaucgccacgucgugggcaaaccuugccccaagccucauagacugaaccacaugggcaucuguagcugcggguucuauaagcagcccggaguuccggugcgguggaaacgcuga

SEQ ID NO: 29892 - RNA, 1476 nt, Artificial Sequence
  derived and/or modified CDS sequence (opt5) from LASV(Z0947-SLE-2011;Clade IV)__AIT17840__GPCmut6
augggccagaucgugaccuucuuucaagaggucccccacguuauugaagaggugaugaacaucgugcugauugcccucagcauccuggcuguccuuaaggggcuguacaauuucgccacaugcggacucgugggccugguuacguuucuucugcucugugggagauccugcaccauuucucuguauaaaggaguguacgaacugcagacacucgagcugaacauggaaacccuuaauauguguaugccucugagcugcacaaagaacaauucccaucacuauaucauggucggcaacgagaccgggcucgagcugacacuuaccaauacgucuaucauuaaccauaaauucuguaaucugagcgacgcgcacaagaaaaaccucuacgaucaugcucugauguccaucauuucuaccuuucaccugagcaucccgaauuucaaccaguaugaagccauguccugcgacuuuaauggaggcaagauuagcgugcaguacaaccucucucacuccuaugccggcgaugcugccaaucauugugggacaguugcuaacggagugcugcaaaccuucaugcggauggccuggggcgggagcuacaucgcgcuugacucuggacgcgauagaugggacugcauuaugacauccuaccaguaucugaucauccagaacaccacgugggaggaucacugucaguuuagccggcccucuccuauuggcuaccucgggcugcuuucccaacgcacaagagacaucuauauuagccggcgccugcucggaaccuucacauggacccuguccgauucugaaggcaaggacacccccggcggguacugccugacaagauggaugcucaucgaggccgagcugaaauguuuuggaaauacggcugucgccaagugcaacgaaaaacaugaugaggaguucugcgacaugcuucggcuguuugauuucuguaagcaggcuauucagcgccucaaagccccugcgcagaugagcauccaacugaucaauaaggccgugaacgcucuuauuaaugaccagcugaucaugaagaaccaccucagagacauuaugggcauccccuauugcaauuacuccaaauauugguaccugaaccacaccacaaccgggaagacaagccugccuaaauguuggcucgugucuaauggauccuaccugaacgaaacccauuucagcgaugacauugaacagcaagccgauaauaugaucacggagaugcuucagaaggaguauauggaacggcagggcaaaacaccgcuggggcucgucgaccuguuuguuuucucuaccagcuuuuaccugaucuccauuuuccuucaccucgugaagauccccacccaucgccacauugugggaaaaccuugccccaagccucauagacugaaccacaugggcaucuguucuugcggccuguauaagcagcccggggucccggugaaauggaagcgguga

SEQ ID NO: 29893 - RNA, 1717 nt, Artificial Sequence
  mRNA product Design a-1 (hSL-A64-N5) comprising derived and/or modified sequence from LASV(Josiah;Clade IV)__NP_694870__GPCmut6 (opt1)
aggagagucccgcagucggcguccagcggcucugcuuguucgugugugugucguugcaggccuuauucaagcuuaccaugggccagaucgugaccuucuuccaggaggucccccacgugaucgaggaggugaugaacaucguccugaucgcccucagcgugcuggccgugcugaaggggcucuacaacuucgcgaccugcggccuggucgggcuggugacguuccuccugcugugcggccgcuccugcaccaccagccucuacaaggggguguacgagcugcagacccuggagcucaacauggagacgcugaacaugugcaugccgcuguccugcaccaagaacaacagccaccacuacaucauggucggcaacgagaccggccucgagcugacgcugaccaacaccuccaucaucaaccacaaguucugcaaccucagcgacgcccacaagaagaaccuguacgaccacgcccugauguccaucaucagcaccuuccaccucuccauccccaacuucaaccaguacgaggccaugagcugcgacuucaacgggggcaagaucuccgugcaguacaaccugagccacuccuacgccggggacgcggccaaccacugcggcacgguggccaacgggguccugcagaccuucaugcggauggccuggggcggcagcuacaucgcgcucgacuccgggcgcggcaacugggacugcaucaugaccagcuaccaguaccugaucauccagaacaccacgugggaggaccacugccaguucucccggcccagccccaucggguaccugggccuccugucccagcgcacccgggacaucuacaucagccgccggcugcucggcaccuucaccuggacgcugagcgacuccgaggggaaggacaccccgggcggguacugccugacccgcuggaugcucaucgaggccgagcugaagugcuucggcaacaccgccguggccaagugcaacgagaagcacgacgaggaguucugcgacaugcugcggcuguucgacuucugcaagcaggccauccagcgccugaaggcgcccgcccagaugagcauccagcugaucaacaaggccgugaacgcccucaucaacgaccagcugaucaugaagaaccaccuccgggacaucauggggauccccuacugcaacuacuccaaguacugguaccucaaccacacgaccaccggccgcaccagccugcccaagugcuggcuggucuccaacggcagcuaccucaacgagacgcacuucuccgacgacaucgagcagcaggccgacaacaugaucaccgagaugcugcagaaggaguacauggagcggcaggggaagacgccccugggccucguggaccuguucguguucagcaccuccuucuaccugaucagcaucuuccugcaccucgucaagaucccgacccaccgccacaucguggggaaguccugccccaagccccaccggcugaaccacaugggcaucugcagcugcgggcuguacaagcagcccggcgugccggucaaguggaagcgcugaggacuagucccuguucccagagcccacuuuuuuuucuuuuuuugaaauaaaauagccugucuuucagaucucaaaggcucuuuucagagccaccaaaaaaaaaaaaaaaaaaaaaaaaaaaaaaaaaaaaaaaaaaaaaaaaaaaaaaaaaaaaaaaaagaauu

SEQ ID NO: 29894 - RNA, 1714 nt, Artificial Sequence
  mRNA product Design a-1 (hSL-A64-N5) comprising derived and/or modified sequence from LASV(LP;Clade I)__AAF86701__GPCmut6 (opt1)
aggagagucccgcagucggcguccagcggcucugcuuguucgugugugugucguugcaggccuuauucaagcuuaccaugggccagaucaucaccuucuuccaggaggugccccacgucaucgaggaggugaugaacaucgugcugaucgcccucagccugcuggccauccucaaggggcuguacaacaucgcgaccugcggcaucaucgggcuggucgccuuccucuuccugugcggcaaguccugcagccugacgcucaagggcggguacgagcugcagacccuggagcucaacauggagacccugaacaugugcaugccgcuguccugcacgaagaacagcucccaccacuacauccgcgugggcaacgagaccgggcucgagcugacccugaccaacacgagcaucaucaaccacaaguucugcaaccucuccgacgcccacaagaagaaccuguacgaccacgcccugaugagcaucaucuccaccuuccaccucagcauccccaacuucaaccaguacgaggccauguccugcgacuucaacggcgggaagaucagcgugcaguacaaccugucccacagcuacgcgggcgacgccgccgagcacugcgggaccgucgccaacggcgugcugcagaccuucaugcggauggcguggggcgggcgcuacaucgcccucgacuccggcaaggggaacugggacugcaucaugacgagcuaccaguaccugaucauccagaacaccaccugggaggaccacugccaguucucccggcccagccccaucggcuaccugggccuccugucccagcgcacccgggacaucuacaucagccgccggcugcucgggacguucaccuggacccugagcgacuccgagggcaacgagacccccgggggcuacugccugacgcgcuggaugcucaucgaggccgagcugaagugcuucgggaacaccgccguggccaagugcaacgagaagcacgacgaggaguucugcgacaugcugcggcuguucgacuucugcaagcaggcgauccgccggcugaaggcccccgcccagaugagcauccagcugaucaacaaggccgucaacgcccucaucaacgaccagcugaucaugaagaaccaccuccgcgacaucaugggcauccccuacugcaacuacuccaaguacugguaccucaaccacaccagcuccggccggaccagccugcccaagugcuggcugaucuccaacgggagcuaccucaacgagacgcaguucuccgacgacaucgagcagcaggcggacaacaugaucaccgagaugcugcagaaggaguacaucgagcgccagggcaagaccccgcuggggcucguggacaucuucaucuucagcaccuccuucuaccugaucagcaucuuccugcaccugaucaagaucccgacgcaccggcacaucgugggcaagcccugccccaagccccaccgccucaaccacaugggggucugcuccugcggccuguacaagcacccgggcgugcccaccaaguggaagcggugaggacuagucccuguucccagagcccacuuuuuuuucuuuuuuugaaauaaaauagccugucuuucagaucucaaaggcucuuuucagagccaccaaaaaaaaaaaaaaaaaaaaaaaaaaaaaaaaaaaaaaaaaaaaaaaaaaaaaaaaaaaaaaaaagaauu

SEQ ID NO: 29895 - RNA, 1714 nt, Artificial Sequence
  mRNA product Design a-1 (hSL-A64-N5) comprising derived and/or modified sequence from LASV(803213;Clade II)__AAF86703__GPCmut6 (opt1)
aggagagucccgcagucggcguccagcggcucugcuuguucgugugugugucguugcaggccuuauucaagcuuaccaugggccagaucaucaccuucuuccaggaggugccccacgucaucgaggaggugaugaacaucgugcugaucgcccucagccugcuggccauccucaaggggaucuacaacgucgcgaccugcggccuguucgggcugaucuccuuccuccugcugugcggccgcagcugcuccgugacguacaaggggguguacgagcuccagacccuggagcugaacauggccaaccucaacaugugcaugccgcugagcugcaccaagaacaacucccaccacuacaucauggucggcaacgagacgggccuggagcucacccugaccaacaccagcaucaucaaccacaaguucugcaaccuguccgacgcccacaagaagaaccucuacgaccacgcccugaugagcaucaucuccacguuccaccugagcauccccaacuucaaccaguacgaggccauguccugcgacuucaacgggggcaagaucagcgugcaguacaaccucucccacagcuucgcgguggacgccgccaaccacugcgggaccaucgccaacggcguccugcagaccuucaugcggauggcguggggcggguccuacaucgcccuggacagcggcaaggggaacugggacugcaucaugaccuccuaccaguaccucaucauccagaacacgaccugggaggaccacugccaguucagccgccccucccccaucggcuaccuggggcugcucagccagcggacccgcgacaucuacaucagccggcgccugcugggcaccuucacguggacccucuccgacagcgagggcaacgaggcccccgggggcuacugccugacccgguggaugcugaucgaggccgagcucaagugcuucgggaacaccgccguggcgaagugcaacgagaagcacgacgaggaguucugcgacaugcugcgccuguucgacuucugcaagcaggccaucaagcggcucaagacgcccgcccagauguccauccagcugaucaacaaggccgugaacgcccugaucaacgaccagcucaucaugaagaaccaccuccgcgacaucaugggcauccccuacugcaacuacagccgguacugguaccugaaccacaccgucaccgggaagaccucccugccccgcugcuggcuggugagcaacggcuccuaccugaacgagacgcacuucagcgacgacaucgagcagcaggcggacaacaugaucaccgagaugcuccagaaggaguacauggaccggcagggcaagaccccgcuggggcugguggaccucuucgucuucuccaccagcuucuaccugaucuccaucuuccugcaccuggugaagaucccgacgcaccgccacaucgugggcaagcccugccccaagccccaccggcucaaccacauggggaucugcagcugcggccuguacaagcacccggggguccccgugaaguggaagcgcugaggacuagucccuguucccagagcccacuuuuuuuucuuuuuuugaaauaaaauagccugucuuucagaucucaaaggcucuuuucagagccaccaaaaaaaaaaaaaaaaaaaaaaaaaaaaaaaaaaaaaaaaaaaaaaaaaaaaaaaaaaaaaaaaagaauu

SEQ ID NO: 29896 - RNA, 1714 nt, Artificial Sequence
  mRNA product Design a-1 (hSL-A64-N5) comprising derived and/or modified sequence from LASV(GA391;Clade III)__CAA36645__GPCmut6 (opt1)
aggagagucccgcagucggcguccagcggcucugcuuguucgugugugugucguugcaggccuuauucaagcuuaccaugggccagaucgugaccuucuuccaggaggucccccacgugaucgaggaggugaugaacaucguccugaucgcccucagcauccuggccauccugaaggggcucuacaacguggcgaccugcggccugaucgggcuggugacguuccuccugcuguccggccgcagcugcucccucaucuacaaggggaccuacgagcugcagacccuggagcucaacauggagacccugaacaugugcaugccgcugagcugcaccaagaacaacucccaccacuacauccgggucggcaacgagaccggccucgagcugacccugacgaacaccagcauccucaaccacaaguucugcaaccuguccgacgcccacaagcgcaaccuguacgaccacagccucauguccaucaucagcaccuuccaccuguccauccccaacuucaaccaguacgaggccaugagcugcgacuucaacgggggcaagaucaccgugcaguacaaccugucccacagcuucgccguggacgccgcggggcacugcggcacgcucgccaacgggguccugcagaccuucaugcggauggccuggggcggcuccuacaucgcccuggacagcgggcgcggcaacugggacugcaucaugaccuccuaccaguaccucaucauccagaacaccacgugggacgaccacugccaguucagccggcccucccccaucggguaccugggccugcucagccagcgcacccgggacaucuacaucagccgccggcugcugggcaccuucaccuggacgcucuccgacagcgaggggaacgagaccccgggcggguacugccugacccgcuggaugcugaucgaggcggagcucaagugcuucggcaacaccgccguggccaagugcaacgagaagcacgacgaggaguucugcgacaugcugcggcuguucgacuucugcaagcaggccauccgccggcucaagacgcccgcccagauguccauccagcugaucaacaaggcggugaacgcccugaucaacgaccagcucaucaugaagaaccaccuccgcgacaucauggggauccccuacugcaacuacagccgguacugguaccugaaccacaccuccaccggcaagaccagccugccccgcugcuggcugaucuccaacggcagcuaccugaacgagacgaaguucuccgacgacaucgagcagcaggccgacaacaugaucaccgagaugcuccagaaggaguacaucgaccggcaggggaagacgccccugggccuggucgaccuguucguguucagcaccuccuucuaccucaucagcaucuuccugcaccuggugaagaucccgacccaccgccacaucgucgggaagcccugccccaagccccaccggcucaaccacaugggcaucugcuccugcgggcuguacaagcagccgggcgugcccgugcgcuggaagcggugaggacuagucccuguucccagagcccacuuuuuuuucuuuuuuugaaauaaaauagccugucuuucagaucucaaaggcucuuuucagagccaccaaaaaaaaaaaaaaaaaaaaaaaaaaaaaaaaaaaaaaaaaaaaaaaaaaaaaaaaaaaaaaaaagaauu

SEQ ID NO: 29897 - RNA, 1717 nt, Artificial Sequence
  mRNA product Design a-1 (hSL-A64-N5) comprising derived and/or modified sequence from LASV(AV;Clade V)__CCA30314__GPCmut6 (opt1)
aggagagucccgcagucggcguccagcggcucugcuuguucgugugugugucguugcaggccuuauucaagcuuaccaugggccagaucgugaccuucuuccaggaggucccccacgugaucgaggaggugaugaacaucguccugaucgcccucagcauccuggccgugcugaaggggcucuacaacaucgcgaccugcggccugaucgggcugaucacguuccuccugcugugcggccgcuccugcagcuccaaccucuacaaggggguguacgagcugcagagccuggaccucaacauggagacccugaacaugugcaugccgcuguccugcaccaagaacaacagccaccacuacauccgggucggcaacgacacgggccucgagcugacccugaccaacaccuccauccucaaccacaaguucugcaaccugagcgacgcccacaagaaggaccuguacgaccacgcccucauguccaucaucagcacguuccaccuguccauccccaacuucaaccaguacgaggccaugagcugcgacuucaacgggggcaagaucuccgugcaguacaaccugagccacuccuacgccaucgacgcggccaaccacugcgggaccguggccaacggcauccuccagaccuucaugcgcauggccuggggcgggagcuacaucgcgcuggacuccggccgggggaacugggacugcaucaugaccagcuaccaguaccugaucauccagaacacgaccugggagaaccacugccaguucucccgccccagccccaucggcuaccucgggcugcugagccagcggacccgcgacaucuacaucucccggcgccuccugggcaccuucacguggacccugagcgacuccgagggcaacgccacccccgggggcuacugccucacccgguggaugcugaucgaggccgagcugaagugcuucgggaacacggccgucgccaagugcaacgagaagcacgacgaggaguucugcgacaugcuccgccuguucgacuucugcaagcaggcgaucagccggcugaagucccccgcccagaugagcauccagcucaucaacaaggccgugaacgcccugaucaacgaccagcugaucaugaagaaccaccuccgcgacaucaugggcauccccuacugcaacuacuccaaguacugguaccugaaccacaccaucaccgggaagaccagccugcccaagugcuggcucguguccaacggcagcuaccugaacgagacgcacuucuccgacgacaucgagcagcaggccgacaacaugaucaccgagaugcugcagaaggaguacauggagcggcagggcaagaccccgcucgggcuggucgaccuguucguguucagcaccuccuucuaccugaucagcaucuuccuccgccuggugaagaucccgacgcaccggcacaucgucggcaagcccugccccaagccccaccgccugaaccacauggggaucugcuccugcggccucuacaagcagccgggggugcccgugcgguggaagcgcugaggacuagucccuguucccagagcccacuuuuuuuucuuuuuuugaaauaaaauagccugucuuucagaucucaaaggcucuuuucagagccaccaaaaaaaaaaaaaaaaaaaaaaaaaaaaaaaaaaaaaaaaaaaaaaaaaaaaaaaaaaaaaaaaagaauu

SEQ ID NO: 29898 - RNA, 1714 nt, Artificial Sequence
  mRNA product Design a-1 (hSL-A64-N5) comprising derived and/or modified sequence from LASV(Togo/2016/7082;Clade VI)__AMR44577__GPCmut6 (opt1)
aggagagucccgcagucggcguccagcggcucugcuuguucgugugugugucguugcaggccuuauucaagcuuaccaugggccagaucaucaccuucuuccaggaggugccccacgucaucgaggaggugaugaacaucgugcugaucgcccucagccugcuggccauccucaagggggucuacaacguggcgaccugcggcaucaucgggcuggugacguuccuguuccucugcggccgcuccugcagccugaucuacaagggguccuacgagcugcagacccucgagcugaacauggagacccugaacaugugcaugccgcucagcugcacgaagaacuccagccaccacuacauccgggucggcaacgagaccggccuggagcugacccucaccaacacguccaucaucaaccacaaguucugcaaccugagcgacgcccacaagcgcaaccuguacgaccacgcccucauguccauccugagcaccuuccaccuguccauccccaacuucaaccaguacgaggccaugagcugcgacuucaacgggggcaagaucuccgugcaguacaaccucagccacgccuacgcgguggacgccgccgagcacugcgggaccgucgccaacggcgugcugcagaccuucaugcggauggcguggggcggguccuacaucgcccuggacagcggccgcgggaacugggacugcaucaugacguccuaccaguaccucaucauccagaacaccaccugggaggaccacugccaguucagccggcccucccccaucggcuaccuggggcugcucagccagcgcacccgggacaucuacaucagccgccggcugcugggcacguucaccuggacccucuccgacagcgagggcaacgagacccccgggggcuacugccugacgcgcuggaugcugaucgaggccgagcucaagugcuucgggaacaccgccguggccaagugcaacgagaagcacgacgaggaguucugcgacaugcugcggcuguucgacuucugcaagcaggcgauccagcgccucaagucccccgcccagaugagcauccagcugaucaacaaggccgucaacgcccugaucaacgaccagcucaucaugaagaaccaccuccgggacaugaugggcauccccuacugcaacuacuccaaguacugguaccugaaccacaccagcuccgggcgcaccagccugcccaagugcuggcugguguccaacggcagcuaccugaacgagacgcacuucuccgacgacaucgagcagcaggccgacaacaugaucaccgagaugcuccagaaggaguacaucgaccggcagggcaagaccccgcuggggcugguggaccucuucgucuucagcaccuccuucuaccugaucagcaucuuccugcaccugaucaagaucccgacgcaccgccacaucgugggcaagcccugccccaagccccaccggcucaaccacauggggaucugcuccugcggccuguacaagcagccgggggugcccacccgcuggaagcggugaggacuagucccuguucccagagcccacuuuuuuuucuuuuuuugaaauaaaauagccugucuuucagaucucaaaggcucuuuucagagccaccaaaaaaaaaaaaaaaaaaaaaaaaaaaaaaaaaaaaaaaaaaaaaaaaaaaaaaaaaaaaaaaaagaauu

SEQ ID NO: 29899 - RNA, 1714 nt, Artificial Sequence
  mRNA product Design a-1 (hSL-A64-N5) comprising derived and/or modified sequence from LASV(KAK-428;Clade n.d. (VII))__ANH09740__GPCmut6 (opt1)
aggagagucccgcagucggcguccagcggcucugcuuguucgugugugugucguugcaggccuuauucaagcuuaccaugggccagaucgugaccuucuuccaggaggucccccacgugaucgaggaggugaugaacaucguccugaucgcccucagccugcuggccauccucaaggggcuguacaacuucgcgaccugcggcgugaucgggcugaucacguuccuccugcugugcggccgcuccugcagcgccaccuacaaggggcaguacgagcuccagacccuggagcugaacauggagucccucaacaugugcaugccgcugagcugcacgaagaacaacucccaccacuacauccgggccggcaacaacaccggccuggagcucacccugaccaacacgagcaucaucucccacaaguucugcaaccugagcgacgcccacaagaagaaccucuacgaccacacccugauguccaucaucaccaccuuccaccugagcauccccaacuucaaccaguacgaggccauguccugcgacuucaacgggggcaagaucagcauccaguacaaccucucccacagcuacgcgggggacgccgcccagcacugcggcacgguggccaacgggguccugcagaccuucaugcgcauggcguggggcggcuccuaccuggcccucgacagcgggcggcgcggcugggacugcaucaucuccagcuaccaguaccugaucauccagaacaccaccugggacgaccacugccaguucucccggcccagccccaucggguaccugggcuucgugagccagaagacgcgcgacaucuacaucucccggcgccuccugggcaccuucaccuggacccugagcgacuccgaggggcacgacaugccgggcggguacugccucacgcgguggaugcugaucgaggccgaccugaagugcuucggcaacaccgccguggccaagugcaacgagaagcacgacgaggaguucugcgacauguggcgccucuucgacuucugcaagcaggcgauccagcggcugaaggcccccgcccagaugaacauccagcugaucaacaaggccgucaacgcccucaucaacgaccagcugaugaugaagaaccaccuccgcgacaucauggggauccccuacugcaacuacagcaaguucugguaccugaacaacaccaccacgggccggaccucccugccccgcugcuggcugaucagcaacggcuccuaccucaacgagacccacuucagcgacgacaucgagcagcaggcggacaacaugaucaccgagaugcugcagaaggaguacauggaccggcaggggaagacgccccugggccucguggaccuguucguguucuccaccagcuucuaccugaucaccaucuuccuccaccuggucaagaucccgacccaccgccacaucguggggaagcccugccccaagccccaccggcugaaccacaugggcaucugcuccugcgggcuguacaagcagccgggcgugcccguccgcuggaagcggugaggacuagucccuguucccagagcccacuuuuuuuucuuuuuuugaaauaaaauagccugucuuucagaucucaaaggcucuuuucagagccaccaaaaaaaaaaaaaaaaaaaaaaaaaaaaaaaaaaaaaaaaaaaaaaaaaaaaaaaaaaaaaaaaagaauu

SEQ ID NO: 29900 - RNA, 1714 nt, Artificial Sequence; identical to SEQ ID NO: 29894
  mRNA product Design a-1 (hSL-A64-N5) comprising derived and/or modified sequence from LASV(Pinneo-NIG-1969;Clade I)__AIT17836__GPCmut6 (opt1)

SEQ ID NO: 29901 - RNA, 1714 nt, Artificial Sequence
  mRNA product Design a-1 (hSL-A64-N5) comprising derived and/or modified sequence from LASV(ISTH0009-NIG-2011;Clade II)__AIT17404__GPCmut6 (opt1)
aggagagucccgcagucggcguccagcggcucugcuuguucgugugugugucguugcaggccuuauucaagcuuaccaugggccagaucaucaccuucuuccaggaggugccccacgucaucgaggaggugaugaacaucgugcugaucgcccucagccugcuggccauccucaaggggaucuacaacgucgcgaccugcggccuguucgggcugguguccuuccuccugcugugcggccgcagcugcuccacgaccuacaaggggguguacgagcuccagacccuggagcuggacauggccagccucaacaugugcaugccgcuguccugcacgaagaacaacagccaccacuacaucauggucggcaacgagaccggccuggagcucacccugaccaacacguccaucaucaaccacaaguucugcaaccugagcgacgcccacaagaagaaccucuacgaccacgcccugauguccaucaucagcaccuuccaccuguccauccccaacuucaaccaguacgaggccaugagcugcgacuucaacgggggcaagaucuccgugcaguacaaccucagccacgcguacgccguggacgccgccaaccacugcgggaccaucgcgaacggcguccugcagaccuucaugcggauggccuggggcggguccuacaucgcccuggacagcggcaagggguccugggacugcaucaugacgagcuaccaguaccucaucauccagaacaccaccugggaggaccacugccaguucucccgccccagccccaucggcuaccuggggcugcucagccagcggacccgcgacaucuacaucucccggcgccugcugggcacguucaccuggacccucagcgacuccgagggcaacgagacccccgggggcuacugccugacgcgguggaugcugaucgaggccgagcucaagugcuucgggaacaccgccguggcgaagugcaacgagaagcacgacgaggaguucugcgacaugcugcgccuguucgacuucugcaagcaggccauccggcgccucaagacccccgcccagaugagcauccagcugaucaacaaggccgugaacgcccugaucaacgaccagcucaucaugaagaaccaccuccgggacaucaugggcaucccguacugcaacuacuccaaguacugguaccugaaccacaccgucacggggaagaccagccugccccgcugcuggcugguguccaacggcagcuaccugaacgagacccacuucuccgacgacaucgagcagcaggcggacaacaugaucaccgagcuccugcagaaggaguacauggaccggcagggcaagacgccccuggggcucguggaccuguucgucuucagcaccuccuucuaccugaucagcaucuuccugcaccucaucaagaucccgacccaccgccacaucaccggcaagcccugccccaagccccaccggcugaaccacauggggaucugcuccugcggccuguacaagcacccgggggugcccgugaaguggaagcgcugaggacuagucccuguucccagagcccacuuuuuuuucuuuuuuugaaauaaaauagccugucuuucagaucucaaaggcucuuuucagagccaccaaaaaaaaaaaaaaaaaaaaaaaaaaaaaaaaaaaaaaaaaaaaaaaaaaaaaaaaaaaaaaaaagaauu

SEQ ID NO: 29902 - RNA, 1714 nt, Artificial Sequence
  mRNA product Design a-1 (hSL-A64-N5) comprising derived and/or modified sequence from LASV(ISTH2010-NIG-2012;Clade II)__AIT17482__GPCmut6 (opt1)
aggagagucccgcagucggcguccagcggcucugcuuguucgugugugugucguugcaggccuuauucaagcuuaccaugggccagaucaucaccuucuuccaggaggugccccacgucaucgaggaggugaugaacaucgugcugaucgcccucagccugcuggccauccucaaggggaucuacaacgucgcgaccugcggccuguucgggcugguguccuuccuccugcugugcggccgcagcugcuccacgaccuacaaggggguguacgagcuccagacccuggagcuggacauggccagccucaacaugugcaugccgcuguccugcacgaagaacaacagccaccacuacaucauggucggcaacgagaccggccuggagcucacccugaccaacacguccaucaucaaccacaaguucugcaaccugagcgacgcccacaagaagaaccucuacgaccacgcccugauguccaucaucagcaccuuccaccuguccauccccaacuucaaccaguacgaggccaugagcugcgacuucaacgggggcaagaucuccgugcaguacaaccucagccacgcguacgccguggacgccgccaaccacugcgggaccaucgcgaacggcguccugcagaccuucaugcggauggccuggggcggguccuacaucgcccuggacagcggcaagggguccugggacugcaucaugacgagcuaccaguaccucaucauccagaacaucaccugggaggaccacugccaguucucccgccccagccccaucggcuaccuggggcugcucagccagcggacccgcgacaucuacaucucccggcgccugcugggcaccuucacguggacccucagcgacuccgagggcaacgagacccccgggggcuacugccugacccgguggaugcugaucgaggccgagcucaagugcuucgggaacacggccguggcgaagugcaacgagaagcacgacgaggaguucugcgacaugcugcgccuguucgacuucugcaagcaggccauccggcgccucaagacccccgcccagaugagcauccagcugaucaacaaggccgugaacgcccugaucaacgaccagcucaucaugaagaaccaccuccgggacaucaugggcauccccuacugcaacuacuccaaguacugguaccugaaccacaccgucaccgggaagacgagccugccccgcugcuggcugguguccaacggcagcuaccugaacgagacccacuucuccgacgacaucgagcagcaggcggacaacaugaucaccgagcuccugcagaaggaguacaucgaccggcagggcaagaccccgcuggggcucguggaccuguucgucuucagcacguccuucuaccugaucagcaucuuccugcaccucgugaagaucccgacccaccgccacguggucggcaagcccugccccaagccccaccggcugaaccacauggggaucugcuccugcggccuguacaagcacccgggggugcccgugaaguggaagcgcugaggacuagucccuguucccagagcccacuuuuuuuucuuuuuuugaaauaaaauagccugucuuucagaucucaaaggcucuuuucagagccaccaaaaaaaaaaaaaaaaaaaaaaaaaaaaaaaaaaaaaaaaaaaaaaaaaaaaaaaaaaaaaaaaagaauu

SEQ ID NO: 29903 - RNA, 1714 nt, Artificial Sequence
  mRNA product Design a-1 (hSL-A64-N5) comprising derived and/or modified sequence from LASV(Lassa virus/H.sapiens-wt/NGA/2015/ISTH_0543;Clade II)__AVO03639__GPCmut6 (opt1)
aggagagucccgcagucggcguccagcggcucugcuuguucgugugugugucguugcaggccuuauucaagcuuaccaugggccagaucaucaccuucuuccaggaggugccccacgucaucgaggaggugaugaacaucgugcugaucgcccucagccugcuggccauccucaaggggaucuacaacgucgcgaccugcggccuguucgggcugguguccuuccuccugcugugcggccgcagcugcuccacgaccuacaaggggguguacgagcuccagacccuggagcuggacauggccaaccucaacaugugcaugccgcugagcugcacgaagaacaacucccaccacuacaucauggucggcaacgagaccggccuggagcucacccugaccaacacgagcaucaucaaccacaaguucugcaaccuguccgacgcccacaagaagaaccucuacgaccacgcccugaugagcaucaucuccaccuuccaccugagcauccccaacuucaaccaguacgaggccauguccugcgacuucaacgggggcaagaucagcgugcaguacaaccucucccacaccuacgcgguggacgccgccaaccacugcgggaccaucgccaacggcguccugcagacguucaugcggauggcguggggcgggagcuacaucgcccuggacuccggcaaggggagcugggacugcaucaugaccuccuaccaguaccucgugauccagaacaccaccugggaggaccacugccaguucagccgccccucccccaucggcuaccuggggcugcucagccagcggacgcgcgacaucuacaucagccggcgccugcugggcaccuucaccuggacccucuccgacagcgagggcaacgagacgcccgggggcuacugccugacccgguggaugcugaucgaggccgagcucaagugcuucgggaacaccgccguggccaagugcaacgagaagcacgacgaggaguucugcgacaugcugcgccuguucgacuucugcaagcaggcgauccggcgccucaagacccccgcccagauguccauccagcugaucaacaaggccgucaacgcccugaucaacgaccagcucaucaugaagaaccaccuccgggacaucaugggcauccccuacugcaacuacagcaaguacugguaccugaaccacacggugaccgggaagaccucccugccccgcugcuggcuggugagcaacggcuccuaccugaacgagacccacuucagcgacgacaucgagcagcaggccgacaacaugaucacggagcuccugcagaaggaguacaucgaccggcagggcaagaccccgcuggggcucgucgaccuguucguguucuccaccagcuucuaccugaucuccaucuuccugcaccucgugaagaucccgacccaccgccacaucacgggcaagcccugccccaagccccaccggcugaaccacauggggaucugcagcugcggccuguacaagcacccggggguccccgugaaguggaagcgcugaggacuagucccuguucccagagcccacuuuuuuuucuuuuuuugaaauaaaauagccugucuuucagaucucaaaggcucuuuucagagccaccaaaaaaaaaaaaaaaaaaaaaaaaaaaaaaaaaaaaaaaaaaaaaaaaaaaaaaaaaaaaaaaaagaauu

SEQ ID NO: 29904 - RNA, 1714 nt, Artificial Sequence
  mRNA product Design a-1 (hSL-A64-N5) comprising derived and/or modified sequence from LASV(Lassa virus/H.sapiens-wt/NGA/2016/ISTH_0009;Clade II)__AVO03571__GPCmut6 (opt1)
aggagagucccgcagucggcguccagcggcucugcuuguucgugugugugucguugcaggccuuauucaagcuuaccaugggccagaucaucaccuucuuccaggaggugccccacgucaucgaggaggugaugaacaucgugcugaucgcccucagccugcuggccauccucaaggggaucuacaacgucgcgaccugcggccugcuggggcucguguccuuccugcugcucugcggccgcagcugcuccacgaccuacaaggggguguacgagcugcagacccuggagcucgacauggccagccugaacaugugcaugccgcuguccugcacgaagaacaacagccaccacuacaucauggucggcaacgagaccggccucgagcugacccugaccaacacguccaucaucaaccacaaguucugcaaccucagcgacgcccacaagaagaaccuguacgaccacgcccugauguccaucaucagcaccuuccaccucuccauccccaacuucaaccaguacgaggccaugagcugcgacuucaacgggggccggaucuccgugcaguacaaccugagccacuccuacgcgguggacgccgccaaccacugcgggaccaucgccaacggcguccugcagaccuucaugcgcauggcguggggcgggagcuacaucgcccucgacuccggcaaggggagcugggacugcaucaugacguccuaccaguaccugaucauccagaacaccaccugggaggaccacugccaguucagccggcccagccccaucggcuaccuggggcuccugucccagcgcacccgggacaucuacaucagccgccggcugcucggcacguucaccuggacccuguccgacagcgagggcaacgagacccccgggggcuacugccugacgcgcuggaugcucaucgaggccgagcugaagugcuucgggaacaccgccguggccaagugcaacgagaagcacgacgaggaguucugcgacaugcugcggcuguucgacuucugcaagcaggcgauccgccggcugaagacccccgcccagauguccauccagcugaucaacaaggccgugaacgcccucaucaacgaccagcugaucaugaagaaccaccuccgcgacaucaugggcaucccguacugcaacuacagcaaguacugguaccucaaccacaccgucacggggaagaccucccugccccggugcuggcuggugagcaacggcuccuaccucaacgagacccacuucagcgacgacaucgagcagcaggccgacaacaugaucaccgagcugcugcagaaggaguacaucgaccgccagggcaagacgccccucgggcugguggaccuguucgucuucuccaccagcuucuaccugaucuccaucuuccuccaccuggugaagaucccgacccaccggcacaucaccggcaagcccugccccaagccccaccgccugaaccacauggggaucugcagcugcggccucuacaaccacccgggggugcccgucaaguggaagcggugaggacuagucccuguucccagagcccacuuuuuuuucuuuuuuugaaauaaaauagccugucuuucagaucucaaaggcucuuuucagagccaccaaaaaaaaaaaaaaaaaaaaaaaaaaaaaaaaaaaaaaaaaaaaaaaaaaaaaaaaaaaaaaaaagaauu

SEQ ID NO: 29905 - RNA, 1714 nt, Artificial Sequence
  mRNA product Design a-1 (hSL-A64-N5) comprising derived and/or modified sequence from LASV(Lassa virus/H.sapiens-wt/NGA/2016/ISTH_0017;Clade II)__AVO03567__GPCmut6 (opt1)
aggagagucccgcagucggcguccagcggcucugcuuguucgugugugugucguugcaggccuuauucaagcuuaccaugggccagaucaucaccuucuuccaggaggugccccacgucaucgaggaggugaugaacaucgugcugaucgcccucagccugcuggccauccucaaggggaucuacaacgucgcgaccugcggccuguucgggcugguguccuuccuccugcugugcggccgcagcugcuccacgaccuacaaggggguguacgagcuccagacccuggagcuggacauggccagccucaacaugugcaugccgcuguccugcacgaagaacaacagccaccacuacaucauggucggcaacgagaccggccuggagcucacccugaccaacacguccaucaucaaccacaaguucugcaaccugagcgacgcccacaagaagaaccucuacgaccacgcccugauguccaucaucagcaccuuccaccuguccauccccaacuucaaccaguacgaggccaugagcugcgacuucaacgggggcaagaucuccgugcaguacaaccucagccacaccuacgcgaucgacgccgccaaccacugcgggaccaucgccaacggcgugcugcagacguucaugcggauggcguggggcggguccuacaucgcccuggacagcggcaagggguccugggacugcaucaugaccagcuaccaguaccucaucauccagaacaccaccugggaggaccacugccaguucucccgccccagccccaucggcuaccuggggcugcucagccagcggacgcgcgacaucuacaucucccggcgccugcugggcaccuucaccuggacccucagcgacuccgagggcaacgagacgcccgggggcuacugccugacccgguggaugcugaucgaggccgagcucaagugcuucgggaacaccgccgucgccaagugcaacgagaagcacgacgaggaguucugcgacaugcugcgccuguucgacuucugcaagcaggcgauccggcgccucaagacccccgcccagaugagcauccagcugaucaacaaggccgugaacgcccugaucaacgaccagcucaucaugaagaaccaccuccgggacaucaugggcauccccuacugcaacuacuccaaguacugguaccugaaccacacggugaccgggaagaccagccugccccgcugcuggcuggucuccaacggcagcuaccugaacgagacccacuucuccgacgacaucgagcagcaggccgacaacaugaucacggagcuccugcagaaggaguacauggaccggcagggcaagaccccgcuggggcucguggaccuguucguguucagcaccuccuucuaccugaucagcaucuuccugcaccucguccgcaucccgacccaccggcacgugaucggcaagcccugccccaagccccaccgccugaaccacauggggaucugcuccugcggccuguacaagcacccgggggugcccgucaaguggaagcggugaggacuagucccuguucccagagcccacuuuuuuuucuuuuuuugaaauaaaauagccugucuuucagaucucaaaggcucuuuucagagccaccaaaaaaaaaaaaaaaaaaaaaaaaaaaaaaaaaaaaaaaaaaaaaaaaaaaaaaaaaaaaaaaaagaauu

SEQ ID NO: 29906 - RNA, 1714 nt, Artificial Sequence
  mRNA product Design a-1 (hSL-A64-N5) comprising derived and/or modified sequence from LASV(Lassa virus/H.sapiens-wt/NGA/2018/ISTH_0959;Clade II)__AVV65099__GPCmut6 (opt1)
aggagagucccgcagucggcguccagcggcucugcuuguucgugugugugucguugcaggccuuauucaagcuuaccaugggccagaucaucaccuucuuccaggaggugccccacgucaucgaggaggugaugaacaucgugcugaucgcccucagccugcuggccauccucaaggggaucuacaacgucgugaccugcggccuguucgggcugguguccuuccuccugcugugcggccgcagcugcuccacgaccuacaagggggucuacgagcuccagacccuggagcuggacauggcgagccucaacaugugcaugccgcuguccugcacgaagaacaacagccaccacuacaucauggugggcaacgagaccggccuggagcucacccugaccaacacguccaucaucaaccacaaguucugcaaccugagcgacgcccacaagaagaaccucuacgaccacgcccugauguccaucaucagcaccuuccaccuguccauccccaacuucaaccaguacgaggccaugagcugcgacuucaacgggggcaagaucuccgugcaguacaaccucagccacgccuacgcgaucgacgccgccaaccacugcgggaccaucgccaacggcguccugcagaccuucaugcggauggcguggggcggguccuacaucgcccuggacagcggcaagggguccugggacugcaucaugacgagcuaccaguaccucaucauccagaacaccaccugggaggaccacugccaguucucccgccccagccccaucggcuaccuggggcugcucagccagcggacccgcgacaucuacaucucccggcgccugcugggcacguucaccuggacccucagcgacuccgagggcaacgagacccccgggggcuacugccugacgcgguggaugcugaucgaggccgagcucaagugcuucgggaacaccgccguggccaagugcaacgagaagcacgacgaggaguucugcgacaugcugcgccuguucgacuucugcaagcaggcgauccggcgccucaagacccccgcccagaugagcauccagcugaucaacaaggccgugaacgcccugaucaacgaccagcucaucaugaagaaccaccuccgggacaucaugggcaucccguacugcaacuacuccaaguacugguaccugaaccacaccgucacggggaagaccagccugccccgcugcuggcugguguccaacggcagcuaccugaacgagacccacuucuccgacgacaucgagcagcaggccgacaacaugaucaccgagcuccugcagaaggaguacaucgaccggcagggcaagacgccccuggggcucguggaccuguucgucuucagcaccuccuucuaccugaucagcaucuuccugcaccucgugaagaucccgacccaccgccacgugaucggcaagcccugccccaagccccaccggcugaaccacauggggaucugcuccugcggccuguacaagcacccggggguccccgugaaguggaagcgcugaggacuagucccuguucccagagcccacuuuuuuuucuuuuuuugaaauaaaauagccugucuuucagaucucaaaggcucuuuucagagccaccaaaaaaaaaaaaaaaaaaaaaaaaaaaaaaaaaaaaaaaaaaaaaaaaaaaaaaaaaaaaaaaaagaauu

SEQ ID NO: 29907 - RNA, 1714 nt, Artificial Sequence
  mRNA product Design a-1 (hSL-A64-N5) comprising derived and/or modified sequence from LASV(LASV003-NIG-2008;Clade II)__AIT17580__GPCmut6 (opt1)
aggagagucccgcagucggcguccagcggcucugcuuguucgugugugugucguugcaggccuuauucaagcuuaccaugggccagaucaucaccuucuuccaggaggugccccacgucaucgaggaggugaugaacaucgugcugaucgcccucagccugcuggccauccucaaggggaucuacaacgucgcgaccugcggccuguucgggcugguguccuuccuccugcugugcggccgcagcugcuccacgaccuacaaggggguguacgagcuccagacccuggagcuggacauggccagccucaacaugugcaugccgcuguccugcacgaagaacaacagccaccacuacaucauggucggcaacgagaccggccuggagcucacccugaccaacacguccaucaucaaccacaaguucugcaaccugagcgacgcccacaagaagaaccucuacgaccacgcccugauguccaucaucagcaccuuccaccuguccauccccaacuucaaccaguacgaggccaugagcugcgacuucaacgggggcaagaucuccgugcaguacaaccucagccacaccuacgcgguggacgccgccaaccacugcgggaccaucgccaacggcguccugcagacguucaugcggauggcguggggcggguccuacaucgcccuggacagcggcaagggguccugggacugcaucaugaccagcuaccaguaccucaucauccagaacaccaccugggaggaccacugccaguucucccgccccagccccaucggcuaccuggggcugcucagccagcggacgcgcgacaucuacaucucccggcgccugcugggcaccuucaccuggacccucagcgacuccgagagcaacgagacgccgggcggguacugccugacccgguggaugcugaucgaggccgagcucaagugcuucggcaacaccgccguggccaagugcaacgagaagcacgacgaggaguucugcgacaugcugcgccuguucgacuucugcaagcaggcgauccggcgccucaaggcccccgcccagauguccauccagcugaucaacaaggccgugaacgcccugaucaacgaccagcucaucaugaagaaccaccuccgggacaucauggggauccccuacugcaacuacagcaaguacugguaccugaaccacaccgucacgggccgcaccucccugccccggugcuggcuggugagcaacggguccuaccugaacgagacccacuucagcgacgacaucgagcagcaggcggacaacaugaucaccgagcuccugcagaaggaguacauggaccgccagggcaagacgccccugggccucguggaccuguucgucuucuccaccagcuucuaccugaucuccaucuuccugcaccucgugaagaucccgacccaccggcacgugaucgggaagcccugccccaagccccaccgccugaaccacaugggcaucugcagcugcgggcuguacaagcacccgggcguccccgugaaguggaagcggugaggacuagucccuguucccagagcccacuuuuuuuucuuuuuuugaaauaaaauagccugucuuucagaucucaaaggcucuuuucagagccaccaaaaaaaaaaaaaaaaaaaaaaaaaaaaaaaaaaaaaaaaaaaaaaaaaaaaaaaaaaaaaaaaagaauu

SEQ ID NO: 29908 - RNA, 1714 nt, Artificial Sequence
  mRNA product Design a-1 (hSL-A64-N5) comprising derived and/or modified sequence from LASV(LASV035-NIG-2009;Clade II)__AIT17588__GPCmut6 (opt1)
aggagagucccgcagucggcguccagcggcucugcuuguucgugugugugucguugcaggccuuauucaagcuuaccaugggccagaucaucaccuucuuccaggaggugccccacgucaucgaggaggugaugaacaucgugcugaucgcccucagccugcuggccauccucaaggggaucuacaacgucgcgaccugcggccuguucgggcugguguccuuccuccugcugugcggccgcagcugcuccacgaccuacaaggggguguacgagcuccagacccuggagcuggacauggccagccucaacaugugcaugccgcuguccugcacgaagaacaacagccaccacuacaucauggucggcaacgagaccggccuggagcucacccugaccaacacguccaucaucaaccacaaguucugcaaccugagcgacgcccacaagaagaaccucuacgaccacgcccugauguccaucaucagcaccuuccaccuguccauccccaacuucaaccaguacgaggccaugagcugcgacuucaacgggggcaagaucuccgugcaguacaaccucagccacgcguacgccguggacgccgccaaccacugcgggaccaucgcgaacggcguccugcagaccuucaugcggauggccuggggcggguccuacaucgcccuggacagcggcaagggguccugggacugcaucaugacgagcuaccaguaccucaucauccagaacaccaccugggaggaccacugccaguucucccgccccagccccaucggcuaccuggggcugcucagccagcggacccgcgacaucuacaucucccggcgccugcugggcacguucaccuggacccucagcgacuccgagggcaacgagacccccgggggcuacugccugacgcgguggaugcugaucgaggccgagcucaagugcuucgggaacaccgccguggcgaagugcaacgagaagcacgacgaggaguucugcgacaugcugcgccuguucgacuucugcaagcaggccauccggcgccucaaggcccccgcccagaugagcauccagcugaucaacaaggccgugaacgcgcugaucaacgaccagcucaucaugaagaaccaccuccgggacaucaugggcauccccuacugcaacuacuccaaguacugguaccugaaccacaccgucaccgggaagacgagccugccccgcugcuggcugguguccaacggcagcuaccugaacgagacccacuucuccgacgacaucgagcagcaggccgacaacaugaucaccgagcuccugcagaaggaguacaucgaccggcagggcaagaccccgcuggggcucguggaccuguucgucuucagcacguccuucuaccugaucagcaucuuccugcaccucgugaagaucccgacccaccgccacgugaucggcaagcccugccccaagccccaccggcugaaccacauggggaucugcuccugcggccuguacaagcacccggggguccccgugaaguggaagcgcugaggacuagucccuguucccagagcccacuuuuuuuucuuuuuuugaaauaaaauagccugucuuucagaucucaaaggcucuuuucagagccaccaaaaaaaaaaaaaaaaaaaaaaaaaaaaaaaaaaaaaaaaaaaaaaaaaaaaaaaaaaaaaaaaagaauu

SEQ ID NO: 29909 - RNA, 1714 nt, Artificial Sequence
  mRNA product Design a-1 (hSL-A64-N5) comprising derived and/or modified sequence from LASV(LASV1000-NIG-2009;Clade II)__AIT17782__GPCmut6 (opt1)
aggagagucccgcagucggcguccagcggcucugcuuguucgugugugugucguugcaggccuuauucaagcuuaccaugggccagaucaucaccuucuuccaggaggugccccacgucaucgaggaggugaugaacaucgugcugaucgcccucagccugcuggccauccucaaggggaucuacaacgucgcgaccugcggccuguucgggcugguguccuuccuccugcugugcggccgcagcugcuccacgaccuacaaggggguguacgagcuccagacccuggagcuggacauggccagccucaacaugugcaugccgcuguccugcacgaagaacaacagccaccacuacaucauggucggcaacgagaccggccuggagcucacccugaccaacacguccaucaucaaccacaaguucugcaaccugagcgacgcccacaagaagaaccucuacgaccacgcccugauguccaucaucagcaccuuccaccuguccauccccaacuucaaccaguacgaggccaugagcugcgacuucaacgggggcaagaucuccgugcaguacaaccucagccacaccuacgcgguggacgccgccaaccacugcgggaccaucgccaacggcguccugcagacguucaugcggauggcguggggcggguccuacaucgcccuggacagcggcaagggguccugggacugcaucaugaccagcuaccaguaccucaucauccagaacaccaccugggaggaccacugccaguucucccgccccagccccaucggcuaccuggggcugcucagccagcggacgcgcgacaucuacaucucccggcgccugcugggcaccuucaccuggacccucagcgacuccgagggcaacgagacgcccgggggcuacugccugacccgguggaugcugaucgaggccgagcucaagugcuucgggaacaccgccguggccaagugcaacgagaagcacgacgaggaguucugcgacaugcugcgccuguucgacuucugcaagcaggcgaucaagcggcucaagacccccgcccagaugagcauccagcugaucaacaaggccgugaacgcccugaucaacgaccagcucaucaugaagaaccaccuccgcgacaucaugggcauccccuacugcaacuacuccaaguacugguaccugaaccacacggucaccgggaagaccagccugccccggugcuggcugguguccaacggcagcuaccugaacgagacccacuucuccgacgacaucgagcagcaggccgacaacaugaucacggagcuccugcagaaggaguacaucgaccgccagggcaagaccccgcuggggcucguggaccuguucgucuucagcaccuccuucuaccugaucagcaucuuccugcaccucgugaagaucccgacccaccggcacguggucggcaagcccugccccaagccccaccgccugaaccacauggggaucugcuccugcggccuguacaagcacccgggggugcccgugaaguggaagcggugaggacuagucccuguucccagagcccacuuuuuuuucuuuuuuugaaauaaaauagccugucuuucagaucucaaaggcucuuuucagagccaccaaaaaaaaaaaaaaaaaaaaaaaaaaaaaaaaaaaaaaaaaaaaaaaaaaaaaaaaaaaaaaaaagaauu

SEQ ID NO: 29910 - RNA, 1714 nt, Artificial Sequence
  mRNA product Design a-1 (hSL-A64-N5) comprising derived and/or modified sequence from LASV(LASV221-NIG-2010;Clade II)__AIT17624__GPCmut6 (opt1)
aggagagucccgcagucggcguccagcggcucugcuuguucgugugugugucguugcaggccuuauucaagcuuaccaugggccagaucaucaccuucuuccaggaggugccccacgucaucgaggaggugaugaacaucgugcugaucgcccucagccugcuggccauccucaaggggaucuacaacgucgcgaccugcggccuguucgggcugguguccuuccuccugcugugcggccgcagcugcuccacgaccuacaaggggguguacgagcuccagacccuggagcuggacauggccagccucaacaugugcaugccgcuguccugcacgaagaacaacagccaccacuacaucauggucggcaacgagaccggccuggagcucacccugaccaacacguccaucaucaaccacaaguucugcaaccugagcgacgcccacaagaagaaccucuacgaccacgcccugauguccaucaucagcaccuuccaccuguccauccccaacuucaaccaguacgaggccaugagcugcgacuucaacgggggcaagaucuccgugcaguacaaccucagccacaccuacgcgaucgacgccgccaaccacugcgggaccaucgccaacggcgugcugcagacguucaugcggauggcguggggcggguccuacaucgcccuggacagcggcaagggguccugggacugcaucaugaccagcuaccaguaccucaucauccagaacaccaccugggaggaccacugccaguucucccgccccagccccaucggcuaccuggggcugcucagccagcggacgcgcgacaucuacaucucccggcgccugcugggcaccuucaccuggacccucagcgacuccgagggcaacgagacgcccgggggcuacugccugacccgguggaugcugaucgaggccgagcucaagugcuucgggaacaccgccgucgccaagugcaacgagaagcacgacgaggaguucugcgacaugcugcgccuguucgacuucugcaagcaggcgauccggcgccucaagacccccgcccagaugagcauccagcugaucaacaaggccgugaacgcccugaucaacgaccagcucaucaugaagaaccaccuccgggacaucaugggcauccccuacugcaacuacuccaaguacugguaccugaaccacacggugaccgggaagaccagccugccccgcugcuggcuggucuccaacggcagcuaccugaacgagacccacuucuccgacgacaucgagcagcaggccgacaacaugaucacggagaugcuccagaaggaguacauggaccggcagggcaagaccccgcuggggcugguggaccucuucguguucagcaccuccuucuaccugaucagcaucuuccugcaccuggucaagaucccgacccaccgccacgugaucggcaagcccugccccaagccccaccggcucaaccacauggggaucugcuccugcggccuguacaagcacccgggggugcccgucaaguggaagcgcugaggacuagucccuguucccagagcccacuuuuuuuucuuuuuuugaaauaaaauagccugucuuucagaucucaaaggcucuuuucagagccaccaaaaaaaaaaaaaaaaaaaaaaaaaaaaaaaaaaaaaaaaaaaaaaaaaaaaaaaaaaaaaaaaagaauu

SEQ ID NO: 29911 - RNA, 1714 nt, Artificial Sequence
  mRNA product Design a-1 (hSL-A64-N5) comprising derived and/or modified sequence from LASV(LASV237-NIG-2010;Clade II)__AIT17638__GPCmut6 (opt1)
aggagagucccgcagucggcguccagcggcucugcuuguucgugugugugucguugcaggccuuauucaagcuuaccaugggccagaucaucaccuucuuccaggaggugccccacgucaucgaggaggugaugaacaucgugcugaucgcccucagccugcuggccauccucaaggggaucuacaacgucgcgaccugcggccuguucgggcugguguccuuccuccugcugugcggccgcagcugcuccacgaccuacaaggggguguacgagcuccagacccuggagcuggacauggccagccucaacaugugcaugccgcuguccugcacgaagaacaacagccaccacuacaucauggucggcaacgagaccggccuggagcucacccugaccaacacguccaucaucaaccacaaguucugcaaccugagcgacgcccacaagaaggaccucuacgaccacgcccugauguccaucaucagcaccuuccaccuguccauccccaacuucaaccaguacgaggccaugagcugcgacuucaacgggggcaagaucuccgugcaguacaaccucagccacaccuacgcgguggacgccgccaaccacugcgggaccaucgccaacggcguccugcagacguucaugcggauggcguggggcggguccuacaucgcccuggacagcggcaagggguccugggacugcaucaugaccagcuaccaguaccucaucauccagaacaccaccugggaggaccacugccaguucucccgccccagccccaucggcuaccuggggcugcucagccagcggacgcgcgacaucuacaucucccggcgccugcugggcaccuucaccuggacccucagcgacuccgagggcaacgagacgcccgggggcuacugccugacccgguggaugcugaucgaggccgagcucaagugcuucgggaacaccgccguggccaagugcaacgagaagcacgacgaggaguucugcgacaugcugcgccuguucgacuucugcaagcaggcgauccggcgccucaagacccccgcccagaugagcauccagcugaucaacaaggccgugaacgcccugaucaacgaccagcucaucaugaagaaccaccuccgggacaucaugggcauccccuacugcaacuacuccaaguacugguaccugaaccacacggucaccgggaagaccagccugccccgcugcuggcugguguccaacggcagcuaccugaacgagacccacuucuccgacgacaucgagcagcaggccgacaacaugaucacggagcuccugcagaaggaguacauggaccggcagggcaagaccccgcuggggcucguggaccuguucgucuucagcaccuccuucuaccugaucagcaucuuccugcaccucaucaagaucccgacccaccgccacaucacgggcaagcccugccccaagccccaccggcugaaccacauggggaucugcuccugcggccuguacaagcacccgggggugcccgugaaguggaagcgcugaggacuagucccuguucccagagcccacuuuuuuuucuuuuuuugaaauaaaauagccugucuuucagaucucaaaggcucuuuucagagccaccaaaaaaaaaaaaaaaaaaaaaaaaaaaaaaaaaaaaaaaaaaaaaaaaaaaaaaaaaaaaaaaaagaauu

SEQ ID NO: 29912 - RNA, 1714 nt, Artificial Sequence
  mRNA product Design a-1 (hSL-A64-N5) comprising derived and/or modified sequence from LASV(LASV253-NIG-2011;Clade II)__AIT17670__GPCmut6 (opt1)
aggagagucccgcagucggcguccagcggcucugcuuguucgugugugugucguugcaggccuuauucaagcuuaccaugggccagaucaucaccuucuuccaggaggugccccacgucaucgaggaggugaugaacaucgugcugaucgcccucagccugcuggccauccucaaggggaucuacaacgucgcgaccugcggccuguucgggcugguguccuuccuccugcugugcggccgcagcugcuccacgaccuacaaggggguguacgagcuccagacccuggagcuggacauggccagccucaacaugugcaugccgcuguccugcacgaagaacaacagccaccacuacaucauggucggcaacgagaccggccuggagcucacccugaccaacacguccaucaucaaccacaaguucugcaaccugagcgacgcccacaagaagaaccucuacgaccacgcccugauguccaucaucagcaccuuccaccuguccauccccaacuucaaccaguacgaggccaugagcugcgacuucaacgggggcaagaucuccgugcaguacaaccucagccacaccuacgcgguggacgccgccaaccacugcgggaccaucgccaacggcguccugcagacguucaugcggauggcguggggcggguccuacaucgcccuggacagcggcaagggguccugggacugcaucaugaccagcuaccaguaccucaucauccagaacaccaccugggaggaccacugccaguucucccgccccagccccaucggcuaccuggggcugcucagccagcggacgcgcgacaucuacaucucccggcgccugcugggcaccuucaccuggacccucagcgacuccgagggcaacgagacgcccgggggcuacugccugacccgguggaugcugaucgaggccgagcucaagugcuucgggaacaccgccguggccaagugcaacgagaagcacgacgaggaguucugcgacaugcugcgccuguucgacuucugcaagcaggcgauccggcgccucaaggcccccgcccagaugagcauccagcugaucaacaaggccgugaacgcccugaucaacgaccagcucaucaugaagaaccaccuccgggacaucaugggcaucccguacugcaacuacuccaaguacugguaccugaaccacaccgucacggggcgcaccagccugccccggugcuggcugguguccaacggcagcuaccugaacgagacccacuucuccgacgacaucgagcagcaggcggacaacaugaucaccgagcuccugcagaaggaguacaucgaccgccagggcaagacgccccuggggcucguggaccuguucgucuucagcaccuccuucuaccugaucagcaucuuccugcaccucgugaagaucccgacccaccggcacaucaucggcaagcccugccccaagccccaccgccugaaccacauggggaucugcuccugcggccuguacaagcacccgggggugcccgucaaguggaagcggugaggacuagucccuguucccagagcccacuuuuuuuucuuuuuuugaaauaaaauagccugucuuucagaucucaaaggcucuuuucagagccaccaaaaaaaaaaaaaaaaaaaaaaaaaaaaaaaaaaaaaaaaaaaaaaaaaaaaaaaaaaaaaaaaagaauu

SEQ ID NO: 29913 - RNA, 1714 nt, Artificial Sequence
  mRNA product Design a-1 (hSL-A64-N5) comprising derived and/or modified sequence from LASV(LASV254-NIG-2011;Clade II)__AIT17674__GPCmut6 (opt1)
aggagagucccgcagucggcguccagcggcucugcuuguucgugugugugucguugcaggccuuauucaagcuuaccaugggccagaucaucaccuucuuccaggaggugccccacgucaucgaggaggugaugaacaucgugcugaucgcccucagccugcuggccauccucaaggggaucuacaacgucgcgaccugcggccuguucgggcugguguccuuccuccugcugugcggccgcagcugcuccacgaccuacaaggggguguacgagcuccagacccuggagcuggacaugaccaaccucaacaugugcaugccgcugagcugcaccaagaacaacucccaccacuacaucauggucggcaacgagaccggccuggagcucacccugacgaacaccagcaucaucaaccacaaguucugcaaccuguccgacgcccacaagaagaaccucuacaaccacgcccugaugagcaucaucuccaccuuccaccugagcauccccaacuucaaccaguacgaggccauguccugcgacuucaacgggggcaagaucagcgugcaguacaaccucucccacagcuacgccguggacgcggccaaccacugcgggaccaucgccaacggcguccugcagacguucaugcggauggccuggggcggguccuacaucgcgcuggacagcggcaaggggaacugggacugcaucaugaccuccuaccaguaccucaucauccagaacaccaccugggaggaccacugccaguucagccgccccucccccaucggcuaccuggggcugcucagccagcggacgcgcgacaucuacaucagccggcgccugcugggcaccuucaccuggacccucuccgacagcgagggcaacgagacgcccgggggcuacugccugacccgguggaugcugaucgaggccgagcucaagugcuucgggaacaccgccguggccaagugcaacgagaagcacgacgaggaguucugcgacaugcugcgccuguucgacuucugcaagcaggccauccggcgccucaagacccccgcgcaggccaacauccagcugaucaacaaggccgugaacgcccugaucaacgaccagcucaucaugaagaaccaccuccgggacaucaugggcauccccuacugcaacuacuccaaguacugguaccugaaccacacggucaccgggaagaccagccugccccgcugcuggcugguguccaacggcagcuaccugaacgagacccacuucuccgacgacaucgagcagcaggccgacaacaugaucacggagcuccugcagaaggaguacauggaccggcagggcaagaccccgcuggggcucguggaccuguucgucuucagcaccuccuucuaccugaucagcaucuuccugcaccucgugaagaucccgacccaccgccacgugaucggcaagcccugccccaagccccaccggcugaaccacauggggaucugcuccugcggccuguacaagcacccggggguccccgugaaguggaagcgcugaggacuagucccuguucccagagcccacuuuuuuuucuuuuuuugaaauaaaauagccugucuuucagaucucaaaggcucuuuucagagccaccaaaaaaaaaaaaaaaaaaaaaaaaaaaaaaaaaaaaaaaaaaaaaaaaaaaaaaaaaaaaaaaaagaauu

SEQ ID NO: 29914 - RNA, 1714 nt, Artificial Sequence
  mRNA product Design a-1 (hSL-A64-N5) comprising derived and/or modified sequence from LASV(Nig08-A19;Clade III)__ADU56618__GPCmut6 (opt1)
aggagagucccgcagucggcguccagcggcucugcuuguucgugugugugucguugcaggccuuauucaagcuuaccaugggccagaucgugaccuucuuccaggaggucccccacgugaucgaggaggugaugaacaucguccugaucgcccucagcauccuggccauccugaaggggcucuacaacaucgcgaccugcggccugaucgggcuggugacguuccuccugcuguccggccgcagcugcuccaugaccuacaaggggguguacgagcuccagacccuggagcugaacaugaacacccucaacaugugcaugccgcugagcugcaccaagaacaacucccaccacuacaucauggucggcaacgagaccggccuggagcucacccugacgaacaccagccugcuccaccacaaguucugcaaccuguccgacgcccacaagaagaaccuguacgaccacacccucaugagcaucaucuccaccuuccaccugagcauccccaacuucaaccaguacgaggccauguccugcgacuucaacgggggcaagaucacggugcaguacaaccugagccacuccuacgccaucgacgccgcgaaccacugcgggaccguggccaacggcguccuccagaccuucaugcggauggccuggggcgggagcuacaucgcccuggacuccggccgcgggaagugggacugcaucaugaccagcuaccaguaccugaucauccagaacacgaccugggaggaccacugccaguucucccggcccagccccaucggcuaccucgggcugcugucccagcgcacccgggacaucuacaucagccgccggcuccugggcaccuucacguggacccugagcgacuccgagggcaacgagacccccgggggcuacugccucacccgcuggaugcugaucgaggcggagcugaagugcuucgggaacacggccguggccaagugcaacgagaagcacgacgaggaguucugcgacaugcuccggcuguucgacuucugcaagcaggccauccgccggcugaaggcccccgcgcagaugagcauccagcucaucaacaaggccgugaacgcccugaucaacgaccagcugaucaugaagaaccaccuccgcgacaucaugggcauccccuacugcaacuacuccaaguacugguaccugaaccacaccagcaccgggcggaccucccugccccgcugcuggcucgucagcaacggcuccuaccugaacgagacgcacuucagcgacgacaucgagcagcaggccgacaacaugaucaccgagaugcugcagaaggaguaccucgaccggcagggcaagaccccgcuggggcugguggaccuguucguguucuccaccagcuucuaccucaucuccaucuuccugcaccuggucaagaucccgacgcaccgccacaucgugggcaagcccugccccaagccccaccggcucaaccacauggggaucugcagcugcggccuguacaagcagccgggggugcccguccgcuggaagcggugaggacuagucccuguucccagagcccacuuuuuuuucuuuuuuugaaauaaaauagccugucuuucagaucucaaaggcucuuuucagagccaccaaaaaaaaaaaaaaaaaaaaaaaaaaaaaaaaaaaaaaaaaaaaaaaaaaaaaaaaaaaaaaaaagaauu

SEQ ID NO: 29915 - RNA, 1717 nt, Artificial Sequence
  mRNA product Design a-1 (hSL-A64-N5) comprising derived and/or modified sequence from LASV(G1180-SLE-2010;Clade IV)__AIT17168__GPCmut6 (opt1)
aggagagucccgcagucggcguccagcggcucugcuuguucgugugugugucguugcaggccuuauucaagcuuaccaugggccagaucgugaccuucuuccaggaggucccccacgugaucgaggaggugaugaacaucguccugaucgcccucagcauccuggccgugcugaaggggcucuacaacuucgcgaccugcggccugguggggcugcucaccuuccugcugcucugcggccgcuccugcaccgccagccgguacaagggggucuacgagcugcagacccuggagcucaacauggagacccugaacaugugcaugccgcuguccugcaccaagaacaacagccaccacuacaucauggugggcaacgagaccggccucgagcugacccugacgaacaccuccaucaucaaccacaaguucugcaaccucagcgacgcccacaagaagaaccuguacgaccacgcccugauguccaucaucagcaccuuccaccucuccauccccaacuucaaccaguacgaggccaugagcugcgacuucaacgggggcaagaucuccgugcaguacaaccugagccacuccuacgcgggggacgccgccaaccacugcggcaccgucgccaacggggugcugcagacguucaugcgcauggcguggggcggcagcuacaucgcccucgacuccgggcacggcagcugggacugcaucaugaccuccuaccaguaccugaucauccagaacaccaccugggaggaccacugccaguucagccggcccucccccaucggguaccugggccuccugagccagcgcacgcgggacaucuacaucagccgccggcugcucggcaccuucaccuggacccuguccgacagcgaggggaaggacacgccgggcggguacugccugacccgcuggaugcucaucgaggccgagcugaagugcuucggcaacaccgccguggccaagugcaacgagaagcacgacgaggaguucugcgacaugcugcggcuguucgacuucugcaagcaggcgauccagcgccugaaggcccccgcccagauguccauccagcugaucaacaaggccgucaacgcccucaucaacgaccagcugaucaugaagaaccaccuccgggacaucauggggauccccuacugcaacuacagcaaguacugguaccucaaccacaccacgaccggcaagaccucccugcccaagugcuggcuggugagcaacggcuccuaccucaacgagacccacuucagcgacgacaucgagcagcaggcggacaacaugaucacggagaugcugcagaaggaguacauggagcgccaggggaagacgccccugggccucguggaccuguucgucuucuccaccagcuucuaccugaucuccaucuuccugcaccucgugaagaucccgacccaccggcacaucgugggcaagagcugccccaagccccaccgccugaaccacauggggaucugcuccugcgggcuguacaagcagcccggcgucccggugaaguggaagcggugaggacuagucccuguucccagagcccacuuuuuuuucuuuuuuugaaauaaaauagccugucuuucagaucucaaaggcucuuuucagagccaccaaaaaaaaaaaaaaaaaaaaaaaaaaaaaaaaaaaaaaaaaaaaaaaaaaaaaaaaaaaaaaaaagaauu

SEQ ID NO: 29916 - RNA, 1717 nt, Artificial Sequence
  mRNA product Design a-1 (hSL-A64-N5) comprising derived and/or modified sequence from LASV(G1442-SLE-2011;Clade IV)__AIT17180__GPCmut6 (opt1)
aggagagucccgcagucggcguccagcggcucugcuuguucgugugugugucguugcaggccuuauucaagcuuaccaugggccagaucgugaccuucuuccaggaggucccccacgugaucgaggaggugaugaacaucguccugaucgcccucagcauccuggccgugcugaaggggcucuacaacguggcgaccugcggccugaucgggcuggucacguuccuccugcugugcggccgcuccugcaccaccacccucuacaaggggguguacgagcugcagacgcuggagcucaacauggagacccugaacaugugcaugccgcugagcugcaccaagaacaacucccaccacuacauccgggugggcaacgagacgggccucgagcugacccugaccaacaccagcaucaucaaccacaaguucugcaaccucuccgacgcccacaagaagaaccuguacgaccacgcccugaugagcaucaucuccacguuccaccucagcauccccaacuucaaccaguacgaggccauguccugcgacuucaacgggggcaagaucagcguccaguacaaccugucccacagcuacgccggggacgcggccaaccacugcggcaccguggccaacggggugcugcagaccuucaugcgcauggccuggggcggcuccuacaucgcgcucgacagcgggcggggcaacugggacugcaucaugaccuccuaccaguaccugaucauccagaacacgaccugggacgaccacugccaguucagccgccccucccccaucggguaccugggccuccugagccagcggacccgcgacgucuacaucucccggcgccugcucggcaccuucacguggacccugagcgacagcgaggggaaggacaccccgggcggguacugccugacccgguggaugcucaucgaggccgagcugaagugcuucggcaacacggccguggccaagugcaacgagaagcacgacgaggaguucugcgacaugcugcgccucuucgacuucugcaagcaggccauccagcggcugaaggcgcccgcccagauguccauccagcugaucaacaaggccgugaacgcccucaucaacgaccagcugaucaugaagaaccaccuccgcgacaucauggggauccccuacugcaacuacagcaaguacugguaccugaacaacaccgccaccggcaagaccucccugcccaagugcuggcugaucagcaacggcuccuaccucaacgagacgcacuucagcgacgacaucgagcaggaggcggacaacaugaucaccgagaugcugcagaaggaguacauggagcggcaggggaagacgccccugggccucgucgaccuguucguguucuccaccagcuucuaccugaucuccaucuuccugcaccucgugaagaucccgacccaccgccacaucgucggcaagagcugccccaagccccaccggcugaaccacauggggaucugcuccugcgggcuguacaagcagcccggcgugccggugcgcuggaagcggugaggacuagucccuguucccagagcccacuuuuuuuucuuuuuuugaaauaaaauagccugucuuucagaucucaaaggcucuuuucagagccaccaaaaaaaaaaaaaaaaaaaaaaaaaaaaaaaaaaaaaaaaaaaaaaaaaaaaaaaaaaaaaaaaagaauu

SEQ ID NO: 29917 - RNA, 1717 nt, Artificial Sequence
  mRNA product Design a-1 (hSL-A64-N5) comprising derived and/or modified sequence from LASV(G3010-SLE-2013;Clade IV)__AIT17344__GPCmut6 (opt1)
aggagagucccgcagucggcguccagcggcucugcuuguucgugugugugucguugcaggccuuauucaagcuuaccaugggccagaucgugaccuucuuccaggaggucccccacgugaucgaggaggugaugaacaucguccugaucgcccucagcauccuggccgugcugaaggggcucuacaacuucgcgaccugcggccugguggggcuggucacguuccuccugcugugcggccgcuccugcaccaccagccucuacaaggggguguacgagcugcagacccuggagcucaacauggagacgcugaacaugugcaugccgcuguccugcaccaagaacaacagccaccacuacaucauggugggcaacgagaccggccucgagcugacgcugaccaacaccuccaucaucaaccacaaguucugcaaccucagcgacgcccacaagaagaaccuguacaaccacgcccugauguccaucaucagcaccuuccaccucuccauccccaacuucaaccaguacgaggccaugagcugcgacuucaacgggggcaagaucuccguccaguacaaccugagccacuccuacgccggggacgcggccagccacugcggcacgguggccaacggggugcugcagaccuucaugcggauggccuggggcggcuccuacaucgcgcucgacagcggguacggcaagugggacugcaucaugaccuccuaccaguaccugaucauccagaacaccacgugggaggaccacugccaguucagccgccccucccccaucggguaccugggccuccugagccagcggacccgcgacaucuacaucagccggcgccugcucggcaccuucaccuggacgcuguccgacagcgaggggaaggacaccccgggcggguacugccugacccgguggaugcucaucgaggccgagcugaagugcuucggcaacaccgccgucgccaagugcaacgagaagcacgacgaggaguucugcgacaugcugcgccucuucgacuucugcaagcaggccauccagcggcugaagacgcccgcgcagauguccauccagcugaucaacaaggccgugaacgcccucaucaacgaccagcugaucaugaagaaccaccuccgcgacaucauggggauccccuacugcaacuacagcaaguacugguaccugaaccacaccaccaccggcaagacgucccugcccaagugcuggcuggugagcaacggcuccuaccucaacgagacccacuucagcgacgacaucgagcagcaggccgacaacaugaucaccgagaugcugcagaaggaguacauggagcggcaggggaagacgccccugggccucgucgaccuguucguguucuccaccagcuucuaccugaucuccaucuuccugcaccucgugaagaucccgacccaccgccacaucgucggcaagagcugccccaagccccaccggcugaaccacauggggaucugcuccugcgggcuguacaagcagcccggcgugccggugcgcuggaagcggugaggacuagucccuguucccagagcccacuuuuuuuucuuuuuuugaaauaaaauagccugucuuucagaucucaaaggcucuuuucagagccaccaaaaaaaaaaaaaaaaaaaaaaaaaaaaaaaaaaaaaaaaaaaaaaaaaaaaaaaaaaaaaaaaagaauu

SEQ ID NO: 29918 - RNA, 1717 nt, Artificial Sequence
  mRNA product Design a-1 (hSL-A64-N5) comprising derived and/or modified sequence from LASV(G502-SLE-2009;Clade IV)__AIT17126__GPCmut6 (opt1)
aggagagucccgcagucggcguccagcggcucugcuuguucgugugugugucguugcaggccuuauucaagcuuaccaugggccagaucgugaccuucuuccaggaggucccccacgugaucgaggaggugaugaacaucguccugaucgcccucagcauccuggccgugcugaaggggcucuacaacuucgcgaccugcggccugguggggcugcucacguuccugcugcucugcggccgcuccugcaccaccgggcuguacaagggcgucuacgagcugcagacccucgagcugaacauggagacgcugaacaugugcaugccgcucagcugcaccaagaacaacucccaccacuacaucauggugggcaacgagaccgggcuggagcugacgcucaccaacaccagcaucaucaaccacaaguucugcaaccuguccgacgcccacaagaagaaccuguacgaccacgcccucaugagcaucaucuccaccuuccaccugagcauccccaacuucaaccaguacgaggccauguccugcgacuucaacggcgggaagaucagcgugcaguacaaccugucccacagcuacgccggcgacgcggccgaccacugcgggacggucgccaacggcgugcuccagaccuucaugcggauggccuggggcggguccuacaucgcgcuggacagcggccgcgggcggugggacugcaucaugaccuccuaccaguaccugaucauccagaacaccacgugggaggaccacugccaguucagccgccccucccccaucggcuaccucggccugcugagccagcggacccgcgacaucuacaucucccggcgccuccuggggaccuucaccuggacgcugagcgacagcgagggcaaggacacccccgggggcuacugccucacccgguggaugcugaucgaggccgagcugaagugcuucgggaacaccgccguggccaagugcaacgagaagcacgacgaggaguucugcgacaugcuccgccuguucgacuucugcaagcaggccauccagcggcugaaggcgcccgcccagauguccauccagcucaucaacaaggccgucaacgcccugaucaacgaccagcuggugaugaagaaccaccuccgcgacaucaugggcauccccuacugcaacuacagccgguacugguaccugaaccacacgaccaccggccgcaccucccugcccaagugcuggcucgugagcaacggguccuaccugaacgagacgcacuucagcgacgacaucgagcagcaggccgacaacaugaucaccgagaugcugcagaaggaguacauggagcggcagggcaagaccccgcucgggcuggucgaccuguucguguucuccaccagcuucuaccugaucuccaucuuccuccaccuggugaagaucccgacgcaccgccacaucgucggcaagagcugccccaagccccaccggcugaaccacauggggaucugcuccugcggccucuacaagcagcccggcgugccggugaaguggaagcgcugaggacuagucccuguucccagagcccacuuuuuuuucuuuuuuugaaauaaaauagccugucuuucagaucucaaaggcucuuuucagagccaccaaaaaaaaaaaaaaaaaaaaaaaaaaaaaaaaaaaaaaaaaaaaaaaaaaaaaaaaaaaaaaaaagaauu

SEQ ID NO: 29919 - RNA, 1717 nt, Artificial Sequence
  mRNA product Design a-1 (hSL-A64-N5) comprising derived and/or modified sequence from LASV(G733-SLE-2010;Clade IV)__AIT17154__GPCmut6 (opt1)
aggagagucccgcagucggcguccagcggcucugcuuguucgugugugugucguugcaggccuuauucaagcuuaccaugggccagaucgugaccuucuuccaggaggucccccacgugaucgaggaggugaugaacaucguccugaucgcccucagcauccuggccgugcugaaggggcucuacaacuucgcgaccugcggcaucguggggcuggucuccuuccugcuccugugcggccgcagcugcacgaccucccuguacaaggggguguacgagcuccagacccuggagcugaacauggagacccucaacaugugcaugccgcugagcugcaccaagaacaacucccaccacuacaucauggugggcaacgagaccggccuggagcucacccugacgaacaccagcaucaucaaccacaaguucugcaaccuguccgacgcccacaagaagaaccucuacgaccacgcccugaugagcaucaucuccaccuuccaccugagcauccccaacuucaaccaguacgaggccauguccugcgacuucaacgggggcaagaucagcguccaguacaaccucucccacagcuacgccggggacgcggccaaccacugcggcaccaucgccaacggggugcugcagacguucaugcggauggccuggggcggcuccuacaucgcgcuggacagcgggcgcgaccggugggacugcaucaugaccuccuaccaguaccucaucauccagaacaccaccugggaggaccacugccaguucagccgccccucccccaucggcuaccuggggcugcucagccagcggacgcgcgacaucuacaucagccggcgccugcugggcaccuucaccuggacccucuccgacagcgagggcaaggacacgcccgggggcuacugccugacccgguggaugcugaucgaggccgagcucaagugcuucgggaacaccgccguggccaagugcaacgagaagcacgacgaggaguucugcgacaugcugcgccuguucgacuucugcaagcaggccauccagcggcucaaggcgcccgcccagauguccauccagcugaucaacaaggccgucaacgcccugaucaacgaccagcucaucaugaagaaccaccuccgcgacaucaugggcauccccuacugcaacuacagcaaguacugguaccugaaccacaccacgaccgggaagaccucccugcccaagugcuggcuggugagcaacggcuccuaccugaacgagacccacuucagcgacgacaucgagcagcaggccgacaacaugaucacggagaugcuccagaaggaguacauggagcggcagggcaagaccccgcuggggcugguggaccucuucgucuucuccaccagcuucuaccugaucuccaucuuccugcaccuggugaagaucccgacccaccgccacguggucggcaagagcugccccaagccccaccggcucaaccacauggggaucugcuccugcggccuguacgggcagcccggcgugccggugaaguggaagcgcugaggacuagucccuguucccagagcccacuuuuuuuucuuuuuuugaaauaaaauagccugucuuucagaucucaaaggcucuuuucagagccaccaaaaaaaaaaaaaaaaaaaaaaaaaaaaaaaaaaaaaaaaaaaaaaaaaaaaaaaaaaaaaaaaagaauu

SEQ ID NO: 29920 - RNA, 1717 nt, Artificial Sequence
  mRNA product Design a-1 (hSL-A64-N5) comprising derived and/or modified sequence from MOPV/LASV reassortant(IGS-1;Clade IV)__AFY05576__GPCmut6 (opt1)
aggagagucccgcagucggcguccagcggcucugcuuguucgugugugugucguugcaggccuuauucaagcuuaccaugggccagaucgugaccuucuuccaggaggucccccacgugaucgaggaggugaugaacaucguccugaucgcccucagcgugcuggccgugcugaaggggcucuacaacuucgcgaccugcggccuggucgggcuggugacguuccuccugcugugcggccgcuccugcaccaccagccucuacaaggggguguacgagcugcagacccuggagcucaacauggagacgcugaacaugugcaugccgcuguccugcaccaagaacaacagccaccacuacaucauggucggcaacgagaccggccucgagcugacgcugaccaacaccuccaucaucaaccacaaguucugcaaccucagcgacgcccacaagaagaaccuguacgaccacgcccugauguccaucaucagcaccuuccaccucuccauccccaacuucaaccaguacgaggccaugagcugcgacuucaacgggggcaagaucuccgugcaguacaaccugagccacuccuacgccggggacgcggccaaccacugcggcacgguggccaacgggguccugcagaccuucaugcggauggccuggggcggcagcuacaucgcgcucgacuccgggcgcggcaacugggacugcaucaugaccagcuaccaguaccugaucauccagaacaccacgugggaggaccacugccaguucucccggcccagccccaucggguaccugggccuccugucccagcgcacccgggacaucuacaucagccgccggcugcucggcaccuucaccuggacgcugagcgacuccgagggggaggacaccccgggcggguacugccugacccgcuggaugcucaucgaggccgagcugaagugcuucggcaacaccgccguggccaagugcaacgagaagcacgacgaggaguucugcgacaugcugcggcuguucgacuucugcaagcaggccauccagcgccugaaggcgcccgcccagaugagcauccagcugaucaacaaggccgugaacgcccucaucaacgaccagcugaucaugaagaaccaccuccgggacaucauggggauccccuacugcaacuacuccaaguacugguaccucaaccacacgaccaccggccgcaccagccugcccaagugcuggcuggucuccaacggcagcuaccucaacgagacgcacuucuccgacgacaucgagcagcaggccgacaacaugaucaccgagaugcugcagaaggaguacauggagcggcaggggaagacgccccugggccucguggaccuguucguguucagcaccuccuucuaccugaucagcaucuuccugcaccucgucaagaucccgacccaccgccacaucguggggaaguccugccccaagccccaccggcugaaccacaugggcaucugcagcugcgggcuguacaagcagcccggcgugccggucaaguggaagcgcugaggacuagucccuguucccagagcccacuuuuuuuucuuuuuuugaaauaaaauagccugucuuucagaucucaaaggcucuuuucagagccaccaaaaaaaaaaaaaaaaaaaaaaaaaaaaaaaaaaaaaaaaaaaaaaaaaaaaaaaaaaaaaaaaagaauu

SEQ ID NO: 29921 - RNA, 1717 nt, Artificial Sequence
  mRNA product Design a-1 (hSL-A64-N5) comprising derived and/or modified sequence from LASV(LM765-SLE-2012;Clade IV)__AIT17814__GPCmut6 (opt1)
aggagagucccgcagucggcguccagcggcucugcuuguucgugugugugucguugcaggccuuauucaagcuuaccaugggccagaucgugaccuucuuccaggaggucccccacgugaucgaggaggugaugaacaucguccugaucgcccucagcauccuggccgugcugaaggggcucuacaacuucgcgaccugcggccugguggggcuggucacguuccuccugcugugcggccgcuccugcaccaccagccucuacaaggggguguacgagcugcagacccuggagcucaacauggagacgcugaacaugugcaugccgcuguccugcaccaagaacaacagccaccacuacaucauggugggcaacgagaccggccucgagcugacgcugaccaacaccuccaucaucgaccacaaguucugcaaccucagcgacgcccaccggaagaaccuguacgaccacgcccugauguccaucaucagcaccuuccaccucuccauccccaacuucaaccaguacgaggccaugagcugcgacuucaacgggggcaagaucuccguccaguacaaccugagccacuccuacgccaaggacgcggccgaccacugcgggacgguggccaacggcgugcugcagaccuucaugcgcauggccuggggcgggagcuacaucgcgcucgacuccggccgggggcgcugggacugcaucaugaccagcuaccaguaccugaucauccagaacaccacgugggaggaccacugccaguucucccggcccagccccaucggcuaccuggggcuccugucccagcgcacccgggacaucuacaucagccgccggcugcucggcaccuucaccuggacgcugagcgacuccgagggcaaggacacccccgggggcuacugccugacccgcuggaugcucaucgaggccgagcugaagugcuucgggaacaccgccgucgccaagugcaacgagaagcacgacgaggaguucugcgacaugcugcggcuguucgacuucugcaagcaggccauccagcgccugaaggcgcccgcccagaugagcauccagcugaucaacaaggccgugaacgcccucaucaacgaccagcugaucaugaagaaccaccuccgggacaucaugggcauccccuacugcaacuacuccaaguacugguaccucaaccacacgaccaccgggaagaccagccugcccaagugcuggcugguguccaacggcagcuaccucaacgagacgcacuucuccgacgacaucgagcagcaggccgacaacaugaucaccgagaugcugcagaaggaguacauggagcgccagggcaagaccccgcuggggcucgucgaccuguucguguucagcaccuccuucuaccugaucagcaucuuccugcaccucgugaagaucccgacgcaccggcacaucgucggcaagcccugccccaagccccaccgccugaaccacauggggaucugcuccugcggccuguacaagcagccgggggugcccgugaaguggaagcggugaggacuagucccuguucccagagcccacuuuuuuuucuuuuuuugaaauaaaauagccugucuuucagaucucaaaggcucuuuucagagccaccaaaaaaaaaaaaaaaaaaaaaaaaaaaaaaaaaaaaaaaaaaaaaaaaaaaaaaaaaaaaaaaaagaauu

SEQ ID NO: 29922 - RNA, 1717 nt, Artificial Sequence
  mRNA product Design a-1 (hSL-A64-N5) comprising derived and/or modified sequence from LASV(LM776-SLE-2012;Clade IV)__AIT17824__GPCmut6 (opt1)
aggagagucccgcagucggcguccagcggcucugcuuguucgugugugugucguugcaggccuuauucaagcuuaccaugggccagaucgugaccuucuuccaggaggucccccacgugaucgaggaggugaugaacaucguccugaucgcccucagcauccuggccgugcugaaggggcucuacaacuucgcgaccugcggccugguggggcuggucacguuccuccugcugugcggccgcuccugcaccaccagcguguacaaggggguguacgagcuccagacccuggagcugaacauggagacgcucaacaugugcaugccgcuguccugcaccaagaacaacagccaccacuacaucauggucggcaacgagaccggccuggagcucacgcugaccaacaccuccaucaucaaccacaaguucugcaaccugagcgacgcccacaagaagaaccucuacgaccacgcccugauguccaucaucagcaccuuccaccuguccauccccaacuucaaccaguacgaggccaugagcugcgacuucaacgggggcaagaucuccgugcaguacaaccucagccacuccuacgccggggacgcggccaaccacugcggcacgguggccaacgggguccugcagaccuucaugcggauggccuggggcggcagcuacaucgcgcuggacuccgggcacggcaagugggacugcaucaugaccagcuaccaguaccucaucauccagaacaccacgugggaggaccacugccaguucucccgccccagccccaucggguaccugggccugcucucccagcggacccgcgacaucuacaucagccggcgccugcugggcaccuucaccuggacgcucagcgacuccgaggggaaggacaccccgggcggguacugccugacccgguggaugcugaucgaggccgagcucaagugcuucggcaacaccgccguggccaagugcaacgagaagcacgacgaggaguucugcgacaugcugcgccuguucgacuucugcaagcaggccauccagcggcucaaggcgcccgcccagaugagcauccagcugaucaacaaggccgugaacgcccugaucaacgaccagcucaucaugaagaaccaccuccgcgacaucauggggauccccuacugcaacuacuccaaguacugguaccugaaccacacgaccaccggcaagaccagccugcccaagugcuggcuggucuccaacggcagcuaccugaacgagacgcacuucuccgacgacaucgagcagcaggccgacaacaugaucaccgagaugcuccagaaggaguacauggagcggcaggggaagacgccccugggccugguggaccucuucguguucagcaccuccuucuaccugaucagcaucuuccugcaccuggucaagaucccgacccaccgccacaucguggggaaguccugccccaagccccaccggcucaaccacaugggcaucugcagcugcgggcuguacaagcagcccggcgugccgguccgcuggaagcggugaggacuagucccuguucccagagcccacuuuuuuuucuuuuuuugaaauaaaauagccugucuuucagaucucaaaggcucuuuucagagccaccaaaaaaaaaaaaaaaaaaaaaaaaaaaaaaaaaaaaaaaaaaaaaaaaaaaaaaaaaaaaaaaaagaauu

SEQ ID NO: 29923 - RNA, 1717 nt, Artificial Sequence
  mRNA product Design a-1 (hSL-A64-N5) comprising derived and/or modified sequence from LASV(Mad39;Clade IV)__ANH09722__GPCmut6 (opt1)
aggagagucccgcagucggcguccagcggcucugcuuguucgugugugugucguugcaggccuuauucaagcuuaccaugggccagaucgugaccuucuuccaggaggucccccacgugaucgaggaggugaugaacaucguccugaucgcccucagcauccuggccgugcugaaggggcucuacaacguggcgaccugcggccugaucgggcuggucacguuccuccugcugugcggccgcuccugcaccaccacccucuacaaggggguguacgagcugcaggcccuggagcucaacauggagacgcugaacaugugcaugccgcugagcugcaccaagaacaacucccaccacuacauccgggugggcaacgagaccggccucgagcugacgcugaccaacaccagccucaucaaccacaaguucugcaaccuguccgacgcccacaagaagaaccuguacgaccacgcccucaugagcaucaucuccaccuuccaccugagcauccccaacuucaaccaguacgaggccauguccugcgacuucaacgacgggaagaucagcguccaguacaaccugucccacacguacgcgggcgacaccgccaaccacugcgggaccguggccaacggcgugcuccagaccuucaugcgcauggccuggggcgggagcuacaucgcgcuggacuccggccgcgggggcugggacugcaucaugacgagcuaccaguaccugaucauccagaacaccaccugggaggaccacugccaguucucccggcccagccccaucggguaccucggccugcugucccagcggacccgcgacaucuacaucagccggcgccuccugggcacguucaccuggacccuguccgacagcgaggggaaggacaccccgggcggguacugccucacgcgguggaugcugaucgaggccgagcugaagugcuucggcaacaccgccgucgccaagugcaacgagaagcacgacgaggaguucugcgacaugcuccgccuguucgacuucugcaagcaggccauccagcggcugaaggcgcccgcccagaugagcauccagcucaucaacaaggccgugaacgcccugaucaacgaccagcugaucaugaagaaccaccuccgcgacaucauggggauccccuacugcaacuacuccaaguacugguaccugaaccacaccgugaccggcaagacgagccugcccaagugcuggcucgucuccaacggcagcuaccugaacgagacccacuucuccgacgacaucgagcagcaggccgacaacaugaucaccgagaugcugcagaaggaguacauggagcggcaggggaagacgccccucggccugguggaccuguucguguucagcaccuccuucuaccugaucagcaucuuccuccaccuggucaagaucccgacccaccgccacgugguggggaagcccugccccaagccccaccggcugaaccacaugggcaucugcuccugcggguucuacaagcagccgggcguccccgugcgcuggaagcggugaggacuagucccuguucccagagcccacuuuuuuuucuuuuuuugaaauaaaauagccugucuuucagaucucaaaggcucuuuucagagccaccaaaaaaaaaaaaaaaaaaaaaaaaaaaaaaaaaaaaaaaaaaaaaaaaaaaaaaaaaaaaaaaaagaauu

SEQ ID NO: 29924 - RNA, 1717 nt, Artificial Sequence
  mRNA product Design a-1 (hSL-A64-N5) comprising derived and/or modified sequence from LASV(Z0947-SLE-2011;Clade IV)__AIT17840__GPCmut6 (opt1)
aggagagucccgcagucggcguccagcggcucugcuuguucgugugugugucguugcaggccuuauucaagcuuaccaugggccagaucgugaccuucuuccaggaggucccccacgugaucgaggaggugaugaacaucguccugaucgcccucagcauccuggccgugcugaaggggcucuacaacuucgcgaccugcggccugguggggcuggucacguuccuccugcugugcggccgcuccugcaccaucagccucuacaaggggguguacgagcugcagacccuggagcucaacauggagacccugaacaugugcaugccgcuguccugcaccaagaacaacagccaccacuacaucauggugggcaacgagaccggccucgagcugacccugacgaacaccuccaucaucaaccacaaguucugcaaccucagcgacgcccacaagaagaaccuguacgaccacgcccugauguccaucaucagcaccuuccaccucuccauccccaacuucaaccaguacgaggccaugagcugcgacuucaacgggggcaagaucuccguccaguacaaccugagccacuccuacgccggggacgcggccaaccacugcggcaccguggccaacggggugcugcagacguucaugcggauggccuggggcggcagcuacaucgcgcucgacuccgggcgcgaccggugggacugcaucaugaccagcuaccaguaccugaucauccagaacaccaccugggaggaccacugccaguucucccgccccagccccaucggcuaccuggggcuccugucccagcggacgcgcgacaucuacaucagccggcgccugcucggcaccuucaccuggacccugagcgacuccgagggcaaggacacgcccgggggcuacugccugacccgguggaugcucaucgaggccgagcugaagugcuucgggaacaccgccgucgccaagugcaacgagaagcacgacgaggaguucugcgacaugcugcgccucuucgacuucugcaagcaggccauccagcggcugaaggcgcccgcccagaugagcauccagcugaucaacaaggccgugaacgcccucaucaacgaccagcugaucaugaagaaccaccuccgcgacaucaugggcauccccuacugcaacuacuccaaguacugguaccugaaccacaccacgaccgggaagaccagccugcccaagugcuggcugguguccaacggcagcuaccucaacgagacccacuucuccgacgacaucgagcagcaggccgacaacaugaucacggagaugcugcagaaggaguacauggagcggcagggcaagaccccgcuggggcucgucgaccuguucguguucagcaccuccuucuaccugaucagcaucuuccugcaccucgugaagaucccgacccaccgccacaucgucggcaagcccugccccaagccccaccggcugaaccacauggggaucugcuccugcggccuguacaagcagccgggggugcccgugaaguggaagcgcugaggacuagucccuguucccagagcccacuuuuuuuucuuuuuuugaaauaaaauagccugucuuucagaucucaaaggcucuuuucagagccaccaaaaaaaaaaaaaaaaaaaaaaaaaaaaaaaaaaaaaaaaaaaaaaaaaaaaaaaaaaaaaaaaagaauu

SEQ ID NO: 29925 - RNA, 1717 nt, Artificial Sequence
  mRNA product Design a-1 (hSL-A64-N5) comprising derived and/or modified sequence from LASV(Josiah;Clade IV)__NP_694870__GPCmut6 (opt1)
aggagagucccgcagucggcguccagcggcucugcuuguucgugugugugucguugcaggccuuauucaagcuuaccaugggccagaucgugaccuucuuccaggaggucccccacgugaucgaggaggugaugaacaucguccugaucgcccucagcgugcuggccgugcugaaggggcucuacaacuucgcgaccugcggccuggucgggcuggugacguuccuccugcugugcggccgcuccugcaccaccagccucuacaaggggguguacgagcugcagacccuggagcucaacauggagacgcugaacaugugcaugccgcuguccugcaccaagaacaacagccaccacuacaucauggucggcaacgagaccggccucgagcugacccugacgaacaccuccaucaucaaccacaaguucugcaaccucagcgacgcccacaagaagaaccuguacgaccacgcccugauguccaucaucagcaccuuccaccucuccauccccaacuucaaccaguacgaggccaugagcugcgacuucaacgggggcaagaucuccgugcaguacaaccugagccacuccuacgccggggacgcggccaaccacugcggcaccguggccaacgggguccugcagacguucaugcggauggccuggggcggcagcuacaucgcgcucgacuccgggcgcggcaacugggacugcaucaugaccagcuaccaguaccugaucauccagaacaccaccugggaggaccacugccaguucucccggcccagccccaucggguaccugggccuccugucccagcgcacgcgggacaucuacaucagccgccggcugcucggcaccuucaccuggacccugagcgacuccgaggggaaggacacgccgggcggguacugccugacccgcuggaugcucaucgaggccgagcugaagugcuucggcaacaccgccguggccaagugcaacgagaagcacgacgaggaguucugcgacaugcugcggcuguucgacuucugcaagcaggccauccagcgccugaaggcgcccgcccagaugagcauccagcugaucaacaaggccgugaacgcccucaucaacgaccagcugaucaugaagaaccaccuccgggacaucauggggauccccuacugcaacuacuccaaguacugguaccucaaccacaccacgaccggccgcaccagccugcccaagugcuggcuggucuccaacggcagcuaccucaacgagacccacuucuccgacgacaucgagcagcaggccgacaacaugaucacggagaugcugcagaaggaguacauggagcggcaggggaagaccccgcugggccugguggaccucuucguguucagcaccuccuucuaccugaucagcaucuuccugcaccucgucaagauccccacccaccgccacaucguggggaaguccugccccaagccccaccggcugaaccacaugggcaucugcagcugcgggcuguacaagcagccgggcgugcccgucaaguggaagcgcugaggacuagucccuguucccagagcccacuuuuuuuucuuuuuuugaaauaaaauagccugucuuucagaucucaaaggcucuuuucagagccaccaaaaaaaaaaaaaaaaaaaaaaaaaaaaaaaaaaaaaaaaaaaaaaaaaaaaaaaaaaaaaaaaagaauu

SEQ ID NO: 29926 - RNA, 1714 nt, Artificial Sequence
  mRNA product Design a-1 (hSL-A64-N5) comprising derived and/or modified sequence from LASV(LP;Clade I)__AAF86701__GPCmut6 (opt1)
aggagagucccgcagucggcguccagcggcucugcuuguucgugugugugucguugcaggccuuauucaagcuuaccaugggccagaucaucaccuucuuccaggaggugccccacgucaucgaggaggugaugaacaucgugcugaucgcccucagccugcuggccauccucaaggggcuguacaacaucgcgaccugcggcaucaucgggcuggucgccuuccucuuccugugcggcaaguccugcagccugacgcucaagggcggguacgagcugcagacccuggagcucaacauggagacccugaacaugugcaugccgcuguccugcaccaagaacagcucccaccacuacauccgcgugggcaacgagacggggcucgagcugacccugaccaacaccagcaucaucaaccacaaguucugcaaccucuccgacgcccacaagaagaaccuguacgaccacgcccugaugagcaucaucuccacguuccaccucagcauccccaacuucaaccaguacgaggccauguccugcgacuucaacggcgggaagaucagcgugcaguacaaccugucccacagcuacgcgggcgacgccgccgagcacugcgggaccgucgccaacggcgugcugcagaccuucaugcggauggcguggggcgggcgcuacaucgcccucgacuccggcaaggggaacugggacugcaucaugaccagcuaccaguaccugaucauccagaacacgaccugggaggaccacugccaguucucccggcccagccccaucggcuaccugggccuccugucccagcgcacccgggacaucuacaucagccgccggcugcucgggaccuucacguggacccugagcgacuccgagggcaacgagacccccgggggcuacugccugacccgcuggaugcucaucgaggccgagcugaagugcuucgggaacacggccguggccaagugcaacgagaagcacgacgaggaguucugcgacaugcugcggcuguucgacuucugcaagcaggcgauccgccggcugaaggccccggcccagaugagcauccagcugaucaacaaggccgucaacgcccucaucaacgaccagcugaucaugaagaaccaccuccgcgacaucaugggcauccccuacugcaacuacuccaaguacugguaccucaaccacaccagcuccggccggaccagccugcccaagugcuggcugaucuccaacgggagcuaccucaacgagacccaguucuccgacgacaucgagcagcaggcggacaacaugaucacggagaugcugcagaaggaguacaucgagcgccagggcaagaccccgcuggggcugguggacaucuucaucuucagcaccuccuucuaccucaucagcaucuuccugcaccugaucaagauccccacccaccggcacaucgugggcaagcccugccccaagccgcaccgccucaaccacaugggggucugcuccugcggccuguacaagcaccccggcgugcccacgaaguggaagcggugaggacuagucccuguucccagagcccacuuuuuuuucuuuuuuugaaauaaaauagccugucuuucagaucucaaaggcucuuuucagagccaccaaaaaaaaaaaaaaaaaaaaaaaaaaaaaaaaaaaaaaaaaaaaaaaaaaaaaaaaaaaaaaaaagaauu

SEQ ID NO: 29927 - RNA, 1714 nt, Artificial Sequence
  mRNA product Design a-1 (hSL-A64-N5) comprising derived and/or modified sequence from LASV(803213;Clade II)__AAF86703__GPCmut6 (opt1)
aggagagucccgcagucggcguccagcggcucugcuuguucgugugugugucguugcaggccuuauucaagcuuaccaugggccagaucaucaccuucuuccaggaggugccccacgucaucgaggaggugaugaacaucgugcugaucgcccucagccugcuggccauccucaaggggaucuacaacgucgcgaccugcggccuguucgggcugaucuccuuccuccugcugugcggccgcagcugcuccgugacguacaaggggguguacgagcuccagacccuggagcugaacauggccaaccucaacaugugcaugccgcugagcugcaccaagaacaacucccaccacuacaucauggucggcaacgagaccggccuggagcucacgcugaccaacaccagcaucaucaaccacaaguucugcaaccuguccgacgcccacaagaagaaccucuacgaccacgcccugaugagcaucaucuccaccuuccaccugagcauccccaacuucaaccaguacgaggccauguccugcgacuucaacgggggcaagaucagcgugcaguacaaccucucccacagcuucgcgguggacgccgccaaccacugcgggacgaucgccaacggcguccugcagaccuucaugcggauggcguggggcggguccuacaucgcccuggacagcggcaaggggaacugggacugcaucaugaccuccuaccaguaccucaucauccagaacaccacgugggaggaccacugccaguucagccgccccucccccaucggcuaccuggggcugcucagccagcggacccgcgacaucuacaucagccggcgccugcugggcaccuucaccuggacgcucuccgacagcgagggcaacgaggcccccgggggcuacugccugacccgguggaugcugaucgaggccgagcucaagugcuucgggaacaccgccguggcgaagugcaacgagaagcacgacgaggaguucugcgacaugcugcgccuguucgacuucugcaagcaggccaucaagcggcucaagaccccggcccagauguccauccagcugaucaacaaggccgugaacgcccugaucaacgaccagcucaucaugaagaaccaccuccgcgacaucaugggcauccccuacugcaacuacagccgguacugguaccugaaccacacggucaccgggaagaccucccugccccgcugcuggcuggugagcaacggcuccuaccugaacgagacccacuucagcgacgacaucgagcagcaggcggacaacaugaucacggagaugcuccagaaggaguacauggaccggcagggcaagaccccgcuggggcugguggaccuguucgucuucuccaccagcuucuaccucaucuccaucuuccugcaccuggugaagauccccacccaccgccacaucgugggcaagcccugccccaagccgcaccggcucaaccacauggggaucugcagcugcggccuguacaagcaccccgggguccccgugaaguggaagcgcugaggacuagucccuguucccagagcccacuuuuuuuucuuuuuuugaaauaaaauagccugucuuucagaucucaaaggcucuuuucagagccaccaaaaaaaaaaaaaaaaaaaaaaaaaaaaaaaaaaaaaaaaaaaaaaaaaaaaaaaaaaaaaaaaagaauu

SEQ ID NO: 29928 - RNA, 1714 nt, Artificial Sequence
  mRNA product Design a-1 (hSL-A64-N5) comprising derived and/or modified sequence from LASV(GA391;Clade III)__CAA36645__GPCmut6 (opt1)
aggagagucccgcagucggcguccagcggcucugcuuguucgugugugugucguugcaggccuuauucaagcuuaccaugggccagaucgugaccuucuuccaggaggucccccacgugaucgaggaggugaugaacaucguccugaucgcccucagcauccuggccauccugaaggggcucuacaacguggcgaccugcggccugaucgggcuggugacguuccuccugcuguccggccgcagcugcucccucaucuacaaggggaccuacgagcugcagacccuggagcucaacauggagacccugaacaugugcaugccgcugagcugcacgaagaacaacucccaccacuacauccgggucggcaacgagaccggccucgagcugacccugaccaacacgagcauccucaaccacaaguucugcaaccuguccgacgcccacaagcgcaaccuguacgaccacagccucauguccaucaucagcaccuuccaccuguccauccccaacuucaaccaguacgaggccaugagcugcgacuucaacgggggcaagaucaccgugcaguacaaccugucccacagcuucgccguggacgccgcggggcacugcggcacccucgccaacgggguccugcagacguucaugcggauggccuggggcggcuccuacaucgcccuggacagcgggcgcggcaacugggacugcaucaugaccuccuaccaguaccucaucauccagaacaccaccugggacgaccacugccaguucagccggcccucccccaucggguaccugggccugcucagccagcgcacgcgggacaucuacaucagccgccggcugcugggcaccuucaccuggacccucuccgacagcgaggggaacgagacgccgggcggguacugccugacccgcuggaugcugaucgaggcggagcucaagugcuucggcaacaccgccguggccaagugcaacgagaagcacgacgaggaguucugcgacaugcugcggcuguucgacuucugcaagcaggccauccgccggcucaagacccccgcccagauguccauccagcugaucaacaaggcggugaacgcccugaucaacgaccagcucaucaugaagaaccaccuccgcgacaucauggggauccccuacugcaacuacagccgguacugguaccugaaccacacguccaccggcaagaccagccugccccgcugcuggcugaucuccaacggcagcuaccugaacgagaccaaguucuccgacgacaucgagcagcaggccgacaacaugaucacggagaugcugcagaaggaguacaucgaccggcaggggaagaccccgcucggccuggucgaccuguucguguucagcaccuccuucuaccucaucagcaucuuccugcaccuggugaagauccccacccaccgccacaucgucgggaagcccugccccaagccgcaccggcucaaccacaugggcaucugcuccugcgggcuguacaagcagcccggcgugcccgugcgcuggaagcggugaggacuagucccuguucccagagcccacuuuuuuuucuuuuuuugaaauaaaauagccugucuuucagaucucaaaggcucuuuucagagccaccaaaaaaaaaaaaaaaaaaaaaaaaaaaaaaaaaaaaaaaaaaaaaaaaaaaaaaaaaaaaaaaaagaauu

SEQ ID NO: 29929 - RNA, 1717 nt, Artificial Sequence
  mRNA product Design a-1 (hSL-A64-N5) comprising derived and/or modified sequence from LASV(AV;Clade V)__CCA30314__GPCmut6 (opt1)
aggagagucccgcagucggcguccagcggcucugcuuguucgugugugugucguugcaggccuuauucaagcuuaccaugggccagaucgugaccuucuuccaggaggucccccacgugaucgaggaggugaugaacaucguccugaucgcccucagcauccuggccgugcugaaggggcucuacaacaucgcgaccugcggccugaucgggcugaucacguuccuccugcugugcggccgcuccugcagcuccaaccucuacaaggggguguacgagcugcagagccuggaccucaacauggagacccugaacaugugcaugccgcuguccugcaccaagaacaacagccaccacuacauccgggucggcaacgacaccggccucgagcugacgcugaccaacaccuccauccucaaccacaaguucugcaaccugagcgacgcccacaagaaggaccuguacgaccacgcccucauguccaucaucagcaccuuccaccuguccauccccaacuucaaccaguacgaggccaugagcugcgacuucaacgggggcaagaucuccgugcaguacaaccugagccacuccuacgccaucgacgcggccaaccacugcgggacgguggccaacggcauccuccagaccuucaugcgcauggccuggggcgggagcuacaucgcgcuggacuccggccgggggaacugggacugcaucaugaccagcuaccaguaccugaucauccagaacaccacgugggagaaccacugccaguucucccgccccagccccaucggcuaccucgggcugcugagccagcggacccgcgacaucuacaucucccggcgccuccugggcaccuucaccuggacgcugagcgacuccgagggcaacgccacccccgggggcuacugccucacccgguggaugcugaucgaggccgagcugaagugcuucgggaacaccgccgucgccaagugcaacgagaagcacgacgaggaguucugcgacaugcuccgccuguucgacuucugcaagcaggcgaucagccggcugaaguccccggcccagaugagcauccagcucaucaacaaggccgugaacgcccugaucaacgaccagcugaucaugaagaaccaccuccgcgacaucaugggcauccccuacugcaacuacuccaaguacugguaccugaaccacacgaucaccgggaagaccagccugcccaagugcuggcucguguccaacggcagcuaccugaacgagacccacuucuccgacgacaucgagcagcaggccgacaacaugaucacggagaugcugcagaaggaguacauggagcggcagggcaagaccccgcuggggcucgucgaccuguucguguucagcaccuccuucuaccugaucagcaucuuccuccgccuggugaagauccccacccaccggcacaucgucggcaagcccugccccaagccgcaccgccugaaccacauggggaucugcuccugcggccucuacaagcagcccggggugcccgugcgguggaagcgcugaggacuagucccuguucccagagcccacuuuuuuuucuuuuuuugaaauaaaauagccugucuuucagaucucaaaggcucuuuucagagccaccaaaaaaaaaaaaaaaaaaaaaaaaaaaaaaaaaaaaaaaaaaaaaaaaaaaaaaaaaaaaaaaaagaauu

SEQ ID NO: 29930 - RNA, 1714 nt, Artificial Sequence
  mRNA product Design a-1 (hSL-A64-N5) comprising derived and/or modified sequence from LASV(Togo/2016/7082;Clade VI)__AMR44577__GPCmut6 (opt1)
aggagagucccgcagucggcguccagcggcucugcuuguucgugugugugucguugcaggccuuauucaagcuuaccaugggccagaucaucaccuucuuccaggaggugccccacgucaucgaggaggugaugaacaucgugcugaucgcccucagccugcuggccauccucaagggggucuacaacguggcgaccugcggcaucaucgggcuggugacguuccuguuccucugcggccgcuccugcagccugaucuacaagggguccuacgagcugcagacccucgagcugaacauggagacccugaacaugugcaugccgcucagcugcaccaagaacuccagccaccacuacauccgggucggcaacgagacgggccuggagcugacccucaccaacaccuccaucaucaaccacaaguucugcaaccugagcgacgcccacaagcgcaaccuguacgaccacgcccucauguccauccugagcacguuccaccuguccauccccaacuucaaccaguacgaggccaugagcugcgacuucaacgggggcaagaucuccgugcaguacaaccucagccacgccuacgcgguggacgccgccgagcacugcgggaccgucgccaacggcgugcugcagaccuucaugcggauggcguggggcggguccuacaucgcccuggacagcggccgcgggaacugggacugcaucaugaccuccuaccaguaccucaucauccagaacacgaccugggaggaccacugccaguucagccggcccucccccaucggcuaccuggggcugcucagccagcgcacccgggacaucuacaucagccgccggcugcugggcaccuucacguggacccucuccgacagcgagggcaacgagacccccgggggcuacugccugacccgcuggaugcugaucgaggccgagcucaagugcuucgggaacacggccguggccaagugcaacgagaagcacgacgaggaguucugcgacaugcugcggcuguucgacuucugcaagcaggcgauccagcgccucaaguccccggcccagaugagcauccagcugaucaacaaggccgucaacgcccugaucaacgaccagcucaucaugaagaaccaccuccgggacaugaugggcauccccuacugcaacuacuccaaguacugguaccugaaccacaccagcuccgggcgcaccagccugcccaagugcuggcugguguccaacggcagcuaccugaacgagacccacuucuccgacgacaucgagcagcaggccgacaacaugaucacggagaugcuccagaaggaguacaucgaccggcagggcaagaccccgcuggggcugguggaccuguucgucuucagcaccuccuucuaccucaucagcaucuuccugcaccugaucaagauccccacccaccgccacaucgugggcaagcccugccccaagccgcaccggcucaaccacauggggaucugcuccugcggccuguacaagcagcccggggugcccacgcgcuggaagcggugaggacuagucccuguucccagagcccacuuuuuuuucuuuuuuugaaauaaaauagccugucuuucagaucucaaaggcucuuuucagagccaccaaaaaaaaaaaaaaaaaaaaaaaaaaaaaaaaaaaaaaaaaaaaaaaaaaaaaaaaaaaaaaaaagaauu

SEQ ID NO: 29931 - RNA, 1714 nt, Artificial Sequence
  mRNA product Design a-1 (hSL-A64-N5) comprising derived and/or modified sequence from LASV(KAK-428;Clade n.d. (VII))__ANH09740__GPCmut6 (opt1)
aggagagucccgcagucggcguccagcggcucugcuuguucgugugugugucguugcaggccuuauucaagcuuaccaugggccagaucgugaccuucuuccaggaggucccccacgugaucgaggaggugaugaacaucguccugaucgcccucagccugcuggccauccucaaggggcuguacaacuucgcgaccugcggcgugaucgggcugaucacguuccuccugcugugcggccgcuccugcagcgccaccuacaaggggcaguacgagcuccagacccuggagcugaacauggagucccucaacaugugcaugccgcugagcugcaccaagaacaacucccaccacuacauccgggccggcaacaacacgggccuggagcucacccugaccaacaccagcaucaucucccacaaguucugcaaccugagcgacgcccacaagaagaaccucuacgaccacacgcugauguccaucaucaccaccuuccaccugagcauccccaacuucaaccaguacgaggccauguccugcgacuucaacgggggcaagaucagcauccaguacaaccucucccacagcuacgcgggggacgccgcccagcacugcggcaccguggccaacgggguccugcagacguucaugcgcauggcguggggcggcuccuaccuggcccucgacagcgggcggcgcggcugggacugcaucaucuccagcuaccaguaccugaucauccagaacaccaccugggacgaccacugccaguucucccggcccagccccaucggguaccugggcuucgugagccagaagacccgcgacaucuacaucucccggcgccuccugggcacguucaccuggacccugagcgacuccgaggggcacgacaugccgggcggguacugccucacccgguggaugcugaucgaggccgaccugaagugcuucggcaacacggccguggccaagugcaacgagaagcacgacgaggaguucugcgacauguggcgccucuucgacuucugcaagcaggcgauccagcggcugaaggcccccgcccagaugaacauccagcugaucaacaaggccgucaacgcccucaucaacgaccagcugaugaugaagaaccaccuccgcgacaucauggggauccccuacugcaacuacagcaaguucugguaccugaacaacaccaccaccggccggacgucccugccccgcugcuggcugaucagcaacggcuccuaccucaacgagacccacuucagcgacgacaucgagcagcaggcggacaacaugaucaccgagaugcugcagaaggaguacauggaccggcaggggaagaccccgcugggccucguggaccuguucguguucuccacgagcuucuaccugaucaccaucuuccugcaccucgucaagauccccacccaccgccacaucguggggaagcccugccccaagccgcaccggcugaaccacaugggcaucugcuccugcgggcuguacaagcagcccggcgugcccguccgcuggaagcggugaggacuagucccuguucccagagcccacuuuuuuuucuuuuuuugaaauaaaauagccugucuuucagaucucaaaggcucuuuucagagccaccaaaaaaaaaaaaaaaaaaaaaaaaaaaaaaaaaaaaaaaaaaaaaaaaaaaaaaaaaaaaaaaaagaauu

SEQ ID NO: 29932 - RNA, 1714 nt, Artificial Sequence; identical to SEQ ID NO: 29926
  mRNA product Design a-1 (hSL-A64-N5) comprising derived and/or modified sequence from LASV(Pinneo-NIG-1969;Clade I)__AIT17836__GPCmut6 (opt1)

SEQ ID NO: 29933 - RNA, 1714 nt, Artificial Sequence
  mRNA product Design a-1 (hSL-A64-N5) comprising derived and/or modified sequence from LASV(ISTH0009-NIG-2011;Clade II)__AIT17404__GPCmut6 (opt1)
aggagagucccgcagucggcguccagcggcucugcuuguucgugugugugucguugcaggccuuauucaagcuuaccaugggccagaucaucaccuucuuccaggaggugccccacgucaucgaggaggugaugaacaucgugcugaucgcccucagccugcuggccauccucaaggggaucuacaacgucgcgaccugcggccuguucgggcugguguccuuccuccugcugugcggccgcagcugcuccacgaccuacaaggggguguacgagcuccagacccuggagcuggacauggccagccucaacaugugcaugccgcuguccugcaccaagaacaacagccaccacuacaucauggucggcaacgagacgggccuggagcucacccugaccaacaccuccaucaucaaccacaaguucugcaaccugagcgacgcccacaagaagaaccucuacgaccacgcccugauguccaucaucagcacguuccaccuguccauccccaacuucaaccaguacgaggccaugagcugcgacuucaacgggggcaagaucuccgugcaguacaaccucagccacgcguacgccguggacgccgccaaccacugcgggaccaucgcgaacggcguccugcagaccuucaugcggauggccuggggcggguccuacaucgcccuggacagcggcaagggguccugggacugcaucaugaccagcuaccaguaccucaucauccagaacacgaccugggaggaccacugccaguucucccgccccagccccaucggcuaccuggggcugcucagccagcggacccgcgacaucuacaucucccggcgccugcugggcaccuucacguggacccucagcgacuccgagggcaacgagacccccgggggcuacugccugacccgguggaugcugaucgaggccgagcucaagugcuucgggaacacggccguggcgaagugcaacgagaagcacgacgaggaguucugcgacaugcugcgccuguucgacuucugcaagcaggccauccggcgccucaagaccccggcccagaugagcauccagcugaucaacaaggccgugaacgcccugaucaacgaccagcucaucaugaagaaccaccuccgggacaucaugggcauccccuacugcaacuacuccaaguacugguaccugaaccacaccgucaccgggaagacgagccugccccgcugcuggcugguguccaacggcagcuaccugaacgagacccacuucuccgacgacaucgagcagcaggcggacaacaugaucaccgagcuccugcagaaggaguacauggaccggcagggcaagaccccgcuggggcugguggaccucuucgucuucagcacguccuucuaccugaucagcaucuuccugcaccucaucaagauccccacccaccgccacaucaccggcaagcccugccccaagccgcaccggcugaaccacauggggaucugcuccugcggccuguacaagcaccccggggugcccgugaaguggaagcgcugaggacuagucccuguucccagagcccacuuuuuuuucuuuuuuugaaauaaaauagccugucuuucagaucucaaaggcucuuuucagagccaccaaaaaaaaaaaaaaaaaaaaaaaaaaaaaaaaaaaaaaaaaaaaaaaaaaaaaaaaaaaaaaaaagaauu

SEQ ID NO: 29934 - RNA, 1714 nt, Artificial Sequence
  mRNA product Design a-1 (hSL-A64-N5) comprising derived and/or modified sequence from LASV(ISTH2010-NIG-2012;Clade II)__AIT17482__GPCmut6 (opt1)
aggagagucccgcagucggcguccagcggcucugcuuguucgugugugugucguugcaggccuuauucaagcuuaccaugggccagaucaucaccuucuuccaggaggugccccacgucaucgaggaggugaugaacaucgugcugaucgcccucagccugcuggccauccucaaggggaucuacaacgucgcgaccugcggccuguucgggcugguguccuuccuccugcugugcggccgcagcugcuccacgaccuacaaggggguguacgagcuccagacccuggagcuggacauggccagccucaacaugugcaugccgcuguccugcaccaagaacaacagccaccacuacaucauggucggcaacgagacgggccuggagcucacccugaccaacaccuccaucaucaaccacaaguucugcaaccugagcgacgcccacaagaagaaccucuacgaccacgcccugauguccaucaucagcacguuccaccuguccauccccaacuucaaccaguacgaggccaugagcugcgacuucaacgggggcaagaucuccgugcaguacaaccucagccacgcguacgccguggacgccgccaaccacugcgggaccaucgcgaacggcguccugcagaccuucaugcggauggccuggggcggguccuacaucgcccuggacagcggcaagggguccugggacugcaucaugaccagcuaccaguaccucaucauccagaacaucacgugggaggaccacugccaguucucccgccccagccccaucggcuaccuggggcugcucagccagcggacccgcgacaucuacaucucccggcgccugcugggcaccuucaccuggacgcucagcgacuccgagggcaacgagacccccgggggcuacugccugacccgguggaugcugaucgaggccgagcucaagugcuucgggaacaccgccguggcgaagugcaacgagaagcacgacgaggaguucugcgacaugcugcgccuguucgacuucugcaagcaggccauccggcgccucaagacgccggcccagaugagcauccagcugaucaacaaggccgugaacgcccugaucaacgaccagcucaucaugaagaaccaccuccgggacaucaugggcauccccuacugcaacuacuccaaguacugguaccugaaccacaccgucaccgggaagaccagccugccccgcugcuggcugguguccaacggcagcuaccugaacgagacgcacuucuccgacgacaucgagcagcaggcggacaacaugaucaccgagcuccugcagaaggaguacaucgaccggcagggcaagaccccgcuggggcugguggaccucuucgucuucagcaccuccuucuaccugaucagcaucuuccugcaccucgugaagauccccacgcaccgccacguggucggcaagcccugccccaagccgcaccggcugaaccacauggggaucugcuccugcggccuguacaagcaccccggggugcccgugaaguggaagcgcugaggacuagucccuguucccagagcccacuuuuuuuucuuuuuuugaaauaaaauagccugucuuucagaucucaaaggcucuuuucagagccaccaaaaaaaaaaaaaaaaaaaaaaaaaaaaaaaaaaaaaaaaaaaaaaaaaaaaaaaaaaaaaaaaagaauu

SEQ ID NO: 29935 - RNA, 1714 nt, Artificial Sequence
  mRNA product Design a-1 (hSL-A64-N5) comprising derived and/or modified sequence from LASV(Lassa virus/H.sapiens-wt/NGA/2015/ISTH_0543;Clade II)__AVO03639__GPCmut6 (opt1)
aggagagucccgcagucggcguccagcggcucugcuuguucgugugugugucguugcaggccuuauucaagcuuaccaugggccagaucaucaccuucuuccaggaggugccccacgucaucgaggaggugaugaacaucgugcugaucgcccucagccugcuggccauccucaaggggaucuacaacgucgcgaccugcggccuguucgggcugguguccuuccuccugcugugcggccgcagcugcuccacgaccuacaaggggguguacgagcuccagacccuggagcuggacauggccaaccucaacaugugcaugccgcugagcugcaccaagaacaacucccaccacuacaucauggucggcaacgagacgggccuggagcucacccugaccaacaccagcaucaucaaccacaaguucugcaaccuguccgacgcccacaagaagaaccucuacgaccacgcccugaugagcaucaucuccacguuccaccugagcauccccaacuucaaccaguacgaggccauguccugcgacuucaacgggggcaagaucagcgugcaguacaaccucucccacaccuacgcgguggacgccgccaaccacugcgggaccaucgccaacggcguccugcagaccuucaugcggauggcguggggcgggagcuacaucgcccuggacuccggcaaggggagcugggacugcaucaugacguccuaccaguaccucgugauccagaacaccaccugggaggaccacugccaguucagccgccccucccccaucggcuaccuggggcugcucagccagcggacccgcgacaucuacaucagccggcgccugcugggcacguucaccuggacccucuccgacagcgagggcaacgagacccccgggggcuacugccugacgcgguggaugcugaucgaggccgagcucaagugcuucgggaacaccgccguggccaagugcaacgagaagcacgacgaggaguucugcgacaugcugcgccuguucgacuucugcaagcaggcgauccggcgccucaagaccccggcccagauguccauccagcugaucaacaaggccgucaacgcccugaucaacgaccagcucaucaugaagaaccaccuccgggacaucaugggcauccccuacugcaacuacagcaaguacugguaccugaaccacaccgugacggggaagaccucccugccccgcugcuggcuggugagcaacggcuccuaccugaacgagacccacuucagcgacgacaucgagcagcaggccgacaacaugaucaccgagcuccugcagaaggaguacaucgaccggcagggcaagacgccgcuggggcuggucgaccucuucguguucuccaccagcuucuaccugaucuccaucuuccugcaccucgugaagauccccacccaccgccacaucaccggcaagcccugccccaagccgcaccggcugaaccacauggggaucugcagcugcggccuguacaagcaccccgggguccccgugaaguggaagcgcugaggacuagucccuguucccagagcccacuuuuuuuucuuuuuuugaaauaaaauagccugucuuucagaucucaaaggcucuuuucagagccaccaaaaaaaaaaaaaaaaaaaaaaaaaaaaaaaaaaaaaaaaaaaaaaaaaaaaaaaaaaaaaaaaagaauu

SEQ ID NO: 29936 - RNA, 1714 nt, Artificial Sequence
  mRNA product Design a-1 (hSL-A64-N5) comprising derived and/or modified sequence from LASV(Lassa virus/H.sapiens-wt/NGA/2016/ISTH_0009;Clade II)__AVO03571__GPCmut6 (opt1)
aggagagucccgcagucggcguccagcggcucugcuuguucgugugugugucguugcaggccuuauucaagcuuaccaugggccagaucaucaccuucuuccaggaggugccccacgucaucgaggaggugaugaacaucgugcugaucgcccucagccugcuggccauccucaaggggaucuacaacgucgcgaccugcggccugcuggggcucguguccuuccugcugcucugcggccgcagcugcuccacgaccuacaaggggguguacgagcugcagacccuggagcucgacauggccagccugaacaugugcaugccgcuguccugcaccaagaacaacagccaccacuacaucauggucggcaacgagacgggccucgagcugacccugaccaacaccuccaucaucaaccacaaguucugcaaccucagcgacgcccacaagaagaaccuguacgaccacgcccugauguccaucaucagcacguuccaccucuccauccccaacuucaaccaguacgaggccaugagcugcgacuucaacgggggccggaucuccgugcaguacaaccugagccacuccuacgcgguggacgccgccaaccacugcgggaccaucgccaacggcguccugcagaccuucaugcgcauggcguggggcgggagcuacaucgcccucgacuccggcaaggggagcugggacugcaucaugaccuccuaccaguaccugaucauccagaacacgaccugggaggaccacugccaguucagccggcccagccccaucggcuaccuggggcuccugucccagcgcacccgggacaucuacaucagccgccggcugcucggcaccuucacguggacccuguccgacagcgagggcaacgagacccccgggggcuacugccugacccgcuggaugcucaucgaggccgagcugaagugcuucgggaacacggccguggccaagugcaacgagaagcacgacgaggaguucugcgacaugcugcggcuguucgacuucugcaagcaggcgauccgccggcugaagaccccggcccagauguccauccagcugaucaacaaggccgugaacgcccucaucaacgaccagcugaucaugaagaaccaccuccgcgacaucaugggcauccccuacugcaacuacagcaaguacugguaccucaaccacaccgucaccgggaagacgucccugccccggugcuggcuggugagcaacggcuccuaccucaacgagacccacuucagcgacgacaucgagcagcaggccgacaacaugaucaccgagcugcugcagaaggaguacaucgaccgccagggcaagaccccgcuggggcucguggaccuguucgucuucuccacgagcuucuaccugaucuccaucuuccuccaccuggugaagauccccacccaccggcacaucaccggcaagcccugccccaagccgcaccgccugaaccacauggggaucugcagcugcggccucuacaaccaccccggggugcccgucaaguggaagcggugaggacuagucccuguucccagagcccacuuuuuuuucuuuuuuugaaauaaaauagccugucuuucagaucucaaaggcucuuuucagagccaccaaaaaaaaaaaaaaaaaaaaaaaaaaaaaaaaaaaaaaaaaaaaaaaaaaaaaaaaaaaaaaaaagaauu

SEQ ID NO: 29937 - RNA, 1714 nt, Artificial Sequence
  mRNA product Design a-1 (hSL-A64-N5) comprising derived and/or modified sequence from LASV(Lassa virus/H.sapiens-wt/NGA/2016/ISTH_0017;Clade II)__AVO03567__GPCmut6 (opt1)
aggagagucccgcagucggcguccagcggcucugcuuguucgugugugugucguugcaggccuuauucaagcuuaccaugggccagaucaucaccuucuuccaggaggugccccacgucaucgaggaggugaugaacaucgugcugaucgcccucagccugcuggccauccucaaggggaucuacaacgucgcgaccugcggccuguucgggcugguguccuuccuccugcugugcggccgcagcugcuccacgaccuacaaggggguguacgagcuccagacccuggagcuggacauggccagccucaacaugugcaugccgcuguccugcaccaagaacaacagccaccacuacaucauggucggcaacgagacgggccuggagcucacccugaccaacaccuccaucaucaaccacaaguucugcaaccugagcgacgcccacaagaagaaccucuacgaccacgcccugauguccaucaucagcacguuccaccuguccauccccaacuucaaccaguacgaggccaugagcugcgacuucaacgggggcaagaucuccgugcaguacaaccucagccacaccuacgcgaucgacgccgccaaccacugcgggaccaucgccaacggcgugcugcagaccuucaugcggauggcguggggcggguccuacaucgcccuggacagcggcaagggguccugggacugcaucaugacgagcuaccaguaccucaucauccagaacaccaccugggaggaccacugccaguucucccgccccagccccaucggcuaccuggggcugcucagccagcggacccgcgacaucuacaucucccggcgccugcugggcacguucaccuggacccucagcgacuccgagggcaacgagacccccgggggcuacugccugacgcgguggaugcugaucgaggccgagcucaagugcuucgggaacaccgccgucgccaagugcaacgagaagcacgacgaggaguucugcgacaugcugcgccuguucgacuucugcaagcaggcgauccggcgccucaagaccccggcccagaugagcauccagcugaucaacaaggccgugaacgcccugaucaacgaccagcucaucaugaagaaccaccuccgggacaucaugggcauccccuacugcaacuacuccaaguacugguaccugaaccacaccgugacggggaagaccagccugccccgcugcuggcuggucuccaacggcagcuaccugaacgagacccacuucuccgacgacaucgagcagcaggccgacaacaugaucaccgagcuccugcagaaggaguacauggaccggcagggcaagacgccgcuggggcugguggaccucuucguguucagcaccuccuucuaccugaucagcaucuuccugcaccucguccgcauccccacccaccggcacgugaucggcaagcccugccccaagccgcaccgccugaaccacauggggaucugcuccugcggccuguacaagcaccccggggugcccgucaaguggaagcggugaggacuagucccuguucccagagcccacuuuuuuuucuuuuuuugaaauaaaauagccugucuuucagaucucaaaggcucuuuucagagccaccaaaaaaaaaaaaaaaaaaaaaaaaaaaaaaaaaaaaaaaaaaaaaaaaaaaaaaaaaaaaaaaaagaauu

SEQ ID NO: 29938 - RNA, 1714 nt, Artificial Sequence
  mRNA product Design a-1 (hSL-A64-N5) comprising derived and/or modified sequence from LASV(Lassa virus/H.sapiens-wt/NGA/2018/ISTH_0959;Clade II)__AVV65099__GPCmut6 (opt1)
aggagagucccgcagucggcguccagcggcucugcuuguucgugugugugucguugcaggccuuauucaagcuuaccaugggccagaucaucaccuucuuccaggaggugccccacgucaucgaggaggugaugaacaucgugcugaucgcccucagccugcuggccauccucaaggggaucuacaacgucgugaccugcggccuguucgggcugguguccuuccuccugcugugcggccgcagcugcuccacgaccuacaagggggucuacgagcuccagacccuggagcuggacauggcgagccucaacaugugcaugccgcuguccugcaccaagaacaacagccaccacuacaucauggugggcaacgagacgggccuggagcucacccugaccaacaccuccaucaucaaccacaaguucugcaaccugagcgacgcccacaagaagaaccucuacgaccacgcccugauguccaucaucagcacguuccaccuguccauccccaacuucaaccaguacgaggccaugagcugcgacuucaacgggggcaagaucuccgugcaguacaaccucagccacgccuacgcgaucgacgccgccaaccacugcgggaccaucgccaacggcguccugcagaccuucaugcggauggcguggggcggguccuacaucgcccuggacagcggcaagggguccugggacugcaucaugaccagcuaccaguaccucaucauccagaacacgaccugggaggaccacugccaguucucccgccccagccccaucggcuaccuggggcugcucagccagcggacccgcgacaucuacaucucccggcgccugcugggcaccuucacguggacccucagcgacuccgagggcaacgagacccccgggggcuacugccugacccgguggaugcugaucgaggccgagcucaagugcuucgggaacacggccguggccaagugcaacgagaagcacgacgaggaguucugcgacaugcugcgccuguucgacuucugcaagcaggcgauccggcgccucaagaccccggcccagaugagcauccagcugaucaacaaggccgugaacgcccugaucaacgaccagcucaucaugaagaaccaccuccgggacaucaugggcauccccuacugcaacuacuccaaguacugguaccugaaccacaccgucaccgggaagacgagccugccccgcugcuggcugguguccaacggcagcuaccugaacgagacccacuucuccgacgacaucgagcagcaggccgacaacaugaucaccgagcuccugcagaaggaguacaucgaccggcagggcaagaccccgcuggggcugguggaccucuucgucuucagcacguccuucuaccugaucagcaucuuccugcaccucgugaagauccccacccaccgccacgugaucggcaagcccugccccaagccgcaccggcugaaccacauggggaucugcuccugcggccuguacaagcaccccgggguccccgugaaguggaagcgcugaggacuagucccuguucccagagcccacuuuuuuuucuuuuuuugaaauaaaauagccugucuuucagaucucaaaggcucuuuucagagccaccaaaaaaaaaaaaaaaaaaaaaaaaaaaaaaaaaaaaaaaaaaaaaaaaaaaaaaaaaaaaaaaaagaauu

SEQ ID NO: 29939 - RNA, 1714 nt, Artificial Sequence
  mRNA product Design a-1 (hSL-A64-N5) comprising derived and/or modified sequence from LASV(LASV003-NIG-2008;Clade II)__AIT17580__GPCmut6 (opt1)
aggagagucccgcagucggcguccagcggcucugcuuguucgugugugugucguugcaggccuuauucaagcuuaccaugggccagaucaucaccuucuuccaggaggugccccacgucaucgaggaggugaugaacaucgugcugaucgcccucagccugcuggccauccucaaggggaucuacaacgucgcgaccugcggccuguucgggcugguguccuuccuccugcugugcggccgcagcugcuccacgaccuacaaggggguguacgagcuccagacccuggagcuggacauggccagccucaacaugugcaugccgcuguccugcaccaagaacaacagccaccacuacaucauggucggcaacgagacgggccuggagcucacccugaccaacaccuccaucaucaaccacaaguucugcaaccugagcgacgcccacaagaagaaccucuacgaccacgcccugauguccaucaucagcacguuccaccuguccauccccaacuucaaccaguacgaggccaugagcugcgacuucaacgggggcaagaucuccgugcaguacaaccucagccacaccuacgcgguggacgccgccaaccacugcgggaccaucgccaacggcguccugcagaccuucaugcggauggcguggggcggguccuacaucgcccuggacagcggcaagggguccugggacugcaucaugacgagcuaccaguaccucaucauccagaacaccaccugggaggaccacugccaguucucccgccccagccccaucggcuaccuggggcugcucagccagcggacccgcgacaucuacaucucccggcgccugcugggcacguucaccuggacccucagcgacuccgagagcaacgagaccccgggcggguacugccugacgcgguggaugcugaucgaggccgagcucaagugcuucggcaacaccgccguggccaagugcaacgagaagcacgacgaggaguucugcgacaugcugcgccuguucgacuucugcaagcaggcgauccggcgccucaaggcccccgcccagauguccauccagcugaucaacaaggccgugaacgcccugaucaacgaccagcucaucaugaagaaccaccuccgggacaucauggggauccccuacugcaacuacagcaaguacugguaccugaaccacaccgucaccggccgcacgucccugccccggugcuggcuggugagcaacggguccuaccugaacgagacccacuucagcgacgacaucgagcagcaggcggacaacaugaucaccgagcuccugcagaaggaguacauggaccgccagggcaagaccccgcugggccugguggaccucuucgucuucuccacgagcuucuaccugaucuccaucuuccugcaccucgugaagauccccacccaccggcacgugaucgggaagcccugccccaagccgcaccgccugaaccacaugggcaucugcagcugcgggcuguacaagcaccccggcguccccgugaaguggaagcggugaggacuagucccuguucccagagcccacuuuuuuuucuuuuuuugaaauaaaauagccugucuuucagaucucaaaggcucuuuucagagccaccaaaaaaaaaaaaaaaaaaaaaaaaaaaaaaaaaaaaaaaaaaaaaaaaaaaaaaaaaaaaaaaaagaauu

SEQ ID NO: 29940 - RNA, 1714 nt, Artificial Sequence
  mRNA product Design a-1 (hSL-A64-N5) comprising derived and/or modified sequence from LASV(LASV035-NIG-2009;Clade II)__AIT17588__GPCmut6 (opt1)
aggagagucccgcagucggcguccagcggcucugcuuguucgugugugugucguugcaggccuuauucaagcuuaccaugggccagaucaucaccuucuuccaggaggugccccacgucaucgaggaggugaugaacaucgugcugaucgcccucagccugcuggccauccucaaggggaucuacaacgucgcgaccugcggccuguucgggcugguguccuuccuccugcugugcggccgcagcugcuccacgaccuacaaggggguguacgagcuccagacccuggagcuggacauggccagccucaacaugugcaugccgcuguccugcaccaagaacaacagccaccacuacaucauggucggcaacgagacgggccuggagcucacccugaccaacaccuccaucaucaaccacaaguucugcaaccugagcgacgcccacaagaagaaccucuacgaccacgcccugauguccaucaucagcacguuccaccuguccauccccaacuucaaccaguacgaggccaugagcugcgacuucaacgggggcaagaucuccgugcaguacaaccucagccacgcguacgccguggacgccgccaaccacugcgggaccaucgcgaacggcguccugcagaccuucaugcggauggccuggggcggguccuacaucgcccuggacagcggcaagggguccugggacugcaucaugaccagcuaccaguaccucaucauccagaacacgaccugggaggaccacugccaguucucccgccccagccccaucggcuaccuggggcugcucagccagcggacccgcgacaucuacaucucccggcgccugcugggcaccuucacguggacccucagcgacuccgagggcaacgagacccccgggggcuacugccugacccgguggaugcugaucgaggccgagcucaagugcuucgggaacacggccguggcgaagugcaacgagaagcacgacgaggaguucugcgacaugcugcgccuguucgacuucugcaagcaggccauccggcgccucaaggccccggcccagaugagcauccagcugaucaacaaggccgugaacgcgcugaucaacgaccagcucaucaugaagaaccaccuccgggacaucaugggcauccccuacugcaacuacuccaaguacugguaccugaaccacaccgucaccgggaagaccagccugccccgcugcuggcugguguccaacggcagcuaccugaacgagacgcacuucuccgacgacaucgagcagcaggccgacaacaugaucaccgagcuccugcagaaggaguacaucgaccggcagggcaagaccccgcuggggcugguggaccucuucgucuucagcaccuccuucuaccugaucagcaucuuccugcaccucgugaagauccccacgcaccgccacgugaucggcaagcccugccccaagccgcaccggcugaaccacauggggaucugcuccugcggccuguacaagcaccccgggguccccgugaaguggaagcgcugaggacuagucccuguucccagagcccacuuuuuuuucuuuuuuugaaauaaaauagccugucuuucagaucucaaaggcucuuuucagagccaccaaaaaaaaaaaaaaaaaaaaaaaaaaaaaaaaaaaaaaaaaaaaaaaaaaaaaaaaaaaaaaaaagaauu

SEQ ID NO: 29941 - RNA, 1714 nt, Artificial Sequence
  mRNA product Design a-1 (hSL-A64-N5) comprising derived and/or modified sequence from LASV(LASV1000-NIG-2009;Clade II)__AIT17782__GPCmut6 (opt1)
aggagagucccgcagucggcguccagcggcucugcuuguucgugugugugucguugcaggccuuauucaagcuuaccaugggccagaucaucaccuucuuccaggaggugccccacgucaucgaggaggugaugaacaucgugcugaucgcccucagccugcuggccauccucaaggggaucuacaacgucgcgaccugcggccuguucgggcugguguccuuccuccugcugugcggccgcagcugcuccacgaccuacaaggggguguacgagcuccagacccuggagcuggacauggccagccucaacaugugcaugccgcuguccugcaccaagaacaacagccaccacuacaucauggucggcaacgagacgggccuggagcucacccugaccaacaccuccaucaucaaccacaaguucugcaaccugagcgacgcccacaagaagaaccucuacgaccacgcccugauguccaucaucagcacguuccaccuguccauccccaacuucaaccaguacgaggccaugagcugcgacuucaacgggggcaagaucuccgugcaguacaaccucagccacaccuacgcgguggacgccgccaaccacugcgggaccaucgccaacggcguccugcagaccuucaugcggauggcguggggcggguccuacaucgcccuggacagcggcaagggguccugggacugcaucaugacgagcuaccaguaccucaucauccagaacaccaccugggaggaccacugccaguucucccgccccagccccaucggcuaccuggggcugcucagccagcggacccgcgacaucuacaucucccggcgccugcugggcacguucaccuggacccucagcgacuccgagggcaacgagacccccgggggcuacugccugacgcgguggaugcugaucgaggccgagcucaagugcuucgggaacaccgccguggccaagugcaacgagaagcacgacgaggaguucugcgacaugcugcgccuguucgacuucugcaagcaggcgaucaagcggcucaagaccccggcccagaugagcauccagcugaucaacaaggccgugaacgcccugaucaacgaccagcucaucaugaagaaccaccuccgcgacaucaugggcauccccuacugcaacuacuccaaguacugguaccugaaccacaccgucacggggaagaccagccugccccggugcuggcugguguccaacggcagcuaccugaacgagacccacuucuccgacgacaucgagcagcaggccgacaacaugaucaccgagcuccugcagaaggaguacaucgaccgccagggcaagacgccgcuggggcugguggaccucuucgucuucagcaccuccuucuaccugaucagcaucuuccugcaccucgugaagauccccacccaccggcacguggucggcaagcccugccccaagccgcaccgccugaaccacauggggaucugcuccugcggccuguacaagcaccccggggugcccgugaaguggaagcggugaggacuagucccuguucccagagcccacuuuuuuuucuuuuuuugaaauaaaauagccugucuuucagaucucaaaggcucuuuucagagccaccaaaaaaaaaaaaaaaaaaaaaaaaaaaaaaaaaaaaaaaaaaaaaaaaaaaaaaaaaaaaaaaaagaauu

SEQ ID NO: 29942 - RNA, 1714 nt, Artificial Sequence
  mRNA product Design a-1 (hSL-A64-N5) comprising derived and/or modified sequence from LASV(LASV221-NIG-2010;Clade II)__AIT17624__GPCmut6 (opt1)
aggagagucccgcagucggcguccagcggcucugcuuguucgugugugugucguugcaggccuuauucaagcuuaccaugggccagaucaucaccuucuuccaggaggugccccacgucaucgaggaggugaugaacaucgugcugaucgcccucagccugcuggccauccucaaggggaucuacaacgucgcgaccugcggccuguucgggcugguguccuuccuccugcugugcggccgcagcugcuccacgaccuacaaggggguguacgagcuccagacccuggagcuggacauggccagccucaacaugugcaugccgcuguccugcaccaagaacaacagccaccacuacaucauggucggcaacgagacgggccuggagcucacccugaccaacaccuccaucaucaaccacaaguucugcaaccugagcgacgcccacaagaagaaccucuacgaccacgcccugauguccaucaucagcacguuccaccuguccauccccaacuucaaccaguacgaggccaugagcugcgacuucaacgggggcaagaucuccgugcaguacaaccucagccacaccuacgcgaucgacgccgccaaccacugcgggaccaucgccaacggcgugcugcagaccuucaugcggauggcguggggcggguccuacaucgcccuggacagcggcaagggguccugggacugcaucaugacgagcuaccaguaccucaucauccagaacaccaccugggaggaccacugccaguucucccgccccagccccaucggcuaccuggggcugcucagccagcggacccgcgacaucuacaucucccggcgccugcugggcacguucaccuggacccucagcgacuccgagggcaacgagacccccgggggcuacugccugacgcgguggaugcugaucgaggccgagcucaagugcuucgggaacaccgccgucgccaagugcaacgagaagcacgacgaggaguucugcgacaugcugcgccuguucgacuucugcaagcaggcgauccggcgccucaagaccccggcccagaugagcauccagcugaucaacaaggccgugaacgcccugaucaacgaccagcucaucaugaagaaccaccuccgggacaucaugggcauccccuacugcaacuacuccaaguacugguaccugaaccacaccgugacggggaagaccagccugccccgcugcuggcuggucuccaacggcagcuaccugaacgagacccacuucuccgacgacaucgagcagcaggccgacaacaugaucaccgagaugcuccagaaggaguacauggaccggcagggcaagacgccgcuggggcugguggaccuguucguguucagcaccuccuucuaccucaucagcaucuuccugcaccuggucaagauccccacccaccgccacgugaucggcaagcccugccccaagccgcaccggcucaaccacauggggaucugcuccugcggccuguacaagcaccccggggugcccgucaaguggaagcgcugaggacuagucccuguucccagagcccacuuuuuuuucuuuuuuugaaauaaaauagccugucuuucagaucucaaaggcucuuuucagagccaccaaaaaaaaaaaaaaaaaaaaaaaaaaaaaaaaaaaaaaaaaaaaaaaaaaaaaaaaaaaaaaaaagaauu

SEQ ID NO: 29943 - RNA, 1714 nt, Artificial Sequence
  mRNA product Design a-1 (hSL-A64-N5) comprising derived and/or modified sequence from LASV(LASV237-NIG-2010;Clade II)__AIT17638__GPCmut6 (opt1)
aggagagucccgcagucggcguccagcggcucugcuuguucgugugugugucguugcaggccuuauucaagcuuaccaugggccagaucaucaccuucuuccaggaggugccccacgucaucgaggaggugaugaacaucgugcugaucgcccucagccugcuggccauccucaaggggaucuacaacgucgcgaccugcggccuguucgggcugguguccuuccuccugcugugcggccgcagcugcuccacgaccuacaaggggguguacgagcuccagacccuggagcuggacauggccagccucaacaugugcaugccgcuguccugcaccaagaacaacagccaccacuacaucauggucggcaacgagacgggccuggagcucacccugaccaacaccuccaucaucaaccacaaguucugcaaccugagcgacgcccacaagaaggaccucuacgaccacgcccugauguccaucaucagcacguuccaccuguccauccccaacuucaaccaguacgaggccaugagcugcgacuucaacgggggcaagaucuccgugcaguacaaccucagccacaccuacgcgguggacgccgccaaccacugcgggaccaucgccaacggcguccugcagaccuucaugcggauggcguggggcggguccuacaucgcccuggacagcggcaagggguccugggacugcaucaugacgagcuaccaguaccucaucauccagaacaccaccugggaggaccacugccaguucucccgccccagccccaucggcuaccuggggcugcucagccagcggacccgcgacaucuacaucucccggcgccugcugggcacguucaccuggacccucagcgacuccgagggcaacgagacccccgggggcuacugccugacgcgguggaugcugaucgaggccgagcucaagugcuucgggaacaccgccguggccaagugcaacgagaagcacgacgaggaguucugcgacaugcugcgccuguucgacuucugcaagcaggcgauccggcgccucaagaccccggcccagaugagcauccagcugaucaacaaggccgugaacgcccugaucaacgaccagcucaucaugaagaaccaccuccgggacaucaugggcauccccuacugcaacuacuccaaguacugguaccugaaccacaccgucacggggaagaccagccugccccgcugcuggcugguguccaacggcagcuaccugaacgagacccacuucuccgacgacaucgagcagcaggccgacaacaugaucaccgagcuccugcagaaggaguacauggaccggcagggcaagacgccgcuggggcugguggaccucuucgucuucagcaccuccuucuaccugaucagcaucuuccugcaccucaucaagauccccacccaccgccacaucaccggcaagcccugccccaagccgcaccggcugaaccacauggggaucugcuccugcggccuguacaagcaccccggggugcccgugaaguggaagcgcugaggacuagucccuguucccagagcccacuuuuuuuucuuuuuuugaaauaaaauagccugucuuucagaucucaaaggcucuuuucagagccaccaaaaaaaaaaaaaaaaaaaaaaaaaaaaaaaaaaaaaaaaaaaaaaaaaaaaaaaaaaaaaaaaagaauu

SEQ ID NO: 29944 - RNA, 1714 nt, Artificial Sequence
  mRNA product Design a-1 (hSL-A64-N5) comprising derived and/or modified sequence from LASV(LASV253-NIG-2011;Clade II)__AIT17670__GPCmut6 (opt1)
aggagagucccgcagucggcguccagcggcucugcuuguucgugugugugucguugcaggccuuauucaagcuuaccaugggccagaucaucaccuucuuccaggaggugccccacgucaucgaggaggugaugaacaucgugcugaucgcccucagccugcuggccauccucaaggggaucuacaacgucgcgaccugcggccuguucgggcugguguccuuccuccugcugugcggccgcagcugcuccacgaccuacaaggggguguacgagcuccagacccuggagcuggacauggccagccucaacaugugcaugccgcuguccugcaccaagaacaacagccaccacuacaucauggucggcaacgagacgggccuggagcucacccugaccaacaccuccaucaucaaccacaaguucugcaaccugagcgacgcccacaagaagaaccucuacgaccacgcccugauguccaucaucagcacguuccaccuguccauccccaacuucaaccaguacgaggccaugagcugcgacuucaacgggggcaagaucuccgugcaguacaaccucagccacaccuacgcgguggacgccgccaaccacugcgggaccaucgccaacggcguccugcagaccuucaugcggauggcguggggcggguccuacaucgcccuggacagcggcaagggguccugggacugcaucaugacgagcuaccaguaccucaucauccagaacaccaccugggaggaccacugccaguucucccgccccagccccaucggcuaccuggggcugcucagccagcggacccgcgacaucuacaucucccggcgccugcugggcacguucaccuggacccucagcgacuccgagggcaacgagacccccgggggcuacugccugacgcgguggaugcugaucgaggccgagcucaagugcuucgggaacaccgccguggccaagugcaacgagaagcacgacgaggaguucugcgacaugcugcgccuguucgacuucugcaagcaggcgauccggcgccucaaggccccggcccagaugagcauccagcugaucaacaaggccgugaacgcccugaucaacgaccagcucaucaugaagaaccaccuccgggacaucaugggcauccccuacugcaacuacuccaaguacugguaccugaaccacaccgucaccgggcgcacgagccugccccggugcuggcugguguccaacggcagcuaccugaacgagacccacuucuccgacgacaucgagcagcaggcggacaacaugaucaccgagcuccugcagaaggaguacaucgaccgccagggcaagaccccgcuggggcugguggaccucuucgucuucagcacguccuucuaccugaucagcaucuuccugcaccucgugaagauccccacccaccggcacaucaucggcaagcccugccccaagccgcaccgccugaaccacauggggaucugcuccugcggccuguacaagcaccccggggugcccgucaaguggaagcggugaggacuagucccuguucccagagcccacuuuuuuuucuuuuuuugaaauaaaauagccugucuuucagaucucaaaggcucuuuucagagccaccaaaaaaaaaaaaaaaaaaaaaaaaaaaaaaaaaaaaaaaaaaaaaaaaaaaaaaaaaaaaaaaaagaauu

SEQ ID NO: 29945 - RNA, 1714 nt, Artificial Sequence
  mRNA product Design a-1 (hSL-A64-N5) comprising derived and/or modified sequence from LASV(LASV254-NIG-2011;Clade II)__AIT17674__GPCmut6 (opt1)
aggagagucccgcagucggcguccagcggcucugcuuguucgugugugugucguugcaggccuuauucaagcuuaccaugggccagaucaucaccuucuuccaggaggugccccacgucaucgaggaggugaugaacaucgugcugaucgcccucagccugcuggccauccucaaggggaucuacaacgucgcgaccugcggccuguucgggcugguguccuuccuccugcugugcggccgcagcugcuccacgaccuacaaggggguguacgagcuccagacccuggagcuggacaugaccaaccucaacaugugcaugccgcugagcugcacgaagaacaacucccaccacuacaucauggucggcaacgagaccggccuggagcucacccugaccaacacgagcaucaucaaccacaaguucugcaaccuguccgacgcccacaagaagaaccucuacaaccacgcccugaugagcaucaucuccaccuuccaccugagcauccccaacuucaaccaguacgaggccauguccugcgacuucaacgggggcaagaucagcgugcaguacaaccucucccacagcuacgccguggacgcggccaaccacugcgggaccaucgccaacggcguccugcagaccuucaugcggauggccuggggcggguccuacaucgcgcuggacagcggcaaggggaacugggacugcaucaugacguccuaccaguaccucaucauccagaacaccaccugggaggaccacugccaguucagccgccccucccccaucggcuaccuggggcugcucagccagcggacccgcgacaucuacaucagccggcgccugcugggcacguucaccuggacccucuccgacagcgagggcaacgagacccccgggggcuacugccugacgcgguggaugcugaucgaggccgagcucaagugcuucgggaacaccgccguggccaagugcaacgagaagcacgacgaggaguucugcgacaugcugcgccuguucgacuucugcaagcaggccauccggcgccucaagaccccggcgcaggccaacauccagcugaucaacaaggccgugaacgcccugaucaacgaccagcucaucaugaagaaccaccuccgggacaucaugggcauccccuacugcaacuacuccaaguacugguaccugaaccacaccgucacggggaagaccagccugccccgcugcuggcugguguccaacggcagcuaccugaacgagacccacuucuccgacgacaucgagcagcaggccgacaacaugaucaccgagcuccugcagaaggaguacauggaccggcagggcaagacgccgcuggggcugguggaccucuucgucuucagcaccuccuucuaccugaucagcaucuuccugcaccucgugaagauccccacccaccgccacgugaucggcaagcccugccccaagccgcaccggcugaaccacauggggaucugcuccugcggccuguacaagcaccccgggguccccgugaaguggaagcgcugaggacuagucccuguucccagagcccacuuuuuuuucuuuuuuugaaauaaaauagccugucuuucagaucucaaaggcucuuuucagagccaccaaaaaaaaaaaaaaaaaaaaaaaaaaaaaaaaaaaaaaaaaaaaaaaaaaaaaaaaaaaaaaaaagaauu

SEQ ID NO: 29946 - RNA, 1714 nt, Artificial Sequence
  mRNA product Design a-1 (hSL-A64-N5) comprising derived and/or modified sequence from LASV(Nig08-A19;Clade III)__ADU56618__GPCmut6 (opt1)
aggagagucccgcagucggcguccagcggcucugcuuguucgugugugugucguugcaggccuuauucaagcuuaccaugggccagaucgugaccuucuuccaggaggucccccacgugaucgaggaggugaugaacaucguccugaucgcccucagcauccuggccauccugaaggggcucuacaacaucgcgaccugcggccugaucgggcuggugacguuccuccugcuguccggccgcagcugcuccaugaccuacaaggggguguacgagcuccagacccuggagcugaacaugaacacccucaacaugugcaugccgcugagcugcacgaagaacaacucccaccacuacaucauggucggcaacgagaccggccuggagcucacccugaccaacacgagccugcuccaccacaaguucugcaaccuguccgacgcccacaagaagaaccuguacgaccacacccucaugagcaucaucuccaccuuccaccugagcauccccaacuucaaccaguacgaggccauguccugcgacuucaacgggggcaagaucaccgugcaguacaaccugagccacuccuacgccaucgacgccgcgaaccacugcgggacgguggccaacggcguccuccagaccuucaugcggauggccuggggcgggagcuacaucgcccuggacuccggccgcgggaagugggacugcaucaugaccagcuaccaguaccugaucauccagaacaccacgugggaggaccacugccaguucucccggcccagccccaucggcuaccucgggcugcugucccagcgcacccgggacaucuacaucagccgccggcuccugggcaccuucaccuggacgcugagcgacuccgagggcaacgagacccccgggggcuacugccucacccgcuggaugcugaucgaggcggagcugaagugcuucgggaacaccgccguggccaagugcaacgagaagcacgacgaggaguucugcgacaugcuccggcuguucgacuucugcaagcaggccauccgccggcugaaggccccggcgcagaugagcauccagcucaucaacaaggccgugaacgcccugaucaacgaccagcugaucaugaagaaccaccuccgcgacaucaugggcauccccuacugcaacuacuccaaguacugguaccugaaccacacgagcaccgggcggaccucccugccccgcugcuggcucgucagcaacggcuccuaccugaacgagacccacuucagcgacgacaucgagcagcaggccgacaacaugaucacggagaugcugcagaaggaguaccuggaccggcagggcaagaccccgcucgggcugguggaccuguucguguucuccaccagcuucuaccucaucuccaucuuccugcaccuggucaagauccccacccaccgccacaucgugggcaagcccugccccaagccgcaccggcucaaccacauggggaucugcagcugcggccuguacaagcagcccggggugcccguccgcuggaagcggugaggacuagucccuguucccagagcccacuuuuuuuucuuuuuuugaaauaaaauagccugucuuucagaucucaaaggcucuuuucagagccaccaaaaaaaaaaaaaaaaaaaaaaaaaaaaaaaaaaaaaaaaaaaaaaaaaaaaaaaaaaaaaaaaagaauu

SEQ ID NO: 29947 - RNA, 1717 nt, Artificial Sequence
  mRNA product Design a-1 (hSL-A64-N5) comprising derived and/or modified sequence from LASV(G1180-SLE-2010;Clade IV)__AIT17168__GPCmut6 (opt1)
aggagagucccgcagucggcguccagcggcucugcuuguucgugugugugucguugcaggccuuauucaagcuuaccaugggccagaucgugaccuucuuccaggaggucccccacgugaucgaggaggugaugaacaucguccugaucgcccucagcauccuggccgugcugaaggggcucuacaacuucgcgaccugcggccugguggggcugcucacguuccugcugcucugcggccgcuccugcaccgccagccgguacaagggggucuacgagcugcagacccuggagcucaacauggagacccugaacaugugcaugccgcuguccugcacgaagaacaacagccaccacuacaucauggugggcaacgagaccggccucgagcugacccugaccaacacguccaucaucaaccacaaguucugcaaccucagcgacgcccacaagaagaaccuguacgaccacgcccugauguccaucaucagcaccuuccaccucuccauccccaacuucaaccaguacgaggccaugagcugcgacuucaacgggggcaagaucuccgugcaguacaaccugagccacuccuacgcgggggacgccgccaaccacugcggcaccgucgccaacggggugcugcagaccuucaugcgcauggcguggggcggcagcuacaucgcccucgacuccgggcacggcagcugggacugcaucaugacguccuaccaguaccugaucauccagaacaccaccugggaggaccacugccaguucagccggcccucccccaucggguaccugggccuccugagccagcgcacccgggacaucuacaucagccgccggcugcucggcacguucaccuggacccuguccgacagcgaggggaaggacaccccgggcggguacugccugacgcgcuggaugcucaucgaggccgagcugaagugcuucggcaacaccgccguggccaagugcaacgagaagcacgacgaggaguucugcgacaugcugcggcuguucgacuucugcaagcaggcgauccagcgccugaaggcccccgcccagauguccauccagcugaucaacaaggccgucaacgcccucaucaacgaccagcugaucaugaagaaccaccuccgggacaucauggggauccccuacugcaacuacagcaaguacugguaccucaaccacaccaccacgggcaagaccucccugcccaagugcuggcuggugagcaacggcuccuaccucaacgagacccacuucagcgacgacaucgagcagcaggcggacaacaugaucaccgagaugcugcagaaggaguacauggagcgccaggggaagacgccgcugggccugguggaccucuucgucuucuccaccagcuucuaccugaucuccaucuuccugcaccucgugaagauccccacccaccggcacaucgugggcaagagcugccccaagccccaccgccugaaccacauggggaucugcuccugcgggcuguacaagcagccgggcguccccgugaaguggaagcggugaggacuagucccuguucccagagcccacuuuuuuuucuuuuuuugaaauaaaauagccugucuuucagaucucaaaggcucuuuucagagccaccaaaaaaaaaaaaaaaaaaaaaaaaaaaaaaaaaaaaaaaaaaaaaaaaaaaaaaaaaaaaaaaaagaauu

SEQ ID NO: 29948 - RNA, 1717 nt, Artificial Sequence
  mRNA product Design a-1 (hSL-A64-N5) comprising derived and/or modified sequence from LASV(G1442-SLE-2011;Clade IV)__AIT17180__GPCmut6 (opt1)
aggagagucccgcagucggcguccagcggcucugcuuguucgugugugugucguugcaggccuuauucaagcuuaccaugggccagaucgugaccuucuuccaggaggucccccacgugaucgaggaggugaugaacaucguccugaucgcccucagcauccuggccgugcugaaggggcucuacaacguggcgaccugcggccugaucgggcuggucacguuccuccugcugugcggccgcuccugcaccaccacccucuacaaggggguguacgagcugcagacgcuggagcucaacauggagacccugaacaugugcaugccgcugagcugcaccaagaacaacucccaccacuacauccgggugggcaacgagaccggccucgagcugacgcugaccaacaccagcaucaucaaccacaaguucugcaaccucuccgacgcccacaagaagaaccuguacgaccacgcccugaugagcaucaucuccaccuuccaccucagcauccccaacuucaaccaguacgaggccauguccugcgacuucaacgggggcaagaucagcguccaguacaaccugucccacagcuacgccggggacgcggccaaccacugcggcacgguggccaacggggugcugcagaccuucaugcgcauggccuggggcggcuccuacaucgcgcucgacagcgggcggggcaacugggacugcaucaugaccuccuaccaguaccugaucauccagaacaccacgugggacgaccacugccaguucagccgccccucccccaucggguaccugggccuccugagccagcggacccgcgacgucuacaucucccggcgccugcucggcaccuucaccuggacgcugagcgacagcgaggggaaggacaccccgggcggguacugccugacccgguggaugcucaucgaggccgagcugaagugcuucggcaacaccgccguggccaagugcaacgagaagcacgacgaggaguucugcgacaugcugcgccucuucgacuucugcaagcaggccauccagcggcugaaggcgcccgcccagauguccauccagcugaucaacaaggccgugaacgcccucaucaacgaccagcugaucaugaagaaccaccuccgcgacaucauggggauccccuacugcaacuacagcaaguacugguaccugaacaacacggccaccggcaagaccucccugcccaagugcuggcugaucagcaacggcuccuaccucaacgagacccacuucagcgacgacaucgagcaggaggcggacaacaugaucacggagaugcugcagaaggaguacauggagcggcaggggaagaccccgcugggccuggucgaccucuucguguucuccaccagcuucuaccugaucuccaucuuccugcaccucgugaagauccccacccaccgccacaucgucggcaagagcugccccaagccccaccggcugaaccacauggggaucugcuccugcgggcuguacaagcagccgggcgugcccgugcgcuggaagcggugaggacuagucccuguucccagagcccacuuuuuuuucuuuuuuugaaauaaaauagccugucuuucagaucucaaaggcucuuuucagagccaccaaaaaaaaaaaaaaaaaaaaaaaaaaaaaaaaaaaaaaaaaaaaaaaaaaaaaaaaaaaaaaaaagaauu

SEQ ID NO: 29949 - RNA, 1717 nt, Artificial Sequence
  mRNA product Design a-1 (hSL-A64-N5) comprising derived and/or modified sequence from LASV(G3010-SLE-2013;Clade IV)__AIT17344__GPCmut6 (opt1)
aggagagucccgcagucggcguccagcggcucugcuuguucgugugugugucguugcaggccuuauucaagcuuaccaugggccagaucgugaccuucuuccaggaggucccccacgugaucgaggaggugaugaacaucguccugaucgcccucagcauccuggccgugcugaaggggcucuacaacuucgcgaccugcggccugguggggcuggucacguuccuccugcugugcggccgcuccugcaccaccagccucuacaaggggguguacgagcugcagacccuggagcucaacauggagacgcugaacaugugcaugccgcuguccugcaccaagaacaacagccaccacuacaucauggugggcaacgagaccggccucgagcugacccugacgaacaccuccaucaucaaccacaaguucugcaaccucagcgacgcccacaagaagaaccuguacaaccacgcccugauguccaucaucagcaccuuccaccucuccauccccaacuucaaccaguacgaggccaugagcugcgacuucaacgggggcaagaucuccguccaguacaaccugagccacuccuacgccggggacgcggccagccacugcggcaccguggccaacggggugcugcagacguucaugcggauggccuggggcggcuccuacaucgcgcucgacagcggguacggcaagugggacugcaucaugaccuccuaccaguaccugaucauccagaacaccaccugggaggaccacugccaguucagccgccccucccccaucggguaccugggccuccugagccagcggacgcgcgacaucuacaucagccggcgccugcucggcaccuucaccuggacccuguccgacagcgaggggaaggacacgccgggcggguacugccugacccgguggaugcucaucgaggccgagcugaagugcuucggcaacaccgccgucgccaagugcaacgagaagcacgacgaggaguucugcgacaugcugcgccucuucgacuucugcaagcaggccauccagcggcugaagacccccgcgcagauguccauccagcugaucaacaaggccgugaacgcccucaucaacgaccagcugaucaugaagaaccaccuccgcgacaucauggggauccccuacugcaacuacagcaaguacugguaccugaaccacacgaccaccggcaagaccucccugcccaagugcuggcuggugagcaacggcuccuaccucaacgagacgcacuucagcgacgacaucgagcagcaggccgacaacaugaucaccgagaugcugcagaaggaguacauggagcggcaggggaagaccccgcugggccuggucgaccucuucguguucuccaccagcuucuaccugaucuccaucuuccugcaccucgugaagauccccacgcaccgccacaucgucggcaagagcugccccaagccccaccggcugaaccacauggggaucugcuccugcgggcuguacaagcagccgggcgugcccgugcgcuggaagcggugaggacuagucccuguucccagagcccacuuuuuuuucuuuuuuugaaauaaaauagccugucuuucagaucucaaaggcucuuuucagagccaccaaaaaaaaaaaaaaaaaaaaaaaaaaaaaaaaaaaaaaaaaaaaaaaaaaaaaaaaaaaaaaaaagaauu

SEQ ID NO: 29950 - RNA, 1717 nt, Artificial Sequence
  mRNA product Design a-1 (hSL-A64-N5) comprising derived and/or modified sequence from LASV(G502-SLE-2009;Clade IV)__AIT17126__GPCmut6 (opt1)
aggagagucccgcagucggcguccagcggcucugcuuguucgugugugugucguugcaggccuuauucaagcuuaccaugggccagaucgugaccuucuuccaggaggucccccacgugaucgaggaggugaugaacaucguccugaucgcccucagcauccuggccgugcugaaggggcucuacaacuucgcgaccugcggccugguggggcugcucacguuccugcugcucugcggccgcuccugcaccaccgggcuguacaagggcgucuacgagcugcagacccucgagcugaacauggagacgcugaacaugugcaugccgcucagcugcaccaagaacaacucccaccacuacaucauggugggcaacgagaccgggcuggagcugacccucacgaacaccagcaucaucaaccacaaguucugcaaccuguccgacgcccacaagaagaaccuguacgaccacgcccucaugagcaucaucuccaccuuccaccugagcauccccaacuucaaccaguacgaggccauguccugcgacuucaacggcgggaagaucagcgugcaguacaaccugucccacagcuacgccggcgacgcggccgaccacugcgggaccgucgccaacggcgugcuccagacguucaugcggauggccuggggcggguccuacaucgcgcuggacagcggccgcgggcggugggacugcaucaugaccuccuaccaguaccugaucauccagaacaccaccugggaggaccacugccaguucagccgccccucccccaucggcuaccucggccugcugagccagcggacgcgcgacaucuacaucucccggcgccuccuggggaccuucaccuggacccugagcgacagcgagggcaaggacacgcccgggggcuacugccucacccgguggaugcugaucgaggccgagcugaagugcuucgggaacaccgccguggccaagugcaacgagaagcacgacgaggaguucugcgacaugcuccgccuguucgacuucugcaagcaggccauccagcggcugaaggcgccggcccagauguccauccagcucaucaacaaggccgucaacgcccugaucaacgaccagcuggugaugaagaaccaccuccgcgacaucaugggcauccccuacugcaacuacagccgguacugguaccugaaccacaccacgaccggccgcaccucccugcccaagugcuggcucgugagcaacggguccuaccugaacgagacccacuucagcgacgacaucgagcagcaggccgacaacaugaucacggagaugcugcagaaggaguacauggagcggcagggcaagaccccgcuggggcucgucgaccuguucguguucuccaccagcuucuaccugaucuccaucuuccuccaccuggugaagauccccacccaccgccacaucgucggcaagagcugccccaagccccaccggcugaaccacauggggaucugcuccugcggccucuacaagcagccgggcgugcccgugaaguggaagcgcugaggacuagucccuguucccagagcccacuuuuuuuucuuuuuuugaaauaaaauagccugucuuucagaucucaaaggcucuuuucagagccaccaaaaaaaaaaaaaaaaaaaaaaaaaaaaaaaaaaaaaaaaaaaaaaaaaaaaaaaaaaaaaaaaagaauu

SEQ ID NO: 29951 - RNA, 1717 nt, Artificial Sequence
  mRNA product Design a-1 (hSL-A64-N5) comprising derived and/or modified sequence from LASV(G733-SLE-2010;Clade IV)__AIT17154__GPCmut6 (opt1)
aggagagucccgcagucggcguccagcggcucugcuuguucgugugugugucguugcaggccuuauucaagcuuaccaugggccagaucgugaccuucuuccaggaggucccccacgugaucgaggaggugaugaacaucguccugaucgcccucagcauccuggccgugcugaaggggcucuacaacuucgcgaccugcggcaucguggggcuggucuccuuccugcuccugugcggccgcagcugcacgaccucccuguacaaggggguguacgagcuccagacccuggagcugaacauggagacccucaacaugugcaugccgcugagcugcacgaagaacaacucccaccacuacaucauggugggcaacgagaccggccuggagcucacccugaccaacacgagcaucaucaaccacaaguucugcaaccuguccgacgcccacaagaagaaccucuacgaccacgcccugaugagcaucaucuccaccuuccaccugagcauccccaacuucaaccaguacgaggccauguccugcgacuucaacgggggcaagaucagcguccaguacaaccucucccacagcuacgccggggacgcggccaaccacugcggcaccaucgccaacggggugcugcagaccuucaugcggauggccuggggcggcuccuacaucgcgcuggacagcgggcgcgaccggugggacugcaucaugacguccuaccaguaccucaucauccagaacaccaccugggaggaccacugccaguucagccgccccucccccaucggcuaccuggggcugcucagccagcggacccgcgacaucuacaucagccggcgccugcugggcacguucaccuggacccucuccgacagcgagggcaaggacacccccgggggcuacugccugacgcgguggaugcugaucgaggccgagcucaagugcuucgggaacaccgccguggccaagugcaacgagaagcacgacgaggaguucugcgacaugcugcgccuguucgacuucugcaagcaggccauccagcggcucaaggcgccggcccagauguccauccagcugaucaacaaggccgucaacgcccugaucaacgaccagcucaucaugaagaaccaccuccgcgacaucaugggcauccccuacugcaacuacagcaaguacugguaccugaaccacaccaccacggggaagaccucccugcccaagugcuggcuggugagcaacggcuccuaccugaacgagacccacuucagcgacgacaucgagcagcaggccgacaacaugaucaccgagaugcuccagaaggaguacauggagcggcagggcaagacgccgcuggggcugguggaccuguucgucuucuccaccagcuucuaccucaucuccaucuuccugcaccuggugaagauccccacccaccgccacguggucggcaagagcugccccaagccccaccggcucaaccacauggggaucugcuccugcggccuguacgggcagccgggcgugcccgugaaguggaagcgcugaggacuagucccuguucccagagcccacuuuuuuuucuuuuuuugaaauaaaauagccugucuuucagaucucaaaggcucuuuucagagccaccaaaaaaaaaaaaaaaaaaaaaaaaaaaaaaaaaaaaaaaaaaaaaaaaaaaaaaaaaaaaaaaaagaauu

SEQ ID NO: 29952 - RNA, 1717 nt, Artificial Sequence
  mRNA product Design a-1 (hSL-A64-N5) comprising derived and/or modified sequence from MOPV/LASV reassortant(IGS-1;Clade IV)__AFY05576__GPCmut6 (opt1)
aggagagucccgcagucggcguccagcggcucugcuuguucgugugugugucguugcaggccuuauucaagcuuaccaugggccagaucgugaccuucuuccaggaggucccccacgugaucgaggaggugaugaacaucguccugaucgcccucagcgugcuggccgugcugaaggggcucuacaacuucgcgaccugcggccuggucgggcuggugacguuccuccugcugugcggccgcuccugcaccaccagccucuacaaggggguguacgagcugcagacccuggagcucaacauggagacgcugaacaugugcaugccgcuguccugcaccaagaacaacagccaccacuacaucauggucggcaacgagaccggccucgagcugacccugacgaacaccuccaucaucaaccacaaguucugcaaccucagcgacgcccacaagaagaaccuguacgaccacgcccugauguccaucaucagcaccuuccaccucuccauccccaacuucaaccaguacgaggccaugagcugcgacuucaacgggggcaagaucuccgugcaguacaaccugagccacuccuacgccggggacgcggccaaccacugcggcaccguggccaacgggguccugcagacguucaugcggauggccuggggcggcagcuacaucgcgcucgacuccgggcgcggcaacugggacugcaucaugaccagcuaccaguaccugaucauccagaacaccaccugggaggaccacugccaguucucccggcccagccccaucggguaccugggccuccugucccagcgcacgcgggacaucuacaucagccgccggcugcucggcaccuucaccuggacccugagcgacuccgagggggaggacacgccgggcggguacugccugacccgcuggaugcucaucgaggccgagcugaagugcuucggcaacaccgccguggccaagugcaacgagaagcacgacgaggaguucugcgacaugcugcggcuguucgacuucugcaagcaggccauccagcgccugaaggcgcccgcccagaugagcauccagcugaucaacaaggccgugaacgcccucaucaacgaccagcugaucaugaagaaccaccuccgggacaucauggggauccccuacugcaacuacuccaaguacugguaccucaaccacaccacgaccggccgcaccagccugcccaagugcuggcuggucuccaacggcagcuaccucaacgagacccacuucuccgacgacaucgagcagcaggccgacaacaugaucacggagaugcugcagaaggaguacauggagcggcaggggaagaccccgcugggccugguggaccucuucguguucagcaccuccuucuaccugaucagcaucuuccugcaccucgucaagauccccacccaccgccacaucguggggaaguccugccccaagccccaccggcugaaccacaugggcaucugcagcugcgggcuguacaagcagccgggcgugcccgucaaguggaagcgcugaggacuagucccuguucccagagcccacuuuuuuuucuuuuuuugaaauaaaauagccugucuuucagaucucaaaggcucuuuucagagccaccaaaaaaaaaaaaaaaaaaaaaaaaaaaaaaaaaaaaaaaaaaaaaaaaaaaaaaaaaaaaaaaaagaauu

SEQ ID NO: 29953 - RNA, 1717 nt, Artificial Sequence
  mRNA product Design a-1 (hSL-A64-N5) comprising derived and/or modified sequence from LASV(LM765-SLE-2012;Clade IV)__AIT17814__GPCmut6 (opt1)
aggagagucccgcagucggcguccagcggcucugcuuguucgugugugugucguugcaggccuuauucaagcuuaccaugggccagaucgugaccuucuuccaggaggucccccacgugaucgaggaggugaugaacaucguccugaucgcccucagcauccuggccgugcugaaggggcucuacaacuucgcgaccugcggccugguggggcuggucacguuccuccugcugugcggccgcuccugcaccaccagccucuacaaggggguguacgagcugcagacccuggagcucaacauggagacgcugaacaugugcaugccgcuguccugcaccaagaacaacagccaccacuacaucauggugggcaacgagaccggccucgagcugacccugacgaacaccuccaucaucgaccacaaguucugcaaccucagcgacgcccaccggaagaaccuguacgaccacgcccugauguccaucaucagcaccuuccaccucuccauccccaacuucaaccaguacgaggccaugagcugcgacuucaacgggggcaagaucuccguccaguacaaccugagccacuccuacgccaaggacgcggccgaccacugcgggaccguggccaacggcgugcugcagacguucaugcgcauggccuggggcgggagcuacaucgcgcucgacuccggccgggggcgcugggacugcaucaugaccagcuaccaguaccugaucauccagaacaccaccugggaggaccacugccaguucucccggcccagccccaucggcuaccuggggcuccugucccagcgcacgcgggacaucuacaucagccgccggcugcucggcaccuucaccuggacccugagcgacuccgagggcaaggacacgcccgggggcuacugccugacccgcuggaugcucaucgaggccgagcugaagugcuucgggaacaccgccgucgccaagugcaacgagaagcacgacgaggaguucugcgacaugcugcggcuguucgacuucugcaagcaggccauccagcgccugaaggcgccggcccagaugagcauccagcugaucaacaaggccgugaacgcccucaucaacgaccagcugaucaugaagaaccaccuccgggacaucaugggcauccccuacugcaacuacuccaaguacugguaccucaaccacaccacgaccgggaagaccagccugcccaagugcuggcugguguccaacggcagcuaccucaacgagacccacuucuccgacgacaucgagcagcaggccgacaacaugaucacggagaugcugcagaaggaguacauggagcgccagggcaagaccccgcuggggcuggucgaccucuucguguucagcaccuccuucuaccugaucagcaucuuccugcaccucgugaagauccccacccaccggcacaucgucggcaagcccugccccaagccgcaccgccugaaccacauggggaucugcuccugcggccuguacaagcagcccggggugcccgugaaguggaagcggugaggacuagucccuguucccagagcccacuuuuuuuucuuuuuuugaaauaaaauagccugucuuucagaucucaaaggcucuuuucagagccaccaaaaaaaaaaaaaaaaaaaaaaaaaaaaaaaaaaaaaaaaaaaaaaaaaaaaaaaaaaaaaaaaagaauu

SEQ ID NO: 29954 - RNA, 1717 nt, Artificial Sequence
  mRNA product Design a-1 (hSL-A64-N5) comprising derived and/or modified sequence from LASV(LM776-SLE-2012;Clade IV)__AIT17824__GPCmut6 (opt1)
aggagagucccgcagucggcguccagcggcucugcuuguucgugugugugucguugcaggccuuauucaagcuuaccaugggccagaucgugaccuucuuccaggaggucccccacgugaucgaggaggugaugaacaucguccugaucgcccucagcauccuggccgugcugaaggggcucuacaacuucgcgaccugcggccugguggggcuggucacguuccuccugcugugcggccgcuccugcaccaccagcguguacaaggggguguacgagcuccagacccuggagcugaacauggagacgcucaacaugugcaugccgcuguccugcaccaagaacaacagccaccacuacaucauggucggcaacgagaccggccuggagcucacccugacgaacaccuccaucaucaaccacaaguucugcaaccugagcgacgcccacaagaagaaccucuacgaccacgcccugauguccaucaucagcaccuuccaccuguccauccccaacuucaaccaguacgaggccaugagcugcgacuucaacgggggcaagaucuccgugcaguacaaccucagccacuccuacgccggggacgcggccaaccacugcggcaccguggccaacgggguccugcagacguucaugcggauggccuggggcggcagcuacaucgcgcuggacuccgggcacggcaagugggacugcaucaugaccagcuaccaguaccucaucauccagaacaccaccugggaggaccacugccaguucucccgccccagccccaucggguaccugggccugcucucccagcggacgcgcgacaucuacaucagccggcgccugcugggcaccuucaccuggacccucagcgacuccgaggggaaggacacgccgggcggguacugccugacccgguggaugcugaucgaggccgagcucaagugcuucggcaacaccgccguggccaagugcaacgagaagcacgacgaggaguucugcgacaugcugcgccuguucgacuucugcaagcaggccauccagcggcucaaggcgcccgcccagaugagcauccagcugaucaacaaggccgugaacgcccugaucaacgaccagcucaucaugaagaaccaccuccgcgacaucauggggauccccuacugcaacuacuccaaguacugguaccugaaccacaccacgaccggcaagaccagccugcccaagugcuggcuggucuccaacggcagcuaccugaacgagacccacuucuccgacgacaucgagcagcaggccgacaacaugaucacggagaugcuccagaaggaguacauggagcggcaggggaagaccccgcugggccugguggaccuguucguguucagcaccuccuucuaccucaucagcaucuuccugcaccuggucaagauccccacccaccgccacaucguggggaaguccugccccaagccccaccggcucaaccacaugggcaucugcagcugcgggcuguacaagcagccgggcgugcccguccgcuggaagcggugaggacuagucccuguucccagagcccacuuuuuuuucuuuuuuugaaauaaaauagccugucuuucagaucucaaaggcucuuuucagagccaccaaaaaaaaaaaaaaaaaaaaaaaaaaaaaaaaaaaaaaaaaaaaaaaaaaaaaaaaaaaaaaaaagaauu

SEQ ID NO: 29955 - RNA, 1717 nt, Artificial Sequence
  mRNA product Design a-1 (hSL-A64-N5) comprising derived and/or modified sequence from LASV(Mad39;Clade IV)__ANH09722__GPCmut6 (opt1)
aggagagucccgcagucggcguccagcggcucugcuuguucgugugugugucguugcaggccuuauucaagcuuaccaugggccagaucgugaccuucuuccaggaggucccccacgugaucgaggaggugaugaacaucguccugaucgcccucagcauccuggccgugcugaaggggcucuacaacguggcgaccugcggccugaucgggcuggucacguuccuccugcugugcggccgcuccugcaccaccacccucuacaaggggguguacgagcugcaggcccuggagcucaacauggagacgcugaacaugugcaugccgcugagcugcaccaagaacaacucccaccacuacauccgggugggcaacgagaccggccucgagcugacccugacgaacaccagccucaucaaccacaaguucugcaaccuguccgacgcccacaagaagaaccuguacgaccacgcccucaugagcaucaucuccaccuuccaccugagcauccccaacuucaaccaguacgaggccauguccugcgacuucaacgacgggaagaucagcguccaguacaaccugucccacaccuacgcgggcgacacggccaaccacugcgggaccguggccaacggcgugcuccagaccuucaugcgcauggccuggggcgggagcuacaucgcgcuggacuccggccgcgggggcugggacugcaucaugaccagcuaccaguaccugaucauccagaacacgaccugggaggaccacugccaguucucccggcccagccccaucggguaccucggccugcugucccagcggacccgcgacaucuacaucagccggcgccuccugggcaccuucacguggacccuguccgacagcgaggggaaggacaccccgggcggguacugccucacccgguggaugcugaucgaggccgagcugaagugcuucggcaacacggccgucgccaagugcaacgagaagcacgacgaggaguucugcgacaugcuccgccuguucgacuucugcaagcaggccauccagcggcugaaggcgcccgcccagaugagcauccagcucaucaacaaggccgugaacgcccugaucaacgaccagcugaucaugaagaaccaccuccgcgacaucauggggauccccuacugcaacuacuccaaguacugguaccugaaccacaccgugaccggcaagaccagccugcccaagugcuggcucgucuccaacggcagcuaccugaacgagacgcacuucuccgacgacaucgagcagcaggccgacaacaugaucaccgagaugcugcagaaggaguacauggagcggcaggggaagaccccgcugggccucguggaccuguucguguucagcaccuccuucuaccugaucagcaucuuccuccaccuggucaagauccccacgcaccgccacgugguggggaagcccugccccaagccgcaccggcugaaccacaugggcaucugcuccugcggguucuacaagcagcccggcguccccgugcgcuggaagcggugaggacuagucccuguucccagagcccacuuuuuuuucuuuuuuugaaauaaaauagccugucuuucagaucucaaaggcucuuuucagagccaccaaaaaaaaaaaaaaaaaaaaaaaaaaaaaaaaaaaaaaaaaaaaaaaaaaaaaaaaaaaaaaaaagaauu

SEQ ID NO: 29956 - RNA, 1717 nt, Artificial Sequence
  mRNA product Design a-1 (hSL-A64-N5) comprising derived and/or modified sequence from LASV(Z0947-SLE-2011;Clade IV)__AIT17840__GPCmut6 (opt1)
aggagagucccgcagucggcguccagcggcucugcuuguucgugugugugucguugcaggccuuauucaagcuuaccaugggccagaucgugaccuucuuccaggaggucccccacgugaucgaggaggugaugaacaucguccugaucgcccucagcauccuggccgugcugaaggggcucuacaacuucgcgaccugcggccugguggggcuggucacguuccuccugcugugcggccgcuccugcaccaucagccucuacaaggggguguacgagcugcagacccuggagcucaacauggagacccugaacaugugcaugccgcuguccugcacgaagaacaacagccaccacuacaucauggugggcaacgagaccggccucgagcugacccugaccaacacguccaucaucaaccacaaguucugcaaccucagcgacgcccacaagaagaaccuguacgaccacgcccugauguccaucaucagcaccuuccaccucuccauccccaacuucaaccaguacgaggccaugagcugcgacuucaacgggggcaagaucuccguccaguacaaccugagccacuccuacgccggggacgcggccaaccacugcggcaccguggccaacggggugcugcagaccuucaugcggauggccuggggcggcagcuacaucgcgcucgacuccgggcgcgaccggugggacugcaucaugacgagcuaccaguaccugaucauccagaacaccaccugggaggaccacugccaguucucccgccccagccccaucggcuaccuggggcuccugucccagcggacccgcgacaucuacaucagccggcgccugcucggcacguucaccuggacccugagcgacuccgagggcaaggacacccccgggggcuacugccugacgcgguggaugcucaucgaggccgagcugaagugcuucgggaacaccgccgucgccaagugcaacgagaagcacgacgaggaguucugcgacaugcugcgccucuucgacuucugcaagcaggccauccagcggcugaaggcgccggcccagaugagcauccagcugaucaacaaggccgugaacgcccucaucaacgaccagcugaucaugaagaaccaccuccgcgacaucaugggcauccccuacugcaacuacuccaaguacugguaccugaaccacaccaccacggggaagaccagccugcccaagugcuggcugguguccaacggcagcuaccucaacgagacccacuucuccgacgacaucgagcagcaggccgacaacaugaucaccgagaugcugcagaaggaguacauggagcggcagggcaagacgccgcuggggcuggucgaccucuucguguucagcaccuccuucuaccugaucagcaucuuccugcaccucgugaagauccccacccaccgccacaucgucggcaagcccugccccaagccgcaccggcugaaccacauggggaucugcuccugcggccuguacaagcagcccggggugcccgugaaguggaagcgcugaggacuagucccuguucccagagcccacuuuuuuuucuuuuuuugaaauaaaauagccugucuuucagaucucaaaggcucuuuucagagccaccaaaaaaaaaaaaaaaaaaaaaaaaaaaaaaaaaaaaaaaaaaaaaaaaaaaaaaaaaaaaaaaaagaauu

SEQ ID NO: 29957 - RNA, 1717 nt, Artificial Sequence
  mRNA product Design a-1 (hSL-A64-N5) comprising derived and/or modified sequence from LASV(Josiah;Clade IV)__NP_694870__GPCmut6 (opt4)
aggagagucccgcagucggcguccagcggcucugcuuguucgugugugugucguugcaggccuuauucaagcuuaccaugggccagaucgugaccuucuuccaggaggugccccacgugaucgaggaggugaugaacaucgugcugaucgcccugagcgugcuggccgugcugaagggccuguacaacuucgccaccugcggccuggugggccuggugaccuuccugcugcugugcggcagaagcugcaccaccagccuguacaagggcguguacgagcugcagacccuggagcugaacauggagacccugaacaugugcaugccccugagcugcaccaagaacaacagccaccacuacaucauggugggcaacgagaccggccuggagcugacccugaccaacaccagcaucaucaaccacaaguucugcaaccugagcgacgcccacaagaagaaccuguacgaccacgcccugaugagcaucaucagcaccuuccaccugagcauccccaacuucaaccaguacgaggccaugagcugcgacuucaacggcggcaagaucagcgugcaguacaaccugagccacagcuacgccggcgacgccgccaaccacugcggcaccguggccaacggcgugcugcagaccuucaugagaauggccuggggcggcagcuacaucgcccuggacagcggcagaggcaacugggacugcaucaugaccagcuaccaguaccugaucauccagaacaccaccugggaggaccacugccaguucagcagacccagccccaucggcuaccugggccugcugagccagagaaccagagacaucuacaucagcagaagacugcugggcaccuucaccuggacccugagcgacagcgagggcaaggacacccccggcggcuacugccugaccagauggaugcugaucgaggccgagcugaagugcuucggcaacaccgccguggccaagugcaacgagaagcacgacgaggaguucugcgacaugcugagacuguucgacuucugcaagcaggccauccagagacugaaggcccccgcccagaugagcauccagcugaucaacaaggccgugaacgcccugaucaacgaccagcugaucaugaagaaccaccugagagacaucaugggcauccccuacugcaacuacagcaaguacugguaccugaaccacaccaccaccggcagaaccagccugcccaagugcuggcuggugagcaacggcagcuaccugaacgagacccacuucagcgacgacaucgagcagcaggccgacaacaugaucaccgagaugcugcagaaggaguacauggagagacagggcaagaccccccugggccugguggaccuguucguguucagcaccagcuucuaccugaucagcaucuuccugcaccuggugaagauccccacccacagacacaucgugggcaagagcugccccaagccccacagacugaaccacaugggcaucugcagcugcggccuguacaagcagcccggcgugcccgugaaguggaagagaugaggacuagucccuguucccagagcccacuuuuuuuucuuuuuuugaaauaaaauagccugucuuucagaucucaaaggcucuuuucagagccaccaaaaaaaaaaaaaaaaaaaaaaaaaaaaaaaaaaaaaaaaaaaaaaaaaaaaaaaaaaaaaaaaagaauu

SEQ ID NO: 29958 - RNA, 1714 nt, Artificial Sequence
  mRNA product Design a-1 (hSL-A64-N5) comprising derived and/or modified sequence from LASV(LP;Clade I)__AAF86701__GPCmut6 (opt4)
aggagagucccgcagucggcguccagcggcucugcuuguucgugugugugucguugcaggccuuauucaagcuuaccaugggccagaucaucaccuucuuccaggaggugccccacgugaucgaggaggugaugaacaucgugcugaucgcccugagccugcuggccauccugaagggccuguacaacaucgccaccugcggcaucaucggccugguggccuuccuguuccugugcggcaagagcugcagccugacccugaagggcggcuacgagcugcagacccuggagcugaacauggagacccugaacaugugcaugccccugagcugcaccaagaacagcagccaccacuacaucagagugggcaacgagaccggccuggagcugacccugaccaacaccagcaucaucaaccacaaguucugcaaccugagcgacgcccacaagaagaaccuguacgaccacgcccugaugagcaucaucagcaccuuccaccugagcauccccaacuucaaccaguacgaggccaugagcugcgacuucaacggcggcaagaucagcgugcaguacaaccugagccacagcuacgccggcgacgccgccgagcacugcggcaccguggccaacggcgugcugcagaccuucaugagaauggccuggggcggcagauacaucgcccuggacagcggcaagggcaacugggacugcaucaugaccagcuaccaguaccugaucauccagaacaccaccugggaggaccacugccaguucagcagacccagccccaucggcuaccugggccugcugagccagagaaccagagacaucuacaucagcagaagacugcugggcaccuucaccuggacccugagcgacagcgagggcaacgagacccccggcggcuacugccugaccagauggaugcugaucgaggccgagcugaagugcuucggcaacaccgccguggccaagugcaacgagaagcacgacgaggaguucugcgacaugcugagacuguucgacuucugcaagcaggccaucagaagacugaaggcccccgcccagaugagcauccagcugaucaacaaggccgugaacgcccugaucaacgaccagcugaucaugaagaaccaccugagagacaucaugggcauccccuacugcaacuacagcaaguacugguaccugaaccacaccagcagcggcagaaccagccugcccaagugcuggcugaucagcaacggcagcuaccugaacgagacccaguucagcgacgacaucgagcagcaggccgacaacaugaucaccgagaugcugcagaaggaguacaucgagagacagggcaagaccccccugggccugguggacaucuucaucuucagcaccagcuucuaccugaucagcaucuuccugcaccugaucaagauccccacccacagacacaucgugggcaagcccugccccaagccccacagacugaaccacaugggcgugugcagcugcggccuguacaagcaccccggcgugcccaccaaguggaagagaugaggacuagucccuguucccagagcccacuuuuuuuucuuuuuuugaaauaaaauagccugucuuucagaucucaaaggcucuuuucagagccaccaaaaaaaaaaaaaaaaaaaaaaaaaaaaaaaaaaaaaaaaaaaaaaaaaaaaaaaaaaaaaaaaagaauu

SEQ ID NO: 29959 - RNA, 1714 nt, Artificial Sequence
  mRNA product Design a-1 (hSL-A64-N5) comprising derived and/or modified sequence from LASV(803213;Clade II)__AAF86703__GPCmut6 (opt4)
aggagagucccgcagucggcguccagcggcucugcuuguucgugugugugucguugcaggccuuauucaagcuuaccaugggccagaucaucaccuucuuccaggaggugccccacgugaucgaggaggugaugaacaucgugcugaucgcccugagccugcuggccauccugaagggcaucuacaacguggccaccugcggccuguucggccugaucagcuuccugcugcugugcggcagaagcugcagcgugaccuacaagggcguguacgagcugcagacccuggagcugaacauggccaaccugaacaugugcaugccccugagcugcaccaagaacaacagccaccacuacaucauggugggcaacgagaccggccuggagcugacccugaccaacaccagcaucaucaaccacaaguucugcaaccugagcgacgcccacaagaagaaccuguacgaccacgcccugaugagcaucaucagcaccuuccaccugagcauccccaacuucaaccaguacgaggccaugagcugcgacuucaacggcggcaagaucagcgugcaguacaaccugagccacagcuucgccguggacgccgccaaccacugcggcaccaucgccaacggcgugcugcagaccuucaugagaauggccuggggcggcagcuacaucgcccuggacagcggcaagggcaacugggacugcaucaugaccagcuaccaguaccugaucauccagaacaccaccugggaggaccacugccaguucagcagacccagccccaucggcuaccugggccugcugagccagagaaccagagacaucuacaucagcagaagacugcugggcaccuucaccuggacccugagcgacagcgagggcaacgaggcccccggcggcuacugccugaccagauggaugcugaucgaggccgagcugaagugcuucggcaacaccgccguggccaagugcaacgagaagcacgacgaggaguucugcgacaugcugagacuguucgacuucugcaagcaggccaucaagagacugaagacccccgcccagaugagcauccagcugaucaacaaggccgugaacgcccugaucaacgaccagcugaucaugaagaaccaccugagagacaucaugggcauccccuacugcaacuacagcagauacugguaccugaaccacaccgugaccggcaagaccagccugcccagaugcuggcuggugagcaacggcagcuaccugaacgagacccacuucagcgacgacaucgagcagcaggccgacaacaugaucaccgagaugcugcagaaggaguacauggacagacagggcaagaccccccugggccugguggaccuguucguguucagcaccagcuucuaccugaucagcaucuuccugcaccuggugaagauccccacccacagacacaucgugggcaagcccugccccaagccccacagacugaaccacaugggcaucugcagcugcggccuguacaagcaccccggcgugcccgugaaguggaagagaugaggacuagucccuguucccagagcccacuuuuuuuucuuuuuuugaaauaaaauagccugucuuucagaucucaaaggcucuuuucagagccaccaaaaaaaaaaaaaaaaaaaaaaaaaaaaaaaaaaaaaaaaaaaaaaaaaaaaaaaaaaaaaaaaagaauu

SEQ ID NO: 29960 - RNA, 1714 nt, Artificial Sequence
  mRNA product Design a-1 (hSL-A64-N5) comprising derived and/or modified sequence from LASV(GA391;Clade III)__CAA36645__GPCmut6 (opt4)
aggagagucccgcagucggcguccagcggcucugcuuguucgugugugugucguugcaggccuuauucaagcuuaccaugggccagaucgugaccuucuuccaggaggugccccacgugaucgaggaggugaugaacaucgugcugaucgcccugagcauccuggccauccugaagggccuguacaacguggccaccugcggccugaucggccuggugaccuuccugcugcugagcggcagaagcugcagccugaucuacaagggcaccuacgagcugcagacccuggagcugaacauggagacccugaacaugugcaugccccugagcugcaccaagaacaacagccaccacuacaucagagugggcaacgagaccggccuggagcugacccugaccaacaccagcauccugaaccacaaguucugcaaccugagcgacgcccacaagagaaaccuguacgaccacagccugaugagcaucaucagcaccuuccaccugagcauccccaacuucaaccaguacgaggccaugagcugcgacuucaacggcggcaagaucaccgugcaguacaaccugagccacagcuucgccguggacgccgccggccacugcggcacccuggccaacggcgugcugcagaccuucaugagaauggccuggggcggcagcuacaucgcccuggacagcggcagaggcaacugggacugcaucaugaccagcuaccaguaccugaucauccagaacaccaccugggacgaccacugccaguucagcagacccagccccaucggcuaccugggccugcugagccagagaaccagagacaucuacaucagcagaagacugcugggcaccuucaccuggacccugagcgacagcgagggcaacgagacccccggcggcuacugccugaccagauggaugcugaucgaggccgagcugaagugcuucggcaacaccgccguggccaagugcaacgagaagcacgacgaggaguucugcgacaugcugagacuguucgacuucugcaagcaggccaucagaagacugaagacccccgcccagaugagcauccagcugaucaacaaggccgugaacgcccugaucaacgaccagcugaucaugaagaaccaccugagagacaucaugggcauccccuacugcaacuacagcagauacugguaccugaaccacaccagcaccggcaagaccagccugcccagaugcuggcugaucagcaacggcagcuaccugaacgagaccaaguucagcgacgacaucgagcagcaggccgacaacaugaucaccgagaugcugcagaaggaguacaucgacagacagggcaagaccccccugggccugguggaccuguucguguucagcaccagcuucuaccugaucagcaucuuccugcaccuggugaagauccccacccacagacacaucgugggcaagcccugccccaagccccacagacugaaccacaugggcaucugcagcugcggccuguacaagcagcccggcgugcccgugagauggaagagaugaggacuagucccuguucccagagcccacuuuuuuuucuuuuuuugaaauaaaauagccugucuuucagaucucaaaggcucuuuucagagccaccaaaaaaaaaaaaaaaaaaaaaaaaaaaaaaaaaaaaaaaaaaaaaaaaaaaaaaaaaaaaaaaaagaauu

SEQ ID NO: 29961 - RNA, 1717 nt, Artificial Sequence
  mRNA product Design a-1 (hSL-A64-N5) comprising derived and/or modified sequence from LASV(AV;Clade V)__CCA30314__GPCmut6 (opt4)
aggagagucccgcagucggcguccagcggcucugcuuguucgugugugugucguugcaggccuuauucaagcuuaccaugggccagaucgugaccuucuuccaggaggugccccacgugaucgaggaggugaugaacaucgugcugaucgcccugagcauccuggccgugcugaagggccuguacaacaucgccaccugcggccugaucggccugaucaccuuccugcugcugugcggcagaagcugcagcagcaaccuguacaagggcguguacgagcugcagagccuggaccugaacauggagacccugaacaugugcaugccccugagcugcaccaagaacaacagccaccacuacaucagagugggcaacgacaccggccuggagcugacccugaccaacaccagcauccugaaccacaaguucugcaaccugagcgacgcccacaagaaggaccuguacgaccacgcccugaugagcaucaucagcaccuuccaccugagcauccccaacuucaaccaguacgaggccaugagcugcgacuucaacggcggcaagaucagcgugcaguacaaccugagccacagcuacgccaucgacgccgccaaccacugcggcaccguggccaacggcauccugcagaccuucaugagaauggccuggggcggcagcuacaucgcccuggacagcggcagaggcaacugggacugcaucaugaccagcuaccaguaccugaucauccagaacaccaccugggagaaccacugccaguucagcagacccagccccaucggcuaccugggccugcugagccagagaaccagagacaucuacaucagcagaagacugcugggcaccuucaccuggacccugagcgacagcgagggcaacgccacccccggcggcuacugccugaccagauggaugcugaucgaggccgagcugaagugcuucggcaacaccgccguggccaagugcaacgagaagcacgacgaggaguucugcgacaugcugagacuguucgacuucugcaagcaggccaucagcagacugaagagccccgcccagaugagcauccagcugaucaacaaggccgugaacgcccugaucaacgaccagcugaucaugaagaaccaccugagagacaucaugggcauccccuacugcaacuacagcaaguacugguaccugaaccacaccaucaccggcaagaccagccugcccaagugcuggcuggugagcaacggcagcuaccugaacgagacccacuucagcgacgacaucgagcagcaggccgacaacaugaucaccgagaugcugcagaaggaguacauggagagacagggcaagaccccccugggccugguggaccuguucguguucagcaccagcuucuaccugaucagcaucuuccugagacuggugaagauccccacccacagacacaucgugggcaagcccugccccaagccccacagacugaaccacaugggcaucugcagcugcggccuguacaagcagcccggcgugcccgugagauggaagagaugaggacuagucccuguucccagagcccacuuuuuuuucuuuuuuugaaauaaaauagccugucuuucagaucucaaaggcucuuuucagagccaccaaaaaaaaaaaaaaaaaaaaaaaaaaaaaaaaaaaaaaaaaaaaaaaaaaaaaaaaaaaaaaaaagaauu

SEQ ID NO: 29962 - RNA, 1714 nt, Artificial Sequence
  mRNA product Design a-1 (hSL-A64-N5) comprising derived and/or modified sequence from LASV(Togo/2016/7082;Clade VI)__AMR44577__GPCmut6 (opt4)
aggagagucccgcagucggcguccagcggcucugcuuguucgugugugugucguugcaggccuuauucaagcuuaccaugggccagaucaucaccuucuuccaggaggugccccacgugaucgaggaggugaugaacaucgugcugaucgcccugagccugcuggccauccugaagggcguguacaacguggccaccugcggcaucaucggccuggugaccuuccuguuccugugcggcagaagcugcagccugaucuacaagggcagcuacgagcugcagacccuggagcugaacauggagacccugaacaugugcaugccccugagcugcaccaagaacagcagccaccacuacaucagagugggcaacgagaccggccuggagcugacccugaccaacaccagcaucaucaaccacaaguucugcaaccugagcgacgcccacaagagaaaccuguacgaccacgcccugaugagcauccugagcaccuuccaccugagcauccccaacuucaaccaguacgaggccaugagcugcgacuucaacggcggcaagaucagcgugcaguacaaccugagccacgccuacgccguggacgccgccgagcacugcggcaccguggccaacggcgugcugcagaccuucaugagaauggccuggggcggcagcuacaucgcccuggacagcggcagaggcaacugggacugcaucaugaccagcuaccaguaccugaucauccagaacaccaccugggaggaccacugccaguucagcagacccagccccaucggcuaccugggccugcugagccagagaaccagagacaucuacaucagcagaagacugcugggcaccuucaccuggacccugagcgacagcgagggcaacgagacccccggcggcuacugccugaccagauggaugcugaucgaggccgagcugaagugcuucggcaacaccgccguggccaagugcaacgagaagcacgacgaggaguucugcgacaugcugagacuguucgacuucugcaagcaggccauccagagacugaagagccccgcccagaugagcauccagcugaucaacaaggccgugaacgcccugaucaacgaccagcugaucaugaagaaccaccugagagacaugaugggcauccccuacugcaacuacagcaaguacugguaccugaaccacaccagcagcggcagaaccagccugcccaagugcuggcuggugagcaacggcagcuaccugaacgagacccacuucagcgacgacaucgagcagcaggccgacaacaugaucaccgagaugcugcagaaggaguacaucgacagacagggcaagaccccccugggccugguggaccuguucguguucagcaccagcuucuaccugaucagcaucuuccugcaccugaucaagauccccacccacagacacaucgugggcaagcccugccccaagccccacagacugaaccacaugggcaucugcagcugcggccuguacaagcagcccggcgugcccaccagauggaagagaugaggacuagucccuguucccagagcccacuuuuuuuucuuuuuuugaaauaaaauagccugucuuucagaucucaaaggcucuuuucagagccaccaaaaaaaaaaaaaaaaaaaaaaaaaaaaaaaaaaaaaaaaaaaaaaaaaaaaaaaaaaaaaaaaagaauu

SEQ ID NO: 29963 - RNA, 1714 nt, Artificial Sequence
  mRNA product Design a-1 (hSL-A64-N5) comprising derived and/or modified sequence from LASV(KAK-428;Clade n.d. (VII))__ANH09740__GPCmut6 (opt4)
aggagagucccgcagucggcguccagcggcucugcuuguucgugugugugucguugcaggccuuauucaagcuuaccaugggccagaucgugaccuucuuccaggaggugccccacgugaucgaggaggugaugaacaucgugcugaucgcccugagccugcuggccauccugaagggccuguacaacuucgccaccugcggcgugaucggccugaucaccuuccugcugcugugcggcagaagcugcagcgccaccuacaagggccaguacgagcugcagacccuggagcugaacauggagagccugaacaugugcaugccccugagcugcaccaagaacaacagccaccacuacaucagagccggcaacaacaccggccuggagcugacccugaccaacaccagcaucaucagccacaaguucugcaaccugagcgacgcccacaagaagaaccuguacgaccacacccugaugagcaucaucaccaccuuccaccugagcauccccaacuucaaccaguacgaggccaugagcugcgacuucaacggcggcaagaucagcauccaguacaaccugagccacagcuacgccggcgacgccgcccagcacugcggcaccguggccaacggcgugcugcagaccuucaugagaauggccuggggcggcagcuaccuggcccuggacagcggcagaagaggcugggacugcaucaucagcagcuaccaguaccugaucauccagaacaccaccugggacgaccacugccaguucagcagacccagccccaucggcuaccugggcuucgugagccagaagaccagagacaucuacaucagcagaagacugcugggcaccuucaccuggacccugagcgacagcgagggccacgacaugcccggcggcuacugccugaccagauggaugcugaucgaggccgaccugaagugcuucggcaacaccgccguggccaagugcaacgagaagcacgacgaggaguucugcgacauguggagacuguucgacuucugcaagcaggccauccagagacugaaggcccccgcccagaugaacauccagcugaucaacaaggccgugaacgcccugaucaacgaccagcugaugaugaagaaccaccugagagacaucaugggcauccccuacugcaacuacagcaaguucugguaccugaacaacaccaccaccggcagaaccagccugcccagaugcuggcugaucagcaacggcagcuaccugaacgagacccacuucagcgacgacaucgagcagcaggccgacaacaugaucaccgagaugcugcagaaggaguacauggacagacagggcaagaccccccugggccugguggaccuguucguguucagcaccagcuucuaccugaucaccaucuuccugcaccuggugaagauccccacccacagacacaucgugggcaagcccugccccaagccccacagacugaaccacaugggcaucugcagcugcggccuguacaagcagcccggcgugcccgugagauggaagagaugaggacuagucccuguucccagagcccacuuuuuuuucuuuuuuugaaauaaaauagccugucuuucagaucucaaaggcucuuuucagagccaccaaaaaaaaaaaaaaaaaaaaaaaaaaaaaaaaaaaaaaaaaaaaaaaaaaaaaaaaaaaaaaaaagaauu

SEQ ID NO: 29964 - RNA, 1714 nt, Artificial Sequence; identical to SEQ ID NO: 29958
  mRNA product Design a-1 (hSL-A64-N5) comprising derived and/or modified sequence from LASV(Pinneo-NIG-1969;Clade I)__AIT17836__GPCmut6 (opt4)

SEQ ID NO: 29965 - RNA, 1714 nt, Artificial Sequence
  mRNA product Design a-1 (hSL-A64-N5) comprising derived and/or modified sequence from LASV(ISTH0009-NIG-2011;Clade II)__AIT17404__GPCmut6 (opt4)
aggagagucccgcagucggcguccagcggcucugcuuguucgugugugugucguugcaggccuuauucaagcuuaccaugggccagaucaucaccuucuuccaggaggugccccacgugaucgaggaggugaugaacaucgugcugaucgcccugagccugcuggccauccugaagggcaucuacaacguggccaccugcggccuguucggccuggugagcuuccugcugcugugcggcagaagcugcagcaccaccuacaagggcguguacgagcugcagacccuggagcuggacauggccagccugaacaugugcaugccccugagcugcaccaagaacaacagccaccacuacaucauggugggcaacgagaccggccuggagcugacccugaccaacaccagcaucaucaaccacaaguucugcaaccugagcgacgcccacaagaagaaccuguacgaccacgcccugaugagcaucaucagcaccuuccaccugagcauccccaacuucaaccaguacgaggccaugagcugcgacuucaacggcggcaagaucagcgugcaguacaaccugagccacgccuacgccguggacgccgccaaccacugcggcaccaucgccaacggcgugcugcagaccuucaugagaauggccuggggcggcagcuacaucgcccuggacagcggcaagggcagcugggacugcaucaugaccagcuaccaguaccugaucauccagaacaccaccugggaggaccacugccaguucagcagacccagccccaucggcuaccugggccugcugagccagagaaccagagacaucuacaucagcagaagacugcugggcaccuucaccuggacccugagcgacagcgagggcaacgagacccccggcggcuacugccugaccagauggaugcugaucgaggccgagcugaagugcuucggcaacaccgccguggccaagugcaacgagaagcacgacgaggaguucugcgacaugcugagacuguucgacuucugcaagcaggccaucagaagacugaagacccccgcccagaugagcauccagcugaucaacaaggccgugaacgcccugaucaacgaccagcugaucaugaagaaccaccugagagacaucaugggcauccccuacugcaacuacagcaaguacugguaccugaaccacaccgugaccggcaagaccagccugcccagaugcuggcuggugagcaacggcagcuaccugaacgagacccacuucagcgacgacaucgagcagcaggccgacaacaugaucaccgagcugcugcagaaggaguacauggacagacagggcaagaccccccugggccugguggaccuguucguguucagcaccagcuucuaccugaucagcaucuuccugcaccugaucaagauccccacccacagacacaucaccggcaagcccugccccaagccccacagacugaaccacaugggcaucugcagcugcggccuguacaagcaccccggcgugcccgugaaguggaagagaugaggacuagucccuguucccagagcccacuuuuuuuucuuuuuuugaaauaaaauagccugucuuucagaucucaaaggcucuuuucagagccaccaaaaaaaaaaaaaaaaaaaaaaaaaaaaaaaaaaaaaaaaaaaaaaaaaaaaaaaaaaaaaaaaagaauu

SEQ ID NO: 29966 - RNA, 1714 nt, Artificial Sequence
  mRNA product Design a-1 (hSL-A64-N5) comprising derived and/or modified sequence from LASV(ISTH2010-NIG-2012;Clade II)__AIT17482__GPCmut6 (opt4)
aggagagucccgcagucggcguccagcggcucugcuuguucgugugugugucguugcaggccuuauucaagcuuaccaugggccagaucaucaccuucuuccaggaggugccccacgugaucgaggaggugaugaacaucgugcugaucgcccugagccugcuggccauccugaagggcaucuacaacguggccaccugcggccuguucggccuggugagcuuccugcugcugugcggcagaagcugcagcaccaccuacaagggcguguacgagcugcagacccuggagcuggacauggccagccugaacaugugcaugccccugagcugcaccaagaacaacagccaccacuacaucauggugggcaacgagaccggccuggagcugacccugaccaacaccagcaucaucaaccacaaguucugcaaccugagcgacgcccacaagaagaaccuguacgaccacgcccugaugagcaucaucagcaccuuccaccugagcauccccaacuucaaccaguacgaggccaugagcugcgacuucaacggcggcaagaucagcgugcaguacaaccugagccacgccuacgccguggacgccgccaaccacugcggcaccaucgccaacggcgugcugcagaccuucaugagaauggccuggggcggcagcuacaucgcccuggacagcggcaagggcagcugggacugcaucaugaccagcuaccaguaccugaucauccagaacaucaccugggaggaccacugccaguucagcagacccagccccaucggcuaccugggccugcugagccagagaaccagagacaucuacaucagcagaagacugcugggcaccuucaccuggacccugagcgacagcgagggcaacgagacccccggcggcuacugccugaccagauggaugcugaucgaggccgagcugaagugcuucggcaacaccgccguggccaagugcaacgagaagcacgacgaggaguucugcgacaugcugagacuguucgacuucugcaagcaggccaucagaagacugaagacccccgcccagaugagcauccagcugaucaacaaggccgugaacgcccugaucaacgaccagcugaucaugaagaaccaccugagagacaucaugggcauccccuacugcaacuacagcaaguacugguaccugaaccacaccgugaccggcaagaccagccugcccagaugcuggcuggugagcaacggcagcuaccugaacgagacccacuucagcgacgacaucgagcagcaggccgacaacaugaucaccgagcugcugcagaaggaguacaucgacagacagggcaagaccccccugggccugguggaccuguucguguucagcaccagcuucuaccugaucagcaucuuccugcaccuggugaagauccccacccacagacacguggugggcaagcccugccccaagccccacagacugaaccacaugggcaucugcagcugcggccuguacaagcaccccggcgugcccgugaaguggaagagaugaggacuagucccuguucccagagcccacuuuuuuuucuuuuuuugaaauaaaauagccugucuuucagaucucaaaggcucuuuucagagccaccaaaaaaaaaaaaaaaaaaaaaaaaaaaaaaaaaaaaaaaaaaaaaaaaaaaaaaaaaaaaaaaaagaauu

SEQ ID NO: 29967 - RNA, 1714 nt, Artificial Sequence
  mRNA product Design a-1 (hSL-A64-N5) comprising derived and/or modified sequence from LASV(Lassa virus/H.sapiens-wt/NGA/2015/ISTH_0543;Clade II)__AVO03639__GPCmut6 (opt4)
aggagagucccgcagucggcguccagcggcucugcuuguucgugugugugucguugcaggccuuauucaagcuuaccaugggccagaucaucaccuucuuccaggaggugccccacgugaucgaggaggugaugaacaucgugcugaucgcccugagccugcuggccauccugaagggcaucuacaacguggccaccugcggccuguucggccuggugagcuuccugcugcugugcggcagaagcugcagcaccaccuacaagggcguguacgagcugcagacccuggagcuggacauggccaaccugaacaugugcaugccccugagcugcaccaagaacaacagccaccacuacaucauggugggcaacgagaccggccuggagcugacccugaccaacaccagcaucaucaaccacaaguucugcaaccugagcgacgcccacaagaagaaccuguacgaccacgcccugaugagcaucaucagcaccuuccaccugagcauccccaacuucaaccaguacgaggccaugagcugcgacuucaacggcggcaagaucagcgugcaguacaaccugagccacaccuacgccguggacgccgccaaccacugcggcaccaucgccaacggcgugcugcagaccuucaugagaauggccuggggcggcagcuacaucgcccuggacagcggcaagggcagcugggacugcaucaugaccagcuaccaguaccuggugauccagaacaccaccugggaggaccacugccaguucagcagacccagccccaucggcuaccugggccugcugagccagagaaccagagacaucuacaucagcagaagacugcugggcaccuucaccuggacccugagcgacagcgagggcaacgagacccccggcggcuacugccugaccagauggaugcugaucgaggccgagcugaagugcuucggcaacaccgccguggccaagugcaacgagaagcacgacgaggaguucugcgacaugcugagacuguucgacuucugcaagcaggccaucagaagacugaagacccccgcccagaugagcauccagcugaucaacaaggccgugaacgcccugaucaacgaccagcugaucaugaagaaccaccugagagacaucaugggcauccccuacugcaacuacagcaaguacugguaccugaaccacaccgugaccggcaagaccagccugcccagaugcuggcuggugagcaacggcagcuaccugaacgagacccacuucagcgacgacaucgagcagcaggccgacaacaugaucaccgagcugcugcagaaggaguacaucgacagacagggcaagaccccccugggccugguggaccuguucguguucagcaccagcuucuaccugaucagcaucuuccugcaccuggugaagauccccacccacagacacaucaccggcaagcccugccccaagccccacagacugaaccacaugggcaucugcagcugcggccuguacaagcaccccggcgugcccgugaaguggaagagaugaggacuagucccuguucccagagcccacuuuuuuuucuuuuuuugaaauaaaauagccugucuuucagaucucaaaggcucuuuucagagccaccaaaaaaaaaaaaaaaaaaaaaaaaaaaaaaaaaaaaaaaaaaaaaaaaaaaaaaaaaaaaaaaaagaauu

SEQ ID NO: 29968 - RNA, 1714 nt, Artificial Sequence
  mRNA product Design a-1 (hSL-A64-N5) comprising derived and/or modified sequence from LASV(Lassa virus/H.sapiens-wt/NGA/2016/ISTH_0009;Clade II)__AVO03571__GPCmut6 (opt4)
aggagagucccgcagucggcguccagcggcucugcuuguucgugugugugucguugcaggccuuauucaagcuuaccaugggccagaucaucaccuucuuccaggaggugccccacgugaucgaggaggugaugaacaucgugcugaucgcccugagccugcuggccauccugaagggcaucuacaacguggccaccugcggccugcugggccuggugagcuuccugcugcugugcggcagaagcugcagcaccaccuacaagggcguguacgagcugcagacccuggagcuggacauggccagccugaacaugugcaugccccugagcugcaccaagaacaacagccaccacuacaucauggugggcaacgagaccggccuggagcugacccugaccaacaccagcaucaucaaccacaaguucugcaaccugagcgacgcccacaagaagaaccuguacgaccacgcccugaugagcaucaucagcaccuuccaccugagcauccccaacuucaaccaguacgaggccaugagcugcgacuucaacggcggcagaaucagcgugcaguacaaccugagccacagcuacgccguggacgccgccaaccacugcggcaccaucgccaacggcgugcugcagaccuucaugagaauggccuggggcggcagcuacaucgcccuggacagcggcaagggcagcugggacugcaucaugaccagcuaccaguaccugaucauccagaacaccaccugggaggaccacugccaguucagcagacccagccccaucggcuaccugggccugcugagccagagaaccagagacaucuacaucagcagaagacugcugggcaccuucaccuggacccugagcgacagcgagggcaacgagacccccggcggcuacugccugaccagauggaugcugaucgaggccgagcugaagugcuucggcaacaccgccguggccaagugcaacgagaagcacgacgaggaguucugcgacaugcugagacuguucgacuucugcaagcaggccaucagaagacugaagacccccgcccagaugagcauccagcugaucaacaaggccgugaacgcccugaucaacgaccagcugaucaugaagaaccaccugagagacaucaugggcauccccuacugcaacuacagcaaguacugguaccugaaccacaccgugaccggcaagaccagccugcccagaugcuggcuggugagcaacggcagcuaccugaacgagacccacuucagcgacgacaucgagcagcaggccgacaacaugaucaccgagcugcugcagaaggaguacaucgacagacagggcaagaccccccugggccugguggaccuguucguguucagcaccagcuucuaccugaucagcaucuuccugcaccuggugaagauccccacccacagacacaucaccggcaagcccugccccaagccccacagacugaaccacaugggcaucugcagcugcggccuguacaaccaccccggcgugcccgugaaguggaagagaugaggacuagucccuguucccagagcccacuuuuuuuucuuuuuuugaaauaaaauagccugucuuucagaucucaaaggcucuuuucagagccaccaaaaaaaaaaaaaaaaaaaaaaaaaaaaaaaaaaaaaaaaaaaaaaaaaaaaaaaaaaaaaaaaagaauu

SEQ ID NO: 29969 - RNA, 1714 nt, Artificial Sequence
  mRNA product Design a-1 (hSL-A64-N5) comprising derived and/or modified sequence from LASV(Lassa virus/H.sapiens-wt/NGA/2016/ISTH_0017;Clade II)__AVO03567__GPCmut6 (opt4)
aggagagucccgcagucggcguccagcggcucugcuuguucgugugugugucguugcaggccuuauucaagcuuaccaugggccagaucaucaccuucuuccaggaggugccccacgugaucgaggaggugaugaacaucgugcugaucgcccugagccugcuggccauccugaagggcaucuacaacguggccaccugcggccuguucggccuggugagcuuccugcugcugugcggcagaagcugcagcaccaccuacaagggcguguacgagcugcagacccuggagcuggacauggccagccugaacaugugcaugccccugagcugcaccaagaacaacagccaccacuacaucauggugggcaacgagaccggccuggagcugacccugaccaacaccagcaucaucaaccacaaguucugcaaccugagcgacgcccacaagaagaaccuguacgaccacgcccugaugagcaucaucagcaccuuccaccugagcauccccaacuucaaccaguacgaggccaugagcugcgacuucaacggcggcaagaucagcgugcaguacaaccugagccacaccuacgccaucgacgccgccaaccacugcggcaccaucgccaacggcgugcugcagaccuucaugagaauggccuggggcggcagcuacaucgcccuggacagcggcaagggcagcugggacugcaucaugaccagcuaccaguaccugaucauccagaacaccaccugggaggaccacugccaguucagcagacccagccccaucggcuaccugggccugcugagccagagaaccagagacaucuacaucagcagaagacugcugggcaccuucaccuggacccugagcgacagcgagggcaacgagacccccggcggcuacugccugaccagauggaugcugaucgaggccgagcugaagugcuucggcaacaccgccguggccaagugcaacgagaagcacgacgaggaguucugcgacaugcugagacuguucgacuucugcaagcaggccaucagaagacugaagacccccgcccagaugagcauccagcugaucaacaaggccgugaacgcccugaucaacgaccagcugaucaugaagaaccaccugagagacaucaugggcauccccuacugcaacuacagcaaguacugguaccugaaccacaccgugaccggcaagaccagccugcccagaugcuggcuggugagcaacggcagcuaccugaacgagacccacuucagcgacgacaucgagcagcaggccgacaacaugaucaccgagcugcugcagaaggaguacauggacagacagggcaagaccccccugggccugguggaccuguucguguucagcaccagcuucuaccugaucagcaucuuccugcaccuggugagaauccccacccacagacacgugaucggcaagcccugccccaagccccacagacugaaccacaugggcaucugcagcugcggccuguacaagcaccccggcgugcccgugaaguggaagagaugaggacuagucccuguucccagagcccacuuuuuuuucuuuuuuugaaauaaaauagccugucuuucagaucucaaaggcucuuuucagagccaccaaaaaaaaaaaaaaaaaaaaaaaaaaaaaaaaaaaaaaaaaaaaaaaaaaaaaaaaaaaaaaaaagaauu

SEQ ID NO: 29970 - RNA, 1714 nt, Artificial Sequence
  mRNA product Design a-1 (hSL-A64-N5) comprising derived and/or modified sequence from LASV(Lassa virus/H.sapiens-wt/NGA/2018/ISTH_0959;Clade II)__AVV65099__GPCmut6 (opt4)
aggagagucccgcagucggcguccagcggcucugcuuguucgugugugugucguugcaggccuuauucaagcuuaccaugggccagaucaucaccuucuuccaggaggugccccacgugaucgaggaggugaugaacaucgugcugaucgcccugagccugcuggccauccugaagggcaucuacaacguggugaccugcggccuguucggccuggugagcuuccugcugcugugcggcagaagcugcagcaccaccuacaagggcguguacgagcugcagacccuggagcuggacauggccagccugaacaugugcaugccccugagcugcaccaagaacaacagccaccacuacaucauggugggcaacgagaccggccuggagcugacccugaccaacaccagcaucaucaaccacaaguucugcaaccugagcgacgcccacaagaagaaccuguacgaccacgcccugaugagcaucaucagcaccuuccaccugagcauccccaacuucaaccaguacgaggccaugagcugcgacuucaacggcggcaagaucagcgugcaguacaaccugagccacgccuacgccaucgacgccgccaaccacugcggcaccaucgccaacggcgugcugcagaccuucaugagaauggccuggggcggcagcuacaucgcccuggacagcggcaagggcagcugggacugcaucaugaccagcuaccaguaccugaucauccagaacaccaccugggaggaccacugccaguucagcagacccagccccaucggcuaccugggccugcugagccagagaaccagagacaucuacaucagcagaagacugcugggcaccuucaccuggacccugagcgacagcgagggcaacgagacccccggcggcuacugccugaccagauggaugcugaucgaggccgagcugaagugcuucggcaacaccgccguggccaagugcaacgagaagcacgacgaggaguucugcgacaugcugagacuguucgacuucugcaagcaggccaucagaagacugaagacccccgcccagaugagcauccagcugaucaacaaggccgugaacgcccugaucaacgaccagcugaucaugaagaaccaccugagagacaucaugggcauccccuacugcaacuacagcaaguacugguaccugaaccacaccgugaccggcaagaccagccugcccagaugcuggcuggugagcaacggcagcuaccugaacgagacccacuucagcgacgacaucgagcagcaggccgacaacaugaucaccgagcugcugcagaaggaguacaucgacagacagggcaagaccccccugggccugguggaccuguucguguucagcaccagcuucuaccugaucagcaucuuccugcaccuggugaagauccccacccacagacacgugaucggcaagcccugccccaagccccacagacugaaccacaugggcaucugcagcugcggccuguacaagcaccccggcgugcccgugaaguggaagagaugaggacuagucccuguucccagagcccacuuuuuuuucuuuuuuugaaauaaaauagccugucuuucagaucucaaaggcucuuuucagagccaccaaaaaaaaaaaaaaaaaaaaaaaaaaaaaaaaaaaaaaaaaaaaaaaaaaaaaaaaaaaaaaaaagaauu

SEQ ID NO: 29971 - RNA, 1714 nt, Artificial Sequence
  mRNA product Design a-1 (hSL-A64-N5) comprising derived and/or modified sequence from LASV(LASV003-NIG-2008;Clade II)__AIT17580__GPCmut6 (opt4)
aggagagucccgcagucggcguccagcggcucugcuuguucgugugugugucguugcaggccuuauucaagcuuaccaugggccagaucaucaccuucuuccaggaggugccccacgugaucgaggaggugaugaacaucgugcugaucgcccugagccugcuggccauccugaagggcaucuacaacguggccaccugcggccuguucggccuggugagcuuccugcugcugugcggcagaagcugcagcaccaccuacaagggcguguacgagcugcagacccuggagcuggacauggccagccugaacaugugcaugccccugagcugcaccaagaacaacagccaccacuacaucauggugggcaacgagaccggccuggagcugacccugaccaacaccagcaucaucaaccacaaguucugcaaccugagcgacgcccacaagaagaaccuguacgaccacgcccugaugagcaucaucagcaccuuccaccugagcauccccaacuucaaccaguacgaggccaugagcugcgacuucaacggcggcaagaucagcgugcaguacaaccugagccacaccuacgccguggacgccgccaaccacugcggcaccaucgccaacggcgugcugcagaccuucaugagaauggccuggggcggcagcuacaucgcccuggacagcggcaagggcagcugggacugcaucaugaccagcuaccaguaccugaucauccagaacaccaccugggaggaccacugccaguucagcagacccagccccaucggcuaccugggccugcugagccagagaaccagagacaucuacaucagcagaagacugcugggcaccuucaccuggacccugagcgacagcgagagcaacgagacccccggcggcuacugccugaccagauggaugcugaucgaggccgagcugaagugcuucggcaacaccgccguggccaagugcaacgagaagcacgacgaggaguucugcgacaugcugagacuguucgacuucugcaagcaggccaucagaagacugaaggcccccgcccagaugagcauccagcugaucaacaaggccgugaacgcccugaucaacgaccagcugaucaugaagaaccaccugagagacaucaugggcauccccuacugcaacuacagcaaguacugguaccugaaccacaccgugaccggcagaaccagccugcccagaugcuggcuggugagcaacggcagcuaccugaacgagacccacuucagcgacgacaucgagcagcaggccgacaacaugaucaccgagcugcugcagaaggaguacauggacagacagggcaagaccccccugggccugguggaccuguucguguucagcaccagcuucuaccugaucagcaucuuccugcaccuggugaagauccccacccacagacacgugaucggcaagcccugccccaagccccacagacugaaccacaugggcaucugcagcugcggccuguacaagcaccccggcgugcccgugaaguggaagagaugaggacuagucccuguucccagagcccacuuuuuuuucuuuuuuugaaauaaaauagccugucuuucagaucucaaaggcucuuuucagagccaccaaaaaaaaaaaaaaaaaaaaaaaaaaaaaaaaaaaaaaaaaaaaaaaaaaaaaaaaaaaaaaaaagaauu

SEQ ID NO: 29972 - RNA, 1714 nt, Artificial Sequence
  mRNA product Design a-1 (hSL-A64-N5) comprising derived and/or modified sequence from LASV(LASV035-NIG-2009;Clade II)__AIT17588__GPCmut6 (opt4)
aggagagucccgcagucggcguccagcggcucugcuuguucgugugugugucguugcaggccuuauucaagcuuaccaugggccagaucaucaccuucuuccaggaggugccccacgugaucgaggaggugaugaacaucgugcugaucgcccugagccugcuggccauccugaagggcaucuacaacguggccaccugcggccuguucggccuggugagcuuccugcugcugugcggcagaagcugcagcaccaccuacaagggcguguacgagcugcagacccuggagcuggacauggccagccugaacaugugcaugccccugagcugcaccaagaacaacagccaccacuacaucauggugggcaacgagaccggccuggagcugacccugaccaacaccagcaucaucaaccacaaguucugcaaccugagcgacgcccacaagaagaaccuguacgaccacgcccugaugagcaucaucagcaccuuccaccugagcauccccaacuucaaccaguacgaggccaugagcugcgacuucaacggcggcaagaucagcgugcaguacaaccugagccacgccuacgccguggacgccgccaaccacugcggcaccaucgccaacggcgugcugcagaccuucaugagaauggccuggggcggcagcuacaucgcccuggacagcggcaagggcagcugggacugcaucaugaccagcuaccaguaccugaucauccagaacaccaccugggaggaccacugccaguucagcagacccagccccaucggcuaccugggccugcugagccagagaaccagagacaucuacaucagcagaagacugcugggcaccuucaccuggacccugagcgacagcgagggcaacgagacccccggcggcuacugccugaccagauggaugcugaucgaggccgagcugaagugcuucggcaacaccgccguggccaagugcaacgagaagcacgacgaggaguucugcgacaugcugagacuguucgacuucugcaagcaggccaucagaagacugaaggcccccgcccagaugagcauccagcugaucaacaaggccgugaacgcccugaucaacgaccagcugaucaugaagaaccaccugagagacaucaugggcauccccuacugcaacuacagcaaguacugguaccugaaccacaccgugaccggcaagaccagccugcccagaugcuggcuggugagcaacggcagcuaccugaacgagacccacuucagcgacgacaucgagcagcaggccgacaacaugaucaccgagcugcugcagaaggaguacaucgacagacagggcaagaccccccugggccugguggaccuguucguguucagcaccagcuucuaccugaucagcaucuuccugcaccuggugaagauccccacccacagacacgugaucggcaagcccugccccaagccccacagacugaaccacaugggcaucugcagcugcggccuguacaagcaccccggcgugcccgugaaguggaagagaugaggacuagucccuguucccagagcccacuuuuuuuucuuuuuuugaaauaaaauagccugucuuucagaucucaaaggcucuuuucagagccaccaaaaaaaaaaaaaaaaaaaaaaaaaaaaaaaaaaaaaaaaaaaaaaaaaaaaaaaaaaaaaaaaagaauu

SEQ ID NO: 29973 - RNA, 1714 nt, Artificial Sequence
  mRNA product Design a-1 (hSL-A64-N5) comprising derived and/or modified sequence from LASV(LASV1000-NIG-2009;Clade II)__AIT17782__GPCmut6 (opt4)
aggagagucccgcagucggcguccagcggcucugcuuguucgugugugugucguugcaggccuuauucaagcuuaccaugggccagaucaucaccuucuuccaggaggugccccacgugaucgaggaggugaugaacaucgugcugaucgcccugagccugcuggccauccugaagggcaucuacaacguggccaccugcggccuguucggccuggugagcuuccugcugcugugcggcagaagcugcagcaccaccuacaagggcguguacgagcugcagacccuggagcuggacauggccagccugaacaugugcaugccccugagcugcaccaagaacaacagccaccacuacaucauggugggcaacgagaccggccuggagcugacccugaccaacaccagcaucaucaaccacaaguucugcaaccugagcgacgcccacaagaagaaccuguacgaccacgcccugaugagcaucaucagcaccuuccaccugagcauccccaacuucaaccaguacgaggccaugagcugcgacuucaacggcggcaagaucagcgugcaguacaaccugagccacaccuacgccguggacgccgccaaccacugcggcaccaucgccaacggcgugcugcagaccuucaugagaauggccuggggcggcagcuacaucgcccuggacagcggcaagggcagcugggacugcaucaugaccagcuaccaguaccugaucauccagaacaccaccugggaggaccacugccaguucagcagacccagccccaucggcuaccugggccugcugagccagagaaccagagacaucuacaucagcagaagacugcugggcaccuucaccuggacccugagcgacagcgagggcaacgagacccccggcggcuacugccugaccagauggaugcugaucgaggccgagcugaagugcuucggcaacaccgccguggccaagugcaacgagaagcacgacgaggaguucugcgacaugcugagacuguucgacuucugcaagcaggccaucaagagacugaagacccccgcccagaugagcauccagcugaucaacaaggccgugaacgcccugaucaacgaccagcugaucaugaagaaccaccugagagacaucaugggcauccccuacugcaacuacagcaaguacugguaccugaaccacaccgugaccggcaagaccagccugcccagaugcuggcuggugagcaacggcagcuaccugaacgagacccacuucagcgacgacaucgagcagcaggccgacaacaugaucaccgagcugcugcagaaggaguacaucgacagacagggcaagaccccccugggccugguggaccuguucguguucagcaccagcuucuaccugaucagcaucuuccugcaccuggugaagauccccacccacagacacguggugggcaagcccugccccaagccccacagacugaaccacaugggcaucugcagcugcggccuguacaagcaccccggcgugcccgugaaguggaagagaugaggacuagucccuguucccagagcccacuuuuuuuucuuuuuuugaaauaaaauagccugucuuucagaucucaaaggcucuuuucagagccaccaaaaaaaaaaaaaaaaaaaaaaaaaaaaaaaaaaaaaaaaaaaaaaaaaaaaaaaaaaaaaaaaagaauu

SEQ ID NO: 29974 - RNA, 1714 nt, Artificial Sequence
  mRNA product Design a-1 (hSL-A64-N5) comprising derived and/or modified sequence from LASV(LASV221-NIG-2010;Clade II)__AIT17624__GPCmut6 (opt4)
aggagagucccgcagucggcguccagcggcucugcuuguucgugugugugucguugcaggccuuauucaagcuuaccaugggccagaucaucaccuucuuccaggaggugccccacgugaucgaggaggugaugaacaucgugcugaucgcccugagccugcuggccauccugaagggcaucuacaacguggccaccugcggccuguucggccuggugagcuuccugcugcugugcggcagaagcugcagcaccaccuacaagggcguguacgagcugcagacccuggagcuggacauggccagccugaacaugugcaugccccugagcugcaccaagaacaacagccaccacuacaucauggugggcaacgagaccggccuggagcugacccugaccaacaccagcaucaucaaccacaaguucugcaaccugagcgacgcccacaagaagaaccuguacgaccacgcccugaugagcaucaucagcaccuuccaccugagcauccccaacuucaaccaguacgaggccaugagcugcgacuucaacggcggcaagaucagcgugcaguacaaccugagccacaccuacgccaucgacgccgccaaccacugcggcaccaucgccaacggcgugcugcagaccuucaugagaauggccuggggcggcagcuacaucgcccuggacagcggcaagggcagcugggacugcaucaugaccagcuaccaguaccugaucauccagaacaccaccugggaggaccacugccaguucagcagacccagccccaucggcuaccugggccugcugagccagagaaccagagacaucuacaucagcagaagacugcugggcaccuucaccuggacccugagcgacagcgagggcaacgagacccccggcggcuacugccugaccagauggaugcugaucgaggccgagcugaagugcuucggcaacaccgccguggccaagugcaacgagaagcacgacgaggaguucugcgacaugcugagacuguucgacuucugcaagcaggccaucagaagacugaagacccccgcccagaugagcauccagcugaucaacaaggccgugaacgcccugaucaacgaccagcugaucaugaagaaccaccugagagacaucaugggcauccccuacugcaacuacagcaaguacugguaccugaaccacaccgugaccggcaagaccagccugcccagaugcuggcuggugagcaacggcagcuaccugaacgagacccacuucagcgacgacaucgagcagcaggccgacaacaugaucaccgagaugcugcagaaggaguacauggacagacagggcaagaccccccugggccugguggaccuguucguguucagcaccagcuucuaccugaucagcaucuuccugcaccuggugaagauccccacccacagacacgugaucggcaagcccugccccaagccccacagacugaaccacaugggcaucugcagcugcggccuguacaagcaccccggcgugcccgugaaguggaagagaugaggacuagucccuguucccagagcccacuuuuuuuucuuuuuuugaaauaaaauagccugucuuucagaucucaaaggcucuuuucagagccaccaaaaaaaaaaaaaaaaaaaaaaaaaaaaaaaaaaaaaaaaaaaaaaaaaaaaaaaaaaaaaaaaagaauu

SEQ ID NO: 29975 - RNA, 1714 nt, Artificial Sequence
  mRNA product Design a-1 (hSL-A64-N5) comprising derived and/or modified sequence from LASV(LASV237-NIG-2010;Clade II)__AIT17638__GPCmut6 (opt4)
aggagagucccgcagucggcguccagcggcucugcuuguucgugugugugucguugcaggccuuauucaagcuuaccaugggccagaucaucaccuucuuccaggaggugccccacgugaucgaggaggugaugaacaucgugcugaucgcccugagccugcuggccauccugaagggcaucuacaacguggccaccugcggccuguucggccuggugagcuuccugcugcugugcggcagaagcugcagcaccaccuacaagggcguguacgagcugcagacccuggagcuggacauggccagccugaacaugugcaugccccugagcugcaccaagaacaacagccaccacuacaucauggugggcaacgagaccggccuggagcugacccugaccaacaccagcaucaucaaccacaaguucugcaaccugagcgacgcccacaagaaggaccuguacgaccacgcccugaugagcaucaucagcaccuuccaccugagcauccccaacuucaaccaguacgaggccaugagcugcgacuucaacggcggcaagaucagcgugcaguacaaccugagccacaccuacgccguggacgccgccaaccacugcggcaccaucgccaacggcgugcugcagaccuucaugagaauggccuggggcggcagcuacaucgcccuggacagcggcaagggcagcugggacugcaucaugaccagcuaccaguaccugaucauccagaacaccaccugggaggaccacugccaguucagcagacccagccccaucggcuaccugggccugcugagccagagaaccagagacaucuacaucagcagaagacugcugggcaccuucaccuggacccugagcgacagcgagggcaacgagacccccggcggcuacugccugaccagauggaugcugaucgaggccgagcugaagugcuucggcaacaccgccguggccaagugcaacgagaagcacgacgaggaguucugcgacaugcugagacuguucgacuucugcaagcaggccaucagaagacugaagacccccgcccagaugagcauccagcugaucaacaaggccgugaacgcccugaucaacgaccagcugaucaugaagaaccaccugagagacaucaugggcauccccuacugcaacuacagcaaguacugguaccugaaccacaccgugaccggcaagaccagccugcccagaugcuggcuggugagcaacggcagcuaccugaacgagacccacuucagcgacgacaucgagcagcaggccgacaacaugaucaccgagcugcugcagaaggaguacauggacagacagggcaagaccccccugggccugguggaccuguucguguucagcaccagcuucuaccugaucagcaucuuccugcaccugaucaagauccccacccacagacacaucaccggcaagcccugccccaagccccacagacugaaccacaugggcaucugcagcugcggccuguacaagcaccccggcgugcccgugaaguggaagagaugaggacuagucccuguucccagagcccacuuuuuuuucuuuuuuugaaauaaaauagccugucuuucagaucucaaaggcucuuuucagagccaccaaaaaaaaaaaaaaaaaaaaaaaaaaaaaaaaaaaaaaaaaaaaaaaaaaaaaaaaaaaaaaaaagaauu

SEQ ID NO: 29976 - RNA, 1714 nt, Artificial Sequence
  mRNA product Design a-1 (hSL-A64-N5) comprising derived and/or modified sequence from LASV(LASV253-NIG-2011;Clade II)__AIT17670__GPCmut6 (opt4)
aggagagucccgcagucggcguccagcggcucugcuuguucgugugugugucguugcaggccuuauucaagcuuaccaugggccagaucaucaccuucuuccaggaggugccccacgugaucgaggaggugaugaacaucgugcugaucgcccugagccugcuggccauccugaagggcaucuacaacguggccaccugcggccuguucggccuggugagcuuccugcugcugugcggcagaagcugcagcaccaccuacaagggcguguacgagcugcagacccuggagcuggacauggccagccugaacaugugcaugccccugagcugcaccaagaacaacagccaccacuacaucauggugggcaacgagaccggccuggagcugacccugaccaacaccagcaucaucaaccacaaguucugcaaccugagcgacgcccacaagaagaaccuguacgaccacgcccugaugagcaucaucagcaccuuccaccugagcauccccaacuucaaccaguacgaggccaugagcugcgacuucaacggcggcaagaucagcgugcaguacaaccugagccacaccuacgccguggacgccgccaaccacugcggcaccaucgccaacggcgugcugcagaccuucaugagaauggccuggggcggcagcuacaucgcccuggacagcggcaagggcagcugggacugcaucaugaccagcuaccaguaccugaucauccagaacaccaccugggaggaccacugccaguucagcagacccagccccaucggcuaccugggccugcugagccagagaaccagagacaucuacaucagcagaagacugcugggcaccuucaccuggacccugagcgacagcgagggcaacgagacccccggcggcuacugccugaccagauggaugcugaucgaggccgagcugaagugcuucggcaacaccgccguggccaagugcaacgagaagcacgacgaggaguucugcgacaugcugagacuguucgacuucugcaagcaggccaucagaagacugaaggcccccgcccagaugagcauccagcugaucaacaaggccgugaacgcccugaucaacgaccagcugaucaugaagaaccaccugagagacaucaugggcauccccuacugcaacuacagcaaguacugguaccugaaccacaccgugaccggcagaaccagccugcccagaugcuggcuggugagcaacggcagcuaccugaacgagacccacuucagcgacgacaucgagcagcaggccgacaacaugaucaccgagcugcugcagaaggaguacaucgacagacagggcaagaccccccugggccugguggaccuguucguguucagcaccagcuucuaccugaucagcaucuuccugcaccuggugaagauccccacccacagacacaucaucggcaagcccugccccaagccccacagacugaaccacaugggcaucugcagcugcggccuguacaagcaccccggcgugcccgugaaguggaagagaugaggacuagucccuguucccagagcccacuuuuuuuucuuuuuuugaaauaaaauagccugucuuucagaucucaaaggcucuuuucagagccaccaaaaaaaaaaaaaaaaaaaaaaaaaaaaaaaaaaaaaaaaaaaaaaaaaaaaaaaaaaaaaaaaagaauu

SEQ ID NO: 29977 - RNA, 1714 nt, Artificial Sequence
  mRNA product Design a-1 (hSL-A64-N5) comprising derived and/or modified sequence from LASV(LASV254-NIG-2011;Clade II)__AIT17674__GPCmut6 (opt4)
aggagagucccgcagucggcguccagcggcucugcuuguucgugugugugucguugcaggccuuauucaagcuuaccaugggccagaucaucaccuucuuccaggaggugccccacgugaucgaggaggugaugaacaucgugcugaucgcccugagccugcuggccauccugaagggcaucuacaacguggccaccugcggccuguucggccuggugagcuuccugcugcugugcggcagaagcugcagcaccaccuacaagggcguguacgagcugcagacccuggagcuggacaugaccaaccugaacaugugcaugccccugagcugcaccaagaacaacagccaccacuacaucauggugggcaacgagaccggccuggagcugacccugaccaacaccagcaucaucaaccacaaguucugcaaccugagcgacgcccacaagaagaaccuguacaaccacgcccugaugagcaucaucagcaccuuccaccugagcauccccaacuucaaccaguacgaggccaugagcugcgacuucaacggcggcaagaucagcgugcaguacaaccugagccacagcuacgccguggacgccgccaaccacugcggcaccaucgccaacggcgugcugcagaccuucaugagaauggccuggggcggcagcuacaucgcccuggacagcggcaagggcaacugggacugcaucaugaccagcuaccaguaccugaucauccagaacaccaccugggaggaccacugccaguucagcagacccagccccaucggcuaccugggccugcugagccagagaaccagagacaucuacaucagcagaagacugcugggcaccuucaccuggacccugagcgacagcgagggcaacgagacccccggcggcuacugccugaccagauggaugcugaucgaggccgagcugaagugcuucggcaacaccgccguggccaagugcaacgagaagcacgacgaggaguucugcgacaugcugagacuguucgacuucugcaagcaggccaucagaagacugaagacccccgcccaggccaacauccagcugaucaacaaggccgugaacgcccugaucaacgaccagcugaucaugaagaaccaccugagagacaucaugggcauccccuacugcaacuacagcaaguacugguaccugaaccacaccgugaccggcaagaccagccugcccagaugcuggcuggugagcaacggcagcuaccugaacgagacccacuucagcgacgacaucgagcagcaggccgacaacaugaucaccgagcugcugcagaaggaguacauggacagacagggcaagaccccccugggccugguggaccuguucguguucagcaccagcuucuaccugaucagcaucuuccugcaccuggugaagauccccacccacagacacgugaucggcaagcccugccccaagccccacagacugaaccacaugggcaucugcagcugcggccuguacaagcaccccggcgugcccgugaaguggaagagaugaggacuagucccuguucccagagcccacuuuuuuuucuuuuuuugaaauaaaauagccugucuuucagaucucaaaggcucuuuucagagccaccaaaaaaaaaaaaaaaaaaaaaaaaaaaaaaaaaaaaaaaaaaaaaaaaaaaaaaaaaaaaaaaaagaauu

SEQ ID NO: 29978 - RNA, 1714 nt, Artificial Sequence
  mRNA product Design a-1 (hSL-A64-N5) comprising derived and/or modified sequence from LASV(Nig08-A19;Clade III)__ADU56618__GPCmut6 (opt4)
aggagagucccgcagucggcguccagcggcucugcuuguucgugugugugucguugcaggccuuauucaagcuuaccaugggccagaucgugaccuucuuccaggaggugccccacgugaucgaggaggugaugaacaucgugcugaucgcccugagcauccuggccauccugaagggccuguacaacaucgccaccugcggccugaucggccuggugaccuuccugcugcugagcggcagaagcugcagcaugaccuacaagggcguguacgagcugcagacccuggagcugaacaugaacacccugaacaugugcaugccccugagcugcaccaagaacaacagccaccacuacaucauggugggcaacgagaccggccuggagcugacccugaccaacaccagccugcugcaccacaaguucugcaaccugagcgacgcccacaagaagaaccuguacgaccacacccugaugagcaucaucagcaccuuccaccugagcauccccaacuucaaccaguacgaggccaugagcugcgacuucaacggcggcaagaucaccgugcaguacaaccugagccacagcuacgccaucgacgccgccaaccacugcggcaccguggccaacggcgugcugcagaccuucaugagaauggccuggggcggcagcuacaucgcccuggacagcggcagaggcaagugggacugcaucaugaccagcuaccaguaccugaucauccagaacaccaccugggaggaccacugccaguucagcagacccagccccaucggcuaccugggccugcugagccagagaaccagagacaucuacaucagcagaagacugcugggcaccuucaccuggacccugagcgacagcgagggcaacgagacccccggcggcuacugccugaccagauggaugcugaucgaggccgagcugaagugcuucggcaacaccgccguggccaagugcaacgagaagcacgacgaggaguucugcgacaugcugagacuguucgacuucugcaagcaggccaucagaagacugaaggcccccgcccagaugagcauccagcugaucaacaaggccgugaacgcccugaucaacgaccagcugaucaugaagaaccaccugagagacaucaugggcauccccuacugcaacuacagcaaguacugguaccugaaccacaccagcaccggcagaaccagccugcccagaugcuggcuggugagcaacggcagcuaccugaacgagacccacuucagcgacgacaucgagcagcaggccgacaacaugaucaccgagaugcugcagaaggaguaccuggacagacagggcaagaccccccugggccugguggaccuguucguguucagcaccagcuucuaccugaucagcaucuuccugcaccuggugaagauccccacccacagacacaucgugggcaagcccugccccaagccccacagacugaaccacaugggcaucugcagcugcggccuguacaagcagcccggcgugcccgugagauggaagagaugaggacuagucccuguucccagagcccacuuuuuuuucuuuuuuugaaauaaaauagccugucuuucagaucucaaaggcucuuuucagagccaccaaaaaaaaaaaaaaaaaaaaaaaaaaaaaaaaaaaaaaaaaaaaaaaaaaaaaaaaaaaaaaaaagaauu

SEQ ID NO: 29979 - RNA, 1717 nt, Artificial Sequence
  mRNA product Design a-1 (hSL-A64-N5) comprising derived and/or modified sequence from LASV(G1180-SLE-2010;Clade IV)__AIT17168__GPCmut6 (opt4)
aggagagucccgcagucggcguccagcggcucugcuuguucgugugugugucguugcaggccuuauucaagcuuaccaugggccagaucgugaccuucuuccaggaggugccccacgugaucgaggaggugaugaacaucgugcugaucgcccugagcauccuggccgugcugaagggccuguacaacuucgccaccugcggccuggugggccugcugaccuuccugcugcugugcggcagaagcugcaccgccagcagauacaagggcguguacgagcugcagacccuggagcugaacauggagacccugaacaugugcaugccccugagcugcaccaagaacaacagccaccacuacaucauggugggcaacgagaccggccuggagcugacccugaccaacaccagcaucaucaaccacaaguucugcaaccugagcgacgcccacaagaagaaccuguacgaccacgcccugaugagcaucaucagcaccuuccaccugagcauccccaacuucaaccaguacgaggccaugagcugcgacuucaacggcggcaagaucagcgugcaguacaaccugagccacagcuacgccggcgacgccgccaaccacugcggcaccguggccaacggcgugcugcagaccuucaugagaauggccuggggcggcagcuacaucgcccuggacagcggccacggcagcugggacugcaucaugaccagcuaccaguaccugaucauccagaacaccaccugggaggaccacugccaguucagcagacccagccccaucggcuaccugggccugcugagccagagaaccagagacaucuacaucagcagaagacugcugggcaccuucaccuggacccugagcgacagcgagggcaaggacacccccggcggcuacugccugaccagauggaugcugaucgaggccgagcugaagugcuucggcaacaccgccguggccaagugcaacgagaagcacgacgaggaguucugcgacaugcugagacuguucgacuucugcaagcaggccauccagagacugaaggcccccgcccagaugagcauccagcugaucaacaaggccgugaacgcccugaucaacgaccagcugaucaugaagaaccaccugagagacaucaugggcauccccuacugcaacuacagcaaguacugguaccugaaccacaccaccaccggcaagaccagccugcccaagugcuggcuggugagcaacggcagcuaccugaacgagacccacuucagcgacgacaucgagcagcaggccgacaacaugaucaccgagaugcugcagaaggaguacauggagagacagggcaagaccccccugggccugguggaccuguucguguucagcaccagcuucuaccugaucagcaucuuccugcaccuggugaagauccccacccacagacacaucgugggcaagagcugccccaagccccacagacugaaccacaugggcaucugcagcugcggccuguacaagcagcccggcgugcccgugaaguggaagagaugaggacuagucccuguucccagagcccacuuuuuuuucuuuuuuugaaauaaaauagccugucuuucagaucucaaaggcucuuuucagagccaccaaaaaaaaaaaaaaaaaaaaaaaaaaaaaaaaaaaaaaaaaaaaaaaaaaaaaaaaaaaaaaaaagaauu

SEQ ID NO: 29980 - RNA, 1717 nt, Artificial Sequence
  mRNA product Design a-1 (hSL-A64-N5) comprising derived and/or modified sequence from LASV(G1442-SLE-2011;Clade IV)__AIT17180__GPCmut6 (opt4)
aggagagucccgcagucggcguccagcggcucugcuuguucgugugugugucguugcaggccuuauucaagcuuaccaugggccagaucgugaccuucuuccaggaggugccccacgugaucgaggaggugaugaacaucgugcugaucgcccugagcauccuggccgugcugaagggccuguacaacguggccaccugcggccugaucggccuggugaccuuccugcugcugugcggcagaagcugcaccaccacccuguacaagggcguguacgagcugcagacccuggagcugaacauggagacccugaacaugugcaugccccugagcugcaccaagaacaacagccaccacuacaucagagugggcaacgagaccggccuggagcugacccugaccaacaccagcaucaucaaccacaaguucugcaaccugagcgacgcccacaagaagaaccuguacgaccacgcccugaugagcaucaucagcaccuuccaccugagcauccccaacuucaaccaguacgaggccaugagcugcgacuucaacggcggcaagaucagcgugcaguacaaccugagccacagcuacgccggcgacgccgccaaccacugcggcaccguggccaacggcgugcugcagaccuucaugagaauggccuggggcggcagcuacaucgcccuggacagcggcagaggcaacugggacugcaucaugaccagcuaccaguaccugaucauccagaacaccaccugggacgaccacugccaguucagcagacccagccccaucggcuaccugggccugcugagccagagaaccagagacguguacaucagcagaagacugcugggcaccuucaccuggacccugagcgacagcgagggcaaggacacccccggcggcuacugccugaccagauggaugcugaucgaggccgagcugaagugcuucggcaacaccgccguggccaagugcaacgagaagcacgacgaggaguucugcgacaugcugagacuguucgacuucugcaagcaggccauccagagacugaaggcccccgcccagaugagcauccagcugaucaacaaggccgugaacgcccugaucaacgaccagcugaucaugaagaaccaccugagagacaucaugggcauccccuacugcaacuacagcaaguacugguaccugaacaacaccgccaccggcaagaccagccugcccaagugcuggcugaucagcaacggcagcuaccugaacgagacccacuucagcgacgacaucgagcaggaggccgacaacaugaucaccgagaugcugcagaaggaguacauggagagacagggcaagaccccccugggccugguggaccuguucguguucagcaccagcuucuaccugaucagcaucuuccugcaccuggugaagauccccacccacagacacaucgugggcaagagcugccccaagccccacagacugaaccacaugggcaucugcagcugcggccuguacaagcagcccggcgugcccgugagauggaagagaugaggacuagucccuguucccagagcccacuuuuuuuucuuuuuuugaaauaaaauagccugucuuucagaucucaaaggcucuuuucagagccaccaaaaaaaaaaaaaaaaaaaaaaaaaaaaaaaaaaaaaaaaaaaaaaaaaaaaaaaaaaaaaaaaagaauu

SEQ ID NO: 29981 - RNA, 1717 nt, Artificial Sequence
  mRNA product Design a-1 (hSL-A64-N5) comprising derived and/or modified sequence from LASV(G3010-SLE-2013;Clade IV)__AIT17344__GPCmut6 (opt4)
aggagagucccgcagucggcguccagcggcucugcuuguucgugugugugucguugcaggccuuauucaagcuuaccaugggccagaucgugaccuucuuccaggaggugccccacgugaucgaggaggugaugaacaucgugcugaucgcccugagcauccuggccgugcugaagggccuguacaacuucgccaccugcggccuggugggccuggugaccuuccugcugcugugcggcagaagcugcaccaccagccuguacaagggcguguacgagcugcagacccuggagcugaacauggagacccugaacaugugcaugccccugagcugcaccaagaacaacagccaccacuacaucauggugggcaacgagaccggccuggagcugacccugaccaacaccagcaucaucaaccacaaguucugcaaccugagcgacgcccacaagaagaaccuguacaaccacgcccugaugagcaucaucagcaccuuccaccugagcauccccaacuucaaccaguacgaggccaugagcugcgacuucaacggcggcaagaucagcgugcaguacaaccugagccacagcuacgccggcgacgccgccagccacugcggcaccguggccaacggcgugcugcagaccuucaugagaauggccuggggcggcagcuacaucgcccuggacagcggcuacggcaagugggacugcaucaugaccagcuaccaguaccugaucauccagaacaccaccugggaggaccacugccaguucagcagacccagccccaucggcuaccugggccugcugagccagagaaccagagacaucuacaucagcagaagacugcugggcaccuucaccuggacccugagcgacagcgagggcaaggacacccccggcggcuacugccugaccagauggaugcugaucgaggccgagcugaagugcuucggcaacaccgccguggccaagugcaacgagaagcacgacgaggaguucugcgacaugcugagacuguucgacuucugcaagcaggccauccagagacugaagacccccgcccagaugagcauccagcugaucaacaaggccgugaacgcccugaucaacgaccagcugaucaugaagaaccaccugagagacaucaugggcauccccuacugcaacuacagcaaguacugguaccugaaccacaccaccaccggcaagaccagccugcccaagugcuggcuggugagcaacggcagcuaccugaacgagacccacuucagcgacgacaucgagcagcaggccgacaacaugaucaccgagaugcugcagaaggaguacauggagagacagggcaagaccccccugggccugguggaccuguucguguucagcaccagcuucuaccugaucagcaucuuccugcaccuggugaagauccccacccacagacacaucgugggcaagagcugccccaagccccacagacugaaccacaugggcaucugcagcugcggccuguacaagcagcccggcgugcccgugagauggaagagaugaggacuagucccuguucccagagcccacuuuuuuuucuuuuuuugaaauaaaauagccugucuuucagaucucaaaggcucuuuucagagccaccaaaaaaaaaaaaaaaaaaaaaaaaaaaaaaaaaaaaaaaaaaaaaaaaaaaaaaaaaaaaaaaaagaauu

SEQ ID NO: 29982 - RNA, 1717 nt, Artificial Sequence
  mRNA product Design a-1 (hSL-A64-N5) comprising derived and/or modified sequence from LASV(G502-SLE-2009;Clade IV)__AIT17126__GPCmut6 (opt4)
aggagagucccgcagucggcguccagcggcucugcuuguucgugugugugucguugcaggccuuauucaagcuuaccaugggccagaucgugaccuucuuccaggaggugccccacgugaucgaggaggugaugaacaucgugcugaucgcccugagcauccuggccgugcugaagggccuguacaacuucgccaccugcggccuggugggccugcugaccuuccugcugcugugcggcagaagcugcaccaccggccuguacaagggcguguacgagcugcagacccuggagcugaacauggagacccugaacaugugcaugccccugagcugcaccaagaacaacagccaccacuacaucauggugggcaacgagaccggccuggagcugacccugaccaacaccagcaucaucaaccacaaguucugcaaccugagcgacgcccacaagaagaaccuguacgaccacgcccugaugagcaucaucagcaccuuccaccugagcauccccaacuucaaccaguacgaggccaugagcugcgacuucaacggcggcaagaucagcgugcaguacaaccugagccacagcuacgccggcgacgccgccgaccacugcggcaccguggccaacggcgugcugcagaccuucaugagaauggccuggggcggcagcuacaucgcccuggacagcggcagaggcagaugggacugcaucaugaccagcuaccaguaccugaucauccagaacaccaccugggaggaccacugccaguucagcagacccagccccaucggcuaccugggccugcugagccagagaaccagagacaucuacaucagcagaagacugcugggcaccuucaccuggacccugagcgacagcgagggcaaggacacccccggcggcuacugccugaccagauggaugcugaucgaggccgagcugaagugcuucggcaacaccgccguggccaagugcaacgagaagcacgacgaggaguucugcgacaugcugagacuguucgacuucugcaagcaggccauccagagacugaaggcccccgcccagaugagcauccagcugaucaacaaggccgugaacgcccugaucaacgaccagcuggugaugaagaaccaccugagagacaucaugggcauccccuacugcaacuacagcagauacugguaccugaaccacaccaccaccggcagaaccagccugcccaagugcuggcuggugagcaacggcagcuaccugaacgagacccacuucagcgacgacaucgagcagcaggccgacaacaugaucaccgagaugcugcagaaggaguacauggagagacagggcaagaccccccugggccugguggaccuguucguguucagcaccagcuucuaccugaucagcaucuuccugcaccuggugaagauccccacccacagacacaucgugggcaagagcugccccaagccccacagacugaaccacaugggcaucugcagcugcggccuguacaagcagcccggcgugcccgugaaguggaagagaugaggacuagucccuguucccagagcccacuuuuuuuucuuuuuuugaaauaaaauagccugucuuucagaucucaaaggcucuuuucagagccaccaaaaaaaaaaaaaaaaaaaaaaaaaaaaaaaaaaaaaaaaaaaaaaaaaaaaaaaaaaaaaaaaagaauu

SEQ ID NO: 29983 - RNA, 1717 nt, Artificial Sequence
  mRNA product Design a-1 (hSL-A64-N5) comprising derived and/or modified sequence from LASV(G733-SLE-2010;Clade IV)__AIT17154__GPCmut6 (opt4)
aggagagucccgcagucggcguccagcggcucugcuuguucgugugugugucguugcaggccuuauucaagcuuaccaugggccagaucgugaccuucuuccaggaggugccccacgugaucgaggaggugaugaacaucgugcugaucgcccugagcauccuggccgugcugaagggccuguacaacuucgccaccugcggcaucgugggccuggugagcuuccugcugcugugcggcagaagcugcaccaccagccuguacaagggcguguacgagcugcagacccuggagcugaacauggagacccugaacaugugcaugccccugagcugcaccaagaacaacagccaccacuacaucauggugggcaacgagaccggccuggagcugacccugaccaacaccagcaucaucaaccacaaguucugcaaccugagcgacgcccacaagaagaaccuguacgaccacgcccugaugagcaucaucagcaccuuccaccugagcauccccaacuucaaccaguacgaggccaugagcugcgacuucaacggcggcaagaucagcgugcaguacaaccugagccacagcuacgccggcgacgccgccaaccacugcggcaccaucgccaacggcgugcugcagaccuucaugagaauggccuggggcggcagcuacaucgcccuggacagcggcagagacagaugggacugcaucaugaccagcuaccaguaccugaucauccagaacaccaccugggaggaccacugccaguucagcagacccagccccaucggcuaccugggccugcugagccagagaaccagagacaucuacaucagcagaagacugcugggcaccuucaccuggacccugagcgacagcgagggcaaggacacccccggcggcuacugccugaccagauggaugcugaucgaggccgagcugaagugcuucggcaacaccgccguggccaagugcaacgagaagcacgacgaggaguucugcgacaugcugagacuguucgacuucugcaagcaggccauccagagacugaaggcccccgcccagaugagcauccagcugaucaacaaggccgugaacgcccugaucaacgaccagcugaucaugaagaaccaccugagagacaucaugggcauccccuacugcaacuacagcaaguacugguaccugaaccacaccaccaccggcaagaccagccugcccaagugcuggcuggugagcaacggcagcuaccugaacgagacccacuucagcgacgacaucgagcagcaggccgacaacaugaucaccgagaugcugcagaaggaguacauggagagacagggcaagaccccccugggccugguggaccuguucguguucagcaccagcuucuaccugaucagcaucuuccugcaccuggugaagauccccacccacagacacguggugggcaagagcugccccaagccccacagacugaaccacaugggcaucugcagcugcggccuguacggccagcccggcgugcccgugaaguggaagagaugaggacuagucccuguucccagagcccacuuuuuuuucuuuuuuugaaauaaaauagccugucuuucagaucucaaaggcucuuuucagagccaccaaaaaaaaaaaaaaaaaaaaaaaaaaaaaaaaaaaaaaaaaaaaaaaaaaaaaaaaaaaaaaaaagaauu

SEQ ID NO: 29984 - RNA, 1717 nt, Artificial Sequence
  mRNA product Design a-1 (hSL-A64-N5) comprising derived and/or modified sequence from MOPV/LASV reassortant(IGS-1;Clade IV)__AFY05576__GPCmut6 (opt4)
aggagagucccgcagucggcguccagcggcucugcuuguucgugugugugucguugcaggccuuauucaagcuuaccaugggccagaucgugaccuucuuccaggaggugccccacgugaucgaggaggugaugaacaucgugcugaucgcccugagcgugcuggccgugcugaagggccuguacaacuucgccaccugcggccuggugggccuggugaccuuccugcugcugugcggcagaagcugcaccaccagccuguacaagggcguguacgagcugcagacccuggagcugaacauggagacccugaacaugugcaugccccugagcugcaccaagaacaacagccaccacuacaucauggugggcaacgagaccggccuggagcugacccugaccaacaccagcaucaucaaccacaaguucugcaaccugagcgacgcccacaagaagaaccuguacgaccacgcccugaugagcaucaucagcaccuuccaccugagcauccccaacuucaaccaguacgaggccaugagcugcgacuucaacggcggcaagaucagcgugcaguacaaccugagccacagcuacgccggcgacgccgccaaccacugcggcaccguggccaacggcgugcugcagaccuucaugagaauggccuggggcggcagcuacaucgcccuggacagcggcagaggcaacugggacugcaucaugaccagcuaccaguaccugaucauccagaacaccaccugggaggaccacugccaguucagcagacccagccccaucggcuaccugggccugcugagccagagaaccagagacaucuacaucagcagaagacugcugggcaccuucaccuggacccugagcgacagcgagggcgaggacacccccggcggcuacugccugaccagauggaugcugaucgaggccgagcugaagugcuucggcaacaccgccguggccaagugcaacgagaagcacgacgaggaguucugcgacaugcugagacuguucgacuucugcaagcaggccauccagagacugaaggcccccgcccagaugagcauccagcugaucaacaaggccgugaacgcccugaucaacgaccagcugaucaugaagaaccaccugagagacaucaugggcauccccuacugcaacuacagcaaguacugguaccugaaccacaccaccaccggcagaaccagccugcccaagugcuggcuggugagcaacggcagcuaccugaacgagacccacuucagcgacgacaucgagcagcaggccgacaacaugaucaccgagaugcugcagaaggaguacauggagagacagggcaagaccccccugggccugguggaccuguucguguucagcaccagcuucuaccugaucagcaucuuccugcaccuggugaagauccccacccacagacacaucgugggcaagagcugccccaagccccacagacugaaccacaugggcaucugcagcugcggccuguacaagcagcccggcgugcccgugaaguggaagagaugaggacuagucccuguucccagagcccacuuuuuuuucuuuuuuugaaauaaaauagccugucuuucagaucucaaaggcucuuuucagagccaccaaaaaaaaaaaaaaaaaaaaaaaaaaaaaaaaaaaaaaaaaaaaaaaaaaaaaaaaaaaaaaaaagaauu

SEQ ID NO: 29985 - RNA, 1717 nt, Artificial Sequence
  mRNA product Design a-1 (hSL-A64-N5) comprising derived and/or modified sequence from LASV(LM765-SLE-2012;Clade IV)__AIT17814__GPCmut6 (opt4)
aggagagucccgcagucggcguccagcggcucugcuuguucgugugugugucguugcaggccuuauucaagcuuaccaugggccagaucgugaccuucuuccaggaggugccccacgugaucgaggaggugaugaacaucgugcugaucgcccugagcauccuggccgugcugaagggccuguacaacuucgccaccugcggccuggugggccuggugaccuuccugcugcugugcggcagaagcugcaccaccagccuguacaagggcguguacgagcugcagacccuggagcugaacauggagacccugaacaugugcaugccccugagcugcaccaagaacaacagccaccacuacaucauggugggcaacgagaccggccuggagcugacccugaccaacaccagcaucaucgaccacaaguucugcaaccugagcgacgcccacagaaagaaccuguacgaccacgcccugaugagcaucaucagcaccuuccaccugagcauccccaacuucaaccaguacgaggccaugagcugcgacuucaacggcggcaagaucagcgugcaguacaaccugagccacagcuacgccaaggacgccgccgaccacugcggcaccguggccaacggcgugcugcagaccuucaugagaauggccuggggcggcagcuacaucgcccuggacagcggcagaggcagaugggacugcaucaugaccagcuaccaguaccugaucauccagaacaccaccugggaggaccacugccaguucagcagacccagccccaucggcuaccugggccugcugagccagagaaccagagacaucuacaucagcagaagacugcugggcaccuucaccuggacccugagcgacagcgagggcaaggacacccccggcggcuacugccugaccagauggaugcugaucgaggccgagcugaagugcuucggcaacaccgccguggccaagugcaacgagaagcacgacgaggaguucugcgacaugcugagacuguucgacuucugcaagcaggccauccagagacugaaggcccccgcccagaugagcauccagcugaucaacaaggccgugaacgcccugaucaacgaccagcugaucaugaagaaccaccugagagacaucaugggcauccccuacugcaacuacagcaaguacugguaccugaaccacaccaccaccggcaagaccagccugcccaagugcuggcuggugagcaacggcagcuaccugaacgagacccacuucagcgacgacaucgagcagcaggccgacaacaugaucaccgagaugcugcagaaggaguacauggagagacagggcaagaccccccugggccugguggaccuguucguguucagcaccagcuucuaccugaucagcaucuuccugcaccuggugaagauccccacccacagacacaucgugggcaagcccugccccaagccccacagacugaaccacaugggcaucugcagcugcggccuguacaagcagcccggcgugcccgugaaguggaagagaugaggacuagucccuguucccagagcccacuuuuuuuucuuuuuuugaaauaaaauagccugucuuucagaucucaaaggcucuuuucagagccaccaaaaaaaaaaaaaaaaaaaaaaaaaaaaaaaaaaaaaaaaaaaaaaaaaaaaaaaaaaaaaaaaagaauu

SEQ ID NO: 29986 - RNA, 1717 nt, Artificial Sequence
  mRNA product Design a-1 (hSL-A64-N5) comprising derived and/or modified sequence from LASV(LM776-SLE-2012;Clade IV)__AIT17824__GPCmut6 (opt4)
aggagagucccgcagucggcguccagcggcucugcuuguucgugugugugucguugcaggccuuauucaagcuuaccaugggccagaucgugaccuucuuccaggaggugccccacgugaucgaggaggugaugaacaucgugcugaucgcccugagcauccuggccgugcugaagggccuguacaacuucgccaccugcggccuggugggccuggugaccuuccugcugcugugcggcagaagcugcaccaccagcguguacaagggcguguacgagcugcagacccuggagcugaacauggagacccugaacaugugcaugccccugagcugcaccaagaacaacagccaccacuacaucauggugggcaacgagaccggccuggagcugacccugaccaacaccagcaucaucaaccacaaguucugcaaccugagcgacgcccacaagaagaaccuguacgaccacgcccugaugagcaucaucagcaccuuccaccugagcauccccaacuucaaccaguacgaggccaugagcugcgacuucaacggcggcaagaucagcgugcaguacaaccugagccacagcuacgccggcgacgccgccaaccacugcggcaccguggccaacggcgugcugcagaccuucaugagaauggccuggggcggcagcuacaucgcccuggacagcggccacggcaagugggacugcaucaugaccagcuaccaguaccugaucauccagaacaccaccugggaggaccacugccaguucagcagacccagccccaucggcuaccugggccugcugagccagagaaccagagacaucuacaucagcagaagacugcugggcaccuucaccuggacccugagcgacagcgagggcaaggacacccccggcggcuacugccugaccagauggaugcugaucgaggccgagcugaagugcuucggcaacaccgccguggccaagugcaacgagaagcacgacgaggaguucugcgacaugcugagacuguucgacuucugcaagcaggccauccagagacugaaggcccccgcccagaugagcauccagcugaucaacaaggccgugaacgcccugaucaacgaccagcugaucaugaagaaccaccugagagacaucaugggcauccccuacugcaacuacagcaaguacugguaccugaaccacaccaccaccggcaagaccagccugcccaagugcuggcuggugagcaacggcagcuaccugaacgagacccacuucagcgacgacaucgagcagcaggccgacaacaugaucaccgagaugcugcagaaggaguacauggagagacagggcaagaccccccugggccugguggaccuguucguguucagcaccagcuucuaccugaucagcaucuuccugcaccuggugaagauccccacccacagacacaucgugggcaagagcugccccaagccccacagacugaaccacaugggcaucugcagcugcggccuguacaagcagcccggcgugcccgugagauggaagagaugaggacuagucccuguucccagagcccacuuuuuuuucuuuuuuugaaauaaaauagccugucuuucagaucucaaaggcucuuuucagagccaccaaaaaaaaaaaaaaaaaaaaaaaaaaaaaaaaaaaaaaaaaaaaaaaaaaaaaaaaaaaaaaaaagaauu

SEQ ID NO: 29987 - RNA, 1717 nt, Artificial Sequence
  mRNA product Design a-1 (hSL-A64-N5) comprising derived and/or modified sequence from LASV(Mad39;Clade IV)__ANH09722__GPCmut6 (opt4)
aggagagucccgcagucggcguccagcggcucugcuuguucgugugugugucguugcaggccuuauucaagcuuaccaugggccagaucgugaccuucuuccaggaggugccccacgugaucgaggaggugaugaacaucgugcugaucgcccugagcauccuggccgugcugaagggccuguacaacguggccaccugcggccugaucggccuggugaccuuccugcugcugugcggcagaagcugcaccaccacccuguacaagggcguguacgagcugcaggcccuggagcugaacauggagacccugaacaugugcaugccccugagcugcaccaagaacaacagccaccacuacaucagagugggcaacgagaccggccuggagcugacccugaccaacaccagccugaucaaccacaaguucugcaaccugagcgacgcccacaagaagaaccuguacgaccacgcccugaugagcaucaucagcaccuuccaccugagcauccccaacuucaaccaguacgaggccaugagcugcgacuucaacgacggcaagaucagcgugcaguacaaccugagccacaccuacgccggcgacaccgccaaccacugcggcaccguggccaacggcgugcugcagaccuucaugagaauggccuggggcggcagcuacaucgcccuggacagcggcagaggcggcugggacugcaucaugaccagcuaccaguaccugaucauccagaacaccaccugggaggaccacugccaguucagcagacccagccccaucggcuaccugggccugcugagccagagaaccagagacaucuacaucagcagaagacugcugggcaccuucaccuggacccugagcgacagcgagggcaaggacacccccggcggcuacugccugaccagauggaugcugaucgaggccgagcugaagugcuucggcaacaccgccguggccaagugcaacgagaagcacgacgaggaguucugcgacaugcugagacuguucgacuucugcaagcaggccauccagagacugaaggcccccgcccagaugagcauccagcugaucaacaaggccgugaacgcccugaucaacgaccagcugaucaugaagaaccaccugagagacaucaugggcauccccuacugcaacuacagcaaguacugguaccugaaccacaccgugaccggcaagaccagccugcccaagugcuggcuggugagcaacggcagcuaccugaacgagacccacuucagcgacgacaucgagcagcaggccgacaacaugaucaccgagaugcugcagaaggaguacauggagagacagggcaagaccccccugggccugguggaccuguucguguucagcaccagcuucuaccugaucagcaucuuccugcaccuggugaagauccccacccacagacacguggugggcaagcccugccccaagccccacagacugaaccacaugggcaucugcagcugcggcuucuacaagcagcccggcgugcccgugagauggaagagaugaggacuagucccuguucccagagcccacuuuuuuuucuuuuuuugaaauaaaauagccugucuuucagaucucaaaggcucuuuucagagccaccaaaaaaaaaaaaaaaaaaaaaaaaaaaaaaaaaaaaaaaaaaaaaaaaaaaaaaaaaaaaaaaaagaauu

SEQ ID NO: 29988 - RNA, 1717 nt, Artificial Sequence
  mRNA product Design a-1 (hSL-A64-N5) comprising derived and/or modified sequence from LASV(Z0947-SLE-2011;Clade IV)__AIT17840__GPCmut6 (opt4)
aggagagucccgcagucggcguccagcggcucugcuuguucgugugugugucguugcaggccuuauucaagcuuaccaugggccagaucgugaccuucuuccaggaggugccccacgugaucgaggaggugaugaacaucgugcugaucgcccugagcauccuggccgugcugaagggccuguacaacuucgccaccugcggccuggugggccuggugaccuuccugcugcugugcggcagaagcugcaccaucagccuguacaagggcguguacgagcugcagacccuggagcugaacauggagacccugaacaugugcaugccccugagcugcaccaagaacaacagccaccacuacaucauggugggcaacgagaccggccuggagcugacccugaccaacaccagcaucaucaaccacaaguucugcaaccugagcgacgcccacaagaagaaccuguacgaccacgcccugaugagcaucaucagcaccuuccaccugagcauccccaacuucaaccaguacgaggccaugagcugcgacuucaacggcggcaagaucagcgugcaguacaaccugagccacagcuacgccggcgacgccgccaaccacugcggcaccguggccaacggcgugcugcagaccuucaugagaauggccuggggcggcagcuacaucgcccuggacagcggcagagacagaugggacugcaucaugaccagcuaccaguaccugaucauccagaacaccaccugggaggaccacugccaguucagcagacccagccccaucggcuaccugggccugcugagccagagaaccagagacaucuacaucagcagaagacugcugggcaccuucaccuggacccugagcgacagcgagggcaaggacacccccggcggcuacugccugaccagauggaugcugaucgaggccgagcugaagugcuucggcaacaccgccguggccaagugcaacgagaagcacgacgaggaguucugcgacaugcugagacuguucgacuucugcaagcaggccauccagagacugaaggcccccgcccagaugagcauccagcugaucaacaaggccgugaacgcccugaucaacgaccagcugaucaugaagaaccaccugagagacaucaugggcauccccuacugcaacuacagcaaguacugguaccugaaccacaccaccaccggcaagaccagccugcccaagugcuggcuggugagcaacggcagcuaccugaacgagacccacuucagcgacgacaucgagcagcaggccgacaacaugaucaccgagaugcugcagaaggaguacauggagagacagggcaagaccccccugggccugguggaccuguucguguucagcaccagcuucuaccugaucagcaucuuccugcaccuggugaagauccccacccacagacacaucgugggcaagcccugccccaagccccacagacugaaccacaugggcaucugcagcugcggccuguacaagcagcccggcgugcccgugaaguggaagagaugaggacuagucccuguucccagagcccacuuuuuuuucuuuuuuugaaauaaaauagccugucuuucagaucucaaaggcucuuuucagagccaccaaaaaaaaaaaaaaaaaaaaaaaaaaaaaaaaaaaaaaaaaaaaaaaaaaaaaaaaaaaaaaaaagaauu

SEQ ID NO: 29989 - RNA, 1717 nt, Artificial Sequence
  mRNA product Design a-1 (hSL-A64-N5) comprising derived and/or modified sequence from LASV(Josiah;Clade IV)__NP_694870__GPCmut6 (opt5)
aggagagucccgcagucggcguccagcggcucugcuuguucgugugugugucguugcaggccuuauucaagcuuaccaugggccagaucgugaccuucuuucaagaggucccccacguuauugaagaggugaugaacaucgugcugauugcccucagcguccuggcugugcuuaaggggcuguacaauuucgccacaugcggacucguuggccuggugacguuucuucugcucugugggagauccugcaccacaucucuguauaaaggagucuacgaacugcagacccucgagcugaacauggaaacacuuaauauguguaugccucugagcugcaccaagaacaauucccaucacuauaucauggugggcaacgagacagggcucgagcugacccuuacgaauaccucuauuaucaaccauaaauucuguaaucugagcgacgcgcacaagaaaaaccucuacgaucaugcucugauguccaucauuucuacauuucaccugagcaucccgaauuucaaccaguaugaagccauguccugcgacuuuaauggaggcaagauuagcguucaguacaaccucucucacuccuaugccggcgaugcugccaaucauugugggaccguggcuaacggaguccugcaaacauucaugcggauggccuggggcgggagcuacaucgcgcuugacucuggacgcggcaacugggauugcauuaugaccuccuaccaguaucugaucauucagaauacgacaugggaggaccacugucaguuuagcagacccucuccuaucggguaccucggacugcuuucccaacggacccgcgauaucuauauuagcagacggcugcucggcacauucaccuggacccuguccgacucugaaggcaaggauacacccgggggauacugccugacgcgcuggaugcucaucgaggccgagcugaaauguuuuggcaacaccgcuguggccaagugcaaugaaaaacaugacgaggaguucugcgauaugcuuagacuguuugacuucuguaagcaggcuauucagcggcucaaagccccugcgcagaugagcauccaacugauuaacaaggccgugaaugcucuuaucaacgaucagcugaucaugaagaaucaccuccgcgacauuauggggauccccuauugcaacuacuccaaauauugguaccugaaucacacaaccacaggaagaaccagccugccuaaguguuggcucgucucuaacggcuccuaccugaaugaaacgcauuucagcgacgauauugaacagcaagccgacaacaugaucacagagaugcuucagaaagaguauauggaacggcaggggaagaccccgcugggacucguugaucuguuuguguucucuaccagcuuuuaccugauuuccaucuuccuucaccucgugaaaauccccacacaucgccacauugucggcaagucuugcccuaaaccccauagacugaaucacaugggcaucuguagcugcgggcuguauaagcagccuggagugcccguuaaguggaaacggugaggacuagucccuguucccagagcccacuuuuuuuucuuuuuuugaaauaaaauagccugucuuucagaucucaaaggcucuuuucagagccaccaaaaaaaaaaaaaaaaaaaaaaaaaaaaaaaaaaaaaaaaaaaaaaaaaaaaaaaaaaaaaaaaagaauu

SEQ ID NO: 29990 - RNA, 1714 nt, Artificial Sequence
  mRNA product Design a-1 (hSL-A64-N5) comprising derived and/or modified sequence from LASV(LP;Clade I)__AAF86701__GPCmut6 (opt5)
aggagagucccgcagucggcguccagcggcucugcuuguucgugugugugucguugcaggccuuauucaagcuuaccaugggccagaucauuaccuucuuucaagaggugccccacgucaucgaagagguuaugaacauugugcugaucgcccucagccugcuugcuauucugaaggggcucuacaauaucgccacaugcggaaucauuggccugguggcguuccuuuuucugugugggaaauccugcucucucacgcugaagggaggcuaugaacugcagacccucgagcugaacauggaaacacuuaauauguguaugccucugagcugcaccaaaaacuccucucaucacuacaucagagucgggaaugagacaggacucgagcugacccuuacaaacaccagcauuaucaaucauaaguucuguaaccuguccgacgcucacaaaaagaaucucuaugaucaugcccugaugucuauuaucagcacguuucaccuguccauuccgaacuucaaucaguacgaagccaugagcugcgacuuuaacggcggcaagaucucugugcaguauaaucucucccacagcuacgcuggggaugccgcugagcauuguggaaccguugccaacggcgugcugcaaacauucaugcggauggcguggggagggcgcuauaucgcccuugacucuggcaaagggaauugggauugcauuaugaccuccuaccaguaccugaucauucagaacacaaccugggaagaccacugucaguuuagcagacccucuccuaucggauaucucggccugcuuucccaacggacgcgcgauauuuacaucagcagacggcugcucggcacauucaccuggacacuguccgacucugaggggaacgagacccccggaggcuauugccugacccgcuggaugcucaucgaagcugagcugaaguguuuugggaauacagccgucgcuaaaugcaacgaaaagcaugaugaggaguucugcgacaugcuuagacuguuugauuucuguaaacaggccauucggcgccucaaggcgccugcccagaugagcauccagcugauuaauaaggcugugaacgcccuuaucaaugaccaacugauuaugaaaaaccaccucagagauaucaugggaauccccuacugcaauuauuccaaguacugguaucugaaccacacgagcucuggccggaccucccugccuaaauguuggcucauuagcaaugggucuuaccugaacgaaacacaguucagcgacgacaucgagcagcaagcugauaauaugauuaccgaaaugcuucagaaggaguacaucgaacgccagggaaaaacaccgcugggccucguugacauuuuuaucuucuccaccucuuuuuaucugauuagcaucuuccugcaucuuaucaagauucccacgcacagacauaucgugggcaaaccuugccccaagccucaccggcucaaccauaugggggucuguuccugcggacuguacaagcaccccggcgugccgacaaaauggaagcgcugaggacuagucccuguucccagagcccacuuuuuuuucuuuuuuugaaauaaaauagccugucuuucagaucucaaaggcucuuuucagagccaccaaaaaaaaaaaaaaaaaaaaaaaaaaaaaaaaaaaaaaaaaaaaaaaaaaaaaaaaaaaaaaaaagaauu

SEQ ID NO: 29991 - RNA, 1714 nt, Artificial Sequence
  mRNA product Design a-1 (hSL-A64-N5) comprising derived and/or modified sequence from LASV(803213;Clade II)__AAF86703__GPCmut6 (opt5)
aggagagucccgcagucggcguccagcggcucugcuuguucgugugugugucguugcaggccuuauucaagcuuaccaugggccagaucauuaccuucuuucaagaggugccccacgucaucgaagagguuaugaacauugugcugaucgcccucagccugcuugcuauucugaaggggaucuacaauguggccacaugcggacucuucggccugaucuccuuucuucugcucugugggagaucuugcagcgucacguauaaaggaguguacgaacugcagacccuggagcucaacauggcgaaucugaacauguguaugccucuuuccugcacaaagaauaacucucaucacuauauuaugguuggcaaugaaaccgggcuggagcucacacugaccaacacaagcaucauuaaucauaaauucuguaaccuuuccgacgcucacaagaaaaaucuguacgaucaugcccucaugucuaucauuagcaccuuucaccuguccaucccgaacuucaaucaguaugaggccaugagcugcgacuuuaacggaggcaagauuucugugcaguacaaucugucccacagcuucgcugucgaugccgcuaaccauuguggcacgaucgccaacggggugcuccaaaccuuuaugcggauggcguggggaggcucuuauaucgcccuggacuccgggaagggaaauugggauugcauuaugacaagcuaccaguaccuuaucauucagaacaccacaugggaagaccacugucaguucucucgccccuccccuaucggcuaucuggggcuccugagccaaagaacccgggauauuuacaucucccgcagacuucugggaacguuuacauggacccucucugacagcgagggcaaugaagcucccggcggguauugccugacacgguggaugcugaucgaggccgagcucaaauguuucggaaacaccgcuguugccaagugcaaugaaaaacaugaugaggaauuuugcgacaugcugcgccuuuucgauuucuguaagcaggcgauuaaaagacugaagaccccugcccagauguccauccagcucauuaacaaggcugugaaugcccugaucaacgaccaacuuauuaugaaaaaucaucugcgggauaucaugggcauccccuacugcaacuauagccgcuacugguaucucaaucacacagucacggggaagaccucucugccuagauguuggcugguguccaacggaagcuaccucaaugagacacacuuuucugacgacauugaacagcaggcugauaacaugaucaccgagaugcugcaaaaagaguacauggaccggcagggcaagacaccgcuugggcugguggaucucuucgucuuuagcaccuccuucuaucugauuucuaucuuucugcaccuuguuaaaauucccacgcaucgccacaucgugggaaagccuugccccaaaccucauagacucaaucacaugggcauuuguagcugcggccuguacaagcaccccggggugccggucaaguggaaacggugaggacuagucccuguucccagagcccacuuuuuuuucuuuuuuugaaauaaaauagccugucuuucagaucucaaaggcucuuuucagagccaccaaaaaaaaaaaaaaaaaaaaaaaaaaaaaaaaaaaaaaaaaaaaaaaaaaaaaaaaaaaaaaaaagaauu

SEQ ID NO: 29992 - RNA, 1714 nt, Artificial Sequence
  mRNA product Design a-1 (hSL-A64-N5) comprising derived and/or modified sequence from LASV(GA391;Clade III)__CAA36645__GPCmut6 (opt5)
aggagagucccgcagucggcguccagcggcucugcuuguucgugugugugucguugcaggccuuauucaagcuuaccaugggccagaucgugaccuucuuucaagaggucccccacguuauugaagaggugaugaacaucgugcugauugcccucagcauccuggcuauucuuaaggggcuguacaaugucgccacaugcggacucaucggccuggugacguuccuucugcucuccgggagaucuuguagccugaucuauaaaggaaccuacgaacugcagacacucgagcugaacauggaaacccuuaauaugugcaugccucuguccuguacaaagaacaauucucaucacuauauucggguuggcaacgagaccgggcucgagcugacacuuaccaauacgagcauccugaaccauaaauuuugcaaucucuccgacgcgcacaagcgcaaccuguacgaucauucucugaugagcauuaucuccaccuuccaccucagcauuccgaauuuuaaccaguaugaagcuaugucuugugacuucaauggaggcaaaaucacagugcaguacaaccugucccacagcuuugccgucgaugccgcuggccauugcgggacccuugccaauggagugcugcaaacauucaugagaauggcuuggggcgggucuuauauugcccucgacuccggacggggcaacugggauuguaucaugaccagcuaccaguaccugaucauucagaacacgacaugggacgaucacugccaguuuucucgccccuccccuaucggguaucuuggacugcucagccaaagaacccgggacauuuacaucucccgcagacugcugggcacauucaccuggacccucucugauagcgagggcaaugaaacacccgggggauauugucugacgcgguggaugcuuauugaggcggagcugaagugcuuuggcaacaccgccguugcuaaguguaaugaaaaacaugacgaggaguucugcgauaugcuccgccuguuugacuucugcaagcaggccaucagacggcuuaaaaccccugcucagauguccauccagcugauuaacaaggccgugaaugcgcucaucaacgaucaacugauuaugaaaaaucaucugcgcgacaucauggggauucccuacuguaacuauagcagauacugguaucucaaucacacaucuacaggaaagaccucccugccucggugcuggcuuaucagcaacggcucuuaccugaaugaaacgaaguucagcgacgauaucgaacagcaggccgacaacaugauuacagagaugcuccaaaaagaguacaucgaucgccaggggaagaccccgcugggacuggucgaccuuuuuguguucuccaccucuuuuuaucucauuagcaucuuccugcaccuggugaaaauucccacacacagacauaucgucggcaagccuugucccaaaccucaccggcucaaucauaugggcauuugcuccugugggcuguacaagcagcccggaguuccggugagauggaaacgcugaggacuagucccuguucccagagcccacuuuuuuuucuuuuuuugaaauaaaauagccugucuuucagaucucaaaggcucuuuucagagccaccaaaaaaaaaaaaaaaaaaaaaaaaaaaaaaaaaaaaaaaaaaaaaaaaaaaaaaaaaaaaaaaaagaauu

SEQ ID NO: 29993 - RNA, 1717 nt, Artificial Sequence
  mRNA product Design a-1 (hSL-A64-N5) comprising derived and/or modified sequence from LASV(AV;Clade V)__CCA30314__GPCmut6 (opt5)
aggagagucccgcagucggcguccagcggcucugcuuguucgugugugugucguugcaggccuuauucaagcuuaccaugggccagaucgugaccuucuuucaagaggucccccacguuauugaagaggugaugaacaucgugcugauugcccucagcauccuggcuguccuuaaggggcuguacaauauugccacaugcggacucaucggccugaucacguuccuucugcucugugggagauccugcucuagcaaccuguauaaaggaguguacgaacugcagucccucgaccugaauauggagacccuuaacauguguaugccucugucuugcacaaagaauaacagccaucacuauauucggguuggcaaugauaccgggcucgaacugacacuuaccaacacauccauccugaaucauaaauuuuguaaccucucugacgcgcacaagaaagaucuguacgaccaugcucugaugagcauuaucuccaccuuccaccucagcauuccgaauuuuaaccaguaugaggccaugucuugcgauuucaauggaggcaagaucuccgugcaguacaaccugagccacucuuaugccauugacgcugccaaucauuguggcacggucgcuaacgggauccuucaaaccuuuaugcgcauggccuggggaggcuccuacaucgcgcuggauagcgggagaggaaacugggacugcauuaugacaucuuaccaguaucucaucauucagaauaccacaugggagaaccacugucaguucucccggcccagcccuaucggcuaccuggggcuucugucccaacgcaccagagauauuuauaucucucggcgccuccugggaacguuuacauggacccugagcgacuccgaaggcaaugccacacccggcggguacugccucaccagauggaugcugaucgaggcugaacuuaaguguuucggaaacaccgccguggcuaaaugcaaugagaagcaugaugaggaauuuugcgacaugcugcgccucuucgauuuuuguaaacaggccauuagccggcugaagucuccugcgcagauguccauccagcuuauuaacaaagccguuaaugcucugaucaacgaccaacucauuaugaagaaucaccugagagacaucaugggcauccccuauugcaacuacagcaaguauugguaccugaaucacacaauuacggggaaaaccucucucccuaaguguuggcuggugagcaacggauccuaccuuaaugagacacauuucucugaugacaucgaacagcaggccgauaacaugauuaccgagaugcugcaaaaagaauauauggagcggcagggcaagacaccgcucgggcuggucgaccuguucguguuuagcaccuccuucuaccuuaucagcauuuuucuccgccuggugaaaauccccacgcacagacauauugucggaaagccuugccccaaaccucaccggcugaaucauaugggcaucuguucuugcggccucuauaagcagcccgggguuccggugcgcuggaagagaugaggacuagucccuguucccagagcccacuuuuuuuucuuuuuuugaaauaaaauagccugucuuucagaucucaaaggcucuuuucagagccaccaaaaaaaaaaaaaaaaaaaaaaaaaaaaaaaaaaaaaaaaaaaaaaaaaaaaaaaaaaaaaaaaagaauu

SEQ ID NO: 29994 - RNA, 1714 nt, Artificial Sequence
  mRNA product Design a-1 (hSL-A64-N5) comprising derived and/or modified sequence from LASV(Togo/2016/7082;Clade VI)__AMR44577__GPCmut6 (opt5)
aggagagucccgcagucggcguccagcggcucugcuuguucgugugugugucguugcaggccuuauucaagcuuaccaugggccagaucauuaccuucuuucaagaggugccccacgucaucgaagagguuaugaacauugugcugaucgcccucagccugcuugcuauucugaaggggguguacaaugucgccacaugcggaaucaucggccucgugacguuccuguuucuuugugggagauccugcucucugauuuauaaaggaagcuacgaacuccagacccuggagcugaacauggaaacacucaauauguguaugccucuguccugcaccaagaacucuagccaucacuauauccggguuggcaaugagacagggcuugagcugacccucacaaacaccuccauuaucaaucauaaauucuguaaccugucugacgcgcacaagcgcaaucuuuacgaucaugcucugaugagcauucucuccacguuucaccugagcaucccgaacuucaaucaguaugaagccaugucuugcgacuuuaacggaggcaaaauuuccgugcaguacaaucugagccacgccuaugcugucgaugccgcugagcauuguggcaccguggccaacgggguucuccaaacauucaugagaauggcguggggaggcucuuacaucgcccuggacuccgggcggggaaauugggauugcaucaugaccagcuaccaguaucuuauuauccagaacacaaccugggaagaccacugucaguuuucucgccccuccccuauuggcuaccuggggcuccugagccaaagaacgcgggauaucuauauuucccgcagacuucugggaacauucaccuggacacucucugacagcgagggcaacgagacccccggcggguacugccugacccgguggaugcugaucgaagcugagcucaaguguuuuggaaauacagccguggcuaagugcaacgaaaaacaugaugaggaguucugcgacaugcugcgccuuuuugauuucuguaagcaggccauccagagacugaaauccccugcgcagaugagcauucaacucaucaauaaggccgucaacgcucugauuaaugaccagcuuaucaugaaaaaccaucugcgggauaugaugggcauucccuauugcaauuacucuaaguauugguaccucaaccacacguccagcgggcgcaccucucugccuaaguguuggcuggugagcaauggauccuaccucaacgaaacacacuucucugacgacaucgagcagcaagccgauaauaugaucaccgaaaugcugcagaaagaguauauugacagacagggcaagacaccgcuugggcugguggaucucuuugucuucagcaccuccuuuuaccugaucagcauuuuccugcaccuuaucaaaauucccacgcaucggcacaucguuggaaagccuugccccaaaccucaucgccucaaccacaugggcauuuguucuugcggccuguauaagcagcccggggugccgacaagauggaaacggugaggacuagucccuguucccagagcccacuuuuuuuucuuuuuuugaaauaaaauagccugucuuucagaucucaaaggcucuuuucagagccaccaaaaaaaaaaaaaaaaaaaaaaaaaaaaaaaaaaaaaaaaaaaaaaaaaaaaaaaaaaaaaaaaagaauu

SEQ ID NO: 29995 - RNA, 1714 nt, Artificial Sequence
  mRNA product Design a-1 (hSL-A64-N5) comprising derived and/or modified sequence from LASV(KAK-428;Clade n.d. (VII))__ANH09740__GPCmut6 (opt5)
aggagagucccgcagucggcguccagcggcucugcuuguucgugugugugucguugcaggccuuauucaagcuuaccaugggccagaucgugaccuucuuucaagaggucccccacguuauugaagaggugaugaacaucgugcugauugcccucagccugcuugcuauccugaaggggcucuacaauuucgccacaugcggagucauuggccugaucacguuucuucugcucugugggagauccugcucugcgaccuauaaaggacaguacgaacugcagacacuggagcucaacauggaaagccugaauauguguaugccucuuuccugcaccaagaacaauucucaucacuauauccgggcuggcaacaauacagggcuggagcucacccugacaaacaccagcauuaucucccauaaauucuguaaucuuucugacgcccacaagaaaaaccuguacgaucauacgcucaugagcauuaucaccacauuucaccuguccauuccgaauuucaaccaguaugaggccaugagcugcgacuuuaauggaggcaagaucucuauucaauacaaccugucccacagcuaugcuggcgaugccgcucagcauugugggaccguggccaauggaguucuccagacauucaugcgcauggcguggggcgggucuuaccuggcccuugacuccggaagacggggcugggauugcaucaucagcucuuaccaguaucugauuauccaaaacaccacgugggacgaucacugucaguuuucccgccccagcccuauuggguaccucggauucgugucccagaagacaagagacaucuauauuucucggcgccugcuuggcaccuuuacauggacccugagcgauuccgaaggccaugacaugcccgggggauacugccucaccagauggaugcugaucgaggcugaucugaaauguuucggcaacacagccgucgcuaagugcaaugaaaaacacgacgaggaguuuugcgauauguggcgccucuucgacuucuguaagcaggccauccaacggcugaaagcgccugcccagaugaacauucagcuuaucaauaaggcugugaacgcccugauuaaugaccaacucaugaugaagaaccaccugagagauaucauggggauucccuauugcaauuacagcaaauuuugguaucuuaacaauacgaccacaggacggaccucucugccucgcuguuggcucaucuccaacggcagcuaccugaaugaaacacauuucucugacgauaucgagcagcaggcugacaacaugauuaccgaaaugcugcagaaggaguacauggauagacaagggaaaacgccgcucggacugguugaccuuuuuguguucagcacauccuuuuaucugaucaccauuuuccuccaccuggucaagauccccacccaucggcacauugugggcaaaccuugccccaagccucaucgccugaaucacaugggcaucuguucuugcgggcuuuacaaacagcccggagugccggucagauggaagcggugaggacuagucccuguucccagagcccacuuuuuuuucuuuuuuugaaauaaaauagccugucuuucagaucucaaaggcucuuuucagagccaccaaaaaaaaaaaaaaaaaaaaaaaaaaaaaaaaaaaaaaaaaaaaaaaaaaaaaaaaaaaaaaaaagaauu

SEQ ID NO: 29996 - RNA, 1714 nt, Artificial Sequence; identical to SEQ ID NO: 29990
  mRNA product Design a-1 (hSL-A64-N5) comprising derived and/or modified sequence from LASV(Pinneo-NIG-1969;Clade I)__AIT17836__GPCmut6 (opt5)

SEQ ID NO: 29997 - RNA, 1714 nt, Artificial Sequence
  mRNA product Design a-1 (hSL-A64-N5) comprising derived and/or modified sequence from LASV(ISTH0009-NIG-2011;Clade II)__AIT17404__GPCmut6 (opt5)
aggagagucccgcagucggcguccagcggcucugcuuguucgugugugugucguugcaggccuuauucaagcuuaccaugggccagaucauuaccuucuuucaagaggugccccacgucaucgaagagguuaugaacauugugcugaucgcccucagccugcuugcuauucugaaggggaucuacaauguggccacaugcggacucuucggccuggucuccuuucuucugcucugugggagaucuugcagcacgaccuauaaaggaguguacgaacugcagacacuggagcucgacauggcgucccugaacauguguaugccucuuucuugcaccaagaauaacagccaucacuauaucaugguuggcaaugaaacagggcuggagcucacccugacaaacaccuccauuaucaaucauaaauucuguaaccuuucugaugcucacaagaaaaaucuguacgaccaugcccucaugagcauuaucuccacguuucaccugagcauuccgaacuucaaucaguaugaggccaugucuugcgauuuuaacggaggcaagaucuccgugcaguacaaucugagccacgcuuaugccgucgacgcugccaaccauuguggcaccauugcgaauggggugcuccaaacauucaugcggauggccuggggaggcucuuacaucgcucuggauuccgggaagggaagcugggacugcaucaugaccucuuaccaguaucuuauuauccagaacacaaccugggaagaucacugucaguuuucccgccccagcccuauuggcuaccuggggcuccugucccaaagaacgcgggacaucuauauuucucgcagacuucugggaacauucaccuggacacucagcgauuccgagggcaacgaaacccccggcggguacugccugacccgguggaugcugaucgaggccgagcucaaauguuuuggaaauacagcuguugccaagugcaacgaaaaacaugacgaggaguucugcgauaugcugcgccuuuuugacuucuguaagcaggcgaucagacggcugaaaacgccugcccagaugagcauucagcucaucaauaaggcugugaacgcccugauuaaugaucaacuuaucaugaagaaccaucugcgcgacauuaugggcauccccuauugcaauuacucuaaauauugguaccucaaccacaccgucacagggaagaccucccugccuagauguuggcuggugagcaauggaucuuaccucaacgaaacacacuucagcgacgauaucgaacagcaggcugacaauaugauuaccgagcugcuucaaaaagaguauauggaucggcagggcaagacgccgcuggggcucguggaccuguuugucuucuccacaucuuuuuaccugaucagcauuuuccuucaccucaucaaaauucccacccaucgccacaucaccggaaagccuugccccaaaccucauagacugaaccacaugggcauuuguuccugcggccuguauaagcaccccgggguuccggugaaguggaaacggugaggacuagucccuguucccagagcccacuuuuuuuucuuuuuuugaaauaaaauagccugucuuucagaucucaaaggcucuuuucagagccaccaaaaaaaaaaaaaaaaaaaaaaaaaaaaaaaaaaaaaaaaaaaaaaaaaaaaaaaaaaaaaaaaagaauu

SEQ ID NO: 29998 - RNA, 1714 nt, Artificial Sequence
  mRNA product Design a-1 (hSL-A64-N5) comprising derived and/or modified sequence from LASV(ISTH2010-NIG-2012;Clade II)__AIT17482__GPCmut6 (opt5)
aggagagucccgcagucggcguccagcggcucugcuuguucgugugugugucguugcaggccuuauucaagcuuaccaugggccagaucauuaccuucuuucaagaggugccccacgucaucgaagagguuaugaacauugugcugaucgcccucagccugcuugcuauucugaaggggaucuacaauguggccacaugcggacucuucggccuggucuccuuucuucugcucugugggagaucuugcagcacgaccuauaaaggaguguacgaacugcagacacuggagcucgacauggcgucccugaacauguguaugccucuuucuugcaccaagaauaacagccaucacuauaucaugguuggcaaugaaacagggcuggagcucacccugacaaacaccuccauuaucaaucauaaauucuguaaccuuucugaugcucacaagaaaaaucuguacgaccaugcccucaugagcauuaucuccacguuucaccugagcauuccgaacuucaaucaguaugaggccaugucuugcgauuuuaacggaggcaagaucuccgugcaguacaaucugagccacgcuuaugccgucgacgcugccaaccauuguggcaccauugcgaauggggugcuccaaacauucaugcggauggccuggggaggcucuuacaucgcucuggauuccgggaagggaagcugggacugcaucaugaccucuuaccaguaucuuauuauccagaacauuacaugggaagaucacugucaguuuucccgccccagcccuaucggcuaccuggggcuccugucccaaagaacccgggacauuuauaucucucgcagacuucugggaacguucacauggacccucagcgauuccgagggcaacgaaacacccggcggguacugccugacccgguggaugcugaucgaggccgagcucaaauguuuuggaaauaccgcuguugccaagugcaacgaaaaacaugacgaggaguucugcgauaugcugcgccuuuuugacuucuguaagcaggcgauuagacggcugaaaacgccugcccagaugagcauccagcucauuaauaaggcugugaacgcccugaucaaugaucaacuuauuaugaagaaccaucugcgcgacaucaugggcauccccuauugcaauuacucuaaauauugguaccucaaccacacagucaccgggaagacaucccugccuagauguuggcuggugagcaauggaucuuaccucaacgaaacccacuucagcgacgauauugaacagcaggcugacaauaugaucacagagcugcuucaaaaagaguauauugaucggcagggcaagaccccgcuggggcucguggaccuguuugucuucuccacgucuuuuuaccugaucagcauuuuccuucaccucguuaaaauccccacacaucgccacguggugggaaagccuugccccaaaccucauagacugaaccacaugggcauuuguuccugcggccuguauaagcaccccggggucccggugaaguggaaacggugaggacuagucccuguucccagagcccacuuuuuuuucuuuuuuugaaauaaaauagccugucuuucagaucucaaaggcucuuuucagagccaccaaaaaaaaaaaaaaaaaaaaaaaaaaaaaaaaaaaaaaaaaaaaaaaaaaaaaaaaaaaaaaaaagaauu

SEQ ID NO: 29999 - RNA, 1714 nt, Artificial Sequence
  mRNA product Design a-1 (hSL-A64-N5) comprising derived and/or modified sequence from LASV(Lassa virus/H.sapiens-wt/NGA/2015/ISTH_0543;Clade II)__AVO03639__GPCmut6 (opt5)
aggagagucccgcagucggcguccagcggcucugcuuguucgugugugugucguugcaggccuuauucaagcuuaccaugggccagaucauuaccuucuuucaagaggugccccacgucaucgaagagguuaugaacauugugcugaucgcccucagccugcuugcuauucugaaggggaucuacaauguggccacaugcggacucuucggccuggucuccuuucuucugcucugugggagaucuugcagcacgaccuauaaaggaguguacgaacugcagacacuggagcucgacauggcgaaccugaauauguguaugccucuuuccugcaccaagaacaauucucaucacuauaucaugguuggcaacgaaacagggcuggagcucacccugacaaauaccagcauuaucaaccauaaauucuguaaucuuuccgaugcucacaagaaaaaccuguacgaccaugcccucaugucuauuaucagcacguuucaccuguccauuccgaauuucaaccaguaugaggccaugagcugcgauuuuaauggaggcaagaucucugugcaguacaaccugucccacaccuaugcugucgacgccgcuaaucauuguggcacaauugccaacggggugcuccaaaccuucaugcggauggcguggggaggcagcuacaucgcccuggauucugggaagggauccugggacugcaucaugacaagcuaccaguaucuuguuauucagaacaccacgugggaagaucacugucaguuuucucgccccuccccuaucggcuaccuggggcuccugagccaaagaacacgggacauuuauaucucccgcagacuucugggaaccuucacauggacccucucugauagcgagggcaaugaaacccccggcggguacugccugacacgguggaugcugauugaggcugagcucaaauguuuuggaaacacggccguggcuaagugcaaugaaaaacaugacgaggaguucugcgauaugcugcgccuuuuugacuucuguaagcaggccaucagacggcugaaaaccccugcgcagauguccauccagcucauuaacaaggccgucaaugcucugaucaacgaucaacuuauuaugaagaaucaucugcgcgacaucaugggcauucccuauugcaacuacagcaaauauugguaccucaaucacacagugaccgggaagacaucucugccuagauguuggcugguguccaacggaagcuaccucaaugaaacccacuucucugacgauaucgaacagcaggccgacaacaugaucacggagcugcuucaaaaagaguauauugaucggcagggcaagacaccgcuggggcucgucgaccuguuuguuuucagcaccuccuuuuaccugaucucuauuuuccuucaccucgugaaaauccccacccaucgccacauuacaggaaagccuugccccaaaccucauagacugaaucacaugggcaucuguagcugcggccuguauaagcaccccggggugccggucaaguggaaacggugaggacuagucccuguucccagagcccacuuuuuuuucuuuuuuugaaauaaaauagccugucuuucagaucucaaaggcucuuuucagagccaccaaaaaaaaaaaaaaaaaaaaaaaaaaaaaaaaaaaaaaaaaaaaaaaaaaaaaaaaaaaaaaaaagaauu

SEQ ID NO: 30000 - RNA, 1714 nt, Artificial Sequence
  mRNA product Design a-1 (hSL-A64-N5) comprising derived and/or modified sequence from LASV(Lassa virus/H.sapiens-wt/NGA/2016/ISTH_0009;Clade II)__AVO03571__GPCmut6 (opt5)
aggagagucccgcagucggcguccagcggcucugcuuguucgugugugugucguugcaggccuuauucaagcuuaccaugggccagaucauuaccuucuuucaagaggugccccacgucaucgaagagguuaugaacauugugcugaucgcccucagccugcuugcuauucugaaggggaucuacaauguggccacaugcggacuccugggccuugucuccuuccugcuccugugugggagaucuugcagcacgaccuauaaaggaguguacgaacugcagacacucgagcuggacauggcgucccuuaacauguguaugccucugucuugcaccaagaauaacagccaucacuauaucaugguuggcaaugaaacagggcucgagcugacccuuacaaacaccuccauuaucaaucauaaauuuuguaaccugucugaugcucacaagaaaaaucucuacgaccaugcccugaugagcauuaucuccacguuccaccugagcauuccgaacuuuaaucaguaugaggccaugucuugcgauuucaacggaggccggaucuccgugcaguacaaucucagccacucuuaugcugucgacgccgcuaaccauuguggcaccauugccaauggggugcugcaaacauuuaugcgcauggcguggggaggcuccuacaucgcccuugauagcgggaagggaucuugggacugcaucaugaccuccuaccaguaucugauuauccagaacacaaccugggaagaucacugucaguucagcagacccuccccuauuggcuaccucgggcugcuuucucaacggacgcgcgacaucuauauuagcagacggcugcucggaacauuuaccuggacacuguccgauagcgagggcaacgaaacccccggcggguacugccugacccgcuggaugcucaucgaggcugagcugaaguguuucggaaauacagccguugcuaaaugcaacgaaaagcaugacgaggaauuuugcgauaugcuuagacuguucgacuuuuguaaacaggccauccggcgccucaagacgccugcgcagaugucuauucagcugaucaauaaagccgugaacgcucuuauuaaugaucaacugaucaugaagaaccaccucagagacauuaugggcauccccuauugcaauuacuccaaguauugguaccugaaccacaccgucacagggaaaaccagccugccucgguguuggcucgugucuaauggaagcuaccugaacgagacacauuucuccgacgauaucgaacagcaggccgacaauaugauuaccgagcuucugcaaaaggaguauaucgaucgccagggcaaaacgccgcucgggcugguggaccuguucgucuuuucuaccagcuucuaccuuauuuccaucuuucuccaccugguuaagauucccacacauagacacaucaccggaaaaccuugccccaagccucaucggcugaaccacaugggcauuuguagcugcggccucuauaaucaccccggggugccggugaaauggaagcgcugaggacuagucccuguucccagagcccacuuuuuuuucuuuuuuugaaauaaaauagccugucuuucagaucucaaaggcucuuuucagagccaccaaaaaaaaaaaaaaaaaaaaaaaaaaaaaaaaaaaaaaaaaaaaaaaaaaaaaaaaaaaaaaaaagaauu

SEQ ID NO: 30001 - RNA, 1714 nt, Artificial Sequence
  mRNA product Design a-1 (hSL-A64-N5) comprising derived and/or modified sequence from LASV(Lassa virus/H.sapiens-wt/NGA/2016/ISTH_0017;Clade II)__AVO03567__GPCmut6 (opt5)
aggagagucccgcagucggcguccagcggcucugcuuguucgugugugugucguugcaggccuuauucaagcuuaccaugggccagaucauuaccuucuuucaagaggugccccacgucaucgaagagguuaugaacauugugcugaucgcccucagccugcuugcuauucugaaggggaucuacaauguggccacaugcggacucuucggccuggucuccuuucuucugcucugugggagaucuugcagcacgaccuauaaaggaguguacgaacugcagacacuggagcucgacauggcgucccugaacauguguaugccucuuucuugcaccaagaauaacagccaucacuauaucaugguuggcaaugaaacagggcuggagcucacccugacaaacaccuccauuaucaaucauaaauucuguaaccuuucugaugcucacaagaaaaaucuguacgaccaugcccucaugagcauuaucuccacguuucaccugagcauuccgaacuucaaucaguaugaggccaugucuugcgauuuuaacggaggcaagaucuccgugcaguacaaucugagccacaccuaugcuauugacgccgcuaaccauuguggcacaaucgccaaugggguccuccaaaccuucaugcggauggcguggggaggcucuuacaucgcccuggauuccgggaagggaagcugggacugcauuaugacaucuuaccaguaucuuaucauucagaacaccacgugggaagaucacugucaguuuucccgccccagcccuaucggcuaccuggggcuccugucccaaagaacacgggacauuuauaucucucgcagacuucugggaaccuucacauggacccucagcgauuccgagggcaacgaaacccccggcggguacugccugacacgguggaugcugaucgaggcugagcucaaauguuuuggaaauacggccguggcuaagugcaacgaaaaacaugacgaggaguucugcgauaugcugcgccuuuuugacuucuguaagcaggccauuagacggcugaaaaccccugcgcagaugagcauccagcucauuaauaaggccguuaacgcucugaucaaugaucaacuuauuaugaagaaccaucugcgcgacaucaugggcauccccuauugcaauuacucuaaauauugguaccucaaccacacagugaccgggaagacaucccugccuagauguuggcuggucagcaauggaucuuaccucaacgaaacccacuucagcgacgauauugaacagcaggccgacaauaugaucacggagcugcuucaaaaagaguauauggaucggcagggcaagacaccgcuggggcucguggaccuguuuguguucuccaccucuuuuuaccugauuagcaucuuccuucaccucguccgcauucccacccauagacacguuaucggaaaaccuugccccaagccucaucggcugaaccacaugggcauuuguuccugcggccuguauaaacaccccggggugccggugaaguggaagcgcugaggacuagucccuguucccagagcccacuuuuuuuucuuuuuuugaaauaaaauagccugucuuucagaucucaaaggcucuuuucagagccaccaaaaaaaaaaaaaaaaaaaaaaaaaaaaaaaaaaaaaaaaaaaaaaaaaaaaaaaaaaaaaaaaagaauu

SEQ ID NO: 30002 - RNA, 1714 nt, Artificial Sequence
  mRNA product Design a-1 (hSL-A64-N5) comprising derived and/or modified sequence from LASV(Lassa virus/H.sapiens-wt/NGA/2018/ISTH_0959;Clade II)__AVV65099__GPCmut6 (opt5)
aggagagucccgcagucggcguccagcggcucugcuuguucgugugugugucguugcaggccuuauucaagcuuaccaugggccagaucauuaccuucuuucaagaggugccccacgucaucgaagagguuaugaacauugugcugaucgcccucagccugcuugcuauucugaaggggaucuacaauguggucacaugcggacucuucggccugguguccuuucuucugcucugugggagaucuugcagcacgaccuauaaaggaguuuacgaacugcagacacuggagcucgacauggccucccugaacauguguaugccucuuucuugcaccaagaauaacagccaucacuauaucauggugggcaaugaaacagggcuggagcucacccugacaaacaccuccauuaucaaucauaaauucuguaaccuuucugaugcgcacaagaaaaaucuguacgaccaugcucucaugagcauuaucuccacguuucaccugagcauuccgaacuucaaucaguaugaggccaugucuugcgauuuuaacggaggcaagaucuccguccaguacaaucugagccacgccuaugcuauugacgccgcuaaccauuguggcaccaucgccaauggggugcuccaaacauucaugcggauggcguggggaggcucuuacaucgcccuggauuccgggaagggaagcugggacugcauuaugaccucuuaccaguaucuuaucauucagaacacaaccugggaagaucacugucaguuuucccgccccagcccuaucggcuaccuggggcuccugucccaaagaacgcgggacauuuauaucucucgcagacuucugggaacauucaccuggacacucagcgauuccgagggcaacgaaacccccggcggguacugccugacccgguggaugcugaucgaggcugagcucaaauguuuuggaaauacagccguugcuaagugcaacgaaaaacaugacgaggaguucugcgauaugcugcgccuuuuugacuucuguaagcaggccauuagacggcugaaaacgccugcgcagaugagcauccagcucauuaauaaggccgugaacgcucugaucaaugaucaacuuauuaugaagaaccaucugcgcgacaucaugggcauccccuauugcaauuacucuaaauauugguaccucaaccacaccgucacagggaagaccucccugccuagauguuggcuggugagcaauggaucuuaccucaacgaaacacacuucagcgacgauauugaacagcaggccgacaauaugaucaccgagcugcuucaaaaagaguauauugaucggcagggcaagacgccgcuggggcucguggaccuguuugucuucuccacaucuuuuuaccugaucagcauuuuccuucaccucguuaaaauccccacccaucgccacgugauuggaaagccuugccccaaaccucauagacugaaccacaugggcaucuguuccugcggccuguauaagcaccccggggugccggucaaguggaaacggugaggacuagucccuguucccagagcccacuuuuuuuucuuuuuuugaaauaaaauagccugucuuucagaucucaaaggcucuuuucagagccaccaaaaaaaaaaaaaaaaaaaaaaaaaaaaaaaaaaaaaaaaaaaaaaaaaaaaaaaaaaaaaaaaagaauu

SEQ ID NO: 30003 - RNA, 1714 nt, Artificial Sequence
  mRNA product Design a-1 (hSL-A64-N5) comprising derived and/or modified sequence from LASV(LASV003-NIG-2008;Clade II)__AIT17580__GPCmut6 (opt5)
aggagagucccgcagucggcguccagcggcucugcuuguucgugugugugucguugcaggccuuauucaagcuuaccaugggccagaucauuaccuucuuucaagaggugccccacgucaucgaagagguuaugaacauugugcugaucgcccucagccugcuugcuauucugaaggggaucuacaauguggccacaugcggacucuucggccuggucuccuuucuucugcucugugggagaucuugcagcacgaccuauaaaggaguguacgaacugcagacacuggagcucgacauggcgucccugaacauguguaugccucuuucuugcaccaagaauaacagccaucacuauaucaugguuggcaaugaaacagggcuggagcucacccugacaaacaccuccauuaucaaucauaaauucuguaaccuuucugaugcucacaagaaaaaucuguacgaccaugcccucaugagcauuaucuccacguuucaccugagcauuccgaacuucaaucaguaugaggccaugucuugcgauuuuaacggaggcaagaucuccgugcaguacaaucugagccacaccuaugcugucgacgccgcuaaccauuguggcacaauugccaauggggugcuccaaaccuucaugcggauggcguggggaggcucuuacaucgcccuggauuccgggaagggaagcugggacugcaucaugacaucuuaccaguaucuuauuauccagaacaccacgugggaagaucacugucaguuuucccgccccagcccuauuggcuaccuggggcuccugucccaaagaacacgggacaucuauauuucucgcagacuucugggaaccuucacauggacccucagcgauuccgagagcaacgaaacccccggcggcuacugccugacacgguggaugcugaucgaggcugagcucaaauguuuugggaauacggccguugcuaagugcaacgaaaaacaugacgaggaguucugcgauaugcugcgccuuuuugacuucuguaagcaggccaucagacggcugaaagcgccugcccagaugucuauucagcucaucaauaaggcugugaacgcccugauuaaugaucaacuuaucaugaagaaccaucugcgcgacauuaugggaauccccuauugcaauuacuccaaauauugguaccucaaccacaccgucacaggcagaaccagccugccucgguguuggcuggugucuaaugggagcuaccucaacgaaacacacuucuccgacgauaucgaacagcaggcugacaauaugauuaccgagcugcuucaaaaggaguauauggaucgccagggaaaaacgccgcugggccucguggaccuguuugucuucucuaccagcuuuuaccugaucuccauuuuccuucaccucguuaagauccccacacauagacacgugauugggaaaccuugccccaagccucaucggcugaaccacaugggaaucuguagcugcggccuguauaaacaccccggcgugccggucaaguggaagcgcugaggacuagucccuguucccagagcccacuuuuuuuucuuuuuuugaaauaaaauagccugucuuucagaucucaaaggcucuuuucagagccaccaaaaaaaaaaaaaaaaaaaaaaaaaaaaaaaaaaaaaaaaaaaaaaaaaaaaaaaaaaaaaaaaagaauu

SEQ ID NO: 30004 - RNA, 1714 nt, Artificial Sequence
  mRNA product Design a-1 (hSL-A64-N5) comprising derived and/or modified sequence from LASV(LASV035-NIG-2009;Clade II)__AIT17588__GPCmut6 (opt5)
aggagagucccgcagucggcguccagcggcucugcuuguucgugugugugucguugcaggccuuauucaagcuuaccaugggccagaucauuaccuucuuucaagaggugccccacgucaucgaagagguuaugaacauugugcugaucgcccucagccugcuugcuauucugaaggggaucuacaauguggccacaugcggacucuucggccuggucuccuuucuucugcucugugggagaucuugcagcacgaccuauaaaggaguguacgaacugcagacacuggagcucgacauggcgucccugaacauguguaugccucuuucuugcaccaagaauaacagccaucacuauaucaugguuggcaaugaaacagggcuggagcucacccugacaaacaccuccauuaucaaucauaaauucuguaaccuuucugaugcucacaagaaaaaucuguacgaccaugcccucaugagcauuaucuccacguuucaccugagcauuccgaacuucaaucaguaugaggccaugucuugcgauuuuaacggaggcaagaucuccgugcaguacaaucugagccacgcuuaugccgucgacgcugccaaccauuguggcaccauugcgaauggggugcuccaaacauucaugcggauggccuggggaggcucuuacaucgcucuggauuccgggaagggaagcugggacugcaucaugaccucuuaccaguaucuuauuauccagaacacaaccugggaagaucacugucaguuuucccgccccagcccuauuggcuaccuggggcuccugucccaaagaacgcgggacaucuauauuucucgcagacuucugggaacauucaccuggacacucagcgauuccgagggcaacgaaacccccggcggguacugccugacccgguggaugcugaucgaggccgagcucaaauguuuuggaaauacagcuguugccaagugcaacgaaaaacaugacgaggaguucugcgauaugcugcgccuuuuugacuucuguaagcaggcgaucagacggcugaaagccccugcucagaugagcauucagcucaucaauaaggccgugaacgcucugauuaaugaucaacuuaucaugaagaaccaucugcgcgacauuaugggcauccccuauugcaauuacucuaaauauugguaccucaaccacacggucaccgggaagacaucccugccuagauguuggcuggugagcaauggaucuuaccucaacgaaacccacuucagcgacgauaucgaacagcaggccgacaauaugauuacagagcugcuucaaaaagaguauaucgaucggcagggcaagaccccgcuggggcucguggaccuguuugucuucuccacgucuuuuuaccugauuagcaucuuccuucaccucguuaaaauucccacacaucgccacgugaucggaaagccuugccccaaaccucauagacugaaccacaugggcauuuguuccugcggccuguauaagcaccccggggugccggucaaguggaaacggugaggacuagucccuguucccagagcccacuuuuuuuucuuuuuuugaaauaaaauagccugucuuucagaucucaaaggcucuuuucagagccaccaaaaaaaaaaaaaaaaaaaaaaaaaaaaaaaaaaaaaaaaaaaaaaaaaaaaaaaaaaaaaaaaagaauu

SEQ ID NO: 30005 - RNA, 1714 nt, Artificial Sequence
  mRNA product Design a-1 (hSL-A64-N5) comprising derived and/or modified sequence from LASV(LASV1000-NIG-2009;Clade II)__AIT17782__GPCmut6 (opt5)
aggagagucccgcagucggcguccagcggcucugcuuguucgugugugugucguugcaggccuuauucaagcuuaccaugggccagaucauuaccuucuuucaagaggugccccacgucaucgaagagguuaugaacauugugcugaucgcccucagccugcuugcuauucugaaggggaucuacaauguggccacaugcggacucuucggccuggucuccuuucuucugcucugugggagaucuugcagcacgaccuauaaaggaguguacgaacugcagacacuggagcucgacauggcgucccugaacauguguaugccucuuucuugcaccaagaauaacagccaucacuauaucaugguuggcaaugaaacagggcuggagcucacccugacaaacaccuccauuaucaaucauaaauucuguaaccuuucugaugcucacaagaaaaaucuguacgaccaugcccucaugagcauuaucuccacguuucaccugagcauuccgaacuucaaucaguaugaggccaugucuugcgauuuuaacggaggcaagaucuccgugcaguacaaucugagccacaccuaugcugucgacgccgcuaaccauuguggcacaauugccaauggggugcuccaaaccuucaugcggauggcguggggaggcucuuacaucgcccuggauuccgggaagggaagcugggacugcaucaugacaucuuaccaguaucuuauuauccagaacaccacgugggaagaucacugucaguuuucccgccccagcccuauuggcuaccuggggcuccugucccaaagaacacgggacaucuauauuucucgcagacuucugggaaccuucacauggacccucagcgauuccgagggcaacgaaacccccggcggguacugccugacacgguggaugcugaucgaggcugagcucaaauguuuuggaaauacggccguugcuaagugcaacgaaaaacaugacgaggaguucugcgauaugcugcgccuuuuugacuucuguaagcaggccaucaaaagacugaagaccccugcgcagaugagcauucagcucaucaauaaggccgugaacgcucugauuaaugaucaacuuaucaugaaaaaccaucugcgggacauuaugggcauccccuauugcaauuacucuaaguauugguaccucaaccacacagucaccgggaaaacaucccugccucgcuguuggcuggugagcaauggaucuuaccucaacgaaacccacuucagcgacgauaucgaacagcaggccgacaauaugauuacggagcugcuucaaaaggaguauaucgauagacagggcaaaacaccgcuggggcucguggaccuguuugucuucuccaccucuuuuuaccugauuagcaucuuccuucaccucguuaagauucccacccaucggcacguggugggaaaaccuugccccaagccucaucgccugaaccacaugggcaucuguuccugcggccuguauaagcaccccggggucccggugaaauggaagagaugaggacuagucccuguucccagagcccacuuuuuuuucuuuuuuugaaauaaaauagccugucuuucagaucucaaaggcucuuuucagagccaccaaaaaaaaaaaaaaaaaaaaaaaaaaaaaaaaaaaaaaaaaaaaaaaaaaaaaaaaaaaaaaaaagaauu

SEQ ID NO: 30006 - RNA, 1714 nt, Artificial Sequence
  mRNA product Design a-1 (hSL-A64-N5) comprising derived and/or modified sequence from LASV(LASV221-NIG-2010;Clade II)__AIT17624__GPCmut6 (opt5)
aggagagucccgcagucggcguccagcggcucugcuuguucgugugugugucguugcaggccuuauucaagcuuaccaugggccagaucauuaccuucuuucaagaggugccccacgucaucgaagagguuaugaacauugugcugaucgcccucagccugcuugcuauucugaaggggaucuacaauguggccacaugcggacucuucggccuggucuccuuucuucugcucugugggagaucuugcagcacgaccuauaaaggaguguacgaacugcagacacuggagcucgacauggcgucccugaacauguguaugccucuuucuugcaccaagaauaacagccaucacuauaucaugguuggcaaugaaacagggcuggagcucacccugacaaacaccuccauuaucaaucauaaauucuguaaccuuucugaugcucacaagaaaaaucuguacgaccaugcccucaugagcauuaucuccacguuucaccugagcauuccgaacuucaaucaguaugaggccaugucuugcgauuuuaacggaggcaagaucuccgugcaguacaaucugagccacaccuaugcuauugacgccgcuaaccauuguggcacaaucgccaaugggguccuccaaaccuucaugcggauggcguggggaggcucuuacaucgcccuggauuccgggaagggaagcugggacugcauuaugacaucuuaccaguaucuuaucauucagaacaccacgugggaagaucacugucaguuuucccgccccagcccuaucggcuaccuggggcuccugucccaaagaacacgggacauuuauaucucucgcagacuucugggaaccuucacauggacccucagcgauuccgagggcaacgaaacccccggcggguacugccugacacgguggaugcugaucgaggcugagcucaaauguuuuggaaauacggccguggcuaagugcaacgaaaaacaugacgaggaguucugcgauaugcugcgccuuuuugacuucuguaagcaggccauuagacggcugaaaaccccugcgcagaugagcauccagcucauuaauaaggccguuaacgcucugaucaaugaucaacuuauuaugaagaaccaucugcgcgacaucaugggcauccccuauugcaauuacucuaaauauugguaccucaaccacacagugaccgggaagacaucccugccuagauguuggcuggucagcaauggaucuuaccucaacgaaacccacuucagcgacgauauugaacagcaggccgacaauaugaucacggagaugcugcaaaaagaguauauggaucggcagggcaagacaccgcuugggcugguggaccucuuuguguucuccaccucuuuuuaccugauuagcaucuuccugcaccuugucaaaauucccacccaucgccacguuaucggaaagccuugccccaaaccucauagacucaaccacaugggcauuuguuccugcggccuguauaagcaccccggggugccggugaaguggaaacggugaggacuagucccuguucccagagcccacuuuuuuuucuuuuuuugaaauaaaauagccugucuuucagaucucaaaggcucuuuucagagccaccaaaaaaaaaaaaaaaaaaaaaaaaaaaaaaaaaaaaaaaaaaaaaaaaaaaaaaaaaaaaaaaaagaauu

SEQ ID NO: 30007 - RNA, 1714 nt, Artificial Sequence
  mRNA product Design a-1 (hSL-A64-N5) comprising derived and/or modified sequence from LASV(LASV237-NIG-2010;Clade II)__AIT17638__GPCmut6 (opt5)
aggagagucccgcagucggcguccagcggcucugcuuguucgugugugugucguugcaggccuuauucaagcuuaccaugggccagaucauuaccuucuuucaagaggugccccacgucaucgaagagguuaugaacauugugcugaucgcccucagccugcuugcuauucugaaggggaucuacaauguggccacaugcggacucuucggccuggucuccuuucuucugcucugugggagaucuugcagcacgaccuauaaaggaguguacgaacugcagacacuggagcucgacauggcgucccugaacauguguaugccucuuucuugcaccaagaauaacagccaucacuauaucaugguuggcaaugaaacagggcuggagcucacccugacaaacaccuccauuaucaaucauaaauucuguaaccuuucugaugcucacaagaaagaccuguacgaucaugcccucaugagcauuaucuccacguuucaccugagcauuccgaauuucaaccaguaugaggccaugucuugcgacuuuaauggaggcaagaucuccgugcaguacaaccugagccacaccuaugcugucgaugccgcuaaucauuguggcacaauugccaacggggugcuccaaaccuucaugcggauggcguggggaggcucuuacaucgcccuggacuccgggaagggaagcugggauugcaucaugacaucuuaccaguaucuuauuauccagaauaccacgugggaagaccacugucaguuuucccgccccagcccuauuggcuaccuggggcuccugucccaaagaacacgggauaucuauauuucucgcagacuucugggaaccuucacauggacccucagcgacuccgagggcaacgaaacccccggcggguacugccugacacgguggaugcugaucgaggcugagcucaaauguuuuggaaacacggccguugcuaagugcaaugaaaaacaugaugaggaguucugcgacaugcugcgccuuuuugauuucuguaagcaggccaucagacggcugaaaaccccugcgcagaugagcauucagcucaucaacaaggccgugaaugcucugauuaacgaccaacuuaucaugaagaaucaucugcgcgacauuaugggcauccccuauugcaacuacucuaaauauugguaccucaaucacacagucaccgggaagacaucccugccuagauguuggcuggugagcaacggaucuuaccucaaugaaacccacuucagcgaugacaucgaacagcaggccgauaacaugauuacggagcugcuucaaaaagaguauauggaccggcagggcaagacaccgcuggggcucguggaucuguuugucuucuccaccucuuuuuaccugaucagcauuuuccuucaccucaucaaaauucccacccaucgccacaucacaggaaagccuugccccaaaccucauagacugaaucacaugggcauuuguuccugcggccuguauaagcaccccgggguuccggugaaguggaaacggugaggacuagucccuguucccagagcccacuuuuuuuucuuuuuuugaaauaaaauagccugucuuucagaucucaaaggcucuuuucagagccaccaaaaaaaaaaaaaaaaaaaaaaaaaaaaaaaaaaaaaaaaaaaaaaaaaaaaaaaaaaaaaaaaagaauu

SEQ ID NO: 30008 - RNA, 1714 nt, Artificial Sequence
  mRNA product Design a-1 (hSL-A64-N5) comprising derived and/or modified sequence from LASV(LASV253-NIG-2011;Clade II)__AIT17670__GPCmut6 (opt5)
aggagagucccgcagucggcguccagcggcucugcuuguucgugugugugucguugcaggccuuauucaagcuuaccaugggccagaucauuaccuucuuucaagaggugccccacgucaucgaagagguuaugaacauugugcugaucgcccucagccugcuugcuauucugaaggggaucuacaauguggccacaugcggacucuucggccuggucuccuuucuucugcucugugggagaucuugcagcacgaccuauaaaggaguguacgaacugcagacacuggagcucgacauggcgucccugaacauguguaugccucuuucuugcaccaagaauaacagccaucacuauaucaugguuggcaaugaaacagggcuggagcucacccugacaaacaccuccauuaucaaucauaaauucuguaaccuuucugaugcucacaagaaaaaucuguacgaccaugcccucaugagcauuaucuccacguuucaccugagcauuccgaacuucaaucaguaugaggccaugucuugcgauuuuaacggaggcaagaucuccgugcaguacaaucugagccacaccuaugcugucgacgccgcuaaccauuguggcacaauugccaauggggugcuccaaaccuucaugcggauggcguggggaggcucuuacaucgcccuggauuccgggaagggaagcugggacugcaucaugacaucuuaccaguaucuuauuauccagaacaccacgugggaagaucacugucaguuuucccgccccagcccuauuggcuaccuggggcuccugucccaaagaacacgggacaucuauauuucucgcagacuucugggaaccuucacauggacccucagcgauuccgagggcaacgaaacccccggcggguacugccugacacgguggaugcugaucgaggcugagcucaaauguuuuggaaauacggccguugcuaagugcaacgaaaaacaugacgaggaguucugcgauaugcugcgccuuuuugacuucuguaagcaggccaucagacggcugaaagcgccugcccagaugagcauucagcucaucaauaaggcugugaacgcccugauuaaugaucaacuuaucaugaagaaccaucugcgcgacauuaugggcauccccuauugcaauuacucuaaauauugguaccucaaccacaccgucacagggagaaccucccugccucgguguuggcuggugagcaauggaucuuaccucaacgaaacacacuucagcgacgauaucgaacagcaggcugacaauaugauuaccgagcugcuucaaaaggaguauaucgaucgccagggcaaaacgccgcuggggcucguggaccuguuugucuucuccacaucuuuuuaccugauuagcaucuuccuucaccucguuaagauucccacccauagacacaucauuggaaaaccuugccccaagccucaucggcugaaccacaugggcaucuguuccugcggccuguauaaacaccccggggugccggugaaguggaagcgcugaggacuagucccuguucccagagcccacuuuuuuuucuuuuuuugaaauaaaauagccugucuuucagaucucaaaggcucuuuucagagccaccaaaaaaaaaaaaaaaaaaaaaaaaaaaaaaaaaaaaaaaaaaaaaaaaaaaaaaaaaaaaaaaaagaauu

SEQ ID NO: 30009 - RNA, 1714 nt, Artificial Sequence
  mRNA product Design a-1 (hSL-A64-N5) comprising derived and/or modified sequence from LASV(LASV254-NIG-2011;Clade II)__AIT17674__GPCmut6 (opt5)
aggagagucccgcagucggcguccagcggcucugcuuguucgugugugugucguugcaggccuuauucaagcuuaccaugggccagaucauuaccuucuuucaagaggugccccacgucaucgaagagguuaugaacauugugcugaucgcccucagccugcuugcuauucugaaggggaucuacaauguggccacaugcggacucuucggccuggucuccuuucuucugcucugugggagaucuugcagcacgaccuauaaaggaguguacgaacugcagacacuggagcucgacaugaccaaccugaauauguguaugccucuuuccugcacaaagaacaauucucaucacuauaucaugguuggcaacgaaaccgggcuggagcucacacugaccaauacgagcauuaucaaccauaaauucuguaaucuuuccgaugcgcacaagaaaaaccuguacaaucaugcucucaugucuauuaucagcaccuuucaccuguccauuccgaacuucaaucaguaugaggccaugagcugcgacuuuaacggaggcaagaucucugugcaguacaaucugucccacagcuaugccgucgaugcugccaaccauuguggcacaauugcuaacggggugcuccaaaccuucaugcggauggccuggggaggcucuuacaucgcgcuggacuccgggaagggaaauugggauugcaucaugacaagcuaccaguaucuuauuauccagaacaccacgugggaagaccacugucaguuuucucgccccuccccuauuggcuaccuggggcuccugagccaaagaacacgggauaucuauauuucccgcagacuucugggaaccuucacauggacccucucugacagcgagggcaaugaaacccccggcggguacugccugacacgguggaugcugaucgaggccgagcucaaauguuuuggaaacacggcuguugccaagugcaaugaaaaacaugaugaggaguucugcgacaugcugcgccuuuuugauuucuguaagcaggcuaucagacggcugaaaaccccugcccaggcgaacauucagcucaucaauaaggccgugaacgcucugauuaaugaccaacuuaucaugaagaaccaucugcgcgauauuaugggcauccccuauugcaauuacuccaaauauugguaccucaaccacacagucaccgggaagacaagccugccuagauguuggcuggugucuaauggauccuaccucaacgaaacccacuucagcgacgacaucgaacagcaggccgauaauaugauuacggagcugcuucaaaaagaguauauggaccggcagggcaagacaccgcuggggcucguggaucuguuugucuucucuaccagcuuuuaccugaucuccauuuuccuucaccucguuaaaauccccacccaucgccacgugauuggaaagccuugccccaaaccucauagacugaaccacaugggcaucuguucuugcggccuguauaagcaccccggggugccggucaaguggaaacggugaggacuagucccuguucccagagcccacuuuuuuuucuuuuuuugaaauaaaauagccugucuuucagaucucaaaggcucuuuucagagccaccaaaaaaaaaaaaaaaaaaaaaaaaaaaaaaaaaaaaaaaaaaaaaaaaaaaaaaaaaaaaaaaaagaauu

SEQ ID NO: 30010 - RNA, 1714 nt, Artificial Sequence
  mRNA product Design a-1 (hSL-A64-N5) comprising derived and/or modified sequence from LASV(Nig08-A19;Clade III)__ADU56618__GPCmut6 (opt5)
aggagagucccgcagucggcguccagcggcucugcuuguucgugugugugucguugcaggccuuauucaagcuuaccaugggccagaucgugaccuucuuucaagaggucccccacguuauugaagaggugaugaacaucgugcugauugcccucagcauccuggcuauucuuaaggggcuguacaauaucgccacaugcggacucaucggccuggucacguuccuucugcucuccgggagaucuuguagcaugaccuauaaaggaguguacgaacugcagacacuggagcucaacaugaauacccugaacaugugcaugccucuuuccuguacaaagaauaacucucaucacuauauuaugguuggcaaugaaaccgggcuggagcucacacugaccaacacgagccuucugcaucacaaauuuugcaaucucuccgacgcgcauaagaaaaaccuguacgaucacacccugaugucuaucauuagcacauuccaccucuccaucccgaauuuuaaccaguaugaggcuaugagcugugacuucaauggaggcaagauuaccgugcaguacaaccugucucauuccuaugccaucgaugccgcuaaucacugcggcacagucgccaacggggugcuucaaaccuuuaugcggauggcuuggggaggcagcuacauugcccuggacucugggcgcggaaagugggauuguaucaugacguccuaccaguaucucaucauucagaacacaaccugggaagaccauugccaguucagcagacccucuccuaucggcuaccuggggcuucugucccaacggacacgcgauauuuauaucagcagacggcuccugggaaccuuuaccuggacacuguccgacucugagggcaaugaaacgcccggcggguacugucucacccgcuggaugcugauugaggcggagcuuaaaugcuucggaaacacagccguugcuaaguguaaugaaaaacacgaugaggaauuuugcgacaugcugagacucuucgauuuuugcaagcaggccauccggcgccugaaagcuccugcccagaugagcauccagcuuauuaacaaggcggugaaugcccugaucaacgaccaacucauuaugaagaaucaccugagagauaucaugggcauucccuauuguaacuacuccaaauauugguaccugaaucauaccagcacagggcggaccucucucccucgcugcuggcuggucuccaacggaagcuaccuuaaugagacgcacuucucugacgacaucgaacagcaggcugauaacaugaucacagagaugcugcaaaaggaguaucucgacagacagggcaaaaccccgcuggggcugguggaucuuuucguguuuagcaccuccuucuaccucauuucuaucuuucugcaucuggucaagauucccacacaccggcauaucguuggaaaaccuugucccaagccucaccgccucaaucacaugggcauuugcagcuguggccuguauaaacagcccggggugccggugagauggaagcggugaggacuagucccuguucccagagcccacuuuuuuuucuuuuuuugaaauaaaauagccugucuuucagaucucaaaggcucuuuucagagccaccaaaaaaaaaaaaaaaaaaaaaaaaaaaaaaaaaaaaaaaaaaaaaaaaaaaaaaaaaaaaaaaaagaauu

SEQ ID NO: 30011 - RNA, 1717 nt, Artificial Sequence
  mRNA product Design a-1 (hSL-A64-N5) comprising derived and/or modified sequence from LASV(G1180-SLE-2010;Clade IV)__AIT17168__GPCmut6 (opt5)
aggagagucccgcagucggcguccagcggcucugcuuguucgugugugugucguugcaggccuuauucaagcuuaccaugggccagaucgugaccuucuuucaagaggucccccacguuauugaagaggugaugaacaucgugcugauugcccucagcauccuggcuguccuuaaggggcuguacaauuucgccacaugcggacucgugggccugcuuacguuucugcuccugugugggagauccugcaccgcgucucgguauaaaggaguuuacgaacugcagacacucgagcugaacauggaaacccuuaauauguguaugccucugagcugcacaaagaacaauucccaucacuauauuauggugggcaacgagaccgggcucgagcugacacuuaccaauacgucuaucaucaaccauaaauucuguaaucugagcgacgcucacaagaaaaaccucuacgaucaugcccugauguccauuaucucuaccuuucaccugagcauuccgaauuucaaccaguaugaagccauguccugcgacuuuaauggaggcaagaucagcguccaguacaaccucucucacuccuaugcuggcgaugccgcuaaucauugugggacaguggccaacggaguucugcaaaccuucaugcgcauggcguggggcgggagcuacauugcccuugacucuggacacggcuccugggauugcaucaugacaagcuaccaguaucugauuauccagaacaccacgugggaggaccauugucaguuuucuagacccuccccuaucggguaccucggacugcuuagccaacggacacgcgauauuuauaucuccagacggcugcucggcaccuucacauggacccugucugacagcgaaggcaaggauacccccgggggauacugccugacacgcuggaugcucauugaggcugagcugaaauguuuuggcaauacggccguggcuaagugcaacgaaaaacacgacgaggaguucugcgauaugcuuagacuguuugacuucuguaagcaggccauccagcggcucaaagcgccugcccagauguccauucaacugaucaauaaggcugucaacgcccuuaucaaugaucagcugauuaugaagaaccaccuccgcgacaucauggggauucccuauugcaauuacagcaaauauugguaccugaaccauaccacaaccggaaagacaucucugccuaaauguuggcucguguccaauggcagcuaccugaacgaaacccacuucucugacgauaucgaacagcaagcugacaauaugauuacggagaugcuucagaaggaguauauggaaagacaggggaaaacaccgcugggacucguggaucuguuugucuucagcaccuccuuuuaccugaucucuaucuuccuucaucucguuaagauucccacccaccggcauaucgugggcaaaagcugcccuaagccccaccgccugaaccacaugggcauuuguuccugcgggcuguauaagcagccuggagugcccgucaaauggaagagaugaggacuagucccuguucccagagcccacuuuuuuuucuuuuuuugaaauaaaauagccugucuuucagaucucaaaggcucuuuucagagccaccaaaaaaaaaaaaaaaaaaaaaaaaaaaaaaaaaaaaaaaaaaaaaaaaaaaaaaaaaaaaaaaaagaauu

SEQ ID NO: 30012 - RNA, 1717 nt, Artificial Sequence
  mRNA product Design a-1 (hSL-A64-N5) comprising derived and/or modified sequence from LASV(G1442-SLE-2011;Clade IV)__AIT17180__GPCmut6 (opt5)
aggagagucccgcagucggcguccagcggcucugcuuguucgugugugugucguugcaggccuuauucaagcuuaccaugggccagaucgugaccuucuuucaagaggucccccacguuauugaagaggugaugaacaucgugcugauugcccucagcauccuggcuguccuuaaggggcuguacaauguggccacaugcggacucauuggccugguuacguuccuucugcucugugggagauccugcaccacaacccuguauaaaggaguguacgaacugcagacacucgagcugaacauggaaacccuuaauauguguaugccucugucuugcacaaagaacaauagccaucacuauauccgggucggcaacgagaccgggcucgagcugacgcuuaccaauacauccaucauuaaccauaaauuuuguaaucugucugacgcgcacaagaaaaaccucuacgaucaugcucugaugagcaucauuuccaccuuccaccugucuaucccgaauuuuaaccaguaugaagccaugagcugcgacuucaauggaggcaagauuuccgugcaguacaaccucagccacucuuaugccggcgaugcugccaaucauugugggacaguugcuaacggagugcugcaaaccuuuaugcgcauggccuggggcggguccuacaucgcgcuugacagcggaagaggcaacugggauugcauuaugacgucuuaccaguaucugaucauccagaauacaaccugggacgaucacugucaguucucccggcccagcccuauuggguaccucggacugcuuucucaacgcacaagagacgucuauaucucccggcgccugcucggcaccuuuaccuggacacugagcgauuccgagggcaaggacacgcccgggggauacugccugaccagauggaugcucauugaagccgagcugaaauguuucggcaacacagcuguggccaagugcaaugagaaacaugaugaagaguuuugcgacaugcuucggcuguucgauuuuuguaagcaggcuauccagcgccucaaagccccugcgcagaugucuauucaacugaucaacaaggccgugaaugcucuuaucaacgaccagcugauuaugaagaaucaccucagagacaucauggggauucccuauugcaacuacagcaaauauugguaccugaauaacaccgccacaggaaagaccucccugccuaaauguuggcucaucagcaauggcucuuaccugaacgaaacgcacuucuccgaugacauugagcaggaagcugauaauaugaucacagagaugcuucaaaaggaguauauggaacggcaggggaaaaccccgcugggacucgucgaccuguucguuuuuagcaccucuuucuaccugaucagcauuuuucuucaucucgugaagauccccacacaccgccauauugugggcaaauccugcccuaagccccacagacugaaccauaugggcaucuguucuugcgggcuguauaagcagccuggaguccccgugcgguggaaacgcugaggacuagucccuguucccagagcccacuuuuuuuucuuuuuuugaaauaaaauagccugucuuucagaucucaaaggcucuuuucagagccaccaaaaaaaaaaaaaaaaaaaaaaaaaaaaaaaaaaaaaaaaaaaaaaaaaaaaaaaaaaaaaaaaagaauu

SEQ ID NO: 30013 - RNA, 1717 nt, Artificial Sequence
  mRNA product Design a-1 (hSL-A64-N5) comprising derived and/or modified sequence from LASV(G3010-SLE-2013;Clade IV)__AIT17344__GPCmut6 (opt5)
aggagagucccgcagucggcguccagcggcucugcuuguucgugugugugucguugcaggccuuauucaagcuuaccaugggccagaucgugaccuucuuucaagaggucccccacguuauugaagaggugaugaacaucgugcugauugcccucagcauccuggcuguccuuaaggggcuguacaauuucgccacaugcggacucgugggccugguuacguuucuucugcucugugggagauccugcaccacaucucuguauaaaggaguguacgaacugcagacccucgagcugaacauggaaacacuuaauauguguaugccucugagcugcaccaagaacaauucccaucacuauauuauggucggcaacgagacagggcucgagcugacccuuacgaauaccucuaucaucaaccauaaauucuguaaucugagcgacgcgcacaagaaaaaccucuacaaucaugcucugauguccauuaucucuacauuucaccugagcauuccgaacuucaaucaguaugaagccauguccugcgauuuuaacggaggcaagaucagcgugcaguacaaucucucucacuccuaugccggcgacgcugccagccauugugggaccguugcuaacggagugcugcaaacauucaugcggauggccuggggcgggucuuacauugcgcuugauuccggauacggcaagugggacugcaucaugaccagcuaucaguaccugauuauccagaacacgacaugggaggaucacugucaguuuucucgccccuccccuaucggguaucucggacugcuuagccaaagaacccgggacauuuacaucucccgcagacugcucggcacauucaccuggacccugucugauagcgaaggcaaagacacacccgggggauauugccugacgcgguggaugcucauugaggccgagcugaaguguuuuggcaauaccgcugucgccaaaugcaacgaaaagcaugaugaggaguucugcgacaugcuucgccuguuugauuucuguaaacaggcuauccagagacucaagaccccugcccagauguccauucaacugaucaauaaggcggugaacgcccuuaucaaugaccagcugauuaugaaaaaccaccuccgggauaucauggggauucccuacugcaauuauagcaaguacugguaccugaaccacacaacaaccggaaaaacgucucugccuaaguguuggcucguguccaauggcagcuaucugaacgaaacacauuucucugacgacaucgaacagcaagcugauaauaugauuaccgagaugcuucagaaagaguacauggaacgccaggggaagaccccgcugggacucgucgaccuguuuguuuucagcacauccuuuuaucugaucucuaucuuccuucaccucgugaaaauucccacccauagacacaucgugggcaagagcugcccuaagccccaucggcugaaccacaugggcauuuguuccugcgggcuguacaaacagccuggaguccccgugcgcuggaagagaugaggacuagucccuguucccagagcccacuuuuuuuucuuuuuuugaaauaaaauagccugucuuucagaucucaaaggcucuuuucagagccaccaaaaaaaaaaaaaaaaaaaaaaaaaaaaaaaaaaaaaaaaaaaaaaaaaaaaaaaaaaaaaaaaagaauu

SEQ ID NO: 30014 - RNA, 1717 nt, Artificial Sequence
  mRNA product Design a-1 (hSL-A64-N5) comprising derived and/or modified sequence from LASV(G502-SLE-2009;Clade IV)__AIT17126__GPCmut6 (opt5)
aggagagucccgcagucggcguccagcggcucugcuuguucgugugugugucguugcaggccuuauucaagcuuaccaugggccagaucgugaccuucuuucaagaggucccccacguuauugaagaggugaugaacaucgugcugauugcccucagcauccuggcuguccuuaaggggcuguacaauuucgccacaugcggacucgugggccugcuuacguuucugcuccugugugggagauccugcaccacaggacuguauaaaggcguuuacgaacuccagacccuggagcuuaacauggaaacacugaauauguguaugccucucucuugcaccaagaacaauagccaucacuauauuaugguggggaacgagacaggacuggagcuuacccugacgaauaccuccaucaucaaccauaaauucuguaaucucucugacgcgcacaagaaaaaccuguacgaucaugcucugaugagcauuaucuccacauuucaccucucuauuccgaauuucaaccaguaugaagccaugagcugcgacuuuaauggcggcaagaucuccguccaguacaaccugagccacucuuaugccggggaugcugccgaccauuguggaaccguggcuaauggcguucuucaaacauucaugcggauggccuggggaggguccuacauugcgcuggauagcggccgcgggagaugggacugcaucaugaccucuuaccaguaucucauuauccagaacacgacaugggaggaucacugucaguuuucccggcccagcccuaucggauaccugggccuucugucucaacgcaccagagacauuuauaucucccggcgccuccugggcacauucaccuggacccugagcgauuccgaagggaaggacacacccggaggcuacugccucacgagauggaugcugauugaggccgagcuuaaauguuuugggaacaccgcuguggccaagugcaaugaaaaacaugaugaggaguucugcgacaugcugcggcucuuugauuucuguaagcaggcuauccagcgccugaaagccccugcgcagaugucuauucaacuuaucaacaaggccgucaaugcucugaucaacgaccagcucgugaugaagaaucaccugagagacauuaugggaauccccuauugcaacuacagccgguauugguaccugaaucacacaaccacaggccgcaccucccucccuaaauguuggcuggugagcaacgggucuuaccuuaaugaaacgcauuucuccgaugacauugaacagcaagccgauaacaugaucacagagaugcugcagaaggaguauauggaaagacagggaaaaaccccgcucggccuggucgaccuguuuguuuucagcaccucuuuuuaccuuauuagcaucuuccuccaccuggugaagauccccacacaucggcacauugugggcaaauccugcccuaagccccaucgccugaaucacauggggaucuguucuugcggacucuauaaacagccuggcguccccgugaaguggaagagaugaggacuagucccuguucccagagcccacuuuuuuuucuuuuuuugaaauaaaauagccugucuuucagaucucaaaggcucuuuucagagccaccaaaaaaaaaaaaaaaaaaaaaaaaaaaaaaaaaaaaaaaaaaaaaaaaaaaaaaaaaaaaaaaaagaauu

SEQ ID NO: 30015 - RNA, 1717 nt, Artificial Sequence
  mRNA product Design a-1 (hSL-A64-N5) comprising derived and/or modified sequence from LASV(G733-SLE-2010;Clade IV)__AIT17154__GPCmut6 (opt5)
aggagagucccgcagucggcguccagcggcucugcuuguucgugugugugucguugcaggccuuauucaagcuuaccaugggccagaucgugaccuucuuucaagaggucccccacguuauugaagaggugaugaacaucgugcugauugcccucagcauccuggcuguccuuaaggggcuguacaauuucgccacaugcggaauugugggccucguuuccuuucugcuucugugugggagaucuugcacgaccagccucuauaaaggaguguacgaacugcagacacuggagcucaacauggaaacccugaauauguguaugccucuuuccugcacaaagaacaauucucaucacuauaucauggucggcaacgagaccgggcuggagcucacacugaccaauacgagcaucauuaaccauaaauucuguaaucuuuccgacgcgcacaagaaaaaccuguacgaucaugcucucaugucuaucauuagcaccuuucaccuguccaucccgaauuucaaccaguaugaagccaugagcugcgacuuuaauggaggcaagauuucugugcaguacaaccugucccacagcuaugccggcgaugcugccaaucauugugggacaaucgcuaacggaguucuccaaaccuucaugcggauggccuggggcgggucuuacauugcgcuggacuccggacgcgauagaugggacugcaucaugacaagcuaccaguaucuuaucauucagaacaccacgugggaggaucacugucaguuuucucggcccuccccuaucggcuaccuggggcuccugagccaacgcacaagagacauuuauaucucccggcgccuucugggaaccuucacauggacccucucugauagcgaaggcaaggacacccccggcggguacugccugacaagauggaugcugauugaggccgagcucaaauguuuuggaaauacggcuguggccaagugcaacgaaaaacaugaugaggaguucugcgacaugcugcggcuuuuugauuucuguaagcaggcuauccagcgccugaaagccccugcgcagauguccauccaacucauuaauaaggccgucaacgcucugaucaaugaccagcuuauuaugaagaaccaccugagagacaucaugggcauucccuauugcaauuacagcaaauauugguaccucaaccacaccacaaccgggaagacaucucugccuaaauguuggcugguguccaauggaagcuaccucaacgaaacccauuucucugaugacaucgaacagcaagccgauaauaugaucacggagaugcugcagaaggaguauauggaacggcagggcaaaacaccgcuugggcugguggaccucuuugucuucagcaccuccuuuuaccugauuucuaucuuccugcaccuuguuaagauucccacccaucgccacguggugggaaaaagcugcccuaagccccauagacucaaccacaugggcaucuguuccugcggccuguaugggcagccuggaguccccgugaaguggaaacggugaggacuagucccuguucccagagcccacuuuuuuuucuuuuuuugaaauaaaauagccugucuuucagaucucaaaggcucuuuucagagccaccaaaaaaaaaaaaaaaaaaaaaaaaaaaaaaaaaaaaaaaaaaaaaaaaaaaaaaaaaaaaaaaaagaauu

SEQ ID NO: 30016 - RNA, 1717 nt, Artificial Sequence
  mRNA product Design a-1 (hSL-A64-N5) comprising derived and/or modified sequence from MOPV/LASV reassortant(IGS-1;Clade IV)__AFY05576__GPCmut6 (opt5)
aggagagucccgcagucggcguccagcggcucugcuuguucgugugugugucguugcaggccuuauucaagcuuaccaugggccagaucgugaccuucuuucaagaggucccccacguuauugaagaggugaugaacaucgugcugauugcccucagcguccuggcugugcuuaaggggcuguacaauuucgccacaugcggacucguuggccuggugacguuucuucugcucugugggagauccugcaccacaucucuguauaaaggagucuacgaacugcagacccucgagcugaacauggaaacacuuaauauguguaugccucugagcugcaccaagaacaauucccaucacuauaucauggugggcaacgagacagggcucgagcugacccuuacgaauaccucuauuaucaaccauaaauucuguaaucugagcgacgcgcacaagaaaaaccucuacgaucaugcucugauguccaucauuucuacauuucaccugagcaucccgaauuucaaccaguaugaagccauguccugcgacuuuaauggaggcaagauuagcguucaguacaaccucucucacuccuaugccggcgaugcugccaaucauugugggaccguggcuaacggaguccugcaaacauucaugcggauggccuggggcgggagcuacaucgcgcuugacucuggacgcggcaacugggauugcauuaugaccuccuaccaguaucugaucauucagaauacgacaugggaggaccacugucaguuuagcagacccucuccuaucggguaccucggacugcuuucccaacggacccgcgauaucuauauuagcagacggcugcucggcacauucaccuggacccuguccgacucugaaggcgaggauacacccgggggauacugccugacgcgcuggaugcucaucgaggccgaacugaaguguuuuggcaacaccgcuguggccaaaugcaaugagaagcaugacgaagaguucugcgauaugcuuagacuguuugacuucuguaaacaggcuauucagcggcucaaggccccugcgcagaugagcauccaacugauuaacaaagccgugaaugcucuuaucaacgaucagcugaucaugaagaaucaccuccgcgacauuauggggauccccuauugcaacuacuccaaguauugguaccugaaucacacaaccacaggaagaaccagccugccuaaauguuggcucgucucuaacggcuccuaccugaaugaaacgcauuucagcgacgauauugagcagcaagccgacaacaugaucacagagaugcuucagaaggaauauauggagcggcaggggaaaaccccgcugggacucguugaucuguuuguguucucuaccagcuuuuaccugauuuccaucuuccuucaccucgugaagauccccacacaucgccacauugucggcaaaucuugcccuaagccccauagacugaaucacaugggcaucuguagcugcgggcuguauaaacagccuggagugcccguuaaguggaagcggugaggacuagucccuguucccagagcccacuuuuuuuucuuuuuuugaaauaaaauagccugucuuucagaucucaaaggcucuuuucagagccaccaaaaaaaaaaaaaaaaaaaaaaaaaaaaaaaaaaaaaaaaaaaaaaaaaaaaaaaaaaaaaaaaagaauu

SEQ ID NO: 30017 - RNA, 1717 nt, Artificial Sequence
  mRNA product Design a-1 (hSL-A64-N5) comprising derived and/or modified sequence from LASV(LM765-SLE-2012;Clade IV)__AIT17814__GPCmut6 (opt5)
aggagagucccgcagucggcguccagcggcucugcuuguucgugugugugucguugcaggccuuauucaagcuuaccaugggccagaucgugaccuucuuucaagaggucccccacguuauugaagaggugaugaacaucgugcugauugcccucagcauccuggcuguccuuaaggggcuguacaauuucgccacaugcggacucgugggccugguuacguuucuucugcucugugggagauccugcaccacaucucuguauaaaggaguguacgaacugcagacccucgagcugaacauggaaacacuuaauauguguaugccucugagcugcaccaagaacaauucccaucacuauauuauggucggcaacgagacagggcucgagcugacccuuacgaauaccucuaucaucgaccauaaauucuguaaccugagcgaugcgcaccggaagaaucucuacgaccaugcucugauguccauuaucucuacauuucaccugagcauuccgaacuucaaucaguaugaagccauguccugcgauuuuaacggaggcaaaaucagcgugcaguacaaucucucucacuccuaugccaaggacgcugccgaucauuguggcaccguugcuaacggggugcugcaaacauucaugcgcauggccuggggaggcagcuacauugcgcuugacucugggagaggacggugggauugcaucaugaccuccuaccaguaucugauuauccagaauacgacaugggaggaccacugucaguuuagccgccccucuccuaucggcuaccucgggcugcuuucccaaagaacccgggauauuuauaucagccgcagacugcucggaacauucaccuggacccuguccgacucugaaggcaaggauacacccggcggguacugccugacgcgguggaugcucauugaggccgagcugaaauguuuuggaaacaccgcugucgccaagugcaacgaaaaacaugacgaggaguucugcgauaugcuucgccuguuugacuucuguaagcaggcuauccagagacucaaagccccugcgcagaugagcauucaacugaucaauaaggccgugaacgcucuuaucaaugaccagcugauuaugaagaaccaccuccgggauaucaugggcauucccuauugcaauuacuccaaauauugguaccugaaccacacaaccacagggaagaccagccugccuaaauguuggcucgugucuaauggauccuaccugaacgaaacgcauuucagcgacgauaucgaacagcaagccgacaauaugauuacagagaugcuucagaaggaguauauggaacgccagggcaaaaccccgcuggggcucgucgaucuguuuguuuucucuaccagcuuuuaccugaucuccaucuuccuucaccucgugaagauucccacacauagacacaucgugggaaaaccuugccccaagccucaucggcugaaccacaugggcauuuguucuugcggccuguauaagcagcccggggucccggugaaauggaagcgcugaggacuagucccuguucccagagcccacuuuuuuuucuuuuuuugaaauaaaauagccugucuuucagaucucaaaggcucuuuucagagccaccaaaaaaaaaaaaaaaaaaaaaaaaaaaaaaaaaaaaaaaaaaaaaaaaaaaaaaaaaaaaaaaaagaauu

SEQ ID NO: 30018 - RNA, 1717 nt, Artificial Sequence
  mRNA product Design a-1 (hSL-A64-N5) comprising derived and/or modified sequence from LASV(LM776-SLE-2012;Clade IV)__AIT17824__GPCmut6 (opt5)
aggagagucccgcagucggcguccagcggcucugcuuguucgugugugugucguugcaggccuuauucaagcuuaccaugggccagaucgugaccuucuuucaagaggucccccacguuauugaagaggugaugaacaucgugcugauugcccucagcauccuggcuguccuuaaggggcuguacaauuucgccacaugcggacucgugggccugguuacguuucuucugcucugugggagauccugcaccacaucuguguauaaaggagucuacgaacugcagacccuggagcucaacauggaaacacugaauauguguaugccucuuagcugcaccaagaacaauucccaucacuauauuauggugggcaacgagacagggcuggagcucacccugacgaauaccucuaucaucaaccauaaauucuguaaucuuagcgacgcgcacaagaaaaaccuguacgaucaugcucucauguccauuaucucuacauuucaccugagcauuccgaauuucaaccaguaugaagccauguccugcgacuuuaauggaggcaagaucagcguucaguacaaccugucucacuccuaugccggcgaugcugccaaucauugugggaccguggcuaacggaguccuccaaacauucaugcggauggccuggggcgggagcuacauugcgcuggacucuggacacggcaagugggauugcaucaugaccuccuaccaguaucuuauuauccagaacacgacaugggaggaccauugucaguuuagccgccccucuccuaucggguaccugggacuccugucccaaagaacccgggauauuuauaucagccgcagacuucugggcacauucaccuggacccucuccgacucugaaggcaaagauacacccgggggauacugccugacgcgguggaugcugauugaggccgagcucaaguguuuuggcaauaccgcuguggccaaaugcaacgaaaagcacgacgaggaguucugcgauaugcugcgccuuuuugacuucuguaaacaggcuauccagagacugaaggccccugcgcagaugagcauucaacucaucaauaaggccgugaacgcucugaucaaugaucagcuuauuaugaaaaaccaucugcgggacaucauggggauucccuauugcaauuacuccaaguauugguaccucaaccacacaaccacaggaaaaaccagccugccuaaguguuggcuggucucuaauggcuccuaccucaacgaaacgcacuucagcgacgauaucgaacagcaagccgacaauaugauuacagagaugcugcagaaagaguauauggaacgccaggggaagaccccgcuuggacugguugaucucuuuguguucucuaccagcuuuuaccugaucuccaucuuccugcaucuugugaaaauucccacacacagacauaucgucggcaagucuugcccuaagccccaccggcucaaccacaugggcauuuguagcugcgggcuguauaaacagccuggagugcccguucgcuggaagagaugaggacuagucccuguucccagagcccacuuuuuuuucuuuuuuugaaauaaaauagccugucuuucagaucucaaaggcucuuuucagagccaccaaaaaaaaaaaaaaaaaaaaaaaaaaaaaaaaaaaaaaaaaaaaaaaaaaaaaaaaaaaaaaaaagaauu

SEQ ID NO: 30019 - RNA, 1717 nt, Artificial Sequence
  mRNA product Design a-1 (hSL-A64-N5) comprising derived and/or modified sequence from LASV(Mad39;Clade IV)__ANH09722__GPCmut6 (opt5)
aggagagucccgcagucggcguccagcggcucugcuuguucgugugugugucguugcaggccuuauucaagcuuaccaugggccagaucgugaccuucuuucaagaggucccccacguuauugaagaggugaugaacaucgugcugauugcccucagcauccuggcuguccuuaaggggcuguacaauguggccacaugcggacucauuggccugguuacguuccuucugcucugugggagauccugcaccacaacccuguauaaaggaguguacgaacugcaggcgcucgagcugaacauggaaacacuuaauauguguaugccucugucuugcaccaagaacaauagccaucacuauauccgggucggcaacgagacagggcucgagcugacccuuacgaauaccucccugaucaaccauaaauuuuguaaucucucugacgcucacaagaaaaaccuguacgaucaugcccugaugagcauuaucuccacauuccaccucucuauuccgaauuuuaaccaguaugaagccaugagcugcgacuucaaugauggaaagaucuccgugcaguacaaccugagccacaccuaugcuggcgacacagccaaucauuguggcaccguugcuaacggggugcuucaaacguuuaugcgcauggccuggggaggcucuuacauugcgcuggauuccgggagaggaggcugggacugcaucaugacaagcuaccaguaucucauuauccagaacaccacaugggaggaucacugucaguucucucggcccuccccuaucggguaccugggacuucugagccaacgcaccagagacauuuauaucucucggcgccuccugggcaccuuuacauggacgcuguccgauagcgaaggcaaggacacccccgggggauacugccucacaagauggaugcugauugaggccgagcuuaaauguuucggcaauaccgcugucgccaagugcaacgaaaaacaugaugaggaauuuugcgacaugcugcgccucuucgauuuuuguaagcaggcuauccagcggcugaaagccccugcgcagauguccauucaacuuaucaauaaggccgugaacgcucugaucaaugaccagcucauuaugaagaaccaccugagagacaucauggggauucccuauugcaauuacucuaaauauugguaccugaaccacacagugaccggaaagacgagccucccuaaauguuggcuggucuccaauggcagcuaccuuaacgagacacauuucucugaugacaucgaacagcaagccgauaauaugauuaccgagaugcugcagaaggaguauauggaacggcaggggaaaaccccgcucggacugguugaccuguucguguuuuccaccagcuucuaccuuaucucuaucuuucuccaccuggugaagauucccacacaucgccacgucgugggcaaaccuugccccaagccucauagacugaaccacaugggcaucuguagcugcggguucuauaagcagcccggaguuccggugcgguggaaacgcugaggacuagucccuguucccagagcccacuuuuuuuucuuuuuuugaaauaaaauagccugucuuucagaucucaaaggcucuuuucagagccaccaaaaaaaaaaaaaaaaaaaaaaaaaaaaaaaaaaaaaaaaaaaaaaaaaaaaaaaaaaaaaaaaagaauu

SEQ ID NO: 30020 - RNA, 1717 nt, Artificial Sequence
  mRNA product Design a-1 (hSL-A64-N5) comprising derived and/or modified sequence from LASV(Z0947-SLE-2011;Clade IV)__AIT17840__GPCmut6 (opt5)
aggagagucccgcagucggcguccagcggcucugcuuguucgugugugugucguugcaggccuuauucaagcuuaccaugggccagaucgugaccuucuuucaagaggucccccacguuauugaagaggugaugaacaucgugcugauugcccucagcauccuggcuguccuuaaggggcuguacaauuucgccacaugcggacucgugggccugguuacguuucuucugcucugugggagauccugcaccauuucucuguauaaaggaguguacgaacugcagacacucgagcugaacauggaaacccuuaauauguguaugccucugagcugcacaaagaacaauucccaucacuauaucauggucggcaacgagaccgggcucgagcugacacuuaccaauacgucuaucauuaaccauaaauucuguaaucugagcgacgcgcacaagaaaaaccucuacgaucaugcucugauguccaucauuucuaccuuucaccugagcaucccgaauuucaaccaguaugaagccauguccugcgacuuuaauggaggcaagauuagcgugcaguacaaccucucucacuccuaugccggcgaugcugccaaucauugugggacaguugcuaacggagugcugcaaaccuucaugcggauggccuggggcgggagcuacaucgcgcuugacucuggacgcgauagaugggacugcauuaugacauccuaccaguaucugaucauccagaacaccacgugggaggaucacugucaguuuagccggcccucuccuauuggcuaccucgggcugcuuucccaacgcacaagagacaucuauauuagccggcgccugcucggaaccuucacauggacccuguccgauucugaaggcaaggacacccccggcggguacugccugacaagauggaugcucaucgaggccgagcugaaauguuuuggaaauacggcugucgccaagugcaacgaaaaacaugaugaggaguucugcgacaugcuucggcuguuugauuucuguaagcaggcuauucagcgccucaaagccccugcgcagaugagcauccaacugaucaauaaggccgugaacgcucuuauuaaugaccagcugaucaugaagaaccaccucagagacauuaugggcauccccuauugcaauuacuccaaauauugguaccugaaccacaccacaaccgggaagacaagccugccuaaauguuggcucgugucuaauggauccuaccugaacgaaacccauuucagcgaugacauugaacagcaagccgauaauaugaucacggagaugcuucagaaggaguauauggaacggcagggcaaaacaccgcuggggcucgucgaccuguuuguuuucucuaccagcuuuuaccugaucuccauuuuccuucaccucgugaagauccccacccaucgccacauugugggaaaaccuugccccaagccucauagacugaaccacaugggcaucuguucuugcggccuguauaagcagcccggggucccggugaaauggaagcggugaggacuagucccuguucccagagcccacuuuuuuuucuuuuuuugaaauaaaauagccugucuuucagaucucaaaggcucuuuucagagccaccaaaaaaaaaaaaaaaaaaaaaaaaaaaaaaaaaaaaaaaaaaaaaaaaaaaaaaaaaaaaaaaaagaauu

SEQ ID NO: 30021 - RNA, 1748 nt, Artificial Sequence
  mRNA product Design a-1 (hSL-A100) comprising derived and/or modified sequence from LASV(Josiah;Clade IV)__NP_694870__GPCmut6 (opt1)
aggagagucccgcagucggcguccagcggcucugcuuguucgugugugugucguugcaggccuuauucaagcuuaccaugggccagaucgugaccuucuuccaggaggucccccacgugaucgaggaggugaugaacaucguccugaucgcccucagcgugcuggccgugcugaaggggcucuacaacuucgcgaccugcggccuggucgggcuggugacguuccuccugcugugcggccgcuccugcaccaccagccucuacaaggggguguacgagcugcagacccuggagcucaacauggagacgcugaacaugugcaugccgcuguccugcaccaagaacaacagccaccacuacaucauggucggcaacgagaccggccucgagcugacgcugaccaacaccuccaucaucaaccacaaguucugcaaccucagcgacgcccacaagaagaaccuguacgaccacgcccugauguccaucaucagcaccuuccaccucuccauccccaacuucaaccaguacgaggccaugagcugcgacuucaacgggggcaagaucuccgugcaguacaaccugagccacuccuacgccggggacgcggccaaccacugcggcacgguggccaacgggguccugcagaccuucaugcggauggccuggggcggcagcuacaucgcgcucgacuccgggcgcggcaacugggacugcaucaugaccagcuaccaguaccugaucauccagaacaccacgugggaggaccacugccaguucucccggcccagccccaucggguaccugggccuccugucccagcgcacccgggacaucuacaucagccgccggcugcucggcaccuucaccuggacgcugagcgacuccgaggggaaggacaccccgggcggguacugccugacccgcuggaugcucaucgaggccgagcugaagugcuucggcaacaccgccguggccaagugcaacgagaagcacgacgaggaguucugcgacaugcugcggcuguucgacuucugcaagcaggccauccagcgccugaaggcgcccgcccagaugagcauccagcugaucaacaaggccgugaacgcccucaucaacgaccagcugaucaugaagaaccaccuccgggacaucauggggauccccuacugcaacuacuccaaguacugguaccucaaccacacgaccaccggccgcaccagccugcccaagugcuggcuggucuccaacggcagcuaccucaacgagacgcacuucuccgacgacaucgagcagcaggccgacaacaugaucaccgagaugcugcagaaggaguacauggagcggcaggggaagacgccccugggccucguggaccuguucguguucagcaccuccuucuaccugaucagcaucuuccugcaccucgucaagaucccgacccaccgccacaucguggggaaguccugccccaagccccaccggcugaaccacaugggcaucugcagcugcgggcuguacaagcagcccggcgugccggucaaguggaagcgcugaggacuagucccuguucccagagcccacuuuuuuuucuuuuuuugaaauaaaauagccugucuuucagaucucaaaggcucuuuucagagccaccaaaaaaaaaaaaaaaaaaaaaaaaaaaaaaaaaaaaaaaaaaaaaaaaaaaaaaaaaaaaaaaaaaaaaaaaaaaaaaaaaaaaaaaaaaaaaaaaaaaaa

SEQ ID NO: 30022 - RNA, 1745 nt, Artificial Sequence
  mRNA product Design a-1 (hSL-A100) comprising derived and/or modified sequence from LASV(LP;Clade I)__AAF86701__GPCmut6 (opt1)
aggagagucccgcagucggcguccagcggcucugcuuguucgugugugugucguugcaggccuuauucaagcuuaccaugggccagaucaucaccuucuuccaggaggugccccacgucaucgaggaggugaugaacaucgugcugaucgcccucagccugcuggccauccucaaggggcuguacaacaucgcgaccugcggcaucaucgggcuggucgccuuccucuuccugugcggcaaguccugcagccugacgcucaagggcggguacgagcugcagacccuggagcucaacauggagacccugaacaugugcaugccgcuguccugcacgaagaacagcucccaccacuacauccgcgugggcaacgagaccgggcucgagcugacccugaccaacacgagcaucaucaaccacaaguucugcaaccucuccgacgcccacaagaagaaccuguacgaccacgcccugaugagcaucaucuccaccuuccaccucagcauccccaacuucaaccaguacgaggccauguccugcgacuucaacggcgggaagaucagcgugcaguacaaccugucccacagcuacgcgggcgacgccgccgagcacugcgggaccgucgccaacggcgugcugcagaccuucaugcggauggcguggggcgggcgcuacaucgcccucgacuccggcaaggggaacugggacugcaucaugacgagcuaccaguaccugaucauccagaacaccaccugggaggaccacugccaguucucccggcccagccccaucggcuaccugggccuccugucccagcgcacccgggacaucuacaucagccgccggcugcucgggacguucaccuggacccugagcgacuccgagggcaacgagacccccgggggcuacugccugacgcgcuggaugcucaucgaggccgagcugaagugcuucgggaacaccgccguggccaagugcaacgagaagcacgacgaggaguucugcgacaugcugcggcuguucgacuucugcaagcaggcgauccgccggcugaaggcccccgcccagaugagcauccagcugaucaacaaggccgucaacgcccucaucaacgaccagcugaucaugaagaaccaccuccgcgacaucaugggcauccccuacugcaacuacuccaaguacugguaccucaaccacaccagcuccggccggaccagccugcccaagugcuggcugaucuccaacgggagcuaccucaacgagacgcaguucuccgacgacaucgagcagcaggcggacaacaugaucaccgagaugcugcagaaggaguacaucgagcgccagggcaagaccccgcuggggcucguggacaucuucaucuucagcaccuccuucuaccugaucagcaucuuccugcaccugaucaagaucccgacgcaccggcacaucgugggcaagcccugccccaagccccaccgccucaaccacaugggggucugcuccugcggccuguacaagcacccgggcgugcccaccaaguggaagcggugaggacuagucccuguucccagagcccacuuuuuuuucuuuuuuugaaauaaaauagccugucuuucagaucucaaaggcucuuuucagagccaccaaaaaaaaaaaaaaaaaaaaaaaaaaaaaaaaaaaaaaaaaaaaaaaaaaaaaaaaaaaaaaaaaaaaaaaaaaaaaaaaaaaaaaaaaaaaaaaaaaaaa

SEQ ID NO: 30023 - RNA, 1745 nt, Artificial Sequence
  mRNA product Design a-1 (hSL-A100) comprising derived and/or modified sequence from LASV(803213;Clade II)__AAF86703__GPCmut6 (opt1)
aggagagucccgcagucggcguccagcggcucugcuuguucgugugugugucguugcaggccuuauucaagcuuaccaugggccagaucaucaccuucuuccaggaggugccccacgucaucgaggaggugaugaacaucgugcugaucgcccucagccugcuggccauccucaaggggaucuacaacgucgcgaccugcggccuguucgggcugaucuccuuccuccugcugugcggccgcagcugcuccgugacguacaaggggguguacgagcuccagacccuggagcugaacauggccaaccucaacaugugcaugccgcugagcugcaccaagaacaacucccaccacuacaucauggucggcaacgagacgggccuggagcucacccugaccaacaccagcaucaucaaccacaaguucugcaaccuguccgacgcccacaagaagaaccucuacgaccacgcccugaugagcaucaucuccacguuccaccugagcauccccaacuucaaccaguacgaggccauguccugcgacuucaacgggggcaagaucagcgugcaguacaaccucucccacagcuucgcgguggacgccgccaaccacugcgggaccaucgccaacggcguccugcagaccuucaugcggauggcguggggcggguccuacaucgcccuggacagcggcaaggggaacugggacugcaucaugaccuccuaccaguaccucaucauccagaacacgaccugggaggaccacugccaguucagccgccccucccccaucggcuaccuggggcugcucagccagcggacccgcgacaucuacaucagccggcgccugcugggcaccuucacguggacccucuccgacagcgagggcaacgaggcccccgggggcuacugccugacccgguggaugcugaucgaggccgagcucaagugcuucgggaacaccgccguggcgaagugcaacgagaagcacgacgaggaguucugcgacaugcugcgccuguucgacuucugcaagcaggccaucaagcggcucaagacgcccgcccagauguccauccagcugaucaacaaggccgugaacgcccugaucaacgaccagcucaucaugaagaaccaccuccgcgacaucaugggcauccccuacugcaacuacagccgguacugguaccugaaccacaccgucaccgggaagaccucccugccccgcugcuggcuggugagcaacggcuccuaccugaacgagacgcacuucagcgacgacaucgagcagcaggcggacaacaugaucaccgagaugcuccagaaggaguacauggaccggcagggcaagaccccgcuggggcugguggaccucuucgucuucuccaccagcuucuaccugaucuccaucuuccugcaccuggugaagaucccgacgcaccgccacaucgugggcaagcccugccccaagccccaccggcucaaccacauggggaucugcagcugcggccuguacaagcacccggggguccccgugaaguggaagcgcugaggacuagucccuguucccagagcccacuuuuuuuucuuuuuuugaaauaaaauagccugucuuucagaucucaaaggcucuuuucagagccaccaaaaaaaaaaaaaaaaaaaaaaaaaaaaaaaaaaaaaaaaaaaaaaaaaaaaaaaaaaaaaaaaaaaaaaaaaaaaaaaaaaaaaaaaaaaaaaaaaaaaa

SEQ ID NO: 30024 - RNA, 1745 nt, Artificial Sequence
  mRNA product Design a-1 (hSL-A100) comprising derived and/or modified sequence from LASV(GA391;Clade III)__CAA36645__GPCmut6 (opt1)
aggagagucccgcagucggcguccagcggcucugcuuguucgugugugugucguugcaggccuuauucaagcuuaccaugggccagaucgugaccuucuuccaggaggucccccacgugaucgaggaggugaugaacaucguccugaucgcccucagcauccuggccauccugaaggggcucuacaacguggcgaccugcggccugaucgggcuggugacguuccuccugcuguccggccgcagcugcucccucaucuacaaggggaccuacgagcugcagacccuggagcucaacauggagacccugaacaugugcaugccgcugagcugcaccaagaacaacucccaccacuacauccgggucggcaacgagaccggccucgagcugacccugacgaacaccagcauccucaaccacaaguucugcaaccuguccgacgcccacaagcgcaaccuguacgaccacagccucauguccaucaucagcaccuuccaccuguccauccccaacuucaaccaguacgaggccaugagcugcgacuucaacgggggcaagaucaccgugcaguacaaccugucccacagcuucgccguggacgccgcggggcacugcggcacgcucgccaacgggguccugcagaccuucaugcggauggccuggggcggcuccuacaucgcccuggacagcgggcgcggcaacugggacugcaucaugaccuccuaccaguaccucaucauccagaacaccacgugggacgaccacugccaguucagccggcccucccccaucggguaccugggccugcucagccagcgcacccgggacaucuacaucagccgccggcugcugggcaccuucaccuggacgcucuccgacagcgaggggaacgagaccccgggcggguacugccugacccgcuggaugcugaucgaggcggagcucaagugcuucggcaacaccgccguggccaagugcaacgagaagcacgacgaggaguucugcgacaugcugcggcuguucgacuucugcaagcaggccauccgccggcucaagacgcccgcccagauguccauccagcugaucaacaaggcggugaacgcccugaucaacgaccagcucaucaugaagaaccaccuccgcgacaucauggggauccccuacugcaacuacagccgguacugguaccugaaccacaccuccaccggcaagaccagccugccccgcugcuggcugaucuccaacggcagcuaccugaacgagacgaaguucuccgacgacaucgagcagcaggccgacaacaugaucaccgagaugcuccagaaggaguacaucgaccggcaggggaagacgccccugggccuggucgaccuguucguguucagcaccuccuucuaccucaucagcaucuuccugcaccuggugaagaucccgacccaccgccacaucgucgggaagcccugccccaagccccaccggcucaaccacaugggcaucugcuccugcgggcuguacaagcagccgggcgugcccgugcgcuggaagcggugaggacuagucccuguucccagagcccacuuuuuuuucuuuuuuugaaauaaaauagccugucuuucagaucucaaaggcucuuuucagagccaccaaaaaaaaaaaaaaaaaaaaaaaaaaaaaaaaaaaaaaaaaaaaaaaaaaaaaaaaaaaaaaaaaaaaaaaaaaaaaaaaaaaaaaaaaaaaaaaaaaaaa

SEQ ID NO: 30025 - RNA, 1748 nt, Artificial Sequence
  mRNA product Design a-1 (hSL-A100) comprising derived and/or modified sequence from LASV(AV;Clade V)__CCA30314__GPCmut6 (opt1)
aggagagucccgcagucggcguccagcggcucugcuuguucgugugugugucguugcaggccuuauucaagcuuaccaugggccagaucgugaccuucuuccaggaggucccccacgugaucgaggaggugaugaacaucguccugaucgcccucagcauccuggccgugcugaaggggcucuacaacaucgcgaccugcggccugaucgggcugaucacguuccuccugcugugcggccgcuccugcagcuccaaccucuacaaggggguguacgagcugcagagccuggaccucaacauggagacccugaacaugugcaugccgcuguccugcaccaagaacaacagccaccacuacauccgggucggcaacgacacgggccucgagcugacccugaccaacaccuccauccucaaccacaaguucugcaaccugagcgacgcccacaagaaggaccuguacgaccacgcccucauguccaucaucagcacguuccaccuguccauccccaacuucaaccaguacgaggccaugagcugcgacuucaacgggggcaagaucuccgugcaguacaaccugagccacuccuacgccaucgacgcggccaaccacugcgggaccguggccaacggcauccuccagaccuucaugcgcauggccuggggcgggagcuacaucgcgcuggacuccggccgggggaacugggacugcaucaugaccagcuaccaguaccugaucauccagaacacgaccugggagaaccacugccaguucucccgccccagccccaucggcuaccucgggcugcugagccagcggacccgcgacaucuacaucucccggcgccuccugggcaccuucacguggacccugagcgacuccgagggcaacgccacccccgggggcuacugccucacccgguggaugcugaucgaggccgagcugaagugcuucgggaacacggccgucgccaagugcaacgagaagcacgacgaggaguucugcgacaugcuccgccuguucgacuucugcaagcaggcgaucagccggcugaagucccccgcccagaugagcauccagcucaucaacaaggccgugaacgcccugaucaacgaccagcugaucaugaagaaccaccuccgcgacaucaugggcauccccuacugcaacuacuccaaguacugguaccugaaccacaccaucaccgggaagaccagccugcccaagugcuggcucguguccaacggcagcuaccugaacgagacgcacuucuccgacgacaucgagcagcaggccgacaacaugaucaccgagaugcugcagaaggaguacauggagcggcagggcaagaccccgcucgggcuggucgaccuguucguguucagcaccuccuucuaccugaucagcaucuuccuccgccuggugaagaucccgacgcaccggcacaucgucggcaagcccugccccaagccccaccgccugaaccacauggggaucugcuccugcggccucuacaagcagccgggggugcccgugcgguggaagcgcugaggacuagucccuguucccagagcccacuuuuuuuucuuuuuuugaaauaaaauagccugucuuucagaucucaaaggcucuuuucagagccaccaaaaaaaaaaaaaaaaaaaaaaaaaaaaaaaaaaaaaaaaaaaaaaaaaaaaaaaaaaaaaaaaaaaaaaaaaaaaaaaaaaaaaaaaaaaaaaaaaaaaa

SEQ ID NO: 30026 - RNA, 1745 nt, Artificial Sequence
  mRNA product Design a-1 (hSL-A100) comprising derived and/or modified sequence from LASV(Togo/2016/7082;Clade VI)__AMR44577__GPCmut6 (opt1)
aggagagucccgcagucggcguccagcggcucugcuuguucgugugugugucguugcaggccuuauucaagcuuaccaugggccagaucaucaccuucuuccaggaggugccccacgucaucgaggaggugaugaacaucgugcugaucgcccucagccugcuggccauccucaagggggucuacaacguggcgaccugcggcaucaucgggcuggugacguuccuguuccucugcggccgcuccugcagccugaucuacaagggguccuacgagcugcagacccucgagcugaacauggagacccugaacaugugcaugccgcucagcugcacgaagaacuccagccaccacuacauccgggucggcaacgagaccggccuggagcugacccucaccaacacguccaucaucaaccacaaguucugcaaccugagcgacgcccacaagcgcaaccuguacgaccacgcccucauguccauccugagcaccuuccaccuguccauccccaacuucaaccaguacgaggccaugagcugcgacuucaacgggggcaagaucuccgugcaguacaaccucagccacgccuacgcgguggacgccgccgagcacugcgggaccgucgccaacggcgugcugcagaccuucaugcggauggcguggggcggguccuacaucgcccuggacagcggccgcgggaacugggacugcaucaugacguccuaccaguaccucaucauccagaacaccaccugggaggaccacugccaguucagccggcccucccccaucggcuaccuggggcugcucagccagcgcacccgggacaucuacaucagccgccggcugcugggcacguucaccuggacccucuccgacagcgagggcaacgagacccccgggggcuacugccugacgcgcuggaugcugaucgaggccgagcucaagugcuucgggaacaccgccguggccaagugcaacgagaagcacgacgaggaguucugcgacaugcugcggcuguucgacuucugcaagcaggcgauccagcgccucaagucccccgcccagaugagcauccagcugaucaacaaggccgucaacgcccugaucaacgaccagcucaucaugaagaaccaccuccgggacaugaugggcauccccuacugcaacuacuccaaguacugguaccugaaccacaccagcuccgggcgcaccagccugcccaagugcuggcugguguccaacggcagcuaccugaacgagacgcacuucuccgacgacaucgagcagcaggccgacaacaugaucaccgagaugcuccagaaggaguacaucgaccggcagggcaagaccccgcuggggcugguggaccucuucgucuucagcaccuccuucuaccugaucagcaucuuccugcaccugaucaagaucccgacgcaccgccacaucgugggcaagcccugccccaagccccaccggcucaaccacauggggaucugcuccugcggccuguacaagcagccgggggugcccacccgcuggaagcggugaggacuagucccuguucccagagcccacuuuuuuuucuuuuuuugaaauaaaauagccugucuuucagaucucaaaggcucuuuucagagccaccaaaaaaaaaaaaaaaaaaaaaaaaaaaaaaaaaaaaaaaaaaaaaaaaaaaaaaaaaaaaaaaaaaaaaaaaaaaaaaaaaaaaaaaaaaaaaaaaaaaaa

SEQ ID NO: 30027 - RNA, 1745 nt, Artificial Sequence
  mRNA product Design a-1 (hSL-A100) comprising derived and/or modified sequence from LASV(KAK-428;Clade n.d. (VII))__ANH09740__GPCmut6 (opt1)
aggagagucccgcagucggcguccagcggcucugcuuguucgugugugugucguugcaggccuuauucaagcuuaccaugggccagaucgugaccuucuuccaggaggucccccacgugaucgaggaggugaugaacaucguccugaucgcccucagccugcuggccauccucaaggggcuguacaacuucgcgaccugcggcgugaucgggcugaucacguuccuccugcugugcggccgcuccugcagcgccaccuacaaggggcaguacgagcuccagacccuggagcugaacauggagucccucaacaugugcaugccgcugagcugcacgaagaacaacucccaccacuacauccgggccggcaacaacaccggccuggagcucacccugaccaacacgagcaucaucucccacaaguucugcaaccugagcgacgcccacaagaagaaccucuacgaccacacccugauguccaucaucaccaccuuccaccugagcauccccaacuucaaccaguacgaggccauguccugcgacuucaacgggggcaagaucagcauccaguacaaccucucccacagcuacgcgggggacgccgcccagcacugcggcacgguggccaacgggguccugcagaccuucaugcgcauggcguggggcggcuccuaccuggcccucgacagcgggcggcgcggcugggacugcaucaucuccagcuaccaguaccugaucauccagaacaccaccugggacgaccacugccaguucucccggcccagccccaucggguaccugggcuucgugagccagaagacgcgcgacaucuacaucucccggcgccuccugggcaccuucaccuggacccugagcgacuccgaggggcacgacaugccgggcggguacugccucacgcgguggaugcugaucgaggccgaccugaagugcuucggcaacaccgccguggccaagugcaacgagaagcacgacgaggaguucugcgacauguggcgccucuucgacuucugcaagcaggcgauccagcggcugaaggcccccgcccagaugaacauccagcugaucaacaaggccgucaacgcccucaucaacgaccagcugaugaugaagaaccaccuccgcgacaucauggggauccccuacugcaacuacagcaaguucugguaccugaacaacaccaccacgggccggaccucccugccccgcugcuggcugaucagcaacggcuccuaccucaacgagacccacuucagcgacgacaucgagcagcaggcggacaacaugaucaccgagaugcugcagaaggaguacauggaccggcaggggaagacgccccugggccucguggaccuguucguguucuccaccagcuucuaccugaucaccaucuuccuccaccuggucaagaucccgacccaccgccacaucguggggaagcccugccccaagccccaccggcugaaccacaugggcaucugcuccugcgggcuguacaagcagccgggcgugcccguccgcuggaagcggugaggacuagucccuguucccagagcccacuuuuuuuucuuuuuuugaaauaaaauagccugucuuucagaucucaaaggcucuuuucagagccaccaaaaaaaaaaaaaaaaaaaaaaaaaaaaaaaaaaaaaaaaaaaaaaaaaaaaaaaaaaaaaaaaaaaaaaaaaaaaaaaaaaaaaaaaaaaaaaaaaaaaa

SEQ ID NO: 30028 - RNA, 1745 nt, Artificial Sequence; identical to SEQ ID NO: 30022
  mRNA product Design a-1 (hSL-A100) comprising derived and/or modified sequence from LASV(Pinneo-NIG-1969;Clade I)__AIT17836__GPCmut6 (opt1)

SEQ ID NO: 30029 - RNA, 1745 nt, Artificial Sequence
  mRNA product Design a-1 (hSL-A100) comprising derived and/or modified sequence from LASV(ISTH0009-NIG-2011;Clade II)__AIT17404__GPCmut6 (opt1)
aggagagucccgcagucggcguccagcggcucugcuuguucgugugugugucguugcaggccuuauucaagcuuaccaugggccagaucaucaccuucuuccaggaggugccccacgucaucgaggaggugaugaacaucgugcugaucgcccucagccugcuggccauccucaaggggaucuacaacgucgcgaccugcggccuguucgggcugguguccuuccuccugcugugcggccgcagcugcuccacgaccuacaaggggguguacgagcuccagacccuggagcuggacauggccagccucaacaugugcaugccgcuguccugcacgaagaacaacagccaccacuacaucauggucggcaacgagaccggccuggagcucacccugaccaacacguccaucaucaaccacaaguucugcaaccugagcgacgcccacaagaagaaccucuacgaccacgcccugauguccaucaucagcaccuuccaccuguccauccccaacuucaaccaguacgaggccaugagcugcgacuucaacgggggcaagaucuccgugcaguacaaccucagccacgcguacgccguggacgccgccaaccacugcgggaccaucgcgaacggcguccugcagaccuucaugcggauggccuggggcggguccuacaucgcccuggacagcggcaagggguccugggacugcaucaugacgagcuaccaguaccucaucauccagaacaccaccugggaggaccacugccaguucucccgccccagccccaucggcuaccuggggcugcucagccagcggacccgcgacaucuacaucucccggcgccugcugggcacguucaccuggacccucagcgacuccgagggcaacgagacccccgggggcuacugccugacgcgguggaugcugaucgaggccgagcucaagugcuucgggaacaccgccguggcgaagugcaacgagaagcacgacgaggaguucugcgacaugcugcgccuguucgacuucugcaagcaggccauccggcgccucaagacccccgcccagaugagcauccagcugaucaacaaggccgugaacgcccugaucaacgaccagcucaucaugaagaaccaccuccgggacaucaugggcaucccguacugcaacuacuccaaguacugguaccugaaccacaccgucacggggaagaccagccugccccgcugcuggcugguguccaacggcagcuaccugaacgagacccacuucuccgacgacaucgagcagcaggcggacaacaugaucaccgagcuccugcagaaggaguacauggaccggcagggcaagacgccccuggggcucguggaccuguucgucuucagcaccuccuucuaccugaucagcaucuuccugcaccucaucaagaucccgacccaccgccacaucaccggcaagcccugccccaagccccaccggcugaaccacauggggaucugcuccugcggccuguacaagcacccgggggugcccgugaaguggaagcgcugaggacuagucccuguucccagagcccacuuuuuuuucuuuuuuugaaauaaaauagccugucuuucagaucucaaaggcucuuuucagagccaccaaaaaaaaaaaaaaaaaaaaaaaaaaaaaaaaaaaaaaaaaaaaaaaaaaaaaaaaaaaaaaaaaaaaaaaaaaaaaaaaaaaaaaaaaaaaaaaaaaaaa

SEQ ID NO: 30030 - RNA, 1745 nt, Artificial Sequence
  mRNA product Design a-1 (hSL-A100) comprising derived and/or modified sequence from LASV(ISTH2010-NIG-2012;Clade II)__AIT17482__GPCmut6 (opt1)
aggagagucccgcagucggcguccagcggcucugcuuguucgugugugugucguugcaggccuuauucaagcuuaccaugggccagaucaucaccuucuuccaggaggugccccacgucaucgaggaggugaugaacaucgugcugaucgcccucagccugcuggccauccucaaggggaucuacaacgucgcgaccugcggccuguucgggcugguguccuuccuccugcugugcggccgcagcugcuccacgaccuacaaggggguguacgagcuccagacccuggagcuggacauggccagccucaacaugugcaugccgcuguccugcacgaagaacaacagccaccacuacaucauggucggcaacgagaccggccuggagcucacccugaccaacacguccaucaucaaccacaaguucugcaaccugagcgacgcccacaagaagaaccucuacgaccacgcccugauguccaucaucagcaccuuccaccuguccauccccaacuucaaccaguacgaggccaugagcugcgacuucaacgggggcaagaucuccgugcaguacaaccucagccacgcguacgccguggacgccgccaaccacugcgggaccaucgcgaacggcguccugcagaccuucaugcggauggccuggggcggguccuacaucgcccuggacagcggcaagggguccugggacugcaucaugacgagcuaccaguaccucaucauccagaacaucaccugggaggaccacugccaguucucccgccccagccccaucggcuaccuggggcugcucagccagcggacccgcgacaucuacaucucccggcgccugcugggcaccuucacguggacccucagcgacuccgagggcaacgagacccccgggggcuacugccugacccgguggaugcugaucgaggccgagcucaagugcuucgggaacacggccguggcgaagugcaacgagaagcacgacgaggaguucugcgacaugcugcgccuguucgacuucugcaagcaggccauccggcgccucaagacccccgcccagaugagcauccagcugaucaacaaggccgugaacgcccugaucaacgaccagcucaucaugaagaaccaccuccgggacaucaugggcauccccuacugcaacuacuccaaguacugguaccugaaccacaccgucaccgggaagacgagccugccccgcugcuggcugguguccaacggcagcuaccugaacgagacccacuucuccgacgacaucgagcagcaggcggacaacaugaucaccgagcuccugcagaaggaguacaucgaccggcagggcaagaccccgcuggggcucguggaccuguucgucuucagcacguccuucuaccugaucagcaucuuccugcaccucgugaagaucccgacccaccgccacguggucggcaagcccugccccaagccccaccggcugaaccacauggggaucugcuccugcggccuguacaagcacccgggggugcccgugaaguggaagcgcugaggacuagucccuguucccagagcccacuuuuuuuucuuuuuuugaaauaaaauagccugucuuucagaucucaaaggcucuuuucagagccaccaaaaaaaaaaaaaaaaaaaaaaaaaaaaaaaaaaaaaaaaaaaaaaaaaaaaaaaaaaaaaaaaaaaaaaaaaaaaaaaaaaaaaaaaaaaaaaaaaaaaa

SEQ ID NO: 30031 - RNA, 1745 nt, Artificial Sequence
  mRNA product Design a-1 (hSL-A100) comprising derived and/or modified sequence from LASV(Lassa virus/H.sapiens-wt/NGA/2015/ISTH_0543;Clade II)__AVO03639__GPCmut6 (opt1)
aggagagucccgcagucggcguccagcggcucugcuuguucgugugugugucguugcaggccuuauucaagcuuaccaugggccagaucaucaccuucuuccaggaggugccccacgucaucgaggaggugaugaacaucgugcugaucgcccucagccugcuggccauccucaaggggaucuacaacgucgcgaccugcggccuguucgggcugguguccuuccuccugcugugcggccgcagcugcuccacgaccuacaaggggguguacgagcuccagacccuggagcuggacauggccaaccucaacaugugcaugccgcugagcugcacgaagaacaacucccaccacuacaucauggucggcaacgagaccggccuggagcucacccugaccaacacgagcaucaucaaccacaaguucugcaaccuguccgacgcccacaagaagaaccucuacgaccacgcccugaugagcaucaucuccaccuuccaccugagcauccccaacuucaaccaguacgaggccauguccugcgacuucaacgggggcaagaucagcgugcaguacaaccucucccacaccuacgcgguggacgccgccaaccacugcgggaccaucgccaacggcguccugcagacguucaugcggauggcguggggcgggagcuacaucgcccuggacuccggcaaggggagcugggacugcaucaugaccuccuaccaguaccucgugauccagaacaccaccugggaggaccacugccaguucagccgccccucccccaucggcuaccuggggcugcucagccagcggacgcgcgacaucuacaucagccggcgccugcugggcaccuucaccuggacccucuccgacagcgagggcaacgagacgcccgggggcuacugccugacccgguggaugcugaucgaggccgagcucaagugcuucgggaacaccgccguggccaagugcaacgagaagcacgacgaggaguucugcgacaugcugcgccuguucgacuucugcaagcaggcgauccggcgccucaagacccccgcccagauguccauccagcugaucaacaaggccgucaacgcccugaucaacgaccagcucaucaugaagaaccaccuccgggacaucaugggcauccccuacugcaacuacagcaaguacugguaccugaaccacacggugaccgggaagaccucccugccccgcugcuggcuggugagcaacggcuccuaccugaacgagacccacuucagcgacgacaucgagcagcaggccgacaacaugaucacggagcuccugcagaaggaguacaucgaccggcagggcaagaccccgcuggggcucgucgaccuguucguguucuccaccagcuucuaccugaucuccaucuuccugcaccucgugaagaucccgacccaccgccacaucacgggcaagcccugccccaagccccaccggcugaaccacauggggaucugcagcugcggccuguacaagcacccggggguccccgugaaguggaagcgcugaggacuagucccuguucccagagcccacuuuuuuuucuuuuuuugaaauaaaauagccugucuuucagaucucaaaggcucuuuucagagccaccaaaaaaaaaaaaaaaaaaaaaaaaaaaaaaaaaaaaaaaaaaaaaaaaaaaaaaaaaaaaaaaaaaaaaaaaaaaaaaaaaaaaaaaaaaaaaaaaaaaaa

SEQ ID NO: 30032 - RNA, 1745 nt, Artificial Sequence
  mRNA product Design a-1 (hSL-A100) comprising derived and/or modified sequence from LASV(Lassa virus/H.sapiens-wt/NGA/2016/ISTH_0009;Clade II)__AVO03571__GPCmut6 (opt1)
aggagagucccgcagucggcguccagcggcucugcuuguucgugugugugucguugcaggccuuauucaagcuuaccaugggccagaucaucaccuucuuccaggaggugccccacgucaucgaggaggugaugaacaucgugcugaucgcccucagccugcuggccauccucaaggggaucuacaacgucgcgaccugcggccugcuggggcucguguccuuccugcugcucugcggccgcagcugcuccacgaccuacaaggggguguacgagcugcagacccuggagcucgacauggccagccugaacaugugcaugccgcuguccugcacgaagaacaacagccaccacuacaucauggucggcaacgagaccggccucgagcugacccugaccaacacguccaucaucaaccacaaguucugcaaccucagcgacgcccacaagaagaaccuguacgaccacgcccugauguccaucaucagcaccuuccaccucuccauccccaacuucaaccaguacgaggccaugagcugcgacuucaacgggggccggaucuccgugcaguacaaccugagccacuccuacgcgguggacgccgccaaccacugcgggaccaucgccaacggcguccugcagaccuucaugcgcauggcguggggcgggagcuacaucgcccucgacuccggcaaggggagcugggacugcaucaugacguccuaccaguaccugaucauccagaacaccaccugggaggaccacugccaguucagccggcccagccccaucggcuaccuggggcuccugucccagcgcacccgggacaucuacaucagccgccggcugcucggcacguucaccuggacccuguccgacagcgagggcaacgagacccccgggggcuacugccugacgcgcuggaugcucaucgaggccgagcugaagugcuucgggaacaccgccguggccaagugcaacgagaagcacgacgaggaguucugcgacaugcugcggcuguucgacuucugcaagcaggcgauccgccggcugaagacccccgcccagauguccauccagcugaucaacaaggccgugaacgcccucaucaacgaccagcugaucaugaagaaccaccuccgcgacaucaugggcaucccguacugcaacuacagcaaguacugguaccucaaccacaccgucacggggaagaccucccugccccggugcuggcuggugagcaacggcuccuaccucaacgagacccacuucagcgacgacaucgagcagcaggccgacaacaugaucaccgagcugcugcagaaggaguacaucgaccgccagggcaagacgccccucgggcugguggaccuguucgucuucuccaccagcuucuaccugaucuccaucuuccuccaccuggugaagaucccgacccaccggcacaucaccggcaagcccugccccaagccccaccgccugaaccacauggggaucugcagcugcggccucuacaaccacccgggggugcccgucaaguggaagcggugaggacuagucccuguucccagagcccacuuuuuuuucuuuuuuugaaauaaaauagccugucuuucagaucucaaaggcucuuuucagagccaccaaaaaaaaaaaaaaaaaaaaaaaaaaaaaaaaaaaaaaaaaaaaaaaaaaaaaaaaaaaaaaaaaaaaaaaaaaaaaaaaaaaaaaaaaaaaaaaaaaaaa

SEQ ID NO: 30033 - RNA, 1745 nt, Artificial Sequence
  mRNA product Design a-1 (hSL-A100) comprising derived and/or modified sequence from LASV(Lassa virus/H.sapiens-wt/NGA/2016/ISTH_0017;Clade II)__AVO03567__GPCmut6 (opt1)
aggagagucccgcagucggcguccagcggcucugcuuguucgugugugugucguugcaggccuuauucaagcuuaccaugggccagaucaucaccuucuuccaggaggugccccacgucaucgaggaggugaugaacaucgugcugaucgcccucagccugcuggccauccucaaggggaucuacaacgucgcgaccugcggccuguucgggcugguguccuuccuccugcugugcggccgcagcugcuccacgaccuacaaggggguguacgagcuccagacccuggagcuggacauggccagccucaacaugugcaugccgcuguccugcacgaagaacaacagccaccacuacaucauggucggcaacgagaccggccuggagcucacccugaccaacacguccaucaucaaccacaaguucugcaaccugagcgacgcccacaagaagaaccucuacgaccacgcccugauguccaucaucagcaccuuccaccuguccauccccaacuucaaccaguacgaggccaugagcugcgacuucaacgggggcaagaucuccgugcaguacaaccucagccacaccuacgcgaucgacgccgccaaccacugcgggaccaucgccaacggcgugcugcagacguucaugcggauggcguggggcggguccuacaucgcccuggacagcggcaagggguccugggacugcaucaugaccagcuaccaguaccucaucauccagaacaccaccugggaggaccacugccaguucucccgccccagccccaucggcuaccuggggcugcucagccagcggacgcgcgacaucuacaucucccggcgccugcugggcaccuucaccuggacccucagcgacuccgagggcaacgagacgcccgggggcuacugccugacccgguggaugcugaucgaggccgagcucaagugcuucgggaacaccgccgucgccaagugcaacgagaagcacgacgaggaguucugcgacaugcugcgccuguucgacuucugcaagcaggcgauccggcgccucaagacccccgcccagaugagcauccagcugaucaacaaggccgugaacgcccugaucaacgaccagcucaucaugaagaaccaccuccgggacaucaugggcauccccuacugcaacuacuccaaguacugguaccugaaccacacggugaccgggaagaccagccugccccgcugcuggcuggucuccaacggcagcuaccugaacgagacccacuucuccgacgacaucgagcagcaggccgacaacaugaucacggagcuccugcagaaggaguacauggaccggcagggcaagaccccgcuggggcucguggaccuguucguguucagcaccuccuucuaccugaucagcaucuuccugcaccucguccgcaucccgacccaccggcacgugaucggcaagcccugccccaagccccaccgccugaaccacauggggaucugcuccugcggccuguacaagcacccgggggugcccgucaaguggaagcggugaggacuagucccuguucccagagcccacuuuuuuuucuuuuuuugaaauaaaauagccugucuuucagaucucaaaggcucuuuucagagccaccaaaaaaaaaaaaaaaaaaaaaaaaaaaaaaaaaaaaaaaaaaaaaaaaaaaaaaaaaaaaaaaaaaaaaaaaaaaaaaaaaaaaaaaaaaaaaaaaaaaaa

SEQ ID NO: 30034 - RNA, 1745 nt, Artificial Sequence
  mRNA product Design a-1 (hSL-A100) comprising derived and/or modified sequence from LASV(Lassa virus/H.sapiens-wt/NGA/2018/ISTH_0959;Clade II)__AVV65099__GPCmut6 (opt1)
aggagagucccgcagucggcguccagcggcucugcuuguucgugugugugucguugcaggccuuauucaagcuuaccaugggccagaucaucaccuucuuccaggaggugccccacgucaucgaggaggugaugaacaucgugcugaucgcccucagccugcuggccauccucaaggggaucuacaacgucgugaccugcggccuguucgggcugguguccuuccuccugcugugcggccgcagcugcuccacgaccuacaagggggucuacgagcuccagacccuggagcuggacauggcgagccucaacaugugcaugccgcuguccugcacgaagaacaacagccaccacuacaucauggugggcaacgagaccggccuggagcucacccugaccaacacguccaucaucaaccacaaguucugcaaccugagcgacgcccacaagaagaaccucuacgaccacgcccugauguccaucaucagcaccuuccaccuguccauccccaacuucaaccaguacgaggccaugagcugcgacuucaacgggggcaagaucuccgugcaguacaaccucagccacgccuacgcgaucgacgccgccaaccacugcgggaccaucgccaacggcguccugcagaccuucaugcggauggcguggggcggguccuacaucgcccuggacagcggcaagggguccugggacugcaucaugacgagcuaccaguaccucaucauccagaacaccaccugggaggaccacugccaguucucccgccccagccccaucggcuaccuggggcugcucagccagcggacccgcgacaucuacaucucccggcgccugcugggcacguucaccuggacccucagcgacuccgagggcaacgagacccccgggggcuacugccugacgcgguggaugcugaucgaggccgagcucaagugcuucgggaacaccgccguggccaagugcaacgagaagcacgacgaggaguucugcgacaugcugcgccuguucgacuucugcaagcaggcgauccggcgccucaagacccccgcccagaugagcauccagcugaucaacaaggccgugaacgcccugaucaacgaccagcucaucaugaagaaccaccuccgggacaucaugggcaucccguacugcaacuacuccaaguacugguaccugaaccacaccgucacggggaagaccagccugccccgcugcuggcugguguccaacggcagcuaccugaacgagacccacuucuccgacgacaucgagcagcaggccgacaacaugaucaccgagcuccugcagaaggaguacaucgaccggcagggcaagacgccccuggggcucguggaccuguucgucuucagcaccuccuucuaccugaucagcaucuuccugcaccucgugaagaucccgacccaccgccacgugaucggcaagcccugccccaagccccaccggcugaaccacauggggaucugcuccugcggccuguacaagcacccggggguccccgugaaguggaagcgcugaggacuagucccuguucccagagcccacuuuuuuuucuuuuuuugaaauaaaauagccugucuuucagaucucaaaggcucuuuucagagccaccaaaaaaaaaaaaaaaaaaaaaaaaaaaaaaaaaaaaaaaaaaaaaaaaaaaaaaaaaaaaaaaaaaaaaaaaaaaaaaaaaaaaaaaaaaaaaaaaaaaaa

SEQ ID NO: 30035 - RNA, 1745 nt, Artificial Sequence
  mRNA product Design a-1 (hSL-A100) comprising derived and/or modified sequence from LASV(LASV003-NIG-2008;Clade II)__AIT17580__GPCmut6 (opt1)
aggagagucccgcagucggcguccagcggcucugcuuguucgugugugugucguugcaggccuuauucaagcuuaccaugggccagaucaucaccuucuuccaggaggugccccacgucaucgaggaggugaugaacaucgugcugaucgcccucagccugcuggccauccucaaggggaucuacaacgucgcgaccugcggccuguucgggcugguguccuuccuccugcugugcggccgcagcugcuccacgaccuacaaggggguguacgagcuccagacccuggagcuggacauggccagccucaacaugugcaugccgcuguccugcacgaagaacaacagccaccacuacaucauggucggcaacgagaccggccuggagcucacccugaccaacacguccaucaucaaccacaaguucugcaaccugagcgacgcccacaagaagaaccucuacgaccacgcccugauguccaucaucagcaccuuccaccuguccauccccaacuucaaccaguacgaggccaugagcugcgacuucaacgggggcaagaucuccgugcaguacaaccucagccacaccuacgcgguggacgccgccaaccacugcgggaccaucgccaacggcguccugcagacguucaugcggauggcguggggcggguccuacaucgcccuggacagcggcaagggguccugggacugcaucaugaccagcuaccaguaccucaucauccagaacaccaccugggaggaccacugccaguucucccgccccagccccaucggcuaccuggggcugcucagccagcggacgcgcgacaucuacaucucccggcgccugcugggcaccuucaccuggacccucagcgacuccgagagcaacgagacgccgggcggguacugccugacccgguggaugcugaucgaggccgagcucaagugcuucggcaacaccgccguggccaagugcaacgagaagcacgacgaggaguucugcgacaugcugcgccuguucgacuucugcaagcaggcgauccggcgccucaaggcccccgcccagauguccauccagcugaucaacaaggccgugaacgcccugaucaacgaccagcucaucaugaagaaccaccuccgggacaucauggggauccccuacugcaacuacagcaaguacugguaccugaaccacaccgucacgggccgcaccucccugccccggugcuggcuggugagcaacggguccuaccugaacgagacccacuucagcgacgacaucgagcagcaggcggacaacaugaucaccgagcuccugcagaaggaguacauggaccgccagggcaagacgccccugggccucguggaccuguucgucuucuccaccagcuucuaccugaucuccaucuuccugcaccucgugaagaucccgacccaccggcacgugaucgggaagcccugccccaagccccaccgccugaaccacaugggcaucugcagcugcgggcuguacaagcacccgggcguccccgugaaguggaagcggugaggacuagucccuguucccagagcccacuuuuuuuucuuuuuuugaaauaaaauagccugucuuucagaucucaaaggcucuuuucagagccaccaaaaaaaaaaaaaaaaaaaaaaaaaaaaaaaaaaaaaaaaaaaaaaaaaaaaaaaaaaaaaaaaaaaaaaaaaaaaaaaaaaaaaaaaaaaaaaaaaaaaa

SEQ ID NO: 30036 - RNA, 1745 nt, Artificial Sequence
  mRNA product Design a-1 (hSL-A100) comprising derived and/or modified sequence from LASV(LASV035-NIG-2009;Clade II)__AIT17588__GPCmut6 (opt1)
aggagagucccgcagucggcguccagcggcucugcuuguucgugugugugucguugcaggccuuauucaagcuuaccaugggccagaucaucaccuucuuccaggaggugccccacgucaucgaggaggugaugaacaucgugcugaucgcccucagccugcuggccauccucaaggggaucuacaacgucgcgaccugcggccuguucgggcugguguccuuccuccugcugugcggccgcagcugcuccacgaccuacaaggggguguacgagcuccagacccuggagcuggacauggccagccucaacaugugcaugccgcuguccugcacgaagaacaacagccaccacuacaucauggucggcaacgagaccggccuggagcucacccugaccaacacguccaucaucaaccacaaguucugcaaccugagcgacgcccacaagaagaaccucuacgaccacgcccugauguccaucaucagcaccuuccaccuguccauccccaacuucaaccaguacgaggccaugagcugcgacuucaacgggggcaagaucuccgugcaguacaaccucagccacgcguacgccguggacgccgccaaccacugcgggaccaucgcgaacggcguccugcagaccuucaugcggauggccuggggcggguccuacaucgcccuggacagcggcaagggguccugggacugcaucaugacgagcuaccaguaccucaucauccagaacaccaccugggaggaccacugccaguucucccgccccagccccaucggcuaccuggggcugcucagccagcggacccgcgacaucuacaucucccggcgccugcugggcacguucaccuggacccucagcgacuccgagggcaacgagacccccgggggcuacugccugacgcgguggaugcugaucgaggccgagcucaagugcuucgggaacaccgccguggcgaagugcaacgagaagcacgacgaggaguucugcgacaugcugcgccuguucgacuucugcaagcaggccauccggcgccucaaggcccccgcccagaugagcauccagcugaucaacaaggccgugaacgcgcugaucaacgaccagcucaucaugaagaaccaccuccgggacaucaugggcauccccuacugcaacuacuccaaguacugguaccugaaccacaccgucaccgggaagacgagccugccccgcugcuggcugguguccaacggcagcuaccugaacgagacccacuucuccgacgacaucgagcagcaggccgacaacaugaucaccgagcuccugcagaaggaguacaucgaccggcagggcaagaccccgcuggggcucguggaccuguucgucuucagcacguccuucuaccugaucagcaucuuccugcaccucgugaagaucccgacccaccgccacgugaucggcaagcccugccccaagccccaccggcugaaccacauggggaucugcuccugcggccuguacaagcacccggggguccccgugaaguggaagcgcugaggacuagucccuguucccagagcccacuuuuuuuucuuuuuuugaaauaaaauagccugucuuucagaucucaaaggcucuuuucagagccaccaaaaaaaaaaaaaaaaaaaaaaaaaaaaaaaaaaaaaaaaaaaaaaaaaaaaaaaaaaaaaaaaaaaaaaaaaaaaaaaaaaaaaaaaaaaaaaaaaaaaa

SEQ ID NO: 30037 - RNA, 1745 nt, Artificial Sequence
  mRNA product Design a-1 (hSL-A100) comprising derived and/or modified sequence from LASV(LASV1000-NIG-2009;Clade II)__AIT17782__GPCmut6 (opt1)
aggagagucccgcagucggcguccagcggcucugcuuguucgugugugugucguugcaggccuuauucaagcuuaccaugggccagaucaucaccuucuuccaggaggugccccacgucaucgaggaggugaugaacaucgugcugaucgcccucagccugcuggccauccucaaggggaucuacaacgucgcgaccugcggccuguucgggcugguguccuuccuccugcugugcggccgcagcugcuccacgaccuacaaggggguguacgagcuccagacccuggagcuggacauggccagccucaacaugugcaugccgcuguccugcacgaagaacaacagccaccacuacaucauggucggcaacgagaccggccuggagcucacccugaccaacacguccaucaucaaccacaaguucugcaaccugagcgacgcccacaagaagaaccucuacgaccacgcccugauguccaucaucagcaccuuccaccuguccauccccaacuucaaccaguacgaggccaugagcugcgacuucaacgggggcaagaucuccgugcaguacaaccucagccacaccuacgcgguggacgccgccaaccacugcgggaccaucgccaacggcguccugcagacguucaugcggauggcguggggcggguccuacaucgcccuggacagcggcaagggguccugggacugcaucaugaccagcuaccaguaccucaucauccagaacaccaccugggaggaccacugccaguucucccgccccagccccaucggcuaccuggggcugcucagccagcggacgcgcgacaucuacaucucccggcgccugcugggcaccuucaccuggacccucagcgacuccgagggcaacgagacgcccgggggcuacugccugacccgguggaugcugaucgaggccgagcucaagugcuucgggaacaccgccguggccaagugcaacgagaagcacgacgaggaguucugcgacaugcugcgccuguucgacuucugcaagcaggcgaucaagcggcucaagacccccgcccagaugagcauccagcugaucaacaaggccgugaacgcccugaucaacgaccagcucaucaugaagaaccaccuccgcgacaucaugggcauccccuacugcaacuacuccaaguacugguaccugaaccacacggucaccgggaagaccagccugccccggugcuggcugguguccaacggcagcuaccugaacgagacccacuucuccgacgacaucgagcagcaggccgacaacaugaucacggagcuccugcagaaggaguacaucgaccgccagggcaagaccccgcuggggcucguggaccuguucgucuucagcaccuccuucuaccugaucagcaucuuccugcaccucgugaagaucccgacccaccggcacguggucggcaagcccugccccaagccccaccgccugaaccacauggggaucugcuccugcggccuguacaagcacccgggggugcccgugaaguggaagcggugaggacuagucccuguucccagagcccacuuuuuuuucuuuuuuugaaauaaaauagccugucuuucagaucucaaaggcucuuuucagagccaccaaaaaaaaaaaaaaaaaaaaaaaaaaaaaaaaaaaaaaaaaaaaaaaaaaaaaaaaaaaaaaaaaaaaaaaaaaaaaaaaaaaaaaaaaaaaaaaaaaaaa

SEQ ID NO: 30038 - RNA, 1745 nt, Artificial Sequence
  mRNA product Design a-1 (hSL-A100) comprising derived and/or modified sequence from LASV(LASV221-NIG-2010;Clade II)__AIT17624__GPCmut6 (opt1)
aggagagucccgcagucggcguccagcggcucugcuuguucgugugugugucguugcaggccuuauucaagcuuaccaugggccagaucaucaccuucuuccaggaggugccccacgucaucgaggaggugaugaacaucgugcugaucgcccucagccugcuggccauccucaaggggaucuacaacgucgcgaccugcggccuguucgggcugguguccuuccuccugcugugcggccgcagcugcuccacgaccuacaaggggguguacgagcuccagacccuggagcuggacauggccagccucaacaugugcaugccgcuguccugcacgaagaacaacagccaccacuacaucauggucggcaacgagaccggccuggagcucacccugaccaacacguccaucaucaaccacaaguucugcaaccugagcgacgcccacaagaagaaccucuacgaccacgcccugauguccaucaucagcaccuuccaccuguccauccccaacuucaaccaguacgaggccaugagcugcgacuucaacgggggcaagaucuccgugcaguacaaccucagccacaccuacgcgaucgacgccgccaaccacugcgggaccaucgccaacggcgugcugcagacguucaugcggauggcguggggcggguccuacaucgcccuggacagcggcaagggguccugggacugcaucaugaccagcuaccaguaccucaucauccagaacaccaccugggaggaccacugccaguucucccgccccagccccaucggcuaccuggggcugcucagccagcggacgcgcgacaucuacaucucccggcgccugcugggcaccuucaccuggacccucagcgacuccgagggcaacgagacgcccgggggcuacugccugacccgguggaugcugaucgaggccgagcucaagugcuucgggaacaccgccgucgccaagugcaacgagaagcacgacgaggaguucugcgacaugcugcgccuguucgacuucugcaagcaggcgauccggcgccucaagacccccgcccagaugagcauccagcugaucaacaaggccgugaacgcccugaucaacgaccagcucaucaugaagaaccaccuccgggacaucaugggcauccccuacugcaacuacuccaaguacugguaccugaaccacacggugaccgggaagaccagccugccccgcugcuggcuggucuccaacggcagcuaccugaacgagacccacuucuccgacgacaucgagcagcaggccgacaacaugaucacggagaugcuccagaaggaguacauggaccggcagggcaagaccccgcuggggcugguggaccucuucguguucagcaccuccuucuaccugaucagcaucuuccugcaccuggucaagaucccgacccaccgccacgugaucggcaagcccugccccaagccccaccggcucaaccacauggggaucugcuccugcggccuguacaagcacccgggggugcccgucaaguggaagcgcugaggacuagucccuguucccagagcccacuuuuuuuucuuuuuuugaaauaaaauagccugucuuucagaucucaaaggcucuuuucagagccaccaaaaaaaaaaaaaaaaaaaaaaaaaaaaaaaaaaaaaaaaaaaaaaaaaaaaaaaaaaaaaaaaaaaaaaaaaaaaaaaaaaaaaaaaaaaaaaaaaaaaa

SEQ ID NO: 30039 - RNA, 1745 nt, Artificial Sequence
  mRNA product Design a-1 (hSL-A100) comprising derived and/or modified sequence from LASV(LASV237-NIG-2010;Clade II)__AIT17638__GPCmut6 (opt1)
aggagagucccgcagucggcguccagcggcucugcuuguucgugugugugucguugcaggccuuauucaagcuuaccaugggccagaucaucaccuucuuccaggaggugccccacgucaucgaggaggugaugaacaucgugcugaucgcccucagccugcuggccauccucaaggggaucuacaacgucgcgaccugcggccuguucgggcugguguccuuccuccugcugugcggccgcagcugcuccacgaccuacaaggggguguacgagcuccagacccuggagcuggacauggccagccucaacaugugcaugccgcuguccugcacgaagaacaacagccaccacuacaucauggucggcaacgagaccggccuggagcucacccugaccaacacguccaucaucaaccacaaguucugcaaccugagcgacgcccacaagaaggaccucuacgaccacgcccugauguccaucaucagcaccuuccaccuguccauccccaacuucaaccaguacgaggccaugagcugcgacuucaacgggggcaagaucuccgugcaguacaaccucagccacaccuacgcgguggacgccgccaaccacugcgggaccaucgccaacggcguccugcagacguucaugcggauggcguggggcggguccuacaucgcccuggacagcggcaagggguccugggacugcaucaugaccagcuaccaguaccucaucauccagaacaccaccugggaggaccacugccaguucucccgccccagccccaucggcuaccuggggcugcucagccagcggacgcgcgacaucuacaucucccggcgccugcugggcaccuucaccuggacccucagcgacuccgagggcaacgagacgcccgggggcuacugccugacccgguggaugcugaucgaggccgagcucaagugcuucgggaacaccgccguggccaagugcaacgagaagcacgacgaggaguucugcgacaugcugcgccuguucgacuucugcaagcaggcgauccggcgccucaagacccccgcccagaugagcauccagcugaucaacaaggccgugaacgcccugaucaacgaccagcucaucaugaagaaccaccuccgggacaucaugggcauccccuacugcaacuacuccaaguacugguaccugaaccacacggucaccgggaagaccagccugccccgcugcuggcugguguccaacggcagcuaccugaacgagacccacuucuccgacgacaucgagcagcaggccgacaacaugaucacggagcuccugcagaaggaguacauggaccggcagggcaagaccccgcuggggcucguggaccuguucgucuucagcaccuccuucuaccugaucagcaucuuccugcaccucaucaagaucccgacccaccgccacaucacgggcaagcccugccccaagccccaccggcugaaccacauggggaucugcuccugcggccuguacaagcacccgggggugcccgugaaguggaagcgcugaggacuagucccuguucccagagcccacuuuuuuuucuuuuuuugaaauaaaauagccugucuuucagaucucaaaggcucuuuucagagccaccaaaaaaaaaaaaaaaaaaaaaaaaaaaaaaaaaaaaaaaaaaaaaaaaaaaaaaaaaaaaaaaaaaaaaaaaaaaaaaaaaaaaaaaaaaaaaaaaaaaaa

SEQ ID NO: 30040 - RNA, 1745 nt, Artificial Sequence
  mRNA product Design a-1 (hSL-A100) comprising derived and/or modified sequence from LASV(LASV253-NIG-2011;Clade II)__AIT17670__GPCmut6 (opt1)
aggagagucccgcagucggcguccagcggcucugcuuguucgugugugugucguugcaggccuuauucaagcuuaccaugggccagaucaucaccuucuuccaggaggugccccacgucaucgaggaggugaugaacaucgugcugaucgcccucagccugcuggccauccucaaggggaucuacaacgucgcgaccugcggccuguucgggcugguguccuuccuccugcugugcggccgcagcugcuccacgaccuacaaggggguguacgagcuccagacccuggagcuggacauggccagccucaacaugugcaugccgcuguccugcacgaagaacaacagccaccacuacaucauggucggcaacgagaccggccuggagcucacccugaccaacacguccaucaucaaccacaaguucugcaaccugagcgacgcccacaagaagaaccucuacgaccacgcccugauguccaucaucagcaccuuccaccuguccauccccaacuucaaccaguacgaggccaugagcugcgacuucaacgggggcaagaucuccgugcaguacaaccucagccacaccuacgcgguggacgccgccaaccacugcgggaccaucgccaacggcguccugcagacguucaugcggauggcguggggcggguccuacaucgcccuggacagcggcaagggguccugggacugcaucaugaccagcuaccaguaccucaucauccagaacaccaccugggaggaccacugccaguucucccgccccagccccaucggcuaccuggggcugcucagccagcggacgcgcgacaucuacaucucccggcgccugcugggcaccuucaccuggacccucagcgacuccgagggcaacgagacgcccgggggcuacugccugacccgguggaugcugaucgaggccgagcucaagugcuucgggaacaccgccguggccaagugcaacgagaagcacgacgaggaguucugcgacaugcugcgccuguucgacuucugcaagcaggcgauccggcgccucaaggcccccgcccagaugagcauccagcugaucaacaaggccgugaacgcccugaucaacgaccagcucaucaugaagaaccaccuccgggacaucaugggcaucccguacugcaacuacuccaaguacugguaccugaaccacaccgucacggggcgcaccagccugccccggugcuggcugguguccaacggcagcuaccugaacgagacccacuucuccgacgacaucgagcagcaggcggacaacaugaucaccgagcuccugcagaaggaguacaucgaccgccagggcaagacgccccuggggcucguggaccuguucgucuucagcaccuccuucuaccugaucagcaucuuccugcaccucgugaagaucccgacccaccggcacaucaucggcaagcccugccccaagccccaccgccugaaccacauggggaucugcuccugcggccuguacaagcacccgggggugcccgucaaguggaagcggugaggacuagucccuguucccagagcccacuuuuuuuucuuuuuuugaaauaaaauagccugucuuucagaucucaaaggcucuuuucagagccaccaaaaaaaaaaaaaaaaaaaaaaaaaaaaaaaaaaaaaaaaaaaaaaaaaaaaaaaaaaaaaaaaaaaaaaaaaaaaaaaaaaaaaaaaaaaaaaaaaaaaa

SEQ ID NO: 30041 - RNA, 1745 nt, Artificial Sequence
  mRNA product Design a-1 (hSL-A100) comprising derived and/or modified sequence from LASV(LASV254-NIG-2011;Clade II)__AIT17674__GPCmut6 (opt1)
aggagagucccgcagucggcguccagcggcucugcuuguucgugugugugucguugcaggccuuauucaagcuuaccaugggccagaucaucaccuucuuccaggaggugccccacgucaucgaggaggugaugaacaucgugcugaucgcccucagccugcuggccauccucaaggggaucuacaacgucgcgaccugcggccuguucgggcugguguccuuccuccugcugugcggccgcagcugcuccacgaccuacaaggggguguacgagcuccagacccuggagcuggacaugaccaaccucaacaugugcaugccgcugagcugcaccaagaacaacucccaccacuacaucauggucggcaacgagaccggccuggagcucacccugacgaacaccagcaucaucaaccacaaguucugcaaccuguccgacgcccacaagaagaaccucuacaaccacgcccugaugagcaucaucuccaccuuccaccugagcauccccaacuucaaccaguacgaggccauguccugcgacuucaacgggggcaagaucagcgugcaguacaaccucucccacagcuacgccguggacgcggccaaccacugcgggaccaucgccaacggcguccugcagacguucaugcggauggccuggggcggguccuacaucgcgcuggacagcggcaaggggaacugggacugcaucaugaccuccuaccaguaccucaucauccagaacaccaccugggaggaccacugccaguucagccgccccucccccaucggcuaccuggggcugcucagccagcggacgcgcgacaucuacaucagccggcgccugcugggcaccuucaccuggacccucuccgacagcgagggcaacgagacgcccgggggcuacugccugacccgguggaugcugaucgaggccgagcucaagugcuucgggaacaccgccguggccaagugcaacgagaagcacgacgaggaguucugcgacaugcugcgccuguucgacuucugcaagcaggccauccggcgccucaagacccccgcgcaggccaacauccagcugaucaacaaggccgugaacgcccugaucaacgaccagcucaucaugaagaaccaccuccgggacaucaugggcauccccuacugcaacuacuccaaguacugguaccugaaccacacggucaccgggaagaccagccugccccgcugcuggcugguguccaacggcagcuaccugaacgagacccacuucuccgacgacaucgagcagcaggccgacaacaugaucacggagcuccugcagaaggaguacauggaccggcagggcaagaccccgcuggggcucguggaccuguucgucuucagcaccuccuucuaccugaucagcaucuuccugcaccucgugaagaucccgacccaccgccacgugaucggcaagcccugccccaagccccaccggcugaaccacauggggaucugcuccugcggccuguacaagcacccggggguccccgugaaguggaagcgcugaggacuagucccuguucccagagcccacuuuuuuuucuuuuuuugaaauaaaauagccugucuuucagaucucaaaggcucuuuucagagccaccaaaaaaaaaaaaaaaaaaaaaaaaaaaaaaaaaaaaaaaaaaaaaaaaaaaaaaaaaaaaaaaaaaaaaaaaaaaaaaaaaaaaaaaaaaaaaaaaaaaaa

SEQ ID NO: 30042 - RNA, 1745 nt, Artificial Sequence
  mRNA product Design a-1 (hSL-A100) comprising derived and/or modified sequence from LASV(Nig08-A19;Clade III)__ADU56618__GPCmut6 (opt1)
aggagagucccgcagucggcguccagcggcucugcuuguucgugugugugucguugcaggccuuauucaagcuuaccaugggccagaucgugaccuucuuccaggaggucccccacgugaucgaggaggugaugaacaucguccugaucgcccucagcauccuggccauccugaaggggcucuacaacaucgcgaccugcggccugaucgggcuggugacguuccuccugcuguccggccgcagcugcuccaugaccuacaaggggguguacgagcuccagacccuggagcugaacaugaacacccucaacaugugcaugccgcugagcugcaccaagaacaacucccaccacuacaucauggucggcaacgagaccggccuggagcucacccugacgaacaccagccugcuccaccacaaguucugcaaccuguccgacgcccacaagaagaaccuguacgaccacacccucaugagcaucaucuccaccuuccaccugagcauccccaacuucaaccaguacgaggccauguccugcgacuucaacgggggcaagaucacggugcaguacaaccugagccacuccuacgccaucgacgccgcgaaccacugcgggaccguggccaacggcguccuccagaccuucaugcggauggccuggggcgggagcuacaucgcccuggacuccggccgcgggaagugggacugcaucaugaccagcuaccaguaccugaucauccagaacacgaccugggaggaccacugccaguucucccggcccagccccaucggcuaccucgggcugcugucccagcgcacccgggacaucuacaucagccgccggcuccugggcaccuucacguggacccugagcgacuccgagggcaacgagacccccgggggcuacugccucacccgcuggaugcugaucgaggcggagcugaagugcuucgggaacacggccguggccaagugcaacgagaagcacgacgaggaguucugcgacaugcuccggcuguucgacuucugcaagcaggccauccgccggcugaaggcccccgcgcagaugagcauccagcucaucaacaaggccgugaacgcccugaucaacgaccagcugaucaugaagaaccaccuccgcgacaucaugggcauccccuacugcaacuacuccaaguacugguaccugaaccacaccagcaccgggcggaccucccugccccgcugcuggcucgucagcaacggcuccuaccugaacgagacgcacuucagcgacgacaucgagcagcaggccgacaacaugaucaccgagaugcugcagaaggaguaccucgaccggcagggcaagaccccgcuggggcugguggaccuguucguguucuccaccagcuucuaccucaucuccaucuuccugcaccuggucaagaucccgacgcaccgccacaucgugggcaagcccugccccaagccccaccggcucaaccacauggggaucugcagcugcggccuguacaagcagccgggggugcccguccgcuggaagcggugaggacuagucccuguucccagagcccacuuuuuuuucuuuuuuugaaauaaaauagccugucuuucagaucucaaaggcucuuuucagagccaccaaaaaaaaaaaaaaaaaaaaaaaaaaaaaaaaaaaaaaaaaaaaaaaaaaaaaaaaaaaaaaaaaaaaaaaaaaaaaaaaaaaaaaaaaaaaaaaaaaaaa

SEQ ID NO: 30043 - RNA, 1748 nt, Artificial Sequence
  mRNA product Design a-1 (hSL-A100) comprising derived and/or modified sequence from LASV(G1180-SLE-2010;Clade IV)__AIT17168__GPCmut6 (opt1)
aggagagucccgcagucggcguccagcggcucugcuuguucgugugugugucguugcaggccuuauucaagcuuaccaugggccagaucgugaccuucuuccaggaggucccccacgugaucgaggaggugaugaacaucguccugaucgcccucagcauccuggccgugcugaaggggcucuacaacuucgcgaccugcggccugguggggcugcucaccuuccugcugcucugcggccgcuccugcaccgccagccgguacaagggggucuacgagcugcagacccuggagcucaacauggagacccugaacaugugcaugccgcuguccugcaccaagaacaacagccaccacuacaucauggugggcaacgagaccggccucgagcugacccugacgaacaccuccaucaucaaccacaaguucugcaaccucagcgacgcccacaagaagaaccuguacgaccacgcccugauguccaucaucagcaccuuccaccucuccauccccaacuucaaccaguacgaggccaugagcugcgacuucaacgggggcaagaucuccgugcaguacaaccugagccacuccuacgcgggggacgccgccaaccacugcggcaccgucgccaacggggugcugcagacguucaugcgcauggcguggggcggcagcuacaucgcccucgacuccgggcacggcagcugggacugcaucaugaccuccuaccaguaccugaucauccagaacaccaccugggaggaccacugccaguucagccggcccucccccaucggguaccugggccuccugagccagcgcacgcgggacaucuacaucagccgccggcugcucggcaccuucaccuggacccuguccgacagcgaggggaaggacacgccgggcggguacugccugacccgcuggaugcucaucgaggccgagcugaagugcuucggcaacaccgccguggccaagugcaacgagaagcacgacgaggaguucugcgacaugcugcggcuguucgacuucugcaagcaggcgauccagcgccugaaggcccccgcccagauguccauccagcugaucaacaaggccgucaacgcccucaucaacgaccagcugaucaugaagaaccaccuccgggacaucauggggauccccuacugcaacuacagcaaguacugguaccucaaccacaccacgaccggcaagaccucccugcccaagugcuggcuggugagcaacggcuccuaccucaacgagacccacuucagcgacgacaucgagcagcaggcggacaacaugaucacggagaugcugcagaaggaguacauggagcgccaggggaagacgccccugggccucguggaccuguucgucuucuccaccagcuucuaccugaucuccaucuuccugcaccucgugaagaucccgacccaccggcacaucgugggcaagagcugccccaagccccaccgccugaaccacauggggaucugcuccugcgggcuguacaagcagcccggcgucccggugaaguggaagcggugaggacuagucccuguucccagagcccacuuuuuuuucuuuuuuugaaauaaaauagccugucuuucagaucucaaaggcucuuuucagagccaccaaaaaaaaaaaaaaaaaaaaaaaaaaaaaaaaaaaaaaaaaaaaaaaaaaaaaaaaaaaaaaaaaaaaaaaaaaaaaaaaaaaaaaaaaaaaaaaaaaaaa

SEQ ID NO: 30044 - RNA, 1748 nt, Artificial Sequence
  mRNA product Design a-1 (hSL-A100) comprising derived and/or modified sequence from LASV(G1442-SLE-2011;Clade IV)__AIT17180__GPCmut6 (opt1)
aggagagucccgcagucggcguccagcggcucugcuuguucgugugugugucguugcaggccuuauucaagcuuaccaugggccagaucgugaccuucuuccaggaggucccccacgugaucgaggaggugaugaacaucguccugaucgcccucagcauccuggccgugcugaaggggcucuacaacguggcgaccugcggccugaucgggcuggucacguuccuccugcugugcggccgcuccugcaccaccacccucuacaaggggguguacgagcugcagacgcuggagcucaacauggagacccugaacaugugcaugccgcugagcugcaccaagaacaacucccaccacuacauccgggugggcaacgagacgggccucgagcugacccugaccaacaccagcaucaucaaccacaaguucugcaaccucuccgacgcccacaagaagaaccuguacgaccacgcccugaugagcaucaucuccacguuccaccucagcauccccaacuucaaccaguacgaggccauguccugcgacuucaacgggggcaagaucagcguccaguacaaccugucccacagcuacgccggggacgcggccaaccacugcggcaccguggccaacggggugcugcagaccuucaugcgcauggccuggggcggcuccuacaucgcgcucgacagcgggcggggcaacugggacugcaucaugaccuccuaccaguaccugaucauccagaacacgaccugggacgaccacugccaguucagccgccccucccccaucggguaccugggccuccugagccagcggacccgcgacgucuacaucucccggcgccugcucggcaccuucacguggacccugagcgacagcgaggggaaggacaccccgggcggguacugccugacccgguggaugcucaucgaggccgagcugaagugcuucggcaacacggccguggccaagugcaacgagaagcacgacgaggaguucugcgacaugcugcgccucuucgacuucugcaagcaggccauccagcggcugaaggcgcccgcccagauguccauccagcugaucaacaaggccgugaacgcccucaucaacgaccagcugaucaugaagaaccaccuccgcgacaucauggggauccccuacugcaacuacagcaaguacugguaccugaacaacaccgccaccggcaagaccucccugcccaagugcuggcugaucagcaacggcuccuaccucaacgagacgcacuucagcgacgacaucgagcaggaggcggacaacaugaucaccgagaugcugcagaaggaguacauggagcggcaggggaagacgccccugggccucgucgaccuguucguguucuccaccagcuucuaccugaucuccaucuuccugcaccucgugaagaucccgacccaccgccacaucgucggcaagagcugccccaagccccaccggcugaaccacauggggaucugcuccugcgggcuguacaagcagcccggcgugccggugcgcuggaagcggugaggacuagucccuguucccagagcccacuuuuuuuucuuuuuuugaaauaaaauagccugucuuucagaucucaaaggcucuuuucagagccaccaaaaaaaaaaaaaaaaaaaaaaaaaaaaaaaaaaaaaaaaaaaaaaaaaaaaaaaaaaaaaaaaaaaaaaaaaaaaaaaaaaaaaaaaaaaaaaaaaaaaa

SEQ ID NO: 30045 - RNA, 1748 nt, Artificial Sequence
  mRNA product Design a-1 (hSL-A100) comprising derived and/or modified sequence from LASV(G3010-SLE-2013;Clade IV)__AIT17344__GPCmut6 (opt1)
aggagagucccgcagucggcguccagcggcucugcuuguucgugugugugucguugcaggccuuauucaagcuuaccaugggccagaucgugaccuucuuccaggaggucccccacgugaucgaggaggugaugaacaucguccugaucgcccucagcauccuggccgugcugaaggggcucuacaacuucgcgaccugcggccugguggggcuggucacguuccuccugcugugcggccgcuccugcaccaccagccucuacaaggggguguacgagcugcagacccuggagcucaacauggagacgcugaacaugugcaugccgcuguccugcaccaagaacaacagccaccacuacaucauggugggcaacgagaccggccucgagcugacgcugaccaacaccuccaucaucaaccacaaguucugcaaccucagcgacgcccacaagaagaaccuguacaaccacgcccugauguccaucaucagcaccuuccaccucuccauccccaacuucaaccaguacgaggccaugagcugcgacuucaacgggggcaagaucuccguccaguacaaccugagccacuccuacgccggggacgcggccagccacugcggcacgguggccaacggggugcugcagaccuucaugcggauggccuggggcggcuccuacaucgcgcucgacagcggguacggcaagugggacugcaucaugaccuccuaccaguaccugaucauccagaacaccacgugggaggaccacugccaguucagccgccccucccccaucggguaccugggccuccugagccagcggacccgcgacaucuacaucagccggcgccugcucggcaccuucaccuggacgcuguccgacagcgaggggaaggacaccccgggcggguacugccugacccgguggaugcucaucgaggccgagcugaagugcuucggcaacaccgccgucgccaagugcaacgagaagcacgacgaggaguucugcgacaugcugcgccucuucgacuucugcaagcaggccauccagcggcugaagacgcccgcgcagauguccauccagcugaucaacaaggccgugaacgcccucaucaacgaccagcugaucaugaagaaccaccuccgcgacaucauggggauccccuacugcaacuacagcaaguacugguaccugaaccacaccaccaccggcaagacgucccugcccaagugcuggcuggugagcaacggcuccuaccucaacgagacccacuucagcgacgacaucgagcagcaggccgacaacaugaucaccgagaugcugcagaaggaguacauggagcggcaggggaagacgccccugggccucgucgaccuguucguguucuccaccagcuucuaccugaucuccaucuuccugcaccucgugaagaucccgacccaccgccacaucgucggcaagagcugccccaagccccaccggcugaaccacauggggaucugcuccugcgggcuguacaagcagcccggcgugccggugcgcuggaagcggugaggacuagucccuguucccagagcccacuuuuuuuucuuuuuuugaaauaaaauagccugucuuucagaucucaaaggcucuuuucagagccaccaaaaaaaaaaaaaaaaaaaaaaaaaaaaaaaaaaaaaaaaaaaaaaaaaaaaaaaaaaaaaaaaaaaaaaaaaaaaaaaaaaaaaaaaaaaaaaaaaaaaa

SEQ ID NO: 30046 - RNA, 1748 nt, Artificial Sequence
  mRNA product Design a-1 (hSL-A100) comprising derived and/or modified sequence from LASV(G502-SLE-2009;Clade IV)__AIT17126__GPCmut6 (opt1)
aggagagucccgcagucggcguccagcggcucugcuuguucgugugugugucguugcaggccuuauucaagcuuaccaugggccagaucgugaccuucuuccaggaggucccccacgugaucgaggaggugaugaacaucguccugaucgcccucagcauccuggccgugcugaaggggcucuacaacuucgcgaccugcggccugguggggcugcucacguuccugcugcucugcggccgcuccugcaccaccgggcuguacaagggcgucuacgagcugcagacccucgagcugaacauggagacgcugaacaugugcaugccgcucagcugcaccaagaacaacucccaccacuacaucauggugggcaacgagaccgggcuggagcugacgcucaccaacaccagcaucaucaaccacaaguucugcaaccuguccgacgcccacaagaagaaccuguacgaccacgcccucaugagcaucaucuccaccuuccaccugagcauccccaacuucaaccaguacgaggccauguccugcgacuucaacggcgggaagaucagcgugcaguacaaccugucccacagcuacgccggcgacgcggccgaccacugcgggacggucgccaacggcgugcuccagaccuucaugcggauggccuggggcggguccuacaucgcgcuggacagcggccgcgggcggugggacugcaucaugaccuccuaccaguaccugaucauccagaacaccacgugggaggaccacugccaguucagccgccccucccccaucggcuaccucggccugcugagccagcggacccgcgacaucuacaucucccggcgccuccuggggaccuucaccuggacgcugagcgacagcgagggcaaggacacccccgggggcuacugccucacccgguggaugcugaucgaggccgagcugaagugcuucgggaacaccgccguggccaagugcaacgagaagcacgacgaggaguucugcgacaugcuccgccuguucgacuucugcaagcaggccauccagcggcugaaggcgcccgcccagauguccauccagcucaucaacaaggccgucaacgcccugaucaacgaccagcuggugaugaagaaccaccuccgcgacaucaugggcauccccuacugcaacuacagccgguacugguaccugaaccacacgaccaccggccgcaccucccugcccaagugcuggcucgugagcaacggguccuaccugaacgagacgcacuucagcgacgacaucgagcagcaggccgacaacaugaucaccgagaugcugcagaaggaguacauggagcggcagggcaagaccccgcucgggcuggucgaccuguucguguucuccaccagcuucuaccugaucuccaucuuccuccaccuggugaagaucccgacgcaccgccacaucgucggcaagagcugccccaagccccaccggcugaaccacauggggaucugcuccugcggccucuacaagcagcccggcgugccggugaaguggaagcgcugaggacuagucccuguucccagagcccacuuuuuuuucuuuuuuugaaauaaaauagccugucuuucagaucucaaaggcucuuuucagagccaccaaaaaaaaaaaaaaaaaaaaaaaaaaaaaaaaaaaaaaaaaaaaaaaaaaaaaaaaaaaaaaaaaaaaaaaaaaaaaaaaaaaaaaaaaaaaaaaaaaaaa

SEQ ID NO: 30047 - RNA, 1748 nt, Artificial Sequence
  mRNA product Design a-1 (hSL-A100) comprising derived and/or modified sequence from LASV(G733-SLE-2010;Clade IV)__AIT17154__GPCmut6 (opt1)
aggagagucccgcagucggcguccagcggcucugcuuguucgugugugugucguugcaggccuuauucaagcuuaccaugggccagaucgugaccuucuuccaggaggucccccacgugaucgaggaggugaugaacaucguccugaucgcccucagcauccuggccgugcugaaggggcucuacaacuucgcgaccugcggcaucguggggcuggucuccuuccugcuccugugcggccgcagcugcacgaccucccuguacaaggggguguacgagcuccagacccuggagcugaacauggagacccucaacaugugcaugccgcugagcugcaccaagaacaacucccaccacuacaucauggugggcaacgagaccggccuggagcucacccugacgaacaccagcaucaucaaccacaaguucugcaaccuguccgacgcccacaagaagaaccucuacgaccacgcccugaugagcaucaucuccaccuuccaccugagcauccccaacuucaaccaguacgaggccauguccugcgacuucaacgggggcaagaucagcguccaguacaaccucucccacagcuacgccggggacgcggccaaccacugcggcaccaucgccaacggggugcugcagacguucaugcggauggccuggggcggcuccuacaucgcgcuggacagcgggcgcgaccggugggacugcaucaugaccuccuaccaguaccucaucauccagaacaccaccugggaggaccacugccaguucagccgccccucccccaucggcuaccuggggcugcucagccagcggacgcgcgacaucuacaucagccggcgccugcugggcaccuucaccuggacccucuccgacagcgagggcaaggacacgcccgggggcuacugccugacccgguggaugcugaucgaggccgagcucaagugcuucgggaacaccgccguggccaagugcaacgagaagcacgacgaggaguucugcgacaugcugcgccuguucgacuucugcaagcaggccauccagcggcucaaggcgcccgcccagauguccauccagcugaucaacaaggccgucaacgcccugaucaacgaccagcucaucaugaagaaccaccuccgcgacaucaugggcauccccuacugcaacuacagcaaguacugguaccugaaccacaccacgaccgggaagaccucccugcccaagugcuggcuggugagcaacggcuccuaccugaacgagacccacuucagcgacgacaucgagcagcaggccgacaacaugaucacggagaugcuccagaaggaguacauggagcggcagggcaagaccccgcuggggcugguggaccucuucgucuucuccaccagcuucuaccugaucuccaucuuccugcaccuggugaagaucccgacccaccgccacguggucggcaagagcugccccaagccccaccggcucaaccacauggggaucugcuccugcggccuguacgggcagcccggcgugccggugaaguggaagcgcugaggacuagucccuguucccagagcccacuuuuuuuucuuuuuuugaaauaaaauagccugucuuucagaucucaaaggcucuuuucagagccaccaaaaaaaaaaaaaaaaaaaaaaaaaaaaaaaaaaaaaaaaaaaaaaaaaaaaaaaaaaaaaaaaaaaaaaaaaaaaaaaaaaaaaaaaaaaaaaaaaaaaa

SEQ ID NO: 30048 - RNA, 1748 nt, Artificial Sequence
  mRNA product Design a-1 (hSL-A100) comprising derived and/or modified sequence from MOPV/LASV reassortant(IGS-1;Clade IV)__AFY05576__GPCmut6 (opt1)
aggagagucccgcagucggcguccagcggcucugcuuguucgugugugugucguugcaggccuuauucaagcuuaccaugggccagaucgugaccuucuuccaggaggucccccacgugaucgaggaggugaugaacaucguccugaucgcccucagcgugcuggccgugcugaaggggcucuacaacuucgcgaccugcggccuggucgggcuggugacguuccuccugcugugcggccgcuccugcaccaccagccucuacaaggggguguacgagcugcagacccuggagcucaacauggagacgcugaacaugugcaugccgcuguccugcaccaagaacaacagccaccacuacaucauggucggcaacgagaccggccucgagcugacgcugaccaacaccuccaucaucaaccacaaguucugcaaccucagcgacgcccacaagaagaaccuguacgaccacgcccugauguccaucaucagcaccuuccaccucuccauccccaacuucaaccaguacgaggccaugagcugcgacuucaacgggggcaagaucuccgugcaguacaaccugagccacuccuacgccggggacgcggccaaccacugcggcacgguggccaacgggguccugcagaccuucaugcggauggccuggggcggcagcuacaucgcgcucgacuccgggcgcggcaacugggacugcaucaugaccagcuaccaguaccugaucauccagaacaccacgugggaggaccacugccaguucucccggcccagccccaucggguaccugggccuccugucccagcgcacccgggacaucuacaucagccgccggcugcucggcaccuucaccuggacgcugagcgacuccgagggggaggacaccccgggcggguacugccugacccgcuggaugcucaucgaggccgagcugaagugcuucggcaacaccgccguggccaagugcaacgagaagcacgacgaggaguucugcgacaugcugcggcuguucgacuucugcaagcaggccauccagcgccugaaggcgcccgcccagaugagcauccagcugaucaacaaggccgugaacgcccucaucaacgaccagcugaucaugaagaaccaccuccgggacaucauggggauccccuacugcaacuacuccaaguacugguaccucaaccacacgaccaccggccgcaccagccugcccaagugcuggcuggucuccaacggcagcuaccucaacgagacgcacuucuccgacgacaucgagcagcaggccgacaacaugaucaccgagaugcugcagaaggaguacauggagcggcaggggaagacgccccugggccucguggaccuguucguguucagcaccuccuucuaccugaucagcaucuuccugcaccucgucaagaucccgacccaccgccacaucguggggaaguccugccccaagccccaccggcugaaccacaugggcaucugcagcugcgggcuguacaagcagcccggcgugccggucaaguggaagcgcugaggacuagucccuguucccagagcccacuuuuuuuucuuuuuuugaaauaaaauagccugucuuucagaucucaaaggcucuuuucagagccaccaaaaaaaaaaaaaaaaaaaaaaaaaaaaaaaaaaaaaaaaaaaaaaaaaaaaaaaaaaaaaaaaaaaaaaaaaaaaaaaaaaaaaaaaaaaaaaaaaaaaa

SEQ ID NO: 30049 - RNA, 1748 nt, Artificial Sequence
  mRNA product Design a-1 (hSL-A100) comprising derived and/or modified sequence from LASV(LM765-SLE-2012;Clade IV)__AIT17814__GPCmut6 (opt1)
aggagagucccgcagucggcguccagcggcucugcuuguucgugugugugucguugcaggccuuauucaagcuuaccaugggccagaucgugaccuucuuccaggaggucccccacgugaucgaggaggugaugaacaucguccugaucgcccucagcauccuggccgugcugaaggggcucuacaacuucgcgaccugcggccugguggggcuggucacguuccuccugcugugcggccgcuccugcaccaccagccucuacaaggggguguacgagcugcagacccuggagcucaacauggagacgcugaacaugugcaugccgcuguccugcaccaagaacaacagccaccacuacaucauggugggcaacgagaccggccucgagcugacgcugaccaacaccuccaucaucgaccacaaguucugcaaccucagcgacgcccaccggaagaaccuguacgaccacgcccugauguccaucaucagcaccuuccaccucuccauccccaacuucaaccaguacgaggccaugagcugcgacuucaacgggggcaagaucuccguccaguacaaccugagccacuccuacgccaaggacgcggccgaccacugcgggacgguggccaacggcgugcugcagaccuucaugcgcauggccuggggcgggagcuacaucgcgcucgacuccggccgggggcgcugggacugcaucaugaccagcuaccaguaccugaucauccagaacaccacgugggaggaccacugccaguucucccggcccagccccaucggcuaccuggggcuccugucccagcgcacccgggacaucuacaucagccgccggcugcucggcaccuucaccuggacgcugagcgacuccgagggcaaggacacccccgggggcuacugccugacccgcuggaugcucaucgaggccgagcugaagugcuucgggaacaccgccgucgccaagugcaacgagaagcacgacgaggaguucugcgacaugcugcggcuguucgacuucugcaagcaggccauccagcgccugaaggcgcccgcccagaugagcauccagcugaucaacaaggccgugaacgcccucaucaacgaccagcugaucaugaagaaccaccuccgggacaucaugggcauccccuacugcaacuacuccaaguacugguaccucaaccacacgaccaccgggaagaccagccugcccaagugcuggcugguguccaacggcagcuaccucaacgagacgcacuucuccgacgacaucgagcagcaggccgacaacaugaucaccgagaugcugcagaaggaguacauggagcgccagggcaagaccccgcuggggcucgucgaccuguucguguucagcaccuccuucuaccugaucagcaucuuccugcaccucgugaagaucccgacgcaccggcacaucgucggcaagcccugccccaagccccaccgccugaaccacauggggaucugcuccugcggccuguacaagcagccgggggugcccgugaaguggaagcggugaggacuagucccuguucccagagcccacuuuuuuuucuuuuuuugaaauaaaauagccugucuuucagaucucaaaggcucuuuucagagccaccaaaaaaaaaaaaaaaaaaaaaaaaaaaaaaaaaaaaaaaaaaaaaaaaaaaaaaaaaaaaaaaaaaaaaaaaaaaaaaaaaaaaaaaaaaaaaaaaaaaaa

SEQ ID NO: 30050 - RNA, 1748 nt, Artificial Sequence
  mRNA product Design a-1 (hSL-A100) comprising derived and/or modified sequence from LASV(LM776-SLE-2012;Clade IV)__AIT17824__GPCmut6 (opt1)
aggagagucccgcagucggcguccagcggcucugcuuguucgugugugugucguugcaggccuuauucaagcuuaccaugggccagaucgugaccuucuuccaggaggucccccacgugaucgaggaggugaugaacaucguccugaucgcccucagcauccuggccgugcugaaggggcucuacaacuucgcgaccugcggccugguggggcuggucacguuccuccugcugugcggccgcuccugcaccaccagcguguacaaggggguguacgagcuccagacccuggagcugaacauggagacgcucaacaugugcaugccgcuguccugcaccaagaacaacagccaccacuacaucauggucggcaacgagaccggccuggagcucacgcugaccaacaccuccaucaucaaccacaaguucugcaaccugagcgacgcccacaagaagaaccucuacgaccacgcccugauguccaucaucagcaccuuccaccuguccauccccaacuucaaccaguacgaggccaugagcugcgacuucaacgggggcaagaucuccgugcaguacaaccucagccacuccuacgccggggacgcggccaaccacugcggcacgguggccaacgggguccugcagaccuucaugcggauggccuggggcggcagcuacaucgcgcuggacuccgggcacggcaagugggacugcaucaugaccagcuaccaguaccucaucauccagaacaccacgugggaggaccacugccaguucucccgccccagccccaucggguaccugggccugcucucccagcggacccgcgacaucuacaucagccggcgccugcugggcaccuucaccuggacgcucagcgacuccgaggggaaggacaccccgggcggguacugccugacccgguggaugcugaucgaggccgagcucaagugcuucggcaacaccgccguggccaagugcaacgagaagcacgacgaggaguucugcgacaugcugcgccuguucgacuucugcaagcaggccauccagcggcucaaggcgcccgcccagaugagcauccagcugaucaacaaggccgugaacgcccugaucaacgaccagcucaucaugaagaaccaccuccgcgacaucauggggauccccuacugcaacuacuccaaguacugguaccugaaccacacgaccaccggcaagaccagccugcccaagugcuggcuggucuccaacggcagcuaccugaacgagacgcacuucuccgacgacaucgagcagcaggccgacaacaugaucaccgagaugcuccagaaggaguacauggagcggcaggggaagacgccccugggccugguggaccucuucguguucagcaccuccuucuaccugaucagcaucuuccugcaccuggucaagaucccgacccaccgccacaucguggggaaguccugccccaagccccaccggcucaaccacaugggcaucugcagcugcgggcuguacaagcagcccggcgugccgguccgcuggaagcggugaggacuagucccuguucccagagcccacuuuuuuuucuuuuuuugaaauaaaauagccugucuuucagaucucaaaggcucuuuucagagccaccaaaaaaaaaaaaaaaaaaaaaaaaaaaaaaaaaaaaaaaaaaaaaaaaaaaaaaaaaaaaaaaaaaaaaaaaaaaaaaaaaaaaaaaaaaaaaaaaaaaaa

SEQ ID NO: 30051 - RNA, 1748 nt, Artificial Sequence
  mRNA product Design a-1 (hSL-A100) comprising derived and/or modified sequence from LASV(Mad39;Clade IV)__ANH09722__GPCmut6 (opt1)
aggagagucccgcagucggcguccagcggcucugcuuguucgugugugugucguugcaggccuuauucaagcuuaccaugggccagaucgugaccuucuuccaggaggucccccacgugaucgaggaggugaugaacaucguccugaucgcccucagcauccuggccgugcugaaggggcucuacaacguggcgaccugcggccugaucgggcuggucacguuccuccugcugugcggccgcuccugcaccaccacccucuacaaggggguguacgagcugcaggcccuggagcucaacauggagacgcugaacaugugcaugccgcugagcugcaccaagaacaacucccaccacuacauccgggugggcaacgagaccggccucgagcugacgcugaccaacaccagccucaucaaccacaaguucugcaaccuguccgacgcccacaagaagaaccuguacgaccacgcccucaugagcaucaucuccaccuuccaccugagcauccccaacuucaaccaguacgaggccauguccugcgacuucaacgacgggaagaucagcguccaguacaaccugucccacacguacgcgggcgacaccgccaaccacugcgggaccguggccaacggcgugcuccagaccuucaugcgcauggccuggggcgggagcuacaucgcgcuggacuccggccgcgggggcugggacugcaucaugacgagcuaccaguaccugaucauccagaacaccaccugggaggaccacugccaguucucccggcccagccccaucggguaccucggccugcugucccagcggacccgcgacaucuacaucagccggcgccuccugggcacguucaccuggacccuguccgacagcgaggggaaggacaccccgggcggguacugccucacgcgguggaugcugaucgaggccgagcugaagugcuucggcaacaccgccgucgccaagugcaacgagaagcacgacgaggaguucugcgacaugcuccgccuguucgacuucugcaagcaggccauccagcggcugaaggcgcccgcccagaugagcauccagcucaucaacaaggccgugaacgcccugaucaacgaccagcugaucaugaagaaccaccuccgcgacaucauggggauccccuacugcaacuacuccaaguacugguaccugaaccacaccgugaccggcaagacgagccugcccaagugcuggcucgucuccaacggcagcuaccugaacgagacccacuucuccgacgacaucgagcagcaggccgacaacaugaucaccgagaugcugcagaaggaguacauggagcggcaggggaagacgccccucggccugguggaccuguucguguucagcaccuccuucuaccugaucagcaucuuccuccaccuggucaagaucccgacccaccgccacgugguggggaagcccugccccaagccccaccggcugaaccacaugggcaucugcuccugcggguucuacaagcagccgggcguccccgugcgcuggaagcggugaggacuagucccuguucccagagcccacuuuuuuuucuuuuuuugaaauaaaauagccugucuuucagaucucaaaggcucuuuucagagccaccaaaaaaaaaaaaaaaaaaaaaaaaaaaaaaaaaaaaaaaaaaaaaaaaaaaaaaaaaaaaaaaaaaaaaaaaaaaaaaaaaaaaaaaaaaaaaaaaaaaaa

SEQ ID NO: 30052 - RNA, 1748 nt, Artificial Sequence
  mRNA product Design a-1 (hSL-A100) comprising derived and/or modified sequence from LASV(Z0947-SLE-2011;Clade IV)__AIT17840__GPCmut6 (opt1)
aggagagucccgcagucggcguccagcggcucugcuuguucgugugugugucguugcaggccuuauucaagcuuaccaugggccagaucgugaccuucuuccaggaggucccccacgugaucgaggaggugaugaacaucguccugaucgcccucagcauccuggccgugcugaaggggcucuacaacuucgcgaccugcggccugguggggcuggucacguuccuccugcugugcggccgcuccugcaccaucagccucuacaaggggguguacgagcugcagacccuggagcucaacauggagacccugaacaugugcaugccgcuguccugcaccaagaacaacagccaccacuacaucauggugggcaacgagaccggccucgagcugacccugacgaacaccuccaucaucaaccacaaguucugcaaccucagcgacgcccacaagaagaaccuguacgaccacgcccugauguccaucaucagcaccuuccaccucuccauccccaacuucaaccaguacgaggccaugagcugcgacuucaacgggggcaagaucuccguccaguacaaccugagccacuccuacgccggggacgcggccaaccacugcggcaccguggccaacggggugcugcagacguucaugcggauggccuggggcggcagcuacaucgcgcucgacuccgggcgcgaccggugggacugcaucaugaccagcuaccaguaccugaucauccagaacaccaccugggaggaccacugccaguucucccgccccagccccaucggcuaccuggggcuccugucccagcggacgcgcgacaucuacaucagccggcgccugcucggcaccuucaccuggacccugagcgacuccgagggcaaggacacgcccgggggcuacugccugacccgguggaugcucaucgaggccgagcugaagugcuucgggaacaccgccgucgccaagugcaacgagaagcacgacgaggaguucugcgacaugcugcgccucuucgacuucugcaagcaggccauccagcggcugaaggcgcccgcccagaugagcauccagcugaucaacaaggccgugaacgcccucaucaacgaccagcugaucaugaagaaccaccuccgcgacaucaugggcauccccuacugcaacuacuccaaguacugguaccugaaccacaccacgaccgggaagaccagccugcccaagugcuggcugguguccaacggcagcuaccucaacgagacccacuucuccgacgacaucgagcagcaggccgacaacaugaucacggagaugcugcagaaggaguacauggagcggcagggcaagaccccgcuggggcucgucgaccuguucguguucagcaccuccuucuaccugaucagcaucuuccugcaccucgugaagaucccgacccaccgccacaucgucggcaagcccugccccaagccccaccggcugaaccacauggggaucugcuccugcggccuguacaagcagccgggggugcccgugaaguggaagcgcugaggacuagucccuguucccagagcccacuuuuuuuucuuuuuuugaaauaaaauagccugucuuucagaucucaaaggcucuuuucagagccaccaaaaaaaaaaaaaaaaaaaaaaaaaaaaaaaaaaaaaaaaaaaaaaaaaaaaaaaaaaaaaaaaaaaaaaaaaaaaaaaaaaaaaaaaaaaaaaaaaaaaa

SEQ ID NO: 30053 - RNA, 1748 nt, Artificial Sequence
  mRNA product Design a-1 (hSL-A100) comprising derived and/or modified sequence from LASV(Josiah;Clade IV)__NP_694870__GPCmut6 (opt1)
aggagagucccgcagucggcguccagcggcucugcuuguucgugugugugucguugcaggccuuauucaagcuuaccaugggccagaucgugaccuucuuccaggaggucccccacgugaucgaggaggugaugaacaucguccugaucgcccucagcgugcuggccgugcugaaggggcucuacaacuucgcgaccugcggccuggucgggcuggugacguuccuccugcugugcggccgcuccugcaccaccagccucuacaaggggguguacgagcugcagacccuggagcucaacauggagacgcugaacaugugcaugccgcuguccugcaccaagaacaacagccaccacuacaucauggucggcaacgagaccggccucgagcugacccugacgaacaccuccaucaucaaccacaaguucugcaaccucagcgacgcccacaagaagaaccuguacgaccacgcccugauguccaucaucagcaccuuccaccucuccauccccaacuucaaccaguacgaggccaugagcugcgacuucaacgggggcaagaucuccgugcaguacaaccugagccacuccuacgccggggacgcggccaaccacugcggcaccguggccaacgggguccugcagacguucaugcggauggccuggggcggcagcuacaucgcgcucgacuccgggcgcggcaacugggacugcaucaugaccagcuaccaguaccugaucauccagaacaccaccugggaggaccacugccaguucucccggcccagccccaucggguaccugggccuccugucccagcgcacgcgggacaucuacaucagccgccggcugcucggcaccuucaccuggacccugagcgacuccgaggggaaggacacgccgggcggguacugccugacccgcuggaugcucaucgaggccgagcugaagugcuucggcaacaccgccguggccaagugcaacgagaagcacgacgaggaguucugcgacaugcugcggcuguucgacuucugcaagcaggccauccagcgccugaaggcgcccgcccagaugagcauccagcugaucaacaaggccgugaacgcccucaucaacgaccagcugaucaugaagaaccaccuccgggacaucauggggauccccuacugcaacuacuccaaguacugguaccucaaccacaccacgaccggccgcaccagccugcccaagugcuggcuggucuccaacggcagcuaccucaacgagacccacuucuccgacgacaucgagcagcaggccgacaacaugaucacggagaugcugcagaaggaguacauggagcggcaggggaagaccccgcugggccugguggaccucuucguguucagcaccuccuucuaccugaucagcaucuuccugcaccucgucaagauccccacccaccgccacaucguggggaaguccugccccaagccccaccggcugaaccacaugggcaucugcagcugcgggcuguacaagcagccgggcgugcccgucaaguggaagcgcugaggacuagucccuguucccagagcccacuuuuuuuucuuuuuuugaaauaaaauagccugucuuucagaucucaaaggcucuuuucagagccaccaaaaaaaaaaaaaaaaaaaaaaaaaaaaaaaaaaaaaaaaaaaaaaaaaaaaaaaaaaaaaaaaaaaaaaaaaaaaaaaaaaaaaaaaaaaaaaaaaaaaa

SEQ ID NO: 30054 - RNA, 1745 nt, Artificial Sequence
  mRNA product Design a-1 (hSL-A100) comprising derived and/or modified sequence from LASV(LP;Clade I)__AAF86701__GPCmut6 (opt1)
aggagagucccgcagucggcguccagcggcucugcuuguucgugugugugucguugcaggccuuauucaagcuuaccaugggccagaucaucaccuucuuccaggaggugccccacgucaucgaggaggugaugaacaucgugcugaucgcccucagccugcuggccauccucaaggggcuguacaacaucgcgaccugcggcaucaucgggcuggucgccuuccucuuccugugcggcaaguccugcagccugacgcucaagggcggguacgagcugcagacccuggagcucaacauggagacccugaacaugugcaugccgcuguccugcaccaagaacagcucccaccacuacauccgcgugggcaacgagacggggcucgagcugacccugaccaacaccagcaucaucaaccacaaguucugcaaccucuccgacgcccacaagaagaaccuguacgaccacgcccugaugagcaucaucuccacguuccaccucagcauccccaacuucaaccaguacgaggccauguccugcgacuucaacggcgggaagaucagcgugcaguacaaccugucccacagcuacgcgggcgacgccgccgagcacugcgggaccgucgccaacggcgugcugcagaccuucaugcggauggcguggggcgggcgcuacaucgcccucgacuccggcaaggggaacugggacugcaucaugaccagcuaccaguaccugaucauccagaacacgaccugggaggaccacugccaguucucccggcccagccccaucggcuaccugggccuccugucccagcgcacccgggacaucuacaucagccgccggcugcucgggaccuucacguggacccugagcgacuccgagggcaacgagacccccgggggcuacugccugacccgcuggaugcucaucgaggccgagcugaagugcuucgggaacacggccguggccaagugcaacgagaagcacgacgaggaguucugcgacaugcugcggcuguucgacuucugcaagcaggcgauccgccggcugaaggccccggcccagaugagcauccagcugaucaacaaggccgucaacgcccucaucaacgaccagcugaucaugaagaaccaccuccgcgacaucaugggcauccccuacugcaacuacuccaaguacugguaccucaaccacaccagcuccggccggaccagccugcccaagugcuggcugaucuccaacgggagcuaccucaacgagacccaguucuccgacgacaucgagcagcaggcggacaacaugaucacggagaugcugcagaaggaguacaucgagcgccagggcaagaccccgcuggggcugguggacaucuucaucuucagcaccuccuucuaccucaucagcaucuuccugcaccugaucaagauccccacccaccggcacaucgugggcaagcccugccccaagccgcaccgccucaaccacaugggggucugcuccugcggccuguacaagcaccccggcgugcccacgaaguggaagcggugaggacuagucccuguucccagagcccacuuuuuuuucuuuuuuugaaauaaaauagccugucuuucagaucucaaaggcucuuuucagagccaccaaaaaaaaaaaaaaaaaaaaaaaaaaaaaaaaaaaaaaaaaaaaaaaaaaaaaaaaaaaaaaaaaaaaaaaaaaaaaaaaaaaaaaaaaaaaaaaaaaaaa

SEQ ID NO: 30055 - RNA, 1745 nt, Artificial Sequence
  mRNA product Design a-1 (hSL-A100) comprising derived and/or modified sequence from LASV(803213;Clade II)__AAF86703__GPCmut6 (opt1)
aggagagucccgcagucggcguccagcggcucugcuuguucgugugugugucguugcaggccuuauucaagcuuaccaugggccagaucaucaccuucuuccaggaggugccccacgucaucgaggaggugaugaacaucgugcugaucgcccucagccugcuggccauccucaaggggaucuacaacgucgcgaccugcggccuguucgggcugaucuccuuccuccugcugugcggccgcagcugcuccgugacguacaaggggguguacgagcuccagacccuggagcugaacauggccaaccucaacaugugcaugccgcugagcugcaccaagaacaacucccaccacuacaucauggucggcaacgagaccggccuggagcucacgcugaccaacaccagcaucaucaaccacaaguucugcaaccuguccgacgcccacaagaagaaccucuacgaccacgcccugaugagcaucaucuccaccuuccaccugagcauccccaacuucaaccaguacgaggccauguccugcgacuucaacgggggcaagaucagcgugcaguacaaccucucccacagcuucgcgguggacgccgccaaccacugcgggacgaucgccaacggcguccugcagaccuucaugcggauggcguggggcggguccuacaucgcccuggacagcggcaaggggaacugggacugcaucaugaccuccuaccaguaccucaucauccagaacaccacgugggaggaccacugccaguucagccgccccucccccaucggcuaccuggggcugcucagccagcggacccgcgacaucuacaucagccggcgccugcugggcaccuucaccuggacgcucuccgacagcgagggcaacgaggcccccgggggcuacugccugacccgguggaugcugaucgaggccgagcucaagugcuucgggaacaccgccguggcgaagugcaacgagaagcacgacgaggaguucugcgacaugcugcgccuguucgacuucugcaagcaggccaucaagcggcucaagaccccggcccagauguccauccagcugaucaacaaggccgugaacgcccugaucaacgaccagcucaucaugaagaaccaccuccgcgacaucaugggcauccccuacugcaacuacagccgguacugguaccugaaccacacggucaccgggaagaccucccugccccgcugcuggcuggugagcaacggcuccuaccugaacgagacccacuucagcgacgacaucgagcagcaggcggacaacaugaucacggagaugcuccagaaggaguacauggaccggcagggcaagaccccgcuggggcugguggaccuguucgucuucuccaccagcuucuaccucaucuccaucuuccugcaccuggugaagauccccacccaccgccacaucgugggcaagcccugccccaagccgcaccggcucaaccacauggggaucugcagcugcggccuguacaagcaccccgggguccccgugaaguggaagcgcugaggacuagucccuguucccagagcccacuuuuuuuucuuuuuuugaaauaaaauagccugucuuucagaucucaaaggcucuuuucagagccaccaaaaaaaaaaaaaaaaaaaaaaaaaaaaaaaaaaaaaaaaaaaaaaaaaaaaaaaaaaaaaaaaaaaaaaaaaaaaaaaaaaaaaaaaaaaaaaaaaaaaa

SEQ ID NO: 30056 - RNA, 1745 nt, Artificial Sequence
  mRNA product Design a-1 (hSL-A100) comprising derived and/or modified sequence from LASV(GA391;Clade III)__CAA36645__GPCmut6 (opt1)
aggagagucccgcagucggcguccagcggcucugcuuguucgugugugugucguugcaggccuuauucaagcuuaccaugggccagaucgugaccuucuuccaggaggucccccacgugaucgaggaggugaugaacaucguccugaucgcccucagcauccuggccauccugaaggggcucuacaacguggcgaccugcggccugaucgggcuggugacguuccuccugcuguccggccgcagcugcucccucaucuacaaggggaccuacgagcugcagacccuggagcucaacauggagacccugaacaugugcaugccgcugagcugcacgaagaacaacucccaccacuacauccgggucggcaacgagaccggccucgagcugacccugaccaacacgagcauccucaaccacaaguucugcaaccuguccgacgcccacaagcgcaaccuguacgaccacagccucauguccaucaucagcaccuuccaccuguccauccccaacuucaaccaguacgaggccaugagcugcgacuucaacgggggcaagaucaccgugcaguacaaccugucccacagcuucgccguggacgccgcggggcacugcggcacccucgccaacgggguccugcagacguucaugcggauggccuggggcggcuccuacaucgcccuggacagcgggcgcggcaacugggacugcaucaugaccuccuaccaguaccucaucauccagaacaccaccugggacgaccacugccaguucagccggcccucccccaucggguaccugggccugcucagccagcgcacgcgggacaucuacaucagccgccggcugcugggcaccuucaccuggacccucuccgacagcgaggggaacgagacgccgggcggguacugccugacccgcuggaugcugaucgaggcggagcucaagugcuucggcaacaccgccguggccaagugcaacgagaagcacgacgaggaguucugcgacaugcugcggcuguucgacuucugcaagcaggccauccgccggcucaagacccccgcccagauguccauccagcugaucaacaaggcggugaacgcccugaucaacgaccagcucaucaugaagaaccaccuccgcgacaucauggggauccccuacugcaacuacagccgguacugguaccugaaccacacguccaccggcaagaccagccugccccgcugcuggcugaucuccaacggcagcuaccugaacgagaccaaguucuccgacgacaucgagcagcaggccgacaacaugaucacggagaugcugcagaaggaguacaucgaccggcaggggaagaccccgcucggccuggucgaccuguucguguucagcaccuccuucuaccucaucagcaucuuccugcaccuggugaagauccccacccaccgccacaucgucgggaagcccugccccaagccgcaccggcucaaccacaugggcaucugcuccugcgggcuguacaagcagcccggcgugcccgugcgcuggaagcggugaggacuagucccuguucccagagcccacuuuuuuuucuuuuuuugaaauaaaauagccugucuuucagaucucaaaggcucuuuucagagccaccaaaaaaaaaaaaaaaaaaaaaaaaaaaaaaaaaaaaaaaaaaaaaaaaaaaaaaaaaaaaaaaaaaaaaaaaaaaaaaaaaaaaaaaaaaaaaaaaaaaaa

SEQ ID NO: 30057 - RNA, 1748 nt, Artificial Sequence
  mRNA product Design a-1 (hSL-A100) comprising derived and/or modified sequence from LASV(AV;Clade V)__CCA30314__GPCmut6 (opt1)
aggagagucccgcagucggcguccagcggcucugcuuguucgugugugugucguugcaggccuuauucaagcuuaccaugggccagaucgugaccuucuuccaggaggucccccacgugaucgaggaggugaugaacaucguccugaucgcccucagcauccuggccgugcugaaggggcucuacaacaucgcgaccugcggccugaucgggcugaucacguuccuccugcugugcggccgcuccugcagcuccaaccucuacaaggggguguacgagcugcagagccuggaccucaacauggagacccugaacaugugcaugccgcuguccugcaccaagaacaacagccaccacuacauccgggucggcaacgacaccggccucgagcugacgcugaccaacaccuccauccucaaccacaaguucugcaaccugagcgacgcccacaagaaggaccuguacgaccacgcccucauguccaucaucagcaccuuccaccuguccauccccaacuucaaccaguacgaggccaugagcugcgacuucaacgggggcaagaucuccgugcaguacaaccugagccacuccuacgccaucgacgcggccaaccacugcgggacgguggccaacggcauccuccagaccuucaugcgcauggccuggggcgggagcuacaucgcgcuggacuccggccgggggaacugggacugcaucaugaccagcuaccaguaccugaucauccagaacaccacgugggagaaccacugccaguucucccgccccagccccaucggcuaccucgggcugcugagccagcggacccgcgacaucuacaucucccggcgccuccugggcaccuucaccuggacgcugagcgacuccgagggcaacgccacccccgggggcuacugccucacccgguggaugcugaucgaggccgagcugaagugcuucgggaacaccgccgucgccaagugcaacgagaagcacgacgaggaguucugcgacaugcuccgccuguucgacuucugcaagcaggcgaucagccggcugaaguccccggcccagaugagcauccagcucaucaacaaggccgugaacgcccugaucaacgaccagcugaucaugaagaaccaccuccgcgacaucaugggcauccccuacugcaacuacuccaaguacugguaccugaaccacacgaucaccgggaagaccagccugcccaagugcuggcucguguccaacggcagcuaccugaacgagacccacuucuccgacgacaucgagcagcaggccgacaacaugaucacggagaugcugcagaaggaguacauggagcggcagggcaagaccccgcuggggcucgucgaccuguucguguucagcaccuccuucuaccugaucagcaucuuccuccgccuggugaagauccccacccaccggcacaucgucggcaagcccugccccaagccgcaccgccugaaccacauggggaucugcuccugcggccucuacaagcagcccggggugcccgugcgguggaagcgcugaggacuagucccuguucccagagcccacuuuuuuuucuuuuuuugaaauaaaauagccugucuuucagaucucaaaggcucuuuucagagccaccaaaaaaaaaaaaaaaaaaaaaaaaaaaaaaaaaaaaaaaaaaaaaaaaaaaaaaaaaaaaaaaaaaaaaaaaaaaaaaaaaaaaaaaaaaaaaaaaaaaaa

SEQ ID NO: 30058 - RNA, 1745 nt, Artificial Sequence
  mRNA product Design a-1 (hSL-A100) comprising derived and/or modified sequence from LASV(Togo/2016/7082;Clade VI)__AMR44577__GPCmut6 (opt1)
aggagagucccgcagucggcguccagcggcucugcuuguucgugugugugucguugcaggccuuauucaagcuuaccaugggccagaucaucaccuucuuccaggaggugccccacgucaucgaggaggugaugaacaucgugcugaucgcccucagccugcuggccauccucaagggggucuacaacguggcgaccugcggcaucaucgggcuggugacguuccuguuccucugcggccgcuccugcagccugaucuacaagggguccuacgagcugcagacccucgagcugaacauggagacccugaacaugugcaugccgcucagcugcaccaagaacuccagccaccacuacauccgggucggcaacgagacgggccuggagcugacccucaccaacaccuccaucaucaaccacaaguucugcaaccugagcgacgcccacaagcgcaaccuguacgaccacgcccucauguccauccugagcacguuccaccuguccauccccaacuucaaccaguacgaggccaugagcugcgacuucaacgggggcaagaucuccgugcaguacaaccucagccacgccuacgcgguggacgccgccgagcacugcgggaccgucgccaacggcgugcugcagaccuucaugcggauggcguggggcggguccuacaucgcccuggacagcggccgcgggaacugggacugcaucaugaccuccuaccaguaccucaucauccagaacacgaccugggaggaccacugccaguucagccggcccucccccaucggcuaccuggggcugcucagccagcgcacccgggacaucuacaucagccgccggcugcugggcaccuucacguggacccucuccgacagcgagggcaacgagacccccgggggcuacugccugacccgcuggaugcugaucgaggccgagcucaagugcuucgggaacacggccguggccaagugcaacgagaagcacgacgaggaguucugcgacaugcugcggcuguucgacuucugcaagcaggcgauccagcgccucaaguccccggcccagaugagcauccagcugaucaacaaggccgucaacgcccugaucaacgaccagcucaucaugaagaaccaccuccgggacaugaugggcauccccuacugcaacuacuccaaguacugguaccugaaccacaccagcuccgggcgcaccagccugcccaagugcuggcugguguccaacggcagcuaccugaacgagacccacuucuccgacgacaucgagcagcaggccgacaacaugaucacggagaugcuccagaaggaguacaucgaccggcagggcaagaccccgcuggggcugguggaccuguucgucuucagcaccuccuucuaccucaucagcaucuuccugcaccugaucaagauccccacccaccgccacaucgugggcaagcccugccccaagccgcaccggcucaaccacauggggaucugcuccugcggccuguacaagcagcccggggugcccacgcgcuggaagcggugaggacuagucccuguucccagagcccacuuuuuuuucuuuuuuugaaauaaaauagccugucuuucagaucucaaaggcucuuuucagagccaccaaaaaaaaaaaaaaaaaaaaaaaaaaaaaaaaaaaaaaaaaaaaaaaaaaaaaaaaaaaaaaaaaaaaaaaaaaaaaaaaaaaaaaaaaaaaaaaaaaaaa

SEQ ID NO: 30059 - RNA, 1745 nt, Artificial Sequence
  mRNA product Design a-1 (hSL-A100) comprising derived and/or modified sequence from LASV(KAK-428;Clade n.d. (VII))__ANH09740__GPCmut6 (opt1)
aggagagucccgcagucggcguccagcggcucugcuuguucgugugugugucguugcaggccuuauucaagcuuaccaugggccagaucgugaccuucuuccaggaggucccccacgugaucgaggaggugaugaacaucguccugaucgcccucagccugcuggccauccucaaggggcuguacaacuucgcgaccugcggcgugaucgggcugaucacguuccuccugcugugcggccgcuccugcagcgccaccuacaaggggcaguacgagcuccagacccuggagcugaacauggagucccucaacaugugcaugccgcugagcugcaccaagaacaacucccaccacuacauccgggccggcaacaacacgggccuggagcucacccugaccaacaccagcaucaucucccacaaguucugcaaccugagcgacgcccacaagaagaaccucuacgaccacacgcugauguccaucaucaccaccuuccaccugagcauccccaacuucaaccaguacgaggccauguccugcgacuucaacgggggcaagaucagcauccaguacaaccucucccacagcuacgcgggggacgccgcccagcacugcggcaccguggccaacgggguccugcagacguucaugcgcauggcguggggcggcuccuaccuggcccucgacagcgggcggcgcggcugggacugcaucaucuccagcuaccaguaccugaucauccagaacaccaccugggacgaccacugccaguucucccggcccagccccaucggguaccugggcuucgugagccagaagacccgcgacaucuacaucucccggcgccuccugggcacguucaccuggacccugagcgacuccgaggggcacgacaugccgggcggguacugccucacccgguggaugcugaucgaggccgaccugaagugcuucggcaacacggccguggccaagugcaacgagaagcacgacgaggaguucugcgacauguggcgccucuucgacuucugcaagcaggcgauccagcggcugaaggcccccgcccagaugaacauccagcugaucaacaaggccgucaacgcccucaucaacgaccagcugaugaugaagaaccaccuccgcgacaucauggggauccccuacugcaacuacagcaaguucugguaccugaacaacaccaccaccggccggacgucccugccccgcugcuggcugaucagcaacggcuccuaccucaacgagacccacuucagcgacgacaucgagcagcaggcggacaacaugaucaccgagaugcugcagaaggaguacauggaccggcaggggaagaccccgcugggccucguggaccuguucguguucuccacgagcuucuaccugaucaccaucuuccugcaccucgucaagauccccacccaccgccacaucguggggaagcccugccccaagccgcaccggcugaaccacaugggcaucugcuccugcgggcuguacaagcagcccggcgugcccguccgcuggaagcggugaggacuagucccuguucccagagcccacuuuuuuuucuuuuuuugaaauaaaauagccugucuuucagaucucaaaggcucuuuucagagccaccaaaaaaaaaaaaaaaaaaaaaaaaaaaaaaaaaaaaaaaaaaaaaaaaaaaaaaaaaaaaaaaaaaaaaaaaaaaaaaaaaaaaaaaaaaaaaaaaaaaaa

SEQ ID NO: 30060 - RNA, 1745 nt, Artificial Sequence; identical to SEQ ID NO: 30054
  mRNA product Design a-1 (hSL-A100) comprising derived and/or modified sequence from LASV(Pinneo-NIG-1969;Clade I)__AIT17836__GPCmut6 (opt1)

SEQ ID NO: 30061 - RNA, 1745 nt, Artificial Sequence
  mRNA product Design a-1 (hSL-A100) comprising derived and/or modified sequence from LASV(ISTH0009-NIG-2011;Clade II)__AIT17404__GPCmut6 (opt1)
aggagagucccgcagucggcguccagcggcucugcuuguucgugugugugucguugcaggccuuauucaagcuuaccaugggccagaucaucaccuucuuccaggaggugccccacgucaucgaggaggugaugaacaucgugcugaucgcccucagccugcuggccauccucaaggggaucuacaacgucgcgaccugcggccuguucgggcugguguccuuccuccugcugugcggccgcagcugcuccacgaccuacaaggggguguacgagcuccagacccuggagcuggacauggccagccucaacaugugcaugccgcuguccugcaccaagaacaacagccaccacuacaucauggucggcaacgagacgggccuggagcucacccugaccaacaccuccaucaucaaccacaaguucugcaaccugagcgacgcccacaagaagaaccucuacgaccacgcccugauguccaucaucagcacguuccaccuguccauccccaacuucaaccaguacgaggccaugagcugcgacuucaacgggggcaagaucuccgugcaguacaaccucagccacgcguacgccguggacgccgccaaccacugcgggaccaucgcgaacggcguccugcagaccuucaugcggauggccuggggcggguccuacaucgcccuggacagcggcaagggguccugggacugcaucaugaccagcuaccaguaccucaucauccagaacacgaccugggaggaccacugccaguucucccgccccagccccaucggcuaccuggggcugcucagccagcggacccgcgacaucuacaucucccggcgccugcugggcaccuucacguggacccucagcgacuccgagggcaacgagacccccgggggcuacugccugacccgguggaugcugaucgaggccgagcucaagugcuucgggaacacggccguggcgaagugcaacgagaagcacgacgaggaguucugcgacaugcugcgccuguucgacuucugcaagcaggccauccggcgccucaagaccccggcccagaugagcauccagcugaucaacaaggccgugaacgcccugaucaacgaccagcucaucaugaagaaccaccuccgggacaucaugggcauccccuacugcaacuacuccaaguacugguaccugaaccacaccgucaccgggaagacgagccugccccgcugcuggcugguguccaacggcagcuaccugaacgagacccacuucuccgacgacaucgagcagcaggcggacaacaugaucaccgagcuccugcagaaggaguacauggaccggcagggcaagaccccgcuggggcugguggaccucuucgucuucagcacguccuucuaccugaucagcaucuuccugcaccucaucaagauccccacccaccgccacaucaccggcaagcccugccccaagccgcaccggcugaaccacauggggaucugcuccugcggccuguacaagcaccccggggugcccgugaaguggaagcgcugaggacuagucccuguucccagagcccacuuuuuuuucuuuuuuugaaauaaaauagccugucuuucagaucucaaaggcucuuuucagagccaccaaaaaaaaaaaaaaaaaaaaaaaaaaaaaaaaaaaaaaaaaaaaaaaaaaaaaaaaaaaaaaaaaaaaaaaaaaaaaaaaaaaaaaaaaaaaaaaaaaaaa

SEQ ID NO: 30062 - RNA, 1745 nt, Artificial Sequence
  mRNA product Design a-1 (hSL-A100) comprising derived and/or modified sequence from LASV(ISTH2010-NIG-2012;Clade II)__AIT17482__GPCmut6 (opt1)
aggagagucccgcagucggcguccagcggcucugcuuguucgugugugugucguugcaggccuuauucaagcuuaccaugggccagaucaucaccuucuuccaggaggugccccacgucaucgaggaggugaugaacaucgugcugaucgcccucagccugcuggccauccucaaggggaucuacaacgucgcgaccugcggccuguucgggcugguguccuuccuccugcugugcggccgcagcugcuccacgaccuacaaggggguguacgagcuccagacccuggagcuggacauggccagccucaacaugugcaugccgcuguccugcaccaagaacaacagccaccacuacaucauggucggcaacgagacgggccuggagcucacccugaccaacaccuccaucaucaaccacaaguucugcaaccugagcgacgcccacaagaagaaccucuacgaccacgcccugauguccaucaucagcacguuccaccuguccauccccaacuucaaccaguacgaggccaugagcugcgacuucaacgggggcaagaucuccgugcaguacaaccucagccacgcguacgccguggacgccgccaaccacugcgggaccaucgcgaacggcguccugcagaccuucaugcggauggccuggggcggguccuacaucgcccuggacagcggcaagggguccugggacugcaucaugaccagcuaccaguaccucaucauccagaacaucacgugggaggaccacugccaguucucccgccccagccccaucggcuaccuggggcugcucagccagcggacccgcgacaucuacaucucccggcgccugcugggcaccuucaccuggacgcucagcgacuccgagggcaacgagacccccgggggcuacugccugacccgguggaugcugaucgaggccgagcucaagugcuucgggaacaccgccguggcgaagugcaacgagaagcacgacgaggaguucugcgacaugcugcgccuguucgacuucugcaagcaggccauccggcgccucaagacgccggcccagaugagcauccagcugaucaacaaggccgugaacgcccugaucaacgaccagcucaucaugaagaaccaccuccgggacaucaugggcauccccuacugcaacuacuccaaguacugguaccugaaccacaccgucaccgggaagaccagccugccccgcugcuggcugguguccaacggcagcuaccugaacgagacgcacuucuccgacgacaucgagcagcaggcggacaacaugaucaccgagcuccugcagaaggaguacaucgaccggcagggcaagaccccgcuggggcugguggaccucuucgucuucagcaccuccuucuaccugaucagcaucuuccugcaccucgugaagauccccacgcaccgccacguggucggcaagcccugccccaagccgcaccggcugaaccacauggggaucugcuccugcggccuguacaagcaccccggggugcccgugaaguggaagcgcugaggacuagucccuguucccagagcccacuuuuuuuucuuuuuuugaaauaaaauagccugucuuucagaucucaaaggcucuuuucagagccaccaaaaaaaaaaaaaaaaaaaaaaaaaaaaaaaaaaaaaaaaaaaaaaaaaaaaaaaaaaaaaaaaaaaaaaaaaaaaaaaaaaaaaaaaaaaaaaaaaaaaa

SEQ ID NO: 30063 - RNA, 1745 nt, Artificial Sequence
  mRNA product Design a-1 (hSL-A100) comprising derived and/or modified sequence from LASV(Lassa virus/H.sapiens-wt/NGA/2015/ISTH_0543;Clade II)__AVO03639__GPCmut6 (opt1)
aggagagucccgcagucggcguccagcggcucugcuuguucgugugugugucguugcaggccuuauucaagcuuaccaugggccagaucaucaccuucuuccaggaggugccccacgucaucgaggaggugaugaacaucgugcugaucgcccucagccugcuggccauccucaaggggaucuacaacgucgcgaccugcggccuguucgggcugguguccuuccuccugcugugcggccgcagcugcuccacgaccuacaaggggguguacgagcuccagacccuggagcuggacauggccaaccucaacaugugcaugccgcugagcugcaccaagaacaacucccaccacuacaucauggucggcaacgagacgggccuggagcucacccugaccaacaccagcaucaucaaccacaaguucugcaaccuguccgacgcccacaagaagaaccucuacgaccacgcccugaugagcaucaucuccacguuccaccugagcauccccaacuucaaccaguacgaggccauguccugcgacuucaacgggggcaagaucagcgugcaguacaaccucucccacaccuacgcgguggacgccgccaaccacugcgggaccaucgccaacggcguccugcagaccuucaugcggauggcguggggcgggagcuacaucgcccuggacuccggcaaggggagcugggacugcaucaugacguccuaccaguaccucgugauccagaacaccaccugggaggaccacugccaguucagccgccccucccccaucggcuaccuggggcugcucagccagcggacccgcgacaucuacaucagccggcgccugcugggcacguucaccuggacccucuccgacagcgagggcaacgagacccccgggggcuacugccugacgcgguggaugcugaucgaggccgagcucaagugcuucgggaacaccgccguggccaagugcaacgagaagcacgacgaggaguucugcgacaugcugcgccuguucgacuucugcaagcaggcgauccggcgccucaagaccccggcccagauguccauccagcugaucaacaaggccgucaacgcccugaucaacgaccagcucaucaugaagaaccaccuccgggacaucaugggcauccccuacugcaacuacagcaaguacugguaccugaaccacaccgugacggggaagaccucccugccccgcugcuggcuggugagcaacggcuccuaccugaacgagacccacuucagcgacgacaucgagcagcaggccgacaacaugaucaccgagcuccugcagaaggaguacaucgaccggcagggcaagacgccgcuggggcuggucgaccucuucguguucuccaccagcuucuaccugaucuccaucuuccugcaccucgugaagauccccacccaccgccacaucaccggcaagcccugccccaagccgcaccggcugaaccacauggggaucugcagcugcggccuguacaagcaccccgggguccccgugaaguggaagcgcugaggacuagucccuguucccagagcccacuuuuuuuucuuuuuuugaaauaaaauagccugucuuucagaucucaaaggcucuuuucagagccaccaaaaaaaaaaaaaaaaaaaaaaaaaaaaaaaaaaaaaaaaaaaaaaaaaaaaaaaaaaaaaaaaaaaaaaaaaaaaaaaaaaaaaaaaaaaaaaaaaaaaa

SEQ ID NO: 30064 - RNA, 1745 nt, Artificial Sequence
  mRNA product Design a-1 (hSL-A100) comprising derived and/or modified sequence from LASV(Lassa virus/H.sapiens-wt/NGA/2016/ISTH_0009;Clade II)__AVO03571__GPCmut6 (opt1)
aggagagucccgcagucggcguccagcggcucugcuuguucgugugugugucguugcaggccuuauucaagcuuaccaugggccagaucaucaccuucuuccaggaggugccccacgucaucgaggaggugaugaacaucgugcugaucgcccucagccugcuggccauccucaaggggaucuacaacgucgcgaccugcggccugcuggggcucguguccuuccugcugcucugcggccgcagcugcuccacgaccuacaaggggguguacgagcugcagacccuggagcucgacauggccagccugaacaugugcaugccgcuguccugcaccaagaacaacagccaccacuacaucauggucggcaacgagacgggccucgagcugacccugaccaacaccuccaucaucaaccacaaguucugcaaccucagcgacgcccacaagaagaaccuguacgaccacgcccugauguccaucaucagcacguuccaccucuccauccccaacuucaaccaguacgaggccaugagcugcgacuucaacgggggccggaucuccgugcaguacaaccugagccacuccuacgcgguggacgccgccaaccacugcgggaccaucgccaacggcguccugcagaccuucaugcgcauggcguggggcgggagcuacaucgcccucgacuccggcaaggggagcugggacugcaucaugaccuccuaccaguaccugaucauccagaacacgaccugggaggaccacugccaguucagccggcccagccccaucggcuaccuggggcuccugucccagcgcacccgggacaucuacaucagccgccggcugcucggcaccuucacguggacccuguccgacagcgagggcaacgagacccccgggggcuacugccugacccgcuggaugcucaucgaggccgagcugaagugcuucgggaacacggccguggccaagugcaacgagaagcacgacgaggaguucugcgacaugcugcggcuguucgacuucugcaagcaggcgauccgccggcugaagaccccggcccagauguccauccagcugaucaacaaggccgugaacgcccucaucaacgaccagcugaucaugaagaaccaccuccgcgacaucaugggcauccccuacugcaacuacagcaaguacugguaccucaaccacaccgucaccgggaagacgucccugccccggugcuggcuggugagcaacggcuccuaccucaacgagacccacuucagcgacgacaucgagcagcaggccgacaacaugaucaccgagcugcugcagaaggaguacaucgaccgccagggcaagaccccgcuggggcucguggaccuguucgucuucuccacgagcuucuaccugaucuccaucuuccuccaccuggugaagauccccacccaccggcacaucaccggcaagcccugccccaagccgcaccgccugaaccacauggggaucugcagcugcggccucuacaaccaccccggggugcccgucaaguggaagcggugaggacuagucccuguucccagagcccacuuuuuuuucuuuuuuugaaauaaaauagccugucuuucagaucucaaaggcucuuuucagagccaccaaaaaaaaaaaaaaaaaaaaaaaaaaaaaaaaaaaaaaaaaaaaaaaaaaaaaaaaaaaaaaaaaaaaaaaaaaaaaaaaaaaaaaaaaaaaaaaaaaaaa

SEQ ID NO: 30065 - RNA, 1745 nt, Artificial Sequence
  mRNA product Design a-1 (hSL-A100) comprising derived and/or modified sequence from LASV(Lassa virus/H.sapiens-wt/NGA/2016/ISTH_0017;Clade II)__AVO03567__GPCmut6 (opt1)
aggagagucccgcagucggcguccagcggcucugcuuguucgugugugugucguugcaggccuuauucaagcuuaccaugggccagaucaucaccuucuuccaggaggugccccacgucaucgaggaggugaugaacaucgugcugaucgcccucagccugcuggccauccucaaggggaucuacaacgucgcgaccugcggccuguucgggcugguguccuuccuccugcugugcggccgcagcugcuccacgaccuacaaggggguguacgagcuccagacccuggagcuggacauggccagccucaacaugugcaugccgcuguccugcaccaagaacaacagccaccacuacaucauggucggcaacgagacgggccuggagcucacccugaccaacaccuccaucaucaaccacaaguucugcaaccugagcgacgcccacaagaagaaccucuacgaccacgcccugauguccaucaucagcacguuccaccuguccauccccaacuucaaccaguacgaggccaugagcugcgacuucaacgggggcaagaucuccgugcaguacaaccucagccacaccuacgcgaucgacgccgccaaccacugcgggaccaucgccaacggcgugcugcagaccuucaugcggauggcguggggcggguccuacaucgcccuggacagcggcaagggguccugggacugcaucaugacgagcuaccaguaccucaucauccagaacaccaccugggaggaccacugccaguucucccgccccagccccaucggcuaccuggggcugcucagccagcggacccgcgacaucuacaucucccggcgccugcugggcacguucaccuggacccucagcgacuccgagggcaacgagacccccgggggcuacugccugacgcgguggaugcugaucgaggccgagcucaagugcuucgggaacaccgccgucgccaagugcaacgagaagcacgacgaggaguucugcgacaugcugcgccuguucgacuucugcaagcaggcgauccggcgccucaagaccccggcccagaugagcauccagcugaucaacaaggccgugaacgcccugaucaacgaccagcucaucaugaagaaccaccuccgggacaucaugggcauccccuacugcaacuacuccaaguacugguaccugaaccacaccgugacggggaagaccagccugccccgcugcuggcuggucuccaacggcagcuaccugaacgagacccacuucuccgacgacaucgagcagcaggccgacaacaugaucaccgagcuccugcagaaggaguacauggaccggcagggcaagacgccgcuggggcugguggaccucuucguguucagcaccuccuucuaccugaucagcaucuuccugcaccucguccgcauccccacccaccggcacgugaucggcaagcccugccccaagccgcaccgccugaaccacauggggaucugcuccugcggccuguacaagcaccccggggugcccgucaaguggaagcggugaggacuagucccuguucccagagcccacuuuuuuuucuuuuuuugaaauaaaauagccugucuuucagaucucaaaggcucuuuucagagccaccaaaaaaaaaaaaaaaaaaaaaaaaaaaaaaaaaaaaaaaaaaaaaaaaaaaaaaaaaaaaaaaaaaaaaaaaaaaaaaaaaaaaaaaaaaaaaaaaaaaaa

SEQ ID NO: 30066 - RNA, 1745 nt, Artificial Sequence
  mRNA product Design a-1 (hSL-A100) comprising derived and/or modified sequence from LASV(Lassa virus/H.sapiens-wt/NGA/2018/ISTH_0959;Clade II)__AVV65099__GPCmut6 (opt1)
aggagagucccgcagucggcguccagcggcucugcuuguucgugugugugucguugcaggccuuauucaagcuuaccaugggccagaucaucaccuucuuccaggaggugccccacgucaucgaggaggugaugaacaucgugcugaucgcccucagccugcuggccauccucaaggggaucuacaacgucgugaccugcggccuguucgggcugguguccuuccuccugcugugcggccgcagcugcuccacgaccuacaagggggucuacgagcuccagacccuggagcuggacauggcgagccucaacaugugcaugccgcuguccugcaccaagaacaacagccaccacuacaucauggugggcaacgagacgggccuggagcucacccugaccaacaccuccaucaucaaccacaaguucugcaaccugagcgacgcccacaagaagaaccucuacgaccacgcccugauguccaucaucagcacguuccaccuguccauccccaacuucaaccaguacgaggccaugagcugcgacuucaacgggggcaagaucuccgugcaguacaaccucagccacgccuacgcgaucgacgccgccaaccacugcgggaccaucgccaacggcguccugcagaccuucaugcggauggcguggggcggguccuacaucgcccuggacagcggcaagggguccugggacugcaucaugaccagcuaccaguaccucaucauccagaacacgaccugggaggaccacugccaguucucccgccccagccccaucggcuaccuggggcugcucagccagcggacccgcgacaucuacaucucccggcgccugcugggcaccuucacguggacccucagcgacuccgagggcaacgagacccccgggggcuacugccugacccgguggaugcugaucgaggccgagcucaagugcuucgggaacacggccguggccaagugcaacgagaagcacgacgaggaguucugcgacaugcugcgccuguucgacuucugcaagcaggcgauccggcgccucaagaccccggcccagaugagcauccagcugaucaacaaggccgugaacgcccugaucaacgaccagcucaucaugaagaaccaccuccgggacaucaugggcauccccuacugcaacuacuccaaguacugguaccugaaccacaccgucaccgggaagacgagccugccccgcugcuggcugguguccaacggcagcuaccugaacgagacccacuucuccgacgacaucgagcagcaggccgacaacaugaucaccgagcuccugcagaaggaguacaucgaccggcagggcaagaccccgcuggggcugguggaccucuucgucuucagcacguccuucuaccugaucagcaucuuccugcaccucgugaagauccccacccaccgccacgugaucggcaagcccugccccaagccgcaccggcugaaccacauggggaucugcuccugcggccuguacaagcaccccgggguccccgugaaguggaagcgcugaggacuagucccuguucccagagcccacuuuuuuuucuuuuuuugaaauaaaauagccugucuuucagaucucaaaggcucuuuucagagccaccaaaaaaaaaaaaaaaaaaaaaaaaaaaaaaaaaaaaaaaaaaaaaaaaaaaaaaaaaaaaaaaaaaaaaaaaaaaaaaaaaaaaaaaaaaaaaaaaaaaaa

SEQ ID NO: 30067 - RNA, 1745 nt, Artificial Sequence
  mRNA product Design a-1 (hSL-A100) comprising derived and/or modified sequence from LASV(LASV003-NIG-2008;Clade II)__AIT17580__GPCmut6 (opt1)
aggagagucccgcagucggcguccagcggcucugcuuguucgugugugugucguugcaggccuuauucaagcuuaccaugggccagaucaucaccuucuuccaggaggugccccacgucaucgaggaggugaugaacaucgugcugaucgcccucagccugcuggccauccucaaggggaucuacaacgucgcgaccugcggccuguucgggcugguguccuuccuccugcugugcggccgcagcugcuccacgaccuacaaggggguguacgagcuccagacccuggagcuggacauggccagccucaacaugugcaugccgcuguccugcaccaagaacaacagccaccacuacaucauggucggcaacgagacgggccuggagcucacccugaccaacaccuccaucaucaaccacaaguucugcaaccugagcgacgcccacaagaagaaccucuacgaccacgcccugauguccaucaucagcacguuccaccuguccauccccaacuucaaccaguacgaggccaugagcugcgacuucaacgggggcaagaucuccgugcaguacaaccucagccacaccuacgcgguggacgccgccaaccacugcgggaccaucgccaacggcguccugcagaccuucaugcggauggcguggggcggguccuacaucgcccuggacagcggcaagggguccugggacugcaucaugacgagcuaccaguaccucaucauccagaacaccaccugggaggaccacugccaguucucccgccccagccccaucggcuaccuggggcugcucagccagcggacccgcgacaucuacaucucccggcgccugcugggcacguucaccuggacccucagcgacuccgagagcaacgagaccccgggcggguacugccugacgcgguggaugcugaucgaggccgagcucaagugcuucggcaacaccgccguggccaagugcaacgagaagcacgacgaggaguucugcgacaugcugcgccuguucgacuucugcaagcaggcgauccggcgccucaaggcccccgcccagauguccauccagcugaucaacaaggccgugaacgcccugaucaacgaccagcucaucaugaagaaccaccuccgggacaucauggggauccccuacugcaacuacagcaaguacugguaccugaaccacaccgucaccggccgcacgucccugccccggugcuggcuggugagcaacggguccuaccugaacgagacccacuucagcgacgacaucgagcagcaggcggacaacaugaucaccgagcuccugcagaaggaguacauggaccgccagggcaagaccccgcugggccugguggaccucuucgucuucuccacgagcuucuaccugaucuccaucuuccugcaccucgugaagauccccacccaccggcacgugaucgggaagcccugccccaagccgcaccgccugaaccacaugggcaucugcagcugcgggcuguacaagcaccccggcguccccgugaaguggaagcggugaggacuagucccuguucccagagcccacuuuuuuuucuuuuuuugaaauaaaauagccugucuuucagaucucaaaggcucuuuucagagccaccaaaaaaaaaaaaaaaaaaaaaaaaaaaaaaaaaaaaaaaaaaaaaaaaaaaaaaaaaaaaaaaaaaaaaaaaaaaaaaaaaaaaaaaaaaaaaaaaaaaaa

SEQ ID NO: 30068 - RNA, 1745 nt, Artificial Sequence
  mRNA product Design a-1 (hSL-A100) comprising derived and/or modified sequence from LASV(LASV035-NIG-2009;Clade II)__AIT17588__GPCmut6 (opt1)
aggagagucccgcagucggcguccagcggcucugcuuguucgugugugugucguugcaggccuuauucaagcuuaccaugggccagaucaucaccuucuuccaggaggugccccacgucaucgaggaggugaugaacaucgugcugaucgcccucagccugcuggccauccucaaggggaucuacaacgucgcgaccugcggccuguucgggcugguguccuuccuccugcugugcggccgcagcugcuccacgaccuacaaggggguguacgagcuccagacccuggagcuggacauggccagccucaacaugugcaugccgcuguccugcaccaagaacaacagccaccacuacaucauggucggcaacgagacgggccuggagcucacccugaccaacaccuccaucaucaaccacaaguucugcaaccugagcgacgcccacaagaagaaccucuacgaccacgcccugauguccaucaucagcacguuccaccuguccauccccaacuucaaccaguacgaggccaugagcugcgacuucaacgggggcaagaucuccgugcaguacaaccucagccacgcguacgccguggacgccgccaaccacugcgggaccaucgcgaacggcguccugcagaccuucaugcggauggccuggggcggguccuacaucgcccuggacagcggcaagggguccugggacugcaucaugaccagcuaccaguaccucaucauccagaacacgaccugggaggaccacugccaguucucccgccccagccccaucggcuaccuggggcugcucagccagcggacccgcgacaucuacaucucccggcgccugcugggcaccuucacguggacccucagcgacuccgagggcaacgagacccccgggggcuacugccugacccgguggaugcugaucgaggccgagcucaagugcuucgggaacacggccguggcgaagugcaacgagaagcacgacgaggaguucugcgacaugcugcgccuguucgacuucugcaagcaggccauccggcgccucaaggccccggcccagaugagcauccagcugaucaacaaggccgugaacgcgcugaucaacgaccagcucaucaugaagaaccaccuccgggacaucaugggcauccccuacugcaacuacuccaaguacugguaccugaaccacaccgucaccgggaagaccagccugccccgcugcuggcugguguccaacggcagcuaccugaacgagacgcacuucuccgacgacaucgagcagcaggccgacaacaugaucaccgagcuccugcagaaggaguacaucgaccggcagggcaagaccccgcuggggcugguggaccucuucgucuucagcaccuccuucuaccugaucagcaucuuccugcaccucgugaagauccccacgcaccgccacgugaucggcaagcccugccccaagccgcaccggcugaaccacauggggaucugcuccugcggccuguacaagcaccccgggguccccgugaaguggaagcgcugaggacuagucccuguucccagagcccacuuuuuuuucuuuuuuugaaauaaaauagccugucuuucagaucucaaaggcucuuuucagagccaccaaaaaaaaaaaaaaaaaaaaaaaaaaaaaaaaaaaaaaaaaaaaaaaaaaaaaaaaaaaaaaaaaaaaaaaaaaaaaaaaaaaaaaaaaaaaaaaaaaaaa

SEQ ID NO: 30069 - RNA, 1745 nt, Artificial Sequence
  mRNA product Design a-1 (hSL-A100) comprising derived and/or modified sequence from LASV(LASV1000-NIG-2009;Clade II)__AIT17782__GPCmut6 (opt1)
aggagagucccgcagucggcguccagcggcucugcuuguucgugugugugucguugcaggccuuauucaagcuuaccaugggccagaucaucaccuucuuccaggaggugccccacgucaucgaggaggugaugaacaucgugcugaucgcccucagccugcuggccauccucaaggggaucuacaacgucgcgaccugcggccuguucgggcugguguccuuccuccugcugugcggccgcagcugcuccacgaccuacaaggggguguacgagcuccagacccuggagcuggacauggccagccucaacaugugcaugccgcuguccugcaccaagaacaacagccaccacuacaucauggucggcaacgagacgggccuggagcucacccugaccaacaccuccaucaucaaccacaaguucugcaaccugagcgacgcccacaagaagaaccucuacgaccacgcccugauguccaucaucagcacguuccaccuguccauccccaacuucaaccaguacgaggccaugagcugcgacuucaacgggggcaagaucuccgugcaguacaaccucagccacaccuacgcgguggacgccgccaaccacugcgggaccaucgccaacggcguccugcagaccuucaugcggauggcguggggcggguccuacaucgcccuggacagcggcaagggguccugggacugcaucaugacgagcuaccaguaccucaucauccagaacaccaccugggaggaccacugccaguucucccgccccagccccaucggcuaccuggggcugcucagccagcggacccgcgacaucuacaucucccggcgccugcugggcacguucaccuggacccucagcgacuccgagggcaacgagacccccgggggcuacugccugacgcgguggaugcugaucgaggccgagcucaagugcuucgggaacaccgccguggccaagugcaacgagaagcacgacgaggaguucugcgacaugcugcgccuguucgacuucugcaagcaggcgaucaagcggcucaagaccccggcccagaugagcauccagcugaucaacaaggccgugaacgcccugaucaacgaccagcucaucaugaagaaccaccuccgcgacaucaugggcauccccuacugcaacuacuccaaguacugguaccugaaccacaccgucacggggaagaccagccugccccggugcuggcugguguccaacggcagcuaccugaacgagacccacuucuccgacgacaucgagcagcaggccgacaacaugaucaccgagcuccugcagaaggaguacaucgaccgccagggcaagacgccgcuggggcugguggaccucuucgucuucagcaccuccuucuaccugaucagcaucuuccugcaccucgugaagauccccacccaccggcacguggucggcaagcccugccccaagccgcaccgccugaaccacauggggaucugcuccugcggccuguacaagcaccccggggugcccgugaaguggaagcggugaggacuagucccuguucccagagcccacuuuuuuuucuuuuuuugaaauaaaauagccugucuuucagaucucaaaggcucuuuucagagccaccaaaaaaaaaaaaaaaaaaaaaaaaaaaaaaaaaaaaaaaaaaaaaaaaaaaaaaaaaaaaaaaaaaaaaaaaaaaaaaaaaaaaaaaaaaaaaaaaaaaaa

SEQ ID NO: 30070 - RNA, 1745 nt, Artificial Sequence
  mRNA product Design a-1 (hSL-A100) comprising derived and/or modified sequence from LASV(LASV221-NIG-2010;Clade II)__AIT17624__GPCmut6 (opt1)
aggagagucccgcagucggcguccagcggcucugcuuguucgugugugugucguugcaggccuuauucaagcuuaccaugggccagaucaucaccuucuuccaggaggugccccacgucaucgaggaggugaugaacaucgugcugaucgcccucagccugcuggccauccucaaggggaucuacaacgucgcgaccugcggccuguucgggcugguguccuuccuccugcugugcggccgcagcugcuccacgaccuacaaggggguguacgagcuccagacccuggagcuggacauggccagccucaacaugugcaugccgcuguccugcaccaagaacaacagccaccacuacaucauggucggcaacgagacgggccuggagcucacccugaccaacaccuccaucaucaaccacaaguucugcaaccugagcgacgcccacaagaagaaccucuacgaccacgcccugauguccaucaucagcacguuccaccuguccauccccaacuucaaccaguacgaggccaugagcugcgacuucaacgggggcaagaucuccgugcaguacaaccucagccacaccuacgcgaucgacgccgccaaccacugcgggaccaucgccaacggcgugcugcagaccuucaugcggauggcguggggcggguccuacaucgcccuggacagcggcaagggguccugggacugcaucaugacgagcuaccaguaccucaucauccagaacaccaccugggaggaccacugccaguucucccgccccagccccaucggcuaccuggggcugcucagccagcggacccgcgacaucuacaucucccggcgccugcugggcacguucaccuggacccucagcgacuccgagggcaacgagacccccgggggcuacugccugacgcgguggaugcugaucgaggccgagcucaagugcuucgggaacaccgccgucgccaagugcaacgagaagcacgacgaggaguucugcgacaugcugcgccuguucgacuucugcaagcaggcgauccggcgccucaagaccccggcccagaugagcauccagcugaucaacaaggccgugaacgcccugaucaacgaccagcucaucaugaagaaccaccuccgggacaucaugggcauccccuacugcaacuacuccaaguacugguaccugaaccacaccgugacggggaagaccagccugccccgcugcuggcuggucuccaacggcagcuaccugaacgagacccacuucuccgacgacaucgagcagcaggccgacaacaugaucaccgagaugcuccagaaggaguacauggaccggcagggcaagacgccgcuggggcugguggaccuguucguguucagcaccuccuucuaccucaucagcaucuuccugcaccuggucaagauccccacccaccgccacgugaucggcaagcccugccccaagccgcaccggcucaaccacauggggaucugcuccugcggccuguacaagcaccccggggugcccgucaaguggaagcgcugaggacuagucccuguucccagagcccacuuuuuuuucuuuuuuugaaauaaaauagccugucuuucagaucucaaaggcucuuuucagagccaccaaaaaaaaaaaaaaaaaaaaaaaaaaaaaaaaaaaaaaaaaaaaaaaaaaaaaaaaaaaaaaaaaaaaaaaaaaaaaaaaaaaaaaaaaaaaaaaaaaaaa

SEQ ID NO: 30071 - RNA, 1745 nt, Artificial Sequence
  mRNA product Design a-1 (hSL-A100) comprising derived and/or modified sequence from LASV(LASV237-NIG-2010;Clade II)__AIT17638__GPCmut6 (opt1)
aggagagucccgcagucggcguccagcggcucugcuuguucgugugugugucguugcaggccuuauucaagcuuaccaugggccagaucaucaccuucuuccaggaggugccccacgucaucgaggaggugaugaacaucgugcugaucgcccucagccugcuggccauccucaaggggaucuacaacgucgcgaccugcggccuguucgggcugguguccuuccuccugcugugcggccgcagcugcuccacgaccuacaaggggguguacgagcuccagacccuggagcuggacauggccagccucaacaugugcaugccgcuguccugcaccaagaacaacagccaccacuacaucauggucggcaacgagacgggccuggagcucacccugaccaacaccuccaucaucaaccacaaguucugcaaccugagcgacgcccacaagaaggaccucuacgaccacgcccugauguccaucaucagcacguuccaccuguccauccccaacuucaaccaguacgaggccaugagcugcgacuucaacgggggcaagaucuccgugcaguacaaccucagccacaccuacgcgguggacgccgccaaccacugcgggaccaucgccaacggcguccugcagaccuucaugcggauggcguggggcggguccuacaucgcccuggacagcggcaagggguccugggacugcaucaugacgagcuaccaguaccucaucauccagaacaccaccugggaggaccacugccaguucucccgccccagccccaucggcuaccuggggcugcucagccagcggacccgcgacaucuacaucucccggcgccugcugggcacguucaccuggacccucagcgacuccgagggcaacgagacccccgggggcuacugccugacgcgguggaugcugaucgaggccgagcucaagugcuucgggaacaccgccguggccaagugcaacgagaagcacgacgaggaguucugcgacaugcugcgccuguucgacuucugcaagcaggcgauccggcgccucaagaccccggcccagaugagcauccagcugaucaacaaggccgugaacgcccugaucaacgaccagcucaucaugaagaaccaccuccgggacaucaugggcauccccuacugcaacuacuccaaguacugguaccugaaccacaccgucacggggaagaccagccugccccgcugcuggcugguguccaacggcagcuaccugaacgagacccacuucuccgacgacaucgagcagcaggccgacaacaugaucaccgagcuccugcagaaggaguacauggaccggcagggcaagacgccgcuggggcugguggaccucuucgucuucagcaccuccuucuaccugaucagcaucuuccugcaccucaucaagauccccacccaccgccacaucaccggcaagcccugccccaagccgcaccggcugaaccacauggggaucugcuccugcggccuguacaagcaccccggggugcccgugaaguggaagcgcugaggacuagucccuguucccagagcccacuuuuuuuucuuuuuuugaaauaaaauagccugucuuucagaucucaaaggcucuuuucagagccaccaaaaaaaaaaaaaaaaaaaaaaaaaaaaaaaaaaaaaaaaaaaaaaaaaaaaaaaaaaaaaaaaaaaaaaaaaaaaaaaaaaaaaaaaaaaaaaaaaaaaa

SEQ ID NO: 30072 - RNA, 1745 nt, Artificial Sequence
  mRNA product Design a-1 (hSL-A100) comprising derived and/or modified sequence from LASV(LASV253-NIG-2011;Clade II)__AIT17670__GPCmut6 (opt1)
aggagagucccgcagucggcguccagcggcucugcuuguucgugugugugucguugcaggccuuauucaagcuuaccaugggccagaucaucaccuucuuccaggaggugccccacgucaucgaggaggugaugaacaucgugcugaucgcccucagccugcuggccauccucaaggggaucuacaacgucgcgaccugcggccuguucgggcugguguccuuccuccugcugugcggccgcagcugcuccacgaccuacaaggggguguacgagcuccagacccuggagcuggacauggccagccucaacaugugcaugccgcuguccugcaccaagaacaacagccaccacuacaucauggucggcaacgagacgggccuggagcucacccugaccaacaccuccaucaucaaccacaaguucugcaaccugagcgacgcccacaagaagaaccucuacgaccacgcccugauguccaucaucagcacguuccaccuguccauccccaacuucaaccaguacgaggccaugagcugcgacuucaacgggggcaagaucuccgugcaguacaaccucagccacaccuacgcgguggacgccgccaaccacugcgggaccaucgccaacggcguccugcagaccuucaugcggauggcguggggcggguccuacaucgcccuggacagcggcaagggguccugggacugcaucaugacgagcuaccaguaccucaucauccagaacaccaccugggaggaccacugccaguucucccgccccagccccaucggcuaccuggggcugcucagccagcggacccgcgacaucuacaucucccggcgccugcugggcacguucaccuggacccucagcgacuccgagggcaacgagacccccgggggcuacugccugacgcgguggaugcugaucgaggccgagcucaagugcuucgggaacaccgccguggccaagugcaacgagaagcacgacgaggaguucugcgacaugcugcgccuguucgacuucugcaagcaggcgauccggcgccucaaggccccggcccagaugagcauccagcugaucaacaaggccgugaacgcccugaucaacgaccagcucaucaugaagaaccaccuccgggacaucaugggcauccccuacugcaacuacuccaaguacugguaccugaaccacaccgucaccgggcgcacgagccugccccggugcuggcugguguccaacggcagcuaccugaacgagacccacuucuccgacgacaucgagcagcaggcggacaacaugaucaccgagcuccugcagaaggaguacaucgaccgccagggcaagaccccgcuggggcugguggaccucuucgucuucagcacguccuucuaccugaucagcaucuuccugcaccucgugaagauccccacccaccggcacaucaucggcaagcccugccccaagccgcaccgccugaaccacauggggaucugcuccugcggccuguacaagcaccccggggugcccgucaaguggaagcggugaggacuagucccuguucccagagcccacuuuuuuuucuuuuuuugaaauaaaauagccugucuuucagaucucaaaggcucuuuucagagccaccaaaaaaaaaaaaaaaaaaaaaaaaaaaaaaaaaaaaaaaaaaaaaaaaaaaaaaaaaaaaaaaaaaaaaaaaaaaaaaaaaaaaaaaaaaaaaaaaaaaaa

SEQ ID NO: 30073 - RNA, 1745 nt, Artificial Sequence
  mRNA product Design a-1 (hSL-A100) comprising derived and/or modified sequence from LASV(LASV254-NIG-2011;Clade II)__AIT17674__GPCmut6 (opt1)
aggagagucccgcagucggcguccagcggcucugcuuguucgugugugugucguugcaggccuuauucaagcuuaccaugggccagaucaucaccuucuuccaggaggugccccacgucaucgaggaggugaugaacaucgugcugaucgcccucagccugcuggccauccucaaggggaucuacaacgucgcgaccugcggccuguucgggcugguguccuuccuccugcugugcggccgcagcugcuccacgaccuacaaggggguguacgagcuccagacccuggagcuggacaugaccaaccucaacaugugcaugccgcugagcugcacgaagaacaacucccaccacuacaucauggucggcaacgagaccggccuggagcucacccugaccaacacgagcaucaucaaccacaaguucugcaaccuguccgacgcccacaagaagaaccucuacaaccacgcccugaugagcaucaucuccaccuuccaccugagcauccccaacuucaaccaguacgaggccauguccugcgacuucaacgggggcaagaucagcgugcaguacaaccucucccacagcuacgccguggacgcggccaaccacugcgggaccaucgccaacggcguccugcagaccuucaugcggauggccuggggcggguccuacaucgcgcuggacagcggcaaggggaacugggacugcaucaugacguccuaccaguaccucaucauccagaacaccaccugggaggaccacugccaguucagccgccccucccccaucggcuaccuggggcugcucagccagcggacccgcgacaucuacaucagccggcgccugcugggcacguucaccuggacccucuccgacagcgagggcaacgagacccccgggggcuacugccugacgcgguggaugcugaucgaggccgagcucaagugcuucgggaacaccgccguggccaagugcaacgagaagcacgacgaggaguucugcgacaugcugcgccuguucgacuucugcaagcaggccauccggcgccucaagaccccggcgcaggccaacauccagcugaucaacaaggccgugaacgcccugaucaacgaccagcucaucaugaagaaccaccuccgggacaucaugggcauccccuacugcaacuacuccaaguacugguaccugaaccacaccgucacggggaagaccagccugccccgcugcuggcugguguccaacggcagcuaccugaacgagacccacuucuccgacgacaucgagcagcaggccgacaacaugaucaccgagcuccugcagaaggaguacauggaccggcagggcaagacgccgcuggggcugguggaccucuucgucuucagcaccuccuucuaccugaucagcaucuuccugcaccucgugaagauccccacccaccgccacgugaucggcaagcccugccccaagccgcaccggcugaaccacauggggaucugcuccugcggccuguacaagcaccccgggguccccgugaaguggaagcgcugaggacuagucccuguucccagagcccacuuuuuuuucuuuuuuugaaauaaaauagccugucuuucagaucucaaaggcucuuuucagagccaccaaaaaaaaaaaaaaaaaaaaaaaaaaaaaaaaaaaaaaaaaaaaaaaaaaaaaaaaaaaaaaaaaaaaaaaaaaaaaaaaaaaaaaaaaaaaaaaaaaaaa

SEQ ID NO: 30074 - RNA, 1745 nt, Artificial Sequence
  mRNA product Design a-1 (hSL-A100) comprising derived and/or modified sequence from LASV(Nig08-A19;Clade III)__ADU56618__GPCmut6 (opt1)
aggagagucccgcagucggcguccagcggcucugcuuguucgugugugugucguugcaggccuuauucaagcuuaccaugggccagaucgugaccuucuuccaggaggucccccacgugaucgaggaggugaugaacaucguccugaucgcccucagcauccuggccauccugaaggggcucuacaacaucgcgaccugcggccugaucgggcuggugacguuccuccugcuguccggccgcagcugcuccaugaccuacaaggggguguacgagcuccagacccuggagcugaacaugaacacccucaacaugugcaugccgcugagcugcacgaagaacaacucccaccacuacaucauggucggcaacgagaccggccuggagcucacccugaccaacacgagccugcuccaccacaaguucugcaaccuguccgacgcccacaagaagaaccuguacgaccacacccucaugagcaucaucuccaccuuccaccugagcauccccaacuucaaccaguacgaggccauguccugcgacuucaacgggggcaagaucaccgugcaguacaaccugagccacuccuacgccaucgacgccgcgaaccacugcgggacgguggccaacggcguccuccagaccuucaugcggauggccuggggcgggagcuacaucgcccuggacuccggccgcgggaagugggacugcaucaugaccagcuaccaguaccugaucauccagaacaccacgugggaggaccacugccaguucucccggcccagccccaucggcuaccucgggcugcugucccagcgcacccgggacaucuacaucagccgccggcuccugggcaccuucaccuggacgcugagcgacuccgagggcaacgagacccccgggggcuacugccucacccgcuggaugcugaucgaggcggagcugaagugcuucgggaacaccgccguggccaagugcaacgagaagcacgacgaggaguucugcgacaugcuccggcuguucgacuucugcaagcaggccauccgccggcugaaggccccggcgcagaugagcauccagcucaucaacaaggccgugaacgcccugaucaacgaccagcugaucaugaagaaccaccuccgcgacaucaugggcauccccuacugcaacuacuccaaguacugguaccugaaccacacgagcaccgggcggaccucccugccccgcugcuggcucgucagcaacggcuccuaccugaacgagacccacuucagcgacgacaucgagcagcaggccgacaacaugaucacggagaugcugcagaaggaguaccuggaccggcagggcaagaccccgcucgggcugguggaccuguucguguucuccaccagcuucuaccucaucuccaucuuccugcaccuggucaagauccccacccaccgccacaucgugggcaagcccugccccaagccgcaccggcucaaccacauggggaucugcagcugcggccuguacaagcagcccggggugcccguccgcuggaagcggugaggacuagucccuguucccagagcccacuuuuuuuucuuuuuuugaaauaaaauagccugucuuucagaucucaaaggcucuuuucagagccaccaaaaaaaaaaaaaaaaaaaaaaaaaaaaaaaaaaaaaaaaaaaaaaaaaaaaaaaaaaaaaaaaaaaaaaaaaaaaaaaaaaaaaaaaaaaaaaaaaaaaa

SEQ ID NO: 30075 - RNA, 1748 nt, Artificial Sequence
  mRNA product Design a-1 (hSL-A100) comprising derived and/or modified sequence from LASV(G1180-SLE-2010;Clade IV)__AIT17168__GPCmut6 (opt1)
aggagagucccgcagucggcguccagcggcucugcuuguucgugugugugucguugcaggccuuauucaagcuuaccaugggccagaucgugaccuucuuccaggaggucccccacgugaucgaggaggugaugaacaucguccugaucgcccucagcauccuggccgugcugaaggggcucuacaacuucgcgaccugcggccugguggggcugcucacguuccugcugcucugcggccgcuccugcaccgccagccgguacaagggggucuacgagcugcagacccuggagcucaacauggagacccugaacaugugcaugccgcuguccugcacgaagaacaacagccaccacuacaucauggugggcaacgagaccggccucgagcugacccugaccaacacguccaucaucaaccacaaguucugcaaccucagcgacgcccacaagaagaaccuguacgaccacgcccugauguccaucaucagcaccuuccaccucuccauccccaacuucaaccaguacgaggccaugagcugcgacuucaacgggggcaagaucuccgugcaguacaaccugagccacuccuacgcgggggacgccgccaaccacugcggcaccgucgccaacggggugcugcagaccuucaugcgcauggcguggggcggcagcuacaucgcccucgacuccgggcacggcagcugggacugcaucaugacguccuaccaguaccugaucauccagaacaccaccugggaggaccacugccaguucagccggcccucccccaucggguaccugggccuccugagccagcgcacccgggacaucuacaucagccgccggcugcucggcacguucaccuggacccuguccgacagcgaggggaaggacaccccgggcggguacugccugacgcgcuggaugcucaucgaggccgagcugaagugcuucggcaacaccgccguggccaagugcaacgagaagcacgacgaggaguucugcgacaugcugcggcuguucgacuucugcaagcaggcgauccagcgccugaaggcccccgcccagauguccauccagcugaucaacaaggccgucaacgcccucaucaacgaccagcugaucaugaagaaccaccuccgggacaucauggggauccccuacugcaacuacagcaaguacugguaccucaaccacaccaccacgggcaagaccucccugcccaagugcuggcuggugagcaacggcuccuaccucaacgagacccacuucagcgacgacaucgagcagcaggcggacaacaugaucaccgagaugcugcagaaggaguacauggagcgccaggggaagacgccgcugggccugguggaccucuucgucuucuccaccagcuucuaccugaucuccaucuuccugcaccucgugaagauccccacccaccggcacaucgugggcaagagcugccccaagccccaccgccugaaccacauggggaucugcuccugcgggcuguacaagcagccgggcguccccgugaaguggaagcggugaggacuagucccuguucccagagcccacuuuuuuuucuuuuuuugaaauaaaauagccugucuuucagaucucaaaggcucuuuucagagccaccaaaaaaaaaaaaaaaaaaaaaaaaaaaaaaaaaaaaaaaaaaaaaaaaaaaaaaaaaaaaaaaaaaaaaaaaaaaaaaaaaaaaaaaaaaaaaaaaaaaaa

SEQ ID NO: 30076 - RNA, 1748 nt, Artificial Sequence
  mRNA product Design a-1 (hSL-A100) comprising derived and/or modified sequence from LASV(G1442-SLE-2011;Clade IV)__AIT17180__GPCmut6 (opt1)
aggagagucccgcagucggcguccagcggcucugcuuguucgugugugugucguugcaggccuuauucaagcuuaccaugggccagaucgugaccuucuuccaggaggucccccacgugaucgaggaggugaugaacaucguccugaucgcccucagcauccuggccgugcugaaggggcucuacaacguggcgaccugcggccugaucgggcuggucacguuccuccugcugugcggccgcuccugcaccaccacccucuacaaggggguguacgagcugcagacgcuggagcucaacauggagacccugaacaugugcaugccgcugagcugcaccaagaacaacucccaccacuacauccgggugggcaacgagaccggccucgagcugacgcugaccaacaccagcaucaucaaccacaaguucugcaaccucuccgacgcccacaagaagaaccuguacgaccacgcccugaugagcaucaucuccaccuuccaccucagcauccccaacuucaaccaguacgaggccauguccugcgacuucaacgggggcaagaucagcguccaguacaaccugucccacagcuacgccggggacgcggccaaccacugcggcacgguggccaacggggugcugcagaccuucaugcgcauggccuggggcggcuccuacaucgcgcucgacagcgggcggggcaacugggacugcaucaugaccuccuaccaguaccugaucauccagaacaccacgugggacgaccacugccaguucagccgccccucccccaucggguaccugggccuccugagccagcggacccgcgacgucuacaucucccggcgccugcucggcaccuucaccuggacgcugagcgacagcgaggggaaggacaccccgggcggguacugccugacccgguggaugcucaucgaggccgagcugaagugcuucggcaacaccgccguggccaagugcaacgagaagcacgacgaggaguucugcgacaugcugcgccucuucgacuucugcaagcaggccauccagcggcugaaggcgcccgcccagauguccauccagcugaucaacaaggccgugaacgcccucaucaacgaccagcugaucaugaagaaccaccuccgcgacaucauggggauccccuacugcaacuacagcaaguacugguaccugaacaacacggccaccggcaagaccucccugcccaagugcuggcugaucagcaacggcuccuaccucaacgagacccacuucagcgacgacaucgagcaggaggcggacaacaugaucacggagaugcugcagaaggaguacauggagcggcaggggaagaccccgcugggccuggucgaccucuucguguucuccaccagcuucuaccugaucuccaucuuccugcaccucgugaagauccccacccaccgccacaucgucggcaagagcugccccaagccccaccggcugaaccacauggggaucugcuccugcgggcuguacaagcagccgggcgugcccgugcgcuggaagcggugaggacuagucccuguucccagagcccacuuuuuuuucuuuuuuugaaauaaaauagccugucuuucagaucucaaaggcucuuuucagagccaccaaaaaaaaaaaaaaaaaaaaaaaaaaaaaaaaaaaaaaaaaaaaaaaaaaaaaaaaaaaaaaaaaaaaaaaaaaaaaaaaaaaaaaaaaaaaaaaaaaaaa

SEQ ID NO: 30077 - RNA, 1748 nt, Artificial Sequence
  mRNA product Design a-1 (hSL-A100) comprising derived and/or modified sequence from LASV(G3010-SLE-2013;Clade IV)__AIT17344__GPCmut6 (opt1)
aggagagucccgcagucggcguccagcggcucugcuuguucgugugugugucguugcaggccuuauucaagcuuaccaugggccagaucgugaccuucuuccaggaggucccccacgugaucgaggaggugaugaacaucguccugaucgcccucagcauccuggccgugcugaaggggcucuacaacuucgcgaccugcggccugguggggcuggucacguuccuccugcugugcggccgcuccugcaccaccagccucuacaaggggguguacgagcugcagacccuggagcucaacauggagacgcugaacaugugcaugccgcuguccugcaccaagaacaacagccaccacuacaucauggugggcaacgagaccggccucgagcugacccugacgaacaccuccaucaucaaccacaaguucugcaaccucagcgacgcccacaagaagaaccuguacaaccacgcccugauguccaucaucagcaccuuccaccucuccauccccaacuucaaccaguacgaggccaugagcugcgacuucaacgggggcaagaucuccguccaguacaaccugagccacuccuacgccggggacgcggccagccacugcggcaccguggccaacggggugcugcagacguucaugcggauggccuggggcggcuccuacaucgcgcucgacagcggguacggcaagugggacugcaucaugaccuccuaccaguaccugaucauccagaacaccaccugggaggaccacugccaguucagccgccccucccccaucggguaccugggccuccugagccagcggacgcgcgacaucuacaucagccggcgccugcucggcaccuucaccuggacccuguccgacagcgaggggaaggacacgccgggcggguacugccugacccgguggaugcucaucgaggccgagcugaagugcuucggcaacaccgccgucgccaagugcaacgagaagcacgacgaggaguucugcgacaugcugcgccucuucgacuucugcaagcaggccauccagcggcugaagacccccgcgcagauguccauccagcugaucaacaaggccgugaacgcccucaucaacgaccagcugaucaugaagaaccaccuccgcgacaucauggggauccccuacugcaacuacagcaaguacugguaccugaaccacacgaccaccggcaagaccucccugcccaagugcuggcuggugagcaacggcuccuaccucaacgagacgcacuucagcgacgacaucgagcagcaggccgacaacaugaucaccgagaugcugcagaaggaguacauggagcggcaggggaagaccccgcugggccuggucgaccucuucguguucuccaccagcuucuaccugaucuccaucuuccugcaccucgugaagauccccacgcaccgccacaucgucggcaagagcugccccaagccccaccggcugaaccacauggggaucugcuccugcgggcuguacaagcagccgggcgugcccgugcgcuggaagcggugaggacuagucccuguucccagagcccacuuuuuuuucuuuuuuugaaauaaaauagccugucuuucagaucucaaaggcucuuuucagagccaccaaaaaaaaaaaaaaaaaaaaaaaaaaaaaaaaaaaaaaaaaaaaaaaaaaaaaaaaaaaaaaaaaaaaaaaaaaaaaaaaaaaaaaaaaaaaaaaaaaaaa

SEQ ID NO: 30078 - RNA, 1748 nt, Artificial Sequence
  mRNA product Design a-1 (hSL-A100) comprising derived and/or modified sequence from LASV(G502-SLE-2009;Clade IV)__AIT17126__GPCmut6 (opt1)
aggagagucccgcagucggcguccagcggcucugcuuguucgugugugugucguugcaggccuuauucaagcuuaccaugggccagaucgugaccuucuuccaggaggucccccacgugaucgaggaggugaugaacaucguccugaucgcccucagcauccuggccgugcugaaggggcucuacaacuucgcgaccugcggccugguggggcugcucacguuccugcugcucugcggccgcuccugcaccaccgggcuguacaagggcgucuacgagcugcagacccucgagcugaacauggagacgcugaacaugugcaugccgcucagcugcaccaagaacaacucccaccacuacaucauggugggcaacgagaccgggcuggagcugacccucacgaacaccagcaucaucaaccacaaguucugcaaccuguccgacgcccacaagaagaaccuguacgaccacgcccucaugagcaucaucuccaccuuccaccugagcauccccaacuucaaccaguacgaggccauguccugcgacuucaacggcgggaagaucagcgugcaguacaaccugucccacagcuacgccggcgacgcggccgaccacugcgggaccgucgccaacggcgugcuccagacguucaugcggauggccuggggcggguccuacaucgcgcuggacagcggccgcgggcggugggacugcaucaugaccuccuaccaguaccugaucauccagaacaccaccugggaggaccacugccaguucagccgccccucccccaucggcuaccucggccugcugagccagcggacgcgcgacaucuacaucucccggcgccuccuggggaccuucaccuggacccugagcgacagcgagggcaaggacacgcccgggggcuacugccucacccgguggaugcugaucgaggccgagcugaagugcuucgggaacaccgccguggccaagugcaacgagaagcacgacgaggaguucugcgacaugcuccgccuguucgacuucugcaagcaggccauccagcggcugaaggcgccggcccagauguccauccagcucaucaacaaggccgucaacgcccugaucaacgaccagcuggugaugaagaaccaccuccgcgacaucaugggcauccccuacugcaacuacagccgguacugguaccugaaccacaccacgaccggccgcaccucccugcccaagugcuggcucgugagcaacggguccuaccugaacgagacccacuucagcgacgacaucgagcagcaggccgacaacaugaucacggagaugcugcagaaggaguacauggagcggcagggcaagaccccgcuggggcucgucgaccuguucguguucuccaccagcuucuaccugaucuccaucuuccuccaccuggugaagauccccacccaccgccacaucgucggcaagagcugccccaagccccaccggcugaaccacauggggaucugcuccugcggccucuacaagcagccgggcgugcccgugaaguggaagcgcugaggacuagucccuguucccagagcccacuuuuuuuucuuuuuuugaaauaaaauagccugucuuucagaucucaaaggcucuuuucagagccaccaaaaaaaaaaaaaaaaaaaaaaaaaaaaaaaaaaaaaaaaaaaaaaaaaaaaaaaaaaaaaaaaaaaaaaaaaaaaaaaaaaaaaaaaaaaaaaaaaaaaa

SEQ ID NO: 30079 - RNA, 1748 nt, Artificial Sequence
  mRNA product Design a-1 (hSL-A100) comprising derived and/or modified sequence from LASV(G733-SLE-2010;Clade IV)__AIT17154__GPCmut6 (opt1)
aggagagucccgcagucggcguccagcggcucugcuuguucgugugugugucguugcaggccuuauucaagcuuaccaugggccagaucgugaccuucuuccaggaggucccccacgugaucgaggaggugaugaacaucguccugaucgcccucagcauccuggccgugcugaaggggcucuacaacuucgcgaccugcggcaucguggggcuggucuccuuccugcuccugugcggccgcagcugcacgaccucccuguacaaggggguguacgagcuccagacccuggagcugaacauggagacccucaacaugugcaugccgcugagcugcacgaagaacaacucccaccacuacaucauggugggcaacgagaccggccuggagcucacccugaccaacacgagcaucaucaaccacaaguucugcaaccuguccgacgcccacaagaagaaccucuacgaccacgcccugaugagcaucaucuccaccuuccaccugagcauccccaacuucaaccaguacgaggccauguccugcgacuucaacgggggcaagaucagcguccaguacaaccucucccacagcuacgccggggacgcggccaaccacugcggcaccaucgccaacggggugcugcagaccuucaugcggauggccuggggcggcuccuacaucgcgcuggacagcgggcgcgaccggugggacugcaucaugacguccuaccaguaccucaucauccagaacaccaccugggaggaccacugccaguucagccgccccucccccaucggcuaccuggggcugcucagccagcggacccgcgacaucuacaucagccggcgccugcugggcacguucaccuggacccucuccgacagcgagggcaaggacacccccgggggcuacugccugacgcgguggaugcugaucgaggccgagcucaagugcuucgggaacaccgccguggccaagugcaacgagaagcacgacgaggaguucugcgacaugcugcgccuguucgacuucugcaagcaggccauccagcggcucaaggcgccggcccagauguccauccagcugaucaacaaggccgucaacgcccugaucaacgaccagcucaucaugaagaaccaccuccgcgacaucaugggcauccccuacugcaacuacagcaaguacugguaccugaaccacaccaccacggggaagaccucccugcccaagugcuggcuggugagcaacggcuccuaccugaacgagacccacuucagcgacgacaucgagcagcaggccgacaacaugaucaccgagaugcuccagaaggaguacauggagcggcagggcaagacgccgcuggggcugguggaccuguucgucuucuccaccagcuucuaccucaucuccaucuuccugcaccuggugaagauccccacccaccgccacguggucggcaagagcugccccaagccccaccggcucaaccacauggggaucugcuccugcggccuguacgggcagccgggcgugcccgugaaguggaagcgcugaggacuagucccuguucccagagcccacuuuuuuuucuuuuuuugaaauaaaauagccugucuuucagaucucaaaggcucuuuucagagccaccaaaaaaaaaaaaaaaaaaaaaaaaaaaaaaaaaaaaaaaaaaaaaaaaaaaaaaaaaaaaaaaaaaaaaaaaaaaaaaaaaaaaaaaaaaaaaaaaaaaaa

SEQ ID NO: 30080 - RNA, 1748 nt, Artificial Sequence
  mRNA product Design a-1 (hSL-A100) comprising derived and/or modified sequence from MOPV/LASV reassortant(IGS-1;Clade IV)__AFY05576__GPCmut6 (opt1)
aggagagucccgcagucggcguccagcggcucugcuuguucgugugugugucguugcaggccuuauucaagcuuaccaugggccagaucgugaccuucuuccaggaggucccccacgugaucgaggaggugaugaacaucguccugaucgcccucagcgugcuggccgugcugaaggggcucuacaacuucgcgaccugcggccuggucgggcuggugacguuccuccugcugugcggccgcuccugcaccaccagccucuacaaggggguguacgagcugcagacccuggagcucaacauggagacgcugaacaugugcaugccgcuguccugcaccaagaacaacagccaccacuacaucauggucggcaacgagaccggccucgagcugacccugacgaacaccuccaucaucaaccacaaguucugcaaccucagcgacgcccacaagaagaaccuguacgaccacgcccugauguccaucaucagcaccuuccaccucuccauccccaacuucaaccaguacgaggccaugagcugcgacuucaacgggggcaagaucuccgugcaguacaaccugagccacuccuacgccggggacgcggccaaccacugcggcaccguggccaacgggguccugcagacguucaugcggauggccuggggcggcagcuacaucgcgcucgacuccgggcgcggcaacugggacugcaucaugaccagcuaccaguaccugaucauccagaacaccaccugggaggaccacugccaguucucccggcccagccccaucggguaccugggccuccugucccagcgcacgcgggacaucuacaucagccgccggcugcucggcaccuucaccuggacccugagcgacuccgagggggaggacacgccgggcggguacugccugacccgcuggaugcucaucgaggccgagcugaagugcuucggcaacaccgccguggccaagugcaacgagaagcacgacgaggaguucugcgacaugcugcggcuguucgacuucugcaagcaggccauccagcgccugaaggcgcccgcccagaugagcauccagcugaucaacaaggccgugaacgcccucaucaacgaccagcugaucaugaagaaccaccuccgggacaucauggggauccccuacugcaacuacuccaaguacugguaccucaaccacaccacgaccggccgcaccagccugcccaagugcuggcuggucuccaacggcagcuaccucaacgagacccacuucuccgacgacaucgagcagcaggccgacaacaugaucacggagaugcugcagaaggaguacauggagcggcaggggaagaccccgcugggccugguggaccucuucguguucagcaccuccuucuaccugaucagcaucuuccugcaccucgucaagauccccacccaccgccacaucguggggaaguccugccccaagccccaccggcugaaccacaugggcaucugcagcugcgggcuguacaagcagccgggcgugcccgucaaguggaagcgcugaggacuagucccuguucccagagcccacuuuuuuuucuuuuuuugaaauaaaauagccugucuuucagaucucaaaggcucuuuucagagccaccaaaaaaaaaaaaaaaaaaaaaaaaaaaaaaaaaaaaaaaaaaaaaaaaaaaaaaaaaaaaaaaaaaaaaaaaaaaaaaaaaaaaaaaaaaaaaaaaaaaaa

SEQ ID NO: 30081 - RNA, 1748 nt, Artificial Sequence
  mRNA product Design a-1 (hSL-A100) comprising derived and/or modified sequence from LASV(LM765-SLE-2012;Clade IV)__AIT17814__GPCmut6 (opt1)
aggagagucccgcagucggcguccagcggcucugcuuguucgugugugugucguugcaggccuuauucaagcuuaccaugggccagaucgugaccuucuuccaggaggucccccacgugaucgaggaggugaugaacaucguccugaucgcccucagcauccuggccgugcugaaggggcucuacaacuucgcgaccugcggccugguggggcuggucacguuccuccugcugugcggccgcuccugcaccaccagccucuacaaggggguguacgagcugcagacccuggagcucaacauggagacgcugaacaugugcaugccgcuguccugcaccaagaacaacagccaccacuacaucauggugggcaacgagaccggccucgagcugacccugacgaacaccuccaucaucgaccacaaguucugcaaccucagcgacgcccaccggaagaaccuguacgaccacgcccugauguccaucaucagcaccuuccaccucuccauccccaacuucaaccaguacgaggccaugagcugcgacuucaacgggggcaagaucuccguccaguacaaccugagccacuccuacgccaaggacgcggccgaccacugcgggaccguggccaacggcgugcugcagacguucaugcgcauggccuggggcgggagcuacaucgcgcucgacuccggccgggggcgcugggacugcaucaugaccagcuaccaguaccugaucauccagaacaccaccugggaggaccacugccaguucucccggcccagccccaucggcuaccuggggcuccugucccagcgcacgcgggacaucuacaucagccgccggcugcucggcaccuucaccuggacccugagcgacuccgagggcaaggacacgcccgggggcuacugccugacccgcuggaugcucaucgaggccgagcugaagugcuucgggaacaccgccgucgccaagugcaacgagaagcacgacgaggaguucugcgacaugcugcggcuguucgacuucugcaagcaggccauccagcgccugaaggcgccggcccagaugagcauccagcugaucaacaaggccgugaacgcccucaucaacgaccagcugaucaugaagaaccaccuccgggacaucaugggcauccccuacugcaacuacuccaaguacugguaccucaaccacaccacgaccgggaagaccagccugcccaagugcuggcugguguccaacggcagcuaccucaacgagacccacuucuccgacgacaucgagcagcaggccgacaacaugaucacggagaugcugcagaaggaguacauggagcgccagggcaagaccccgcuggggcuggucgaccucuucguguucagcaccuccuucuaccugaucagcaucuuccugcaccucgugaagauccccacccaccggcacaucgucggcaagcccugccccaagccgcaccgccugaaccacauggggaucugcuccugcggccuguacaagcagcccggggugcccgugaaguggaagcggugaggacuagucccuguucccagagcccacuuuuuuuucuuuuuuugaaauaaaauagccugucuuucagaucucaaaggcucuuuucagagccaccaaaaaaaaaaaaaaaaaaaaaaaaaaaaaaaaaaaaaaaaaaaaaaaaaaaaaaaaaaaaaaaaaaaaaaaaaaaaaaaaaaaaaaaaaaaaaaaaaaaaa

SEQ ID NO: 30082 - RNA, 1748 nt, Artificial Sequence
  mRNA product Design a-1 (hSL-A100) comprising derived and/or modified sequence from LASV(LM776-SLE-2012;Clade IV)__AIT17824__GPCmut6 (opt1)
aggagagucccgcagucggcguccagcggcucugcuuguucgugugugugucguugcaggccuuauucaagcuuaccaugggccagaucgugaccuucuuccaggaggucccccacgugaucgaggaggugaugaacaucguccugaucgcccucagcauccuggccgugcugaaggggcucuacaacuucgcgaccugcggccugguggggcuggucacguuccuccugcugugcggccgcuccugcaccaccagcguguacaaggggguguacgagcuccagacccuggagcugaacauggagacgcucaacaugugcaugccgcuguccugcaccaagaacaacagccaccacuacaucauggucggcaacgagaccggccuggagcucacccugacgaacaccuccaucaucaaccacaaguucugcaaccugagcgacgcccacaagaagaaccucuacgaccacgcccugauguccaucaucagcaccuuccaccuguccauccccaacuucaaccaguacgaggccaugagcugcgacuucaacgggggcaagaucuccgugcaguacaaccucagccacuccuacgccggggacgcggccaaccacugcggcaccguggccaacgggguccugcagacguucaugcggauggccuggggcggcagcuacaucgcgcuggacuccgggcacggcaagugggacugcaucaugaccagcuaccaguaccucaucauccagaacaccaccugggaggaccacugccaguucucccgccccagccccaucggguaccugggccugcucucccagcggacgcgcgacaucuacaucagccggcgccugcugggcaccuucaccuggacccucagcgacuccgaggggaaggacacgccgggcggguacugccugacccgguggaugcugaucgaggccgagcucaagugcuucggcaacaccgccguggccaagugcaacgagaagcacgacgaggaguucugcgacaugcugcgccuguucgacuucugcaagcaggccauccagcggcucaaggcgcccgcccagaugagcauccagcugaucaacaaggccgugaacgcccugaucaacgaccagcucaucaugaagaaccaccuccgcgacaucauggggauccccuacugcaacuacuccaaguacugguaccugaaccacaccacgaccggcaagaccagccugcccaagugcuggcuggucuccaacggcagcuaccugaacgagacccacuucuccgacgacaucgagcagcaggccgacaacaugaucacggagaugcuccagaaggaguacauggagcggcaggggaagaccccgcugggccugguggaccuguucguguucagcaccuccuucuaccucaucagcaucuuccugcaccuggucaagauccccacccaccgccacaucguggggaaguccugccccaagccccaccggcucaaccacaugggcaucugcagcugcgggcuguacaagcagccgggcgugcccguccgcuggaagcggugaggacuagucccuguucccagagcccacuuuuuuuucuuuuuuugaaauaaaauagccugucuuucagaucucaaaggcucuuuucagagccaccaaaaaaaaaaaaaaaaaaaaaaaaaaaaaaaaaaaaaaaaaaaaaaaaaaaaaaaaaaaaaaaaaaaaaaaaaaaaaaaaaaaaaaaaaaaaaaaaaaaaa

SEQ ID NO: 30083 - RNA, 1748 nt, Artificial Sequence
  mRNA product Design a-1 (hSL-A100) comprising derived and/or modified sequence from LASV(Mad39;Clade IV)__ANH09722__GPCmut6 (opt1)
aggagagucccgcagucggcguccagcggcucugcuuguucgugugugugucguugcaggccuuauucaagcuuaccaugggccagaucgugaccuucuuccaggaggucccccacgugaucgaggaggugaugaacaucguccugaucgcccucagcauccuggccgugcugaaggggcucuacaacguggcgaccugcggccugaucgggcuggucacguuccuccugcugugcggccgcuccugcaccaccacccucuacaaggggguguacgagcugcaggcccuggagcucaacauggagacgcugaacaugugcaugccgcugagcugcaccaagaacaacucccaccacuacauccgggugggcaacgagaccggccucgagcugacccugacgaacaccagccucaucaaccacaaguucugcaaccuguccgacgcccacaagaagaaccuguacgaccacgcccucaugagcaucaucuccaccuuccaccugagcauccccaacuucaaccaguacgaggccauguccugcgacuucaacgacgggaagaucagcguccaguacaaccugucccacaccuacgcgggcgacacggccaaccacugcgggaccguggccaacggcgugcuccagaccuucaugcgcauggccuggggcgggagcuacaucgcgcuggacuccggccgcgggggcugggacugcaucaugaccagcuaccaguaccugaucauccagaacacgaccugggaggaccacugccaguucucccggcccagccccaucggguaccucggccugcugucccagcggacccgcgacaucuacaucagccggcgccuccugggcaccuucacguggacccuguccgacagcgaggggaaggacaccccgggcggguacugccucacccgguggaugcugaucgaggccgagcugaagugcuucggcaacacggccgucgccaagugcaacgagaagcacgacgaggaguucugcgacaugcuccgccuguucgacuucugcaagcaggccauccagcggcugaaggcgcccgcccagaugagcauccagcucaucaacaaggccgugaacgcccugaucaacgaccagcugaucaugaagaaccaccuccgcgacaucauggggauccccuacugcaacuacuccaaguacugguaccugaaccacaccgugaccggcaagaccagccugcccaagugcuggcucgucuccaacggcagcuaccugaacgagacgcacuucuccgacgacaucgagcagcaggccgacaacaugaucaccgagaugcugcagaaggaguacauggagcggcaggggaagaccccgcugggccucguggaccuguucguguucagcaccuccuucuaccugaucagcaucuuccuccaccuggucaagauccccacgcaccgccacgugguggggaagcccugccccaagccgcaccggcugaaccacaugggcaucugcuccugcggguucuacaagcagcccggcguccccgugcgcuggaagcggugaggacuagucccuguucccagagcccacuuuuuuuucuuuuuuugaaauaaaauagccugucuuucagaucucaaaggcucuuuucagagccaccaaaaaaaaaaaaaaaaaaaaaaaaaaaaaaaaaaaaaaaaaaaaaaaaaaaaaaaaaaaaaaaaaaaaaaaaaaaaaaaaaaaaaaaaaaaaaaaaaaaaa

SEQ ID NO: 30084 - RNA, 1748 nt, Artificial Sequence
  mRNA product Design a-1 (hSL-A100) comprising derived and/or modified sequence from LASV(Z0947-SLE-2011;Clade IV)__AIT17840__GPCmut6 (opt1)
aggagagucccgcagucggcguccagcggcucugcuuguucgugugugugucguugcaggccuuauucaagcuuaccaugggccagaucgugaccuucuuccaggaggucccccacgugaucgaggaggugaugaacaucguccugaucgcccucagcauccuggccgugcugaaggggcucuacaacuucgcgaccugcggccugguggggcuggucacguuccuccugcugugcggccgcuccugcaccaucagccucuacaaggggguguacgagcugcagacccuggagcucaacauggagacccugaacaugugcaugccgcuguccugcacgaagaacaacagccaccacuacaucauggugggcaacgagaccggccucgagcugacccugaccaacacguccaucaucaaccacaaguucugcaaccucagcgacgcccacaagaagaaccuguacgaccacgcccugauguccaucaucagcaccuuccaccucuccauccccaacuucaaccaguacgaggccaugagcugcgacuucaacgggggcaagaucuccguccaguacaaccugagccacuccuacgccggggacgcggccaaccacugcggcaccguggccaacggggugcugcagaccuucaugcggauggccuggggcggcagcuacaucgcgcucgacuccgggcgcgaccggugggacugcaucaugacgagcuaccaguaccugaucauccagaacaccaccugggaggaccacugccaguucucccgccccagccccaucggcuaccuggggcuccugucccagcggacccgcgacaucuacaucagccggcgccugcucggcacguucaccuggacccugagcgacuccgagggcaaggacacccccgggggcuacugccugacgcgguggaugcucaucgaggccgagcugaagugcuucgggaacaccgccgucgccaagugcaacgagaagcacgacgaggaguucugcgacaugcugcgccucuucgacuucugcaagcaggccauccagcggcugaaggcgccggcccagaugagcauccagcugaucaacaaggccgugaacgcccucaucaacgaccagcugaucaugaagaaccaccuccgcgacaucaugggcauccccuacugcaacuacuccaaguacugguaccugaaccacaccaccacggggaagaccagccugcccaagugcuggcugguguccaacggcagcuaccucaacgagacccacuucuccgacgacaucgagcagcaggccgacaacaugaucaccgagaugcugcagaaggaguacauggagcggcagggcaagacgccgcuggggcuggucgaccucuucguguucagcaccuccuucuaccugaucagcaucuuccugcaccucgugaagauccccacccaccgccacaucgucggcaagcccugccccaagccgcaccggcugaaccacauggggaucugcuccugcggccuguacaagcagcccggggugcccgugaaguggaagcgcugaggacuagucccuguucccagagcccacuuuuuuuucuuuuuuugaaauaaaauagccugucuuucagaucucaaaggcucuuuucagagccaccaaaaaaaaaaaaaaaaaaaaaaaaaaaaaaaaaaaaaaaaaaaaaaaaaaaaaaaaaaaaaaaaaaaaaaaaaaaaaaaaaaaaaaaaaaaaaaaaaaaaa

SEQ ID NO: 30085 - RNA, 1748 nt, Artificial Sequence
  mRNA product Design a-1 (hSL-A100) comprising derived and/or modified sequence from LASV(Josiah;Clade IV)__NP_694870__GPCmut6 (opt4)
aggagagucccgcagucggcguccagcggcucugcuuguucgugugugugucguugcaggccuuauucaagcuuaccaugggccagaucgugaccuucuuccaggaggugccccacgugaucgaggaggugaugaacaucgugcugaucgcccugagcgugcuggccgugcugaagggccuguacaacuucgccaccugcggccuggugggccuggugaccuuccugcugcugugcggcagaagcugcaccaccagccuguacaagggcguguacgagcugcagacccuggagcugaacauggagacccugaacaugugcaugccccugagcugcaccaagaacaacagccaccacuacaucauggugggcaacgagaccggccuggagcugacccugaccaacaccagcaucaucaaccacaaguucugcaaccugagcgacgcccacaagaagaaccuguacgaccacgcccugaugagcaucaucagcaccuuccaccugagcauccccaacuucaaccaguacgaggccaugagcugcgacuucaacggcggcaagaucagcgugcaguacaaccugagccacagcuacgccggcgacgccgccaaccacugcggcaccguggccaacggcgugcugcagaccuucaugagaauggccuggggcggcagcuacaucgcccuggacagcggcagaggcaacugggacugcaucaugaccagcuaccaguaccugaucauccagaacaccaccugggaggaccacugccaguucagcagacccagccccaucggcuaccugggccugcugagccagagaaccagagacaucuacaucagcagaagacugcugggcaccuucaccuggacccugagcgacagcgagggcaaggacacccccggcggcuacugccugaccagauggaugcugaucgaggccgagcugaagugcuucggcaacaccgccguggccaagugcaacgagaagcacgacgaggaguucugcgacaugcugagacuguucgacuucugcaagcaggccauccagagacugaaggcccccgcccagaugagcauccagcugaucaacaaggccgugaacgcccugaucaacgaccagcugaucaugaagaaccaccugagagacaucaugggcauccccuacugcaacuacagcaaguacugguaccugaaccacaccaccaccggcagaaccagccugcccaagugcuggcuggugagcaacggcagcuaccugaacgagacccacuucagcgacgacaucgagcagcaggccgacaacaugaucaccgagaugcugcagaaggaguacauggagagacagggcaagaccccccugggccugguggaccuguucguguucagcaccagcuucuaccugaucagcaucuuccugcaccuggugaagauccccacccacagacacaucgugggcaagagcugccccaagccccacagacugaaccacaugggcaucugcagcugcggccuguacaagcagcccggcgugcccgugaaguggaagagaugaggacuagucccuguucccagagcccacuuuuuuuucuuuuuuugaaauaaaauagccugucuuucagaucucaaaggcucuuuucagagccaccaaaaaaaaaaaaaaaaaaaaaaaaaaaaaaaaaaaaaaaaaaaaaaaaaaaaaaaaaaaaaaaaaaaaaaaaaaaaaaaaaaaaaaaaaaaaaaaaaaaaa

SEQ ID NO: 30086 - RNA, 1745 nt, Artificial Sequence
  mRNA product Design a-1 (hSL-A100) comprising derived and/or modified sequence from LASV(LP;Clade I)__AAF86701__GPCmut6 (opt4)
aggagagucccgcagucggcguccagcggcucugcuuguucgugugugugucguugcaggccuuauucaagcuuaccaugggccagaucaucaccuucuuccaggaggugccccacgugaucgaggaggugaugaacaucgugcugaucgcccugagccugcuggccauccugaagggccuguacaacaucgccaccugcggcaucaucggccugguggccuuccuguuccugugcggcaagagcugcagccugacccugaagggcggcuacgagcugcagacccuggagcugaacauggagacccugaacaugugcaugccccugagcugcaccaagaacagcagccaccacuacaucagagugggcaacgagaccggccuggagcugacccugaccaacaccagcaucaucaaccacaaguucugcaaccugagcgacgcccacaagaagaaccuguacgaccacgcccugaugagcaucaucagcaccuuccaccugagcauccccaacuucaaccaguacgaggccaugagcugcgacuucaacggcggcaagaucagcgugcaguacaaccugagccacagcuacgccggcgacgccgccgagcacugcggcaccguggccaacggcgugcugcagaccuucaugagaauggccuggggcggcagauacaucgcccuggacagcggcaagggcaacugggacugcaucaugaccagcuaccaguaccugaucauccagaacaccaccugggaggaccacugccaguucagcagacccagccccaucggcuaccugggccugcugagccagagaaccagagacaucuacaucagcagaagacugcugggcaccuucaccuggacccugagcgacagcgagggcaacgagacccccggcggcuacugccugaccagauggaugcugaucgaggccgagcugaagugcuucggcaacaccgccguggccaagugcaacgagaagcacgacgaggaguucugcgacaugcugagacuguucgacuucugcaagcaggccaucagaagacugaaggcccccgcccagaugagcauccagcugaucaacaaggccgugaacgcccugaucaacgaccagcugaucaugaagaaccaccugagagacaucaugggcauccccuacugcaacuacagcaaguacugguaccugaaccacaccagcagcggcagaaccagccugcccaagugcuggcugaucagcaacggcagcuaccugaacgagacccaguucagcgacgacaucgagcagcaggccgacaacaugaucaccgagaugcugcagaaggaguacaucgagagacagggcaagaccccccugggccugguggacaucuucaucuucagcaccagcuucuaccugaucagcaucuuccugcaccugaucaagauccccacccacagacacaucgugggcaagcccugccccaagccccacagacugaaccacaugggcgugugcagcugcggccuguacaagcaccccggcgugcccaccaaguggaagagaugaggacuagucccuguucccagagcccacuuuuuuuucuuuuuuugaaauaaaauagccugucuuucagaucucaaaggcucuuuucagagccaccaaaaaaaaaaaaaaaaaaaaaaaaaaaaaaaaaaaaaaaaaaaaaaaaaaaaaaaaaaaaaaaaaaaaaaaaaaaaaaaaaaaaaaaaaaaaaaaaaaaaa

SEQ ID NO: 30087 - RNA, 1745 nt, Artificial Sequence
  mRNA product Design a-1 (hSL-A100) comprising derived and/or modified sequence from LASV(803213;Clade II)__AAF86703__GPCmut6 (opt4)
aggagagucccgcagucggcguccagcggcucugcuuguucgugugugugucguugcaggccuuauucaagcuuaccaugggccagaucaucaccuucuuccaggaggugccccacgugaucgaggaggugaugaacaucgugcugaucgcccugagccugcuggccauccugaagggcaucuacaacguggccaccugcggccuguucggccugaucagcuuccugcugcugugcggcagaagcugcagcgugaccuacaagggcguguacgagcugcagacccuggagcugaacauggccaaccugaacaugugcaugccccugagcugcaccaagaacaacagccaccacuacaucauggugggcaacgagaccggccuggagcugacccugaccaacaccagcaucaucaaccacaaguucugcaaccugagcgacgcccacaagaagaaccuguacgaccacgcccugaugagcaucaucagcaccuuccaccugagcauccccaacuucaaccaguacgaggccaugagcugcgacuucaacggcggcaagaucagcgugcaguacaaccugagccacagcuucgccguggacgccgccaaccacugcggcaccaucgccaacggcgugcugcagaccuucaugagaauggccuggggcggcagcuacaucgcccuggacagcggcaagggcaacugggacugcaucaugaccagcuaccaguaccugaucauccagaacaccaccugggaggaccacugccaguucagcagacccagccccaucggcuaccugggccugcugagccagagaaccagagacaucuacaucagcagaagacugcugggcaccuucaccuggacccugagcgacagcgagggcaacgaggcccccggcggcuacugccugaccagauggaugcugaucgaggccgagcugaagugcuucggcaacaccgccguggccaagugcaacgagaagcacgacgaggaguucugcgacaugcugagacuguucgacuucugcaagcaggccaucaagagacugaagacccccgcccagaugagcauccagcugaucaacaaggccgugaacgcccugaucaacgaccagcugaucaugaagaaccaccugagagacaucaugggcauccccuacugcaacuacagcagauacugguaccugaaccacaccgugaccggcaagaccagccugcccagaugcuggcuggugagcaacggcagcuaccugaacgagacccacuucagcgacgacaucgagcagcaggccgacaacaugaucaccgagaugcugcagaaggaguacauggacagacagggcaagaccccccugggccugguggaccuguucguguucagcaccagcuucuaccugaucagcaucuuccugcaccuggugaagauccccacccacagacacaucgugggcaagcccugccccaagccccacagacugaaccacaugggcaucugcagcugcggccuguacaagcaccccggcgugcccgugaaguggaagagaugaggacuagucccuguucccagagcccacuuuuuuuucuuuuuuugaaauaaaauagccugucuuucagaucucaaaggcucuuuucagagccaccaaaaaaaaaaaaaaaaaaaaaaaaaaaaaaaaaaaaaaaaaaaaaaaaaaaaaaaaaaaaaaaaaaaaaaaaaaaaaaaaaaaaaaaaaaaaaaaaaaaaa

SEQ ID NO: 30088 - RNA, 1745 nt, Artificial Sequence
  mRNA product Design a-1 (hSL-A100) comprising derived and/or modified sequence from LASV(GA391;Clade III)__CAA36645__GPCmut6 (opt4)
aggagagucccgcagucggcguccagcggcucugcuuguucgugugugugucguugcaggccuuauucaagcuuaccaugggccagaucgugaccuucuuccaggaggugccccacgugaucgaggaggugaugaacaucgugcugaucgcccugagcauccuggccauccugaagggccuguacaacguggccaccugcggccugaucggccuggugaccuuccugcugcugagcggcagaagcugcagccugaucuacaagggcaccuacgagcugcagacccuggagcugaacauggagacccugaacaugugcaugccccugagcugcaccaagaacaacagccaccacuacaucagagugggcaacgagaccggccuggagcugacccugaccaacaccagcauccugaaccacaaguucugcaaccugagcgacgcccacaagagaaaccuguacgaccacagccugaugagcaucaucagcaccuuccaccugagcauccccaacuucaaccaguacgaggccaugagcugcgacuucaacggcggcaagaucaccgugcaguacaaccugagccacagcuucgccguggacgccgccggccacugcggcacccuggccaacggcgugcugcagaccuucaugagaauggccuggggcggcagcuacaucgcccuggacagcggcagaggcaacugggacugcaucaugaccagcuaccaguaccugaucauccagaacaccaccugggacgaccacugccaguucagcagacccagccccaucggcuaccugggccugcugagccagagaaccagagacaucuacaucagcagaagacugcugggcaccuucaccuggacccugagcgacagcgagggcaacgagacccccggcggcuacugccugaccagauggaugcugaucgaggccgagcugaagugcuucggcaacaccgccguggccaagugcaacgagaagcacgacgaggaguucugcgacaugcugagacuguucgacuucugcaagcaggccaucagaagacugaagacccccgcccagaugagcauccagcugaucaacaaggccgugaacgcccugaucaacgaccagcugaucaugaagaaccaccugagagacaucaugggcauccccuacugcaacuacagcagauacugguaccugaaccacaccagcaccggcaagaccagccugcccagaugcuggcugaucagcaacggcagcuaccugaacgagaccaaguucagcgacgacaucgagcagcaggccgacaacaugaucaccgagaugcugcagaaggaguacaucgacagacagggcaagaccccccugggccugguggaccuguucguguucagcaccagcuucuaccugaucagcaucuuccugcaccuggugaagauccccacccacagacacaucgugggcaagcccugccccaagccccacagacugaaccacaugggcaucugcagcugcggccuguacaagcagcccggcgugcccgugagauggaagagaugaggacuagucccuguucccagagcccacuuuuuuuucuuuuuuugaaauaaaauagccugucuuucagaucucaaaggcucuuuucagagccaccaaaaaaaaaaaaaaaaaaaaaaaaaaaaaaaaaaaaaaaaaaaaaaaaaaaaaaaaaaaaaaaaaaaaaaaaaaaaaaaaaaaaaaaaaaaaaaaaaaaaa

SEQ ID NO: 30089 - RNA, 1748 nt, Artificial Sequence
  mRNA product Design a-1 (hSL-A100) comprising derived and/or modified sequence from LASV(AV;Clade V)__CCA30314__GPCmut6 (opt4)
aggagagucccgcagucggcguccagcggcucugcuuguucgugugugugucguugcaggccuuauucaagcuuaccaugggccagaucgugaccuucuuccaggaggugccccacgugaucgaggaggugaugaacaucgugcugaucgcccugagcauccuggccgugcugaagggccuguacaacaucgccaccugcggccugaucggccugaucaccuuccugcugcugugcggcagaagcugcagcagcaaccuguacaagggcguguacgagcugcagagccuggaccugaacauggagacccugaacaugugcaugccccugagcugcaccaagaacaacagccaccacuacaucagagugggcaacgacaccggccuggagcugacccugaccaacaccagcauccugaaccacaaguucugcaaccugagcgacgcccacaagaaggaccuguacgaccacgcccugaugagcaucaucagcaccuuccaccugagcauccccaacuucaaccaguacgaggccaugagcugcgacuucaacggcggcaagaucagcgugcaguacaaccugagccacagcuacgccaucgacgccgccaaccacugcggcaccguggccaacggcauccugcagaccuucaugagaauggccuggggcggcagcuacaucgcccuggacagcggcagaggcaacugggacugcaucaugaccagcuaccaguaccugaucauccagaacaccaccugggagaaccacugccaguucagcagacccagccccaucggcuaccugggccugcugagccagagaaccagagacaucuacaucagcagaagacugcugggcaccuucaccuggacccugagcgacagcgagggcaacgccacccccggcggcuacugccugaccagauggaugcugaucgaggccgagcugaagugcuucggcaacaccgccguggccaagugcaacgagaagcacgacgaggaguucugcgacaugcugagacuguucgacuucugcaagcaggccaucagcagacugaagagccccgcccagaugagcauccagcugaucaacaaggccgugaacgcccugaucaacgaccagcugaucaugaagaaccaccugagagacaucaugggcauccccuacugcaacuacagcaaguacugguaccugaaccacaccaucaccggcaagaccagccugcccaagugcuggcuggugagcaacggcagcuaccugaacgagacccacuucagcgacgacaucgagcagcaggccgacaacaugaucaccgagaugcugcagaaggaguacauggagagacagggcaagaccccccugggccugguggaccuguucguguucagcaccagcuucuaccugaucagcaucuuccugagacuggugaagauccccacccacagacacaucgugggcaagcccugccccaagccccacagacugaaccacaugggcaucugcagcugcggccuguacaagcagcccggcgugcccgugagauggaagagaugaggacuagucccuguucccagagcccacuuuuuuuucuuuuuuugaaauaaaauagccugucuuucagaucucaaaggcucuuuucagagccaccaaaaaaaaaaaaaaaaaaaaaaaaaaaaaaaaaaaaaaaaaaaaaaaaaaaaaaaaaaaaaaaaaaaaaaaaaaaaaaaaaaaaaaaaaaaaaaaaaaaaa

SEQ ID NO: 30090 - RNA, 1745 nt, Artificial Sequence
  mRNA product Design a-1 (hSL-A100) comprising derived and/or modified sequence from LASV(Togo/2016/7082;Clade VI)__AMR44577__GPCmut6 (opt4)
aggagagucccgcagucggcguccagcggcucugcuuguucgugugugugucguugcaggccuuauucaagcuuaccaugggccagaucaucaccuucuuccaggaggugccccacgugaucgaggaggugaugaacaucgugcugaucgcccugagccugcuggccauccugaagggcguguacaacguggccaccugcggcaucaucggccuggugaccuuccuguuccugugcggcagaagcugcagccugaucuacaagggcagcuacgagcugcagacccuggagcugaacauggagacccugaacaugugcaugccccugagcugcaccaagaacagcagccaccacuacaucagagugggcaacgagaccggccuggagcugacccugaccaacaccagcaucaucaaccacaaguucugcaaccugagcgacgcccacaagagaaaccuguacgaccacgcccugaugagcauccugagcaccuuccaccugagcauccccaacuucaaccaguacgaggccaugagcugcgacuucaacggcggcaagaucagcgugcaguacaaccugagccacgccuacgccguggacgccgccgagcacugcggcaccguggccaacggcgugcugcagaccuucaugagaauggccuggggcggcagcuacaucgcccuggacagcggcagaggcaacugggacugcaucaugaccagcuaccaguaccugaucauccagaacaccaccugggaggaccacugccaguucagcagacccagccccaucggcuaccugggccugcugagccagagaaccagagacaucuacaucagcagaagacugcugggcaccuucaccuggacccugagcgacagcgagggcaacgagacccccggcggcuacugccugaccagauggaugcugaucgaggccgagcugaagugcuucggcaacaccgccguggccaagugcaacgagaagcacgacgaggaguucugcgacaugcugagacuguucgacuucugcaagcaggccauccagagacugaagagccccgcccagaugagcauccagcugaucaacaaggccgugaacgcccugaucaacgaccagcugaucaugaagaaccaccugagagacaugaugggcauccccuacugcaacuacagcaaguacugguaccugaaccacaccagcagcggcagaaccagccugcccaagugcuggcuggugagcaacggcagcuaccugaacgagacccacuucagcgacgacaucgagcagcaggccgacaacaugaucaccgagaugcugcagaaggaguacaucgacagacagggcaagaccccccugggccugguggaccuguucguguucagcaccagcuucuaccugaucagcaucuuccugcaccugaucaagauccccacccacagacacaucgugggcaagcccugccccaagccccacagacugaaccacaugggcaucugcagcugcggccuguacaagcagcccggcgugcccaccagauggaagagaugaggacuagucccuguucccagagcccacuuuuuuuucuuuuuuugaaauaaaauagccugucuuucagaucucaaaggcucuuuucagagccaccaaaaaaaaaaaaaaaaaaaaaaaaaaaaaaaaaaaaaaaaaaaaaaaaaaaaaaaaaaaaaaaaaaaaaaaaaaaaaaaaaaaaaaaaaaaaaaaaaaaaa

SEQ ID NO: 30091 - RNA, 1745 nt, Artificial Sequence
  mRNA product Design a-1 (hSL-A100) comprising derived and/or modified sequence from LASV(KAK-428;Clade n.d. (VII))__ANH09740__GPCmut6 (opt4)
aggagagucccgcagucggcguccagcggcucugcuuguucgugugugugucguugcaggccuuauucaagcuuaccaugggccagaucgugaccuucuuccaggaggugccccacgugaucgaggaggugaugaacaucgugcugaucgcccugagccugcuggccauccugaagggccuguacaacuucgccaccugcggcgugaucggccugaucaccuuccugcugcugugcggcagaagcugcagcgccaccuacaagggccaguacgagcugcagacccuggagcugaacauggagagccugaacaugugcaugccccugagcugcaccaagaacaacagccaccacuacaucagagccggcaacaacaccggccuggagcugacccugaccaacaccagcaucaucagccacaaguucugcaaccugagcgacgcccacaagaagaaccuguacgaccacacccugaugagcaucaucaccaccuuccaccugagcauccccaacuucaaccaguacgaggccaugagcugcgacuucaacggcggcaagaucagcauccaguacaaccugagccacagcuacgccggcgacgccgcccagcacugcggcaccguggccaacggcgugcugcagaccuucaugagaauggccuggggcggcagcuaccuggcccuggacagcggcagaagaggcugggacugcaucaucagcagcuaccaguaccugaucauccagaacaccaccugggacgaccacugccaguucagcagacccagccccaucggcuaccugggcuucgugagccagaagaccagagacaucuacaucagcagaagacugcugggcaccuucaccuggacccugagcgacagcgagggccacgacaugcccggcggcuacugccugaccagauggaugcugaucgaggccgaccugaagugcuucggcaacaccgccguggccaagugcaacgagaagcacgacgaggaguucugcgacauguggagacuguucgacuucugcaagcaggccauccagagacugaaggcccccgcccagaugaacauccagcugaucaacaaggccgugaacgcccugaucaacgaccagcugaugaugaagaaccaccugagagacaucaugggcauccccuacugcaacuacagcaaguucugguaccugaacaacaccaccaccggcagaaccagccugcccagaugcuggcugaucagcaacggcagcuaccugaacgagacccacuucagcgacgacaucgagcagcaggccgacaacaugaucaccgagaugcugcagaaggaguacauggacagacagggcaagaccccccugggccugguggaccuguucguguucagcaccagcuucuaccugaucaccaucuuccugcaccuggugaagauccccacccacagacacaucgugggcaagcccugccccaagccccacagacugaaccacaugggcaucugcagcugcggccuguacaagcagcccggcgugcccgugagauggaagagaugaggacuagucccuguucccagagcccacuuuuuuuucuuuuuuugaaauaaaauagccugucuuucagaucucaaaggcucuuuucagagccaccaaaaaaaaaaaaaaaaaaaaaaaaaaaaaaaaaaaaaaaaaaaaaaaaaaaaaaaaaaaaaaaaaaaaaaaaaaaaaaaaaaaaaaaaaaaaaaaaaaaaa

SEQ ID NO: 30092 - RNA, 1745 nt, Artificial Sequence; identical to SEQ ID NO: 30086
  mRNA product Design a-1 (hSL-A100) comprising derived and/or modified sequence from LASV(Pinneo-NIG-1969;Clade I)__AIT17836__GPCmut6 (opt4)

SEQ ID NO: 30093 - RNA, 1745 nt, Artificial Sequence
  mRNA product Design a-1 (hSL-A100) comprising derived and/or modified sequence from LASV(ISTH0009-NIG-2011;Clade II)__AIT17404__GPCmut6 (opt4)
aggagagucccgcagucggcguccagcggcucugcuuguucgugugugugucguugcaggccuuauucaagcuuaccaugggccagaucaucaccuucuuccaggaggugccccacgugaucgaggaggugaugaacaucgugcugaucgcccugagccugcuggccauccugaagggcaucuacaacguggccaccugcggccuguucggccuggugagcuuccugcugcugugcggcagaagcugcagcaccaccuacaagggcguguacgagcugcagacccuggagcuggacauggccagccugaacaugugcaugccccugagcugcaccaagaacaacagccaccacuacaucauggugggcaacgagaccggccuggagcugacccugaccaacaccagcaucaucaaccacaaguucugcaaccugagcgacgcccacaagaagaaccuguacgaccacgcccugaugagcaucaucagcaccuuccaccugagcauccccaacuucaaccaguacgaggccaugagcugcgacuucaacggcggcaagaucagcgugcaguacaaccugagccacgccuacgccguggacgccgccaaccacugcggcaccaucgccaacggcgugcugcagaccuucaugagaauggccuggggcggcagcuacaucgcccuggacagcggcaagggcagcugggacugcaucaugaccagcuaccaguaccugaucauccagaacaccaccugggaggaccacugccaguucagcagacccagccccaucggcuaccugggccugcugagccagagaaccagagacaucuacaucagcagaagacugcugggcaccuucaccuggacccugagcgacagcgagggcaacgagacccccggcggcuacugccugaccagauggaugcugaucgaggccgagcugaagugcuucggcaacaccgccguggccaagugcaacgagaagcacgacgaggaguucugcgacaugcugagacuguucgacuucugcaagcaggccaucagaagacugaagacccccgcccagaugagcauccagcugaucaacaaggccgugaacgcccugaucaacgaccagcugaucaugaagaaccaccugagagacaucaugggcauccccuacugcaacuacagcaaguacugguaccugaaccacaccgugaccggcaagaccagccugcccagaugcuggcuggugagcaacggcagcuaccugaacgagacccacuucagcgacgacaucgagcagcaggccgacaacaugaucaccgagcugcugcagaaggaguacauggacagacagggcaagaccccccugggccugguggaccuguucguguucagcaccagcuucuaccugaucagcaucuuccugcaccugaucaagauccccacccacagacacaucaccggcaagcccugccccaagccccacagacugaaccacaugggcaucugcagcugcggccuguacaagcaccccggcgugcccgugaaguggaagagaugaggacuagucccuguucccagagcccacuuuuuuuucuuuuuuugaaauaaaauagccugucuuucagaucucaaaggcucuuuucagagccaccaaaaaaaaaaaaaaaaaaaaaaaaaaaaaaaaaaaaaaaaaaaaaaaaaaaaaaaaaaaaaaaaaaaaaaaaaaaaaaaaaaaaaaaaaaaaaaaaaaaaa

SEQ ID NO: 30094 - RNA, 1745 nt, Artificial Sequence
  mRNA product Design a-1 (hSL-A100) comprising derived and/or modified sequence from LASV(ISTH2010-NIG-2012;Clade II)__AIT17482__GPCmut6 (opt4)
aggagagucccgcagucggcguccagcggcucugcuuguucgugugugugucguugcaggccuuauucaagcuuaccaugggccagaucaucaccuucuuccaggaggugccccacgugaucgaggaggugaugaacaucgugcugaucgcccugagccugcuggccauccugaagggcaucuacaacguggccaccugcggccuguucggccuggugagcuuccugcugcugugcggcagaagcugcagcaccaccuacaagggcguguacgagcugcagacccuggagcuggacauggccagccugaacaugugcaugccccugagcugcaccaagaacaacagccaccacuacaucauggugggcaacgagaccggccuggagcugacccugaccaacaccagcaucaucaaccacaaguucugcaaccugagcgacgcccacaagaagaaccuguacgaccacgcccugaugagcaucaucagcaccuuccaccugagcauccccaacuucaaccaguacgaggccaugagcugcgacuucaacggcggcaagaucagcgugcaguacaaccugagccacgccuacgccguggacgccgccaaccacugcggcaccaucgccaacggcgugcugcagaccuucaugagaauggccuggggcggcagcuacaucgcccuggacagcggcaagggcagcugggacugcaucaugaccagcuaccaguaccugaucauccagaacaucaccugggaggaccacugccaguucagcagacccagccccaucggcuaccugggccugcugagccagagaaccagagacaucuacaucagcagaagacugcugggcaccuucaccuggacccugagcgacagcgagggcaacgagacccccggcggcuacugccugaccagauggaugcugaucgaggccgagcugaagugcuucggcaacaccgccguggccaagugcaacgagaagcacgacgaggaguucugcgacaugcugagacuguucgacuucugcaagcaggccaucagaagacugaagacccccgcccagaugagcauccagcugaucaacaaggccgugaacgcccugaucaacgaccagcugaucaugaagaaccaccugagagacaucaugggcauccccuacugcaacuacagcaaguacugguaccugaaccacaccgugaccggcaagaccagccugcccagaugcuggcuggugagcaacggcagcuaccugaacgagacccacuucagcgacgacaucgagcagcaggccgacaacaugaucaccgagcugcugcagaaggaguacaucgacagacagggcaagaccccccugggccugguggaccuguucguguucagcaccagcuucuaccugaucagcaucuuccugcaccuggugaagauccccacccacagacacguggugggcaagcccugccccaagccccacagacugaaccacaugggcaucugcagcugcggccuguacaagcaccccggcgugcccgugaaguggaagagaugaggacuagucccuguucccagagcccacuuuuuuuucuuuuuuugaaauaaaauagccugucuuucagaucucaaaggcucuuuucagagccaccaaaaaaaaaaaaaaaaaaaaaaaaaaaaaaaaaaaaaaaaaaaaaaaaaaaaaaaaaaaaaaaaaaaaaaaaaaaaaaaaaaaaaaaaaaaaaaaaaaaaa

SEQ ID NO: 30095 - RNA, 1745 nt, Artificial Sequence
  mRNA product Design a-1 (hSL-A100) comprising derived and/or modified sequence from LASV(Lassa virus/H.sapiens-wt/NGA/2015/ISTH_0543;Clade II)__AVO03639__GPCmut6 (opt4)
aggagagucccgcagucggcguccagcggcucugcuuguucgugugugugucguugcaggccuuauucaagcuuaccaugggccagaucaucaccuucuuccaggaggugccccacgugaucgaggaggugaugaacaucgugcugaucgcccugagccugcuggccauccugaagggcaucuacaacguggccaccugcggccuguucggccuggugagcuuccugcugcugugcggcagaagcugcagcaccaccuacaagggcguguacgagcugcagacccuggagcuggacauggccaaccugaacaugugcaugccccugagcugcaccaagaacaacagccaccacuacaucauggugggcaacgagaccggccuggagcugacccugaccaacaccagcaucaucaaccacaaguucugcaaccugagcgacgcccacaagaagaaccuguacgaccacgcccugaugagcaucaucagcaccuuccaccugagcauccccaacuucaaccaguacgaggccaugagcugcgacuucaacggcggcaagaucagcgugcaguacaaccugagccacaccuacgccguggacgccgccaaccacugcggcaccaucgccaacggcgugcugcagaccuucaugagaauggccuggggcggcagcuacaucgcccuggacagcggcaagggcagcugggacugcaucaugaccagcuaccaguaccuggugauccagaacaccaccugggaggaccacugccaguucagcagacccagccccaucggcuaccugggccugcugagccagagaaccagagacaucuacaucagcagaagacugcugggcaccuucaccuggacccugagcgacagcgagggcaacgagacccccggcggcuacugccugaccagauggaugcugaucgaggccgagcugaagugcuucggcaacaccgccguggccaagugcaacgagaagcacgacgaggaguucugcgacaugcugagacuguucgacuucugcaagcaggccaucagaagacugaagacccccgcccagaugagcauccagcugaucaacaaggccgugaacgcccugaucaacgaccagcugaucaugaagaaccaccugagagacaucaugggcauccccuacugcaacuacagcaaguacugguaccugaaccacaccgugaccggcaagaccagccugcccagaugcuggcuggugagcaacggcagcuaccugaacgagacccacuucagcgacgacaucgagcagcaggccgacaacaugaucaccgagcugcugcagaaggaguacaucgacagacagggcaagaccccccugggccugguggaccuguucguguucagcaccagcuucuaccugaucagcaucuuccugcaccuggugaagauccccacccacagacacaucaccggcaagcccugccccaagccccacagacugaaccacaugggcaucugcagcugcggccuguacaagcaccccggcgugcccgugaaguggaagagaugaggacuagucccuguucccagagcccacuuuuuuuucuuuuuuugaaauaaaauagccugucuuucagaucucaaaggcucuuuucagagccaccaaaaaaaaaaaaaaaaaaaaaaaaaaaaaaaaaaaaaaaaaaaaaaaaaaaaaaaaaaaaaaaaaaaaaaaaaaaaaaaaaaaaaaaaaaaaaaaaaaaaa

SEQ ID NO: 30096 - RNA, 1745 nt, Artificial Sequence
  mRNA product Design a-1 (hSL-A100) comprising derived and/or modified sequence from LASV(Lassa virus/H.sapiens-wt/NGA/2016/ISTH_0009;Clade II)__AVO03571__GPCmut6 (opt4)
aggagagucccgcagucggcguccagcggcucugcuuguucgugugugugucguugcaggccuuauucaagcuuaccaugggccagaucaucaccuucuuccaggaggugccccacgugaucgaggaggugaugaacaucgugcugaucgcccugagccugcuggccauccugaagggcaucuacaacguggccaccugcggccugcugggccuggugagcuuccugcugcugugcggcagaagcugcagcaccaccuacaagggcguguacgagcugcagacccuggagcuggacauggccagccugaacaugugcaugccccugagcugcaccaagaacaacagccaccacuacaucauggugggcaacgagaccggccuggagcugacccugaccaacaccagcaucaucaaccacaaguucugcaaccugagcgacgcccacaagaagaaccuguacgaccacgcccugaugagcaucaucagcaccuuccaccugagcauccccaacuucaaccaguacgaggccaugagcugcgacuucaacggcggcagaaucagcgugcaguacaaccugagccacagcuacgccguggacgccgccaaccacugcggcaccaucgccaacggcgugcugcagaccuucaugagaauggccuggggcggcagcuacaucgcccuggacagcggcaagggcagcugggacugcaucaugaccagcuaccaguaccugaucauccagaacaccaccugggaggaccacugccaguucagcagacccagccccaucggcuaccugggccugcugagccagagaaccagagacaucuacaucagcagaagacugcugggcaccuucaccuggacccugagcgacagcgagggcaacgagacccccggcggcuacugccugaccagauggaugcugaucgaggccgagcugaagugcuucggcaacaccgccguggccaagugcaacgagaagcacgacgaggaguucugcgacaugcugagacuguucgacuucugcaagcaggccaucagaagacugaagacccccgcccagaugagcauccagcugaucaacaaggccgugaacgcccugaucaacgaccagcugaucaugaagaaccaccugagagacaucaugggcauccccuacugcaacuacagcaaguacugguaccugaaccacaccgugaccggcaagaccagccugcccagaugcuggcuggugagcaacggcagcuaccugaacgagacccacuucagcgacgacaucgagcagcaggccgacaacaugaucaccgagcugcugcagaaggaguacaucgacagacagggcaagaccccccugggccugguggaccuguucguguucagcaccagcuucuaccugaucagcaucuuccugcaccuggugaagauccccacccacagacacaucaccggcaagcccugccccaagccccacagacugaaccacaugggcaucugcagcugcggccuguacaaccaccccggcgugcccgugaaguggaagagaugaggacuagucccuguucccagagcccacuuuuuuuucuuuuuuugaaauaaaauagccugucuuucagaucucaaaggcucuuuucagagccaccaaaaaaaaaaaaaaaaaaaaaaaaaaaaaaaaaaaaaaaaaaaaaaaaaaaaaaaaaaaaaaaaaaaaaaaaaaaaaaaaaaaaaaaaaaaaaaaaaaaaa

SEQ ID NO: 30097 - RNA, 1745 nt, Artificial Sequence
  mRNA product Design a-1 (hSL-A100) comprising derived and/or modified sequence from LASV(Lassa virus/H.sapiens-wt/NGA/2016/ISTH_0017;Clade II)__AVO03567__GPCmut6 (opt4)
aggagagucccgcagucggcguccagcggcucugcuuguucgugugugugucguugcaggccuuauucaagcuuaccaugggccagaucaucaccuucuuccaggaggugccccacgugaucgaggaggugaugaacaucgugcugaucgcccugagccugcuggccauccugaagggcaucuacaacguggccaccugcggccuguucggccuggugagcuuccugcugcugugcggcagaagcugcagcaccaccuacaagggcguguacgagcugcagacccuggagcuggacauggccagccugaacaugugcaugccccugagcugcaccaagaacaacagccaccacuacaucauggugggcaacgagaccggccuggagcugacccugaccaacaccagcaucaucaaccacaaguucugcaaccugagcgacgcccacaagaagaaccuguacgaccacgcccugaugagcaucaucagcaccuuccaccugagcauccccaacuucaaccaguacgaggccaugagcugcgacuucaacggcggcaagaucagcgugcaguacaaccugagccacaccuacgccaucgacgccgccaaccacugcggcaccaucgccaacggcgugcugcagaccuucaugagaauggccuggggcggcagcuacaucgcccuggacagcggcaagggcagcugggacugcaucaugaccagcuaccaguaccugaucauccagaacaccaccugggaggaccacugccaguucagcagacccagccccaucggcuaccugggccugcugagccagagaaccagagacaucuacaucagcagaagacugcugggcaccuucaccuggacccugagcgacagcgagggcaacgagacccccggcggcuacugccugaccagauggaugcugaucgaggccgagcugaagugcuucggcaacaccgccguggccaagugcaacgagaagcacgacgaggaguucugcgacaugcugagacuguucgacuucugcaagcaggccaucagaagacugaagacccccgcccagaugagcauccagcugaucaacaaggccgugaacgcccugaucaacgaccagcugaucaugaagaaccaccugagagacaucaugggcauccccuacugcaacuacagcaaguacugguaccugaaccacaccgugaccggcaagaccagccugcccagaugcuggcuggugagcaacggcagcuaccugaacgagacccacuucagcgacgacaucgagcagcaggccgacaacaugaucaccgagcugcugcagaaggaguacauggacagacagggcaagaccccccugggccugguggaccuguucguguucagcaccagcuucuaccugaucagcaucuuccugcaccuggugagaauccccacccacagacacgugaucggcaagcccugccccaagccccacagacugaaccacaugggcaucugcagcugcggccuguacaagcaccccggcgugcccgugaaguggaagagaugaggacuagucccuguucccagagcccacuuuuuuuucuuuuuuugaaauaaaauagccugucuuucagaucucaaaggcucuuuucagagccaccaaaaaaaaaaaaaaaaaaaaaaaaaaaaaaaaaaaaaaaaaaaaaaaaaaaaaaaaaaaaaaaaaaaaaaaaaaaaaaaaaaaaaaaaaaaaaaaaaaaaa

SEQ ID NO: 30098 - RNA, 1745 nt, Artificial Sequence
  mRNA product Design a-1 (hSL-A100) comprising derived and/or modified sequence from LASV(Lassa virus/H.sapiens-wt/NGA/2018/ISTH_0959;Clade II)__AVV65099__GPCmut6 (opt4)
aggagagucccgcagucggcguccagcggcucugcuuguucgugugugugucguugcaggccuuauucaagcuuaccaugggccagaucaucaccuucuuccaggaggugccccacgugaucgaggaggugaugaacaucgugcugaucgcccugagccugcuggccauccugaagggcaucuacaacguggugaccugcggccuguucggccuggugagcuuccugcugcugugcggcagaagcugcagcaccaccuacaagggcguguacgagcugcagacccuggagcuggacauggccagccugaacaugugcaugccccugagcugcaccaagaacaacagccaccacuacaucauggugggcaacgagaccggccuggagcugacccugaccaacaccagcaucaucaaccacaaguucugcaaccugagcgacgcccacaagaagaaccuguacgaccacgcccugaugagcaucaucagcaccuuccaccugagcauccccaacuucaaccaguacgaggccaugagcugcgacuucaacggcggcaagaucagcgugcaguacaaccugagccacgccuacgccaucgacgccgccaaccacugcggcaccaucgccaacggcgugcugcagaccuucaugagaauggccuggggcggcagcuacaucgcccuggacagcggcaagggcagcugggacugcaucaugaccagcuaccaguaccugaucauccagaacaccaccugggaggaccacugccaguucagcagacccagccccaucggcuaccugggccugcugagccagagaaccagagacaucuacaucagcagaagacugcugggcaccuucaccuggacccugagcgacagcgagggcaacgagacccccggcggcuacugccugaccagauggaugcugaucgaggccgagcugaagugcuucggcaacaccgccguggccaagugcaacgagaagcacgacgaggaguucugcgacaugcugagacuguucgacuucugcaagcaggccaucagaagacugaagacccccgcccagaugagcauccagcugaucaacaaggccgugaacgcccugaucaacgaccagcugaucaugaagaaccaccugagagacaucaugggcauccccuacugcaacuacagcaaguacugguaccugaaccacaccgugaccggcaagaccagccugcccagaugcuggcuggugagcaacggcagcuaccugaacgagacccacuucagcgacgacaucgagcagcaggccgacaacaugaucaccgagcugcugcagaaggaguacaucgacagacagggcaagaccccccugggccugguggaccuguucguguucagcaccagcuucuaccugaucagcaucuuccugcaccuggugaagauccccacccacagacacgugaucggcaagcccugccccaagccccacagacugaaccacaugggcaucugcagcugcggccuguacaagcaccccggcgugcccgugaaguggaagagaugaggacuagucccuguucccagagcccacuuuuuuuucuuuuuuugaaauaaaauagccugucuuucagaucucaaaggcucuuuucagagccaccaaaaaaaaaaaaaaaaaaaaaaaaaaaaaaaaaaaaaaaaaaaaaaaaaaaaaaaaaaaaaaaaaaaaaaaaaaaaaaaaaaaaaaaaaaaaaaaaaaaaa

SEQ ID NO: 30099 - RNA, 1745 nt, Artificial Sequence
  mRNA product Design a-1 (hSL-A100) comprising derived and/or modified sequence from LASV(LASV003-NIG-2008;Clade II)__AIT17580__GPCmut6 (opt4)
aggagagucccgcagucggcguccagcggcucugcuuguucgugugugugucguugcaggccuuauucaagcuuaccaugggccagaucaucaccuucuuccaggaggugccccacgugaucgaggaggugaugaacaucgugcugaucgcccugagccugcuggccauccugaagggcaucuacaacguggccaccugcggccuguucggccuggugagcuuccugcugcugugcggcagaagcugcagcaccaccuacaagggcguguacgagcugcagacccuggagcuggacauggccagccugaacaugugcaugccccugagcugcaccaagaacaacagccaccacuacaucauggugggcaacgagaccggccuggagcugacccugaccaacaccagcaucaucaaccacaaguucugcaaccugagcgacgcccacaagaagaaccuguacgaccacgcccugaugagcaucaucagcaccuuccaccugagcauccccaacuucaaccaguacgaggccaugagcugcgacuucaacggcggcaagaucagcgugcaguacaaccugagccacaccuacgccguggacgccgccaaccacugcggcaccaucgccaacggcgugcugcagaccuucaugagaauggccuggggcggcagcuacaucgcccuggacagcggcaagggcagcugggacugcaucaugaccagcuaccaguaccugaucauccagaacaccaccugggaggaccacugccaguucagcagacccagccccaucggcuaccugggccugcugagccagagaaccagagacaucuacaucagcagaagacugcugggcaccuucaccuggacccugagcgacagcgagagcaacgagacccccggcggcuacugccugaccagauggaugcugaucgaggccgagcugaagugcuucggcaacaccgccguggccaagugcaacgagaagcacgacgaggaguucugcgacaugcugagacuguucgacuucugcaagcaggccaucagaagacugaaggcccccgcccagaugagcauccagcugaucaacaaggccgugaacgcccugaucaacgaccagcugaucaugaagaaccaccugagagacaucaugggcauccccuacugcaacuacagcaaguacugguaccugaaccacaccgugaccggcagaaccagccugcccagaugcuggcuggugagcaacggcagcuaccugaacgagacccacuucagcgacgacaucgagcagcaggccgacaacaugaucaccgagcugcugcagaaggaguacauggacagacagggcaagaccccccugggccugguggaccuguucguguucagcaccagcuucuaccugaucagcaucuuccugcaccuggugaagauccccacccacagacacgugaucggcaagcccugccccaagccccacagacugaaccacaugggcaucugcagcugcggccuguacaagcaccccggcgugcccgugaaguggaagagaugaggacuagucccuguucccagagcccacuuuuuuuucuuuuuuugaaauaaaauagccugucuuucagaucucaaaggcucuuuucagagccaccaaaaaaaaaaaaaaaaaaaaaaaaaaaaaaaaaaaaaaaaaaaaaaaaaaaaaaaaaaaaaaaaaaaaaaaaaaaaaaaaaaaaaaaaaaaaaaaaaaaaa

SEQ ID NO: 30100 - RNA, 1745 nt, Artificial Sequence
  mRNA product Design a-1 (hSL-A100) comprising derived and/or modified sequence from LASV(LASV035-NIG-2009;Clade II)__AIT17588__GPCmut6 (opt4)
aggagagucccgcagucggcguccagcggcucugcuuguucgugugugugucguugcaggccuuauucaagcuuaccaugggccagaucaucaccuucuuccaggaggugccccacgugaucgaggaggugaugaacaucgugcugaucgcccugagccugcuggccauccugaagggcaucuacaacguggccaccugcggccuguucggccuggugagcuuccugcugcugugcggcagaagcugcagcaccaccuacaagggcguguacgagcugcagacccuggagcuggacauggccagccugaacaugugcaugccccugagcugcaccaagaacaacagccaccacuacaucauggugggcaacgagaccggccuggagcugacccugaccaacaccagcaucaucaaccacaaguucugcaaccugagcgacgcccacaagaagaaccuguacgaccacgcccugaugagcaucaucagcaccuuccaccugagcauccccaacuucaaccaguacgaggccaugagcugcgacuucaacggcggcaagaucagcgugcaguacaaccugagccacgccuacgccguggacgccgccaaccacugcggcaccaucgccaacggcgugcugcagaccuucaugagaauggccuggggcggcagcuacaucgcccuggacagcggcaagggcagcugggacugcaucaugaccagcuaccaguaccugaucauccagaacaccaccugggaggaccacugccaguucagcagacccagccccaucggcuaccugggccugcugagccagagaaccagagacaucuacaucagcagaagacugcugggcaccuucaccuggacccugagcgacagcgagggcaacgagacccccggcggcuacugccugaccagauggaugcugaucgaggccgagcugaagugcuucggcaacaccgccguggccaagugcaacgagaagcacgacgaggaguucugcgacaugcugagacuguucgacuucugcaagcaggccaucagaagacugaaggcccccgcccagaugagcauccagcugaucaacaaggccgugaacgcccugaucaacgaccagcugaucaugaagaaccaccugagagacaucaugggcauccccuacugcaacuacagcaaguacugguaccugaaccacaccgugaccggcaagaccagccugcccagaugcuggcuggugagcaacggcagcuaccugaacgagacccacuucagcgacgacaucgagcagcaggccgacaacaugaucaccgagcugcugcagaaggaguacaucgacagacagggcaagaccccccugggccugguggaccuguucguguucagcaccagcuucuaccugaucagcaucuuccugcaccuggugaagauccccacccacagacacgugaucggcaagcccugccccaagccccacagacugaaccacaugggcaucugcagcugcggccuguacaagcaccccggcgugcccgugaaguggaagagaugaggacuagucccuguucccagagcccacuuuuuuuucuuuuuuugaaauaaaauagccugucuuucagaucucaaaggcucuuuucagagccaccaaaaaaaaaaaaaaaaaaaaaaaaaaaaaaaaaaaaaaaaaaaaaaaaaaaaaaaaaaaaaaaaaaaaaaaaaaaaaaaaaaaaaaaaaaaaaaaaaaaaa

SEQ ID NO: 30101 - RNA, 1745 nt, Artificial Sequence
  mRNA product Design a-1 (hSL-A100) comprising derived and/or modified sequence from LASV(LASV1000-NIG-2009;Clade II)__AIT17782__GPCmut6 (opt4)
aggagagucccgcagucggcguccagcggcucugcuuguucgugugugugucguugcaggccuuauucaagcuuaccaugggccagaucaucaccuucuuccaggaggugccccacgugaucgaggaggugaugaacaucgugcugaucgcccugagccugcuggccauccugaagggcaucuacaacguggccaccugcggccuguucggccuggugagcuuccugcugcugugcggcagaagcugcagcaccaccuacaagggcguguacgagcugcagacccuggagcuggacauggccagccugaacaugugcaugccccugagcugcaccaagaacaacagccaccacuacaucauggugggcaacgagaccggccuggagcugacccugaccaacaccagcaucaucaaccacaaguucugcaaccugagcgacgcccacaagaagaaccuguacgaccacgcccugaugagcaucaucagcaccuuccaccugagcauccccaacuucaaccaguacgaggccaugagcugcgacuucaacggcggcaagaucagcgugcaguacaaccugagccacaccuacgccguggacgccgccaaccacugcggcaccaucgccaacggcgugcugcagaccuucaugagaauggccuggggcggcagcuacaucgcccuggacagcggcaagggcagcugggacugcaucaugaccagcuaccaguaccugaucauccagaacaccaccugggaggaccacugccaguucagcagacccagccccaucggcuaccugggccugcugagccagagaaccagagacaucuacaucagcagaagacugcugggcaccuucaccuggacccugagcgacagcgagggcaacgagacccccggcggcuacugccugaccagauggaugcugaucgaggccgagcugaagugcuucggcaacaccgccguggccaagugcaacgagaagcacgacgaggaguucugcgacaugcugagacuguucgacuucugcaagcaggccaucaagagacugaagacccccgcccagaugagcauccagcugaucaacaaggccgugaacgcccugaucaacgaccagcugaucaugaagaaccaccugagagacaucaugggcauccccuacugcaacuacagcaaguacugguaccugaaccacaccgugaccggcaagaccagccugcccagaugcuggcuggugagcaacggcagcuaccugaacgagacccacuucagcgacgacaucgagcagcaggccgacaacaugaucaccgagcugcugcagaaggaguacaucgacagacagggcaagaccccccugggccugguggaccuguucguguucagcaccagcuucuaccugaucagcaucuuccugcaccuggugaagauccccacccacagacacguggugggcaagcccugccccaagccccacagacugaaccacaugggcaucugcagcugcggccuguacaagcaccccggcgugcccgugaaguggaagagaugaggacuagucccuguucccagagcccacuuuuuuuucuuuuuuugaaauaaaauagccugucuuucagaucucaaaggcucuuuucagagccaccaaaaaaaaaaaaaaaaaaaaaaaaaaaaaaaaaaaaaaaaaaaaaaaaaaaaaaaaaaaaaaaaaaaaaaaaaaaaaaaaaaaaaaaaaaaaaaaaaaaaa

SEQ ID NO: 30102 - RNA, 1745 nt, Artificial Sequence
  mRNA product Design a-1 (hSL-A100) comprising derived and/or modified sequence from LASV(LASV221-NIG-2010;Clade II)__AIT17624__GPCmut6 (opt4)
aggagagucccgcagucggcguccagcggcucugcuuguucgugugugugucguugcaggccuuauucaagcuuaccaugggccagaucaucaccuucuuccaggaggugccccacgugaucgaggaggugaugaacaucgugcugaucgcccugagccugcuggccauccugaagggcaucuacaacguggccaccugcggccuguucggccuggugagcuuccugcugcugugcggcagaagcugcagcaccaccuacaagggcguguacgagcugcagacccuggagcuggacauggccagccugaacaugugcaugccccugagcugcaccaagaacaacagccaccacuacaucauggugggcaacgagaccggccuggagcugacccugaccaacaccagcaucaucaaccacaaguucugcaaccugagcgacgcccacaagaagaaccuguacgaccacgcccugaugagcaucaucagcaccuuccaccugagcauccccaacuucaaccaguacgaggccaugagcugcgacuucaacggcggcaagaucagcgugcaguacaaccugagccacaccuacgccaucgacgccgccaaccacugcggcaccaucgccaacggcgugcugcagaccuucaugagaauggccuggggcggcagcuacaucgcccuggacagcggcaagggcagcugggacugcaucaugaccagcuaccaguaccugaucauccagaacaccaccugggaggaccacugccaguucagcagacccagccccaucggcuaccugggccugcugagccagagaaccagagacaucuacaucagcagaagacugcugggcaccuucaccuggacccugagcgacagcgagggcaacgagacccccggcggcuacugccugaccagauggaugcugaucgaggccgagcugaagugcuucggcaacaccgccguggccaagugcaacgagaagcacgacgaggaguucugcgacaugcugagacuguucgacuucugcaagcaggccaucagaagacugaagacccccgcccagaugagcauccagcugaucaacaaggccgugaacgcccugaucaacgaccagcugaucaugaagaaccaccugagagacaucaugggcauccccuacugcaacuacagcaaguacugguaccugaaccacaccgugaccggcaagaccagccugcccagaugcuggcuggugagcaacggcagcuaccugaacgagacccacuucagcgacgacaucgagcagcaggccgacaacaugaucaccgagaugcugcagaaggaguacauggacagacagggcaagaccccccugggccugguggaccuguucguguucagcaccagcuucuaccugaucagcaucuuccugcaccuggugaagauccccacccacagacacgugaucggcaagcccugccccaagccccacagacugaaccacaugggcaucugcagcugcggccuguacaagcaccccggcgugcccgugaaguggaagagaugaggacuagucccuguucccagagcccacuuuuuuuucuuuuuuugaaauaaaauagccugucuuucagaucucaaaggcucuuuucagagccaccaaaaaaaaaaaaaaaaaaaaaaaaaaaaaaaaaaaaaaaaaaaaaaaaaaaaaaaaaaaaaaaaaaaaaaaaaaaaaaaaaaaaaaaaaaaaaaaaaaaaa

SEQ ID NO: 30103 - RNA, 1745 nt, Artificial Sequence
  mRNA product Design a-1 (hSL-A100) comprising derived and/or modified sequence from LASV(LASV237-NIG-2010;Clade II)__AIT17638__GPCmut6 (opt4)
aggagagucccgcagucggcguccagcggcucugcuuguucgugugugugucguugcaggccuuauucaagcuuaccaugggccagaucaucaccuucuuccaggaggugccccacgugaucgaggaggugaugaacaucgugcugaucgcccugagccugcuggccauccugaagggcaucuacaacguggccaccugcggccuguucggccuggugagcuuccugcugcugugcggcagaagcugcagcaccaccuacaagggcguguacgagcugcagacccuggagcuggacauggccagccugaacaugugcaugccccugagcugcaccaagaacaacagccaccacuacaucauggugggcaacgagaccggccuggagcugacccugaccaacaccagcaucaucaaccacaaguucugcaaccugagcgacgcccacaagaaggaccuguacgaccacgcccugaugagcaucaucagcaccuuccaccugagcauccccaacuucaaccaguacgaggccaugagcugcgacuucaacggcggcaagaucagcgugcaguacaaccugagccacaccuacgccguggacgccgccaaccacugcggcaccaucgccaacggcgugcugcagaccuucaugagaauggccuggggcggcagcuacaucgcccuggacagcggcaagggcagcugggacugcaucaugaccagcuaccaguaccugaucauccagaacaccaccugggaggaccacugccaguucagcagacccagccccaucggcuaccugggccugcugagccagagaaccagagacaucuacaucagcagaagacugcugggcaccuucaccuggacccugagcgacagcgagggcaacgagacccccggcggcuacugccugaccagauggaugcugaucgaggccgagcugaagugcuucggcaacaccgccguggccaagugcaacgagaagcacgacgaggaguucugcgacaugcugagacuguucgacuucugcaagcaggccaucagaagacugaagacccccgcccagaugagcauccagcugaucaacaaggccgugaacgcccugaucaacgaccagcugaucaugaagaaccaccugagagacaucaugggcauccccuacugcaacuacagcaaguacugguaccugaaccacaccgugaccggcaagaccagccugcccagaugcuggcuggugagcaacggcagcuaccugaacgagacccacuucagcgacgacaucgagcagcaggccgacaacaugaucaccgagcugcugcagaaggaguacauggacagacagggcaagaccccccugggccugguggaccuguucguguucagcaccagcuucuaccugaucagcaucuuccugcaccugaucaagauccccacccacagacacaucaccggcaagcccugccccaagccccacagacugaaccacaugggcaucugcagcugcggccuguacaagcaccccggcgugcccgugaaguggaagagaugaggacuagucccuguucccagagcccacuuuuuuuucuuuuuuugaaauaaaauagccugucuuucagaucucaaaggcucuuuucagagccaccaaaaaaaaaaaaaaaaaaaaaaaaaaaaaaaaaaaaaaaaaaaaaaaaaaaaaaaaaaaaaaaaaaaaaaaaaaaaaaaaaaaaaaaaaaaaaaaaaaaaa

SEQ ID NO: 30104 - RNA, 1745 nt, Artificial Sequence
  mRNA product Design a-1 (hSL-A100) comprising derived and/or modified sequence from LASV(LASV253-NIG-2011;Clade II)__AIT17670__GPCmut6 (opt4)
aggagagucccgcagucggcguccagcggcucugcuuguucgugugugugucguugcaggccuuauucaagcuuaccaugggccagaucaucaccuucuuccaggaggugccccacgugaucgaggaggugaugaacaucgugcugaucgcccugagccugcuggccauccugaagggcaucuacaacguggccaccugcggccuguucggccuggugagcuuccugcugcugugcggcagaagcugcagcaccaccuacaagggcguguacgagcugcagacccuggagcuggacauggccagccugaacaugugcaugccccugagcugcaccaagaacaacagccaccacuacaucauggugggcaacgagaccggccuggagcugacccugaccaacaccagcaucaucaaccacaaguucugcaaccugagcgacgcccacaagaagaaccuguacgaccacgcccugaugagcaucaucagcaccuuccaccugagcauccccaacuucaaccaguacgaggccaugagcugcgacuucaacggcggcaagaucagcgugcaguacaaccugagccacaccuacgccguggacgccgccaaccacugcggcaccaucgccaacggcgugcugcagaccuucaugagaauggccuggggcggcagcuacaucgcccuggacagcggcaagggcagcugggacugcaucaugaccagcuaccaguaccugaucauccagaacaccaccugggaggaccacugccaguucagcagacccagccccaucggcuaccugggccugcugagccagagaaccagagacaucuacaucagcagaagacugcugggcaccuucaccuggacccugagcgacagcgagggcaacgagacccccggcggcuacugccugaccagauggaugcugaucgaggccgagcugaagugcuucggcaacaccgccguggccaagugcaacgagaagcacgacgaggaguucugcgacaugcugagacuguucgacuucugcaagcaggccaucagaagacugaaggcccccgcccagaugagcauccagcugaucaacaaggccgugaacgcccugaucaacgaccagcugaucaugaagaaccaccugagagacaucaugggcauccccuacugcaacuacagcaaguacugguaccugaaccacaccgugaccggcagaaccagccugcccagaugcuggcuggugagcaacggcagcuaccugaacgagacccacuucagcgacgacaucgagcagcaggccgacaacaugaucaccgagcugcugcagaaggaguacaucgacagacagggcaagaccccccugggccugguggaccuguucguguucagcaccagcuucuaccugaucagcaucuuccugcaccuggugaagauccccacccacagacacaucaucggcaagcccugccccaagccccacagacugaaccacaugggcaucugcagcugcggccuguacaagcaccccggcgugcccgugaaguggaagagaugaggacuagucccuguucccagagcccacuuuuuuuucuuuuuuugaaauaaaauagccugucuuucagaucucaaaggcucuuuucagagccaccaaaaaaaaaaaaaaaaaaaaaaaaaaaaaaaaaaaaaaaaaaaaaaaaaaaaaaaaaaaaaaaaaaaaaaaaaaaaaaaaaaaaaaaaaaaaaaaaaaaaa

SEQ ID NO: 30105 - RNA, 1745 nt, Artificial Sequence
  mRNA product Design a-1 (hSL-A100) comprising derived and/or modified sequence from LASV(LASV254-NIG-2011;Clade II)__AIT17674__GPCmut6 (opt4)
aggagagucccgcagucggcguccagcggcucugcuuguucgugugugugucguugcaggccuuauucaagcuuaccaugggccagaucaucaccuucuuccaggaggugccccacgugaucgaggaggugaugaacaucgugcugaucgcccugagccugcuggccauccugaagggcaucuacaacguggccaccugcggccuguucggccuggugagcuuccugcugcugugcggcagaagcugcagcaccaccuacaagggcguguacgagcugcagacccuggagcuggacaugaccaaccugaacaugugcaugccccugagcugcaccaagaacaacagccaccacuacaucauggugggcaacgagaccggccuggagcugacccugaccaacaccagcaucaucaaccacaaguucugcaaccugagcgacgcccacaagaagaaccuguacaaccacgcccugaugagcaucaucagcaccuuccaccugagcauccccaacuucaaccaguacgaggccaugagcugcgacuucaacggcggcaagaucagcgugcaguacaaccugagccacagcuacgccguggacgccgccaaccacugcggcaccaucgccaacggcgugcugcagaccuucaugagaauggccuggggcggcagcuacaucgcccuggacagcggcaagggcaacugggacugcaucaugaccagcuaccaguaccugaucauccagaacaccaccugggaggaccacugccaguucagcagacccagccccaucggcuaccugggccugcugagccagagaaccagagacaucuacaucagcagaagacugcugggcaccuucaccuggacccugagcgacagcgagggcaacgagacccccggcggcuacugccugaccagauggaugcugaucgaggccgagcugaagugcuucggcaacaccgccguggccaagugcaacgagaagcacgacgaggaguucugcgacaugcugagacuguucgacuucugcaagcaggccaucagaagacugaagacccccgcccaggccaacauccagcugaucaacaaggccgugaacgcccugaucaacgaccagcugaucaugaagaaccaccugagagacaucaugggcauccccuacugcaacuacagcaaguacugguaccugaaccacaccgugaccggcaagaccagccugcccagaugcuggcuggugagcaacggcagcuaccugaacgagacccacuucagcgacgacaucgagcagcaggccgacaacaugaucaccgagcugcugcagaaggaguacauggacagacagggcaagaccccccugggccugguggaccuguucguguucagcaccagcuucuaccugaucagcaucuuccugcaccuggugaagauccccacccacagacacgugaucggcaagcccugccccaagccccacagacugaaccacaugggcaucugcagcugcggccuguacaagcaccccggcgugcccgugaaguggaagagaugaggacuagucccuguucccagagcccacuuuuuuuucuuuuuuugaaauaaaauagccugucuuucagaucucaaaggcucuuuucagagccaccaaaaaaaaaaaaaaaaaaaaaaaaaaaaaaaaaaaaaaaaaaaaaaaaaaaaaaaaaaaaaaaaaaaaaaaaaaaaaaaaaaaaaaaaaaaaaaaaaaaaa

SEQ ID NO: 30106 - RNA, 1745 nt, Artificial Sequence
  mRNA product Design a-1 (hSL-A100) comprising derived and/or modified sequence from LASV(Nig08-A19;Clade III)__ADU56618__GPCmut6 (opt4)
aggagagucccgcagucggcguccagcggcucugcuuguucgugugugugucguugcaggccuuauucaagcuuaccaugggccagaucgugaccuucuuccaggaggugccccacgugaucgaggaggugaugaacaucgugcugaucgcccugagcauccuggccauccugaagggccuguacaacaucgccaccugcggccugaucggccuggugaccuuccugcugcugagcggcagaagcugcagcaugaccuacaagggcguguacgagcugcagacccuggagcugaacaugaacacccugaacaugugcaugccccugagcugcaccaagaacaacagccaccacuacaucauggugggcaacgagaccggccuggagcugacccugaccaacaccagccugcugcaccacaaguucugcaaccugagcgacgcccacaagaagaaccuguacgaccacacccugaugagcaucaucagcaccuuccaccugagcauccccaacuucaaccaguacgaggccaugagcugcgacuucaacggcggcaagaucaccgugcaguacaaccugagccacagcuacgccaucgacgccgccaaccacugcggcaccguggccaacggcgugcugcagaccuucaugagaauggccuggggcggcagcuacaucgcccuggacagcggcagaggcaagugggacugcaucaugaccagcuaccaguaccugaucauccagaacaccaccugggaggaccacugccaguucagcagacccagccccaucggcuaccugggccugcugagccagagaaccagagacaucuacaucagcagaagacugcugggcaccuucaccuggacccugagcgacagcgagggcaacgagacccccggcggcuacugccugaccagauggaugcugaucgaggccgagcugaagugcuucggcaacaccgccguggccaagugcaacgagaagcacgacgaggaguucugcgacaugcugagacuguucgacuucugcaagcaggccaucagaagacugaaggcccccgcccagaugagcauccagcugaucaacaaggccgugaacgcccugaucaacgaccagcugaucaugaagaaccaccugagagacaucaugggcauccccuacugcaacuacagcaaguacugguaccugaaccacaccagcaccggcagaaccagccugcccagaugcuggcuggugagcaacggcagcuaccugaacgagacccacuucagcgacgacaucgagcagcaggccgacaacaugaucaccgagaugcugcagaaggaguaccuggacagacagggcaagaccccccugggccugguggaccuguucguguucagcaccagcuucuaccugaucagcaucuuccugcaccuggugaagauccccacccacagacacaucgugggcaagcccugccccaagccccacagacugaaccacaugggcaucugcagcugcggccuguacaagcagcccggcgugcccgugagauggaagagaugaggacuagucccuguucccagagcccacuuuuuuuucuuuuuuugaaauaaaauagccugucuuucagaucucaaaggcucuuuucagagccaccaaaaaaaaaaaaaaaaaaaaaaaaaaaaaaaaaaaaaaaaaaaaaaaaaaaaaaaaaaaaaaaaaaaaaaaaaaaaaaaaaaaaaaaaaaaaaaaaaaaaa

SEQ ID NO: 30107 - RNA, 1748 nt, Artificial Sequence
  mRNA product Design a-1 (hSL-A100) comprising derived and/or modified sequence from LASV(G1180-SLE-2010;Clade IV)__AIT17168__GPCmut6 (opt4)
aggagagucccgcagucggcguccagcggcucugcuuguucgugugugugucguugcaggccuuauucaagcuuaccaugggccagaucgugaccuucuuccaggaggugccccacgugaucgaggaggugaugaacaucgugcugaucgcccugagcauccuggccgugcugaagggccuguacaacuucgccaccugcggccuggugggccugcugaccuuccugcugcugugcggcagaagcugcaccgccagcagauacaagggcguguacgagcugcagacccuggagcugaacauggagacccugaacaugugcaugccccugagcugcaccaagaacaacagccaccacuacaucauggugggcaacgagaccggccuggagcugacccugaccaacaccagcaucaucaaccacaaguucugcaaccugagcgacgcccacaagaagaaccuguacgaccacgcccugaugagcaucaucagcaccuuccaccugagcauccccaacuucaaccaguacgaggccaugagcugcgacuucaacggcggcaagaucagcgugcaguacaaccugagccacagcuacgccggcgacgccgccaaccacugcggcaccguggccaacggcgugcugcagaccuucaugagaauggccuggggcggcagcuacaucgcccuggacagcggccacggcagcugggacugcaucaugaccagcuaccaguaccugaucauccagaacaccaccugggaggaccacugccaguucagcagacccagccccaucggcuaccugggccugcugagccagagaaccagagacaucuacaucagcagaagacugcugggcaccuucaccuggacccugagcgacagcgagggcaaggacacccccggcggcuacugccugaccagauggaugcugaucgaggccgagcugaagugcuucggcaacaccgccguggccaagugcaacgagaagcacgacgaggaguucugcgacaugcugagacuguucgacuucugcaagcaggccauccagagacugaaggcccccgcccagaugagcauccagcugaucaacaaggccgugaacgcccugaucaacgaccagcugaucaugaagaaccaccugagagacaucaugggcauccccuacugcaacuacagcaaguacugguaccugaaccacaccaccaccggcaagaccagccugcccaagugcuggcuggugagcaacggcagcuaccugaacgagacccacuucagcgacgacaucgagcagcaggccgacaacaugaucaccgagaugcugcagaaggaguacauggagagacagggcaagaccccccugggccugguggaccuguucguguucagcaccagcuucuaccugaucagcaucuuccugcaccuggugaagauccccacccacagacacaucgugggcaagagcugccccaagccccacagacugaaccacaugggcaucugcagcugcggccuguacaagcagcccggcgugcccgugaaguggaagagaugaggacuagucccuguucccagagcccacuuuuuuuucuuuuuuugaaauaaaauagccugucuuucagaucucaaaggcucuuuucagagccaccaaaaaaaaaaaaaaaaaaaaaaaaaaaaaaaaaaaaaaaaaaaaaaaaaaaaaaaaaaaaaaaaaaaaaaaaaaaaaaaaaaaaaaaaaaaaaaaaaaaaa

SEQ ID NO: 30108 - RNA, 1748 nt, Artificial Sequence
  mRNA product Design a-1 (hSL-A100) comprising derived and/or modified sequence from LASV(G1442-SLE-2011;Clade IV)__AIT17180__GPCmut6 (opt4)
aggagagucccgcagucggcguccagcggcucugcuuguucgugugugugucguugcaggccuuauucaagcuuaccaugggccagaucgugaccuucuuccaggaggugccccacgugaucgaggaggugaugaacaucgugcugaucgcccugagcauccuggccgugcugaagggccuguacaacguggccaccugcggccugaucggccuggugaccuuccugcugcugugcggcagaagcugcaccaccacccuguacaagggcguguacgagcugcagacccuggagcugaacauggagacccugaacaugugcaugccccugagcugcaccaagaacaacagccaccacuacaucagagugggcaacgagaccggccuggagcugacccugaccaacaccagcaucaucaaccacaaguucugcaaccugagcgacgcccacaagaagaaccuguacgaccacgcccugaugagcaucaucagcaccuuccaccugagcauccccaacuucaaccaguacgaggccaugagcugcgacuucaacggcggcaagaucagcgugcaguacaaccugagccacagcuacgccggcgacgccgccaaccacugcggcaccguggccaacggcgugcugcagaccuucaugagaauggccuggggcggcagcuacaucgcccuggacagcggcagaggcaacugggacugcaucaugaccagcuaccaguaccugaucauccagaacaccaccugggacgaccacugccaguucagcagacccagccccaucggcuaccugggccugcugagccagagaaccagagacguguacaucagcagaagacugcugggcaccuucaccuggacccugagcgacagcgagggcaaggacacccccggcggcuacugccugaccagauggaugcugaucgaggccgagcugaagugcuucggcaacaccgccguggccaagugcaacgagaagcacgacgaggaguucugcgacaugcugagacuguucgacuucugcaagcaggccauccagagacugaaggcccccgcccagaugagcauccagcugaucaacaaggccgugaacgcccugaucaacgaccagcugaucaugaagaaccaccugagagacaucaugggcauccccuacugcaacuacagcaaguacugguaccugaacaacaccgccaccggcaagaccagccugcccaagugcuggcugaucagcaacggcagcuaccugaacgagacccacuucagcgacgacaucgagcaggaggccgacaacaugaucaccgagaugcugcagaaggaguacauggagagacagggcaagaccccccugggccugguggaccuguucguguucagcaccagcuucuaccugaucagcaucuuccugcaccuggugaagauccccacccacagacacaucgugggcaagagcugccccaagccccacagacugaaccacaugggcaucugcagcugcggccuguacaagcagcccggcgugcccgugagauggaagagaugaggacuagucccuguucccagagcccacuuuuuuuucuuuuuuugaaauaaaauagccugucuuucagaucucaaaggcucuuuucagagccaccaaaaaaaaaaaaaaaaaaaaaaaaaaaaaaaaaaaaaaaaaaaaaaaaaaaaaaaaaaaaaaaaaaaaaaaaaaaaaaaaaaaaaaaaaaaaaaaaaaaaa

SEQ ID NO: 30109 - RNA, 1748 nt, Artificial Sequence
  mRNA product Design a-1 (hSL-A100) comprising derived and/or modified sequence from LASV(G3010-SLE-2013;Clade IV)__AIT17344__GPCmut6 (opt4)
aggagagucccgcagucggcguccagcggcucugcuuguucgugugugugucguugcaggccuuauucaagcuuaccaugggccagaucgugaccuucuuccaggaggugccccacgugaucgaggaggugaugaacaucgugcugaucgcccugagcauccuggccgugcugaagggccuguacaacuucgccaccugcggccuggugggccuggugaccuuccugcugcugugcggcagaagcugcaccaccagccuguacaagggcguguacgagcugcagacccuggagcugaacauggagacccugaacaugugcaugccccugagcugcaccaagaacaacagccaccacuacaucauggugggcaacgagaccggccuggagcugacccugaccaacaccagcaucaucaaccacaaguucugcaaccugagcgacgcccacaagaagaaccuguacaaccacgcccugaugagcaucaucagcaccuuccaccugagcauccccaacuucaaccaguacgaggccaugagcugcgacuucaacggcggcaagaucagcgugcaguacaaccugagccacagcuacgccggcgacgccgccagccacugcggcaccguggccaacggcgugcugcagaccuucaugagaauggccuggggcggcagcuacaucgcccuggacagcggcuacggcaagugggacugcaucaugaccagcuaccaguaccugaucauccagaacaccaccugggaggaccacugccaguucagcagacccagccccaucggcuaccugggccugcugagccagagaaccagagacaucuacaucagcagaagacugcugggcaccuucaccuggacccugagcgacagcgagggcaaggacacccccggcggcuacugccugaccagauggaugcugaucgaggccgagcugaagugcuucggcaacaccgccguggccaagugcaacgagaagcacgacgaggaguucugcgacaugcugagacuguucgacuucugcaagcaggccauccagagacugaagacccccgcccagaugagcauccagcugaucaacaaggccgugaacgcccugaucaacgaccagcugaucaugaagaaccaccugagagacaucaugggcauccccuacugcaacuacagcaaguacugguaccugaaccacaccaccaccggcaagaccagccugcccaagugcuggcuggugagcaacggcagcuaccugaacgagacccacuucagcgacgacaucgagcagcaggccgacaacaugaucaccgagaugcugcagaaggaguacauggagagacagggcaagaccccccugggccugguggaccuguucguguucagcaccagcuucuaccugaucagcaucuuccugcaccuggugaagauccccacccacagacacaucgugggcaagagcugccccaagccccacagacugaaccacaugggcaucugcagcugcggccuguacaagcagcccggcgugcccgugagauggaagagaugaggacuagucccuguucccagagcccacuuuuuuuucuuuuuuugaaauaaaauagccugucuuucagaucucaaaggcucuuuucagagccaccaaaaaaaaaaaaaaaaaaaaaaaaaaaaaaaaaaaaaaaaaaaaaaaaaaaaaaaaaaaaaaaaaaaaaaaaaaaaaaaaaaaaaaaaaaaaaaaaaaaaa

SEQ ID NO: 30110 - RNA, 1748 nt, Artificial Sequence
  mRNA product Design a-1 (hSL-A100) comprising derived and/or modified sequence from LASV(G502-SLE-2009;Clade IV)__AIT17126__GPCmut6 (opt4)
aggagagucccgcagucggcguccagcggcucugcuuguucgugugugugucguugcaggccuuauucaagcuuaccaugggccagaucgugaccuucuuccaggaggugccccacgugaucgaggaggugaugaacaucgugcugaucgcccugagcauccuggccgugcugaagggccuguacaacuucgccaccugcggccuggugggccugcugaccuuccugcugcugugcggcagaagcugcaccaccggccuguacaagggcguguacgagcugcagacccuggagcugaacauggagacccugaacaugugcaugccccugagcugcaccaagaacaacagccaccacuacaucauggugggcaacgagaccggccuggagcugacccugaccaacaccagcaucaucaaccacaaguucugcaaccugagcgacgcccacaagaagaaccuguacgaccacgcccugaugagcaucaucagcaccuuccaccugagcauccccaacuucaaccaguacgaggccaugagcugcgacuucaacggcggcaagaucagcgugcaguacaaccugagccacagcuacgccggcgacgccgccgaccacugcggcaccguggccaacggcgugcugcagaccuucaugagaauggccuggggcggcagcuacaucgcccuggacagcggcagaggcagaugggacugcaucaugaccagcuaccaguaccugaucauccagaacaccaccugggaggaccacugccaguucagcagacccagccccaucggcuaccugggccugcugagccagagaaccagagacaucuacaucagcagaagacugcugggcaccuucaccuggacccugagcgacagcgagggcaaggacacccccggcggcuacugccugaccagauggaugcugaucgaggccgagcugaagugcuucggcaacaccgccguggccaagugcaacgagaagcacgacgaggaguucugcgacaugcugagacuguucgacuucugcaagcaggccauccagagacugaaggcccccgcccagaugagcauccagcugaucaacaaggccgugaacgcccugaucaacgaccagcuggugaugaagaaccaccugagagacaucaugggcauccccuacugcaacuacagcagauacugguaccugaaccacaccaccaccggcagaaccagccugcccaagugcuggcuggugagcaacggcagcuaccugaacgagacccacuucagcgacgacaucgagcagcaggccgacaacaugaucaccgagaugcugcagaaggaguacauggagagacagggcaagaccccccugggccugguggaccuguucguguucagcaccagcuucuaccugaucagcaucuuccugcaccuggugaagauccccacccacagacacaucgugggcaagagcugccccaagccccacagacugaaccacaugggcaucugcagcugcggccuguacaagcagcccggcgugcccgugaaguggaagagaugaggacuagucccuguucccagagcccacuuuuuuuucuuuuuuugaaauaaaauagccugucuuucagaucucaaaggcucuuuucagagccaccaaaaaaaaaaaaaaaaaaaaaaaaaaaaaaaaaaaaaaaaaaaaaaaaaaaaaaaaaaaaaaaaaaaaaaaaaaaaaaaaaaaaaaaaaaaaaaaaaaaaa

SEQ ID NO: 30111 - RNA, 1748 nt, Artificial Sequence
  mRNA product Design a-1 (hSL-A100) comprising derived and/or modified sequence from LASV(G733-SLE-2010;Clade IV)__AIT17154__GPCmut6 (opt4)
aggagagucccgcagucggcguccagcggcucugcuuguucgugugugugucguugcaggccuuauucaagcuuaccaugggccagaucgugaccuucuuccaggaggugccccacgugaucgaggaggugaugaacaucgugcugaucgcccugagcauccuggccgugcugaagggccuguacaacuucgccaccugcggcaucgugggccuggugagcuuccugcugcugugcggcagaagcugcaccaccagccuguacaagggcguguacgagcugcagacccuggagcugaacauggagacccugaacaugugcaugccccugagcugcaccaagaacaacagccaccacuacaucauggugggcaacgagaccggccuggagcugacccugaccaacaccagcaucaucaaccacaaguucugcaaccugagcgacgcccacaagaagaaccuguacgaccacgcccugaugagcaucaucagcaccuuccaccugagcauccccaacuucaaccaguacgaggccaugagcugcgacuucaacggcggcaagaucagcgugcaguacaaccugagccacagcuacgccggcgacgccgccaaccacugcggcaccaucgccaacggcgugcugcagaccuucaugagaauggccuggggcggcagcuacaucgcccuggacagcggcagagacagaugggacugcaucaugaccagcuaccaguaccugaucauccagaacaccaccugggaggaccacugccaguucagcagacccagccccaucggcuaccugggccugcugagccagagaaccagagacaucuacaucagcagaagacugcugggcaccuucaccuggacccugagcgacagcgagggcaaggacacccccggcggcuacugccugaccagauggaugcugaucgaggccgagcugaagugcuucggcaacaccgccguggccaagugcaacgagaagcacgacgaggaguucugcgacaugcugagacuguucgacuucugcaagcaggccauccagagacugaaggcccccgcccagaugagcauccagcugaucaacaaggccgugaacgcccugaucaacgaccagcugaucaugaagaaccaccugagagacaucaugggcauccccuacugcaacuacagcaaguacugguaccugaaccacaccaccaccggcaagaccagccugcccaagugcuggcuggugagcaacggcagcuaccugaacgagacccacuucagcgacgacaucgagcagcaggccgacaacaugaucaccgagaugcugcagaaggaguacauggagagacagggcaagaccccccugggccugguggaccuguucguguucagcaccagcuucuaccugaucagcaucuuccugcaccuggugaagauccccacccacagacacguggugggcaagagcugccccaagccccacagacugaaccacaugggcaucugcagcugcggccuguacggccagcccggcgugcccgugaaguggaagagaugaggacuagucccuguucccagagcccacuuuuuuuucuuuuuuugaaauaaaauagccugucuuucagaucucaaaggcucuuuucagagccaccaaaaaaaaaaaaaaaaaaaaaaaaaaaaaaaaaaaaaaaaaaaaaaaaaaaaaaaaaaaaaaaaaaaaaaaaaaaaaaaaaaaaaaaaaaaaaaaaaaaaa

SEQ ID NO: 30112 - RNA, 1748 nt, Artificial Sequence
  mRNA product Design a-1 (hSL-A100) comprising derived and/or modified sequence from MOPV/LASV reassortant(IGS-1;Clade IV)__AFY05576__GPCmut6 (opt4)
aggagagucccgcagucggcguccagcggcucugcuuguucgugugugugucguugcaggccuuauucaagcuuaccaugggccagaucgugaccuucuuccaggaggugccccacgugaucgaggaggugaugaacaucgugcugaucgcccugagcgugcuggccgugcugaagggccuguacaacuucgccaccugcggccuggugggccuggugaccuuccugcugcugugcggcagaagcugcaccaccagccuguacaagggcguguacgagcugcagacccuggagcugaacauggagacccugaacaugugcaugccccugagcugcaccaagaacaacagccaccacuacaucauggugggcaacgagaccggccuggagcugacccugaccaacaccagcaucaucaaccacaaguucugcaaccugagcgacgcccacaagaagaaccuguacgaccacgcccugaugagcaucaucagcaccuuccaccugagcauccccaacuucaaccaguacgaggccaugagcugcgacuucaacggcggcaagaucagcgugcaguacaaccugagccacagcuacgccggcgacgccgccaaccacugcggcaccguggccaacggcgugcugcagaccuucaugagaauggccuggggcggcagcuacaucgcccuggacagcggcagaggcaacugggacugcaucaugaccagcuaccaguaccugaucauccagaacaccaccugggaggaccacugccaguucagcagacccagccccaucggcuaccugggccugcugagccagagaaccagagacaucuacaucagcagaagacugcugggcaccuucaccuggacccugagcgacagcgagggcgaggacacccccggcggcuacugccugaccagauggaugcugaucgaggccgagcugaagugcuucggcaacaccgccguggccaagugcaacgagaagcacgacgaggaguucugcgacaugcugagacuguucgacuucugcaagcaggccauccagagacugaaggcccccgcccagaugagcauccagcugaucaacaaggccgugaacgcccugaucaacgaccagcugaucaugaagaaccaccugagagacaucaugggcauccccuacugcaacuacagcaaguacugguaccugaaccacaccaccaccggcagaaccagccugcccaagugcuggcuggugagcaacggcagcuaccugaacgagacccacuucagcgacgacaucgagcagcaggccgacaacaugaucaccgagaugcugcagaaggaguacauggagagacagggcaagaccccccugggccugguggaccuguucguguucagcaccagcuucuaccugaucagcaucuuccugcaccuggugaagauccccacccacagacacaucgugggcaagagcugccccaagccccacagacugaaccacaugggcaucugcagcugcggccuguacaagcagcccggcgugcccgugaaguggaagagaugaggacuagucccuguucccagagcccacuuuuuuuucuuuuuuugaaauaaaauagccugucuuucagaucucaaaggcucuuuucagagccaccaaaaaaaaaaaaaaaaaaaaaaaaaaaaaaaaaaaaaaaaaaaaaaaaaaaaaaaaaaaaaaaaaaaaaaaaaaaaaaaaaaaaaaaaaaaaaaaaaaaaa

SEQ ID NO: 30113 - RNA, 1748 nt, Artificial Sequence
  mRNA product Design a-1 (hSL-A100) comprising derived and/or modified sequence from LASV(LM765-SLE-2012;Clade IV)__AIT17814__GPCmut6 (opt4)
aggagagucccgcagucggcguccagcggcucugcuuguucgugugugugucguugcaggccuuauucaagcuuaccaugggccagaucgugaccuucuuccaggaggugccccacgugaucgaggaggugaugaacaucgugcugaucgcccugagcauccuggccgugcugaagggccuguacaacuucgccaccugcggccuggugggccuggugaccuuccugcugcugugcggcagaagcugcaccaccagccuguacaagggcguguacgagcugcagacccuggagcugaacauggagacccugaacaugugcaugccccugagcugcaccaagaacaacagccaccacuacaucauggugggcaacgagaccggccuggagcugacccugaccaacaccagcaucaucgaccacaaguucugcaaccugagcgacgcccacagaaagaaccuguacgaccacgcccugaugagcaucaucagcaccuuccaccugagcauccccaacuucaaccaguacgaggccaugagcugcgacuucaacggcggcaagaucagcgugcaguacaaccugagccacagcuacgccaaggacgccgccgaccacugcggcaccguggccaacggcgugcugcagaccuucaugagaauggccuggggcggcagcuacaucgcccuggacagcggcagaggcagaugggacugcaucaugaccagcuaccaguaccugaucauccagaacaccaccugggaggaccacugccaguucagcagacccagccccaucggcuaccugggccugcugagccagagaaccagagacaucuacaucagcagaagacugcugggcaccuucaccuggacccugagcgacagcgagggcaaggacacccccggcggcuacugccugaccagauggaugcugaucgaggccgagcugaagugcuucggcaacaccgccguggccaagugcaacgagaagcacgacgaggaguucugcgacaugcugagacuguucgacuucugcaagcaggccauccagagacugaaggcccccgcccagaugagcauccagcugaucaacaaggccgugaacgcccugaucaacgaccagcugaucaugaagaaccaccugagagacaucaugggcauccccuacugcaacuacagcaaguacugguaccugaaccacaccaccaccggcaagaccagccugcccaagugcuggcuggugagcaacggcagcuaccugaacgagacccacuucagcgacgacaucgagcagcaggccgacaacaugaucaccgagaugcugcagaaggaguacauggagagacagggcaagaccccccugggccugguggaccuguucguguucagcaccagcuucuaccugaucagcaucuuccugcaccuggugaagauccccacccacagacacaucgugggcaagcccugccccaagccccacagacugaaccacaugggcaucugcagcugcggccuguacaagcagcccggcgugcccgugaaguggaagagaugaggacuagucccuguucccagagcccacuuuuuuuucuuuuuuugaaauaaaauagccugucuuucagaucucaaaggcucuuuucagagccaccaaaaaaaaaaaaaaaaaaaaaaaaaaaaaaaaaaaaaaaaaaaaaaaaaaaaaaaaaaaaaaaaaaaaaaaaaaaaaaaaaaaaaaaaaaaaaaaaaaaaa

SEQ ID NO: 30114 - RNA, 1748 nt, Artificial Sequence
  mRNA product Design a-1 (hSL-A100) comprising derived and/or modified sequence from LASV(LM776-SLE-2012;Clade IV)__AIT17824__GPCmut6 (opt4)
aggagagucccgcagucggcguccagcggcucugcuuguucgugugugugucguugcaggccuuauucaagcuuaccaugggccagaucgugaccuucuuccaggaggugccccacgugaucgaggaggugaugaacaucgugcugaucgcccugagcauccuggccgugcugaagggccuguacaacuucgccaccugcggccuggugggccuggugaccuuccugcugcugugcggcagaagcugcaccaccagcguguacaagggcguguacgagcugcagacccuggagcugaacauggagacccugaacaugugcaugccccugagcugcaccaagaacaacagccaccacuacaucauggugggcaacgagaccggccuggagcugacccugaccaacaccagcaucaucaaccacaaguucugcaaccugagcgacgcccacaagaagaaccuguacgaccacgcccugaugagcaucaucagcaccuuccaccugagcauccccaacuucaaccaguacgaggccaugagcugcgacuucaacggcggcaagaucagcgugcaguacaaccugagccacagcuacgccggcgacgccgccaaccacugcggcaccguggccaacggcgugcugcagaccuucaugagaauggccuggggcggcagcuacaucgcccuggacagcggccacggcaagugggacugcaucaugaccagcuaccaguaccugaucauccagaacaccaccugggaggaccacugccaguucagcagacccagccccaucggcuaccugggccugcugagccagagaaccagagacaucuacaucagcagaagacugcugggcaccuucaccuggacccugagcgacagcgagggcaaggacacccccggcggcuacugccugaccagauggaugcugaucgaggccgagcugaagugcuucggcaacaccgccguggccaagugcaacgagaagcacgacgaggaguucugcgacaugcugagacuguucgacuucugcaagcaggccauccagagacugaaggcccccgcccagaugagcauccagcugaucaacaaggccgugaacgcccugaucaacgaccagcugaucaugaagaaccaccugagagacaucaugggcauccccuacugcaacuacagcaaguacugguaccugaaccacaccaccaccggcaagaccagccugcccaagugcuggcuggugagcaacggcagcuaccugaacgagacccacuucagcgacgacaucgagcagcaggccgacaacaugaucaccgagaugcugcagaaggaguacauggagagacagggcaagaccccccugggccugguggaccuguucguguucagcaccagcuucuaccugaucagcaucuuccugcaccuggugaagauccccacccacagacacaucgugggcaagagcugccccaagccccacagacugaaccacaugggcaucugcagcugcggccuguacaagcagcccggcgugcccgugagauggaagagaugaggacuagucccuguucccagagcccacuuuuuuuucuuuuuuugaaauaaaauagccugucuuucagaucucaaaggcucuuuucagagccaccaaaaaaaaaaaaaaaaaaaaaaaaaaaaaaaaaaaaaaaaaaaaaaaaaaaaaaaaaaaaaaaaaaaaaaaaaaaaaaaaaaaaaaaaaaaaaaaaaaaaa

SEQ ID NO: 30115 - RNA, 1748 nt, Artificial Sequence
  mRNA product Design a-1 (hSL-A100) comprising derived and/or modified sequence from LASV(Mad39;Clade IV)__ANH09722__GPCmut6 (opt4)
aggagagucccgcagucggcguccagcggcucugcuuguucgugugugugucguugcaggccuuauucaagcuuaccaugggccagaucgugaccuucuuccaggaggugccccacgugaucgaggaggugaugaacaucgugcugaucgcccugagcauccuggccgugcugaagggccuguacaacguggccaccugcggccugaucggccuggugaccuuccugcugcugugcggcagaagcugcaccaccacccuguacaagggcguguacgagcugcaggcccuggagcugaacauggagacccugaacaugugcaugccccugagcugcaccaagaacaacagccaccacuacaucagagugggcaacgagaccggccuggagcugacccugaccaacaccagccugaucaaccacaaguucugcaaccugagcgacgcccacaagaagaaccuguacgaccacgcccugaugagcaucaucagcaccuuccaccugagcauccccaacuucaaccaguacgaggccaugagcugcgacuucaacgacggcaagaucagcgugcaguacaaccugagccacaccuacgccggcgacaccgccaaccacugcggcaccguggccaacggcgugcugcagaccuucaugagaauggccuggggcggcagcuacaucgcccuggacagcggcagaggcggcugggacugcaucaugaccagcuaccaguaccugaucauccagaacaccaccugggaggaccacugccaguucagcagacccagccccaucggcuaccugggccugcugagccagagaaccagagacaucuacaucagcagaagacugcugggcaccuucaccuggacccugagcgacagcgagggcaaggacacccccggcggcuacugccugaccagauggaugcugaucgaggccgagcugaagugcuucggcaacaccgccguggccaagugcaacgagaagcacgacgaggaguucugcgacaugcugagacuguucgacuucugcaagcaggccauccagagacugaaggcccccgcccagaugagcauccagcugaucaacaaggccgugaacgcccugaucaacgaccagcugaucaugaagaaccaccugagagacaucaugggcauccccuacugcaacuacagcaaguacugguaccugaaccacaccgugaccggcaagaccagccugcccaagugcuggcuggugagcaacggcagcuaccugaacgagacccacuucagcgacgacaucgagcagcaggccgacaacaugaucaccgagaugcugcagaaggaguacauggagagacagggcaagaccccccugggccugguggaccuguucguguucagcaccagcuucuaccugaucagcaucuuccugcaccuggugaagauccccacccacagacacguggugggcaagcccugccccaagccccacagacugaaccacaugggcaucugcagcugcggcuucuacaagcagcccggcgugcccgugagauggaagagaugaggacuagucccuguucccagagcccacuuuuuuuucuuuuuuugaaauaaaauagccugucuuucagaucucaaaggcucuuuucagagccaccaaaaaaaaaaaaaaaaaaaaaaaaaaaaaaaaaaaaaaaaaaaaaaaaaaaaaaaaaaaaaaaaaaaaaaaaaaaaaaaaaaaaaaaaaaaaaaaaaaaaa

SEQ ID NO: 30116 - RNA, 1748 nt, Artificial Sequence
  mRNA product Design a-1 (hSL-A100) comprising derived and/or modified sequence from LASV(Z0947-SLE-2011;Clade IV)__AIT17840__GPCmut6 (opt4)
aggagagucccgcagucggcguccagcggcucugcuuguucgugugugugucguugcaggccuuauucaagcuuaccaugggccagaucgugaccuucuuccaggaggugccccacgugaucgaggaggugaugaacaucgugcugaucgcccugagcauccuggccgugcugaagggccuguacaacuucgccaccugcggccuggugggccuggugaccuuccugcugcugugcggcagaagcugcaccaucagccuguacaagggcguguacgagcugcagacccuggagcugaacauggagacccugaacaugugcaugccccugagcugcaccaagaacaacagccaccacuacaucauggugggcaacgagaccggccuggagcugacccugaccaacaccagcaucaucaaccacaaguucugcaaccugagcgacgcccacaagaagaaccuguacgaccacgcccugaugagcaucaucagcaccuuccaccugagcauccccaacuucaaccaguacgaggccaugagcugcgacuucaacggcggcaagaucagcgugcaguacaaccugagccacagcuacgccggcgacgccgccaaccacugcggcaccguggccaacggcgugcugcagaccuucaugagaauggccuggggcggcagcuacaucgcccuggacagcggcagagacagaugggacugcaucaugaccagcuaccaguaccugaucauccagaacaccaccugggaggaccacugccaguucagcagacccagccccaucggcuaccugggccugcugagccagagaaccagagacaucuacaucagcagaagacugcugggcaccuucaccuggacccugagcgacagcgagggcaaggacacccccggcggcuacugccugaccagauggaugcugaucgaggccgagcugaagugcuucggcaacaccgccguggccaagugcaacgagaagcacgacgaggaguucugcgacaugcugagacuguucgacuucugcaagcaggccauccagagacugaaggcccccgcccagaugagcauccagcugaucaacaaggccgugaacgcccugaucaacgaccagcugaucaugaagaaccaccugagagacaucaugggcauccccuacugcaacuacagcaaguacugguaccugaaccacaccaccaccggcaagaccagccugcccaagugcuggcuggugagcaacggcagcuaccugaacgagacccacuucagcgacgacaucgagcagcaggccgacaacaugaucaccgagaugcugcagaaggaguacauggagagacagggcaagaccccccugggccugguggaccuguucguguucagcaccagcuucuaccugaucagcaucuuccugcaccuggugaagauccccacccacagacacaucgugggcaagcccugccccaagccccacagacugaaccacaugggcaucugcagcugcggccuguacaagcagcccggcgugcccgugaaguggaagagaugaggacuagucccuguucccagagcccacuuuuuuuucuuuuuuugaaauaaaauagccugucuuucagaucucaaaggcucuuuucagagccaccaaaaaaaaaaaaaaaaaaaaaaaaaaaaaaaaaaaaaaaaaaaaaaaaaaaaaaaaaaaaaaaaaaaaaaaaaaaaaaaaaaaaaaaaaaaaaaaaaaaaa

SEQ ID NO: 30117 - RNA, 1748 nt, Artificial Sequence
  mRNA product Design a-1 (hSL-A100) comprising derived and/or modified sequence from LASV(Josiah;Clade IV)__NP_694870__GPCmut6 (opt5)
aggagagucccgcagucggcguccagcggcucugcuuguucgugugugugucguugcaggccuuauucaagcuuaccaugggccagaucgugaccuucuuucaagaggucccccacguuauugaagaggugaugaacaucgugcugauugcccucagcguccuggcugugcuuaaggggcuguacaauuucgccacaugcggacucguuggccuggugacguuucuucugcucugugggagauccugcaccacaucucuguauaaaggagucuacgaacugcagacccucgagcugaacauggaaacacuuaauauguguaugccucugagcugcaccaagaacaauucccaucacuauaucauggugggcaacgagacagggcucgagcugacccuuacgaauaccucuauuaucaaccauaaauucuguaaucugagcgacgcgcacaagaaaaaccucuacgaucaugcucugauguccaucauuucuacauuucaccugagcaucccgaauuucaaccaguaugaagccauguccugcgacuuuaauggaggcaagauuagcguucaguacaaccucucucacuccuaugccggcgaugcugccaaucauugugggaccguggcuaacggaguccugcaaacauucaugcggauggccuggggcgggagcuacaucgcgcuugacucuggacgcggcaacugggauugcauuaugaccuccuaccaguaucugaucauucagaauacgacaugggaggaccacugucaguuuagcagacccucuccuaucggguaccucggacugcuuucccaacggacccgcgauaucuauauuagcagacggcugcucggcacauucaccuggacccuguccgacucugaaggcaaggauacacccgggggauacugccugacgcgcuggaugcucaucgaggccgagcugaaauguuuuggcaacaccgcuguggccaagugcaaugaaaaacaugacgaggaguucugcgauaugcuuagacuguuugacuucuguaagcaggcuauucagcggcucaaagccccugcgcagaugagcauccaacugauuaacaaggccgugaaugcucuuaucaacgaucagcugaucaugaagaaucaccuccgcgacauuauggggauccccuauugcaacuacuccaaauauugguaccugaaucacacaaccacaggaagaaccagccugccuaaguguuggcucgucucuaacggcuccuaccugaaugaaacgcauuucagcgacgauauugaacagcaagccgacaacaugaucacagagaugcuucagaaagaguauauggaacggcaggggaagaccccgcugggacucguugaucuguuuguguucucuaccagcuuuuaccugauuuccaucuuccuucaccucgugaaaauccccacacaucgccacauugucggcaagucuugcccuaaaccccauagacugaaucacaugggcaucuguagcugcgggcuguauaagcagccuggagugcccguuaaguggaaacggugaggacuagucccuguucccagagcccacuuuuuuuucuuuuuuugaaauaaaauagccugucuuucagaucucaaaggcucuuuucagagccaccaaaaaaaaaaaaaaaaaaaaaaaaaaaaaaaaaaaaaaaaaaaaaaaaaaaaaaaaaaaaaaaaaaaaaaaaaaaaaaaaaaaaaaaaaaaaaaaaaaaaa

SEQ ID NO: 30118 - RNA, 1745 nt, Artificial Sequence
  mRNA product Design a-1 (hSL-A100) comprising derived and/or modified sequence from LASV(LP;Clade I)__AAF86701__GPCmut6 (opt5)
aggagagucccgcagucggcguccagcggcucugcuuguucgugugugugucguugcaggccuuauucaagcuuaccaugggccagaucauuaccuucuuucaagaggugccccacgucaucgaagagguuaugaacauugugcugaucgcccucagccugcuugcuauucugaaggggcucuacaauaucgccacaugcggaaucauuggccugguggcguuccuuuuucugugugggaaauccugcucucucacgcugaagggaggcuaugaacugcagacccucgagcugaacauggaaacacuuaauauguguaugccucugagcugcaccaaaaacuccucucaucacuacaucagagucgggaaugagacaggacucgagcugacccuuacaaacaccagcauuaucaaucauaaguucuguaaccuguccgacgcucacaaaaagaaucucuaugaucaugcccugaugucuauuaucagcacguuucaccuguccauuccgaacuucaaucaguacgaagccaugagcugcgacuuuaacggcggcaagaucucugugcaguauaaucucucccacagcuacgcuggggaugccgcugagcauuguggaaccguugccaacggcgugcugcaaacauucaugcggauggcguggggagggcgcuauaucgcccuugacucuggcaaagggaauugggauugcauuaugaccuccuaccaguaccugaucauucagaacacaaccugggaagaccacugucaguuuagcagacccucuccuaucggauaucucggccugcuuucccaacggacgcgcgauauuuacaucagcagacggcugcucggcacauucaccuggacacuguccgacucugaggggaacgagacccccggaggcuauugccugacccgcuggaugcucaucgaagcugagcugaaguguuuugggaauacagccgucgcuaaaugcaacgaaaagcaugaugaggaguucugcgacaugcuuagacuguuugauuucuguaaacaggccauucggcgccucaaggcgccugcccagaugagcauccagcugauuaauaaggcugugaacgcccuuaucaaugaccaacugauuaugaaaaaccaccucagagauaucaugggaauccccuacugcaauuauuccaaguacugguaucugaaccacacgagcucuggccggaccucccugccuaaauguuggcucauuagcaaugggucuuaccugaacgaaacacaguucagcgacgacaucgagcagcaagcugauaauaugauuaccgaaaugcuucagaaggaguacaucgaacgccagggaaaaacaccgcugggccucguugacauuuuuaucuucuccaccucuuuuuaucugauuagcaucuuccugcaucuuaucaagauucccacgcacagacauaucgugggcaaaccuugccccaagccucaccggcucaaccauaugggggucuguuccugcggacuguacaagcaccccggcgugccgacaaaauggaagcgcugaggacuagucccuguucccagagcccacuuuuuuuucuuuuuuugaaauaaaauagccugucuuucagaucucaaaggcucuuuucagagccaccaaaaaaaaaaaaaaaaaaaaaaaaaaaaaaaaaaaaaaaaaaaaaaaaaaaaaaaaaaaaaaaaaaaaaaaaaaaaaaaaaaaaaaaaaaaaaaaaaaaaa

SEQ ID NO: 30119 - RNA, 1745 nt, Artificial Sequence
  mRNA product Design a-1 (hSL-A100) comprising derived and/or modified sequence from LASV(803213;Clade II)__AAF86703__GPCmut6 (opt5)
aggagagucccgcagucggcguccagcggcucugcuuguucgugugugugucguugcaggccuuauucaagcuuaccaugggccagaucauuaccuucuuucaagaggugccccacgucaucgaagagguuaugaacauugugcugaucgcccucagccugcuugcuauucugaaggggaucuacaauguggccacaugcggacucuucggccugaucuccuuucuucugcucugugggagaucuugcagcgucacguauaaaggaguguacgaacugcagacccuggagcucaacauggcgaaucugaacauguguaugccucuuuccugcacaaagaauaacucucaucacuauauuaugguuggcaaugaaaccgggcuggagcucacacugaccaacacaagcaucauuaaucauaaauucuguaaccuuuccgacgcucacaagaaaaaucuguacgaucaugcccucaugucuaucauuagcaccuuucaccuguccaucccgaacuucaaucaguaugaggccaugagcugcgacuuuaacggaggcaagauuucugugcaguacaaucugucccacagcuucgcugucgaugccgcuaaccauuguggcacgaucgccaacggggugcuccaaaccuuuaugcggauggcguggggaggcucuuauaucgcccuggacuccgggaagggaaauugggauugcauuaugacaagcuaccaguaccuuaucauucagaacaccacaugggaagaccacugucaguucucucgccccuccccuaucggcuaucuggggcuccugagccaaagaacccgggauauuuacaucucccgcagacuucugggaacguuuacauggacccucucugacagcgagggcaaugaagcucccggcggguauugccugacacgguggaugcugaucgaggccgagcucaaauguuucggaaacaccgcuguugccaagugcaaugaaaaacaugaugaggaauuuugcgacaugcugcgccuuuucgauuucuguaagcaggcgauuaaaagacugaagaccccugcccagauguccauccagcucauuaacaaggcugugaaugcccugaucaacgaccaacuuauuaugaaaaaucaucugcgggauaucaugggcauccccuacugcaacuauagccgcuacugguaucucaaucacacagucacggggaagaccucucugccuagauguuggcugguguccaacggaagcuaccucaaugagacacacuuuucugacgacauugaacagcaggcugauaacaugaucaccgagaugcugcaaaaagaguacauggaccggcagggcaagacaccgcuugggcugguggaucucuucgucuuuagcaccuccuucuaucugauuucuaucuuucugcaccuuguuaaaauucccacgcaucgccacaucgugggaaagccuugccccaaaccucauagacucaaucacaugggcauuuguagcugcggccuguacaagcaccccggggugccggucaaguggaaacggugaggacuagucccuguucccagagcccacuuuuuuuucuuuuuuugaaauaaaauagccugucuuucagaucucaaaggcucuuuucagagccaccaaaaaaaaaaaaaaaaaaaaaaaaaaaaaaaaaaaaaaaaaaaaaaaaaaaaaaaaaaaaaaaaaaaaaaaaaaaaaaaaaaaaaaaaaaaaaaaaaaaaa

SEQ ID NO: 30120 - RNA, 1745 nt, Artificial Sequence
  mRNA product Design a-1 (hSL-A100) comprising derived and/or modified sequence from LASV(GA391;Clade III)__CAA36645__GPCmut6 (opt5)
aggagagucccgcagucggcguccagcggcucugcuuguucgugugugugucguugcaggccuuauucaagcuuaccaugggccagaucgugaccuucuuucaagaggucccccacguuauugaagaggugaugaacaucgugcugauugcccucagcauccuggcuauucuuaaggggcuguacaaugucgccacaugcggacucaucggccuggugacguuccuucugcucuccgggagaucuuguagccugaucuauaaaggaaccuacgaacugcagacacucgagcugaacauggaaacccuuaauaugugcaugccucuguccuguacaaagaacaauucucaucacuauauucggguuggcaacgagaccgggcucgagcugacacuuaccaauacgagcauccugaaccauaaauuuugcaaucucuccgacgcgcacaagcgcaaccuguacgaucauucucugaugagcauuaucuccaccuuccaccucagcauuccgaauuuuaaccaguaugaagcuaugucuugugacuucaauggaggcaaaaucacagugcaguacaaccugucccacagcuuugccgucgaugccgcuggccauugcgggacccuugccaauggagugcugcaaacauucaugagaauggcuuggggcgggucuuauauugcccucgacuccggacggggcaacugggauuguaucaugaccagcuaccaguaccugaucauucagaacacgacaugggacgaucacugccaguuuucucgccccuccccuaucggguaucuuggacugcucagccaaagaacccgggacauuuacaucucccgcagacugcugggcacauucaccuggacccucucugauagcgagggcaaugaaacacccgggggauauugucugacgcgguggaugcuuauugaggcggagcugaagugcuuuggcaacaccgccguugcuaaguguaaugaaaaacaugacgaggaguucugcgauaugcuccgccuguuugacuucugcaagcaggccaucagacggcuuaaaaccccugcucagauguccauccagcugauuaacaaggccgugaaugcgcucaucaacgaucaacugauuaugaaaaaucaucugcgcgacaucauggggauucccuacuguaacuauagcagauacugguaucucaaucacacaucuacaggaaagaccucccugccucggugcuggcuuaucagcaacggcucuuaccugaaugaaacgaaguucagcgacgauaucgaacagcaggccgacaacaugauuacagagaugcuccaaaaagaguacaucgaucgccaggggaagaccccgcugggacuggucgaccuuuuuguguucuccaccucuuuuuaucucauuagcaucuuccugcaccuggugaaaauucccacacacagacauaucgucggcaagccuugucccaaaccucaccggcucaaucauaugggcauuugcuccugugggcuguacaagcagcccggaguuccggugagauggaaacgcugaggacuagucccuguucccagagcccacuuuuuuuucuuuuuuugaaauaaaauagccugucuuucagaucucaaaggcucuuuucagagccaccaaaaaaaaaaaaaaaaaaaaaaaaaaaaaaaaaaaaaaaaaaaaaaaaaaaaaaaaaaaaaaaaaaaaaaaaaaaaaaaaaaaaaaaaaaaaaaaaaaaaa

SEQ ID NO: 30121 - RNA, 1748 nt, Artificial Sequence
  mRNA product Design a-1 (hSL-A100) comprising derived and/or modified sequence from LASV(AV;Clade V)__CCA30314__GPCmut6 (opt5)
aggagagucccgcagucggcguccagcggcucugcuuguucgugugugugucguugcaggccuuauucaagcuuaccaugggccagaucgugaccuucuuucaagaggucccccacguuauugaagaggugaugaacaucgugcugauugcccucagcauccuggcuguccuuaaggggcuguacaauauugccacaugcggacucaucggccugaucacguuccuucugcucugugggagauccugcucuagcaaccuguauaaaggaguguacgaacugcagucccucgaccugaauauggagacccuuaacauguguaugccucugucuugcacaaagaauaacagccaucacuauauucggguuggcaaugauaccgggcucgaacugacacuuaccaacacauccauccugaaucauaaauuuuguaaccucucugacgcgcacaagaaagaucuguacgaccaugcucugaugagcauuaucuccaccuuccaccucagcauuccgaauuuuaaccaguaugaggccaugucuugcgauuucaauggaggcaagaucuccgugcaguacaaccugagccacucuuaugccauugacgcugccaaucauuguggcacggucgcuaacgggauccuucaaaccuuuaugcgcauggccuggggaggcuccuacaucgcgcuggauagcgggagaggaaacugggacugcauuaugacaucuuaccaguaucucaucauucagaauaccacaugggagaaccacugucaguucucccggcccagcccuaucggcuaccuggggcuucugucccaacgcaccagagauauuuauaucucucggcgccuccugggaacguuuacauggacccugagcgacuccgaaggcaaugccacacccggcggguacugccucaccagauggaugcugaucgaggcugaacuuaaguguuucggaaacaccgccguggcuaaaugcaaugagaagcaugaugaggaauuuugcgacaugcugcgccucuucgauuuuuguaaacaggccauuagccggcugaagucuccugcgcagauguccauccagcuuauuaacaaagccguuaaugcucugaucaacgaccaacucauuaugaagaaucaccugagagacaucaugggcauccccuauugcaacuacagcaaguauugguaccugaaucacacaauuacggggaaaaccucucucccuaaguguuggcuggugagcaacggauccuaccuuaaugagacacauuucucugaugacaucgaacagcaggccgauaacaugauuaccgagaugcugcaaaaagaauauauggagcggcagggcaagacaccgcucgggcuggucgaccuguucguguuuagcaccuccuucuaccuuaucagcauuuuucuccgccuggugaaaauccccacgcacagacauauugucggaaagccuugccccaaaccucaccggcugaaucauaugggcaucuguucuugcggccucuauaagcagcccgggguuccggugcgcuggaagagaugaggacuagucccuguucccagagcccacuuuuuuuucuuuuuuugaaauaaaauagccugucuuucagaucucaaaggcucuuuucagagccaccaaaaaaaaaaaaaaaaaaaaaaaaaaaaaaaaaaaaaaaaaaaaaaaaaaaaaaaaaaaaaaaaaaaaaaaaaaaaaaaaaaaaaaaaaaaaaaaaaaaaa

SEQ ID NO: 30122 - RNA, 1745 nt, Artificial Sequence
  mRNA product Design a-1 (hSL-A100) comprising derived and/or modified sequence from LASV(Togo/2016/7082;Clade VI)__AMR44577__GPCmut6 (opt5)
aggagagucccgcagucggcguccagcggcucugcuuguucgugugugugucguugcaggccuuauucaagcuuaccaugggccagaucauuaccuucuuucaagaggugccccacgucaucgaagagguuaugaacauugugcugaucgcccucagccugcuugcuauucugaaggggguguacaaugucgccacaugcggaaucaucggccucgugacguuccuguuucuuugugggagauccugcucucugauuuauaaaggaagcuacgaacuccagacccuggagcugaacauggaaacacucaauauguguaugccucuguccugcaccaagaacucuagccaucacuauauccggguuggcaaugagacagggcuugagcugacccucacaaacaccuccauuaucaaucauaaauucuguaaccugucugacgcgcacaagcgcaaucuuuacgaucaugcucugaugagcauucucuccacguuucaccugagcaucccgaacuucaaucaguaugaagccaugucuugcgacuuuaacggaggcaaaauuuccgugcaguacaaucugagccacgccuaugcugucgaugccgcugagcauuguggcaccguggccaacgggguucuccaaacauucaugagaauggcguggggaggcucuuacaucgcccuggacuccgggcggggaaauugggauugcaucaugaccagcuaccaguaucuuauuauccagaacacaaccugggaagaccacugucaguuuucucgccccuccccuauuggcuaccuggggcuccugagccaaagaacgcgggauaucuauauuucccgcagacuucugggaacauucaccuggacacucucugacagcgagggcaacgagacccccggcggguacugccugacccgguggaugcugaucgaagcugagcucaaguguuuuggaaauacagccguggcuaagugcaacgaaaaacaugaugaggaguucugcgacaugcugcgccuuuuugauuucuguaagcaggccauccagagacugaaauccccugcgcagaugagcauucaacucaucaauaaggccgucaacgcucugauuaaugaccagcuuaucaugaaaaaccaucugcgggauaugaugggcauucccuauugcaauuacucuaaguauugguaccucaaccacacguccagcgggcgcaccucucugccuaaguguuggcuggugagcaauggauccuaccucaacgaaacacacuucucugacgacaucgagcagcaagccgauaauaugaucaccgaaaugcugcagaaagaguauauugacagacagggcaagacaccgcuugggcugguggaucucuuugucuucagcaccuccuuuuaccugaucagcauuuuccugcaccuuaucaaaauucccacgcaucggcacaucguuggaaagccuugccccaaaccucaucgccucaaccacaugggcauuuguucuugcggccuguauaagcagcccggggugccgacaagauggaaacggugaggacuagucccuguucccagagcccacuuuuuuuucuuuuuuugaaauaaaauagccugucuuucagaucucaaaggcucuuuucagagccaccaaaaaaaaaaaaaaaaaaaaaaaaaaaaaaaaaaaaaaaaaaaaaaaaaaaaaaaaaaaaaaaaaaaaaaaaaaaaaaaaaaaaaaaaaaaaaaaaaaaaa

SEQ ID NO: 30123 - RNA, 1745 nt, Artificial Sequence
  mRNA product Design a-1 (hSL-A100) comprising derived and/or modified sequence from LASV(KAK-428;Clade n.d. (VII))__ANH09740__GPCmut6 (opt5)
aggagagucccgcagucggcguccagcggcucugcuuguucgugugugugucguugcaggccuuauucaagcuuaccaugggccagaucgugaccuucuuucaagaggucccccacguuauugaagaggugaugaacaucgugcugauugcccucagccugcuugcuauccugaaggggcucuacaauuucgccacaugcggagucauuggccugaucacguuucuucugcucugugggagauccugcucugcgaccuauaaaggacaguacgaacugcagacacuggagcucaacauggaaagccugaauauguguaugccucuuuccugcaccaagaacaauucucaucacuauauccgggcuggcaacaauacagggcuggagcucacccugacaaacaccagcauuaucucccauaaauucuguaaucuuucugacgcccacaagaaaaaccuguacgaucauacgcucaugagcauuaucaccacauuucaccuguccauuccgaauuucaaccaguaugaggccaugagcugcgacuuuaauggaggcaagaucucuauucaauacaaccugucccacagcuaugcuggcgaugccgcucagcauugugggaccguggccaauggaguucuccagacauucaugcgcauggcguggggcgggucuuaccuggcccuugacuccggaagacggggcugggauugcaucaucagcucuuaccaguaucugauuauccaaaacaccacgugggacgaucacugucaguuuucccgccccagcccuauuggguaccucggauucgugucccagaagacaagagacaucuauauuucucggcgccugcuuggcaccuuuacauggacccugagcgauuccgaaggccaugacaugcccgggggauacugccucaccagauggaugcugaucgaggcugaucugaaauguuucggcaacacagccgucgcuaagugcaaugaaaaacacgacgaggaguuuugcgauauguggcgccucuucgacuucuguaagcaggccauccaacggcugaaagcgccugcccagaugaacauucagcuuaucaauaaggcugugaacgcccugauuaaugaccaacucaugaugaagaaccaccugagagauaucauggggauucccuauugcaauuacagcaaauuuugguaucuuaacaauacgaccacaggacggaccucucugccucgcuguuggcucaucuccaacggcagcuaccugaaugaaacacauuucucugacgauaucgagcagcaggcugacaacaugauuaccgaaaugcugcagaaggaguacauggauagacaagggaaaacgccgcucggacugguugaccuuuuuguguucagcacauccuuuuaucugaucaccauuuuccuccaccuggucaagauccccacccaucggcacauugugggcaaaccuugccccaagccucaucgccugaaucacaugggcaucuguucuugcgggcuuuacaaacagcccggagugccggucagauggaagcggugaggacuagucccuguucccagagcccacuuuuuuuucuuuuuuugaaauaaaauagccugucuuucagaucucaaaggcucuuuucagagccaccaaaaaaaaaaaaaaaaaaaaaaaaaaaaaaaaaaaaaaaaaaaaaaaaaaaaaaaaaaaaaaaaaaaaaaaaaaaaaaaaaaaaaaaaaaaaaaaaaaaaa

SEQ ID NO: 30124 - RNA, 1745 nt, Artificial Sequence; identical to SEQ ID NO: 30118
  mRNA product Design a-1 (hSL-A100) comprising derived and/or modified sequence from LASV(Pinneo-NIG-1969;Clade I)__AIT17836__GPCmut6 (opt5)

SEQ ID NO: 30125 - RNA, 1745 nt, Artificial Sequence
  mRNA product Design a-1 (hSL-A100) comprising derived and/or modified sequence from LASV(ISTH0009-NIG-2011;Clade II)__AIT17404__GPCmut6 (opt5)
aggagagucccgcagucggcguccagcggcucugcuuguucgugugugugucguugcaggccuuauucaagcuuaccaugggccagaucauuaccuucuuucaagaggugccccacgucaucgaagagguuaugaacauugugcugaucgcccucagccugcuugcuauucugaaggggaucuacaauguggccacaugcggacucuucggccuggucuccuuucuucugcucugugggagaucuugcagcacgaccuauaaaggaguguacgaacugcagacacuggagcucgacauggcgucccugaacauguguaugccucuuucuugcaccaagaauaacagccaucacuauaucaugguuggcaaugaaacagggcuggagcucacccugacaaacaccuccauuaucaaucauaaauucuguaaccuuucugaugcucacaagaaaaaucuguacgaccaugcccucaugagcauuaucuccacguuucaccugagcauuccgaacuucaaucaguaugaggccaugucuugcgauuuuaacggaggcaagaucuccgugcaguacaaucugagccacgcuuaugccgucgacgcugccaaccauuguggcaccauugcgaauggggugcuccaaacauucaugcggauggccuggggaggcucuuacaucgcucuggauuccgggaagggaagcugggacugcaucaugaccucuuaccaguaucuuauuauccagaacacaaccugggaagaucacugucaguuuucccgccccagcccuauuggcuaccuggggcuccugucccaaagaacgcgggacaucuauauuucucgcagacuucugggaacauucaccuggacacucagcgauuccgagggcaacgaaacccccggcggguacugccugacccgguggaugcugaucgaggccgagcucaaauguuuuggaaauacagcuguugccaagugcaacgaaaaacaugacgaggaguucugcgauaugcugcgccuuuuugacuucuguaagcaggcgaucagacggcugaaaacgccugcccagaugagcauucagcucaucaauaaggcugugaacgcccugauuaaugaucaacuuaucaugaagaaccaucugcgcgacauuaugggcauccccuauugcaauuacucuaaauauugguaccucaaccacaccgucacagggaagaccucccugccuagauguuggcuggugagcaauggaucuuaccucaacgaaacacacuucagcgacgauaucgaacagcaggcugacaauaugauuaccgagcugcuucaaaaagaguauauggaucggcagggcaagacgccgcuggggcucguggaccuguuugucuucuccacaucuuuuuaccugaucagcauuuuccuucaccucaucaaaauucccacccaucgccacaucaccggaaagccuugccccaaaccucauagacugaaccacaugggcauuuguuccugcggccuguauaagcaccccgggguuccggugaaguggaaacggugaggacuagucccuguucccagagcccacuuuuuuuucuuuuuuugaaauaaaauagccugucuuucagaucucaaaggcucuuuucagagccaccaaaaaaaaaaaaaaaaaaaaaaaaaaaaaaaaaaaaaaaaaaaaaaaaaaaaaaaaaaaaaaaaaaaaaaaaaaaaaaaaaaaaaaaaaaaaaaaaaaaaa

SEQ ID NO: 30126 - RNA, 1745 nt, Artificial Sequence
  mRNA product Design a-1 (hSL-A100) comprising derived and/or modified sequence from LASV(ISTH2010-NIG-2012;Clade II)__AIT17482__GPCmut6 (opt5)
aggagagucccgcagucggcguccagcggcucugcuuguucgugugugugucguugcaggccuuauucaagcuuaccaugggccagaucauuaccuucuuucaagaggugccccacgucaucgaagagguuaugaacauugugcugaucgcccucagccugcuugcuauucugaaggggaucuacaauguggccacaugcggacucuucggccuggucuccuuucuucugcucugugggagaucuugcagcacgaccuauaaaggaguguacgaacugcagacacuggagcucgacauggcgucccugaacauguguaugccucuuucuugcaccaagaauaacagccaucacuauaucaugguuggcaaugaaacagggcuggagcucacccugacaaacaccuccauuaucaaucauaaauucuguaaccuuucugaugcucacaagaaaaaucuguacgaccaugcccucaugagcauuaucuccacguuucaccugagcauuccgaacuucaaucaguaugaggccaugucuugcgauuuuaacggaggcaagaucuccgugcaguacaaucugagccacgcuuaugccgucgacgcugccaaccauuguggcaccauugcgaauggggugcuccaaacauucaugcggauggccuggggaggcucuuacaucgcucuggauuccgggaagggaagcugggacugcaucaugaccucuuaccaguaucuuauuauccagaacauuacaugggaagaucacugucaguuuucccgccccagcccuaucggcuaccuggggcuccugucccaaagaacccgggacauuuauaucucucgcagacuucugggaacguucacauggacccucagcgauuccgagggcaacgaaacacccggcggguacugccugacccgguggaugcugaucgaggccgagcucaaauguuuuggaaauaccgcuguugccaagugcaacgaaaaacaugacgaggaguucugcgauaugcugcgccuuuuugacuucuguaagcaggcgauuagacggcugaaaacgccugcccagaugagcauccagcucauuaauaaggcugugaacgcccugaucaaugaucaacuuauuaugaagaaccaucugcgcgacaucaugggcauccccuauugcaauuacucuaaauauugguaccucaaccacacagucaccgggaagacaucccugccuagauguuggcuggugagcaauggaucuuaccucaacgaaacccacuucagcgacgauauugaacagcaggcugacaauaugaucacagagcugcuucaaaaagaguauauugaucggcagggcaagaccccgcuggggcucguggaccuguuugucuucuccacgucuuuuuaccugaucagcauuuuccuucaccucguuaaaauccccacacaucgccacguggugggaaagccuugccccaaaccucauagacugaaccacaugggcauuuguuccugcggccuguauaagcaccccggggucccggugaaguggaaacggugaggacuagucccuguucccagagcccacuuuuuuuucuuuuuuugaaauaaaauagccugucuuucagaucucaaaggcucuuuucagagccaccaaaaaaaaaaaaaaaaaaaaaaaaaaaaaaaaaaaaaaaaaaaaaaaaaaaaaaaaaaaaaaaaaaaaaaaaaaaaaaaaaaaaaaaaaaaaaaaaaaaaa

SEQ ID NO: 30127 - RNA, 1745 nt, Artificial Sequence
  mRNA product Design a-1 (hSL-A100) comprising derived and/or modified sequence from LASV(Lassa virus/H.sapiens-wt/NGA/2015/ISTH_0543;Clade II)__AVO03639__GPCmut6 (opt5)
aggagagucccgcagucggcguccagcggcucugcuuguucgugugugugucguugcaggccuuauucaagcuuaccaugggccagaucauuaccuucuuucaagaggugccccacgucaucgaagagguuaugaacauugugcugaucgcccucagccugcuugcuauucugaaggggaucuacaauguggccacaugcggacucuucggccuggucuccuuucuucugcucugugggagaucuugcagcacgaccuauaaaggaguguacgaacugcagacacuggagcucgacauggcgaaccugaauauguguaugccucuuuccugcaccaagaacaauucucaucacuauaucaugguuggcaacgaaacagggcuggagcucacccugacaaauaccagcauuaucaaccauaaauucuguaaucuuuccgaugcucacaagaaaaaccuguacgaccaugcccucaugucuauuaucagcacguuucaccuguccauuccgaauuucaaccaguaugaggccaugagcugcgauuuuaauggaggcaagaucucugugcaguacaaccugucccacaccuaugcugucgacgccgcuaaucauuguggcacaauugccaacggggugcuccaaaccuucaugcggauggcguggggaggcagcuacaucgcccuggauucugggaagggauccugggacugcaucaugacaagcuaccaguaucuuguuauucagaacaccacgugggaagaucacugucaguuuucucgccccuccccuaucggcuaccuggggcuccugagccaaagaacacgggacauuuauaucucccgcagacuucugggaaccuucacauggacccucucugauagcgagggcaaugaaacccccggcggguacugccugacacgguggaugcugauugaggcugagcucaaauguuuuggaaacacggccguggcuaagugcaaugaaaaacaugacgaggaguucugcgauaugcugcgccuuuuugacuucuguaagcaggccaucagacggcugaaaaccccugcgcagauguccauccagcucauuaacaaggccgucaaugcucugaucaacgaucaacuuauuaugaagaaucaucugcgcgacaucaugggcauucccuauugcaacuacagcaaauauugguaccucaaucacacagugaccgggaagacaucucugccuagauguuggcugguguccaacggaagcuaccucaaugaaacccacuucucugacgauaucgaacagcaggccgacaacaugaucacggagcugcuucaaaaagaguauauugaucggcagggcaagacaccgcuggggcucgucgaccuguuuguuuucagcaccuccuuuuaccugaucucuauuuuccuucaccucgugaaaauccccacccaucgccacauuacaggaaagccuugccccaaaccucauagacugaaucacaugggcaucuguagcugcggccuguauaagcaccccggggugccggucaaguggaaacggugaggacuagucccuguucccagagcccacuuuuuuuucuuuuuuugaaauaaaauagccugucuuucagaucucaaaggcucuuuucagagccaccaaaaaaaaaaaaaaaaaaaaaaaaaaaaaaaaaaaaaaaaaaaaaaaaaaaaaaaaaaaaaaaaaaaaaaaaaaaaaaaaaaaaaaaaaaaaaaaaaaaaa

SEQ ID NO: 30128 - RNA, 1745 nt, Artificial Sequence
  mRNA product Design a-1 (hSL-A100) comprising derived and/or modified sequence from LASV(Lassa virus/H.sapiens-wt/NGA/2016/ISTH_0009;Clade II)__AVO03571__GPCmut6 (opt5)
aggagagucccgcagucggcguccagcggcucugcuuguucgugugugugucguugcaggccuuauucaagcuuaccaugggccagaucauuaccuucuuucaagaggugccccacgucaucgaagagguuaugaacauugugcugaucgcccucagccugcuugcuauucugaaggggaucuacaauguggccacaugcggacuccugggccuugucuccuuccugcuccugugugggagaucuugcagcacgaccuauaaaggaguguacgaacugcagacacucgagcuggacauggcgucccuuaacauguguaugccucugucuugcaccaagaauaacagccaucacuauaucaugguuggcaaugaaacagggcucgagcugacccuuacaaacaccuccauuaucaaucauaaauuuuguaaccugucugaugcucacaagaaaaaucucuacgaccaugcccugaugagcauuaucuccacguuccaccugagcauuccgaacuuuaaucaguaugaggccaugucuugcgauuucaacggaggccggaucuccgugcaguacaaucucagccacucuuaugcugucgacgccgcuaaccauuguggcaccauugccaauggggugcugcaaacauuuaugcgcauggcguggggaggcuccuacaucgcccuugauagcgggaagggaucuugggacugcaucaugaccuccuaccaguaucugauuauccagaacacaaccugggaagaucacugucaguucagcagacccuccccuauuggcuaccucgggcugcuuucucaacggacgcgcgacaucuauauuagcagacggcugcucggaacauuuaccuggacacuguccgauagcgagggcaacgaaacccccggcggguacugccugacccgcuggaugcucaucgaggcugagcugaaguguuucggaaauacagccguugcuaaaugcaacgaaaagcaugacgaggaauuuugcgauaugcuuagacuguucgacuuuuguaaacaggccauccggcgccucaagacgccugcgcagaugucuauucagcugaucaauaaagccgugaacgcucuuauuaaugaucaacugaucaugaagaaccaccucagagacauuaugggcauccccuauugcaauuacuccaaguauugguaccugaaccacaccgucacagggaaaaccagccugccucgguguuggcucgugucuaauggaagcuaccugaacgagacacauuucuccgacgauaucgaacagcaggccgacaauaugauuaccgagcuucugcaaaaggaguauaucgaucgccagggcaaaacgccgcucgggcugguggaccuguucgucuuuucuaccagcuucuaccuuauuuccaucuuucuccaccugguuaagauucccacacauagacacaucaccggaaaaccuugccccaagccucaucggcugaaccacaugggcauuuguagcugcggccucuauaaucaccccggggugccggugaaauggaagcgcugaggacuagucccuguucccagagcccacuuuuuuuucuuuuuuugaaauaaaauagccugucuuucagaucucaaaggcucuuuucagagccaccaaaaaaaaaaaaaaaaaaaaaaaaaaaaaaaaaaaaaaaaaaaaaaaaaaaaaaaaaaaaaaaaaaaaaaaaaaaaaaaaaaaaaaaaaaaaaaaaaaaaa

SEQ ID NO: 30129 - RNA, 1745 nt, Artificial Sequence
  mRNA product Design a-1 (hSL-A100) comprising derived and/or modified sequence from LASV(Lassa virus/H.sapiens-wt/NGA/2016/ISTH_0017;Clade II)__AVO03567__GPCmut6 (opt5)
aggagagucccgcagucggcguccagcggcucugcuuguucgugugugugucguugcaggccuuauucaagcuuaccaugggccagaucauuaccuucuuucaagaggugccccacgucaucgaagagguuaugaacauugugcugaucgcccucagccugcuugcuauucugaaggggaucuacaauguggccacaugcggacucuucggccuggucuccuuucuucugcucugugggagaucuugcagcacgaccuauaaaggaguguacgaacugcagacacuggagcucgacauggcgucccugaacauguguaugccucuuucuugcaccaagaauaacagccaucacuauaucaugguuggcaaugaaacagggcuggagcucacccugacaaacaccuccauuaucaaucauaaauucuguaaccuuucugaugcucacaagaaaaaucuguacgaccaugcccucaugagcauuaucuccacguuucaccugagcauuccgaacuucaaucaguaugaggccaugucuugcgauuuuaacggaggcaagaucuccgugcaguacaaucugagccacaccuaugcuauugacgccgcuaaccauuguggcacaaucgccaaugggguccuccaaaccuucaugcggauggcguggggaggcucuuacaucgcccuggauuccgggaagggaagcugggacugcauuaugacaucuuaccaguaucuuaucauucagaacaccacgugggaagaucacugucaguuuucccgccccagcccuaucggcuaccuggggcuccugucccaaagaacacgggacauuuauaucucucgcagacuucugggaaccuucacauggacccucagcgauuccgagggcaacgaaacccccggcggguacugccugacacgguggaugcugaucgaggcugagcucaaauguuuuggaaauacggccguggcuaagugcaacgaaaaacaugacgaggaguucugcgauaugcugcgccuuuuugacuucuguaagcaggccauuagacggcugaaaaccccugcgcagaugagcauccagcucauuaauaaggccguuaacgcucugaucaaugaucaacuuauuaugaagaaccaucugcgcgacaucaugggcauccccuauugcaauuacucuaaauauugguaccucaaccacacagugaccgggaagacaucccugccuagauguuggcuggucagcaauggaucuuaccucaacgaaacccacuucagcgacgauauugaacagcaggccgacaauaugaucacggagcugcuucaaaaagaguauauggaucggcagggcaagacaccgcuggggcucguggaccuguuuguguucuccaccucuuuuuaccugauuagcaucuuccuucaccucguccgcauucccacccauagacacguuaucggaaaaccuugccccaagccucaucggcugaaccacaugggcauuuguuccugcggccuguauaaacaccccggggugccggugaaguggaagcgcugaggacuagucccuguucccagagcccacuuuuuuuucuuuuuuugaaauaaaauagccugucuuucagaucucaaaggcucuuuucagagccaccaaaaaaaaaaaaaaaaaaaaaaaaaaaaaaaaaaaaaaaaaaaaaaaaaaaaaaaaaaaaaaaaaaaaaaaaaaaaaaaaaaaaaaaaaaaaaaaaaaaaa

SEQ ID NO: 30130 - RNA, 1745 nt, Artificial Sequence
  mRNA product Design a-1 (hSL-A100) comprising derived and/or modified sequence from LASV(Lassa virus/H.sapiens-wt/NGA/2018/ISTH_0959;Clade II)__AVV65099__GPCmut6 (opt5)
aggagagucccgcagucggcguccagcggcucugcuuguucgugugugugucguugcaggccuuauucaagcuuaccaugggccagaucauuaccuucuuucaagaggugccccacgucaucgaagagguuaugaacauugugcugaucgcccucagccugcuugcuauucugaaggggaucuacaauguggucacaugcggacucuucggccugguguccuuucuucugcucugugggagaucuugcagcacgaccuauaaaggaguuuacgaacugcagacacuggagcucgacauggccucccugaacauguguaugccucuuucuugcaccaagaauaacagccaucacuauaucauggugggcaaugaaacagggcuggagcucacccugacaaacaccuccauuaucaaucauaaauucuguaaccuuucugaugcgcacaagaaaaaucuguacgaccaugcucucaugagcauuaucuccacguuucaccugagcauuccgaacuucaaucaguaugaggccaugucuugcgauuuuaacggaggcaagaucuccguccaguacaaucugagccacgccuaugcuauugacgccgcuaaccauuguggcaccaucgccaauggggugcuccaaacauucaugcggauggcguggggaggcucuuacaucgcccuggauuccgggaagggaagcugggacugcauuaugaccucuuaccaguaucuuaucauucagaacacaaccugggaagaucacugucaguuuucccgccccagcccuaucggcuaccuggggcuccugucccaaagaacgcgggacauuuauaucucucgcagacuucugggaacauucaccuggacacucagcgauuccgagggcaacgaaacccccggcggguacugccugacccgguggaugcugaucgaggcugagcucaaauguuuuggaaauacagccguugcuaagugcaacgaaaaacaugacgaggaguucugcgauaugcugcgccuuuuugacuucuguaagcaggccauuagacggcugaaaacgccugcgcagaugagcauccagcucauuaauaaggccgugaacgcucugaucaaugaucaacuuauuaugaagaaccaucugcgcgacaucaugggcauccccuauugcaauuacucuaaauauugguaccucaaccacaccgucacagggaagaccucccugccuagauguuggcuggugagcaauggaucuuaccucaacgaaacacacuucagcgacgauauugaacagcaggccgacaauaugaucaccgagcugcuucaaaaagaguauauugaucggcagggcaagacgccgcuggggcucguggaccuguuugucuucuccacaucuuuuuaccugaucagcauuuuccuucaccucguuaaaauccccacccaucgccacgugauuggaaagccuugccccaaaccucauagacugaaccacaugggcaucuguuccugcggccuguauaagcaccccggggugccggucaaguggaaacggugaggacuagucccuguucccagagcccacuuuuuuuucuuuuuuugaaauaaaauagccugucuuucagaucucaaaggcucuuuucagagccaccaaaaaaaaaaaaaaaaaaaaaaaaaaaaaaaaaaaaaaaaaaaaaaaaaaaaaaaaaaaaaaaaaaaaaaaaaaaaaaaaaaaaaaaaaaaaaaaaaaaaa

SEQ ID NO: 30131 - RNA, 1745 nt, Artificial Sequence
  mRNA product Design a-1 (hSL-A100) comprising derived and/or modified sequence from LASV(LASV003-NIG-2008;Clade II)__AIT17580__GPCmut6 (opt5)
aggagagucccgcagucggcguccagcggcucugcuuguucgugugugugucguugcaggccuuauucaagcuuaccaugggccagaucauuaccuucuuucaagaggugccccacgucaucgaagagguuaugaacauugugcugaucgcccucagccugcuugcuauucugaaggggaucuacaauguggccacaugcggacucuucggccuggucuccuuucuucugcucugugggagaucuugcagcacgaccuauaaaggaguguacgaacugcagacacuggagcucgacauggcgucccugaacauguguaugccucuuucuugcaccaagaauaacagccaucacuauaucaugguuggcaaugaaacagggcuggagcucacccugacaaacaccuccauuaucaaucauaaauucuguaaccuuucugaugcucacaagaaaaaucuguacgaccaugcccucaugagcauuaucuccacguuucaccugagcauuccgaacuucaaucaguaugaggccaugucuugcgauuuuaacggaggcaagaucuccgugcaguacaaucugagccacaccuaugcugucgacgccgcuaaccauuguggcacaauugccaauggggugcuccaaaccuucaugcggauggcguggggaggcucuuacaucgcccuggauuccgggaagggaagcugggacugcaucaugacaucuuaccaguaucuuauuauccagaacaccacgugggaagaucacugucaguuuucccgccccagcccuauuggcuaccuggggcuccugucccaaagaacacgggacaucuauauuucucgcagacuucugggaaccuucacauggacccucagcgauuccgagagcaacgaaacccccggcggcuacugccugacacgguggaugcugaucgaggcugagcucaaauguuuugggaauacggccguugcuaagugcaacgaaaaacaugacgaggaguucugcgauaugcugcgccuuuuugacuucuguaagcaggccaucagacggcugaaagcgccugcccagaugucuauucagcucaucaauaaggcugugaacgcccugauuaaugaucaacuuaucaugaagaaccaucugcgcgacauuaugggaauccccuauugcaauuacuccaaauauugguaccucaaccacaccgucacaggcagaaccagccugccucgguguuggcuggugucuaaugggagcuaccucaacgaaacacacuucuccgacgauaucgaacagcaggcugacaauaugauuaccgagcugcuucaaaaggaguauauggaucgccagggaaaaacgccgcugggccucguggaccuguuugucuucucuaccagcuuuuaccugaucuccauuuuccuucaccucguuaagauccccacacauagacacgugauugggaaaccuugccccaagccucaucggcugaaccacaugggaaucuguagcugcggccuguauaaacaccccggcgugccggucaaguggaagcgcugaggacuagucccuguucccagagcccacuuuuuuuucuuuuuuugaaauaaaauagccugucuuucagaucucaaaggcucuuuucagagccaccaaaaaaaaaaaaaaaaaaaaaaaaaaaaaaaaaaaaaaaaaaaaaaaaaaaaaaaaaaaaaaaaaaaaaaaaaaaaaaaaaaaaaaaaaaaaaaaaaaaaa

SEQ ID NO: 30132 - RNA, 1745 nt, Artificial Sequence
  mRNA product Design a-1 (hSL-A100) comprising derived and/or modified sequence from LASV(LASV035-NIG-2009;Clade II)__AIT17588__GPCmut6 (opt5)
aggagagucccgcagucggcguccagcggcucugcuuguucgugugugugucguugcaggccuuauucaagcuuaccaugggccagaucauuaccuucuuucaagaggugccccacgucaucgaagagguuaugaacauugugcugaucgcccucagccugcuugcuauucugaaggggaucuacaauguggccacaugcggacucuucggccuggucuccuuucuucugcucugugggagaucuugcagcacgaccuauaaaggaguguacgaacugcagacacuggagcucgacauggcgucccugaacauguguaugccucuuucuugcaccaagaauaacagccaucacuauaucaugguuggcaaugaaacagggcuggagcucacccugacaaacaccuccauuaucaaucauaaauucuguaaccuuucugaugcucacaagaaaaaucuguacgaccaugcccucaugagcauuaucuccacguuucaccugagcauuccgaacuucaaucaguaugaggccaugucuugcgauuuuaacggaggcaagaucuccgugcaguacaaucugagccacgcuuaugccgucgacgcugccaaccauuguggcaccauugcgaauggggugcuccaaacauucaugcggauggccuggggaggcucuuacaucgcucuggauuccgggaagggaagcugggacugcaucaugaccucuuaccaguaucuuauuauccagaacacaaccugggaagaucacugucaguuuucccgccccagcccuauuggcuaccuggggcuccugucccaaagaacgcgggacaucuauauuucucgcagacuucugggaacauucaccuggacacucagcgauuccgagggcaacgaaacccccggcggguacugccugacccgguggaugcugaucgaggccgagcucaaauguuuuggaaauacagcuguugccaagugcaacgaaaaacaugacgaggaguucugcgauaugcugcgccuuuuugacuucuguaagcaggcgaucagacggcugaaagccccugcucagaugagcauucagcucaucaauaaggccgugaacgcucugauuaaugaucaacuuaucaugaagaaccaucugcgcgacauuaugggcauccccuauugcaauuacucuaaauauugguaccucaaccacacggucaccgggaagacaucccugccuagauguuggcuggugagcaauggaucuuaccucaacgaaacccacuucagcgacgauaucgaacagcaggccgacaauaugauuacagagcugcuucaaaaagaguauaucgaucggcagggcaagaccccgcuggggcucguggaccuguuugucuucuccacgucuuuuuaccugauuagcaucuuccuucaccucguuaaaauucccacacaucgccacgugaucggaaagccuugccccaaaccucauagacugaaccacaugggcauuuguuccugcggccuguauaagcaccccggggugccggucaaguggaaacggugaggacuagucccuguucccagagcccacuuuuuuuucuuuuuuugaaauaaaauagccugucuuucagaucucaaaggcucuuuucagagccaccaaaaaaaaaaaaaaaaaaaaaaaaaaaaaaaaaaaaaaaaaaaaaaaaaaaaaaaaaaaaaaaaaaaaaaaaaaaaaaaaaaaaaaaaaaaaaaaaaaaaa

SEQ ID NO: 30133 - RNA, 1745 nt, Artificial Sequence
  mRNA product Design a-1 (hSL-A100) comprising derived and/or modified sequence from LASV(LASV1000-NIG-2009;Clade II)__AIT17782__GPCmut6 (opt5)
aggagagucccgcagucggcguccagcggcucugcuuguucgugugugugucguugcaggccuuauucaagcuuaccaugggccagaucauuaccuucuuucaagaggugccccacgucaucgaagagguuaugaacauugugcugaucgcccucagccugcuugcuauucugaaggggaucuacaauguggccacaugcggacucuucggccuggucuccuuucuucugcucugugggagaucuugcagcacgaccuauaaaggaguguacgaacugcagacacuggagcucgacauggcgucccugaacauguguaugccucuuucuugcaccaagaauaacagccaucacuauaucaugguuggcaaugaaacagggcuggagcucacccugacaaacaccuccauuaucaaucauaaauucuguaaccuuucugaugcucacaagaaaaaucuguacgaccaugcccucaugagcauuaucuccacguuucaccugagcauuccgaacuucaaucaguaugaggccaugucuugcgauuuuaacggaggcaagaucuccgugcaguacaaucugagccacaccuaugcugucgacgccgcuaaccauuguggcacaauugccaauggggugcuccaaaccuucaugcggauggcguggggaggcucuuacaucgcccuggauuccgggaagggaagcugggacugcaucaugacaucuuaccaguaucuuauuauccagaacaccacgugggaagaucacugucaguuuucccgccccagcccuauuggcuaccuggggcuccugucccaaagaacacgggacaucuauauuucucgcagacuucugggaaccuucacauggacccucagcgauuccgagggcaacgaaacccccggcggguacugccugacacgguggaugcugaucgaggcugagcucaaauguuuuggaaauacggccguugcuaagugcaacgaaaaacaugacgaggaguucugcgauaugcugcgccuuuuugacuucuguaagcaggccaucaaaagacugaagaccccugcgcagaugagcauucagcucaucaauaaggccgugaacgcucugauuaaugaucaacuuaucaugaaaaaccaucugcgggacauuaugggcauccccuauugcaauuacucuaaguauugguaccucaaccacacagucaccgggaaaacaucccugccucgcuguuggcuggugagcaauggaucuuaccucaacgaaacccacuucagcgacgauaucgaacagcaggccgacaauaugauuacggagcugcuucaaaaggaguauaucgauagacagggcaaaacaccgcuggggcucguggaccuguuugucuucuccaccucuuuuuaccugauuagcaucuuccuucaccucguuaagauucccacccaucggcacguggugggaaaaccuugccccaagccucaucgccugaaccacaugggcaucuguuccugcggccuguauaagcaccccggggucccggugaaauggaagagaugaggacuagucccuguucccagagcccacuuuuuuuucuuuuuuugaaauaaaauagccugucuuucagaucucaaaggcucuuuucagagccaccaaaaaaaaaaaaaaaaaaaaaaaaaaaaaaaaaaaaaaaaaaaaaaaaaaaaaaaaaaaaaaaaaaaaaaaaaaaaaaaaaaaaaaaaaaaaaaaaaaaaa

SEQ ID NO: 30134 - RNA, 1745 nt, Artificial Sequence
  mRNA product Design a-1 (hSL-A100) comprising derived and/or modified sequence from LASV(LASV221-NIG-2010;Clade II)__AIT17624__GPCmut6 (opt5)
aggagagucccgcagucggcguccagcggcucugcuuguucgugugugugucguugcaggccuuauucaagcuuaccaugggccagaucauuaccuucuuucaagaggugccccacgucaucgaagagguuaugaacauugugcugaucgcccucagccugcuugcuauucugaaggggaucuacaauguggccacaugcggacucuucggccuggucuccuuucuucugcucugugggagaucuugcagcacgaccuauaaaggaguguacgaacugcagacacuggagcucgacauggcgucccugaacauguguaugccucuuucuugcaccaagaauaacagccaucacuauaucaugguuggcaaugaaacagggcuggagcucacccugacaaacaccuccauuaucaaucauaaauucuguaaccuuucugaugcucacaagaaaaaucuguacgaccaugcccucaugagcauuaucuccacguuucaccugagcauuccgaacuucaaucaguaugaggccaugucuugcgauuuuaacggaggcaagaucuccgugcaguacaaucugagccacaccuaugcuauugacgccgcuaaccauuguggcacaaucgccaaugggguccuccaaaccuucaugcggauggcguggggaggcucuuacaucgcccuggauuccgggaagggaagcugggacugcauuaugacaucuuaccaguaucuuaucauucagaacaccacgugggaagaucacugucaguuuucccgccccagcccuaucggcuaccuggggcuccugucccaaagaacacgggacauuuauaucucucgcagacuucugggaaccuucacauggacccucagcgauuccgagggcaacgaaacccccggcggguacugccugacacgguggaugcugaucgaggcugagcucaaauguuuuggaaauacggccguggcuaagugcaacgaaaaacaugacgaggaguucugcgauaugcugcgccuuuuugacuucuguaagcaggccauuagacggcugaaaaccccugcgcagaugagcauccagcucauuaauaaggccguuaacgcucugaucaaugaucaacuuauuaugaagaaccaucugcgcgacaucaugggcauccccuauugcaauuacucuaaauauugguaccucaaccacacagugaccgggaagacaucccugccuagauguuggcuggucagcaauggaucuuaccucaacgaaacccacuucagcgacgauauugaacagcaggccgacaauaugaucacggagaugcugcaaaaagaguauauggaucggcagggcaagacaccgcuugggcugguggaccucuuuguguucuccaccucuuuuuaccugauuagcaucuuccugcaccuugucaaaauucccacccaucgccacguuaucggaaagccuugccccaaaccucauagacucaaccacaugggcauuuguuccugcggccuguauaagcaccccggggugccggugaaguggaaacggugaggacuagucccuguucccagagcccacuuuuuuuucuuuuuuugaaauaaaauagccugucuuucagaucucaaaggcucuuuucagagccaccaaaaaaaaaaaaaaaaaaaaaaaaaaaaaaaaaaaaaaaaaaaaaaaaaaaaaaaaaaaaaaaaaaaaaaaaaaaaaaaaaaaaaaaaaaaaaaaaaaaaa

SEQ ID NO: 30135 - RNA, 1745 nt, Artificial Sequence
  mRNA product Design a-1 (hSL-A100) comprising derived and/or modified sequence from LASV(LASV237-NIG-2010;Clade II)__AIT17638__GPCmut6 (opt5)
aggagagucccgcagucggcguccagcggcucugcuuguucgugugugugucguugcaggccuuauucaagcuuaccaugggccagaucauuaccuucuuucaagaggugccccacgucaucgaagagguuaugaacauugugcugaucgcccucagccugcuugcuauucugaaggggaucuacaauguggccacaugcggacucuucggccuggucuccuuucuucugcucugugggagaucuugcagcacgaccuauaaaggaguguacgaacugcagacacuggagcucgacauggcgucccugaacauguguaugccucuuucuugcaccaagaauaacagccaucacuauaucaugguuggcaaugaaacagggcuggagcucacccugacaaacaccuccauuaucaaucauaaauucuguaaccuuucugaugcucacaagaaagaccuguacgaucaugcccucaugagcauuaucuccacguuucaccugagcauuccgaauuucaaccaguaugaggccaugucuugcgacuuuaauggaggcaagaucuccgugcaguacaaccugagccacaccuaugcugucgaugccgcuaaucauuguggcacaauugccaacggggugcuccaaaccuucaugcggauggcguggggaggcucuuacaucgcccuggacuccgggaagggaagcugggauugcaucaugacaucuuaccaguaucuuauuauccagaauaccacgugggaagaccacugucaguuuucccgccccagcccuauuggcuaccuggggcuccugucccaaagaacacgggauaucuauauuucucgcagacuucugggaaccuucacauggacccucagcgacuccgagggcaacgaaacccccggcggguacugccugacacgguggaugcugaucgaggcugagcucaaauguuuuggaaacacggccguugcuaagugcaaugaaaaacaugaugaggaguucugcgacaugcugcgccuuuuugauuucuguaagcaggccaucagacggcugaaaaccccugcgcagaugagcauucagcucaucaacaaggccgugaaugcucugauuaacgaccaacuuaucaugaagaaucaucugcgcgacauuaugggcauccccuauugcaacuacucuaaauauugguaccucaaucacacagucaccgggaagacaucccugccuagauguuggcuggugagcaacggaucuuaccucaaugaaacccacuucagcgaugacaucgaacagcaggccgauaacaugauuacggagcugcuucaaaaagaguauauggaccggcagggcaagacaccgcuggggcucguggaucuguuugucuucuccaccucuuuuuaccugaucagcauuuuccuucaccucaucaaaauucccacccaucgccacaucacaggaaagccuugccccaaaccucauagacugaaucacaugggcauuuguuccugcggccuguauaagcaccccgggguuccggugaaguggaaacggugaggacuagucccuguucccagagcccacuuuuuuuucuuuuuuugaaauaaaauagccugucuuucagaucucaaaggcucuuuucagagccaccaaaaaaaaaaaaaaaaaaaaaaaaaaaaaaaaaaaaaaaaaaaaaaaaaaaaaaaaaaaaaaaaaaaaaaaaaaaaaaaaaaaaaaaaaaaaaaaaaaaaa

SEQ ID NO: 30136 - RNA, 1745 nt, Artificial Sequence
  mRNA product Design a-1 (hSL-A100) comprising derived and/or modified sequence from LASV(LASV253-NIG-2011;Clade II)__AIT17670__GPCmut6 (opt5)
aggagagucccgcagucggcguccagcggcucugcuuguucgugugugugucguugcaggccuuauucaagcuuaccaugggccagaucauuaccuucuuucaagaggugccccacgucaucgaagagguuaugaacauugugcugaucgcccucagccugcuugcuauucugaaggggaucuacaauguggccacaugcggacucuucggccuggucuccuuucuucugcucugugggagaucuugcagcacgaccuauaaaggaguguacgaacugcagacacuggagcucgacauggcgucccugaacauguguaugccucuuucuugcaccaagaauaacagccaucacuauaucaugguuggcaaugaaacagggcuggagcucacccugacaaacaccuccauuaucaaucauaaauucuguaaccuuucugaugcucacaagaaaaaucuguacgaccaugcccucaugagcauuaucuccacguuucaccugagcauuccgaacuucaaucaguaugaggccaugucuugcgauuuuaacggaggcaagaucuccgugcaguacaaucugagccacaccuaugcugucgacgccgcuaaccauuguggcacaauugccaauggggugcuccaaaccuucaugcggauggcguggggaggcucuuacaucgcccuggauuccgggaagggaagcugggacugcaucaugacaucuuaccaguaucuuauuauccagaacaccacgugggaagaucacugucaguuuucccgccccagcccuauuggcuaccuggggcuccugucccaaagaacacgggacaucuauauuucucgcagacuucugggaaccuucacauggacccucagcgauuccgagggcaacgaaacccccggcggguacugccugacacgguggaugcugaucgaggcugagcucaaauguuuuggaaauacggccguugcuaagugcaacgaaaaacaugacgaggaguucugcgauaugcugcgccuuuuugacuucuguaagcaggccaucagacggcugaaagcgccugcccagaugagcauucagcucaucaauaaggcugugaacgcccugauuaaugaucaacuuaucaugaagaaccaucugcgcgacauuaugggcauccccuauugcaauuacucuaaauauugguaccucaaccacaccgucacagggagaaccucccugccucgguguuggcuggugagcaauggaucuuaccucaacgaaacacacuucagcgacgauaucgaacagcaggcugacaauaugauuaccgagcugcuucaaaaggaguauaucgaucgccagggcaaaacgccgcuggggcucguggaccuguuugucuucuccacaucuuuuuaccugauuagcaucuuccuucaccucguuaagauucccacccauagacacaucauuggaaaaccuugccccaagccucaucggcugaaccacaugggcaucuguuccugcggccuguauaaacaccccggggugccggugaaguggaagcgcugaggacuagucccuguucccagagcccacuuuuuuuucuuuuuuugaaauaaaauagccugucuuucagaucucaaaggcucuuuucagagccaccaaaaaaaaaaaaaaaaaaaaaaaaaaaaaaaaaaaaaaaaaaaaaaaaaaaaaaaaaaaaaaaaaaaaaaaaaaaaaaaaaaaaaaaaaaaaaaaaaaaaa

SEQ ID NO: 30137 - RNA, 1745 nt, Artificial Sequence
  mRNA product Design a-1 (hSL-A100) comprising derived and/or modified sequence from LASV(LASV254-NIG-2011;Clade II)__AIT17674__GPCmut6 (opt5)
aggagagucccgcagucggcguccagcggcucugcuuguucgugugugugucguugcaggccuuauucaagcuuaccaugggccagaucauuaccuucuuucaagaggugccccacgucaucgaagagguuaugaacauugugcugaucgcccucagccugcuugcuauucugaaggggaucuacaauguggccacaugcggacucuucggccuggucuccuuucuucugcucugugggagaucuugcagcacgaccuauaaaggaguguacgaacugcagacacuggagcucgacaugaccaaccugaauauguguaugccucuuuccugcacaaagaacaauucucaucacuauaucaugguuggcaacgaaaccgggcuggagcucacacugaccaauacgagcauuaucaaccauaaauucuguaaucuuuccgaugcgcacaagaaaaaccuguacaaucaugcucucaugucuauuaucagcaccuuucaccuguccauuccgaacuucaaucaguaugaggccaugagcugcgacuuuaacggaggcaagaucucugugcaguacaaucugucccacagcuaugccgucgaugcugccaaccauuguggcacaauugcuaacggggugcuccaaaccuucaugcggauggccuggggaggcucuuacaucgcgcuggacuccgggaagggaaauugggauugcaucaugacaagcuaccaguaucuuauuauccagaacaccacgugggaagaccacugucaguuuucucgccccuccccuauuggcuaccuggggcuccugagccaaagaacacgggauaucuauauuucccgcagacuucugggaaccuucacauggacccucucugacagcgagggcaaugaaacccccggcggguacugccugacacgguggaugcugaucgaggccgagcucaaauguuuuggaaacacggcuguugccaagugcaaugaaaaacaugaugaggaguucugcgacaugcugcgccuuuuugauuucuguaagcaggcuaucagacggcugaaaaccccugcccaggcgaacauucagcucaucaauaaggccgugaacgcucugauuaaugaccaacuuaucaugaagaaccaucugcgcgauauuaugggcauccccuauugcaauuacuccaaauauugguaccucaaccacacagucaccgggaagacaagccugccuagauguuggcuggugucuaauggauccuaccucaacgaaacccacuucagcgacgacaucgaacagcaggccgauaauaugauuacggagcugcuucaaaaagaguauauggaccggcagggcaagacaccgcuggggcucguggaucuguuugucuucucuaccagcuuuuaccugaucuccauuuuccuucaccucguuaaaauccccacccaucgccacgugauuggaaagccuugccccaaaccucauagacugaaccacaugggcaucuguucuugcggccuguauaagcaccccggggugccggucaaguggaaacggugaggacuagucccuguucccagagcccacuuuuuuuucuuuuuuugaaauaaaauagccugucuuucagaucucaaaggcucuuuucagagccaccaaaaaaaaaaaaaaaaaaaaaaaaaaaaaaaaaaaaaaaaaaaaaaaaaaaaaaaaaaaaaaaaaaaaaaaaaaaaaaaaaaaaaaaaaaaaaaaaaaaaa

SEQ ID NO: 30138 - RNA, 1745 nt, Artificial Sequence
  mRNA product Design a-1 (hSL-A100) comprising derived and/or modified sequence from LASV(Nig08-A19;Clade III)__ADU56618__GPCmut6 (opt5)
aggagagucccgcagucggcguccagcggcucugcuuguucgugugugugucguugcaggccuuauucaagcuuaccaugggccagaucgugaccuucuuucaagaggucccccacguuauugaagaggugaugaacaucgugcugauugcccucagcauccuggcuauucuuaaggggcuguacaauaucgccacaugcggacucaucggccuggucacguuccuucugcucuccgggagaucuuguagcaugaccuauaaaggaguguacgaacugcagacacuggagcucaacaugaauacccugaacaugugcaugccucuuuccuguacaaagaauaacucucaucacuauauuaugguuggcaaugaaaccgggcuggagcucacacugaccaacacgagccuucugcaucacaaauuuugcaaucucuccgacgcgcauaagaaaaaccuguacgaucacacccugaugucuaucauuagcacauuccaccucuccaucccgaauuuuaaccaguaugaggcuaugagcugugacuucaauggaggcaagauuaccgugcaguacaaccugucucauuccuaugccaucgaugccgcuaaucacugcggcacagucgccaacggggugcuucaaaccuuuaugcggauggcuuggggaggcagcuacauugcccuggacucugggcgcggaaagugggauuguaucaugacguccuaccaguaucucaucauucagaacacaaccugggaagaccauugccaguucagcagacccucuccuaucggcuaccuggggcuucugucccaacggacacgcgauauuuauaucagcagacggcuccugggaaccuuuaccuggacacuguccgacucugagggcaaugaaacgcccggcggguacugucucacccgcuggaugcugauugaggcggagcuuaaaugcuucggaaacacagccguugcuaaguguaaugaaaaacacgaugaggaauuuugcgacaugcugagacucuucgauuuuugcaagcaggccauccggcgccugaaagcuccugcccagaugagcauccagcuuauuaacaaggcggugaaugcccugaucaacgaccaacucauuaugaagaaucaccugagagauaucaugggcauucccuauuguaacuacuccaaauauugguaccugaaucauaccagcacagggcggaccucucucccucgcugcuggcuggucuccaacggaagcuaccuuaaugagacgcacuucucugacgacaucgaacagcaggcugauaacaugaucacagagaugcugcaaaaggaguaucucgacagacagggcaaaaccccgcuggggcugguggaucuuuucguguuuagcaccuccuucuaccucauuucuaucuuucugcaucuggucaagauucccacacaccggcauaucguuggaaaaccuugucccaagccucaccgccucaaucacaugggcauuugcagcuguggccuguauaaacagcccggggugccggugagauggaagcggugaggacuagucccuguucccagagcccacuuuuuuuucuuuuuuugaaauaaaauagccugucuuucagaucucaaaggcucuuuucagagccaccaaaaaaaaaaaaaaaaaaaaaaaaaaaaaaaaaaaaaaaaaaaaaaaaaaaaaaaaaaaaaaaaaaaaaaaaaaaaaaaaaaaaaaaaaaaaaaaaaaaaa

SEQ ID NO: 30139 - RNA, 1748 nt, Artificial Sequence
  mRNA product Design a-1 (hSL-A100) comprising derived and/or modified sequence from LASV(G1180-SLE-2010;Clade IV)__AIT17168__GPCmut6 (opt5)
aggagagucccgcagucggcguccagcggcucugcuuguucgugugugugucguugcaggccuuauucaagcuuaccaugggccagaucgugaccuucuuucaagaggucccccacguuauugaagaggugaugaacaucgugcugauugcccucagcauccuggcuguccuuaaggggcuguacaauuucgccacaugcggacucgugggccugcuuacguuucugcuccugugugggagauccugcaccgcgucucgguauaaaggaguuuacgaacugcagacacucgagcugaacauggaaacccuuaauauguguaugccucugagcugcacaaagaacaauucccaucacuauauuauggugggcaacgagaccgggcucgagcugacacuuaccaauacgucuaucaucaaccauaaauucuguaaucugagcgacgcucacaagaaaaaccucuacgaucaugcccugauguccauuaucucuaccuuucaccugagcauuccgaauuucaaccaguaugaagccauguccugcgacuuuaauggaggcaagaucagcguccaguacaaccucucucacuccuaugcuggcgaugccgcuaaucauugugggacaguggccaacggaguucugcaaaccuucaugcgcauggcguggggcgggagcuacauugcccuugacucuggacacggcuccugggauugcaucaugacaagcuaccaguaucugauuauccagaacaccacgugggaggaccauugucaguuuucuagacccuccccuaucggguaccucggacugcuuagccaacggacacgcgauauuuauaucuccagacggcugcucggcaccuucacauggacccugucugacagcgaaggcaaggauacccccgggggauacugccugacacgcuggaugcucauugaggcugagcugaaauguuuuggcaauacggccguggcuaagugcaacgaaaaacacgacgaggaguucugcgauaugcuuagacuguuugacuucuguaagcaggccauccagcggcucaaagcgccugcccagauguccauucaacugaucaauaaggcugucaacgcccuuaucaaugaucagcugauuaugaagaaccaccuccgcgacaucauggggauucccuauugcaauuacagcaaauauugguaccugaaccauaccacaaccggaaagacaucucugccuaaauguuggcucguguccaauggcagcuaccugaacgaaacccacuucucugacgauaucgaacagcaagcugacaauaugauuacggagaugcuucagaaggaguauauggaaagacaggggaaaacaccgcugggacucguggaucuguuugucuucagcaccuccuuuuaccugaucucuaucuuccuucaucucguuaagauucccacccaccggcauaucgugggcaaaagcugcccuaagccccaccgccugaaccacaugggcauuuguuccugcgggcuguauaagcagccuggagugcccgucaaauggaagagaugaggacuagucccuguucccagagcccacuuuuuuuucuuuuuuugaaauaaaauagccugucuuucagaucucaaaggcucuuuucagagccaccaaaaaaaaaaaaaaaaaaaaaaaaaaaaaaaaaaaaaaaaaaaaaaaaaaaaaaaaaaaaaaaaaaaaaaaaaaaaaaaaaaaaaaaaaaaaaaaaaaaaa

SEQ ID NO: 30140 - RNA, 1748 nt, Artificial Sequence
  mRNA product Design a-1 (hSL-A100) comprising derived and/or modified sequence from LASV(G1442-SLE-2011;Clade IV)__AIT17180__GPCmut6 (opt5)
aggagagucccgcagucggcguccagcggcucugcuuguucgugugugugucguugcaggccuuauucaagcuuaccaugggccagaucgugaccuucuuucaagaggucccccacguuauugaagaggugaugaacaucgugcugauugcccucagcauccuggcuguccuuaaggggcuguacaauguggccacaugcggacucauuggccugguuacguuccuucugcucugugggagauccugcaccacaacccuguauaaaggaguguacgaacugcagacacucgagcugaacauggaaacccuuaauauguguaugccucugucuugcacaaagaacaauagccaucacuauauccgggucggcaacgagaccgggcucgagcugacgcuuaccaauacauccaucauuaaccauaaauuuuguaaucugucugacgcgcacaagaaaaaccucuacgaucaugcucugaugagcaucauuuccaccuuccaccugucuaucccgaauuuuaaccaguaugaagccaugagcugcgacuucaauggaggcaagauuuccgugcaguacaaccucagccacucuuaugccggcgaugcugccaaucauugugggacaguugcuaacggagugcugcaaaccuuuaugcgcauggccuggggcggguccuacaucgcgcuugacagcggaagaggcaacugggauugcauuaugacgucuuaccaguaucugaucauccagaauacaaccugggacgaucacugucaguucucccggcccagcccuauuggguaccucggacugcuuucucaacgcacaagagacgucuauaucucccggcgccugcucggcaccuuuaccuggacacugagcgauuccgagggcaaggacacgcccgggggauacugccugaccagauggaugcucauugaagccgagcugaaauguuucggcaacacagcuguggccaagugcaaugagaaacaugaugaagaguuuugcgacaugcuucggcuguucgauuuuuguaagcaggcuauccagcgccucaaagccccugcgcagaugucuauucaacugaucaacaaggccgugaaugcucuuaucaacgaccagcugauuaugaagaaucaccucagagacaucauggggauucccuauugcaacuacagcaaauauugguaccugaauaacaccgccacaggaaagaccucccugccuaaauguuggcucaucagcaauggcucuuaccugaacgaaacgcacuucuccgaugacauugagcaggaagcugauaauaugaucacagagaugcuucaaaaggaguauauggaacggcaggggaaaaccccgcugggacucgucgaccuguucguuuuuagcaccucuuucuaccugaucagcauuuuucuucaucucgugaagauccccacacaccgccauauugugggcaaauccugcccuaagccccacagacugaaccauaugggcaucuguucuugcgggcuguauaagcagccuggaguccccgugcgguggaaacgcugaggacuagucccuguucccagagcccacuuuuuuuucuuuuuuugaaauaaaauagccugucuuucagaucucaaaggcucuuuucagagccaccaaaaaaaaaaaaaaaaaaaaaaaaaaaaaaaaaaaaaaaaaaaaaaaaaaaaaaaaaaaaaaaaaaaaaaaaaaaaaaaaaaaaaaaaaaaaaaaaaaaaa

SEQ ID NO: 30141 - RNA, 1748 nt, Artificial Sequence
  mRNA product Design a-1 (hSL-A100) comprising derived and/or modified sequence from LASV(G3010-SLE-2013;Clade IV)__AIT17344__GPCmut6 (opt5)
aggagagucccgcagucggcguccagcggcucugcuuguucgugugugugucguugcaggccuuauucaagcuuaccaugggccagaucgugaccuucuuucaagaggucccccacguuauugaagaggugaugaacaucgugcugauugcccucagcauccuggcuguccuuaaggggcuguacaauuucgccacaugcggacucgugggccugguuacguuucuucugcucugugggagauccugcaccacaucucuguauaaaggaguguacgaacugcagacccucgagcugaacauggaaacacuuaauauguguaugccucugagcugcaccaagaacaauucccaucacuauauuauggucggcaacgagacagggcucgagcugacccuuacgaauaccucuaucaucaaccauaaauucuguaaucugagcgacgcgcacaagaaaaaccucuacaaucaugcucugauguccauuaucucuacauuucaccugagcauuccgaacuucaaucaguaugaagccauguccugcgauuuuaacggaggcaagaucagcgugcaguacaaucucucucacuccuaugccggcgacgcugccagccauugugggaccguugcuaacggagugcugcaaacauucaugcggauggccuggggcgggucuuacauugcgcuugauuccggauacggcaagugggacugcaucaugaccagcuaucaguaccugauuauccagaacacgacaugggaggaucacugucaguuuucucgccccuccccuaucggguaucucggacugcuuagccaaagaacccgggacauuuacaucucccgcagacugcucggcacauucaccuggacccugucugauagcgaaggcaaagacacacccgggggauauugccugacgcgguggaugcucauugaggccgagcugaaguguuuuggcaauaccgcugucgccaaaugcaacgaaaagcaugaugaggaguucugcgacaugcuucgccuguuugauuucuguaaacaggcuauccagagacucaagaccccugcccagauguccauucaacugaucaauaaggcggugaacgcccuuaucaaugaccagcugauuaugaaaaaccaccuccgggauaucauggggauucccuacugcaauuauagcaaguacugguaccugaaccacacaacaaccggaaaaacgucucugccuaaguguuggcucguguccaauggcagcuaucugaacgaaacacauuucucugacgacaucgaacagcaagcugauaauaugauuaccgagaugcuucagaaagaguacauggaacgccaggggaagaccccgcugggacucgucgaccuguuuguuuucagcacauccuuuuaucugaucucuaucuuccuucaccucgugaaaauucccacccauagacacaucgugggcaagagcugcccuaagccccaucggcugaaccacaugggcauuuguuccugcgggcuguacaaacagccuggaguccccgugcgcuggaagagaugaggacuagucccuguucccagagcccacuuuuuuuucuuuuuuugaaauaaaauagccugucuuucagaucucaaaggcucuuuucagagccaccaaaaaaaaaaaaaaaaaaaaaaaaaaaaaaaaaaaaaaaaaaaaaaaaaaaaaaaaaaaaaaaaaaaaaaaaaaaaaaaaaaaaaaaaaaaaaaaaaaaaa

SEQ ID NO: 30142 - RNA, 1748 nt, Artificial Sequence
  mRNA product Design a-1 (hSL-A100) comprising derived and/or modified sequence from LASV(G502-SLE-2009;Clade IV)__AIT17126__GPCmut6 (opt5)
aggagagucccgcagucggcguccagcggcucugcuuguucgugugugugucguugcaggccuuauucaagcuuaccaugggccagaucgugaccuucuuucaagaggucccccacguuauugaagaggugaugaacaucgugcugauugcccucagcauccuggcuguccuuaaggggcuguacaauuucgccacaugcggacucgugggccugcuuacguuucugcuccugugugggagauccugcaccacaggacuguauaaaggcguuuacgaacuccagacccuggagcuuaacauggaaacacugaauauguguaugccucucucuugcaccaagaacaauagccaucacuauauuaugguggggaacgagacaggacuggagcuuacccugacgaauaccuccaucaucaaccauaaauucuguaaucucucugacgcgcacaagaaaaaccuguacgaucaugcucugaugagcauuaucuccacauuucaccucucuauuccgaauuucaaccaguaugaagccaugagcugcgacuuuaauggcggcaagaucuccguccaguacaaccugagccacucuuaugccggggaugcugccgaccauuguggaaccguggcuaauggcguucuucaaacauucaugcggauggccuggggaggguccuacauugcgcuggauagcggccgcgggagaugggacugcaucaugaccucuuaccaguaucucauuauccagaacacgacaugggaggaucacugucaguuuucccggcccagcccuaucggauaccugggccuucugucucaacgcaccagagacauuuauaucucccggcgccuccugggcacauucaccuggacccugagcgauuccgaagggaaggacacacccggaggcuacugccucacgagauggaugcugauugaggccgagcuuaaauguuuugggaacaccgcuguggccaagugcaaugaaaaacaugaugaggaguucugcgacaugcugcggcucuuugauuucuguaagcaggcuauccagcgccugaaagccccugcgcagaugucuauucaacuuaucaacaaggccgucaaugcucugaucaacgaccagcucgugaugaagaaucaccugagagacauuaugggaauccccuauugcaacuacagccgguauugguaccugaaucacacaaccacaggccgcaccucccucccuaaauguuggcuggugagcaacgggucuuaccuuaaugaaacgcauuucuccgaugacauugaacagcaagccgauaacaugaucacagagaugcugcagaaggaguauauggaaagacagggaaaaaccccgcucggccuggucgaccuguuuguuuucagcaccucuuuuuaccuuauuagcaucuuccuccaccuggugaagauccccacacaucggcacauugugggcaaauccugcccuaagccccaucgccugaaucacauggggaucuguucuugcggacucuauaaacagccuggcguccccgugaaguggaagagaugaggacuagucccuguucccagagcccacuuuuuuuucuuuuuuugaaauaaaauagccugucuuucagaucucaaaggcucuuuucagagccaccaaaaaaaaaaaaaaaaaaaaaaaaaaaaaaaaaaaaaaaaaaaaaaaaaaaaaaaaaaaaaaaaaaaaaaaaaaaaaaaaaaaaaaaaaaaaaaaaaaaaa

SEQ ID NO: 30143 - RNA, 1748 nt, Artificial Sequence
  mRNA product Design a-1 (hSL-A100) comprising derived and/or modified sequence from LASV(G733-SLE-2010;Clade IV)__AIT17154__GPCmut6 (opt5)
aggagagucccgcagucggcguccagcggcucugcuuguucgugugugugucguugcaggccuuauucaagcuuaccaugggccagaucgugaccuucuuucaagaggucccccacguuauugaagaggugaugaacaucgugcugauugcccucagcauccuggcuguccuuaaggggcuguacaauuucgccacaugcggaauugugggccucguuuccuuucugcuucugugugggagaucuugcacgaccagccucuauaaaggaguguacgaacugcagacacuggagcucaacauggaaacccugaauauguguaugccucuuuccugcacaaagaacaauucucaucacuauaucauggucggcaacgagaccgggcuggagcucacacugaccaauacgagcaucauuaaccauaaauucuguaaucuuuccgacgcgcacaagaaaaaccuguacgaucaugcucucaugucuaucauuagcaccuuucaccuguccaucccgaauuucaaccaguaugaagccaugagcugcgacuuuaauggaggcaagauuucugugcaguacaaccugucccacagcuaugccggcgaugcugccaaucauugugggacaaucgcuaacggaguucuccaaaccuucaugcggauggccuggggcgggucuuacauugcgcuggacuccggacgcgauagaugggacugcaucaugacaagcuaccaguaucuuaucauucagaacaccacgugggaggaucacugucaguuuucucggcccuccccuaucggcuaccuggggcuccugagccaacgcacaagagacauuuauaucucccggcgccuucugggaaccuucacauggacccucucugauagcgaaggcaaggacacccccggcggguacugccugacaagauggaugcugauugaggccgagcucaaauguuuuggaaauacggcuguggccaagugcaacgaaaaacaugaugaggaguucugcgacaugcugcggcuuuuugauuucuguaagcaggcuauccagcgccugaaagccccugcgcagauguccauccaacucauuaauaaggccgucaacgcucugaucaaugaccagcuuauuaugaagaaccaccugagagacaucaugggcauucccuauugcaauuacagcaaauauugguaccucaaccacaccacaaccgggaagacaucucugccuaaauguuggcugguguccaauggaagcuaccucaacgaaacccauuucucugaugacaucgaacagcaagccgauaauaugaucacggagaugcugcagaaggaguauauggaacggcagggcaaaacaccgcuugggcugguggaccucuuugucuucagcaccuccuuuuaccugauuucuaucuuccugcaccuuguuaagauucccacccaucgccacguggugggaaaaagcugcccuaagccccauagacucaaccacaugggcaucuguuccugcggccuguaugggcagccuggaguccccgugaaguggaaacggugaggacuagucccuguucccagagcccacuuuuuuuucuuuuuuugaaauaaaauagccugucuuucagaucucaaaggcucuuuucagagccaccaaaaaaaaaaaaaaaaaaaaaaaaaaaaaaaaaaaaaaaaaaaaaaaaaaaaaaaaaaaaaaaaaaaaaaaaaaaaaaaaaaaaaaaaaaaaaaaaaaaaa

SEQ ID NO: 30144 - RNA, 1748 nt, Artificial Sequence
  mRNA product Design a-1 (hSL-A100) comprising derived and/or modified sequence from MOPV/LASV reassortant(IGS-1;Clade IV)__AFY05576__GPCmut6 (opt5)
aggagagucccgcagucggcguccagcggcucugcuuguucgugugugugucguugcaggccuuauucaagcuuaccaugggccagaucgugaccuucuuucaagaggucccccacguuauugaagaggugaugaacaucgugcugauugcccucagcguccuggcugugcuuaaggggcuguacaauuucgccacaugcggacucguuggccuggugacguuucuucugcucugugggagauccugcaccacaucucuguauaaaggagucuacgaacugcagacccucgagcugaacauggaaacacuuaauauguguaugccucugagcugcaccaagaacaauucccaucacuauaucauggugggcaacgagacagggcucgagcugacccuuacgaauaccucuauuaucaaccauaaauucuguaaucugagcgacgcgcacaagaaaaaccucuacgaucaugcucugauguccaucauuucuacauuucaccugagcaucccgaauuucaaccaguaugaagccauguccugcgacuuuaauggaggcaagauuagcguucaguacaaccucucucacuccuaugccggcgaugcugccaaucauugugggaccguggcuaacggaguccugcaaacauucaugcggauggccuggggcgggagcuacaucgcgcuugacucuggacgcggcaacugggauugcauuaugaccuccuaccaguaucugaucauucagaauacgacaugggaggaccacugucaguuuagcagacccucuccuaucggguaccucggacugcuuucccaacggacccgcgauaucuauauuagcagacggcugcucggcacauucaccuggacccuguccgacucugaaggcgaggauacacccgggggauacugccugacgcgcuggaugcucaucgaggccgaacugaaguguuuuggcaacaccgcuguggccaaaugcaaugagaagcaugacgaagaguucugcgauaugcuuagacuguuugacuucuguaaacaggcuauucagcggcucaaggccccugcgcagaugagcauccaacugauuaacaaagccgugaaugcucuuaucaacgaucagcugaucaugaagaaucaccuccgcgacauuauggggauccccuauugcaacuacuccaaguauugguaccugaaucacacaaccacaggaagaaccagccugccuaaauguuggcucgucucuaacggcuccuaccugaaugaaacgcauuucagcgacgauauugagcagcaagccgacaacaugaucacagagaugcuucagaaggaauauauggagcggcaggggaaaaccccgcugggacucguugaucuguuuguguucucuaccagcuuuuaccugauuuccaucuuccuucaccucgugaagauccccacacaucgccacauugucggcaaaucuugcccuaagccccauagacugaaucacaugggcaucuguagcugcgggcuguauaaacagccuggagugcccguuaaguggaagcggugaggacuagucccuguucccagagcccacuuuuuuuucuuuuuuugaaauaaaauagccugucuuucagaucucaaaggcucuuuucagagccaccaaaaaaaaaaaaaaaaaaaaaaaaaaaaaaaaaaaaaaaaaaaaaaaaaaaaaaaaaaaaaaaaaaaaaaaaaaaaaaaaaaaaaaaaaaaaaaaaaaaaa

SEQ ID NO: 30145 - RNA, 1748 nt, Artificial Sequence
  mRNA product Design a-1 (hSL-A100) comprising derived and/or modified sequence from LASV(LM765-SLE-2012;Clade IV)__AIT17814__GPCmut6 (opt5)
aggagagucccgcagucggcguccagcggcucugcuuguucgugugugugucguugcaggccuuauucaagcuuaccaugggccagaucgugaccuucuuucaagaggucccccacguuauugaagaggugaugaacaucgugcugauugcccucagcauccuggcuguccuuaaggggcuguacaauuucgccacaugcggacucgugggccugguuacguuucuucugcucugugggagauccugcaccacaucucuguauaaaggaguguacgaacugcagacccucgagcugaacauggaaacacuuaauauguguaugccucugagcugcaccaagaacaauucccaucacuauauuauggucggcaacgagacagggcucgagcugacccuuacgaauaccucuaucaucgaccauaaauucuguaaccugagcgaugcgcaccggaagaaucucuacgaccaugcucugauguccauuaucucuacauuucaccugagcauuccgaacuucaaucaguaugaagccauguccugcgauuuuaacggaggcaaaaucagcgugcaguacaaucucucucacuccuaugccaaggacgcugccgaucauuguggcaccguugcuaacggggugcugcaaacauucaugcgcauggccuggggaggcagcuacauugcgcuugacucugggagaggacggugggauugcaucaugaccuccuaccaguaucugauuauccagaauacgacaugggaggaccacugucaguuuagccgccccucuccuaucggcuaccucgggcugcuuucccaaagaacccgggauauuuauaucagccgcagacugcucggaacauucaccuggacccuguccgacucugaaggcaaggauacacccggcggguacugccugacgcgguggaugcucauugaggccgagcugaaauguuuuggaaacaccgcugucgccaagugcaacgaaaaacaugacgaggaguucugcgauaugcuucgccuguuugacuucuguaagcaggcuauccagagacucaaagccccugcgcagaugagcauucaacugaucaauaaggccgugaacgcucuuaucaaugaccagcugauuaugaagaaccaccuccgggauaucaugggcauucccuauugcaauuacuccaaauauugguaccugaaccacacaaccacagggaagaccagccugccuaaauguuggcucgugucuaauggauccuaccugaacgaaacgcauuucagcgacgauaucgaacagcaagccgacaauaugauuacagagaugcuucagaaggaguauauggaacgccagggcaaaaccccgcuggggcucgucgaucuguuuguuuucucuaccagcuuuuaccugaucuccaucuuccuucaccucgugaagauucccacacauagacacaucgugggaaaaccuugccccaagccucaucggcugaaccacaugggcauuuguucuugcggccuguauaagcagcccggggucccggugaaauggaagcgcugaggacuagucccuguucccagagcccacuuuuuuuucuuuuuuugaaauaaaauagccugucuuucagaucucaaaggcucuuuucagagccaccaaaaaaaaaaaaaaaaaaaaaaaaaaaaaaaaaaaaaaaaaaaaaaaaaaaaaaaaaaaaaaaaaaaaaaaaaaaaaaaaaaaaaaaaaaaaaaaaaaaaa

SEQ ID NO: 30146 - RNA, 1748 nt, Artificial Sequence
  mRNA product Design a-1 (hSL-A100) comprising derived and/or modified sequence from LASV(LM776-SLE-2012;Clade IV)__AIT17824__GPCmut6 (opt5)
aggagagucccgcagucggcguccagcggcucugcuuguucgugugugugucguugcaggccuuauucaagcuuaccaugggccagaucgugaccuucuuucaagaggucccccacguuauugaagaggugaugaacaucgugcugauugcccucagcauccuggcuguccuuaaggggcuguacaauuucgccacaugcggacucgugggccugguuacguuucuucugcucugugggagauccugcaccacaucuguguauaaaggagucuacgaacugcagacccuggagcucaacauggaaacacugaauauguguaugccucuuagcugcaccaagaacaauucccaucacuauauuauggugggcaacgagacagggcuggagcucacccugacgaauaccucuaucaucaaccauaaauucuguaaucuuagcgacgcgcacaagaaaaaccuguacgaucaugcucucauguccauuaucucuacauuucaccugagcauuccgaauuucaaccaguaugaagccauguccugcgacuuuaauggaggcaagaucagcguucaguacaaccugucucacuccuaugccggcgaugcugccaaucauugugggaccguggcuaacggaguccuccaaacauucaugcggauggccuggggcgggagcuacauugcgcuggacucuggacacggcaagugggauugcaucaugaccuccuaccaguaucuuauuauccagaacacgacaugggaggaccauugucaguuuagccgccccucuccuaucggguaccugggacuccugucccaaagaacccgggauauuuauaucagccgcagacuucugggcacauucaccuggacccucuccgacucugaaggcaaagauacacccgggggauacugccugacgcgguggaugcugauugaggccgagcucaaguguuuuggcaauaccgcuguggccaaaugcaacgaaaagcacgacgaggaguucugcgauaugcugcgccuuuuugacuucuguaaacaggcuauccagagacugaaggccccugcgcagaugagcauucaacucaucaauaaggccgugaacgcucugaucaaugaucagcuuauuaugaaaaaccaucugcgggacaucauggggauucccuauugcaauuacuccaaguauugguaccucaaccacacaaccacaggaaaaaccagccugccuaaguguuggcuggucucuaauggcuccuaccucaacgaaacgcacuucagcgacgauaucgaacagcaagccgacaauaugauuacagagaugcugcagaaagaguauauggaacgccaggggaagaccccgcuuggacugguugaucucuuuguguucucuaccagcuuuuaccugaucuccaucuuccugcaucuugugaaaauucccacacacagacauaucgucggcaagucuugcccuaagccccaccggcucaaccacaugggcauuuguagcugcgggcuguauaaacagccuggagugcccguucgcuggaagagaugaggacuagucccuguucccagagcccacuuuuuuuucuuuuuuugaaauaaaauagccugucuuucagaucucaaaggcucuuuucagagccaccaaaaaaaaaaaaaaaaaaaaaaaaaaaaaaaaaaaaaaaaaaaaaaaaaaaaaaaaaaaaaaaaaaaaaaaaaaaaaaaaaaaaaaaaaaaaaaaaaaaaa

SEQ ID NO: 30147 - RNA, 1748 nt, Artificial Sequence
  mRNA product Design a-1 (hSL-A100) comprising derived and/or modified sequence from LASV(Mad39;Clade IV)__ANH09722__GPCmut6 (opt5)
aggagagucccgcagucggcguccagcggcucugcuuguucgugugugugucguugcaggccuuauucaagcuuaccaugggccagaucgugaccuucuuucaagaggucccccacguuauugaagaggugaugaacaucgugcugauugcccucagcauccuggcuguccuuaaggggcuguacaauguggccacaugcggacucauuggccugguuacguuccuucugcucugugggagauccugcaccacaacccuguauaaaggaguguacgaacugcaggcgcucgagcugaacauggaaacacuuaauauguguaugccucugucuugcaccaagaacaauagccaucacuauauccgggucggcaacgagacagggcucgagcugacccuuacgaauaccucccugaucaaccauaaauuuuguaaucucucugacgcucacaagaaaaaccuguacgaucaugcccugaugagcauuaucuccacauuccaccucucuauuccgaauuuuaaccaguaugaagccaugagcugcgacuucaaugauggaaagaucuccgugcaguacaaccugagccacaccuaugcuggcgacacagccaaucauuguggcaccguugcuaacggggugcuucaaacguuuaugcgcauggccuggggaggcucuuacauugcgcuggauuccgggagaggaggcugggacugcaucaugacaagcuaccaguaucucauuauccagaacaccacaugggaggaucacugucaguucucucggcccuccccuaucggguaccugggacuucugagccaacgcaccagagacauuuauaucucucggcgccuccugggcaccuuuacauggacgcuguccgauagcgaaggcaaggacacccccgggggauacugccucacaagauggaugcugauugaggccgagcuuaaauguuucggcaauaccgcugucgccaagugcaacgaaaaacaugaugaggaauuuugcgacaugcugcgccucuucgauuuuuguaagcaggcuauccagcggcugaaagccccugcgcagauguccauucaacuuaucaauaaggccgugaacgcucugaucaaugaccagcucauuaugaagaaccaccugagagacaucauggggauucccuauugcaauuacucuaaauauugguaccugaaccacacagugaccggaaagacgagccucccuaaauguuggcuggucuccaauggcagcuaccuuaacgagacacauuucucugaugacaucgaacagcaagccgauaauaugauuaccgagaugcugcagaaggaguauauggaacggcaggggaaaaccccgcucggacugguugaccuguucguguuuuccaccagcuucuaccuuaucucuaucuuucuccaccuggugaagauucccacacaucgccacgucgugggcaaaccuugccccaagccucauagacugaaccacaugggcaucuguagcugcggguucuauaagcagcccggaguuccggugcgguggaaacgcugaggacuagucccuguucccagagcccacuuuuuuuucuuuuuuugaaauaaaauagccugucuuucagaucucaaaggcucuuuucagagccaccaaaaaaaaaaaaaaaaaaaaaaaaaaaaaaaaaaaaaaaaaaaaaaaaaaaaaaaaaaaaaaaaaaaaaaaaaaaaaaaaaaaaaaaaaaaaaaaaaaaaa

SEQ ID NO: 30148 - RNA, 1748 nt, Artificial Sequence
  mRNA product Design a-1 (hSL-A100) comprising derived and/or modified sequence from LASV(Z0947-SLE-2011;Clade IV)__AIT17840__GPCmut6 (opt5)
aggagagucccgcagucggcguccagcggcucugcuuguucgugugugugucguugcaggccuuauucaagcuuaccaugggccagaucgugaccuucuuucaagaggucccccacguuauugaagaggugaugaacaucgugcugauugcccucagcauccuggcuguccuuaaggggcuguacaauuucgccacaugcggacucgugggccugguuacguuucuucugcucugugggagauccugcaccauuucucuguauaaaggaguguacgaacugcagacacucgagcugaacauggaaacccuuaauauguguaugccucugagcugcacaaagaacaauucccaucacuauaucauggucggcaacgagaccgggcucgagcugacacuuaccaauacgucuaucauuaaccauaaauucuguaaucugagcgacgcgcacaagaaaaaccucuacgaucaugcucugauguccaucauuucuaccuuucaccugagcaucccgaauuucaaccaguaugaagccauguccugcgacuuuaauggaggcaagauuagcgugcaguacaaccucucucacuccuaugccggcgaugcugccaaucauugugggacaguugcuaacggagugcugcaaaccuucaugcggauggccuggggcgggagcuacaucgcgcuugacucuggacgcgauagaugggacugcauuaugacauccuaccaguaucugaucauccagaacaccacgugggaggaucacugucaguuuagccggcccucuccuauuggcuaccucgggcugcuuucccaacgcacaagagacaucuauauuagccggcgccugcucggaaccuucacauggacccuguccgauucugaaggcaaggacacccccggcggguacugccugacaagauggaugcucaucgaggccgagcugaaauguuuuggaaauacggcugucgccaagugcaacgaaaaacaugaugaggaguucugcgacaugcuucggcuguuugauuucuguaagcaggcuauucagcgccucaaagccccugcgcagaugagcauccaacugaucaauaaggccgugaacgcucuuauuaaugaccagcugaucaugaagaaccaccucagagacauuaugggcauccccuauugcaauuacuccaaauauugguaccugaaccacaccacaaccgggaagacaagccugccuaaauguuggcucgugucuaauggauccuaccugaacgaaacccauuucagcgaugacauugaacagcaagccgauaauaugaucacggagaugcuucagaaggaguauauggaacggcagggcaaaacaccgcuggggcucgucgaccuguuuguuuucucuaccagcuuuuaccugaucuccauuuuccuucaccucgugaagauccccacccaucgccacauugugggaaaaccuugccccaagccucauagacugaaccacaugggcaucuguucuugcggccuguauaagcagcccggggucccggugaaauggaagcggugaggacuagucccuguucccagagcccacuuuuuuuucuuuuuuugaaauaaaauagccugucuuucagaucucaaaggcucuuuucagagccaccaaaaaaaaaaaaaaaaaaaaaaaaaaaaaaaaaaaaaaaaaaaaaaaaaaaaaaaaaaaaaaaaaaaaaaaaaaaaaaaaaaaaaaaaaaaaaaaaaaaaa

SEQ ID NO: 30149 - RNA, 1724 nt, Artificial Sequence
  mRNA product Design a-1 (A100) comprising derived and/or modified sequence from LASV(Josiah;Clade IV)__NP_694870__GPCmut6 (opt1)
aggagagucccgcagucggcguccagcggcucugcuuguucgugugugugucguugcaggccuuauucaagcuuaccaugggccagaucgugaccuucuuccaggaggucccccacgugaucgaggaggugaugaacaucguccugaucgcccucagcgugcuggccgugcugaaggggcucuacaacuucgcgaccugcggccuggucgggcuggugacguuccuccugcugugcggccgcuccugcaccaccagccucuacaaggggguguacgagcugcagacccuggagcucaacauggagacgcugaacaugugcaugccgcuguccugcaccaagaacaacagccaccacuacaucauggucggcaacgagaccggccucgagcugacgcugaccaacaccuccaucaucaaccacaaguucugcaaccucagcgacgcccacaagaagaaccuguacgaccacgcccugauguccaucaucagcaccuuccaccucuccauccccaacuucaaccaguacgaggccaugagcugcgacuucaacgggggcaagaucuccgugcaguacaaccugagccacuccuacgccggggacgcggccaaccacugcggcacgguggccaacgggguccugcagaccuucaugcggauggccuggggcggcagcuacaucgcgcucgacuccgggcgcggcaacugggacugcaucaugaccagcuaccaguaccugaucauccagaacaccacgugggaggaccacugccaguucucccggcccagccccaucggguaccugggccuccugucccagcgcacccgggacaucuacaucagccgccggcugcucggcaccuucaccuggacgcugagcgacuccgaggggaaggacaccccgggcggguacugccugacccgcuggaugcucaucgaggccgagcugaagugcuucggcaacaccgccguggccaagugcaacgagaagcacgacgaggaguucugcgacaugcugcggcuguucgacuucugcaagcaggccauccagcgccugaaggcgcccgcccagaugagcauccagcugaucaacaaggccgugaacgcccucaucaacgaccagcugaucaugaagaaccaccuccgggacaucauggggauccccuacugcaacuacuccaaguacugguaccucaaccacacgaccaccggccgcaccagccugcccaagugcuggcuggucuccaacggcagcuaccucaacgagacgcacuucuccgacgacaucgagcagcaggccgacaacaugaucaccgagaugcugcagaaggaguacauggagcggcaggggaagacgccccugggccucguggaccuguucguguucagcaccuccuucuaccugaucagcaucuuccugcaccucgucaagaucccgacccaccgccacaucguggggaaguccugccccaagccccaccggcugaaccacaugggcaucugcagcugcgggcuguacaagcagcccggcgugccggucaaguggaagcgcugaggacuagucccuguucccagagcccacuuuuuuuucuuuuuuugaaauaaaauagccugucuuucagaucuaaaaaaaaaaaaaaaaaaaaaaaaaaaaaaaaaaaaaaaaaaaaaaaaaaaaaaaaaaaaaaaaaaaaaaaaaaaaaaaaaaaaaaaaaaaaaaaaaaaa

SEQ ID NO: 30150 - RNA, 1721 nt, Artificial Sequence
  mRNA product Design a-1 (A100) comprising derived and/or modified sequence from LASV(LP;Clade I)__AAF86701__GPCmut6 (opt1)
aggagagucccgcagucggcguccagcggcucugcuuguucgugugugugucguugcaggccuuauucaagcuuaccaugggccagaucaucaccuucuuccaggaggugccccacgucaucgaggaggugaugaacaucgugcugaucgcccucagccugcuggccauccucaaggggcuguacaacaucgcgaccugcggcaucaucgggcuggucgccuuccucuuccugugcggcaaguccugcagccugacgcucaagggcggguacgagcugcagacccuggagcucaacauggagacccugaacaugugcaugccgcuguccugcacgaagaacagcucccaccacuacauccgcgugggcaacgagaccgggcucgagcugacccugaccaacacgagcaucaucaaccacaaguucugcaaccucuccgacgcccacaagaagaaccuguacgaccacgcccugaugagcaucaucuccaccuuccaccucagcauccccaacuucaaccaguacgaggccauguccugcgacuucaacggcgggaagaucagcgugcaguacaaccugucccacagcuacgcgggcgacgccgccgagcacugcgggaccgucgccaacggcgugcugcagaccuucaugcggauggcguggggcgggcgcuacaucgcccucgacuccggcaaggggaacugggacugcaucaugacgagcuaccaguaccugaucauccagaacaccaccugggaggaccacugccaguucucccggcccagccccaucggcuaccugggccuccugucccagcgcacccgggacaucuacaucagccgccggcugcucgggacguucaccuggacccugagcgacuccgagggcaacgagacccccgggggcuacugccugacgcgcuggaugcucaucgaggccgagcugaagugcuucgggaacaccgccguggccaagugcaacgagaagcacgacgaggaguucugcgacaugcugcggcuguucgacuucugcaagcaggcgauccgccggcugaaggcccccgcccagaugagcauccagcugaucaacaaggccgucaacgcccucaucaacgaccagcugaucaugaagaaccaccuccgcgacaucaugggcauccccuacugcaacuacuccaaguacugguaccucaaccacaccagcuccggccggaccagccugcccaagugcuggcugaucuccaacgggagcuaccucaacgagacgcaguucuccgacgacaucgagcagcaggcggacaacaugaucaccgagaugcugcagaaggaguacaucgagcgccagggcaagaccccgcuggggcucguggacaucuucaucuucagcaccuccuucuaccugaucagcaucuuccugcaccugaucaagaucccgacgcaccggcacaucgugggcaagcccugccccaagccccaccgccucaaccacaugggggucugcuccugcggccuguacaagcacccgggcgugcccaccaaguggaagcggugaggacuagucccuguucccagagcccacuuuuuuuucuuuuuuugaaauaaaauagccugucuuucagaucuaaaaaaaaaaaaaaaaaaaaaaaaaaaaaaaaaaaaaaaaaaaaaaaaaaaaaaaaaaaaaaaaaaaaaaaaaaaaaaaaaaaaaaaaaaaaaaaaaaaa

SEQ ID NO: 30151 - RNA, 1721 nt, Artificial Sequence
  mRNA product Design a-1 (A100) comprising derived and/or modified sequence from LASV(803213;Clade II)__AAF86703__GPCmut6 (opt1)
aggagagucccgcagucggcguccagcggcucugcuuguucgugugugugucguugcaggccuuauucaagcuuaccaugggccagaucaucaccuucuuccaggaggugccccacgucaucgaggaggugaugaacaucgugcugaucgcccucagccugcuggccauccucaaggggaucuacaacgucgcgaccugcggccuguucgggcugaucuccuuccuccugcugugcggccgcagcugcuccgugacguacaaggggguguacgagcuccagacccuggagcugaacauggccaaccucaacaugugcaugccgcugagcugcaccaagaacaacucccaccacuacaucauggucggcaacgagacgggccuggagcucacccugaccaacaccagcaucaucaaccacaaguucugcaaccuguccgacgcccacaagaagaaccucuacgaccacgcccugaugagcaucaucuccacguuccaccugagcauccccaacuucaaccaguacgaggccauguccugcgacuucaacgggggcaagaucagcgugcaguacaaccucucccacagcuucgcgguggacgccgccaaccacugcgggaccaucgccaacggcguccugcagaccuucaugcggauggcguggggcggguccuacaucgcccuggacagcggcaaggggaacugggacugcaucaugaccuccuaccaguaccucaucauccagaacacgaccugggaggaccacugccaguucagccgccccucccccaucggcuaccuggggcugcucagccagcggacccgcgacaucuacaucagccggcgccugcugggcaccuucacguggacccucuccgacagcgagggcaacgaggcccccgggggcuacugccugacccgguggaugcugaucgaggccgagcucaagugcuucgggaacaccgccguggcgaagugcaacgagaagcacgacgaggaguucugcgacaugcugcgccuguucgacuucugcaagcaggccaucaagcggcucaagacgcccgcccagauguccauccagcugaucaacaaggccgugaacgcccugaucaacgaccagcucaucaugaagaaccaccuccgcgacaucaugggcauccccuacugcaacuacagccgguacugguaccugaaccacaccgucaccgggaagaccucccugccccgcugcuggcuggugagcaacggcuccuaccugaacgagacgcacuucagcgacgacaucgagcagcaggcggacaacaugaucaccgagaugcuccagaaggaguacauggaccggcagggcaagaccccgcuggggcugguggaccucuucgucuucuccaccagcuucuaccugaucuccaucuuccugcaccuggugaagaucccgacgcaccgccacaucgugggcaagcccugccccaagccccaccggcucaaccacauggggaucugcagcugcggccuguacaagcacccggggguccccgugaaguggaagcgcugaggacuagucccuguucccagagcccacuuuuuuuucuuuuuuugaaauaaaauagccugucuuucagaucuaaaaaaaaaaaaaaaaaaaaaaaaaaaaaaaaaaaaaaaaaaaaaaaaaaaaaaaaaaaaaaaaaaaaaaaaaaaaaaaaaaaaaaaaaaaaaaaaaaaa

SEQ ID NO: 30152 - RNA, 1721 nt, Artificial Sequence
  mRNA product Design a-1 (A100) comprising derived and/or modified sequence from LASV(GA391;Clade III)__CAA36645__GPCmut6 (opt1)
aggagagucccgcagucggcguccagcggcucugcuuguucgugugugugucguugcaggccuuauucaagcuuaccaugggccagaucgugaccuucuuccaggaggucccccacgugaucgaggaggugaugaacaucguccugaucgcccucagcauccuggccauccugaaggggcucuacaacguggcgaccugcggccugaucgggcuggugacguuccuccugcuguccggccgcagcugcucccucaucuacaaggggaccuacgagcugcagacccuggagcucaacauggagacccugaacaugugcaugccgcugagcugcaccaagaacaacucccaccacuacauccgggucggcaacgagaccggccucgagcugacccugacgaacaccagcauccucaaccacaaguucugcaaccuguccgacgcccacaagcgcaaccuguacgaccacagccucauguccaucaucagcaccuuccaccuguccauccccaacuucaaccaguacgaggccaugagcugcgacuucaacgggggcaagaucaccgugcaguacaaccugucccacagcuucgccguggacgccgcggggcacugcggcacgcucgccaacgggguccugcagaccuucaugcggauggccuggggcggcuccuacaucgcccuggacagcgggcgcggcaacugggacugcaucaugaccuccuaccaguaccucaucauccagaacaccacgugggacgaccacugccaguucagccggcccucccccaucggguaccugggccugcucagccagcgcacccgggacaucuacaucagccgccggcugcugggcaccuucaccuggacgcucuccgacagcgaggggaacgagaccccgggcggguacugccugacccgcuggaugcugaucgaggcggagcucaagugcuucggcaacaccgccguggccaagugcaacgagaagcacgacgaggaguucugcgacaugcugcggcuguucgacuucugcaagcaggccauccgccggcucaagacgcccgcccagauguccauccagcugaucaacaaggcggugaacgcccugaucaacgaccagcucaucaugaagaaccaccuccgcgacaucauggggauccccuacugcaacuacagccgguacugguaccugaaccacaccuccaccggcaagaccagccugccccgcugcuggcugaucuccaacggcagcuaccugaacgagacgaaguucuccgacgacaucgagcagcaggccgacaacaugaucaccgagaugcuccagaaggaguacaucgaccggcaggggaagacgccccugggccuggucgaccuguucguguucagcaccuccuucuaccucaucagcaucuuccugcaccuggugaagaucccgacccaccgccacaucgucgggaagcccugccccaagccccaccggcucaaccacaugggcaucugcuccugcgggcuguacaagcagccgggcgugcccgugcgcuggaagcggugaggacuagucccuguucccagagcccacuuuuuuuucuuuuuuugaaauaaaauagccugucuuucagaucuaaaaaaaaaaaaaaaaaaaaaaaaaaaaaaaaaaaaaaaaaaaaaaaaaaaaaaaaaaaaaaaaaaaaaaaaaaaaaaaaaaaaaaaaaaaaaaaaaaaa

SEQ ID NO: 30153 - RNA, 1724 nt, Artificial Sequence
  mRNA product Design a-1 (A100) comprising derived and/or modified sequence from LASV(AV;Clade V)__CCA30314__GPCmut6 (opt1)
aggagagucccgcagucggcguccagcggcucugcuuguucgugugugugucguugcaggccuuauucaagcuuaccaugggccagaucgugaccuucuuccaggaggucccccacgugaucgaggaggugaugaacaucguccugaucgcccucagcauccuggccgugcugaaggggcucuacaacaucgcgaccugcggccugaucgggcugaucacguuccuccugcugugcggccgcuccugcagcuccaaccucuacaaggggguguacgagcugcagagccuggaccucaacauggagacccugaacaugugcaugccgcuguccugcaccaagaacaacagccaccacuacauccgggucggcaacgacacgggccucgagcugacccugaccaacaccuccauccucaaccacaaguucugcaaccugagcgacgcccacaagaaggaccuguacgaccacgcccucauguccaucaucagcacguuccaccuguccauccccaacuucaaccaguacgaggccaugagcugcgacuucaacgggggcaagaucuccgugcaguacaaccugagccacuccuacgccaucgacgcggccaaccacugcgggaccguggccaacggcauccuccagaccuucaugcgcauggccuggggcgggagcuacaucgcgcuggacuccggccgggggaacugggacugcaucaugaccagcuaccaguaccugaucauccagaacacgaccugggagaaccacugccaguucucccgccccagccccaucggcuaccucgggcugcugagccagcggacccgcgacaucuacaucucccggcgccuccugggcaccuucacguggacccugagcgacuccgagggcaacgccacccccgggggcuacugccucacccgguggaugcugaucgaggccgagcugaagugcuucgggaacacggccgucgccaagugcaacgagaagcacgacgaggaguucugcgacaugcuccgccuguucgacuucugcaagcaggcgaucagccggcugaagucccccgcccagaugagcauccagcucaucaacaaggccgugaacgcccugaucaacgaccagcugaucaugaagaaccaccuccgcgacaucaugggcauccccuacugcaacuacuccaaguacugguaccugaaccacaccaucaccgggaagaccagccugcccaagugcuggcucguguccaacggcagcuaccugaacgagacgcacuucuccgacgacaucgagcagcaggccgacaacaugaucaccgagaugcugcagaaggaguacauggagcggcagggcaagaccccgcucgggcuggucgaccuguucguguucagcaccuccuucuaccugaucagcaucuuccuccgccuggugaagaucccgacgcaccggcacaucgucggcaagcccugccccaagccccaccgccugaaccacauggggaucugcuccugcggccucuacaagcagccgggggugcccgugcgguggaagcgcugaggacuagucccuguucccagagcccacuuuuuuuucuuuuuuugaaauaaaauagccugucuuucagaucuaaaaaaaaaaaaaaaaaaaaaaaaaaaaaaaaaaaaaaaaaaaaaaaaaaaaaaaaaaaaaaaaaaaaaaaaaaaaaaaaaaaaaaaaaaaaaaaaaaaa

SEQ ID NO: 30154 - RNA, 1721 nt, Artificial Sequence
  mRNA product Design a-1 (A100) comprising derived and/or modified sequence from LASV(Togo/2016/7082;Clade VI)__AMR44577__GPCmut6 (opt1)
aggagagucccgcagucggcguccagcggcucugcuuguucgugugugugucguugcaggccuuauucaagcuuaccaugggccagaucaucaccuucuuccaggaggugccccacgucaucgaggaggugaugaacaucgugcugaucgcccucagccugcuggccauccucaagggggucuacaacguggcgaccugcggcaucaucgggcuggugacguuccuguuccucugcggccgcuccugcagccugaucuacaagggguccuacgagcugcagacccucgagcugaacauggagacccugaacaugugcaugccgcucagcugcacgaagaacuccagccaccacuacauccgggucggcaacgagaccggccuggagcugacccucaccaacacguccaucaucaaccacaaguucugcaaccugagcgacgcccacaagcgcaaccuguacgaccacgcccucauguccauccugagcaccuuccaccuguccauccccaacuucaaccaguacgaggccaugagcugcgacuucaacgggggcaagaucuccgugcaguacaaccucagccacgccuacgcgguggacgccgccgagcacugcgggaccgucgccaacggcgugcugcagaccuucaugcggauggcguggggcggguccuacaucgcccuggacagcggccgcgggaacugggacugcaucaugacguccuaccaguaccucaucauccagaacaccaccugggaggaccacugccaguucagccggcccucccccaucggcuaccuggggcugcucagccagcgcacccgggacaucuacaucagccgccggcugcugggcacguucaccuggacccucuccgacagcgagggcaacgagacccccgggggcuacugccugacgcgcuggaugcugaucgaggccgagcucaagugcuucgggaacaccgccguggccaagugcaacgagaagcacgacgaggaguucugcgacaugcugcggcuguucgacuucugcaagcaggcgauccagcgccucaagucccccgcccagaugagcauccagcugaucaacaaggccgucaacgcccugaucaacgaccagcucaucaugaagaaccaccuccgggacaugaugggcauccccuacugcaacuacuccaaguacugguaccugaaccacaccagcuccgggcgcaccagccugcccaagugcuggcugguguccaacggcagcuaccugaacgagacgcacuucuccgacgacaucgagcagcaggccgacaacaugaucaccgagaugcuccagaaggaguacaucgaccggcagggcaagaccccgcuggggcugguggaccucuucgucuucagcaccuccuucuaccugaucagcaucuuccugcaccugaucaagaucccgacgcaccgccacaucgugggcaagcccugccccaagccccaccggcucaaccacauggggaucugcuccugcggccuguacaagcagccgggggugcccacccgcuggaagcggugaggacuagucccuguucccagagcccacuuuuuuuucuuuuuuugaaauaaaauagccugucuuucagaucuaaaaaaaaaaaaaaaaaaaaaaaaaaaaaaaaaaaaaaaaaaaaaaaaaaaaaaaaaaaaaaaaaaaaaaaaaaaaaaaaaaaaaaaaaaaaaaaaaaaa

SEQ ID NO: 30155 - RNA, 1721 nt, Artificial Sequence
  mRNA product Design a-1 (A100) comprising derived and/or modified sequence from LASV(KAK-428;Clade n.d. (VII))__ANH09740__GPCmut6 (opt1)
aggagagucccgcagucggcguccagcggcucugcuuguucgugugugugucguugcaggccuuauucaagcuuaccaugggccagaucgugaccuucuuccaggaggucccccacgugaucgaggaggugaugaacaucguccugaucgcccucagccugcuggccauccucaaggggcuguacaacuucgcgaccugcggcgugaucgggcugaucacguuccuccugcugugcggccgcuccugcagcgccaccuacaaggggcaguacgagcuccagacccuggagcugaacauggagucccucaacaugugcaugccgcugagcugcacgaagaacaacucccaccacuacauccgggccggcaacaacaccggccuggagcucacccugaccaacacgagcaucaucucccacaaguucugcaaccugagcgacgcccacaagaagaaccucuacgaccacacccugauguccaucaucaccaccuuccaccugagcauccccaacuucaaccaguacgaggccauguccugcgacuucaacgggggcaagaucagcauccaguacaaccucucccacagcuacgcgggggacgccgcccagcacugcggcacgguggccaacgggguccugcagaccuucaugcgcauggcguggggcggcuccuaccuggcccucgacagcgggcggcgcggcugggacugcaucaucuccagcuaccaguaccugaucauccagaacaccaccugggacgaccacugccaguucucccggcccagccccaucggguaccugggcuucgugagccagaagacgcgcgacaucuacaucucccggcgccuccugggcaccuucaccuggacccugagcgacuccgaggggcacgacaugccgggcggguacugccucacgcgguggaugcugaucgaggccgaccugaagugcuucggcaacaccgccguggccaagugcaacgagaagcacgacgaggaguucugcgacauguggcgccucuucgacuucugcaagcaggcgauccagcggcugaaggcccccgcccagaugaacauccagcugaucaacaaggccgucaacgcccucaucaacgaccagcugaugaugaagaaccaccuccgcgacaucauggggauccccuacugcaacuacagcaaguucugguaccugaacaacaccaccacgggccggaccucccugccccgcugcuggcugaucagcaacggcuccuaccucaacgagacccacuucagcgacgacaucgagcagcaggcggacaacaugaucaccgagaugcugcagaaggaguacauggaccggcaggggaagacgccccugggccucguggaccuguucguguucuccaccagcuucuaccugaucaccaucuuccuccaccuggucaagaucccgacccaccgccacaucguggggaagcccugccccaagccccaccggcugaaccacaugggcaucugcuccugcgggcuguacaagcagccgggcgugcccguccgcuggaagcggugaggacuagucccuguucccagagcccacuuuuuuuucuuuuuuugaaauaaaauagccugucuuucagaucuaaaaaaaaaaaaaaaaaaaaaaaaaaaaaaaaaaaaaaaaaaaaaaaaaaaaaaaaaaaaaaaaaaaaaaaaaaaaaaaaaaaaaaaaaaaaaaaaaaaa

SEQ ID NO: 30156 - RNA, 1721 nt, Artificial Sequence; identical to SEQ ID NO: 30150
  mRNA product Design a-1 (A100) comprising derived and/or modified sequence from LASV(Pinneo-NIG-1969;Clade I)__AIT17836__GPCmut6 (opt1)

SEQ ID NO: 30157 - RNA, 1721 nt, Artificial Sequence
  mRNA product Design a-1 (A100) comprising derived and/or modified sequence from LASV(ISTH0009-NIG-2011;Clade II)__AIT17404__GPCmut6 (opt1)
aggagagucccgcagucggcguccagcggcucugcuuguucgugugugugucguugcaggccuuauucaagcuuaccaugggccagaucaucaccuucuuccaggaggugccccacgucaucgaggaggugaugaacaucgugcugaucgcccucagccugcuggccauccucaaggggaucuacaacgucgcgaccugcggccuguucgggcugguguccuuccuccugcugugcggccgcagcugcuccacgaccuacaaggggguguacgagcuccagacccuggagcuggacauggccagccucaacaugugcaugccgcuguccugcacgaagaacaacagccaccacuacaucauggucggcaacgagaccggccuggagcucacccugaccaacacguccaucaucaaccacaaguucugcaaccugagcgacgcccacaagaagaaccucuacgaccacgcccugauguccaucaucagcaccuuccaccuguccauccccaacuucaaccaguacgaggccaugagcugcgacuucaacgggggcaagaucuccgugcaguacaaccucagccacgcguacgccguggacgccgccaaccacugcgggaccaucgcgaacggcguccugcagaccuucaugcggauggccuggggcggguccuacaucgcccuggacagcggcaagggguccugggacugcaucaugacgagcuaccaguaccucaucauccagaacaccaccugggaggaccacugccaguucucccgccccagccccaucggcuaccuggggcugcucagccagcggacccgcgacaucuacaucucccggcgccugcugggcacguucaccuggacccucagcgacuccgagggcaacgagacccccgggggcuacugccugacgcgguggaugcugaucgaggccgagcucaagugcuucgggaacaccgccguggcgaagugcaacgagaagcacgacgaggaguucugcgacaugcugcgccuguucgacuucugcaagcaggccauccggcgccucaagacccccgcccagaugagcauccagcugaucaacaaggccgugaacgcccugaucaacgaccagcucaucaugaagaaccaccuccgggacaucaugggcaucccguacugcaacuacuccaaguacugguaccugaaccacaccgucacggggaagaccagccugccccgcugcuggcugguguccaacggcagcuaccugaacgagacccacuucuccgacgacaucgagcagcaggcggacaacaugaucaccgagcuccugcagaaggaguacauggaccggcagggcaagacgccccuggggcucguggaccuguucgucuucagcaccuccuucuaccugaucagcaucuuccugcaccucaucaagaucccgacccaccgccacaucaccggcaagcccugccccaagccccaccggcugaaccacauggggaucugcuccugcggccuguacaagcacccgggggugcccgugaaguggaagcgcugaggacuagucccuguucccagagcccacuuuuuuuucuuuuuuugaaauaaaauagccugucuuucagaucuaaaaaaaaaaaaaaaaaaaaaaaaaaaaaaaaaaaaaaaaaaaaaaaaaaaaaaaaaaaaaaaaaaaaaaaaaaaaaaaaaaaaaaaaaaaaaaaaaaaa

SEQ ID NO: 30158 - RNA, 1721 nt, Artificial Sequence
  mRNA product Design a-1 (A100) comprising derived and/or modified sequence from LASV(ISTH2010-NIG-2012;Clade II)__AIT17482__GPCmut6 (opt1)
aggagagucccgcagucggcguccagcggcucugcuuguucgugugugugucguugcaggccuuauucaagcuuaccaugggccagaucaucaccuucuuccaggaggugccccacgucaucgaggaggugaugaacaucgugcugaucgcccucagccugcuggccauccucaaggggaucuacaacgucgcgaccugcggccuguucgggcugguguccuuccuccugcugugcggccgcagcugcuccacgaccuacaaggggguguacgagcuccagacccuggagcuggacauggccagccucaacaugugcaugccgcuguccugcacgaagaacaacagccaccacuacaucauggucggcaacgagaccggccuggagcucacccugaccaacacguccaucaucaaccacaaguucugcaaccugagcgacgcccacaagaagaaccucuacgaccacgcccugauguccaucaucagcaccuuccaccuguccauccccaacuucaaccaguacgaggccaugagcugcgacuucaacgggggcaagaucuccgugcaguacaaccucagccacgcguacgccguggacgccgccaaccacugcgggaccaucgcgaacggcguccugcagaccuucaugcggauggccuggggcggguccuacaucgcccuggacagcggcaagggguccugggacugcaucaugacgagcuaccaguaccucaucauccagaacaucaccugggaggaccacugccaguucucccgccccagccccaucggcuaccuggggcugcucagccagcggacccgcgacaucuacaucucccggcgccugcugggcaccuucacguggacccucagcgacuccgagggcaacgagacccccgggggcuacugccugacccgguggaugcugaucgaggccgagcucaagugcuucgggaacacggccguggcgaagugcaacgagaagcacgacgaggaguucugcgacaugcugcgccuguucgacuucugcaagcaggccauccggcgccucaagacccccgcccagaugagcauccagcugaucaacaaggccgugaacgcccugaucaacgaccagcucaucaugaagaaccaccuccgggacaucaugggcauccccuacugcaacuacuccaaguacugguaccugaaccacaccgucaccgggaagacgagccugccccgcugcuggcugguguccaacggcagcuaccugaacgagacccacuucuccgacgacaucgagcagcaggcggacaacaugaucaccgagcuccugcagaaggaguacaucgaccggcagggcaagaccccgcuggggcucguggaccuguucgucuucagcacguccuucuaccugaucagcaucuuccugcaccucgugaagaucccgacccaccgccacguggucggcaagcccugccccaagccccaccggcugaaccacauggggaucugcuccugcggccuguacaagcacccgggggugcccgugaaguggaagcgcugaggacuagucccuguucccagagcccacuuuuuuuucuuuuuuugaaauaaaauagccugucuuucagaucuaaaaaaaaaaaaaaaaaaaaaaaaaaaaaaaaaaaaaaaaaaaaaaaaaaaaaaaaaaaaaaaaaaaaaaaaaaaaaaaaaaaaaaaaaaaaaaaaaaaa

SEQ ID NO: 30159 - RNA, 1721 nt, Artificial Sequence
  mRNA product Design a-1 (A100) comprising derived and/or modified sequence from LASV(Lassa virus/H.sapiens-wt/NGA/2015/ISTH_0543;Clade II)__AVO03639__GPCmut6 (opt1)
aggagagucccgcagucggcguccagcggcucugcuuguucgugugugugucguugcaggccuuauucaagcuuaccaugggccagaucaucaccuucuuccaggaggugccccacgucaucgaggaggugaugaacaucgugcugaucgcccucagccugcuggccauccucaaggggaucuacaacgucgcgaccugcggccuguucgggcugguguccuuccuccugcugugcggccgcagcugcuccacgaccuacaaggggguguacgagcuccagacccuggagcuggacauggccaaccucaacaugugcaugccgcugagcugcacgaagaacaacucccaccacuacaucauggucggcaacgagaccggccuggagcucacccugaccaacacgagcaucaucaaccacaaguucugcaaccuguccgacgcccacaagaagaaccucuacgaccacgcccugaugagcaucaucuccaccuuccaccugagcauccccaacuucaaccaguacgaggccauguccugcgacuucaacgggggcaagaucagcgugcaguacaaccucucccacaccuacgcgguggacgccgccaaccacugcgggaccaucgccaacggcguccugcagacguucaugcggauggcguggggcgggagcuacaucgcccuggacuccggcaaggggagcugggacugcaucaugaccuccuaccaguaccucgugauccagaacaccaccugggaggaccacugccaguucagccgccccucccccaucggcuaccuggggcugcucagccagcggacgcgcgacaucuacaucagccggcgccugcugggcaccuucaccuggacccucuccgacagcgagggcaacgagacgcccgggggcuacugccugacccgguggaugcugaucgaggccgagcucaagugcuucgggaacaccgccguggccaagugcaacgagaagcacgacgaggaguucugcgacaugcugcgccuguucgacuucugcaagcaggcgauccggcgccucaagacccccgcccagauguccauccagcugaucaacaaggccgucaacgcccugaucaacgaccagcucaucaugaagaaccaccuccgggacaucaugggcauccccuacugcaacuacagcaaguacugguaccugaaccacacggugaccgggaagaccucccugccccgcugcuggcuggugagcaacggcuccuaccugaacgagacccacuucagcgacgacaucgagcagcaggccgacaacaugaucacggagcuccugcagaaggaguacaucgaccggcagggcaagaccccgcuggggcucgucgaccuguucguguucuccaccagcuucuaccugaucuccaucuuccugcaccucgugaagaucccgacccaccgccacaucacgggcaagcccugccccaagccccaccggcugaaccacauggggaucugcagcugcggccuguacaagcacccggggguccccgugaaguggaagcgcugaggacuagucccuguucccagagcccacuuuuuuuucuuuuuuugaaauaaaauagccugucuuucagaucuaaaaaaaaaaaaaaaaaaaaaaaaaaaaaaaaaaaaaaaaaaaaaaaaaaaaaaaaaaaaaaaaaaaaaaaaaaaaaaaaaaaaaaaaaaaaaaaaaaaa

SEQ ID NO: 30160 - RNA, 1721 nt, Artificial Sequence
  mRNA product Design a-1 (A100) comprising derived and/or modified sequence from LASV(Lassa virus/H.sapiens-wt/NGA/2016/ISTH_0009;Clade II)__AVO03571__GPCmut6 (opt1)
aggagagucccgcagucggcguccagcggcucugcuuguucgugugugugucguugcaggccuuauucaagcuuaccaugggccagaucaucaccuucuuccaggaggugccccacgucaucgaggaggugaugaacaucgugcugaucgcccucagccugcuggccauccucaaggggaucuacaacgucgcgaccugcggccugcuggggcucguguccuuccugcugcucugcggccgcagcugcuccacgaccuacaaggggguguacgagcugcagacccuggagcucgacauggccagccugaacaugugcaugccgcuguccugcacgaagaacaacagccaccacuacaucauggucggcaacgagaccggccucgagcugacccugaccaacacguccaucaucaaccacaaguucugcaaccucagcgacgcccacaagaagaaccuguacgaccacgcccugauguccaucaucagcaccuuccaccucuccauccccaacuucaaccaguacgaggccaugagcugcgacuucaacgggggccggaucuccgugcaguacaaccugagccacuccuacgcgguggacgccgccaaccacugcgggaccaucgccaacggcguccugcagaccuucaugcgcauggcguggggcgggagcuacaucgcccucgacuccggcaaggggagcugggacugcaucaugacguccuaccaguaccugaucauccagaacaccaccugggaggaccacugccaguucagccggcccagccccaucggcuaccuggggcuccugucccagcgcacccgggacaucuacaucagccgccggcugcucggcacguucaccuggacccuguccgacagcgagggcaacgagacccccgggggcuacugccugacgcgcuggaugcucaucgaggccgagcugaagugcuucgggaacaccgccguggccaagugcaacgagaagcacgacgaggaguucugcgacaugcugcggcuguucgacuucugcaagcaggcgauccgccggcugaagacccccgcccagauguccauccagcugaucaacaaggccgugaacgcccucaucaacgaccagcugaucaugaagaaccaccuccgcgacaucaugggcaucccguacugcaacuacagcaaguacugguaccucaaccacaccgucacggggaagaccucccugccccggugcuggcuggugagcaacggcuccuaccucaacgagacccacuucagcgacgacaucgagcagcaggccgacaacaugaucaccgagcugcugcagaaggaguacaucgaccgccagggcaagacgccccucgggcugguggaccuguucgucuucuccaccagcuucuaccugaucuccaucuuccuccaccuggugaagaucccgacccaccggcacaucaccggcaagcccugccccaagccccaccgccugaaccacauggggaucugcagcugcggccucuacaaccacccgggggugcccgucaaguggaagcggugaggacuagucccuguucccagagcccacuuuuuuuucuuuuuuugaaauaaaauagccugucuuucagaucuaaaaaaaaaaaaaaaaaaaaaaaaaaaaaaaaaaaaaaaaaaaaaaaaaaaaaaaaaaaaaaaaaaaaaaaaaaaaaaaaaaaaaaaaaaaaaaaaaaaa

SEQ ID NO: 30161 - RNA, 1721 nt, Artificial Sequence
  mRNA product Design a-1 (A100) comprising derived and/or modified sequence from LASV(Lassa virus/H.sapiens-wt/NGA/2016/ISTH_0017;Clade II)__AVO03567__GPCmut6 (opt1)
aggagagucccgcagucggcguccagcggcucugcuuguucgugugugugucguugcaggccuuauucaagcuuaccaugggccagaucaucaccuucuuccaggaggugccccacgucaucgaggaggugaugaacaucgugcugaucgcccucagccugcuggccauccucaaggggaucuacaacgucgcgaccugcggccuguucgggcugguguccuuccuccugcugugcggccgcagcugcuccacgaccuacaaggggguguacgagcuccagacccuggagcuggacauggccagccucaacaugugcaugccgcuguccugcacgaagaacaacagccaccacuacaucauggucggcaacgagaccggccuggagcucacccugaccaacacguccaucaucaaccacaaguucugcaaccugagcgacgcccacaagaagaaccucuacgaccacgcccugauguccaucaucagcaccuuccaccuguccauccccaacuucaaccaguacgaggccaugagcugcgacuucaacgggggcaagaucuccgugcaguacaaccucagccacaccuacgcgaucgacgccgccaaccacugcgggaccaucgccaacggcgugcugcagacguucaugcggauggcguggggcggguccuacaucgcccuggacagcggcaagggguccugggacugcaucaugaccagcuaccaguaccucaucauccagaacaccaccugggaggaccacugccaguucucccgccccagccccaucggcuaccuggggcugcucagccagcggacgcgcgacaucuacaucucccggcgccugcugggcaccuucaccuggacccucagcgacuccgagggcaacgagacgcccgggggcuacugccugacccgguggaugcugaucgaggccgagcucaagugcuucgggaacaccgccgucgccaagugcaacgagaagcacgacgaggaguucugcgacaugcugcgccuguucgacuucugcaagcaggcgauccggcgccucaagacccccgcccagaugagcauccagcugaucaacaaggccgugaacgcccugaucaacgaccagcucaucaugaagaaccaccuccgggacaucaugggcauccccuacugcaacuacuccaaguacugguaccugaaccacacggugaccgggaagaccagccugccccgcugcuggcuggucuccaacggcagcuaccugaacgagacccacuucuccgacgacaucgagcagcaggccgacaacaugaucacggagcuccugcagaaggaguacauggaccggcagggcaagaccccgcuggggcucguggaccuguucguguucagcaccuccuucuaccugaucagcaucuuccugcaccucguccgcaucccgacccaccggcacgugaucggcaagcccugccccaagccccaccgccugaaccacauggggaucugcuccugcggccuguacaagcacccgggggugcccgucaaguggaagcggugaggacuagucccuguucccagagcccacuuuuuuuucuuuuuuugaaauaaaauagccugucuuucagaucuaaaaaaaaaaaaaaaaaaaaaaaaaaaaaaaaaaaaaaaaaaaaaaaaaaaaaaaaaaaaaaaaaaaaaaaaaaaaaaaaaaaaaaaaaaaaaaaaaaaa

SEQ ID NO: 30162 - RNA, 1721 nt, Artificial Sequence
  mRNA product Design a-1 (A100) comprising derived and/or modified sequence from LASV(Lassa virus/H.sapiens-wt/NGA/2018/ISTH_0959;Clade II)__AVV65099__GPCmut6 (opt1)
aggagagucccgcagucggcguccagcggcucugcuuguucgugugugugucguugcaggccuuauucaagcuuaccaugggccagaucaucaccuucuuccaggaggugccccacgucaucgaggaggugaugaacaucgugcugaucgcccucagccugcuggccauccucaaggggaucuacaacgucgugaccugcggccuguucgggcugguguccuuccuccugcugugcggccgcagcugcuccacgaccuacaagggggucuacgagcuccagacccuggagcuggacauggcgagccucaacaugugcaugccgcuguccugcacgaagaacaacagccaccacuacaucauggugggcaacgagaccggccuggagcucacccugaccaacacguccaucaucaaccacaaguucugcaaccugagcgacgcccacaagaagaaccucuacgaccacgcccugauguccaucaucagcaccuuccaccuguccauccccaacuucaaccaguacgaggccaugagcugcgacuucaacgggggcaagaucuccgugcaguacaaccucagccacgccuacgcgaucgacgccgccaaccacugcgggaccaucgccaacggcguccugcagaccuucaugcggauggcguggggcggguccuacaucgcccuggacagcggcaagggguccugggacugcaucaugacgagcuaccaguaccucaucauccagaacaccaccugggaggaccacugccaguucucccgccccagccccaucggcuaccuggggcugcucagccagcggacccgcgacaucuacaucucccggcgccugcugggcacguucaccuggacccucagcgacuccgagggcaacgagacccccgggggcuacugccugacgcgguggaugcugaucgaggccgagcucaagugcuucgggaacaccgccguggccaagugcaacgagaagcacgacgaggaguucugcgacaugcugcgccuguucgacuucugcaagcaggcgauccggcgccucaagacccccgcccagaugagcauccagcugaucaacaaggccgugaacgcccugaucaacgaccagcucaucaugaagaaccaccuccgggacaucaugggcaucccguacugcaacuacuccaaguacugguaccugaaccacaccgucacggggaagaccagccugccccgcugcuggcugguguccaacggcagcuaccugaacgagacccacuucuccgacgacaucgagcagcaggccgacaacaugaucaccgagcuccugcagaaggaguacaucgaccggcagggcaagacgccccuggggcucguggaccuguucgucuucagcaccuccuucuaccugaucagcaucuuccugcaccucgugaagaucccgacccaccgccacgugaucggcaagcccugccccaagccccaccggcugaaccacauggggaucugcuccugcggccuguacaagcacccggggguccccgugaaguggaagcgcugaggacuagucccuguucccagagcccacuuuuuuuucuuuuuuugaaauaaaauagccugucuuucagaucuaaaaaaaaaaaaaaaaaaaaaaaaaaaaaaaaaaaaaaaaaaaaaaaaaaaaaaaaaaaaaaaaaaaaaaaaaaaaaaaaaaaaaaaaaaaaaaaaaaaa

SEQ ID NO: 30163 - RNA, 1721 nt, Artificial Sequence
  mRNA product Design a-1 (A100) comprising derived and/or modified sequence from LASV(LASV003-NIG-2008;Clade II)__AIT17580__GPCmut6 (opt1)
aggagagucccgcagucggcguccagcggcucugcuuguucgugugugugucguugcaggccuuauucaagcuuaccaugggccagaucaucaccuucuuccaggaggugccccacgucaucgaggaggugaugaacaucgugcugaucgcccucagccugcuggccauccucaaggggaucuacaacgucgcgaccugcggccuguucgggcugguguccuuccuccugcugugcggccgcagcugcuccacgaccuacaaggggguguacgagcuccagacccuggagcuggacauggccagccucaacaugugcaugccgcuguccugcacgaagaacaacagccaccacuacaucauggucggcaacgagaccggccuggagcucacccugaccaacacguccaucaucaaccacaaguucugcaaccugagcgacgcccacaagaagaaccucuacgaccacgcccugauguccaucaucagcaccuuccaccuguccauccccaacuucaaccaguacgaggccaugagcugcgacuucaacgggggcaagaucuccgugcaguacaaccucagccacaccuacgcgguggacgccgccaaccacugcgggaccaucgccaacggcguccugcagacguucaugcggauggcguggggcggguccuacaucgcccuggacagcggcaagggguccugggacugcaucaugaccagcuaccaguaccucaucauccagaacaccaccugggaggaccacugccaguucucccgccccagccccaucggcuaccuggggcugcucagccagcggacgcgcgacaucuacaucucccggcgccugcugggcaccuucaccuggacccucagcgacuccgagagcaacgagacgccgggcggguacugccugacccgguggaugcugaucgaggccgagcucaagugcuucggcaacaccgccguggccaagugcaacgagaagcacgacgaggaguucugcgacaugcugcgccuguucgacuucugcaagcaggcgauccggcgccucaaggcccccgcccagauguccauccagcugaucaacaaggccgugaacgcccugaucaacgaccagcucaucaugaagaaccaccuccgggacaucauggggauccccuacugcaacuacagcaaguacugguaccugaaccacaccgucacgggccgcaccucccugccccggugcuggcuggugagcaacggguccuaccugaacgagacccacuucagcgacgacaucgagcagcaggcggacaacaugaucaccgagcuccugcagaaggaguacauggaccgccagggcaagacgccccugggccucguggaccuguucgucuucuccaccagcuucuaccugaucuccaucuuccugcaccucgugaagaucccgacccaccggcacgugaucgggaagcccugccccaagccccaccgccugaaccacaugggcaucugcagcugcgggcuguacaagcacccgggcguccccgugaaguggaagcggugaggacuagucccuguucccagagcccacuuuuuuuucuuuuuuugaaauaaaauagccugucuuucagaucuaaaaaaaaaaaaaaaaaaaaaaaaaaaaaaaaaaaaaaaaaaaaaaaaaaaaaaaaaaaaaaaaaaaaaaaaaaaaaaaaaaaaaaaaaaaaaaaaaaaa

SEQ ID NO: 30164 - RNA, 1721 nt, Artificial Sequence
  mRNA product Design a-1 (A100) comprising derived and/or modified sequence from LASV(LASV035-NIG-2009;Clade II)__AIT17588__GPCmut6 (opt1)
aggagagucccgcagucggcguccagcggcucugcuuguucgugugugugucguugcaggccuuauucaagcuuaccaugggccagaucaucaccuucuuccaggaggugccccacgucaucgaggaggugaugaacaucgugcugaucgcccucagccugcuggccauccucaaggggaucuacaacgucgcgaccugcggccuguucgggcugguguccuuccuccugcugugcggccgcagcugcuccacgaccuacaaggggguguacgagcuccagacccuggagcuggacauggccagccucaacaugugcaugccgcuguccugcacgaagaacaacagccaccacuacaucauggucggcaacgagaccggccuggagcucacccugaccaacacguccaucaucaaccacaaguucugcaaccugagcgacgcccacaagaagaaccucuacgaccacgcccugauguccaucaucagcaccuuccaccuguccauccccaacuucaaccaguacgaggccaugagcugcgacuucaacgggggcaagaucuccgugcaguacaaccucagccacgcguacgccguggacgccgccaaccacugcgggaccaucgcgaacggcguccugcagaccuucaugcggauggccuggggcggguccuacaucgcccuggacagcggcaagggguccugggacugcaucaugacgagcuaccaguaccucaucauccagaacaccaccugggaggaccacugccaguucucccgccccagccccaucggcuaccuggggcugcucagccagcggacccgcgacaucuacaucucccggcgccugcugggcacguucaccuggacccucagcgacuccgagggcaacgagacccccgggggcuacugccugacgcgguggaugcugaucgaggccgagcucaagugcuucgggaacaccgccguggcgaagugcaacgagaagcacgacgaggaguucugcgacaugcugcgccuguucgacuucugcaagcaggccauccggcgccucaaggcccccgcccagaugagcauccagcugaucaacaaggccgugaacgcgcugaucaacgaccagcucaucaugaagaaccaccuccgggacaucaugggcauccccuacugcaacuacuccaaguacugguaccugaaccacaccgucaccgggaagacgagccugccccgcugcuggcugguguccaacggcagcuaccugaacgagacccacuucuccgacgacaucgagcagcaggccgacaacaugaucaccgagcuccugcagaaggaguacaucgaccggcagggcaagaccccgcuggggcucguggaccuguucgucuucagcacguccuucuaccugaucagcaucuuccugcaccucgugaagaucccgacccaccgccacgugaucggcaagcccugccccaagccccaccggcugaaccacauggggaucugcuccugcggccuguacaagcacccggggguccccgugaaguggaagcgcugaggacuagucccuguucccagagcccacuuuuuuuucuuuuuuugaaauaaaauagccugucuuucagaucuaaaaaaaaaaaaaaaaaaaaaaaaaaaaaaaaaaaaaaaaaaaaaaaaaaaaaaaaaaaaaaaaaaaaaaaaaaaaaaaaaaaaaaaaaaaaaaaaaaaa

SEQ ID NO: 30165 - RNA, 1721 nt, Artificial Sequence
  mRNA product Design a-1 (A100) comprising derived and/or modified sequence from LASV(LASV1000-NIG-2009;Clade II)__AIT17782__GPCmut6 (opt1)
aggagagucccgcagucggcguccagcggcucugcuuguucgugugugugucguugcaggccuuauucaagcuuaccaugggccagaucaucaccuucuuccaggaggugccccacgucaucgaggaggugaugaacaucgugcugaucgcccucagccugcuggccauccucaaggggaucuacaacgucgcgaccugcggccuguucgggcugguguccuuccuccugcugugcggccgcagcugcuccacgaccuacaaggggguguacgagcuccagacccuggagcuggacauggccagccucaacaugugcaugccgcuguccugcacgaagaacaacagccaccacuacaucauggucggcaacgagaccggccuggagcucacccugaccaacacguccaucaucaaccacaaguucugcaaccugagcgacgcccacaagaagaaccucuacgaccacgcccugauguccaucaucagcaccuuccaccuguccauccccaacuucaaccaguacgaggccaugagcugcgacuucaacgggggcaagaucuccgugcaguacaaccucagccacaccuacgcgguggacgccgccaaccacugcgggaccaucgccaacggcguccugcagacguucaugcggauggcguggggcggguccuacaucgcccuggacagcggcaagggguccugggacugcaucaugaccagcuaccaguaccucaucauccagaacaccaccugggaggaccacugccaguucucccgccccagccccaucggcuaccuggggcugcucagccagcggacgcgcgacaucuacaucucccggcgccugcugggcaccuucaccuggacccucagcgacuccgagggcaacgagacgcccgggggcuacugccugacccgguggaugcugaucgaggccgagcucaagugcuucgggaacaccgccguggccaagugcaacgagaagcacgacgaggaguucugcgacaugcugcgccuguucgacuucugcaagcaggcgaucaagcggcucaagacccccgcccagaugagcauccagcugaucaacaaggccgugaacgcccugaucaacgaccagcucaucaugaagaaccaccuccgcgacaucaugggcauccccuacugcaacuacuccaaguacugguaccugaaccacacggucaccgggaagaccagccugccccggugcuggcugguguccaacggcagcuaccugaacgagacccacuucuccgacgacaucgagcagcaggccgacaacaugaucacggagcuccugcagaaggaguacaucgaccgccagggcaagaccccgcuggggcucguggaccuguucgucuucagcaccuccuucuaccugaucagcaucuuccugcaccucgugaagaucccgacccaccggcacguggucggcaagcccugccccaagccccaccgccugaaccacauggggaucugcuccugcggccuguacaagcacccgggggugcccgugaaguggaagcggugaggacuagucccuguucccagagcccacuuuuuuuucuuuuuuugaaauaaaauagccugucuuucagaucuaaaaaaaaaaaaaaaaaaaaaaaaaaaaaaaaaaaaaaaaaaaaaaaaaaaaaaaaaaaaaaaaaaaaaaaaaaaaaaaaaaaaaaaaaaaaaaaaaaaa

SEQ ID NO: 30166 - RNA, 1721 nt, Artificial Sequence
  mRNA product Design a-1 (A100) comprising derived and/or modified sequence from LASV(LASV221-NIG-2010;Clade II)__AIT17624__GPCmut6 (opt1)
aggagagucccgcagucggcguccagcggcucugcuuguucgugugugugucguugcaggccuuauucaagcuuaccaugggccagaucaucaccuucuuccaggaggugccccacgucaucgaggaggugaugaacaucgugcugaucgcccucagccugcuggccauccucaaggggaucuacaacgucgcgaccugcggccuguucgggcugguguccuuccuccugcugugcggccgcagcugcuccacgaccuacaaggggguguacgagcuccagacccuggagcuggacauggccagccucaacaugugcaugccgcuguccugcacgaagaacaacagccaccacuacaucauggucggcaacgagaccggccuggagcucacccugaccaacacguccaucaucaaccacaaguucugcaaccugagcgacgcccacaagaagaaccucuacgaccacgcccugauguccaucaucagcaccuuccaccuguccauccccaacuucaaccaguacgaggccaugagcugcgacuucaacgggggcaagaucuccgugcaguacaaccucagccacaccuacgcgaucgacgccgccaaccacugcgggaccaucgccaacggcgugcugcagacguucaugcggauggcguggggcggguccuacaucgcccuggacagcggcaagggguccugggacugcaucaugaccagcuaccaguaccucaucauccagaacaccaccugggaggaccacugccaguucucccgccccagccccaucggcuaccuggggcugcucagccagcggacgcgcgacaucuacaucucccggcgccugcugggcaccuucaccuggacccucagcgacuccgagggcaacgagacgcccgggggcuacugccugacccgguggaugcugaucgaggccgagcucaagugcuucgggaacaccgccgucgccaagugcaacgagaagcacgacgaggaguucugcgacaugcugcgccuguucgacuucugcaagcaggcgauccggcgccucaagacccccgcccagaugagcauccagcugaucaacaaggccgugaacgcccugaucaacgaccagcucaucaugaagaaccaccuccgggacaucaugggcauccccuacugcaacuacuccaaguacugguaccugaaccacacggugaccgggaagaccagccugccccgcugcuggcuggucuccaacggcagcuaccugaacgagacccacuucuccgacgacaucgagcagcaggccgacaacaugaucacggagaugcuccagaaggaguacauggaccggcagggcaagaccccgcuggggcugguggaccucuucguguucagcaccuccuucuaccugaucagcaucuuccugcaccuggucaagaucccgacccaccgccacgugaucggcaagcccugccccaagccccaccggcucaaccacauggggaucugcuccugcggccuguacaagcacccgggggugcccgucaaguggaagcgcugaggacuagucccuguucccagagcccacuuuuuuuucuuuuuuugaaauaaaauagccugucuuucagaucuaaaaaaaaaaaaaaaaaaaaaaaaaaaaaaaaaaaaaaaaaaaaaaaaaaaaaaaaaaaaaaaaaaaaaaaaaaaaaaaaaaaaaaaaaaaaaaaaaaaa

SEQ ID NO: 30167 - RNA, 1721 nt, Artificial Sequence
  mRNA product Design a-1 (A100) comprising derived and/or modified sequence from LASV(LASV237-NIG-2010;Clade II)__AIT17638__GPCmut6 (opt1)
aggagagucccgcagucggcguccagcggcucugcuuguucgugugugugucguugcaggccuuauucaagcuuaccaugggccagaucaucaccuucuuccaggaggugccccacgucaucgaggaggugaugaacaucgugcugaucgcccucagccugcuggccauccucaaggggaucuacaacgucgcgaccugcggccuguucgggcugguguccuuccuccugcugugcggccgcagcugcuccacgaccuacaaggggguguacgagcuccagacccuggagcuggacauggccagccucaacaugugcaugccgcuguccugcacgaagaacaacagccaccacuacaucauggucggcaacgagaccggccuggagcucacccugaccaacacguccaucaucaaccacaaguucugcaaccugagcgacgcccacaagaaggaccucuacgaccacgcccugauguccaucaucagcaccuuccaccuguccauccccaacuucaaccaguacgaggccaugagcugcgacuucaacgggggcaagaucuccgugcaguacaaccucagccacaccuacgcgguggacgccgccaaccacugcgggaccaucgccaacggcguccugcagacguucaugcggauggcguggggcggguccuacaucgcccuggacagcggcaagggguccugggacugcaucaugaccagcuaccaguaccucaucauccagaacaccaccugggaggaccacugccaguucucccgccccagccccaucggcuaccuggggcugcucagccagcggacgcgcgacaucuacaucucccggcgccugcugggcaccuucaccuggacccucagcgacuccgagggcaacgagacgcccgggggcuacugccugacccgguggaugcugaucgaggccgagcucaagugcuucgggaacaccgccguggccaagugcaacgagaagcacgacgaggaguucugcgacaugcugcgccuguucgacuucugcaagcaggcgauccggcgccucaagacccccgcccagaugagcauccagcugaucaacaaggccgugaacgcccugaucaacgaccagcucaucaugaagaaccaccuccgggacaucaugggcauccccuacugcaacuacuccaaguacugguaccugaaccacacggucaccgggaagaccagccugccccgcugcuggcugguguccaacggcagcuaccugaacgagacccacuucuccgacgacaucgagcagcaggccgacaacaugaucacggagcuccugcagaaggaguacauggaccggcagggcaagaccccgcuggggcucguggaccuguucgucuucagcaccuccuucuaccugaucagcaucuuccugcaccucaucaagaucccgacccaccgccacaucacgggcaagcccugccccaagccccaccggcugaaccacauggggaucugcuccugcggccuguacaagcacccgggggugcccgugaaguggaagcgcugaggacuagucccuguucccagagcccacuuuuuuuucuuuuuuugaaauaaaauagccugucuuucagaucuaaaaaaaaaaaaaaaaaaaaaaaaaaaaaaaaaaaaaaaaaaaaaaaaaaaaaaaaaaaaaaaaaaaaaaaaaaaaaaaaaaaaaaaaaaaaaaaaaaaa

SEQ ID NO: 30168 - RNA, 1721 nt, Artificial Sequence
  mRNA product Design a-1 (A100) comprising derived and/or modified sequence from LASV(LASV253-NIG-2011;Clade II)__AIT17670__GPCmut6 (opt1)
aggagagucccgcagucggcguccagcggcucugcuuguucgugugugugucguugcaggccuuauucaagcuuaccaugggccagaucaucaccuucuuccaggaggugccccacgucaucgaggaggugaugaacaucgugcugaucgcccucagccugcuggccauccucaaggggaucuacaacgucgcgaccugcggccuguucgggcugguguccuuccuccugcugugcggccgcagcugcuccacgaccuacaaggggguguacgagcuccagacccuggagcuggacauggccagccucaacaugugcaugccgcuguccugcacgaagaacaacagccaccacuacaucauggucggcaacgagaccggccuggagcucacccugaccaacacguccaucaucaaccacaaguucugcaaccugagcgacgcccacaagaagaaccucuacgaccacgcccugauguccaucaucagcaccuuccaccuguccauccccaacuucaaccaguacgaggccaugagcugcgacuucaacgggggcaagaucuccgugcaguacaaccucagccacaccuacgcgguggacgccgccaaccacugcgggaccaucgccaacggcguccugcagacguucaugcggauggcguggggcggguccuacaucgcccuggacagcggcaagggguccugggacugcaucaugaccagcuaccaguaccucaucauccagaacaccaccugggaggaccacugccaguucucccgccccagccccaucggcuaccuggggcugcucagccagcggacgcgcgacaucuacaucucccggcgccugcugggcaccuucaccuggacccucagcgacuccgagggcaacgagacgcccgggggcuacugccugacccgguggaugcugaucgaggccgagcucaagugcuucgggaacaccgccguggccaagugcaacgagaagcacgacgaggaguucugcgacaugcugcgccuguucgacuucugcaagcaggcgauccggcgccucaaggcccccgcccagaugagcauccagcugaucaacaaggccgugaacgcccugaucaacgaccagcucaucaugaagaaccaccuccgggacaucaugggcaucccguacugcaacuacuccaaguacugguaccugaaccacaccgucacggggcgcaccagccugccccggugcuggcugguguccaacggcagcuaccugaacgagacccacuucuccgacgacaucgagcagcaggcggacaacaugaucaccgagcuccugcagaaggaguacaucgaccgccagggcaagacgccccuggggcucguggaccuguucgucuucagcaccuccuucuaccugaucagcaucuuccugcaccucgugaagaucccgacccaccggcacaucaucggcaagcccugccccaagccccaccgccugaaccacauggggaucugcuccugcggccuguacaagcacccgggggugcccgucaaguggaagcggugaggacuagucccuguucccagagcccacuuuuuuuucuuuuuuugaaauaaaauagccugucuuucagaucuaaaaaaaaaaaaaaaaaaaaaaaaaaaaaaaaaaaaaaaaaaaaaaaaaaaaaaaaaaaaaaaaaaaaaaaaaaaaaaaaaaaaaaaaaaaaaaaaaaaa

SEQ ID NO: 30169 - RNA, 1721 nt, Artificial Sequence
  mRNA product Design a-1 (A100) comprising derived and/or modified sequence from LASV(LASV254-NIG-2011;Clade II)__AIT17674__GPCmut6 (opt1)
aggagagucccgcagucggcguccagcggcucugcuuguucgugugugugucguugcaggccuuauucaagcuuaccaugggccagaucaucaccuucuuccaggaggugccccacgucaucgaggaggugaugaacaucgugcugaucgcccucagccugcuggccauccucaaggggaucuacaacgucgcgaccugcggccuguucgggcugguguccuuccuccugcugugcggccgcagcugcuccacgaccuacaaggggguguacgagcuccagacccuggagcuggacaugaccaaccucaacaugugcaugccgcugagcugcaccaagaacaacucccaccacuacaucauggucggcaacgagaccggccuggagcucacccugacgaacaccagcaucaucaaccacaaguucugcaaccuguccgacgcccacaagaagaaccucuacaaccacgcccugaugagcaucaucuccaccuuccaccugagcauccccaacuucaaccaguacgaggccauguccugcgacuucaacgggggcaagaucagcgugcaguacaaccucucccacagcuacgccguggacgcggccaaccacugcgggaccaucgccaacggcguccugcagacguucaugcggauggccuggggcggguccuacaucgcgcuggacagcggcaaggggaacugggacugcaucaugaccuccuaccaguaccucaucauccagaacaccaccugggaggaccacugccaguucagccgccccucccccaucggcuaccuggggcugcucagccagcggacgcgcgacaucuacaucagccggcgccugcugggcaccuucaccuggacccucuccgacagcgagggcaacgagacgcccgggggcuacugccugacccgguggaugcugaucgaggccgagcucaagugcuucgggaacaccgccguggccaagugcaacgagaagcacgacgaggaguucugcgacaugcugcgccuguucgacuucugcaagcaggccauccggcgccucaagacccccgcgcaggccaacauccagcugaucaacaaggccgugaacgcccugaucaacgaccagcucaucaugaagaaccaccuccgggacaucaugggcauccccuacugcaacuacuccaaguacugguaccugaaccacacggucaccgggaagaccagccugccccgcugcuggcugguguccaacggcagcuaccugaacgagacccacuucuccgacgacaucgagcagcaggccgacaacaugaucacggagcuccugcagaaggaguacauggaccggcagggcaagaccccgcuggggcucguggaccuguucgucuucagcaccuccuucuaccugaucagcaucuuccugcaccucgugaagaucccgacccaccgccacgugaucggcaagcccugccccaagccccaccggcugaaccacauggggaucugcuccugcggccuguacaagcacccggggguccccgugaaguggaagcgcugaggacuagucccuguucccagagcccacuuuuuuuucuuuuuuugaaauaaaauagccugucuuucagaucuaaaaaaaaaaaaaaaaaaaaaaaaaaaaaaaaaaaaaaaaaaaaaaaaaaaaaaaaaaaaaaaaaaaaaaaaaaaaaaaaaaaaaaaaaaaaaaaaaaaa

SEQ ID NO: 30170 - RNA, 1721 nt, Artificial Sequence
  mRNA product Design a-1 (A100) comprising derived and/or modified sequence from LASV(Nig08-A19;Clade III)__ADU56618__GPCmut6 (opt1)
aggagagucccgcagucggcguccagcggcucugcuuguucgugugugugucguugcaggccuuauucaagcuuaccaugggccagaucgugaccuucuuccaggaggucccccacgugaucgaggaggugaugaacaucguccugaucgcccucagcauccuggccauccugaaggggcucuacaacaucgcgaccugcggccugaucgggcuggugacguuccuccugcuguccggccgcagcugcuccaugaccuacaaggggguguacgagcuccagacccuggagcugaacaugaacacccucaacaugugcaugccgcugagcugcaccaagaacaacucccaccacuacaucauggucggcaacgagaccggccuggagcucacccugacgaacaccagccugcuccaccacaaguucugcaaccuguccgacgcccacaagaagaaccuguacgaccacacccucaugagcaucaucuccaccuuccaccugagcauccccaacuucaaccaguacgaggccauguccugcgacuucaacgggggcaagaucacggugcaguacaaccugagccacuccuacgccaucgacgccgcgaaccacugcgggaccguggccaacggcguccuccagaccuucaugcggauggccuggggcgggagcuacaucgcccuggacuccggccgcgggaagugggacugcaucaugaccagcuaccaguaccugaucauccagaacacgaccugggaggaccacugccaguucucccggcccagccccaucggcuaccucgggcugcugucccagcgcacccgggacaucuacaucagccgccggcuccugggcaccuucacguggacccugagcgacuccgagggcaacgagacccccgggggcuacugccucacccgcuggaugcugaucgaggcggagcugaagugcuucgggaacacggccguggccaagugcaacgagaagcacgacgaggaguucugcgacaugcuccggcuguucgacuucugcaagcaggccauccgccggcugaaggcccccgcgcagaugagcauccagcucaucaacaaggccgugaacgcccugaucaacgaccagcugaucaugaagaaccaccuccgcgacaucaugggcauccccuacugcaacuacuccaaguacugguaccugaaccacaccagcaccgggcggaccucccugccccgcugcuggcucgucagcaacggcuccuaccugaacgagacgcacuucagcgacgacaucgagcagcaggccgacaacaugaucaccgagaugcugcagaaggaguaccucgaccggcagggcaagaccccgcuggggcugguggaccuguucguguucuccaccagcuucuaccucaucuccaucuuccugcaccuggucaagaucccgacgcaccgccacaucgugggcaagcccugccccaagccccaccggcucaaccacauggggaucugcagcugcggccuguacaagcagccgggggugcccguccgcuggaagcggugaggacuagucccuguucccagagcccacuuuuuuuucuuuuuuugaaauaaaauagccugucuuucagaucuaaaaaaaaaaaaaaaaaaaaaaaaaaaaaaaaaaaaaaaaaaaaaaaaaaaaaaaaaaaaaaaaaaaaaaaaaaaaaaaaaaaaaaaaaaaaaaaaaaaa

SEQ ID NO: 30171 - RNA, 1724 nt, Artificial Sequence
  mRNA product Design a-1 (A100) comprising derived and/or modified sequence from LASV(G1180-SLE-2010;Clade IV)__AIT17168__GPCmut6 (opt1)
aggagagucccgcagucggcguccagcggcucugcuuguucgugugugugucguugcaggccuuauucaagcuuaccaugggccagaucgugaccuucuuccaggaggucccccacgugaucgaggaggugaugaacaucguccugaucgcccucagcauccuggccgugcugaaggggcucuacaacuucgcgaccugcggccugguggggcugcucaccuuccugcugcucugcggccgcuccugcaccgccagccgguacaagggggucuacgagcugcagacccuggagcucaacauggagacccugaacaugugcaugccgcuguccugcaccaagaacaacagccaccacuacaucauggugggcaacgagaccggccucgagcugacccugacgaacaccuccaucaucaaccacaaguucugcaaccucagcgacgcccacaagaagaaccuguacgaccacgcccugauguccaucaucagcaccuuccaccucuccauccccaacuucaaccaguacgaggccaugagcugcgacuucaacgggggcaagaucuccgugcaguacaaccugagccacuccuacgcgggggacgccgccaaccacugcggcaccgucgccaacggggugcugcagacguucaugcgcauggcguggggcggcagcuacaucgcccucgacuccgggcacggcagcugggacugcaucaugaccuccuaccaguaccugaucauccagaacaccaccugggaggaccacugccaguucagccggcccucccccaucggguaccugggccuccugagccagcgcacgcgggacaucuacaucagccgccggcugcucggcaccuucaccuggacccuguccgacagcgaggggaaggacacgccgggcggguacugccugacccgcuggaugcucaucgaggccgagcugaagugcuucggcaacaccgccguggccaagugcaacgagaagcacgacgaggaguucugcgacaugcugcggcuguucgacuucugcaagcaggcgauccagcgccugaaggcccccgcccagauguccauccagcugaucaacaaggccgucaacgcccucaucaacgaccagcugaucaugaagaaccaccuccgggacaucauggggauccccuacugcaacuacagcaaguacugguaccucaaccacaccacgaccggcaagaccucccugcccaagugcuggcuggugagcaacggcuccuaccucaacgagacccacuucagcgacgacaucgagcagcaggcggacaacaugaucacggagaugcugcagaaggaguacauggagcgccaggggaagacgccccugggccucguggaccuguucgucuucuccaccagcuucuaccugaucuccaucuuccugcaccucgugaagaucccgacccaccggcacaucgugggcaagagcugccccaagccccaccgccugaaccacauggggaucugcuccugcgggcuguacaagcagcccggcgucccggugaaguggaagcggugaggacuagucccuguucccagagcccacuuuuuuuucuuuuuuugaaauaaaauagccugucuuucagaucuaaaaaaaaaaaaaaaaaaaaaaaaaaaaaaaaaaaaaaaaaaaaaaaaaaaaaaaaaaaaaaaaaaaaaaaaaaaaaaaaaaaaaaaaaaaaaaaaaaaa

SEQ ID NO: 30172 - RNA, 1724 nt, Artificial Sequence
  mRNA product Design a-1 (A100) comprising derived and/or modified sequence from LASV(G1442-SLE-2011;Clade IV)__AIT17180__GPCmut6 (opt1)
aggagagucccgcagucggcguccagcggcucugcuuguucgugugugugucguugcaggccuuauucaagcuuaccaugggccagaucgugaccuucuuccaggaggucccccacgugaucgaggaggugaugaacaucguccugaucgcccucagcauccuggccgugcugaaggggcucuacaacguggcgaccugcggccugaucgggcuggucacguuccuccugcugugcggccgcuccugcaccaccacccucuacaaggggguguacgagcugcagacgcuggagcucaacauggagacccugaacaugugcaugccgcugagcugcaccaagaacaacucccaccacuacauccgggugggcaacgagacgggccucgagcugacccugaccaacaccagcaucaucaaccacaaguucugcaaccucuccgacgcccacaagaagaaccuguacgaccacgcccugaugagcaucaucuccacguuccaccucagcauccccaacuucaaccaguacgaggccauguccugcgacuucaacgggggcaagaucagcguccaguacaaccugucccacagcuacgccggggacgcggccaaccacugcggcaccguggccaacggggugcugcagaccuucaugcgcauggccuggggcggcuccuacaucgcgcucgacagcgggcggggcaacugggacugcaucaugaccuccuaccaguaccugaucauccagaacacgaccugggacgaccacugccaguucagccgccccucccccaucggguaccugggccuccugagccagcggacccgcgacgucuacaucucccggcgccugcucggcaccuucacguggacccugagcgacagcgaggggaaggacaccccgggcggguacugccugacccgguggaugcucaucgaggccgagcugaagugcuucggcaacacggccguggccaagugcaacgagaagcacgacgaggaguucugcgacaugcugcgccucuucgacuucugcaagcaggccauccagcggcugaaggcgcccgcccagauguccauccagcugaucaacaaggccgugaacgcccucaucaacgaccagcugaucaugaagaaccaccuccgcgacaucauggggauccccuacugcaacuacagcaaguacugguaccugaacaacaccgccaccggcaagaccucccugcccaagugcuggcugaucagcaacggcuccuaccucaacgagacgcacuucagcgacgacaucgagcaggaggcggacaacaugaucaccgagaugcugcagaaggaguacauggagcggcaggggaagacgccccugggccucgucgaccuguucguguucuccaccagcuucuaccugaucuccaucuuccugcaccucgugaagaucccgacccaccgccacaucgucggcaagagcugccccaagccccaccggcugaaccacauggggaucugcuccugcgggcuguacaagcagcccggcgugccggugcgcuggaagcggugaggacuagucccuguucccagagcccacuuuuuuuucuuuuuuugaaauaaaauagccugucuuucagaucuaaaaaaaaaaaaaaaaaaaaaaaaaaaaaaaaaaaaaaaaaaaaaaaaaaaaaaaaaaaaaaaaaaaaaaaaaaaaaaaaaaaaaaaaaaaaaaaaaaaa

SEQ ID NO: 30173 - RNA, 1724 nt, Artificial Sequence
  mRNA product Design a-1 (A100) comprising derived and/or modified sequence from LASV(G3010-SLE-2013;Clade IV)__AIT17344__GPCmut6 (opt1)
aggagagucccgcagucggcguccagcggcucugcuuguucgugugugugucguugcaggccuuauucaagcuuaccaugggccagaucgugaccuucuuccaggaggucccccacgugaucgaggaggugaugaacaucguccugaucgcccucagcauccuggccgugcugaaggggcucuacaacuucgcgaccugcggccugguggggcuggucacguuccuccugcugugcggccgcuccugcaccaccagccucuacaaggggguguacgagcugcagacccuggagcucaacauggagacgcugaacaugugcaugccgcuguccugcaccaagaacaacagccaccacuacaucauggugggcaacgagaccggccucgagcugacgcugaccaacaccuccaucaucaaccacaaguucugcaaccucagcgacgcccacaagaagaaccuguacaaccacgcccugauguccaucaucagcaccuuccaccucuccauccccaacuucaaccaguacgaggccaugagcugcgacuucaacgggggcaagaucuccguccaguacaaccugagccacuccuacgccggggacgcggccagccacugcggcacgguggccaacggggugcugcagaccuucaugcggauggccuggggcggcuccuacaucgcgcucgacagcggguacggcaagugggacugcaucaugaccuccuaccaguaccugaucauccagaacaccacgugggaggaccacugccaguucagccgccccucccccaucggguaccugggccuccugagccagcggacccgcgacaucuacaucagccggcgccugcucggcaccuucaccuggacgcuguccgacagcgaggggaaggacaccccgggcggguacugccugacccgguggaugcucaucgaggccgagcugaagugcuucggcaacaccgccgucgccaagugcaacgagaagcacgacgaggaguucugcgacaugcugcgccucuucgacuucugcaagcaggccauccagcggcugaagacgcccgcgcagauguccauccagcugaucaacaaggccgugaacgcccucaucaacgaccagcugaucaugaagaaccaccuccgcgacaucauggggauccccuacugcaacuacagcaaguacugguaccugaaccacaccaccaccggcaagacgucccugcccaagugcuggcuggugagcaacggcuccuaccucaacgagacccacuucagcgacgacaucgagcagcaggccgacaacaugaucaccgagaugcugcagaaggaguacauggagcggcaggggaagacgccccugggccucgucgaccuguucguguucuccaccagcuucuaccugaucuccaucuuccugcaccucgugaagaucccgacccaccgccacaucgucggcaagagcugccccaagccccaccggcugaaccacauggggaucugcuccugcgggcuguacaagcagcccggcgugccggugcgcuggaagcggugaggacuagucccuguucccagagcccacuuuuuuuucuuuuuuugaaauaaaauagccugucuuucagaucuaaaaaaaaaaaaaaaaaaaaaaaaaaaaaaaaaaaaaaaaaaaaaaaaaaaaaaaaaaaaaaaaaaaaaaaaaaaaaaaaaaaaaaaaaaaaaaaaaaaa

SEQ ID NO: 30174 - RNA, 1724 nt, Artificial Sequence
  mRNA product Design a-1 (A100) comprising derived and/or modified sequence from LASV(G502-SLE-2009;Clade IV)__AIT17126__GPCmut6 (opt1)
aggagagucccgcagucggcguccagcggcucugcuuguucgugugugugucguugcaggccuuauucaagcuuaccaugggccagaucgugaccuucuuccaggaggucccccacgugaucgaggaggugaugaacaucguccugaucgcccucagcauccuggccgugcugaaggggcucuacaacuucgcgaccugcggccugguggggcugcucacguuccugcugcucugcggccgcuccugcaccaccgggcuguacaagggcgucuacgagcugcagacccucgagcugaacauggagacgcugaacaugugcaugccgcucagcugcaccaagaacaacucccaccacuacaucauggugggcaacgagaccgggcuggagcugacgcucaccaacaccagcaucaucaaccacaaguucugcaaccuguccgacgcccacaagaagaaccuguacgaccacgcccucaugagcaucaucuccaccuuccaccugagcauccccaacuucaaccaguacgaggccauguccugcgacuucaacggcgggaagaucagcgugcaguacaaccugucccacagcuacgccggcgacgcggccgaccacugcgggacggucgccaacggcgugcuccagaccuucaugcggauggccuggggcggguccuacaucgcgcuggacagcggccgcgggcggugggacugcaucaugaccuccuaccaguaccugaucauccagaacaccacgugggaggaccacugccaguucagccgccccucccccaucggcuaccucggccugcugagccagcggacccgcgacaucuacaucucccggcgccuccuggggaccuucaccuggacgcugagcgacagcgagggcaaggacacccccgggggcuacugccucacccgguggaugcugaucgaggccgagcugaagugcuucgggaacaccgccguggccaagugcaacgagaagcacgacgaggaguucugcgacaugcuccgccuguucgacuucugcaagcaggccauccagcggcugaaggcgcccgcccagauguccauccagcucaucaacaaggccgucaacgcccugaucaacgaccagcuggugaugaagaaccaccuccgcgacaucaugggcauccccuacugcaacuacagccgguacugguaccugaaccacacgaccaccggccgcaccucccugcccaagugcuggcucgugagcaacggguccuaccugaacgagacgcacuucagcgacgacaucgagcagcaggccgacaacaugaucaccgagaugcugcagaaggaguacauggagcggcagggcaagaccccgcucgggcuggucgaccuguucguguucuccaccagcuucuaccugaucuccaucuuccuccaccuggugaagaucccgacgcaccgccacaucgucggcaagagcugccccaagccccaccggcugaaccacauggggaucugcuccugcggccucuacaagcagcccggcgugccggugaaguggaagcgcugaggacuagucccuguucccagagcccacuuuuuuuucuuuuuuugaaauaaaauagccugucuuucagaucuaaaaaaaaaaaaaaaaaaaaaaaaaaaaaaaaaaaaaaaaaaaaaaaaaaaaaaaaaaaaaaaaaaaaaaaaaaaaaaaaaaaaaaaaaaaaaaaaaaaa

SEQ ID NO: 30175 - RNA, 1724 nt, Artificial Sequence
  mRNA product Design a-1 (A100) comprising derived and/or modified sequence from LASV(G733-SLE-2010;Clade IV)__AIT17154__GPCmut6 (opt1)
aggagagucccgcagucggcguccagcggcucugcuuguucgugugugugucguugcaggccuuauucaagcuuaccaugggccagaucgugaccuucuuccaggaggucccccacgugaucgaggaggugaugaacaucguccugaucgcccucagcauccuggccgugcugaaggggcucuacaacuucgcgaccugcggcaucguggggcuggucuccuuccugcuccugugcggccgcagcugcacgaccucccuguacaaggggguguacgagcuccagacccuggagcugaacauggagacccucaacaugugcaugccgcugagcugcaccaagaacaacucccaccacuacaucauggugggcaacgagaccggccuggagcucacccugacgaacaccagcaucaucaaccacaaguucugcaaccuguccgacgcccacaagaagaaccucuacgaccacgcccugaugagcaucaucuccaccuuccaccugagcauccccaacuucaaccaguacgaggccauguccugcgacuucaacgggggcaagaucagcguccaguacaaccucucccacagcuacgccggggacgcggccaaccacugcggcaccaucgccaacggggugcugcagacguucaugcggauggccuggggcggcuccuacaucgcgcuggacagcgggcgcgaccggugggacugcaucaugaccuccuaccaguaccucaucauccagaacaccaccugggaggaccacugccaguucagccgccccucccccaucggcuaccuggggcugcucagccagcggacgcgcgacaucuacaucagccggcgccugcugggcaccuucaccuggacccucuccgacagcgagggcaaggacacgcccgggggcuacugccugacccgguggaugcugaucgaggccgagcucaagugcuucgggaacaccgccguggccaagugcaacgagaagcacgacgaggaguucugcgacaugcugcgccuguucgacuucugcaagcaggccauccagcggcucaaggcgcccgcccagauguccauccagcugaucaacaaggccgucaacgcccugaucaacgaccagcucaucaugaagaaccaccuccgcgacaucaugggcauccccuacugcaacuacagcaaguacugguaccugaaccacaccacgaccgggaagaccucccugcccaagugcuggcuggugagcaacggcuccuaccugaacgagacccacuucagcgacgacaucgagcagcaggccgacaacaugaucacggagaugcuccagaaggaguacauggagcggcagggcaagaccccgcuggggcugguggaccucuucgucuucuccaccagcuucuaccugaucuccaucuuccugcaccuggugaagaucccgacccaccgccacguggucggcaagagcugccccaagccccaccggcucaaccacauggggaucugcuccugcggccuguacgggcagcccggcgugccggugaaguggaagcgcugaggacuagucccuguucccagagcccacuuuuuuuucuuuuuuugaaauaaaauagccugucuuucagaucuaaaaaaaaaaaaaaaaaaaaaaaaaaaaaaaaaaaaaaaaaaaaaaaaaaaaaaaaaaaaaaaaaaaaaaaaaaaaaaaaaaaaaaaaaaaaaaaaaaaa

SEQ ID NO: 30176 - RNA, 1724 nt, Artificial Sequence
  mRNA product Design a-1 (A100) comprising derived and/or modified sequence from MOPV/LASV reassortant(IGS-1;Clade IV)__AFY05576__GPCmut6 (opt1)
aggagagucccgcagucggcguccagcggcucugcuuguucgugugugugucguugcaggccuuauucaagcuuaccaugggccagaucgugaccuucuuccaggaggucccccacgugaucgaggaggugaugaacaucguccugaucgcccucagcgugcuggccgugcugaaggggcucuacaacuucgcgaccugcggccuggucgggcuggugacguuccuccugcugugcggccgcuccugcaccaccagccucuacaaggggguguacgagcugcagacccuggagcucaacauggagacgcugaacaugugcaugccgcuguccugcaccaagaacaacagccaccacuacaucauggucggcaacgagaccggccucgagcugacgcugaccaacaccuccaucaucaaccacaaguucugcaaccucagcgacgcccacaagaagaaccuguacgaccacgcccugauguccaucaucagcaccuuccaccucuccauccccaacuucaaccaguacgaggccaugagcugcgacuucaacgggggcaagaucuccgugcaguacaaccugagccacuccuacgccggggacgcggccaaccacugcggcacgguggccaacgggguccugcagaccuucaugcggauggccuggggcggcagcuacaucgcgcucgacuccgggcgcggcaacugggacugcaucaugaccagcuaccaguaccugaucauccagaacaccacgugggaggaccacugccaguucucccggcccagccccaucggguaccugggccuccugucccagcgcacccgggacaucuacaucagccgccggcugcucggcaccuucaccuggacgcugagcgacuccgagggggaggacaccccgggcggguacugccugacccgcuggaugcucaucgaggccgagcugaagugcuucggcaacaccgccguggccaagugcaacgagaagcacgacgaggaguucugcgacaugcugcggcuguucgacuucugcaagcaggccauccagcgccugaaggcgcccgcccagaugagcauccagcugaucaacaaggccgugaacgcccucaucaacgaccagcugaucaugaagaaccaccuccgggacaucauggggauccccuacugcaacuacuccaaguacugguaccucaaccacacgaccaccggccgcaccagccugcccaagugcuggcuggucuccaacggcagcuaccucaacgagacgcacuucuccgacgacaucgagcagcaggccgacaacaugaucaccgagaugcugcagaaggaguacauggagcggcaggggaagacgccccugggccucguggaccuguucguguucagcaccuccuucuaccugaucagcaucuuccugcaccucgucaagaucccgacccaccgccacaucguggggaaguccugccccaagccccaccggcugaaccacaugggcaucugcagcugcgggcuguacaagcagcccggcgugccggucaaguggaagcgcugaggacuagucccuguucccagagcccacuuuuuuuucuuuuuuugaaauaaaauagccugucuuucagaucuaaaaaaaaaaaaaaaaaaaaaaaaaaaaaaaaaaaaaaaaaaaaaaaaaaaaaaaaaaaaaaaaaaaaaaaaaaaaaaaaaaaaaaaaaaaaaaaaaaaa

SEQ ID NO: 30177 - RNA, 1724 nt, Artificial Sequence
  mRNA product Design a-1 (A100) comprising derived and/or modified sequence from LASV(LM765-SLE-2012;Clade IV)__AIT17814__GPCmut6 (opt1)
aggagagucccgcagucggcguccagcggcucugcuuguucgugugugugucguugcaggccuuauucaagcuuaccaugggccagaucgugaccuucuuccaggaggucccccacgugaucgaggaggugaugaacaucguccugaucgcccucagcauccuggccgugcugaaggggcucuacaacuucgcgaccugcggccugguggggcuggucacguuccuccugcugugcggccgcuccugcaccaccagccucuacaaggggguguacgagcugcagacccuggagcucaacauggagacgcugaacaugugcaugccgcuguccugcaccaagaacaacagccaccacuacaucauggugggcaacgagaccggccucgagcugacgcugaccaacaccuccaucaucgaccacaaguucugcaaccucagcgacgcccaccggaagaaccuguacgaccacgcccugauguccaucaucagcaccuuccaccucuccauccccaacuucaaccaguacgaggccaugagcugcgacuucaacgggggcaagaucuccguccaguacaaccugagccacuccuacgccaaggacgcggccgaccacugcgggacgguggccaacggcgugcugcagaccuucaugcgcauggccuggggcgggagcuacaucgcgcucgacuccggccgggggcgcugggacugcaucaugaccagcuaccaguaccugaucauccagaacaccacgugggaggaccacugccaguucucccggcccagccccaucggcuaccuggggcuccugucccagcgcacccgggacaucuacaucagccgccggcugcucggcaccuucaccuggacgcugagcgacuccgagggcaaggacacccccgggggcuacugccugacccgcuggaugcucaucgaggccgagcugaagugcuucgggaacaccgccgucgccaagugcaacgagaagcacgacgaggaguucugcgacaugcugcggcuguucgacuucugcaagcaggccauccagcgccugaaggcgcccgcccagaugagcauccagcugaucaacaaggccgugaacgcccucaucaacgaccagcugaucaugaagaaccaccuccgggacaucaugggcauccccuacugcaacuacuccaaguacugguaccucaaccacacgaccaccgggaagaccagccugcccaagugcuggcugguguccaacggcagcuaccucaacgagacgcacuucuccgacgacaucgagcagcaggccgacaacaugaucaccgagaugcugcagaaggaguacauggagcgccagggcaagaccccgcuggggcucgucgaccuguucguguucagcaccuccuucuaccugaucagcaucuuccugcaccucgugaagaucccgacgcaccggcacaucgucggcaagcccugccccaagccccaccgccugaaccacauggggaucugcuccugcggccuguacaagcagccgggggugcccgugaaguggaagcggugaggacuagucccuguucccagagcccacuuuuuuuucuuuuuuugaaauaaaauagccugucuuucagaucuaaaaaaaaaaaaaaaaaaaaaaaaaaaaaaaaaaaaaaaaaaaaaaaaaaaaaaaaaaaaaaaaaaaaaaaaaaaaaaaaaaaaaaaaaaaaaaaaaaaa

SEQ ID NO: 30178 - RNA, 1724 nt, Artificial Sequence
  mRNA product Design a-1 (A100) comprising derived and/or modified sequence from LASV(LM776-SLE-2012;Clade IV)__AIT17824__GPCmut6 (opt1)
aggagagucccgcagucggcguccagcggcucugcuuguucgugugugugucguugcaggccuuauucaagcuuaccaugggccagaucgugaccuucuuccaggaggucccccacgugaucgaggaggugaugaacaucguccugaucgcccucagcauccuggccgugcugaaggggcucuacaacuucgcgaccugcggccugguggggcuggucacguuccuccugcugugcggccgcuccugcaccaccagcguguacaaggggguguacgagcuccagacccuggagcugaacauggagacgcucaacaugugcaugccgcuguccugcaccaagaacaacagccaccacuacaucauggucggcaacgagaccggccuggagcucacgcugaccaacaccuccaucaucaaccacaaguucugcaaccugagcgacgcccacaagaagaaccucuacgaccacgcccugauguccaucaucagcaccuuccaccuguccauccccaacuucaaccaguacgaggccaugagcugcgacuucaacgggggcaagaucuccgugcaguacaaccucagccacuccuacgccggggacgcggccaaccacugcggcacgguggccaacgggguccugcagaccuucaugcggauggccuggggcggcagcuacaucgcgcuggacuccgggcacggcaagugggacugcaucaugaccagcuaccaguaccucaucauccagaacaccacgugggaggaccacugccaguucucccgccccagccccaucggguaccugggccugcucucccagcggacccgcgacaucuacaucagccggcgccugcugggcaccuucaccuggacgcucagcgacuccgaggggaaggacaccccgggcggguacugccugacccgguggaugcugaucgaggccgagcucaagugcuucggcaacaccgccguggccaagugcaacgagaagcacgacgaggaguucugcgacaugcugcgccuguucgacuucugcaagcaggccauccagcggcucaaggcgcccgcccagaugagcauccagcugaucaacaaggccgugaacgcccugaucaacgaccagcucaucaugaagaaccaccuccgcgacaucauggggauccccuacugcaacuacuccaaguacugguaccugaaccacacgaccaccggcaagaccagccugcccaagugcuggcuggucuccaacggcagcuaccugaacgagacgcacuucuccgacgacaucgagcagcaggccgacaacaugaucaccgagaugcuccagaaggaguacauggagcggcaggggaagacgccccugggccugguggaccucuucguguucagcaccuccuucuaccugaucagcaucuuccugcaccuggucaagaucccgacccaccgccacaucguggggaaguccugccccaagccccaccggcucaaccacaugggcaucugcagcugcgggcuguacaagcagcccggcgugccgguccgcuggaagcggugaggacuagucccuguucccagagcccacuuuuuuuucuuuuuuugaaauaaaauagccugucuuucagaucuaaaaaaaaaaaaaaaaaaaaaaaaaaaaaaaaaaaaaaaaaaaaaaaaaaaaaaaaaaaaaaaaaaaaaaaaaaaaaaaaaaaaaaaaaaaaaaaaaaaa

SEQ ID NO: 30179 - RNA, 1724 nt, Artificial Sequence
  mRNA product Design a-1 (A100) comprising derived and/or modified sequence from LASV(Mad39;Clade IV)__ANH09722__GPCmut6 (opt1)
aggagagucccgcagucggcguccagcggcucugcuuguucgugugugugucguugcaggccuuauucaagcuuaccaugggccagaucgugaccuucuuccaggaggucccccacgugaucgaggaggugaugaacaucguccugaucgcccucagcauccuggccgugcugaaggggcucuacaacguggcgaccugcggccugaucgggcuggucacguuccuccugcugugcggccgcuccugcaccaccacccucuacaaggggguguacgagcugcaggcccuggagcucaacauggagacgcugaacaugugcaugccgcugagcugcaccaagaacaacucccaccacuacauccgggugggcaacgagaccggccucgagcugacgcugaccaacaccagccucaucaaccacaaguucugcaaccuguccgacgcccacaagaagaaccuguacgaccacgcccucaugagcaucaucuccaccuuccaccugagcauccccaacuucaaccaguacgaggccauguccugcgacuucaacgacgggaagaucagcguccaguacaaccugucccacacguacgcgggcgacaccgccaaccacugcgggaccguggccaacggcgugcuccagaccuucaugcgcauggccuggggcgggagcuacaucgcgcuggacuccggccgcgggggcugggacugcaucaugacgagcuaccaguaccugaucauccagaacaccaccugggaggaccacugccaguucucccggcccagccccaucggguaccucggccugcugucccagcggacccgcgacaucuacaucagccggcgccuccugggcacguucaccuggacccuguccgacagcgaggggaaggacaccccgggcggguacugccucacgcgguggaugcugaucgaggccgagcugaagugcuucggcaacaccgccgucgccaagugcaacgagaagcacgacgaggaguucugcgacaugcuccgccuguucgacuucugcaagcaggccauccagcggcugaaggcgcccgcccagaugagcauccagcucaucaacaaggccgugaacgcccugaucaacgaccagcugaucaugaagaaccaccuccgcgacaucauggggauccccuacugcaacuacuccaaguacugguaccugaaccacaccgugaccggcaagacgagccugcccaagugcuggcucgucuccaacggcagcuaccugaacgagacccacuucuccgacgacaucgagcagcaggccgacaacaugaucaccgagaugcugcagaaggaguacauggagcggcaggggaagacgccccucggccugguggaccuguucguguucagcaccuccuucuaccugaucagcaucuuccuccaccuggucaagaucccgacccaccgccacgugguggggaagcccugccccaagccccaccggcugaaccacaugggcaucugcuccugcggguucuacaagcagccgggcguccccgugcgcuggaagcggugaggacuagucccuguucccagagcccacuuuuuuuucuuuuuuugaaauaaaauagccugucuuucagaucuaaaaaaaaaaaaaaaaaaaaaaaaaaaaaaaaaaaaaaaaaaaaaaaaaaaaaaaaaaaaaaaaaaaaaaaaaaaaaaaaaaaaaaaaaaaaaaaaaaaa

SEQ ID NO: 30180 - RNA, 1724 nt, Artificial Sequence
  mRNA product Design a-1 (A100) comprising derived and/or modified sequence from LASV(Z0947-SLE-2011;Clade IV)__AIT17840__GPCmut6 (opt1)
aggagagucccgcagucggcguccagcggcucugcuuguucgugugugugucguugcaggccuuauucaagcuuaccaugggccagaucgugaccuucuuccaggaggucccccacgugaucgaggaggugaugaacaucguccugaucgcccucagcauccuggccgugcugaaggggcucuacaacuucgcgaccugcggccugguggggcuggucacguuccuccugcugugcggccgcuccugcaccaucagccucuacaaggggguguacgagcugcagacccuggagcucaacauggagacccugaacaugugcaugccgcuguccugcaccaagaacaacagccaccacuacaucauggugggcaacgagaccggccucgagcugacccugacgaacaccuccaucaucaaccacaaguucugcaaccucagcgacgcccacaagaagaaccuguacgaccacgcccugauguccaucaucagcaccuuccaccucuccauccccaacuucaaccaguacgaggccaugagcugcgacuucaacgggggcaagaucuccguccaguacaaccugagccacuccuacgccggggacgcggccaaccacugcggcaccguggccaacggggugcugcagacguucaugcggauggccuggggcggcagcuacaucgcgcucgacuccgggcgcgaccggugggacugcaucaugaccagcuaccaguaccugaucauccagaacaccaccugggaggaccacugccaguucucccgccccagccccaucggcuaccuggggcuccugucccagcggacgcgcgacaucuacaucagccggcgccugcucggcaccuucaccuggacccugagcgacuccgagggcaaggacacgcccgggggcuacugccugacccgguggaugcucaucgaggccgagcugaagugcuucgggaacaccgccgucgccaagugcaacgagaagcacgacgaggaguucugcgacaugcugcgccucuucgacuucugcaagcaggccauccagcggcugaaggcgcccgcccagaugagcauccagcugaucaacaaggccgugaacgcccucaucaacgaccagcugaucaugaagaaccaccuccgcgacaucaugggcauccccuacugcaacuacuccaaguacugguaccugaaccacaccacgaccgggaagaccagccugcccaagugcuggcugguguccaacggcagcuaccucaacgagacccacuucuccgacgacaucgagcagcaggccgacaacaugaucacggagaugcugcagaaggaguacauggagcggcagggcaagaccccgcuggggcucgucgaccuguucguguucagcaccuccuucuaccugaucagcaucuuccugcaccucgugaagaucccgacccaccgccacaucgucggcaagcccugccccaagccccaccggcugaaccacauggggaucugcuccugcggccuguacaagcagccgggggugcccgugaaguggaagcgcugaggacuagucccuguucccagagcccacuuuuuuuucuuuuuuugaaauaaaauagccugucuuucagaucuaaaaaaaaaaaaaaaaaaaaaaaaaaaaaaaaaaaaaaaaaaaaaaaaaaaaaaaaaaaaaaaaaaaaaaaaaaaaaaaaaaaaaaaaaaaaaaaaaaaa

SEQ ID NO: 30181 - RNA, 1724 nt, Artificial Sequence
  mRNA product Design a-1 (A100) comprising derived and/or modified sequence from LASV(Josiah;Clade IV)__NP_694870__GPCmut6 (opt1)
aggagagucccgcagucggcguccagcggcucugcuuguucgugugugugucguugcaggccuuauucaagcuuaccaugggccagaucgugaccuucuuccaggaggucccccacgugaucgaggaggugaugaacaucguccugaucgcccucagcgugcuggccgugcugaaggggcucuacaacuucgcgaccugcggccuggucgggcuggugacguuccuccugcugugcggccgcuccugcaccaccagccucuacaaggggguguacgagcugcagacccuggagcucaacauggagacgcugaacaugugcaugccgcuguccugcaccaagaacaacagccaccacuacaucauggucggcaacgagaccggccucgagcugacccugacgaacaccuccaucaucaaccacaaguucugcaaccucagcgacgcccacaagaagaaccuguacgaccacgcccugauguccaucaucagcaccuuccaccucuccauccccaacuucaaccaguacgaggccaugagcugcgacuucaacgggggcaagaucuccgugcaguacaaccugagccacuccuacgccggggacgcggccaaccacugcggcaccguggccaacgggguccugcagacguucaugcggauggccuggggcggcagcuacaucgcgcucgacuccgggcgcggcaacugggacugcaucaugaccagcuaccaguaccugaucauccagaacaccaccugggaggaccacugccaguucucccggcccagccccaucggguaccugggccuccugucccagcgcacgcgggacaucuacaucagccgccggcugcucggcaccuucaccuggacccugagcgacuccgaggggaaggacacgccgggcggguacugccugacccgcuggaugcucaucgaggccgagcugaagugcuucggcaacaccgccguggccaagugcaacgagaagcacgacgaggaguucugcgacaugcugcggcuguucgacuucugcaagcaggccauccagcgccugaaggcgcccgcccagaugagcauccagcugaucaacaaggccgugaacgcccucaucaacgaccagcugaucaugaagaaccaccuccgggacaucauggggauccccuacugcaacuacuccaaguacugguaccucaaccacaccacgaccggccgcaccagccugcccaagugcuggcuggucuccaacggcagcuaccucaacgagacccacuucuccgacgacaucgagcagcaggccgacaacaugaucacggagaugcugcagaaggaguacauggagcggcaggggaagaccccgcugggccugguggaccucuucguguucagcaccuccuucuaccugaucagcaucuuccugcaccucgucaagauccccacccaccgccacaucguggggaaguccugccccaagccccaccggcugaaccacaugggcaucugcagcugcgggcuguacaagcagccgggcgugcccgucaaguggaagcgcugaggacuagucccuguucccagagcccacuuuuuuuucuuuuuuugaaauaaaauagccugucuuucagaucuaaaaaaaaaaaaaaaaaaaaaaaaaaaaaaaaaaaaaaaaaaaaaaaaaaaaaaaaaaaaaaaaaaaaaaaaaaaaaaaaaaaaaaaaaaaaaaaaaaaa

SEQ ID NO: 30182 - RNA, 1721 nt, Artificial Sequence
  mRNA product Design a-1 (A100) comprising derived and/or modified sequence from LASV(LP;Clade I)__AAF86701__GPCmut6 (opt1)
aggagagucccgcagucggcguccagcggcucugcuuguucgugugugugucguugcaggccuuauucaagcuuaccaugggccagaucaucaccuucuuccaggaggugccccacgucaucgaggaggugaugaacaucgugcugaucgcccucagccugcuggccauccucaaggggcuguacaacaucgcgaccugcggcaucaucgggcuggucgccuuccucuuccugugcggcaaguccugcagccugacgcucaagggcggguacgagcugcagacccuggagcucaacauggagacccugaacaugugcaugccgcuguccugcaccaagaacagcucccaccacuacauccgcgugggcaacgagacggggcucgagcugacccugaccaacaccagcaucaucaaccacaaguucugcaaccucuccgacgcccacaagaagaaccuguacgaccacgcccugaugagcaucaucuccacguuccaccucagcauccccaacuucaaccaguacgaggccauguccugcgacuucaacggcgggaagaucagcgugcaguacaaccugucccacagcuacgcgggcgacgccgccgagcacugcgggaccgucgccaacggcgugcugcagaccuucaugcggauggcguggggcgggcgcuacaucgcccucgacuccggcaaggggaacugggacugcaucaugaccagcuaccaguaccugaucauccagaacacgaccugggaggaccacugccaguucucccggcccagccccaucggcuaccugggccuccugucccagcgcacccgggacaucuacaucagccgccggcugcucgggaccuucacguggacccugagcgacuccgagggcaacgagacccccgggggcuacugccugacccgcuggaugcucaucgaggccgagcugaagugcuucgggaacacggccguggccaagugcaacgagaagcacgacgaggaguucugcgacaugcugcggcuguucgacuucugcaagcaggcgauccgccggcugaaggccccggcccagaugagcauccagcugaucaacaaggccgucaacgcccucaucaacgaccagcugaucaugaagaaccaccuccgcgacaucaugggcauccccuacugcaacuacuccaaguacugguaccucaaccacaccagcuccggccggaccagccugcccaagugcuggcugaucuccaacgggagcuaccucaacgagacccaguucuccgacgacaucgagcagcaggcggacaacaugaucacggagaugcugcagaaggaguacaucgagcgccagggcaagaccccgcuggggcugguggacaucuucaucuucagcaccuccuucuaccucaucagcaucuuccugcaccugaucaagauccccacccaccggcacaucgugggcaagcccugccccaagccgcaccgccucaaccacaugggggucugcuccugcggccuguacaagcaccccggcgugcccacgaaguggaagcggugaggacuagucccuguucccagagcccacuuuuuuuucuuuuuuugaaauaaaauagccugucuuucagaucuaaaaaaaaaaaaaaaaaaaaaaaaaaaaaaaaaaaaaaaaaaaaaaaaaaaaaaaaaaaaaaaaaaaaaaaaaaaaaaaaaaaaaaaaaaaaaaaaaaaa

SEQ ID NO: 30183 - RNA, 1721 nt, Artificial Sequence
  mRNA product Design a-1 (A100) comprising derived and/or modified sequence from LASV(803213;Clade II)__AAF86703__GPCmut6 (opt1)
aggagagucccgcagucggcguccagcggcucugcuuguucgugugugugucguugcaggccuuauucaagcuuaccaugggccagaucaucaccuucuuccaggaggugccccacgucaucgaggaggugaugaacaucgugcugaucgcccucagccugcuggccauccucaaggggaucuacaacgucgcgaccugcggccuguucgggcugaucuccuuccuccugcugugcggccgcagcugcuccgugacguacaaggggguguacgagcuccagacccuggagcugaacauggccaaccucaacaugugcaugccgcugagcugcaccaagaacaacucccaccacuacaucauggucggcaacgagaccggccuggagcucacgcugaccaacaccagcaucaucaaccacaaguucugcaaccuguccgacgcccacaagaagaaccucuacgaccacgcccugaugagcaucaucuccaccuuccaccugagcauccccaacuucaaccaguacgaggccauguccugcgacuucaacgggggcaagaucagcgugcaguacaaccucucccacagcuucgcgguggacgccgccaaccacugcgggacgaucgccaacggcguccugcagaccuucaugcggauggcguggggcggguccuacaucgcccuggacagcggcaaggggaacugggacugcaucaugaccuccuaccaguaccucaucauccagaacaccacgugggaggaccacugccaguucagccgccccucccccaucggcuaccuggggcugcucagccagcggacccgcgacaucuacaucagccggcgccugcugggcaccuucaccuggacgcucuccgacagcgagggcaacgaggcccccgggggcuacugccugacccgguggaugcugaucgaggccgagcucaagugcuucgggaacaccgccguggcgaagugcaacgagaagcacgacgaggaguucugcgacaugcugcgccuguucgacuucugcaagcaggccaucaagcggcucaagaccccggcccagauguccauccagcugaucaacaaggccgugaacgcccugaucaacgaccagcucaucaugaagaaccaccuccgcgacaucaugggcauccccuacugcaacuacagccgguacugguaccugaaccacacggucaccgggaagaccucccugccccgcugcuggcuggugagcaacggcuccuaccugaacgagacccacuucagcgacgacaucgagcagcaggcggacaacaugaucacggagaugcuccagaaggaguacauggaccggcagggcaagaccccgcuggggcugguggaccuguucgucuucuccaccagcuucuaccucaucuccaucuuccugcaccuggugaagauccccacccaccgccacaucgugggcaagcccugccccaagccgcaccggcucaaccacauggggaucugcagcugcggccuguacaagcaccccgggguccccgugaaguggaagcgcugaggacuagucccuguucccagagcccacuuuuuuuucuuuuuuugaaauaaaauagccugucuuucagaucuaaaaaaaaaaaaaaaaaaaaaaaaaaaaaaaaaaaaaaaaaaaaaaaaaaaaaaaaaaaaaaaaaaaaaaaaaaaaaaaaaaaaaaaaaaaaaaaaaaaa

SEQ ID NO: 30184 - RNA, 1721 nt, Artificial Sequence
  mRNA product Design a-1 (A100) comprising derived and/or modified sequence from LASV(GA391;Clade III)__CAA36645__GPCmut6 (opt1)
aggagagucccgcagucggcguccagcggcucugcuuguucgugugugugucguugcaggccuuauucaagcuuaccaugggccagaucgugaccuucuuccaggaggucccccacgugaucgaggaggugaugaacaucguccugaucgcccucagcauccuggccauccugaaggggcucuacaacguggcgaccugcggccugaucgggcuggugacguuccuccugcuguccggccgcagcugcucccucaucuacaaggggaccuacgagcugcagacccuggagcucaacauggagacccugaacaugugcaugccgcugagcugcacgaagaacaacucccaccacuacauccgggucggcaacgagaccggccucgagcugacccugaccaacacgagcauccucaaccacaaguucugcaaccuguccgacgcccacaagcgcaaccuguacgaccacagccucauguccaucaucagcaccuuccaccuguccauccccaacuucaaccaguacgaggccaugagcugcgacuucaacgggggcaagaucaccgugcaguacaaccugucccacagcuucgccguggacgccgcggggcacugcggcacccucgccaacgggguccugcagacguucaugcggauggccuggggcggcuccuacaucgcccuggacagcgggcgcggcaacugggacugcaucaugaccuccuaccaguaccucaucauccagaacaccaccugggacgaccacugccaguucagccggcccucccccaucggguaccugggccugcucagccagcgcacgcgggacaucuacaucagccgccggcugcugggcaccuucaccuggacccucuccgacagcgaggggaacgagacgccgggcggguacugccugacccgcuggaugcugaucgaggcggagcucaagugcuucggcaacaccgccguggccaagugcaacgagaagcacgacgaggaguucugcgacaugcugcggcuguucgacuucugcaagcaggccauccgccggcucaagacccccgcccagauguccauccagcugaucaacaaggcggugaacgcccugaucaacgaccagcucaucaugaagaaccaccuccgcgacaucauggggauccccuacugcaacuacagccgguacugguaccugaaccacacguccaccggcaagaccagccugccccgcugcuggcugaucuccaacggcagcuaccugaacgagaccaaguucuccgacgacaucgagcagcaggccgacaacaugaucacggagaugcugcagaaggaguacaucgaccggcaggggaagaccccgcucggccuggucgaccuguucguguucagcaccuccuucuaccucaucagcaucuuccugcaccuggugaagauccccacccaccgccacaucgucgggaagcccugccccaagccgcaccggcucaaccacaugggcaucugcuccugcgggcuguacaagcagcccggcgugcccgugcgcuggaagcggugaggacuagucccuguucccagagcccacuuuuuuuucuuuuuuugaaauaaaauagccugucuuucagaucuaaaaaaaaaaaaaaaaaaaaaaaaaaaaaaaaaaaaaaaaaaaaaaaaaaaaaaaaaaaaaaaaaaaaaaaaaaaaaaaaaaaaaaaaaaaaaaaaaaaa

SEQ ID NO: 30185 - RNA, 1724 nt, Artificial Sequence
  mRNA product Design a-1 (A100) comprising derived and/or modified sequence from LASV(AV;Clade V)__CCA30314__GPCmut6 (opt1)
aggagagucccgcagucggcguccagcggcucugcuuguucgugugugugucguugcaggccuuauucaagcuuaccaugggccagaucgugaccuucuuccaggaggucccccacgugaucgaggaggugaugaacaucguccugaucgcccucagcauccuggccgugcugaaggggcucuacaacaucgcgaccugcggccugaucgggcugaucacguuccuccugcugugcggccgcuccugcagcuccaaccucuacaaggggguguacgagcugcagagccuggaccucaacauggagacccugaacaugugcaugccgcuguccugcaccaagaacaacagccaccacuacauccgggucggcaacgacaccggccucgagcugacgcugaccaacaccuccauccucaaccacaaguucugcaaccugagcgacgcccacaagaaggaccuguacgaccacgcccucauguccaucaucagcaccuuccaccuguccauccccaacuucaaccaguacgaggccaugagcugcgacuucaacgggggcaagaucuccgugcaguacaaccugagccacuccuacgccaucgacgcggccaaccacugcgggacgguggccaacggcauccuccagaccuucaugcgcauggccuggggcgggagcuacaucgcgcuggacuccggccgggggaacugggacugcaucaugaccagcuaccaguaccugaucauccagaacaccacgugggagaaccacugccaguucucccgccccagccccaucggcuaccucgggcugcugagccagcggacccgcgacaucuacaucucccggcgccuccugggcaccuucaccuggacgcugagcgacuccgagggcaacgccacccccgggggcuacugccucacccgguggaugcugaucgaggccgagcugaagugcuucgggaacaccgccgucgccaagugcaacgagaagcacgacgaggaguucugcgacaugcuccgccuguucgacuucugcaagcaggcgaucagccggcugaaguccccggcccagaugagcauccagcucaucaacaaggccgugaacgcccugaucaacgaccagcugaucaugaagaaccaccuccgcgacaucaugggcauccccuacugcaacuacuccaaguacugguaccugaaccacacgaucaccgggaagaccagccugcccaagugcuggcucguguccaacggcagcuaccugaacgagacccacuucuccgacgacaucgagcagcaggccgacaacaugaucacggagaugcugcagaaggaguacauggagcggcagggcaagaccccgcuggggcucgucgaccuguucguguucagcaccuccuucuaccugaucagcaucuuccuccgccuggugaagauccccacccaccggcacaucgucggcaagcccugccccaagccgcaccgccugaaccacauggggaucugcuccugcggccucuacaagcagcccggggugcccgugcgguggaagcgcugaggacuagucccuguucccagagcccacuuuuuuuucuuuuuuugaaauaaaauagccugucuuucagaucuaaaaaaaaaaaaaaaaaaaaaaaaaaaaaaaaaaaaaaaaaaaaaaaaaaaaaaaaaaaaaaaaaaaaaaaaaaaaaaaaaaaaaaaaaaaaaaaaaaaa

SEQ ID NO: 30186 - RNA, 1721 nt, Artificial Sequence
  mRNA product Design a-1 (A100) comprising derived and/or modified sequence from LASV(Togo/2016/7082;Clade VI)__AMR44577__GPCmut6 (opt1)
aggagagucccgcagucggcguccagcggcucugcuuguucgugugugugucguugcaggccuuauucaagcuuaccaugggccagaucaucaccuucuuccaggaggugccccacgucaucgaggaggugaugaacaucgugcugaucgcccucagccugcuggccauccucaagggggucuacaacguggcgaccugcggcaucaucgggcuggugacguuccuguuccucugcggccgcuccugcagccugaucuacaagggguccuacgagcugcagacccucgagcugaacauggagacccugaacaugugcaugccgcucagcugcaccaagaacuccagccaccacuacauccgggucggcaacgagacgggccuggagcugacccucaccaacaccuccaucaucaaccacaaguucugcaaccugagcgacgcccacaagcgcaaccuguacgaccacgcccucauguccauccugagcacguuccaccuguccauccccaacuucaaccaguacgaggccaugagcugcgacuucaacgggggcaagaucuccgugcaguacaaccucagccacgccuacgcgguggacgccgccgagcacugcgggaccgucgccaacggcgugcugcagaccuucaugcggauggcguggggcggguccuacaucgcccuggacagcggccgcgggaacugggacugcaucaugaccuccuaccaguaccucaucauccagaacacgaccugggaggaccacugccaguucagccggcccucccccaucggcuaccuggggcugcucagccagcgcacccgggacaucuacaucagccgccggcugcugggcaccuucacguggacccucuccgacagcgagggcaacgagacccccgggggcuacugccugacccgcuggaugcugaucgaggccgagcucaagugcuucgggaacacggccguggccaagugcaacgagaagcacgacgaggaguucugcgacaugcugcggcuguucgacuucugcaagcaggcgauccagcgccucaaguccccggcccagaugagcauccagcugaucaacaaggccgucaacgcccugaucaacgaccagcucaucaugaagaaccaccuccgggacaugaugggcauccccuacugcaacuacuccaaguacugguaccugaaccacaccagcuccgggcgcaccagccugcccaagugcuggcugguguccaacggcagcuaccugaacgagacccacuucuccgacgacaucgagcagcaggccgacaacaugaucacggagaugcuccagaaggaguacaucgaccggcagggcaagaccccgcuggggcugguggaccuguucgucuucagcaccuccuucuaccucaucagcaucuuccugcaccugaucaagauccccacccaccgccacaucgugggcaagcccugccccaagccgcaccggcucaaccacauggggaucugcuccugcggccuguacaagcagcccggggugcccacgcgcuggaagcggugaggacuagucccuguucccagagcccacuuuuuuuucuuuuuuugaaauaaaauagccugucuuucagaucuaaaaaaaaaaaaaaaaaaaaaaaaaaaaaaaaaaaaaaaaaaaaaaaaaaaaaaaaaaaaaaaaaaaaaaaaaaaaaaaaaaaaaaaaaaaaaaaaaaaa

SEQ ID NO: 30187 - RNA, 1721 nt, Artificial Sequence
  mRNA product Design a-1 (A100) comprising derived and/or modified sequence from LASV(KAK-428;Clade n.d. (VII))__ANH09740__GPCmut6 (opt1)
aggagagucccgcagucggcguccagcggcucugcuuguucgugugugugucguugcaggccuuauucaagcuuaccaugggccagaucgugaccuucuuccaggaggucccccacgugaucgaggaggugaugaacaucguccugaucgcccucagccugcuggccauccucaaggggcuguacaacuucgcgaccugcggcgugaucgggcugaucacguuccuccugcugugcggccgcuccugcagcgccaccuacaaggggcaguacgagcuccagacccuggagcugaacauggagucccucaacaugugcaugccgcugagcugcaccaagaacaacucccaccacuacauccgggccggcaacaacacgggccuggagcucacccugaccaacaccagcaucaucucccacaaguucugcaaccugagcgacgcccacaagaagaaccucuacgaccacacgcugauguccaucaucaccaccuuccaccugagcauccccaacuucaaccaguacgaggccauguccugcgacuucaacgggggcaagaucagcauccaguacaaccucucccacagcuacgcgggggacgccgcccagcacugcggcaccguggccaacgggguccugcagacguucaugcgcauggcguggggcggcuccuaccuggcccucgacagcgggcggcgcggcugggacugcaucaucuccagcuaccaguaccugaucauccagaacaccaccugggacgaccacugccaguucucccggcccagccccaucggguaccugggcuucgugagccagaagacccgcgacaucuacaucucccggcgccuccugggcacguucaccuggacccugagcgacuccgaggggcacgacaugccgggcggguacugccucacccgguggaugcugaucgaggccgaccugaagugcuucggcaacacggccguggccaagugcaacgagaagcacgacgaggaguucugcgacauguggcgccucuucgacuucugcaagcaggcgauccagcggcugaaggcccccgcccagaugaacauccagcugaucaacaaggccgucaacgcccucaucaacgaccagcugaugaugaagaaccaccuccgcgacaucauggggauccccuacugcaacuacagcaaguucugguaccugaacaacaccaccaccggccggacgucccugccccgcugcuggcugaucagcaacggcuccuaccucaacgagacccacuucagcgacgacaucgagcagcaggcggacaacaugaucaccgagaugcugcagaaggaguacauggaccggcaggggaagaccccgcugggccucguggaccuguucguguucuccacgagcuucuaccugaucaccaucuuccugcaccucgucaagauccccacccaccgccacaucguggggaagcccugccccaagccgcaccggcugaaccacaugggcaucugcuccugcgggcuguacaagcagcccggcgugcccguccgcuggaagcggugaggacuagucccuguucccagagcccacuuuuuuuucuuuuuuugaaauaaaauagccugucuuucagaucuaaaaaaaaaaaaaaaaaaaaaaaaaaaaaaaaaaaaaaaaaaaaaaaaaaaaaaaaaaaaaaaaaaaaaaaaaaaaaaaaaaaaaaaaaaaaaaaaaaaa

SEQ ID NO: 30188 - RNA, 1721 nt, Artificial Sequence; identical to SEQ ID NO: 30182
  mRNA product Design a-1 (A100) comprising derived and/or modified sequence from LASV(Pinneo-NIG-1969;Clade I)__AIT17836__GPCmut6 (opt1)

SEQ ID NO: 30189 - RNA, 1721 nt, Artificial Sequence
  mRNA product Design a-1 (A100) comprising derived and/or modified sequence from LASV(ISTH0009-NIG-2011;Clade II)__AIT17404__GPCmut6 (opt1)
aggagagucccgcagucggcguccagcggcucugcuuguucgugugugugucguugcaggccuuauucaagcuuaccaugggccagaucaucaccuucuuccaggaggugccccacgucaucgaggaggugaugaacaucgugcugaucgcccucagccugcuggccauccucaaggggaucuacaacgucgcgaccugcggccuguucgggcugguguccuuccuccugcugugcggccgcagcugcuccacgaccuacaaggggguguacgagcuccagacccuggagcuggacauggccagccucaacaugugcaugccgcuguccugcaccaagaacaacagccaccacuacaucauggucggcaacgagacgggccuggagcucacccugaccaacaccuccaucaucaaccacaaguucugcaaccugagcgacgcccacaagaagaaccucuacgaccacgcccugauguccaucaucagcacguuccaccuguccauccccaacuucaaccaguacgaggccaugagcugcgacuucaacgggggcaagaucuccgugcaguacaaccucagccacgcguacgccguggacgccgccaaccacugcgggaccaucgcgaacggcguccugcagaccuucaugcggauggccuggggcggguccuacaucgcccuggacagcggcaagggguccugggacugcaucaugaccagcuaccaguaccucaucauccagaacacgaccugggaggaccacugccaguucucccgccccagccccaucggcuaccuggggcugcucagccagcggacccgcgacaucuacaucucccggcgccugcugggcaccuucacguggacccucagcgacuccgagggcaacgagacccccgggggcuacugccugacccgguggaugcugaucgaggccgagcucaagugcuucgggaacacggccguggcgaagugcaacgagaagcacgacgaggaguucugcgacaugcugcgccuguucgacuucugcaagcaggccauccggcgccucaagaccccggcccagaugagcauccagcugaucaacaaggccgugaacgcccugaucaacgaccagcucaucaugaagaaccaccuccgggacaucaugggcauccccuacugcaacuacuccaaguacugguaccugaaccacaccgucaccgggaagacgagccugccccgcugcuggcugguguccaacggcagcuaccugaacgagacccacuucuccgacgacaucgagcagcaggcggacaacaugaucaccgagcuccugcagaaggaguacauggaccggcagggcaagaccccgcuggggcugguggaccucuucgucuucagcacguccuucuaccugaucagcaucuuccugcaccucaucaagauccccacccaccgccacaucaccggcaagcccugccccaagccgcaccggcugaaccacauggggaucugcuccugcggccuguacaagcaccccggggugcccgugaaguggaagcgcugaggacuagucccuguucccagagcccacuuuuuuuucuuuuuuugaaauaaaauagccugucuuucagaucuaaaaaaaaaaaaaaaaaaaaaaaaaaaaaaaaaaaaaaaaaaaaaaaaaaaaaaaaaaaaaaaaaaaaaaaaaaaaaaaaaaaaaaaaaaaaaaaaaaaa

SEQ ID NO: 30190 - RNA, 1721 nt, Artificial Sequence
  mRNA product Design a-1 (A100) comprising derived and/or modified sequence from LASV(ISTH2010-NIG-2012;Clade II)__AIT17482__GPCmut6 (opt1)
aggagagucccgcagucggcguccagcggcucugcuuguucgugugugugucguugcaggccuuauucaagcuuaccaugggccagaucaucaccuucuuccaggaggugccccacgucaucgaggaggugaugaacaucgugcugaucgcccucagccugcuggccauccucaaggggaucuacaacgucgcgaccugcggccuguucgggcugguguccuuccuccugcugugcggccgcagcugcuccacgaccuacaaggggguguacgagcuccagacccuggagcuggacauggccagccucaacaugugcaugccgcuguccugcaccaagaacaacagccaccacuacaucauggucggcaacgagacgggccuggagcucacccugaccaacaccuccaucaucaaccacaaguucugcaaccugagcgacgcccacaagaagaaccucuacgaccacgcccugauguccaucaucagcacguuccaccuguccauccccaacuucaaccaguacgaggccaugagcugcgacuucaacgggggcaagaucuccgugcaguacaaccucagccacgcguacgccguggacgccgccaaccacugcgggaccaucgcgaacggcguccugcagaccuucaugcggauggccuggggcggguccuacaucgcccuggacagcggcaagggguccugggacugcaucaugaccagcuaccaguaccucaucauccagaacaucacgugggaggaccacugccaguucucccgccccagccccaucggcuaccuggggcugcucagccagcggacccgcgacaucuacaucucccggcgccugcugggcaccuucaccuggacgcucagcgacuccgagggcaacgagacccccgggggcuacugccugacccgguggaugcugaucgaggccgagcucaagugcuucgggaacaccgccguggcgaagugcaacgagaagcacgacgaggaguucugcgacaugcugcgccuguucgacuucugcaagcaggccauccggcgccucaagacgccggcccagaugagcauccagcugaucaacaaggccgugaacgcccugaucaacgaccagcucaucaugaagaaccaccuccgggacaucaugggcauccccuacugcaacuacuccaaguacugguaccugaaccacaccgucaccgggaagaccagccugccccgcugcuggcugguguccaacggcagcuaccugaacgagacgcacuucuccgacgacaucgagcagcaggcggacaacaugaucaccgagcuccugcagaaggaguacaucgaccggcagggcaagaccccgcuggggcugguggaccucuucgucuucagcaccuccuucuaccugaucagcaucuuccugcaccucgugaagauccccacgcaccgccacguggucggcaagcccugccccaagccgcaccggcugaaccacauggggaucugcuccugcggccuguacaagcaccccggggugcccgugaaguggaagcgcugaggacuagucccuguucccagagcccacuuuuuuuucuuuuuuugaaauaaaauagccugucuuucagaucuaaaaaaaaaaaaaaaaaaaaaaaaaaaaaaaaaaaaaaaaaaaaaaaaaaaaaaaaaaaaaaaaaaaaaaaaaaaaaaaaaaaaaaaaaaaaaaaaaaaa

SEQ ID NO: 30191 - RNA, 1721 nt, Artificial Sequence
  mRNA product Design a-1 (A100) comprising derived and/or modified sequence from LASV(Lassa virus/H.sapiens-wt/NGA/2015/ISTH_0543;Clade II)__AVO03639__GPCmut6 (opt1)
aggagagucccgcagucggcguccagcggcucugcuuguucgugugugugucguugcaggccuuauucaagcuuaccaugggccagaucaucaccuucuuccaggaggugccccacgucaucgaggaggugaugaacaucgugcugaucgcccucagccugcuggccauccucaaggggaucuacaacgucgcgaccugcggccuguucgggcugguguccuuccuccugcugugcggccgcagcugcuccacgaccuacaaggggguguacgagcuccagacccuggagcuggacauggccaaccucaacaugugcaugccgcugagcugcaccaagaacaacucccaccacuacaucauggucggcaacgagacgggccuggagcucacccugaccaacaccagcaucaucaaccacaaguucugcaaccuguccgacgcccacaagaagaaccucuacgaccacgcccugaugagcaucaucuccacguuccaccugagcauccccaacuucaaccaguacgaggccauguccugcgacuucaacgggggcaagaucagcgugcaguacaaccucucccacaccuacgcgguggacgccgccaaccacugcgggaccaucgccaacggcguccugcagaccuucaugcggauggcguggggcgggagcuacaucgcccuggacuccggcaaggggagcugggacugcaucaugacguccuaccaguaccucgugauccagaacaccaccugggaggaccacugccaguucagccgccccucccccaucggcuaccuggggcugcucagccagcggacccgcgacaucuacaucagccggcgccugcugggcacguucaccuggacccucuccgacagcgagggcaacgagacccccgggggcuacugccugacgcgguggaugcugaucgaggccgagcucaagugcuucgggaacaccgccguggccaagugcaacgagaagcacgacgaggaguucugcgacaugcugcgccuguucgacuucugcaagcaggcgauccggcgccucaagaccccggcccagauguccauccagcugaucaacaaggccgucaacgcccugaucaacgaccagcucaucaugaagaaccaccuccgggacaucaugggcauccccuacugcaacuacagcaaguacugguaccugaaccacaccgugacggggaagaccucccugccccgcugcuggcuggugagcaacggcuccuaccugaacgagacccacuucagcgacgacaucgagcagcaggccgacaacaugaucaccgagcuccugcagaaggaguacaucgaccggcagggcaagacgccgcuggggcuggucgaccucuucguguucuccaccagcuucuaccugaucuccaucuuccugcaccucgugaagauccccacccaccgccacaucaccggcaagcccugccccaagccgcaccggcugaaccacauggggaucugcagcugcggccuguacaagcaccccgggguccccgugaaguggaagcgcugaggacuagucccuguucccagagcccacuuuuuuuucuuuuuuugaaauaaaauagccugucuuucagaucuaaaaaaaaaaaaaaaaaaaaaaaaaaaaaaaaaaaaaaaaaaaaaaaaaaaaaaaaaaaaaaaaaaaaaaaaaaaaaaaaaaaaaaaaaaaaaaaaaaaa

SEQ ID NO: 30192 - RNA, 1721 nt, Artificial Sequence
  mRNA product Design a-1 (A100) comprising derived and/or modified sequence from LASV(Lassa virus/H.sapiens-wt/NGA/2016/ISTH_0009;Clade II)__AVO03571__GPCmut6 (opt1)
aggagagucccgcagucggcguccagcggcucugcuuguucgugugugugucguugcaggccuuauucaagcuuaccaugggccagaucaucaccuucuuccaggaggugccccacgucaucgaggaggugaugaacaucgugcugaucgcccucagccugcuggccauccucaaggggaucuacaacgucgcgaccugcggccugcuggggcucguguccuuccugcugcucugcggccgcagcugcuccacgaccuacaaggggguguacgagcugcagacccuggagcucgacauggccagccugaacaugugcaugccgcuguccugcaccaagaacaacagccaccacuacaucauggucggcaacgagacgggccucgagcugacccugaccaacaccuccaucaucaaccacaaguucugcaaccucagcgacgcccacaagaagaaccuguacgaccacgcccugauguccaucaucagcacguuccaccucuccauccccaacuucaaccaguacgaggccaugagcugcgacuucaacgggggccggaucuccgugcaguacaaccugagccacuccuacgcgguggacgccgccaaccacugcgggaccaucgccaacggcguccugcagaccuucaugcgcauggcguggggcgggagcuacaucgcccucgacuccggcaaggggagcugggacugcaucaugaccuccuaccaguaccugaucauccagaacacgaccugggaggaccacugccaguucagccggcccagccccaucggcuaccuggggcuccugucccagcgcacccgggacaucuacaucagccgccggcugcucggcaccuucacguggacccuguccgacagcgagggcaacgagacccccgggggcuacugccugacccgcuggaugcucaucgaggccgagcugaagugcuucgggaacacggccguggccaagugcaacgagaagcacgacgaggaguucugcgacaugcugcggcuguucgacuucugcaagcaggcgauccgccggcugaagaccccggcccagauguccauccagcugaucaacaaggccgugaacgcccucaucaacgaccagcugaucaugaagaaccaccuccgcgacaucaugggcauccccuacugcaacuacagcaaguacugguaccucaaccacaccgucaccgggaagacgucccugccccggugcuggcuggugagcaacggcuccuaccucaacgagacccacuucagcgacgacaucgagcagcaggccgacaacaugaucaccgagcugcugcagaaggaguacaucgaccgccagggcaagaccccgcuggggcucguggaccuguucgucuucuccacgagcuucuaccugaucuccaucuuccuccaccuggugaagauccccacccaccggcacaucaccggcaagcccugccccaagccgcaccgccugaaccacauggggaucugcagcugcggccucuacaaccaccccggggugcccgucaaguggaagcggugaggacuagucccuguucccagagcccacuuuuuuuucuuuuuuugaaauaaaauagccugucuuucagaucuaaaaaaaaaaaaaaaaaaaaaaaaaaaaaaaaaaaaaaaaaaaaaaaaaaaaaaaaaaaaaaaaaaaaaaaaaaaaaaaaaaaaaaaaaaaaaaaaaaaa

SEQ ID NO: 30193 - RNA, 1721 nt, Artificial Sequence
  mRNA product Design a-1 (A100) comprising derived and/or modified sequence from LASV(Lassa virus/H.sapiens-wt/NGA/2016/ISTH_0017;Clade II)__AVO03567__GPCmut6 (opt1)
aggagagucccgcagucggcguccagcggcucugcuuguucgugugugugucguugcaggccuuauucaagcuuaccaugggccagaucaucaccuucuuccaggaggugccccacgucaucgaggaggugaugaacaucgugcugaucgcccucagccugcuggccauccucaaggggaucuacaacgucgcgaccugcggccuguucgggcugguguccuuccuccugcugugcggccgcagcugcuccacgaccuacaaggggguguacgagcuccagacccuggagcuggacauggccagccucaacaugugcaugccgcuguccugcaccaagaacaacagccaccacuacaucauggucggcaacgagacgggccuggagcucacccugaccaacaccuccaucaucaaccacaaguucugcaaccugagcgacgcccacaagaagaaccucuacgaccacgcccugauguccaucaucagcacguuccaccuguccauccccaacuucaaccaguacgaggccaugagcugcgacuucaacgggggcaagaucuccgugcaguacaaccucagccacaccuacgcgaucgacgccgccaaccacugcgggaccaucgccaacggcgugcugcagaccuucaugcggauggcguggggcggguccuacaucgcccuggacagcggcaagggguccugggacugcaucaugacgagcuaccaguaccucaucauccagaacaccaccugggaggaccacugccaguucucccgccccagccccaucggcuaccuggggcugcucagccagcggacccgcgacaucuacaucucccggcgccugcugggcacguucaccuggacccucagcgacuccgagggcaacgagacccccgggggcuacugccugacgcgguggaugcugaucgaggccgagcucaagugcuucgggaacaccgccgucgccaagugcaacgagaagcacgacgaggaguucugcgacaugcugcgccuguucgacuucugcaagcaggcgauccggcgccucaagaccccggcccagaugagcauccagcugaucaacaaggccgugaacgcccugaucaacgaccagcucaucaugaagaaccaccuccgggacaucaugggcauccccuacugcaacuacuccaaguacugguaccugaaccacaccgugacggggaagaccagccugccccgcugcuggcuggucuccaacggcagcuaccugaacgagacccacuucuccgacgacaucgagcagcaggccgacaacaugaucaccgagcuccugcagaaggaguacauggaccggcagggcaagacgccgcuggggcugguggaccucuucguguucagcaccuccuucuaccugaucagcaucuuccugcaccucguccgcauccccacccaccggcacgugaucggcaagcccugccccaagccgcaccgccugaaccacauggggaucugcuccugcggccuguacaagcaccccggggugcccgucaaguggaagcggugaggacuagucccuguucccagagcccacuuuuuuuucuuuuuuugaaauaaaauagccugucuuucagaucuaaaaaaaaaaaaaaaaaaaaaaaaaaaaaaaaaaaaaaaaaaaaaaaaaaaaaaaaaaaaaaaaaaaaaaaaaaaaaaaaaaaaaaaaaaaaaaaaaaaa

SEQ ID NO: 30194 - RNA, 1721 nt, Artificial Sequence
  mRNA product Design a-1 (A100) comprising derived and/or modified sequence from LASV(Lassa virus/H.sapiens-wt/NGA/2018/ISTH_0959;Clade II)__AVV65099__GPCmut6 (opt1)
aggagagucccgcagucggcguccagcggcucugcuuguucgugugugugucguugcaggccuuauucaagcuuaccaugggccagaucaucaccuucuuccaggaggugccccacgucaucgaggaggugaugaacaucgugcugaucgcccucagccugcuggccauccucaaggggaucuacaacgucgugaccugcggccuguucgggcugguguccuuccuccugcugugcggccgcagcugcuccacgaccuacaagggggucuacgagcuccagacccuggagcuggacauggcgagccucaacaugugcaugccgcuguccugcaccaagaacaacagccaccacuacaucauggugggcaacgagacgggccuggagcucacccugaccaacaccuccaucaucaaccacaaguucugcaaccugagcgacgcccacaagaagaaccucuacgaccacgcccugauguccaucaucagcacguuccaccuguccauccccaacuucaaccaguacgaggccaugagcugcgacuucaacgggggcaagaucuccgugcaguacaaccucagccacgccuacgcgaucgacgccgccaaccacugcgggaccaucgccaacggcguccugcagaccuucaugcggauggcguggggcggguccuacaucgcccuggacagcggcaagggguccugggacugcaucaugaccagcuaccaguaccucaucauccagaacacgaccugggaggaccacugccaguucucccgccccagccccaucggcuaccuggggcugcucagccagcggacccgcgacaucuacaucucccggcgccugcugggcaccuucacguggacccucagcgacuccgagggcaacgagacccccgggggcuacugccugacccgguggaugcugaucgaggccgagcucaagugcuucgggaacacggccguggccaagugcaacgagaagcacgacgaggaguucugcgacaugcugcgccuguucgacuucugcaagcaggcgauccggcgccucaagaccccggcccagaugagcauccagcugaucaacaaggccgugaacgcccugaucaacgaccagcucaucaugaagaaccaccuccgggacaucaugggcauccccuacugcaacuacuccaaguacugguaccugaaccacaccgucaccgggaagacgagccugccccgcugcuggcugguguccaacggcagcuaccugaacgagacccacuucuccgacgacaucgagcagcaggccgacaacaugaucaccgagcuccugcagaaggaguacaucgaccggcagggcaagaccccgcuggggcugguggaccucuucgucuucagcacguccuucuaccugaucagcaucuuccugcaccucgugaagauccccacccaccgccacgugaucggcaagcccugccccaagccgcaccggcugaaccacauggggaucugcuccugcggccuguacaagcaccccgggguccccgugaaguggaagcgcugaggacuagucccuguucccagagcccacuuuuuuuucuuuuuuugaaauaaaauagccugucuuucagaucuaaaaaaaaaaaaaaaaaaaaaaaaaaaaaaaaaaaaaaaaaaaaaaaaaaaaaaaaaaaaaaaaaaaaaaaaaaaaaaaaaaaaaaaaaaaaaaaaaaaa

SEQ ID NO: 30195 - RNA, 1721 nt, Artificial Sequence
  mRNA product Design a-1 (A100) comprising derived and/or modified sequence from LASV(LASV003-NIG-2008;Clade II)__AIT17580__GPCmut6 (opt1)
aggagagucccgcagucggcguccagcggcucugcuuguucgugugugugucguugcaggccuuauucaagcuuaccaugggccagaucaucaccuucuuccaggaggugccccacgucaucgaggaggugaugaacaucgugcugaucgcccucagccugcuggccauccucaaggggaucuacaacgucgcgaccugcggccuguucgggcugguguccuuccuccugcugugcggccgcagcugcuccacgaccuacaaggggguguacgagcuccagacccuggagcuggacauggccagccucaacaugugcaugccgcuguccugcaccaagaacaacagccaccacuacaucauggucggcaacgagacgggccuggagcucacccugaccaacaccuccaucaucaaccacaaguucugcaaccugagcgacgcccacaagaagaaccucuacgaccacgcccugauguccaucaucagcacguuccaccuguccauccccaacuucaaccaguacgaggccaugagcugcgacuucaacgggggcaagaucuccgugcaguacaaccucagccacaccuacgcgguggacgccgccaaccacugcgggaccaucgccaacggcguccugcagaccuucaugcggauggcguggggcggguccuacaucgcccuggacagcggcaagggguccugggacugcaucaugacgagcuaccaguaccucaucauccagaacaccaccugggaggaccacugccaguucucccgccccagccccaucggcuaccuggggcugcucagccagcggacccgcgacaucuacaucucccggcgccugcugggcacguucaccuggacccucagcgacuccgagagcaacgagaccccgggcggguacugccugacgcgguggaugcugaucgaggccgagcucaagugcuucggcaacaccgccguggccaagugcaacgagaagcacgacgaggaguucugcgacaugcugcgccuguucgacuucugcaagcaggcgauccggcgccucaaggcccccgcccagauguccauccagcugaucaacaaggccgugaacgcccugaucaacgaccagcucaucaugaagaaccaccuccgggacaucauggggauccccuacugcaacuacagcaaguacugguaccugaaccacaccgucaccggccgcacgucccugccccggugcuggcuggugagcaacggguccuaccugaacgagacccacuucagcgacgacaucgagcagcaggcggacaacaugaucaccgagcuccugcagaaggaguacauggaccgccagggcaagaccccgcugggccugguggaccucuucgucuucuccacgagcuucuaccugaucuccaucuuccugcaccucgugaagauccccacccaccggcacgugaucgggaagcccugccccaagccgcaccgccugaaccacaugggcaucugcagcugcgggcuguacaagcaccccggcguccccgugaaguggaagcggugaggacuagucccuguucccagagcccacuuuuuuuucuuuuuuugaaauaaaauagccugucuuucagaucuaaaaaaaaaaaaaaaaaaaaaaaaaaaaaaaaaaaaaaaaaaaaaaaaaaaaaaaaaaaaaaaaaaaaaaaaaaaaaaaaaaaaaaaaaaaaaaaaaaaa

SEQ ID NO: 30196 - RNA, 1721 nt, Artificial Sequence
  mRNA product Design a-1 (A100) comprising derived and/or modified sequence from LASV(LASV035-NIG-2009;Clade II)__AIT17588__GPCmut6 (opt1)
aggagagucccgcagucggcguccagcggcucugcuuguucgugugugugucguugcaggccuuauucaagcuuaccaugggccagaucaucaccuucuuccaggaggugccccacgucaucgaggaggugaugaacaucgugcugaucgcccucagccugcuggccauccucaaggggaucuacaacgucgcgaccugcggccuguucgggcugguguccuuccuccugcugugcggccgcagcugcuccacgaccuacaaggggguguacgagcuccagacccuggagcuggacauggccagccucaacaugugcaugccgcuguccugcaccaagaacaacagccaccacuacaucauggucggcaacgagacgggccuggagcucacccugaccaacaccuccaucaucaaccacaaguucugcaaccugagcgacgcccacaagaagaaccucuacgaccacgcccugauguccaucaucagcacguuccaccuguccauccccaacuucaaccaguacgaggccaugagcugcgacuucaacgggggcaagaucuccgugcaguacaaccucagccacgcguacgccguggacgccgccaaccacugcgggaccaucgcgaacggcguccugcagaccuucaugcggauggccuggggcggguccuacaucgcccuggacagcggcaagggguccugggacugcaucaugaccagcuaccaguaccucaucauccagaacacgaccugggaggaccacugccaguucucccgccccagccccaucggcuaccuggggcugcucagccagcggacccgcgacaucuacaucucccggcgccugcugggcaccuucacguggacccucagcgacuccgagggcaacgagacccccgggggcuacugccugacccgguggaugcugaucgaggccgagcucaagugcuucgggaacacggccguggcgaagugcaacgagaagcacgacgaggaguucugcgacaugcugcgccuguucgacuucugcaagcaggccauccggcgccucaaggccccggcccagaugagcauccagcugaucaacaaggccgugaacgcgcugaucaacgaccagcucaucaugaagaaccaccuccgggacaucaugggcauccccuacugcaacuacuccaaguacugguaccugaaccacaccgucaccgggaagaccagccugccccgcugcuggcugguguccaacggcagcuaccugaacgagacgcacuucuccgacgacaucgagcagcaggccgacaacaugaucaccgagcuccugcagaaggaguacaucgaccggcagggcaagaccccgcuggggcugguggaccucuucgucuucagcaccuccuucuaccugaucagcaucuuccugcaccucgugaagauccccacgcaccgccacgugaucggcaagcccugccccaagccgcaccggcugaaccacauggggaucugcuccugcggccuguacaagcaccccgggguccccgugaaguggaagcgcugaggacuagucccuguucccagagcccacuuuuuuuucuuuuuuugaaauaaaauagccugucuuucagaucuaaaaaaaaaaaaaaaaaaaaaaaaaaaaaaaaaaaaaaaaaaaaaaaaaaaaaaaaaaaaaaaaaaaaaaaaaaaaaaaaaaaaaaaaaaaaaaaaaaaa

SEQ ID NO: 30197 - RNA, 1721 nt, Artificial Sequence
  mRNA product Design a-1 (A100) comprising derived and/or modified sequence from LASV(LASV1000-NIG-2009;Clade II)__AIT17782__GPCmut6 (opt1)
aggagagucccgcagucggcguccagcggcucugcuuguucgugugugugucguugcaggccuuauucaagcuuaccaugggccagaucaucaccuucuuccaggaggugccccacgucaucgaggaggugaugaacaucgugcugaucgcccucagccugcuggccauccucaaggggaucuacaacgucgcgaccugcggccuguucgggcugguguccuuccuccugcugugcggccgcagcugcuccacgaccuacaaggggguguacgagcuccagacccuggagcuggacauggccagccucaacaugugcaugccgcuguccugcaccaagaacaacagccaccacuacaucauggucggcaacgagacgggccuggagcucacccugaccaacaccuccaucaucaaccacaaguucugcaaccugagcgacgcccacaagaagaaccucuacgaccacgcccugauguccaucaucagcacguuccaccuguccauccccaacuucaaccaguacgaggccaugagcugcgacuucaacgggggcaagaucuccgugcaguacaaccucagccacaccuacgcgguggacgccgccaaccacugcgggaccaucgccaacggcguccugcagaccuucaugcggauggcguggggcggguccuacaucgcccuggacagcggcaagggguccugggacugcaucaugacgagcuaccaguaccucaucauccagaacaccaccugggaggaccacugccaguucucccgccccagccccaucggcuaccuggggcugcucagccagcggacccgcgacaucuacaucucccggcgccugcugggcacguucaccuggacccucagcgacuccgagggcaacgagacccccgggggcuacugccugacgcgguggaugcugaucgaggccgagcucaagugcuucgggaacaccgccguggccaagugcaacgagaagcacgacgaggaguucugcgacaugcugcgccuguucgacuucugcaagcaggcgaucaagcggcucaagaccccggcccagaugagcauccagcugaucaacaaggccgugaacgcccugaucaacgaccagcucaucaugaagaaccaccuccgcgacaucaugggcauccccuacugcaacuacuccaaguacugguaccugaaccacaccgucacggggaagaccagccugccccggugcuggcugguguccaacggcagcuaccugaacgagacccacuucuccgacgacaucgagcagcaggccgacaacaugaucaccgagcuccugcagaaggaguacaucgaccgccagggcaagacgccgcuggggcugguggaccucuucgucuucagcaccuccuucuaccugaucagcaucuuccugcaccucgugaagauccccacccaccggcacguggucggcaagcccugccccaagccgcaccgccugaaccacauggggaucugcuccugcggccuguacaagcaccccggggugcccgugaaguggaagcggugaggacuagucccuguucccagagcccacuuuuuuuucuuuuuuugaaauaaaauagccugucuuucagaucuaaaaaaaaaaaaaaaaaaaaaaaaaaaaaaaaaaaaaaaaaaaaaaaaaaaaaaaaaaaaaaaaaaaaaaaaaaaaaaaaaaaaaaaaaaaaaaaaaaaa

SEQ ID NO: 30198 - RNA, 1721 nt, Artificial Sequence
  mRNA product Design a-1 (A100) comprising derived and/or modified sequence from LASV(LASV221-NIG-2010;Clade II)__AIT17624__GPCmut6 (opt1)
aggagagucccgcagucggcguccagcggcucugcuuguucgugugugugucguugcaggccuuauucaagcuuaccaugggccagaucaucaccuucuuccaggaggugccccacgucaucgaggaggugaugaacaucgugcugaucgcccucagccugcuggccauccucaaggggaucuacaacgucgcgaccugcggccuguucgggcugguguccuuccuccugcugugcggccgcagcugcuccacgaccuacaaggggguguacgagcuccagacccuggagcuggacauggccagccucaacaugugcaugccgcuguccugcaccaagaacaacagccaccacuacaucauggucggcaacgagacgggccuggagcucacccugaccaacaccuccaucaucaaccacaaguucugcaaccugagcgacgcccacaagaagaaccucuacgaccacgcccugauguccaucaucagcacguuccaccuguccauccccaacuucaaccaguacgaggccaugagcugcgacuucaacgggggcaagaucuccgugcaguacaaccucagccacaccuacgcgaucgacgccgccaaccacugcgggaccaucgccaacggcgugcugcagaccuucaugcggauggcguggggcggguccuacaucgcccuggacagcggcaagggguccugggacugcaucaugacgagcuaccaguaccucaucauccagaacaccaccugggaggaccacugccaguucucccgccccagccccaucggcuaccuggggcugcucagccagcggacccgcgacaucuacaucucccggcgccugcugggcacguucaccuggacccucagcgacuccgagggcaacgagacccccgggggcuacugccugacgcgguggaugcugaucgaggccgagcucaagugcuucgggaacaccgccgucgccaagugcaacgagaagcacgacgaggaguucugcgacaugcugcgccuguucgacuucugcaagcaggcgauccggcgccucaagaccccggcccagaugagcauccagcugaucaacaaggccgugaacgcccugaucaacgaccagcucaucaugaagaaccaccuccgggacaucaugggcauccccuacugcaacuacuccaaguacugguaccugaaccacaccgugacggggaagaccagccugccccgcugcuggcuggucuccaacggcagcuaccugaacgagacccacuucuccgacgacaucgagcagcaggccgacaacaugaucaccgagaugcuccagaaggaguacauggaccggcagggcaagacgccgcuggggcugguggaccuguucguguucagcaccuccuucuaccucaucagcaucuuccugcaccuggucaagauccccacccaccgccacgugaucggcaagcccugccccaagccgcaccggcucaaccacauggggaucugcuccugcggccuguacaagcaccccggggugcccgucaaguggaagcgcugaggacuagucccuguucccagagcccacuuuuuuuucuuuuuuugaaauaaaauagccugucuuucagaucuaaaaaaaaaaaaaaaaaaaaaaaaaaaaaaaaaaaaaaaaaaaaaaaaaaaaaaaaaaaaaaaaaaaaaaaaaaaaaaaaaaaaaaaaaaaaaaaaaaaa

SEQ ID NO: 30199 - RNA, 1721 nt, Artificial Sequence
  mRNA product Design a-1 (A100) comprising derived and/or modified sequence from LASV(LASV237-NIG-2010;Clade II)__AIT17638__GPCmut6 (opt1)
aggagagucccgcagucggcguccagcggcucugcuuguucgugugugugucguugcaggccuuauucaagcuuaccaugggccagaucaucaccuucuuccaggaggugccccacgucaucgaggaggugaugaacaucgugcugaucgcccucagccugcuggccauccucaaggggaucuacaacgucgcgaccugcggccuguucgggcugguguccuuccuccugcugugcggccgcagcugcuccacgaccuacaaggggguguacgagcuccagacccuggagcuggacauggccagccucaacaugugcaugccgcuguccugcaccaagaacaacagccaccacuacaucauggucggcaacgagacgggccuggagcucacccugaccaacaccuccaucaucaaccacaaguucugcaaccugagcgacgcccacaagaaggaccucuacgaccacgcccugauguccaucaucagcacguuccaccuguccauccccaacuucaaccaguacgaggccaugagcugcgacuucaacgggggcaagaucuccgugcaguacaaccucagccacaccuacgcgguggacgccgccaaccacugcgggaccaucgccaacggcguccugcagaccuucaugcggauggcguggggcggguccuacaucgcccuggacagcggcaagggguccugggacugcaucaugacgagcuaccaguaccucaucauccagaacaccaccugggaggaccacugccaguucucccgccccagccccaucggcuaccuggggcugcucagccagcggacccgcgacaucuacaucucccggcgccugcugggcacguucaccuggacccucagcgacuccgagggcaacgagacccccgggggcuacugccugacgcgguggaugcugaucgaggccgagcucaagugcuucgggaacaccgccguggccaagugcaacgagaagcacgacgaggaguucugcgacaugcugcgccuguucgacuucugcaagcaggcgauccggcgccucaagaccccggcccagaugagcauccagcugaucaacaaggccgugaacgcccugaucaacgaccagcucaucaugaagaaccaccuccgggacaucaugggcauccccuacugcaacuacuccaaguacugguaccugaaccacaccgucacggggaagaccagccugccccgcugcuggcugguguccaacggcagcuaccugaacgagacccacuucuccgacgacaucgagcagcaggccgacaacaugaucaccgagcuccugcagaaggaguacauggaccggcagggcaagacgccgcuggggcugguggaccucuucgucuucagcaccuccuucuaccugaucagcaucuuccugcaccucaucaagauccccacccaccgccacaucaccggcaagcccugccccaagccgcaccggcugaaccacauggggaucugcuccugcggccuguacaagcaccccggggugcccgugaaguggaagcgcugaggacuagucccuguucccagagcccacuuuuuuuucuuuuuuugaaauaaaauagccugucuuucagaucuaaaaaaaaaaaaaaaaaaaaaaaaaaaaaaaaaaaaaaaaaaaaaaaaaaaaaaaaaaaaaaaaaaaaaaaaaaaaaaaaaaaaaaaaaaaaaaaaaaaa

SEQ ID NO: 30200 - RNA, 1721 nt, Artificial Sequence
  mRNA product Design a-1 (A100) comprising derived and/or modified sequence from LASV(LASV253-NIG-2011;Clade II)__AIT17670__GPCmut6 (opt1)
aggagagucccgcagucggcguccagcggcucugcuuguucgugugugugucguugcaggccuuauucaagcuuaccaugggccagaucaucaccuucuuccaggaggugccccacgucaucgaggaggugaugaacaucgugcugaucgcccucagccugcuggccauccucaaggggaucuacaacgucgcgaccugcggccuguucgggcugguguccuuccuccugcugugcggccgcagcugcuccacgaccuacaaggggguguacgagcuccagacccuggagcuggacauggccagccucaacaugugcaugccgcuguccugcaccaagaacaacagccaccacuacaucauggucggcaacgagacgggccuggagcucacccugaccaacaccuccaucaucaaccacaaguucugcaaccugagcgacgcccacaagaagaaccucuacgaccacgcccugauguccaucaucagcacguuccaccuguccauccccaacuucaaccaguacgaggccaugagcugcgacuucaacgggggcaagaucuccgugcaguacaaccucagccacaccuacgcgguggacgccgccaaccacugcgggaccaucgccaacggcguccugcagaccuucaugcggauggcguggggcggguccuacaucgcccuggacagcggcaagggguccugggacugcaucaugacgagcuaccaguaccucaucauccagaacaccaccugggaggaccacugccaguucucccgccccagccccaucggcuaccuggggcugcucagccagcggacccgcgacaucuacaucucccggcgccugcugggcacguucaccuggacccucagcgacuccgagggcaacgagacccccgggggcuacugccugacgcgguggaugcugaucgaggccgagcucaagugcuucgggaacaccgccguggccaagugcaacgagaagcacgacgaggaguucugcgacaugcugcgccuguucgacuucugcaagcaggcgauccggcgccucaaggccccggcccagaugagcauccagcugaucaacaaggccgugaacgcccugaucaacgaccagcucaucaugaagaaccaccuccgggacaucaugggcauccccuacugcaacuacuccaaguacugguaccugaaccacaccgucaccgggcgcacgagccugccccggugcuggcugguguccaacggcagcuaccugaacgagacccacuucuccgacgacaucgagcagcaggcggacaacaugaucaccgagcuccugcagaaggaguacaucgaccgccagggcaagaccccgcuggggcugguggaccucuucgucuucagcacguccuucuaccugaucagcaucuuccugcaccucgugaagauccccacccaccggcacaucaucggcaagcccugccccaagccgcaccgccugaaccacauggggaucugcuccugcggccuguacaagcaccccggggugcccgucaaguggaagcggugaggacuagucccuguucccagagcccacuuuuuuuucuuuuuuugaaauaaaauagccugucuuucagaucuaaaaaaaaaaaaaaaaaaaaaaaaaaaaaaaaaaaaaaaaaaaaaaaaaaaaaaaaaaaaaaaaaaaaaaaaaaaaaaaaaaaaaaaaaaaaaaaaaaaa

SEQ ID NO: 30201 - RNA, 1721 nt, Artificial Sequence
  mRNA product Design a-1 (A100) comprising derived and/or modified sequence from LASV(LASV254-NIG-2011;Clade II)__AIT17674__GPCmut6 (opt1)
aggagagucccgcagucggcguccagcggcucugcuuguucgugugugugucguugcaggccuuauucaagcuuaccaugggccagaucaucaccuucuuccaggaggugccccacgucaucgaggaggugaugaacaucgugcugaucgcccucagccugcuggccauccucaaggggaucuacaacgucgcgaccugcggccuguucgggcugguguccuuccuccugcugugcggccgcagcugcuccacgaccuacaaggggguguacgagcuccagacccuggagcuggacaugaccaaccucaacaugugcaugccgcugagcugcacgaagaacaacucccaccacuacaucauggucggcaacgagaccggccuggagcucacccugaccaacacgagcaucaucaaccacaaguucugcaaccuguccgacgcccacaagaagaaccucuacaaccacgcccugaugagcaucaucuccaccuuccaccugagcauccccaacuucaaccaguacgaggccauguccugcgacuucaacgggggcaagaucagcgugcaguacaaccucucccacagcuacgccguggacgcggccaaccacugcgggaccaucgccaacggcguccugcagaccuucaugcggauggccuggggcggguccuacaucgcgcuggacagcggcaaggggaacugggacugcaucaugacguccuaccaguaccucaucauccagaacaccaccugggaggaccacugccaguucagccgccccucccccaucggcuaccuggggcugcucagccagcggacccgcgacaucuacaucagccggcgccugcugggcacguucaccuggacccucuccgacagcgagggcaacgagacccccgggggcuacugccugacgcgguggaugcugaucgaggccgagcucaagugcuucgggaacaccgccguggccaagugcaacgagaagcacgacgaggaguucugcgacaugcugcgccuguucgacuucugcaagcaggccauccggcgccucaagaccccggcgcaggccaacauccagcugaucaacaaggccgugaacgcccugaucaacgaccagcucaucaugaagaaccaccuccgggacaucaugggcauccccuacugcaacuacuccaaguacugguaccugaaccacaccgucacggggaagaccagccugccccgcugcuggcugguguccaacggcagcuaccugaacgagacccacuucuccgacgacaucgagcagcaggccgacaacaugaucaccgagcuccugcagaaggaguacauggaccggcagggcaagacgccgcuggggcugguggaccucuucgucuucagcaccuccuucuaccugaucagcaucuuccugcaccucgugaagauccccacccaccgccacgugaucggcaagcccugccccaagccgcaccggcugaaccacauggggaucugcuccugcggccuguacaagcaccccgggguccccgugaaguggaagcgcugaggacuagucccuguucccagagcccacuuuuuuuucuuuuuuugaaauaaaauagccugucuuucagaucuaaaaaaaaaaaaaaaaaaaaaaaaaaaaaaaaaaaaaaaaaaaaaaaaaaaaaaaaaaaaaaaaaaaaaaaaaaaaaaaaaaaaaaaaaaaaaaaaaaaa

SEQ ID NO: 30202 - RNA, 1721 nt, Artificial Sequence
  mRNA product Design a-1 (A100) comprising derived and/or modified sequence from LASV(Nig08-A19;Clade III)__ADU56618__GPCmut6 (opt1)
aggagagucccgcagucggcguccagcggcucugcuuguucgugugugugucguugcaggccuuauucaagcuuaccaugggccagaucgugaccuucuuccaggaggucccccacgugaucgaggaggugaugaacaucguccugaucgcccucagcauccuggccauccugaaggggcucuacaacaucgcgaccugcggccugaucgggcuggugacguuccuccugcuguccggccgcagcugcuccaugaccuacaaggggguguacgagcuccagacccuggagcugaacaugaacacccucaacaugugcaugccgcugagcugcacgaagaacaacucccaccacuacaucauggucggcaacgagaccggccuggagcucacccugaccaacacgagccugcuccaccacaaguucugcaaccuguccgacgcccacaagaagaaccuguacgaccacacccucaugagcaucaucuccaccuuccaccugagcauccccaacuucaaccaguacgaggccauguccugcgacuucaacgggggcaagaucaccgugcaguacaaccugagccacuccuacgccaucgacgccgcgaaccacugcgggacgguggccaacggcguccuccagaccuucaugcggauggccuggggcgggagcuacaucgcccuggacuccggccgcgggaagugggacugcaucaugaccagcuaccaguaccugaucauccagaacaccacgugggaggaccacugccaguucucccggcccagccccaucggcuaccucgggcugcugucccagcgcacccgggacaucuacaucagccgccggcuccugggcaccuucaccuggacgcugagcgacuccgagggcaacgagacccccgggggcuacugccucacccgcuggaugcugaucgaggcggagcugaagugcuucgggaacaccgccguggccaagugcaacgagaagcacgacgaggaguucugcgacaugcuccggcuguucgacuucugcaagcaggccauccgccggcugaaggccccggcgcagaugagcauccagcucaucaacaaggccgugaacgcccugaucaacgaccagcugaucaugaagaaccaccuccgcgacaucaugggcauccccuacugcaacuacuccaaguacugguaccugaaccacacgagcaccgggcggaccucccugccccgcugcuggcucgucagcaacggcuccuaccugaacgagacccacuucagcgacgacaucgagcagcaggccgacaacaugaucacggagaugcugcagaaggaguaccuggaccggcagggcaagaccccgcucgggcugguggaccuguucguguucuccaccagcuucuaccucaucuccaucuuccugcaccuggucaagauccccacccaccgccacaucgugggcaagcccugccccaagccgcaccggcucaaccacauggggaucugcagcugcggccuguacaagcagcccggggugcccguccgcuggaagcggugaggacuagucccuguucccagagcccacuuuuuuuucuuuuuuugaaauaaaauagccugucuuucagaucuaaaaaaaaaaaaaaaaaaaaaaaaaaaaaaaaaaaaaaaaaaaaaaaaaaaaaaaaaaaaaaaaaaaaaaaaaaaaaaaaaaaaaaaaaaaaaaaaaaaa

SEQ ID NO: 30203 - RNA, 1724 nt, Artificial Sequence
  mRNA product Design a-1 (A100) comprising derived and/or modified sequence from LASV(G1180-SLE-2010;Clade IV)__AIT17168__GPCmut6 (opt1)
aggagagucccgcagucggcguccagcggcucugcuuguucgugugugugucguugcaggccuuauucaagcuuaccaugggccagaucgugaccuucuuccaggaggucccccacgugaucgaggaggugaugaacaucguccugaucgcccucagcauccuggccgugcugaaggggcucuacaacuucgcgaccugcggccugguggggcugcucacguuccugcugcucugcggccgcuccugcaccgccagccgguacaagggggucuacgagcugcagacccuggagcucaacauggagacccugaacaugugcaugccgcuguccugcacgaagaacaacagccaccacuacaucauggugggcaacgagaccggccucgagcugacccugaccaacacguccaucaucaaccacaaguucugcaaccucagcgacgcccacaagaagaaccuguacgaccacgcccugauguccaucaucagcaccuuccaccucuccauccccaacuucaaccaguacgaggccaugagcugcgacuucaacgggggcaagaucuccgugcaguacaaccugagccacuccuacgcgggggacgccgccaaccacugcggcaccgucgccaacggggugcugcagaccuucaugcgcauggcguggggcggcagcuacaucgcccucgacuccgggcacggcagcugggacugcaucaugacguccuaccaguaccugaucauccagaacaccaccugggaggaccacugccaguucagccggcccucccccaucggguaccugggccuccugagccagcgcacccgggacaucuacaucagccgccggcugcucggcacguucaccuggacccuguccgacagcgaggggaaggacaccccgggcggguacugccugacgcgcuggaugcucaucgaggccgagcugaagugcuucggcaacaccgccguggccaagugcaacgagaagcacgacgaggaguucugcgacaugcugcggcuguucgacuucugcaagcaggcgauccagcgccugaaggcccccgcccagauguccauccagcugaucaacaaggccgucaacgcccucaucaacgaccagcugaucaugaagaaccaccuccgggacaucauggggauccccuacugcaacuacagcaaguacugguaccucaaccacaccaccacgggcaagaccucccugcccaagugcuggcuggugagcaacggcuccuaccucaacgagacccacuucagcgacgacaucgagcagcaggcggacaacaugaucaccgagaugcugcagaaggaguacauggagcgccaggggaagacgccgcugggccugguggaccucuucgucuucuccaccagcuucuaccugaucuccaucuuccugcaccucgugaagauccccacccaccggcacaucgugggcaagagcugccccaagccccaccgccugaaccacauggggaucugcuccugcgggcuguacaagcagccgggcguccccgugaaguggaagcggugaggacuagucccuguucccagagcccacuuuuuuuucuuuuuuugaaauaaaauagccugucuuucagaucuaaaaaaaaaaaaaaaaaaaaaaaaaaaaaaaaaaaaaaaaaaaaaaaaaaaaaaaaaaaaaaaaaaaaaaaaaaaaaaaaaaaaaaaaaaaaaaaaaaaa

SEQ ID NO: 30204 - RNA, 1724 nt, Artificial Sequence
  mRNA product Design a-1 (A100) comprising derived and/or modified sequence from LASV(G1442-SLE-2011;Clade IV)__AIT17180__GPCmut6 (opt1)
aggagagucccgcagucggcguccagcggcucugcuuguucgugugugugucguugcaggccuuauucaagcuuaccaugggccagaucgugaccuucuuccaggaggucccccacgugaucgaggaggugaugaacaucguccugaucgcccucagcauccuggccgugcugaaggggcucuacaacguggcgaccugcggccugaucgggcuggucacguuccuccugcugugcggccgcuccugcaccaccacccucuacaaggggguguacgagcugcagacgcuggagcucaacauggagacccugaacaugugcaugccgcugagcugcaccaagaacaacucccaccacuacauccgggugggcaacgagaccggccucgagcugacgcugaccaacaccagcaucaucaaccacaaguucugcaaccucuccgacgcccacaagaagaaccuguacgaccacgcccugaugagcaucaucuccaccuuccaccucagcauccccaacuucaaccaguacgaggccauguccugcgacuucaacgggggcaagaucagcguccaguacaaccugucccacagcuacgccggggacgcggccaaccacugcggcacgguggccaacggggugcugcagaccuucaugcgcauggccuggggcggcuccuacaucgcgcucgacagcgggcggggcaacugggacugcaucaugaccuccuaccaguaccugaucauccagaacaccacgugggacgaccacugccaguucagccgccccucccccaucggguaccugggccuccugagccagcggacccgcgacgucuacaucucccggcgccugcucggcaccuucaccuggacgcugagcgacagcgaggggaaggacaccccgggcggguacugccugacccgguggaugcucaucgaggccgagcugaagugcuucggcaacaccgccguggccaagugcaacgagaagcacgacgaggaguucugcgacaugcugcgccucuucgacuucugcaagcaggccauccagcggcugaaggcgcccgcccagauguccauccagcugaucaacaaggccgugaacgcccucaucaacgaccagcugaucaugaagaaccaccuccgcgacaucauggggauccccuacugcaacuacagcaaguacugguaccugaacaacacggccaccggcaagaccucccugcccaagugcuggcugaucagcaacggcuccuaccucaacgagacccacuucagcgacgacaucgagcaggaggcggacaacaugaucacggagaugcugcagaaggaguacauggagcggcaggggaagaccccgcugggccuggucgaccucuucguguucuccaccagcuucuaccugaucuccaucuuccugcaccucgugaagauccccacccaccgccacaucgucggcaagagcugccccaagccccaccggcugaaccacauggggaucugcuccugcgggcuguacaagcagccgggcgugcccgugcgcuggaagcggugaggacuagucccuguucccagagcccacuuuuuuuucuuuuuuugaaauaaaauagccugucuuucagaucuaaaaaaaaaaaaaaaaaaaaaaaaaaaaaaaaaaaaaaaaaaaaaaaaaaaaaaaaaaaaaaaaaaaaaaaaaaaaaaaaaaaaaaaaaaaaaaaaaaaa

SEQ ID NO: 30205 - RNA, 1724 nt, Artificial Sequence
  mRNA product Design a-1 (A100) comprising derived and/or modified sequence from LASV(G3010-SLE-2013;Clade IV)__AIT17344__GPCmut6 (opt1)
aggagagucccgcagucggcguccagcggcucugcuuguucgugugugugucguugcaggccuuauucaagcuuaccaugggccagaucgugaccuucuuccaggaggucccccacgugaucgaggaggugaugaacaucguccugaucgcccucagcauccuggccgugcugaaggggcucuacaacuucgcgaccugcggccugguggggcuggucacguuccuccugcugugcggccgcuccugcaccaccagccucuacaaggggguguacgagcugcagacccuggagcucaacauggagacgcugaacaugugcaugccgcuguccugcaccaagaacaacagccaccacuacaucauggugggcaacgagaccggccucgagcugacccugacgaacaccuccaucaucaaccacaaguucugcaaccucagcgacgcccacaagaagaaccuguacaaccacgcccugauguccaucaucagcaccuuccaccucuccauccccaacuucaaccaguacgaggccaugagcugcgacuucaacgggggcaagaucuccguccaguacaaccugagccacuccuacgccggggacgcggccagccacugcggcaccguggccaacggggugcugcagacguucaugcggauggccuggggcggcuccuacaucgcgcucgacagcggguacggcaagugggacugcaucaugaccuccuaccaguaccugaucauccagaacaccaccugggaggaccacugccaguucagccgccccucccccaucggguaccugggccuccugagccagcggacgcgcgacaucuacaucagccggcgccugcucggcaccuucaccuggacccuguccgacagcgaggggaaggacacgccgggcggguacugccugacccgguggaugcucaucgaggccgagcugaagugcuucggcaacaccgccgucgccaagugcaacgagaagcacgacgaggaguucugcgacaugcugcgccucuucgacuucugcaagcaggccauccagcggcugaagacccccgcgcagauguccauccagcugaucaacaaggccgugaacgcccucaucaacgaccagcugaucaugaagaaccaccuccgcgacaucauggggauccccuacugcaacuacagcaaguacugguaccugaaccacacgaccaccggcaagaccucccugcccaagugcuggcuggugagcaacggcuccuaccucaacgagacgcacuucagcgacgacaucgagcagcaggccgacaacaugaucaccgagaugcugcagaaggaguacauggagcggcaggggaagaccccgcugggccuggucgaccucuucguguucuccaccagcuucuaccugaucuccaucuuccugcaccucgugaagauccccacgcaccgccacaucgucggcaagagcugccccaagccccaccggcugaaccacauggggaucugcuccugcgggcuguacaagcagccgggcgugcccgugcgcuggaagcggugaggacuagucccuguucccagagcccacuuuuuuuucuuuuuuugaaauaaaauagccugucuuucagaucuaaaaaaaaaaaaaaaaaaaaaaaaaaaaaaaaaaaaaaaaaaaaaaaaaaaaaaaaaaaaaaaaaaaaaaaaaaaaaaaaaaaaaaaaaaaaaaaaaaaa

SEQ ID NO: 30206 - RNA, 1724 nt, Artificial Sequence
  mRNA product Design a-1 (A100) comprising derived and/or modified sequence from LASV(G502-SLE-2009;Clade IV)__AIT17126__GPCmut6 (opt1)
aggagagucccgcagucggcguccagcggcucugcuuguucgugugugugucguugcaggccuuauucaagcuuaccaugggccagaucgugaccuucuuccaggaggucccccacgugaucgaggaggugaugaacaucguccugaucgcccucagcauccuggccgugcugaaggggcucuacaacuucgcgaccugcggccugguggggcugcucacguuccugcugcucugcggccgcuccugcaccaccgggcuguacaagggcgucuacgagcugcagacccucgagcugaacauggagacgcugaacaugugcaugccgcucagcugcaccaagaacaacucccaccacuacaucauggugggcaacgagaccgggcuggagcugacccucacgaacaccagcaucaucaaccacaaguucugcaaccuguccgacgcccacaagaagaaccuguacgaccacgcccucaugagcaucaucuccaccuuccaccugagcauccccaacuucaaccaguacgaggccauguccugcgacuucaacggcgggaagaucagcgugcaguacaaccugucccacagcuacgccggcgacgcggccgaccacugcgggaccgucgccaacggcgugcuccagacguucaugcggauggccuggggcggguccuacaucgcgcuggacagcggccgcgggcggugggacugcaucaugaccuccuaccaguaccugaucauccagaacaccaccugggaggaccacugccaguucagccgccccucccccaucggcuaccucggccugcugagccagcggacgcgcgacaucuacaucucccggcgccuccuggggaccuucaccuggacccugagcgacagcgagggcaaggacacgcccgggggcuacugccucacccgguggaugcugaucgaggccgagcugaagugcuucgggaacaccgccguggccaagugcaacgagaagcacgacgaggaguucugcgacaugcuccgccuguucgacuucugcaagcaggccauccagcggcugaaggcgccggcccagauguccauccagcucaucaacaaggccgucaacgcccugaucaacgaccagcuggugaugaagaaccaccuccgcgacaucaugggcauccccuacugcaacuacagccgguacugguaccugaaccacaccacgaccggccgcaccucccugcccaagugcuggcucgugagcaacggguccuaccugaacgagacccacuucagcgacgacaucgagcagcaggccgacaacaugaucacggagaugcugcagaaggaguacauggagcggcagggcaagaccccgcuggggcucgucgaccuguucguguucuccaccagcuucuaccugaucuccaucuuccuccaccuggugaagauccccacccaccgccacaucgucggcaagagcugccccaagccccaccggcugaaccacauggggaucugcuccugcggccucuacaagcagccgggcgugcccgugaaguggaagcgcugaggacuagucccuguucccagagcccacuuuuuuuucuuuuuuugaaauaaaauagccugucuuucagaucuaaaaaaaaaaaaaaaaaaaaaaaaaaaaaaaaaaaaaaaaaaaaaaaaaaaaaaaaaaaaaaaaaaaaaaaaaaaaaaaaaaaaaaaaaaaaaaaaaaaa

SEQ ID NO: 30207 - RNA, 1724 nt, Artificial Sequence
  mRNA product Design a-1 (A100) comprising derived and/or modified sequence from LASV(G733-SLE-2010;Clade IV)__AIT17154__GPCmut6 (opt1)
aggagagucccgcagucggcguccagcggcucugcuuguucgugugugugucguugcaggccuuauucaagcuuaccaugggccagaucgugaccuucuuccaggaggucccccacgugaucgaggaggugaugaacaucguccugaucgcccucagcauccuggccgugcugaaggggcucuacaacuucgcgaccugcggcaucguggggcuggucuccuuccugcuccugugcggccgcagcugcacgaccucccuguacaaggggguguacgagcuccagacccuggagcugaacauggagacccucaacaugugcaugccgcugagcugcacgaagaacaacucccaccacuacaucauggugggcaacgagaccggccuggagcucacccugaccaacacgagcaucaucaaccacaaguucugcaaccuguccgacgcccacaagaagaaccucuacgaccacgcccugaugagcaucaucuccaccuuccaccugagcauccccaacuucaaccaguacgaggccauguccugcgacuucaacgggggcaagaucagcguccaguacaaccucucccacagcuacgccggggacgcggccaaccacugcggcaccaucgccaacggggugcugcagaccuucaugcggauggccuggggcggcuccuacaucgcgcuggacagcgggcgcgaccggugggacugcaucaugacguccuaccaguaccucaucauccagaacaccaccugggaggaccacugccaguucagccgccccucccccaucggcuaccuggggcugcucagccagcggacccgcgacaucuacaucagccggcgccugcugggcacguucaccuggacccucuccgacagcgagggcaaggacacccccgggggcuacugccugacgcgguggaugcugaucgaggccgagcucaagugcuucgggaacaccgccguggccaagugcaacgagaagcacgacgaggaguucugcgacaugcugcgccuguucgacuucugcaagcaggccauccagcggcucaaggcgccggcccagauguccauccagcugaucaacaaggccgucaacgcccugaucaacgaccagcucaucaugaagaaccaccuccgcgacaucaugggcauccccuacugcaacuacagcaaguacugguaccugaaccacaccaccacggggaagaccucccugcccaagugcuggcuggugagcaacggcuccuaccugaacgagacccacuucagcgacgacaucgagcagcaggccgacaacaugaucaccgagaugcuccagaaggaguacauggagcggcagggcaagacgccgcuggggcugguggaccuguucgucuucuccaccagcuucuaccucaucuccaucuuccugcaccuggugaagauccccacccaccgccacguggucggcaagagcugccccaagccccaccggcucaaccacauggggaucugcuccugcggccuguacgggcagccgggcgugcccgugaaguggaagcgcugaggacuagucccuguucccagagcccacuuuuuuuucuuuuuuugaaauaaaauagccugucuuucagaucuaaaaaaaaaaaaaaaaaaaaaaaaaaaaaaaaaaaaaaaaaaaaaaaaaaaaaaaaaaaaaaaaaaaaaaaaaaaaaaaaaaaaaaaaaaaaaaaaaaaa

SEQ ID NO: 30208 - RNA, 1724 nt, Artificial Sequence
  mRNA product Design a-1 (A100) comprising derived and/or modified sequence from MOPV/LASV reassortant(IGS-1;Clade IV)__AFY05576__GPCmut6 (opt1)
aggagagucccgcagucggcguccagcggcucugcuuguucgugugugugucguugcaggccuuauucaagcuuaccaugggccagaucgugaccuucuuccaggaggucccccacgugaucgaggaggugaugaacaucguccugaucgcccucagcgugcuggccgugcugaaggggcucuacaacuucgcgaccugcggccuggucgggcuggugacguuccuccugcugugcggccgcuccugcaccaccagccucuacaaggggguguacgagcugcagacccuggagcucaacauggagacgcugaacaugugcaugccgcuguccugcaccaagaacaacagccaccacuacaucauggucggcaacgagaccggccucgagcugacccugacgaacaccuccaucaucaaccacaaguucugcaaccucagcgacgcccacaagaagaaccuguacgaccacgcccugauguccaucaucagcaccuuccaccucuccauccccaacuucaaccaguacgaggccaugagcugcgacuucaacgggggcaagaucuccgugcaguacaaccugagccacuccuacgccggggacgcggccaaccacugcggcaccguggccaacgggguccugcagacguucaugcggauggccuggggcggcagcuacaucgcgcucgacuccgggcgcggcaacugggacugcaucaugaccagcuaccaguaccugaucauccagaacaccaccugggaggaccacugccaguucucccggcccagccccaucggguaccugggccuccugucccagcgcacgcgggacaucuacaucagccgccggcugcucggcaccuucaccuggacccugagcgacuccgagggggaggacacgccgggcggguacugccugacccgcuggaugcucaucgaggccgagcugaagugcuucggcaacaccgccguggccaagugcaacgagaagcacgacgaggaguucugcgacaugcugcggcuguucgacuucugcaagcaggccauccagcgccugaaggcgcccgcccagaugagcauccagcugaucaacaaggccgugaacgcccucaucaacgaccagcugaucaugaagaaccaccuccgggacaucauggggauccccuacugcaacuacuccaaguacugguaccucaaccacaccacgaccggccgcaccagccugcccaagugcuggcuggucuccaacggcagcuaccucaacgagacccacuucuccgacgacaucgagcagcaggccgacaacaugaucacggagaugcugcagaaggaguacauggagcggcaggggaagaccccgcugggccugguggaccucuucguguucagcaccuccuucuaccugaucagcaucuuccugcaccucgucaagauccccacccaccgccacaucguggggaaguccugccccaagccccaccggcugaaccacaugggcaucugcagcugcgggcuguacaagcagccgggcgugcccgucaaguggaagcgcugaggacuagucccuguucccagagcccacuuuuuuuucuuuuuuugaaauaaaauagccugucuuucagaucuaaaaaaaaaaaaaaaaaaaaaaaaaaaaaaaaaaaaaaaaaaaaaaaaaaaaaaaaaaaaaaaaaaaaaaaaaaaaaaaaaaaaaaaaaaaaaaaaaaaa

SEQ ID NO: 30209 - RNA, 1724 nt, Artificial Sequence
  mRNA product Design a-1 (A100) comprising derived and/or modified sequence from LASV(LM765-SLE-2012;Clade IV)__AIT17814__GPCmut6 (opt1)
aggagagucccgcagucggcguccagcggcucugcuuguucgugugugugucguugcaggccuuauucaagcuuaccaugggccagaucgugaccuucuuccaggaggucccccacgugaucgaggaggugaugaacaucguccugaucgcccucagcauccuggccgugcugaaggggcucuacaacuucgcgaccugcggccugguggggcuggucacguuccuccugcugugcggccgcuccugcaccaccagccucuacaaggggguguacgagcugcagacccuggagcucaacauggagacgcugaacaugugcaugccgcuguccugcaccaagaacaacagccaccacuacaucauggugggcaacgagaccggccucgagcugacccugacgaacaccuccaucaucgaccacaaguucugcaaccucagcgacgcccaccggaagaaccuguacgaccacgcccugauguccaucaucagcaccuuccaccucuccauccccaacuucaaccaguacgaggccaugagcugcgacuucaacgggggcaagaucuccguccaguacaaccugagccacuccuacgccaaggacgcggccgaccacugcgggaccguggccaacggcgugcugcagacguucaugcgcauggccuggggcgggagcuacaucgcgcucgacuccggccgggggcgcugggacugcaucaugaccagcuaccaguaccugaucauccagaacaccaccugggaggaccacugccaguucucccggcccagccccaucggcuaccuggggcuccugucccagcgcacgcgggacaucuacaucagccgccggcugcucggcaccuucaccuggacccugagcgacuccgagggcaaggacacgcccgggggcuacugccugacccgcuggaugcucaucgaggccgagcugaagugcuucgggaacaccgccgucgccaagugcaacgagaagcacgacgaggaguucugcgacaugcugcggcuguucgacuucugcaagcaggccauccagcgccugaaggcgccggcccagaugagcauccagcugaucaacaaggccgugaacgcccucaucaacgaccagcugaucaugaagaaccaccuccgggacaucaugggcauccccuacugcaacuacuccaaguacugguaccucaaccacaccacgaccgggaagaccagccugcccaagugcuggcugguguccaacggcagcuaccucaacgagacccacuucuccgacgacaucgagcagcaggccgacaacaugaucacggagaugcugcagaaggaguacauggagcgccagggcaagaccccgcuggggcuggucgaccucuucguguucagcaccuccuucuaccugaucagcaucuuccugcaccucgugaagauccccacccaccggcacaucgucggcaagcccugccccaagccgcaccgccugaaccacauggggaucugcuccugcggccuguacaagcagcccggggugcccgugaaguggaagcggugaggacuagucccuguucccagagcccacuuuuuuuucuuuuuuugaaauaaaauagccugucuuucagaucuaaaaaaaaaaaaaaaaaaaaaaaaaaaaaaaaaaaaaaaaaaaaaaaaaaaaaaaaaaaaaaaaaaaaaaaaaaaaaaaaaaaaaaaaaaaaaaaaaaaa

SEQ ID NO: 30210 - RNA, 1724 nt, Artificial Sequence
  mRNA product Design a-1 (A100) comprising derived and/or modified sequence from LASV(LM776-SLE-2012;Clade IV)__AIT17824__GPCmut6 (opt1)
aggagagucccgcagucggcguccagcggcucugcuuguucgugugugugucguugcaggccuuauucaagcuuaccaugggccagaucgugaccuucuuccaggaggucccccacgugaucgaggaggugaugaacaucguccugaucgcccucagcauccuggccgugcugaaggggcucuacaacuucgcgaccugcggccugguggggcuggucacguuccuccugcugugcggccgcuccugcaccaccagcguguacaaggggguguacgagcuccagacccuggagcugaacauggagacgcucaacaugugcaugccgcuguccugcaccaagaacaacagccaccacuacaucauggucggcaacgagaccggccuggagcucacccugacgaacaccuccaucaucaaccacaaguucugcaaccugagcgacgcccacaagaagaaccucuacgaccacgcccugauguccaucaucagcaccuuccaccuguccauccccaacuucaaccaguacgaggccaugagcugcgacuucaacgggggcaagaucuccgugcaguacaaccucagccacuccuacgccggggacgcggccaaccacugcggcaccguggccaacgggguccugcagacguucaugcggauggccuggggcggcagcuacaucgcgcuggacuccgggcacggcaagugggacugcaucaugaccagcuaccaguaccucaucauccagaacaccaccugggaggaccacugccaguucucccgccccagccccaucggguaccugggccugcucucccagcggacgcgcgacaucuacaucagccggcgccugcugggcaccuucaccuggacccucagcgacuccgaggggaaggacacgccgggcggguacugccugacccgguggaugcugaucgaggccgagcucaagugcuucggcaacaccgccguggccaagugcaacgagaagcacgacgaggaguucugcgacaugcugcgccuguucgacuucugcaagcaggccauccagcggcucaaggcgcccgcccagaugagcauccagcugaucaacaaggccgugaacgcccugaucaacgaccagcucaucaugaagaaccaccuccgcgacaucauggggauccccuacugcaacuacuccaaguacugguaccugaaccacaccacgaccggcaagaccagccugcccaagugcuggcuggucuccaacggcagcuaccugaacgagacccacuucuccgacgacaucgagcagcaggccgacaacaugaucacggagaugcuccagaaggaguacauggagcggcaggggaagaccccgcugggccugguggaccuguucguguucagcaccuccuucuaccucaucagcaucuuccugcaccuggucaagauccccacccaccgccacaucguggggaaguccugccccaagccccaccggcucaaccacaugggcaucugcagcugcgggcuguacaagcagccgggcgugcccguccgcuggaagcggugaggacuagucccuguucccagagcccacuuuuuuuucuuuuuuugaaauaaaauagccugucuuucagaucuaaaaaaaaaaaaaaaaaaaaaaaaaaaaaaaaaaaaaaaaaaaaaaaaaaaaaaaaaaaaaaaaaaaaaaaaaaaaaaaaaaaaaaaaaaaaaaaaaaaa

SEQ ID NO: 30211 - RNA, 1724 nt, Artificial Sequence
  mRNA product Design a-1 (A100) comprising derived and/or modified sequence from LASV(Mad39;Clade IV)__ANH09722__GPCmut6 (opt1)
aggagagucccgcagucggcguccagcggcucugcuuguucgugugugugucguugcaggccuuauucaagcuuaccaugggccagaucgugaccuucuuccaggaggucccccacgugaucgaggaggugaugaacaucguccugaucgcccucagcauccuggccgugcugaaggggcucuacaacguggcgaccugcggccugaucgggcuggucacguuccuccugcugugcggccgcuccugcaccaccacccucuacaaggggguguacgagcugcaggcccuggagcucaacauggagacgcugaacaugugcaugccgcugagcugcaccaagaacaacucccaccacuacauccgggugggcaacgagaccggccucgagcugacccugacgaacaccagccucaucaaccacaaguucugcaaccuguccgacgcccacaagaagaaccuguacgaccacgcccucaugagcaucaucuccaccuuccaccugagcauccccaacuucaaccaguacgaggccauguccugcgacuucaacgacgggaagaucagcguccaguacaaccugucccacaccuacgcgggcgacacggccaaccacugcgggaccguggccaacggcgugcuccagaccuucaugcgcauggccuggggcgggagcuacaucgcgcuggacuccggccgcgggggcugggacugcaucaugaccagcuaccaguaccugaucauccagaacacgaccugggaggaccacugccaguucucccggcccagccccaucggguaccucggccugcugucccagcggacccgcgacaucuacaucagccggcgccuccugggcaccuucacguggacccuguccgacagcgaggggaaggacaccccgggcggguacugccucacccgguggaugcugaucgaggccgagcugaagugcuucggcaacacggccgucgccaagugcaacgagaagcacgacgaggaguucugcgacaugcuccgccuguucgacuucugcaagcaggccauccagcggcugaaggcgcccgcccagaugagcauccagcucaucaacaaggccgugaacgcccugaucaacgaccagcugaucaugaagaaccaccuccgcgacaucauggggauccccuacugcaacuacuccaaguacugguaccugaaccacaccgugaccggcaagaccagccugcccaagugcuggcucgucuccaacggcagcuaccugaacgagacgcacuucuccgacgacaucgagcagcaggccgacaacaugaucaccgagaugcugcagaaggaguacauggagcggcaggggaagaccccgcugggccucguggaccuguucguguucagcaccuccuucuaccugaucagcaucuuccuccaccuggucaagauccccacgcaccgccacgugguggggaagcccugccccaagccgcaccggcugaaccacaugggcaucugcuccugcggguucuacaagcagcccggcguccccgugcgcuggaagcggugaggacuagucccuguucccagagcccacuuuuuuuucuuuuuuugaaauaaaauagccugucuuucagaucuaaaaaaaaaaaaaaaaaaaaaaaaaaaaaaaaaaaaaaaaaaaaaaaaaaaaaaaaaaaaaaaaaaaaaaaaaaaaaaaaaaaaaaaaaaaaaaaaaaaa

SEQ ID NO: 30212 - RNA, 1724 nt, Artificial Sequence
  mRNA product Design a-1 (A100) comprising derived and/or modified sequence from LASV(Z0947-SLE-2011;Clade IV)__AIT17840__GPCmut6 (opt1)
aggagagucccgcagucggcguccagcggcucugcuuguucgugugugugucguugcaggccuuauucaagcuuaccaugggccagaucgugaccuucuuccaggaggucccccacgugaucgaggaggugaugaacaucguccugaucgcccucagcauccuggccgugcugaaggggcucuacaacuucgcgaccugcggccugguggggcuggucacguuccuccugcugugcggccgcuccugcaccaucagccucuacaaggggguguacgagcugcagacccuggagcucaacauggagacccugaacaugugcaugccgcuguccugcacgaagaacaacagccaccacuacaucauggugggcaacgagaccggccucgagcugacccugaccaacacguccaucaucaaccacaaguucugcaaccucagcgacgcccacaagaagaaccuguacgaccacgcccugauguccaucaucagcaccuuccaccucuccauccccaacuucaaccaguacgaggccaugagcugcgacuucaacgggggcaagaucuccguccaguacaaccugagccacuccuacgccggggacgcggccaaccacugcggcaccguggccaacggggugcugcagaccuucaugcggauggccuggggcggcagcuacaucgcgcucgacuccgggcgcgaccggugggacugcaucaugacgagcuaccaguaccugaucauccagaacaccaccugggaggaccacugccaguucucccgccccagccccaucggcuaccuggggcuccugucccagcggacccgcgacaucuacaucagccggcgccugcucggcacguucaccuggacccugagcgacuccgagggcaaggacacccccgggggcuacugccugacgcgguggaugcucaucgaggccgagcugaagugcuucgggaacaccgccgucgccaagugcaacgagaagcacgacgaggaguucugcgacaugcugcgccucuucgacuucugcaagcaggccauccagcggcugaaggcgccggcccagaugagcauccagcugaucaacaaggccgugaacgcccucaucaacgaccagcugaucaugaagaaccaccuccgcgacaucaugggcauccccuacugcaacuacuccaaguacugguaccugaaccacaccaccacggggaagaccagccugcccaagugcuggcugguguccaacggcagcuaccucaacgagacccacuucuccgacgacaucgagcagcaggccgacaacaugaucaccgagaugcugcagaaggaguacauggagcggcagggcaagacgccgcuggggcuggucgaccucuucguguucagcaccuccuucuaccugaucagcaucuuccugcaccucgugaagauccccacccaccgccacaucgucggcaagcccugccccaagccgcaccggcugaaccacauggggaucugcuccugcggccuguacaagcagcccggggugcccgugaaguggaagcgcugaggacuagucccuguucccagagcccacuuuuuuuucuuuuuuugaaauaaaauagccugucuuucagaucuaaaaaaaaaaaaaaaaaaaaaaaaaaaaaaaaaaaaaaaaaaaaaaaaaaaaaaaaaaaaaaaaaaaaaaaaaaaaaaaaaaaaaaaaaaaaaaaaaaaa

SEQ ID NO: 30213 - RNA, 1724 nt, Artificial Sequence
  mRNA product Design a-1 (A100) comprising derived and/or modified sequence from LASV(Josiah;Clade IV)__NP_694870__GPCmut6 (opt4)
aggagagucccgcagucggcguccagcggcucugcuuguucgugugugugucguugcaggccuuauucaagcuuaccaugggccagaucgugaccuucuuccaggaggugccccacgugaucgaggaggugaugaacaucgugcugaucgcccugagcgugcuggccgugcugaagggccuguacaacuucgccaccugcggccuggugggccuggugaccuuccugcugcugugcggcagaagcugcaccaccagccuguacaagggcguguacgagcugcagacccuggagcugaacauggagacccugaacaugugcaugccccugagcugcaccaagaacaacagccaccacuacaucauggugggcaacgagaccggccuggagcugacccugaccaacaccagcaucaucaaccacaaguucugcaaccugagcgacgcccacaagaagaaccuguacgaccacgcccugaugagcaucaucagcaccuuccaccugagcauccccaacuucaaccaguacgaggccaugagcugcgacuucaacggcggcaagaucagcgugcaguacaaccugagccacagcuacgccggcgacgccgccaaccacugcggcaccguggccaacggcgugcugcagaccuucaugagaauggccuggggcggcagcuacaucgcccuggacagcggcagaggcaacugggacugcaucaugaccagcuaccaguaccugaucauccagaacaccaccugggaggaccacugccaguucagcagacccagccccaucggcuaccugggccugcugagccagagaaccagagacaucuacaucagcagaagacugcugggcaccuucaccuggacccugagcgacagcgagggcaaggacacccccggcggcuacugccugaccagauggaugcugaucgaggccgagcugaagugcuucggcaacaccgccguggccaagugcaacgagaagcacgacgaggaguucugcgacaugcugagacuguucgacuucugcaagcaggccauccagagacugaaggcccccgcccagaugagcauccagcugaucaacaaggccgugaacgcccugaucaacgaccagcugaucaugaagaaccaccugagagacaucaugggcauccccuacugcaacuacagcaaguacugguaccugaaccacaccaccaccggcagaaccagccugcccaagugcuggcuggugagcaacggcagcuaccugaacgagacccacuucagcgacgacaucgagcagcaggccgacaacaugaucaccgagaugcugcagaaggaguacauggagagacagggcaagaccccccugggccugguggaccuguucguguucagcaccagcuucuaccugaucagcaucuuccugcaccuggugaagauccccacccacagacacaucgugggcaagagcugccccaagccccacagacugaaccacaugggcaucugcagcugcggccuguacaagcagcccggcgugcccgugaaguggaagagaugaggacuagucccuguucccagagcccacuuuuuuuucuuuuuuugaaauaaaauagccugucuuucagaucuaaaaaaaaaaaaaaaaaaaaaaaaaaaaaaaaaaaaaaaaaaaaaaaaaaaaaaaaaaaaaaaaaaaaaaaaaaaaaaaaaaaaaaaaaaaaaaaaaaaa

SEQ ID NO: 30214 - RNA, 1721 nt, Artificial Sequence
  mRNA product Design a-1 (A100) comprising derived and/or modified sequence from LASV(LP;Clade I)__AAF86701__GPCmut6 (opt4)
aggagagucccgcagucggcguccagcggcucugcuuguucgugugugugucguugcaggccuuauucaagcuuaccaugggccagaucaucaccuucuuccaggaggugccccacgugaucgaggaggugaugaacaucgugcugaucgcccugagccugcuggccauccugaagggccuguacaacaucgccaccugcggcaucaucggccugguggccuuccuguuccugugcggcaagagcugcagccugacccugaagggcggcuacgagcugcagacccuggagcugaacauggagacccugaacaugugcaugccccugagcugcaccaagaacagcagccaccacuacaucagagugggcaacgagaccggccuggagcugacccugaccaacaccagcaucaucaaccacaaguucugcaaccugagcgacgcccacaagaagaaccuguacgaccacgcccugaugagcaucaucagcaccuuccaccugagcauccccaacuucaaccaguacgaggccaugagcugcgacuucaacggcggcaagaucagcgugcaguacaaccugagccacagcuacgccggcgacgccgccgagcacugcggcaccguggccaacggcgugcugcagaccuucaugagaauggccuggggcggcagauacaucgcccuggacagcggcaagggcaacugggacugcaucaugaccagcuaccaguaccugaucauccagaacaccaccugggaggaccacugccaguucagcagacccagccccaucggcuaccugggccugcugagccagagaaccagagacaucuacaucagcagaagacugcugggcaccuucaccuggacccugagcgacagcgagggcaacgagacccccggcggcuacugccugaccagauggaugcugaucgaggccgagcugaagugcuucggcaacaccgccguggccaagugcaacgagaagcacgacgaggaguucugcgacaugcugagacuguucgacuucugcaagcaggccaucagaagacugaaggcccccgcccagaugagcauccagcugaucaacaaggccgugaacgcccugaucaacgaccagcugaucaugaagaaccaccugagagacaucaugggcauccccuacugcaacuacagcaaguacugguaccugaaccacaccagcagcggcagaaccagccugcccaagugcuggcugaucagcaacggcagcuaccugaacgagacccaguucagcgacgacaucgagcagcaggccgacaacaugaucaccgagaugcugcagaaggaguacaucgagagacagggcaagaccccccugggccugguggacaucuucaucuucagcaccagcuucuaccugaucagcaucuuccugcaccugaucaagauccccacccacagacacaucgugggcaagcccugccccaagccccacagacugaaccacaugggcgugugcagcugcggccuguacaagcaccccggcgugcccaccaaguggaagagaugaggacuagucccuguucccagagcccacuuuuuuuucuuuuuuugaaauaaaauagccugucuuucagaucuaaaaaaaaaaaaaaaaaaaaaaaaaaaaaaaaaaaaaaaaaaaaaaaaaaaaaaaaaaaaaaaaaaaaaaaaaaaaaaaaaaaaaaaaaaaaaaaaaaaa

SEQ ID NO: 30215 - RNA, 1721 nt, Artificial Sequence
  mRNA product Design a-1 (A100) comprising derived and/or modified sequence from LASV(803213;Clade II)__AAF86703__GPCmut6 (opt4)
aggagagucccgcagucggcguccagcggcucugcuuguucgugugugugucguugcaggccuuauucaagcuuaccaugggccagaucaucaccuucuuccaggaggugccccacgugaucgaggaggugaugaacaucgugcugaucgcccugagccugcuggccauccugaagggcaucuacaacguggccaccugcggccuguucggccugaucagcuuccugcugcugugcggcagaagcugcagcgugaccuacaagggcguguacgagcugcagacccuggagcugaacauggccaaccugaacaugugcaugccccugagcugcaccaagaacaacagccaccacuacaucauggugggcaacgagaccggccuggagcugacccugaccaacaccagcaucaucaaccacaaguucugcaaccugagcgacgcccacaagaagaaccuguacgaccacgcccugaugagcaucaucagcaccuuccaccugagcauccccaacuucaaccaguacgaggccaugagcugcgacuucaacggcggcaagaucagcgugcaguacaaccugagccacagcuucgccguggacgccgccaaccacugcggcaccaucgccaacggcgugcugcagaccuucaugagaauggccuggggcggcagcuacaucgcccuggacagcggcaagggcaacugggacugcaucaugaccagcuaccaguaccugaucauccagaacaccaccugggaggaccacugccaguucagcagacccagccccaucggcuaccugggccugcugagccagagaaccagagacaucuacaucagcagaagacugcugggcaccuucaccuggacccugagcgacagcgagggcaacgaggcccccggcggcuacugccugaccagauggaugcugaucgaggccgagcugaagugcuucggcaacaccgccguggccaagugcaacgagaagcacgacgaggaguucugcgacaugcugagacuguucgacuucugcaagcaggccaucaagagacugaagacccccgcccagaugagcauccagcugaucaacaaggccgugaacgcccugaucaacgaccagcugaucaugaagaaccaccugagagacaucaugggcauccccuacugcaacuacagcagauacugguaccugaaccacaccgugaccggcaagaccagccugcccagaugcuggcuggugagcaacggcagcuaccugaacgagacccacuucagcgacgacaucgagcagcaggccgacaacaugaucaccgagaugcugcagaaggaguacauggacagacagggcaagaccccccugggccugguggaccuguucguguucagcaccagcuucuaccugaucagcaucuuccugcaccuggugaagauccccacccacagacacaucgugggcaagcccugccccaagccccacagacugaaccacaugggcaucugcagcugcggccuguacaagcaccccggcgugcccgugaaguggaagagaugaggacuagucccuguucccagagcccacuuuuuuuucuuuuuuugaaauaaaauagccugucuuucagaucuaaaaaaaaaaaaaaaaaaaaaaaaaaaaaaaaaaaaaaaaaaaaaaaaaaaaaaaaaaaaaaaaaaaaaaaaaaaaaaaaaaaaaaaaaaaaaaaaaaaa

SEQ ID NO: 30216 - RNA, 1721 nt, Artificial Sequence
  mRNA product Design a-1 (A100) comprising derived and/or modified sequence from LASV(GA391;Clade III)__CAA36645__GPCmut6 (opt4)
aggagagucccgcagucggcguccagcggcucugcuuguucgugugugugucguugcaggccuuauucaagcuuaccaugggccagaucgugaccuucuuccaggaggugccccacgugaucgaggaggugaugaacaucgugcugaucgcccugagcauccuggccauccugaagggccuguacaacguggccaccugcggccugaucggccuggugaccuuccugcugcugagcggcagaagcugcagccugaucuacaagggcaccuacgagcugcagacccuggagcugaacauggagacccugaacaugugcaugccccugagcugcaccaagaacaacagccaccacuacaucagagugggcaacgagaccggccuggagcugacccugaccaacaccagcauccugaaccacaaguucugcaaccugagcgacgcccacaagagaaaccuguacgaccacagccugaugagcaucaucagcaccuuccaccugagcauccccaacuucaaccaguacgaggccaugagcugcgacuucaacggcggcaagaucaccgugcaguacaaccugagccacagcuucgccguggacgccgccggccacugcggcacccuggccaacggcgugcugcagaccuucaugagaauggccuggggcggcagcuacaucgcccuggacagcggcagaggcaacugggacugcaucaugaccagcuaccaguaccugaucauccagaacaccaccugggacgaccacugccaguucagcagacccagccccaucggcuaccugggccugcugagccagagaaccagagacaucuacaucagcagaagacugcugggcaccuucaccuggacccugagcgacagcgagggcaacgagacccccggcggcuacugccugaccagauggaugcugaucgaggccgagcugaagugcuucggcaacaccgccguggccaagugcaacgagaagcacgacgaggaguucugcgacaugcugagacuguucgacuucugcaagcaggccaucagaagacugaagacccccgcccagaugagcauccagcugaucaacaaggccgugaacgcccugaucaacgaccagcugaucaugaagaaccaccugagagacaucaugggcauccccuacugcaacuacagcagauacugguaccugaaccacaccagcaccggcaagaccagccugcccagaugcuggcugaucagcaacggcagcuaccugaacgagaccaaguucagcgacgacaucgagcagcaggccgacaacaugaucaccgagaugcugcagaaggaguacaucgacagacagggcaagaccccccugggccugguggaccuguucguguucagcaccagcuucuaccugaucagcaucuuccugcaccuggugaagauccccacccacagacacaucgugggcaagcccugccccaagccccacagacugaaccacaugggcaucugcagcugcggccuguacaagcagcccggcgugcccgugagauggaagagaugaggacuagucccuguucccagagcccacuuuuuuuucuuuuuuugaaauaaaauagccugucuuucagaucuaaaaaaaaaaaaaaaaaaaaaaaaaaaaaaaaaaaaaaaaaaaaaaaaaaaaaaaaaaaaaaaaaaaaaaaaaaaaaaaaaaaaaaaaaaaaaaaaaaaa

SEQ ID NO: 30217 - RNA, 1724 nt, Artificial Sequence
  mRNA product Design a-1 (A100) comprising derived and/or modified sequence from LASV(AV;Clade V)__CCA30314__GPCmut6 (opt4)
aggagagucccgcagucggcguccagcggcucugcuuguucgugugugugucguugcaggccuuauucaagcuuaccaugggccagaucgugaccuucuuccaggaggugccccacgugaucgaggaggugaugaacaucgugcugaucgcccugagcauccuggccgugcugaagggccuguacaacaucgccaccugcggccugaucggccugaucaccuuccugcugcugugcggcagaagcugcagcagcaaccuguacaagggcguguacgagcugcagagccuggaccugaacauggagacccugaacaugugcaugccccugagcugcaccaagaacaacagccaccacuacaucagagugggcaacgacaccggccuggagcugacccugaccaacaccagcauccugaaccacaaguucugcaaccugagcgacgcccacaagaaggaccuguacgaccacgcccugaugagcaucaucagcaccuuccaccugagcauccccaacuucaaccaguacgaggccaugagcugcgacuucaacggcggcaagaucagcgugcaguacaaccugagccacagcuacgccaucgacgccgccaaccacugcggcaccguggccaacggcauccugcagaccuucaugagaauggccuggggcggcagcuacaucgcccuggacagcggcagaggcaacugggacugcaucaugaccagcuaccaguaccugaucauccagaacaccaccugggagaaccacugccaguucagcagacccagccccaucggcuaccugggccugcugagccagagaaccagagacaucuacaucagcagaagacugcugggcaccuucaccuggacccugagcgacagcgagggcaacgccacccccggcggcuacugccugaccagauggaugcugaucgaggccgagcugaagugcuucggcaacaccgccguggccaagugcaacgagaagcacgacgaggaguucugcgacaugcugagacuguucgacuucugcaagcaggccaucagcagacugaagagccccgcccagaugagcauccagcugaucaacaaggccgugaacgcccugaucaacgaccagcugaucaugaagaaccaccugagagacaucaugggcauccccuacugcaacuacagcaaguacugguaccugaaccacaccaucaccggcaagaccagccugcccaagugcuggcuggugagcaacggcagcuaccugaacgagacccacuucagcgacgacaucgagcagcaggccgacaacaugaucaccgagaugcugcagaaggaguacauggagagacagggcaagaccccccugggccugguggaccuguucguguucagcaccagcuucuaccugaucagcaucuuccugagacuggugaagauccccacccacagacacaucgugggcaagcccugccccaagccccacagacugaaccacaugggcaucugcagcugcggccuguacaagcagcccggcgugcccgugagauggaagagaugaggacuagucccuguucccagagcccacuuuuuuuucuuuuuuugaaauaaaauagccugucuuucagaucuaaaaaaaaaaaaaaaaaaaaaaaaaaaaaaaaaaaaaaaaaaaaaaaaaaaaaaaaaaaaaaaaaaaaaaaaaaaaaaaaaaaaaaaaaaaaaaaaaaaa

SEQ ID NO: 30218 - RNA, 1721 nt, Artificial Sequence
  mRNA product Design a-1 (A100) comprising derived and/or modified sequence from LASV(Togo/2016/7082;Clade VI)__AMR44577__GPCmut6 (opt4)
aggagagucccgcagucggcguccagcggcucugcuuguucgugugugugucguugcaggccuuauucaagcuuaccaugggccagaucaucaccuucuuccaggaggugccccacgugaucgaggaggugaugaacaucgugcugaucgcccugagccugcuggccauccugaagggcguguacaacguggccaccugcggcaucaucggccuggugaccuuccuguuccugugcggcagaagcugcagccugaucuacaagggcagcuacgagcugcagacccuggagcugaacauggagacccugaacaugugcaugccccugagcugcaccaagaacagcagccaccacuacaucagagugggcaacgagaccggccuggagcugacccugaccaacaccagcaucaucaaccacaaguucugcaaccugagcgacgcccacaagagaaaccuguacgaccacgcccugaugagcauccugagcaccuuccaccugagcauccccaacuucaaccaguacgaggccaugagcugcgacuucaacggcggcaagaucagcgugcaguacaaccugagccacgccuacgccguggacgccgccgagcacugcggcaccguggccaacggcgugcugcagaccuucaugagaauggccuggggcggcagcuacaucgcccuggacagcggcagaggcaacugggacugcaucaugaccagcuaccaguaccugaucauccagaacaccaccugggaggaccacugccaguucagcagacccagccccaucggcuaccugggccugcugagccagagaaccagagacaucuacaucagcagaagacugcugggcaccuucaccuggacccugagcgacagcgagggcaacgagacccccggcggcuacugccugaccagauggaugcugaucgaggccgagcugaagugcuucggcaacaccgccguggccaagugcaacgagaagcacgacgaggaguucugcgacaugcugagacuguucgacuucugcaagcaggccauccagagacugaagagccccgcccagaugagcauccagcugaucaacaaggccgugaacgcccugaucaacgaccagcugaucaugaagaaccaccugagagacaugaugggcauccccuacugcaacuacagcaaguacugguaccugaaccacaccagcagcggcagaaccagccugcccaagugcuggcuggugagcaacggcagcuaccugaacgagacccacuucagcgacgacaucgagcagcaggccgacaacaugaucaccgagaugcugcagaaggaguacaucgacagacagggcaagaccccccugggccugguggaccuguucguguucagcaccagcuucuaccugaucagcaucuuccugcaccugaucaagauccccacccacagacacaucgugggcaagcccugccccaagccccacagacugaaccacaugggcaucugcagcugcggccuguacaagcagcccggcgugcccaccagauggaagagaugaggacuagucccuguucccagagcccacuuuuuuuucuuuuuuugaaauaaaauagccugucuuucagaucuaaaaaaaaaaaaaaaaaaaaaaaaaaaaaaaaaaaaaaaaaaaaaaaaaaaaaaaaaaaaaaaaaaaaaaaaaaaaaaaaaaaaaaaaaaaaaaaaaaaa

SEQ ID NO: 30219 - RNA, 1721 nt, Artificial Sequence
  mRNA product Design a-1 (A100) comprising derived and/or modified sequence from LASV(KAK-428;Clade n.d. (VII))__ANH09740__GPCmut6 (opt4)
aggagagucccgcagucggcguccagcggcucugcuuguucgugugugugucguugcaggccuuauucaagcuuaccaugggccagaucgugaccuucuuccaggaggugccccacgugaucgaggaggugaugaacaucgugcugaucgcccugagccugcuggccauccugaagggccuguacaacuucgccaccugcggcgugaucggccugaucaccuuccugcugcugugcggcagaagcugcagcgccaccuacaagggccaguacgagcugcagacccuggagcugaacauggagagccugaacaugugcaugccccugagcugcaccaagaacaacagccaccacuacaucagagccggcaacaacaccggccuggagcugacccugaccaacaccagcaucaucagccacaaguucugcaaccugagcgacgcccacaagaagaaccuguacgaccacacccugaugagcaucaucaccaccuuccaccugagcauccccaacuucaaccaguacgaggccaugagcugcgacuucaacggcggcaagaucagcauccaguacaaccugagccacagcuacgccggcgacgccgcccagcacugcggcaccguggccaacggcgugcugcagaccuucaugagaauggccuggggcggcagcuaccuggcccuggacagcggcagaagaggcugggacugcaucaucagcagcuaccaguaccugaucauccagaacaccaccugggacgaccacugccaguucagcagacccagccccaucggcuaccugggcuucgugagccagaagaccagagacaucuacaucagcagaagacugcugggcaccuucaccuggacccugagcgacagcgagggccacgacaugcccggcggcuacugccugaccagauggaugcugaucgaggccgaccugaagugcuucggcaacaccgccguggccaagugcaacgagaagcacgacgaggaguucugcgacauguggagacuguucgacuucugcaagcaggccauccagagacugaaggcccccgcccagaugaacauccagcugaucaacaaggccgugaacgcccugaucaacgaccagcugaugaugaagaaccaccugagagacaucaugggcauccccuacugcaacuacagcaaguucugguaccugaacaacaccaccaccggcagaaccagccugcccagaugcuggcugaucagcaacggcagcuaccugaacgagacccacuucagcgacgacaucgagcagcaggccgacaacaugaucaccgagaugcugcagaaggaguacauggacagacagggcaagaccccccugggccugguggaccuguucguguucagcaccagcuucuaccugaucaccaucuuccugcaccuggugaagauccccacccacagacacaucgugggcaagcccugccccaagccccacagacugaaccacaugggcaucugcagcugcggccuguacaagcagcccggcgugcccgugagauggaagagaugaggacuagucccuguucccagagcccacuuuuuuuucuuuuuuugaaauaaaauagccugucuuucagaucuaaaaaaaaaaaaaaaaaaaaaaaaaaaaaaaaaaaaaaaaaaaaaaaaaaaaaaaaaaaaaaaaaaaaaaaaaaaaaaaaaaaaaaaaaaaaaaaaaaaa

SEQ ID NO: 30220 - RNA, 1721 nt, Artificial Sequence; identical to SEQ ID NO: 30214
  mRNA product Design a-1 (A100) comprising derived and/or modified sequence from LASV(Pinneo-NIG-1969;Clade I)__AIT17836__GPCmut6 (opt4)

SEQ ID NO: 30221 - RNA, 1721 nt, Artificial Sequence
  mRNA product Design a-1 (A100) comprising derived and/or modified sequence from LASV(ISTH0009-NIG-2011;Clade II)__AIT17404__GPCmut6 (opt4)
aggagagucccgcagucggcguccagcggcucugcuuguucgugugugugucguugcaggccuuauucaagcuuaccaugggccagaucaucaccuucuuccaggaggugccccacgugaucgaggaggugaugaacaucgugcugaucgcccugagccugcuggccauccugaagggcaucuacaacguggccaccugcggccuguucggccuggugagcuuccugcugcugugcggcagaagcugcagcaccaccuacaagggcguguacgagcugcagacccuggagcuggacauggccagccugaacaugugcaugccccugagcugcaccaagaacaacagccaccacuacaucauggugggcaacgagaccggccuggagcugacccugaccaacaccagcaucaucaaccacaaguucugcaaccugagcgacgcccacaagaagaaccuguacgaccacgcccugaugagcaucaucagcaccuuccaccugagcauccccaacuucaaccaguacgaggccaugagcugcgacuucaacggcggcaagaucagcgugcaguacaaccugagccacgccuacgccguggacgccgccaaccacugcggcaccaucgccaacggcgugcugcagaccuucaugagaauggccuggggcggcagcuacaucgcccuggacagcggcaagggcagcugggacugcaucaugaccagcuaccaguaccugaucauccagaacaccaccugggaggaccacugccaguucagcagacccagccccaucggcuaccugggccugcugagccagagaaccagagacaucuacaucagcagaagacugcugggcaccuucaccuggacccugagcgacagcgagggcaacgagacccccggcggcuacugccugaccagauggaugcugaucgaggccgagcugaagugcuucggcaacaccgccguggccaagugcaacgagaagcacgacgaggaguucugcgacaugcugagacuguucgacuucugcaagcaggccaucagaagacugaagacccccgcccagaugagcauccagcugaucaacaaggccgugaacgcccugaucaacgaccagcugaucaugaagaaccaccugagagacaucaugggcauccccuacugcaacuacagcaaguacugguaccugaaccacaccgugaccggcaagaccagccugcccagaugcuggcuggugagcaacggcagcuaccugaacgagacccacuucagcgacgacaucgagcagcaggccgacaacaugaucaccgagcugcugcagaaggaguacauggacagacagggcaagaccccccugggccugguggaccuguucguguucagcaccagcuucuaccugaucagcaucuuccugcaccugaucaagauccccacccacagacacaucaccggcaagcccugccccaagccccacagacugaaccacaugggcaucugcagcugcggccuguacaagcaccccggcgugcccgugaaguggaagagaugaggacuagucccuguucccagagcccacuuuuuuuucuuuuuuugaaauaaaauagccugucuuucagaucuaaaaaaaaaaaaaaaaaaaaaaaaaaaaaaaaaaaaaaaaaaaaaaaaaaaaaaaaaaaaaaaaaaaaaaaaaaaaaaaaaaaaaaaaaaaaaaaaaaaa

SEQ ID NO: 30222 - RNA, 1721 nt, Artificial Sequence
  mRNA product Design a-1 (A100) comprising derived and/or modified sequence from LASV(ISTH2010-NIG-2012;Clade II)__AIT17482__GPCmut6 (opt4)
aggagagucccgcagucggcguccagcggcucugcuuguucgugugugugucguugcaggccuuauucaagcuuaccaugggccagaucaucaccuucuuccaggaggugccccacgugaucgaggaggugaugaacaucgugcugaucgcccugagccugcuggccauccugaagggcaucuacaacguggccaccugcggccuguucggccuggugagcuuccugcugcugugcggcagaagcugcagcaccaccuacaagggcguguacgagcugcagacccuggagcuggacauggccagccugaacaugugcaugccccugagcugcaccaagaacaacagccaccacuacaucauggugggcaacgagaccggccuggagcugacccugaccaacaccagcaucaucaaccacaaguucugcaaccugagcgacgcccacaagaagaaccuguacgaccacgcccugaugagcaucaucagcaccuuccaccugagcauccccaacuucaaccaguacgaggccaugagcugcgacuucaacggcggcaagaucagcgugcaguacaaccugagccacgccuacgccguggacgccgccaaccacugcggcaccaucgccaacggcgugcugcagaccuucaugagaauggccuggggcggcagcuacaucgcccuggacagcggcaagggcagcugggacugcaucaugaccagcuaccaguaccugaucauccagaacaucaccugggaggaccacugccaguucagcagacccagccccaucggcuaccugggccugcugagccagagaaccagagacaucuacaucagcagaagacugcugggcaccuucaccuggacccugagcgacagcgagggcaacgagacccccggcggcuacugccugaccagauggaugcugaucgaggccgagcugaagugcuucggcaacaccgccguggccaagugcaacgagaagcacgacgaggaguucugcgacaugcugagacuguucgacuucugcaagcaggccaucagaagacugaagacccccgcccagaugagcauccagcugaucaacaaggccgugaacgcccugaucaacgaccagcugaucaugaagaaccaccugagagacaucaugggcauccccuacugcaacuacagcaaguacugguaccugaaccacaccgugaccggcaagaccagccugcccagaugcuggcuggugagcaacggcagcuaccugaacgagacccacuucagcgacgacaucgagcagcaggccgacaacaugaucaccgagcugcugcagaaggaguacaucgacagacagggcaagaccccccugggccugguggaccuguucguguucagcaccagcuucuaccugaucagcaucuuccugcaccuggugaagauccccacccacagacacguggugggcaagcccugccccaagccccacagacugaaccacaugggcaucugcagcugcggccuguacaagcaccccggcgugcccgugaaguggaagagaugaggacuagucccuguucccagagcccacuuuuuuuucuuuuuuugaaauaaaauagccugucuuucagaucuaaaaaaaaaaaaaaaaaaaaaaaaaaaaaaaaaaaaaaaaaaaaaaaaaaaaaaaaaaaaaaaaaaaaaaaaaaaaaaaaaaaaaaaaaaaaaaaaaaaa

SEQ ID NO: 30223 - RNA, 1721 nt, Artificial Sequence
  mRNA product Design a-1 (A100) comprising derived and/or modified sequence from LASV(Lassa virus/H.sapiens-wt/NGA/2015/ISTH_0543;Clade II)__AVO03639__GPCmut6 (opt4)
aggagagucccgcagucggcguccagcggcucugcuuguucgugugugugucguugcaggccuuauucaagcuuaccaugggccagaucaucaccuucuuccaggaggugccccacgugaucgaggaggugaugaacaucgugcugaucgcccugagccugcuggccauccugaagggcaucuacaacguggccaccugcggccuguucggccuggugagcuuccugcugcugugcggcagaagcugcagcaccaccuacaagggcguguacgagcugcagacccuggagcuggacauggccaaccugaacaugugcaugccccugagcugcaccaagaacaacagccaccacuacaucauggugggcaacgagaccggccuggagcugacccugaccaacaccagcaucaucaaccacaaguucugcaaccugagcgacgcccacaagaagaaccuguacgaccacgcccugaugagcaucaucagcaccuuccaccugagcauccccaacuucaaccaguacgaggccaugagcugcgacuucaacggcggcaagaucagcgugcaguacaaccugagccacaccuacgccguggacgccgccaaccacugcggcaccaucgccaacggcgugcugcagaccuucaugagaauggccuggggcggcagcuacaucgcccuggacagcggcaagggcagcugggacugcaucaugaccagcuaccaguaccuggugauccagaacaccaccugggaggaccacugccaguucagcagacccagccccaucggcuaccugggccugcugagccagagaaccagagacaucuacaucagcagaagacugcugggcaccuucaccuggacccugagcgacagcgagggcaacgagacccccggcggcuacugccugaccagauggaugcugaucgaggccgagcugaagugcuucggcaacaccgccguggccaagugcaacgagaagcacgacgaggaguucugcgacaugcugagacuguucgacuucugcaagcaggccaucagaagacugaagacccccgcccagaugagcauccagcugaucaacaaggccgugaacgcccugaucaacgaccagcugaucaugaagaaccaccugagagacaucaugggcauccccuacugcaacuacagcaaguacugguaccugaaccacaccgugaccggcaagaccagccugcccagaugcuggcuggugagcaacggcagcuaccugaacgagacccacuucagcgacgacaucgagcagcaggccgacaacaugaucaccgagcugcugcagaaggaguacaucgacagacagggcaagaccccccugggccugguggaccuguucguguucagcaccagcuucuaccugaucagcaucuuccugcaccuggugaagauccccacccacagacacaucaccggcaagcccugccccaagccccacagacugaaccacaugggcaucugcagcugcggccuguacaagcaccccggcgugcccgugaaguggaagagaugaggacuagucccuguucccagagcccacuuuuuuuucuuuuuuugaaauaaaauagccugucuuucagaucuaaaaaaaaaaaaaaaaaaaaaaaaaaaaaaaaaaaaaaaaaaaaaaaaaaaaaaaaaaaaaaaaaaaaaaaaaaaaaaaaaaaaaaaaaaaaaaaaaaaa

SEQ ID NO: 30224 - RNA, 1721 nt, Artificial Sequence
  mRNA product Design a-1 (A100) comprising derived and/or modified sequence from LASV(Lassa virus/H.sapiens-wt/NGA/2016/ISTH_0009;Clade II)__AVO03571__GPCmut6 (opt4)
aggagagucccgcagucggcguccagcggcucugcuuguucgugugugugucguugcaggccuuauucaagcuuaccaugggccagaucaucaccuucuuccaggaggugccccacgugaucgaggaggugaugaacaucgugcugaucgcccugagccugcuggccauccugaagggcaucuacaacguggccaccugcggccugcugggccuggugagcuuccugcugcugugcggcagaagcugcagcaccaccuacaagggcguguacgagcugcagacccuggagcuggacauggccagccugaacaugugcaugccccugagcugcaccaagaacaacagccaccacuacaucauggugggcaacgagaccggccuggagcugacccugaccaacaccagcaucaucaaccacaaguucugcaaccugagcgacgcccacaagaagaaccuguacgaccacgcccugaugagcaucaucagcaccuuccaccugagcauccccaacuucaaccaguacgaggccaugagcugcgacuucaacggcggcagaaucagcgugcaguacaaccugagccacagcuacgccguggacgccgccaaccacugcggcaccaucgccaacggcgugcugcagaccuucaugagaauggccuggggcggcagcuacaucgcccuggacagcggcaagggcagcugggacugcaucaugaccagcuaccaguaccugaucauccagaacaccaccugggaggaccacugccaguucagcagacccagccccaucggcuaccugggccugcugagccagagaaccagagacaucuacaucagcagaagacugcugggcaccuucaccuggacccugagcgacagcgagggcaacgagacccccggcggcuacugccugaccagauggaugcugaucgaggccgagcugaagugcuucggcaacaccgccguggccaagugcaacgagaagcacgacgaggaguucugcgacaugcugagacuguucgacuucugcaagcaggccaucagaagacugaagacccccgcccagaugagcauccagcugaucaacaaggccgugaacgcccugaucaacgaccagcugaucaugaagaaccaccugagagacaucaugggcauccccuacugcaacuacagcaaguacugguaccugaaccacaccgugaccggcaagaccagccugcccagaugcuggcuggugagcaacggcagcuaccugaacgagacccacuucagcgacgacaucgagcagcaggccgacaacaugaucaccgagcugcugcagaaggaguacaucgacagacagggcaagaccccccugggccugguggaccuguucguguucagcaccagcuucuaccugaucagcaucuuccugcaccuggugaagauccccacccacagacacaucaccggcaagcccugccccaagccccacagacugaaccacaugggcaucugcagcugcggccuguacaaccaccccggcgugcccgugaaguggaagagaugaggacuagucccuguucccagagcccacuuuuuuuucuuuuuuugaaauaaaauagccugucuuucagaucuaaaaaaaaaaaaaaaaaaaaaaaaaaaaaaaaaaaaaaaaaaaaaaaaaaaaaaaaaaaaaaaaaaaaaaaaaaaaaaaaaaaaaaaaaaaaaaaaaaaa

SEQ ID NO: 30225 - RNA, 1721 nt, Artificial Sequence
  mRNA product Design a-1 (A100) comprising derived and/or modified sequence from LASV(Lassa virus/H.sapiens-wt/NGA/2016/ISTH_0017;Clade II)__AVO03567__GPCmut6 (opt4)
aggagagucccgcagucggcguccagcggcucugcuuguucgugugugugucguugcaggccuuauucaagcuuaccaugggccagaucaucaccuucuuccaggaggugccccacgugaucgaggaggugaugaacaucgugcugaucgcccugagccugcuggccauccugaagggcaucuacaacguggccaccugcggccuguucggccuggugagcuuccugcugcugugcggcagaagcugcagcaccaccuacaagggcguguacgagcugcagacccuggagcuggacauggccagccugaacaugugcaugccccugagcugcaccaagaacaacagccaccacuacaucauggugggcaacgagaccggccuggagcugacccugaccaacaccagcaucaucaaccacaaguucugcaaccugagcgacgcccacaagaagaaccuguacgaccacgcccugaugagcaucaucagcaccuuccaccugagcauccccaacuucaaccaguacgaggccaugagcugcgacuucaacggcggcaagaucagcgugcaguacaaccugagccacaccuacgccaucgacgccgccaaccacugcggcaccaucgccaacggcgugcugcagaccuucaugagaauggccuggggcggcagcuacaucgcccuggacagcggcaagggcagcugggacugcaucaugaccagcuaccaguaccugaucauccagaacaccaccugggaggaccacugccaguucagcagacccagccccaucggcuaccugggccugcugagccagagaaccagagacaucuacaucagcagaagacugcugggcaccuucaccuggacccugagcgacagcgagggcaacgagacccccggcggcuacugccugaccagauggaugcugaucgaggccgagcugaagugcuucggcaacaccgccguggccaagugcaacgagaagcacgacgaggaguucugcgacaugcugagacuguucgacuucugcaagcaggccaucagaagacugaagacccccgcccagaugagcauccagcugaucaacaaggccgugaacgcccugaucaacgaccagcugaucaugaagaaccaccugagagacaucaugggcauccccuacugcaacuacagcaaguacugguaccugaaccacaccgugaccggcaagaccagccugcccagaugcuggcuggugagcaacggcagcuaccugaacgagacccacuucagcgacgacaucgagcagcaggccgacaacaugaucaccgagcugcugcagaaggaguacauggacagacagggcaagaccccccugggccugguggaccuguucguguucagcaccagcuucuaccugaucagcaucuuccugcaccuggugagaauccccacccacagacacgugaucggcaagcccugccccaagccccacagacugaaccacaugggcaucugcagcugcggccuguacaagcaccccggcgugcccgugaaguggaagagaugaggacuagucccuguucccagagcccacuuuuuuuucuuuuuuugaaauaaaauagccugucuuucagaucuaaaaaaaaaaaaaaaaaaaaaaaaaaaaaaaaaaaaaaaaaaaaaaaaaaaaaaaaaaaaaaaaaaaaaaaaaaaaaaaaaaaaaaaaaaaaaaaaaaaa

SEQ ID NO: 30226 - RNA, 1721 nt, Artificial Sequence
  mRNA product Design a-1 (A100) comprising derived and/or modified sequence from LASV(Lassa virus/H.sapiens-wt/NGA/2018/ISTH_0959;Clade II)__AVV65099__GPCmut6 (opt4)
aggagagucccgcagucggcguccagcggcucugcuuguucgugugugugucguugcaggccuuauucaagcuuaccaugggccagaucaucaccuucuuccaggaggugccccacgugaucgaggaggugaugaacaucgugcugaucgcccugagccugcuggccauccugaagggcaucuacaacguggugaccugcggccuguucggccuggugagcuuccugcugcugugcggcagaagcugcagcaccaccuacaagggcguguacgagcugcagacccuggagcuggacauggccagccugaacaugugcaugccccugagcugcaccaagaacaacagccaccacuacaucauggugggcaacgagaccggccuggagcugacccugaccaacaccagcaucaucaaccacaaguucugcaaccugagcgacgcccacaagaagaaccuguacgaccacgcccugaugagcaucaucagcaccuuccaccugagcauccccaacuucaaccaguacgaggccaugagcugcgacuucaacggcggcaagaucagcgugcaguacaaccugagccacgccuacgccaucgacgccgccaaccacugcggcaccaucgccaacggcgugcugcagaccuucaugagaauggccuggggcggcagcuacaucgcccuggacagcggcaagggcagcugggacugcaucaugaccagcuaccaguaccugaucauccagaacaccaccugggaggaccacugccaguucagcagacccagccccaucggcuaccugggccugcugagccagagaaccagagacaucuacaucagcagaagacugcugggcaccuucaccuggacccugagcgacagcgagggcaacgagacccccggcggcuacugccugaccagauggaugcugaucgaggccgagcugaagugcuucggcaacaccgccguggccaagugcaacgagaagcacgacgaggaguucugcgacaugcugagacuguucgacuucugcaagcaggccaucagaagacugaagacccccgcccagaugagcauccagcugaucaacaaggccgugaacgcccugaucaacgaccagcugaucaugaagaaccaccugagagacaucaugggcauccccuacugcaacuacagcaaguacugguaccugaaccacaccgugaccggcaagaccagccugcccagaugcuggcuggugagcaacggcagcuaccugaacgagacccacuucagcgacgacaucgagcagcaggccgacaacaugaucaccgagcugcugcagaaggaguacaucgacagacagggcaagaccccccugggccugguggaccuguucguguucagcaccagcuucuaccugaucagcaucuuccugcaccuggugaagauccccacccacagacacgugaucggcaagcccugccccaagccccacagacugaaccacaugggcaucugcagcugcggccuguacaagcaccccggcgugcccgugaaguggaagagaugaggacuagucccuguucccagagcccacuuuuuuuucuuuuuuugaaauaaaauagccugucuuucagaucuaaaaaaaaaaaaaaaaaaaaaaaaaaaaaaaaaaaaaaaaaaaaaaaaaaaaaaaaaaaaaaaaaaaaaaaaaaaaaaaaaaaaaaaaaaaaaaaaaaaa

SEQ ID NO: 30227 - RNA, 1721 nt, Artificial Sequence
  mRNA product Design a-1 (A100) comprising derived and/or modified sequence from LASV(LASV003-NIG-2008;Clade II)__AIT17580__GPCmut6 (opt4)
aggagagucccgcagucggcguccagcggcucugcuuguucgugugugugucguugcaggccuuauucaagcuuaccaugggccagaucaucaccuucuuccaggaggugccccacgugaucgaggaggugaugaacaucgugcugaucgcccugagccugcuggccauccugaagggcaucuacaacguggccaccugcggccuguucggccuggugagcuuccugcugcugugcggcagaagcugcagcaccaccuacaagggcguguacgagcugcagacccuggagcuggacauggccagccugaacaugugcaugccccugagcugcaccaagaacaacagccaccacuacaucauggugggcaacgagaccggccuggagcugacccugaccaacaccagcaucaucaaccacaaguucugcaaccugagcgacgcccacaagaagaaccuguacgaccacgcccugaugagcaucaucagcaccuuccaccugagcauccccaacuucaaccaguacgaggccaugagcugcgacuucaacggcggcaagaucagcgugcaguacaaccugagccacaccuacgccguggacgccgccaaccacugcggcaccaucgccaacggcgugcugcagaccuucaugagaauggccuggggcggcagcuacaucgcccuggacagcggcaagggcagcugggacugcaucaugaccagcuaccaguaccugaucauccagaacaccaccugggaggaccacugccaguucagcagacccagccccaucggcuaccugggccugcugagccagagaaccagagacaucuacaucagcagaagacugcugggcaccuucaccuggacccugagcgacagcgagagcaacgagacccccggcggcuacugccugaccagauggaugcugaucgaggccgagcugaagugcuucggcaacaccgccguggccaagugcaacgagaagcacgacgaggaguucugcgacaugcugagacuguucgacuucugcaagcaggccaucagaagacugaaggcccccgcccagaugagcauccagcugaucaacaaggccgugaacgcccugaucaacgaccagcugaucaugaagaaccaccugagagacaucaugggcauccccuacugcaacuacagcaaguacugguaccugaaccacaccgugaccggcagaaccagccugcccagaugcuggcuggugagcaacggcagcuaccugaacgagacccacuucagcgacgacaucgagcagcaggccgacaacaugaucaccgagcugcugcagaaggaguacauggacagacagggcaagaccccccugggccugguggaccuguucguguucagcaccagcuucuaccugaucagcaucuuccugcaccuggugaagauccccacccacagacacgugaucggcaagcccugccccaagccccacagacugaaccacaugggcaucugcagcugcggccuguacaagcaccccggcgugcccgugaaguggaagagaugaggacuagucccuguucccagagcccacuuuuuuuucuuuuuuugaaauaaaauagccugucuuucagaucuaaaaaaaaaaaaaaaaaaaaaaaaaaaaaaaaaaaaaaaaaaaaaaaaaaaaaaaaaaaaaaaaaaaaaaaaaaaaaaaaaaaaaaaaaaaaaaaaaaaa

SEQ ID NO: 30228 - RNA, 1721 nt, Artificial Sequence
  mRNA product Design a-1 (A100) comprising derived and/or modified sequence from LASV(LASV035-NIG-2009;Clade II)__AIT17588__GPCmut6 (opt4)
aggagagucccgcagucggcguccagcggcucugcuuguucgugugugugucguugcaggccuuauucaagcuuaccaugggccagaucaucaccuucuuccaggaggugccccacgugaucgaggaggugaugaacaucgugcugaucgcccugagccugcuggccauccugaagggcaucuacaacguggccaccugcggccuguucggccuggugagcuuccugcugcugugcggcagaagcugcagcaccaccuacaagggcguguacgagcugcagacccuggagcuggacauggccagccugaacaugugcaugccccugagcugcaccaagaacaacagccaccacuacaucauggugggcaacgagaccggccuggagcugacccugaccaacaccagcaucaucaaccacaaguucugcaaccugagcgacgcccacaagaagaaccuguacgaccacgcccugaugagcaucaucagcaccuuccaccugagcauccccaacuucaaccaguacgaggccaugagcugcgacuucaacggcggcaagaucagcgugcaguacaaccugagccacgccuacgccguggacgccgccaaccacugcggcaccaucgccaacggcgugcugcagaccuucaugagaauggccuggggcggcagcuacaucgcccuggacagcggcaagggcagcugggacugcaucaugaccagcuaccaguaccugaucauccagaacaccaccugggaggaccacugccaguucagcagacccagccccaucggcuaccugggccugcugagccagagaaccagagacaucuacaucagcagaagacugcugggcaccuucaccuggacccugagcgacagcgagggcaacgagacccccggcggcuacugccugaccagauggaugcugaucgaggccgagcugaagugcuucggcaacaccgccguggccaagugcaacgagaagcacgacgaggaguucugcgacaugcugagacuguucgacuucugcaagcaggccaucagaagacugaaggcccccgcccagaugagcauccagcugaucaacaaggccgugaacgcccugaucaacgaccagcugaucaugaagaaccaccugagagacaucaugggcauccccuacugcaacuacagcaaguacugguaccugaaccacaccgugaccggcaagaccagccugcccagaugcuggcuggugagcaacggcagcuaccugaacgagacccacuucagcgacgacaucgagcagcaggccgacaacaugaucaccgagcugcugcagaaggaguacaucgacagacagggcaagaccccccugggccugguggaccuguucguguucagcaccagcuucuaccugaucagcaucuuccugcaccuggugaagauccccacccacagacacgugaucggcaagcccugccccaagccccacagacugaaccacaugggcaucugcagcugcggccuguacaagcaccccggcgugcccgugaaguggaagagaugaggacuagucccuguucccagagcccacuuuuuuuucuuuuuuugaaauaaaauagccugucuuucagaucuaaaaaaaaaaaaaaaaaaaaaaaaaaaaaaaaaaaaaaaaaaaaaaaaaaaaaaaaaaaaaaaaaaaaaaaaaaaaaaaaaaaaaaaaaaaaaaaaaaaa

SEQ ID NO: 30229 - RNA, 1721 nt, Artificial Sequence
  mRNA product Design a-1 (A100) comprising derived and/or modified sequence from LASV(LASV1000-NIG-2009;Clade II)__AIT17782__GPCmut6 (opt4)
aggagagucccgcagucggcguccagcggcucugcuuguucgugugugugucguugcaggccuuauucaagcuuaccaugggccagaucaucaccuucuuccaggaggugccccacgugaucgaggaggugaugaacaucgugcugaucgcccugagccugcuggccauccugaagggcaucuacaacguggccaccugcggccuguucggccuggugagcuuccugcugcugugcggcagaagcugcagcaccaccuacaagggcguguacgagcugcagacccuggagcuggacauggccagccugaacaugugcaugccccugagcugcaccaagaacaacagccaccacuacaucauggugggcaacgagaccggccuggagcugacccugaccaacaccagcaucaucaaccacaaguucugcaaccugagcgacgcccacaagaagaaccuguacgaccacgcccugaugagcaucaucagcaccuuccaccugagcauccccaacuucaaccaguacgaggccaugagcugcgacuucaacggcggcaagaucagcgugcaguacaaccugagccacaccuacgccguggacgccgccaaccacugcggcaccaucgccaacggcgugcugcagaccuucaugagaauggccuggggcggcagcuacaucgcccuggacagcggcaagggcagcugggacugcaucaugaccagcuaccaguaccugaucauccagaacaccaccugggaggaccacugccaguucagcagacccagccccaucggcuaccugggccugcugagccagagaaccagagacaucuacaucagcagaagacugcugggcaccuucaccuggacccugagcgacagcgagggcaacgagacccccggcggcuacugccugaccagauggaugcugaucgaggccgagcugaagugcuucggcaacaccgccguggccaagugcaacgagaagcacgacgaggaguucugcgacaugcugagacuguucgacuucugcaagcaggccaucaagagacugaagacccccgcccagaugagcauccagcugaucaacaaggccgugaacgcccugaucaacgaccagcugaucaugaagaaccaccugagagacaucaugggcauccccuacugcaacuacagcaaguacugguaccugaaccacaccgugaccggcaagaccagccugcccagaugcuggcuggugagcaacggcagcuaccugaacgagacccacuucagcgacgacaucgagcagcaggccgacaacaugaucaccgagcugcugcagaaggaguacaucgacagacagggcaagaccccccugggccugguggaccuguucguguucagcaccagcuucuaccugaucagcaucuuccugcaccuggugaagauccccacccacagacacguggugggcaagcccugccccaagccccacagacugaaccacaugggcaucugcagcugcggccuguacaagcaccccggcgugcccgugaaguggaagagaugaggacuagucccuguucccagagcccacuuuuuuuucuuuuuuugaaauaaaauagccugucuuucagaucuaaaaaaaaaaaaaaaaaaaaaaaaaaaaaaaaaaaaaaaaaaaaaaaaaaaaaaaaaaaaaaaaaaaaaaaaaaaaaaaaaaaaaaaaaaaaaaaaaaaa

SEQ ID NO: 30230 - RNA, 1721 nt, Artificial Sequence
  mRNA product Design a-1 (A100) comprising derived and/or modified sequence from LASV(LASV221-NIG-2010;Clade II)__AIT17624__GPCmut6 (opt4)
aggagagucccgcagucggcguccagcggcucugcuuguucgugugugugucguugcaggccuuauucaagcuuaccaugggccagaucaucaccuucuuccaggaggugccccacgugaucgaggaggugaugaacaucgugcugaucgcccugagccugcuggccauccugaagggcaucuacaacguggccaccugcggccuguucggccuggugagcuuccugcugcugugcggcagaagcugcagcaccaccuacaagggcguguacgagcugcagacccuggagcuggacauggccagccugaacaugugcaugccccugagcugcaccaagaacaacagccaccacuacaucauggugggcaacgagaccggccuggagcugacccugaccaacaccagcaucaucaaccacaaguucugcaaccugagcgacgcccacaagaagaaccuguacgaccacgcccugaugagcaucaucagcaccuuccaccugagcauccccaacuucaaccaguacgaggccaugagcugcgacuucaacggcggcaagaucagcgugcaguacaaccugagccacaccuacgccaucgacgccgccaaccacugcggcaccaucgccaacggcgugcugcagaccuucaugagaauggccuggggcggcagcuacaucgcccuggacagcggcaagggcagcugggacugcaucaugaccagcuaccaguaccugaucauccagaacaccaccugggaggaccacugccaguucagcagacccagccccaucggcuaccugggccugcugagccagagaaccagagacaucuacaucagcagaagacugcugggcaccuucaccuggacccugagcgacagcgagggcaacgagacccccggcggcuacugccugaccagauggaugcugaucgaggccgagcugaagugcuucggcaacaccgccguggccaagugcaacgagaagcacgacgaggaguucugcgacaugcugagacuguucgacuucugcaagcaggccaucagaagacugaagacccccgcccagaugagcauccagcugaucaacaaggccgugaacgcccugaucaacgaccagcugaucaugaagaaccaccugagagacaucaugggcauccccuacugcaacuacagcaaguacugguaccugaaccacaccgugaccggcaagaccagccugcccagaugcuggcuggugagcaacggcagcuaccugaacgagacccacuucagcgacgacaucgagcagcaggccgacaacaugaucaccgagaugcugcagaaggaguacauggacagacagggcaagaccccccugggccugguggaccuguucguguucagcaccagcuucuaccugaucagcaucuuccugcaccuggugaagauccccacccacagacacgugaucggcaagcccugccccaagccccacagacugaaccacaugggcaucugcagcugcggccuguacaagcaccccggcgugcccgugaaguggaagagaugaggacuagucccuguucccagagcccacuuuuuuuucuuuuuuugaaauaaaauagccugucuuucagaucuaaaaaaaaaaaaaaaaaaaaaaaaaaaaaaaaaaaaaaaaaaaaaaaaaaaaaaaaaaaaaaaaaaaaaaaaaaaaaaaaaaaaaaaaaaaaaaaaaaaa

SEQ ID NO: 30231 - RNA, 1721 nt, Artificial Sequence
  mRNA product Design a-1 (A100) comprising derived and/or modified sequence from LASV(LASV237-NIG-2010;Clade II)__AIT17638__GPCmut6 (opt4)
aggagagucccgcagucggcguccagcggcucugcuuguucgugugugugucguugcaggccuuauucaagcuuaccaugggccagaucaucaccuucuuccaggaggugccccacgugaucgaggaggugaugaacaucgugcugaucgcccugagccugcuggccauccugaagggcaucuacaacguggccaccugcggccuguucggccuggugagcuuccugcugcugugcggcagaagcugcagcaccaccuacaagggcguguacgagcugcagacccuggagcuggacauggccagccugaacaugugcaugccccugagcugcaccaagaacaacagccaccacuacaucauggugggcaacgagaccggccuggagcugacccugaccaacaccagcaucaucaaccacaaguucugcaaccugagcgacgcccacaagaaggaccuguacgaccacgcccugaugagcaucaucagcaccuuccaccugagcauccccaacuucaaccaguacgaggccaugagcugcgacuucaacggcggcaagaucagcgugcaguacaaccugagccacaccuacgccguggacgccgccaaccacugcggcaccaucgccaacggcgugcugcagaccuucaugagaauggccuggggcggcagcuacaucgcccuggacagcggcaagggcagcugggacugcaucaugaccagcuaccaguaccugaucauccagaacaccaccugggaggaccacugccaguucagcagacccagccccaucggcuaccugggccugcugagccagagaaccagagacaucuacaucagcagaagacugcugggcaccuucaccuggacccugagcgacagcgagggcaacgagacccccggcggcuacugccugaccagauggaugcugaucgaggccgagcugaagugcuucggcaacaccgccguggccaagugcaacgagaagcacgacgaggaguucugcgacaugcugagacuguucgacuucugcaagcaggccaucagaagacugaagacccccgcccagaugagcauccagcugaucaacaaggccgugaacgcccugaucaacgaccagcugaucaugaagaaccaccugagagacaucaugggcauccccuacugcaacuacagcaaguacugguaccugaaccacaccgugaccggcaagaccagccugcccagaugcuggcuggugagcaacggcagcuaccugaacgagacccacuucagcgacgacaucgagcagcaggccgacaacaugaucaccgagcugcugcagaaggaguacauggacagacagggcaagaccccccugggccugguggaccuguucguguucagcaccagcuucuaccugaucagcaucuuccugcaccugaucaagauccccacccacagacacaucaccggcaagcccugccccaagccccacagacugaaccacaugggcaucugcagcugcggccuguacaagcaccccggcgugcccgugaaguggaagagaugaggacuagucccuguucccagagcccacuuuuuuuucuuuuuuugaaauaaaauagccugucuuucagaucuaaaaaaaaaaaaaaaaaaaaaaaaaaaaaaaaaaaaaaaaaaaaaaaaaaaaaaaaaaaaaaaaaaaaaaaaaaaaaaaaaaaaaaaaaaaaaaaaaaaa

SEQ ID NO: 30232 - RNA, 1721 nt, Artificial Sequence
  mRNA product Design a-1 (A100) comprising derived and/or modified sequence from LASV(LASV253-NIG-2011;Clade II)__AIT17670__GPCmut6 (opt4)
aggagagucccgcagucggcguccagcggcucugcuuguucgugugugugucguugcaggccuuauucaagcuuaccaugggccagaucaucaccuucuuccaggaggugccccacgugaucgaggaggugaugaacaucgugcugaucgcccugagccugcuggccauccugaagggcaucuacaacguggccaccugcggccuguucggccuggugagcuuccugcugcugugcggcagaagcugcagcaccaccuacaagggcguguacgagcugcagacccuggagcuggacauggccagccugaacaugugcaugccccugagcugcaccaagaacaacagccaccacuacaucauggugggcaacgagaccggccuggagcugacccugaccaacaccagcaucaucaaccacaaguucugcaaccugagcgacgcccacaagaagaaccuguacgaccacgcccugaugagcaucaucagcaccuuccaccugagcauccccaacuucaaccaguacgaggccaugagcugcgacuucaacggcggcaagaucagcgugcaguacaaccugagccacaccuacgccguggacgccgccaaccacugcggcaccaucgccaacggcgugcugcagaccuucaugagaauggccuggggcggcagcuacaucgcccuggacagcggcaagggcagcugggacugcaucaugaccagcuaccaguaccugaucauccagaacaccaccugggaggaccacugccaguucagcagacccagccccaucggcuaccugggccugcugagccagagaaccagagacaucuacaucagcagaagacugcugggcaccuucaccuggacccugagcgacagcgagggcaacgagacccccggcggcuacugccugaccagauggaugcugaucgaggccgagcugaagugcuucggcaacaccgccguggccaagugcaacgagaagcacgacgaggaguucugcgacaugcugagacuguucgacuucugcaagcaggccaucagaagacugaaggcccccgcccagaugagcauccagcugaucaacaaggccgugaacgcccugaucaacgaccagcugaucaugaagaaccaccugagagacaucaugggcauccccuacugcaacuacagcaaguacugguaccugaaccacaccgugaccggcagaaccagccugcccagaugcuggcuggugagcaacggcagcuaccugaacgagacccacuucagcgacgacaucgagcagcaggccgacaacaugaucaccgagcugcugcagaaggaguacaucgacagacagggcaagaccccccugggccugguggaccuguucguguucagcaccagcuucuaccugaucagcaucuuccugcaccuggugaagauccccacccacagacacaucaucggcaagcccugccccaagccccacagacugaaccacaugggcaucugcagcugcggccuguacaagcaccccggcgugcccgugaaguggaagagaugaggacuagucccuguucccagagcccacuuuuuuuucuuuuuuugaaauaaaauagccugucuuucagaucuaaaaaaaaaaaaaaaaaaaaaaaaaaaaaaaaaaaaaaaaaaaaaaaaaaaaaaaaaaaaaaaaaaaaaaaaaaaaaaaaaaaaaaaaaaaaaaaaaaaa

SEQ ID NO: 30233 - RNA, 1721 nt, Artificial Sequence
  mRNA product Design a-1 (A100) comprising derived and/or modified sequence from LASV(LASV254-NIG-2011;Clade II)__AIT17674__GPCmut6 (opt4)
aggagagucccgcagucggcguccagcggcucugcuuguucgugugugugucguugcaggccuuauucaagcuuaccaugggccagaucaucaccuucuuccaggaggugccccacgugaucgaggaggugaugaacaucgugcugaucgcccugagccugcuggccauccugaagggcaucuacaacguggccaccugcggccuguucggccuggugagcuuccugcugcugugcggcagaagcugcagcaccaccuacaagggcguguacgagcugcagacccuggagcuggacaugaccaaccugaacaugugcaugccccugagcugcaccaagaacaacagccaccacuacaucauggugggcaacgagaccggccuggagcugacccugaccaacaccagcaucaucaaccacaaguucugcaaccugagcgacgcccacaagaagaaccuguacaaccacgcccugaugagcaucaucagcaccuuccaccugagcauccccaacuucaaccaguacgaggccaugagcugcgacuucaacggcggcaagaucagcgugcaguacaaccugagccacagcuacgccguggacgccgccaaccacugcggcaccaucgccaacggcgugcugcagaccuucaugagaauggccuggggcggcagcuacaucgcccuggacagcggcaagggcaacugggacugcaucaugaccagcuaccaguaccugaucauccagaacaccaccugggaggaccacugccaguucagcagacccagccccaucggcuaccugggccugcugagccagagaaccagagacaucuacaucagcagaagacugcugggcaccuucaccuggacccugagcgacagcgagggcaacgagacccccggcggcuacugccugaccagauggaugcugaucgaggccgagcugaagugcuucggcaacaccgccguggccaagugcaacgagaagcacgacgaggaguucugcgacaugcugagacuguucgacuucugcaagcaggccaucagaagacugaagacccccgcccaggccaacauccagcugaucaacaaggccgugaacgcccugaucaacgaccagcugaucaugaagaaccaccugagagacaucaugggcauccccuacugcaacuacagcaaguacugguaccugaaccacaccgugaccggcaagaccagccugcccagaugcuggcuggugagcaacggcagcuaccugaacgagacccacuucagcgacgacaucgagcagcaggccgacaacaugaucaccgagcugcugcagaaggaguacauggacagacagggcaagaccccccugggccugguggaccuguucguguucagcaccagcuucuaccugaucagcaucuuccugcaccuggugaagauccccacccacagacacgugaucggcaagcccugccccaagccccacagacugaaccacaugggcaucugcagcugcggccuguacaagcaccccggcgugcccgugaaguggaagagaugaggacuagucccuguucccagagcccacuuuuuuuucuuuuuuugaaauaaaauagccugucuuucagaucuaaaaaaaaaaaaaaaaaaaaaaaaaaaaaaaaaaaaaaaaaaaaaaaaaaaaaaaaaaaaaaaaaaaaaaaaaaaaaaaaaaaaaaaaaaaaaaaaaaaa

SEQ ID NO: 30234 - RNA, 1721 nt, Artificial Sequence
  mRNA product Design a-1 (A100) comprising derived and/or modified sequence from LASV(Nig08-A19;Clade III)__ADU56618__GPCmut6 (opt4)
aggagagucccgcagucggcguccagcggcucugcuuguucgugugugugucguugcaggccuuauucaagcuuaccaugggccagaucgugaccuucuuccaggaggugccccacgugaucgaggaggugaugaacaucgugcugaucgcccugagcauccuggccauccugaagggccuguacaacaucgccaccugcggccugaucggccuggugaccuuccugcugcugagcggcagaagcugcagcaugaccuacaagggcguguacgagcugcagacccuggagcugaacaugaacacccugaacaugugcaugccccugagcugcaccaagaacaacagccaccacuacaucauggugggcaacgagaccggccuggagcugacccugaccaacaccagccugcugcaccacaaguucugcaaccugagcgacgcccacaagaagaaccuguacgaccacacccugaugagcaucaucagcaccuuccaccugagcauccccaacuucaaccaguacgaggccaugagcugcgacuucaacggcggcaagaucaccgugcaguacaaccugagccacagcuacgccaucgacgccgccaaccacugcggcaccguggccaacggcgugcugcagaccuucaugagaauggccuggggcggcagcuacaucgcccuggacagcggcagaggcaagugggacugcaucaugaccagcuaccaguaccugaucauccagaacaccaccugggaggaccacugccaguucagcagacccagccccaucggcuaccugggccugcugagccagagaaccagagacaucuacaucagcagaagacugcugggcaccuucaccuggacccugagcgacagcgagggcaacgagacccccggcggcuacugccugaccagauggaugcugaucgaggccgagcugaagugcuucggcaacaccgccguggccaagugcaacgagaagcacgacgaggaguucugcgacaugcugagacuguucgacuucugcaagcaggccaucagaagacugaaggcccccgcccagaugagcauccagcugaucaacaaggccgugaacgcccugaucaacgaccagcugaucaugaagaaccaccugagagacaucaugggcauccccuacugcaacuacagcaaguacugguaccugaaccacaccagcaccggcagaaccagccugcccagaugcuggcuggugagcaacggcagcuaccugaacgagacccacuucagcgacgacaucgagcagcaggccgacaacaugaucaccgagaugcugcagaaggaguaccuggacagacagggcaagaccccccugggccugguggaccuguucguguucagcaccagcuucuaccugaucagcaucuuccugcaccuggugaagauccccacccacagacacaucgugggcaagcccugccccaagccccacagacugaaccacaugggcaucugcagcugcggccuguacaagcagcccggcgugcccgugagauggaagagaugaggacuagucccuguucccagagcccacuuuuuuuucuuuuuuugaaauaaaauagccugucuuucagaucuaaaaaaaaaaaaaaaaaaaaaaaaaaaaaaaaaaaaaaaaaaaaaaaaaaaaaaaaaaaaaaaaaaaaaaaaaaaaaaaaaaaaaaaaaaaaaaaaaaaa

SEQ ID NO: 30235 - RNA, 1724 nt, Artificial Sequence
  mRNA product Design a-1 (A100) comprising derived and/or modified sequence from LASV(G1180-SLE-2010;Clade IV)__AIT17168__GPCmut6 (opt4)
aggagagucccgcagucggcguccagcggcucugcuuguucgugugugugucguugcaggccuuauucaagcuuaccaugggccagaucgugaccuucuuccaggaggugccccacgugaucgaggaggugaugaacaucgugcugaucgcccugagcauccuggccgugcugaagggccuguacaacuucgccaccugcggccuggugggccugcugaccuuccugcugcugugcggcagaagcugcaccgccagcagauacaagggcguguacgagcugcagacccuggagcugaacauggagacccugaacaugugcaugccccugagcugcaccaagaacaacagccaccacuacaucauggugggcaacgagaccggccuggagcugacccugaccaacaccagcaucaucaaccacaaguucugcaaccugagcgacgcccacaagaagaaccuguacgaccacgcccugaugagcaucaucagcaccuuccaccugagcauccccaacuucaaccaguacgaggccaugagcugcgacuucaacggcggcaagaucagcgugcaguacaaccugagccacagcuacgccggcgacgccgccaaccacugcggcaccguggccaacggcgugcugcagaccuucaugagaauggccuggggcggcagcuacaucgcccuggacagcggccacggcagcugggacugcaucaugaccagcuaccaguaccugaucauccagaacaccaccugggaggaccacugccaguucagcagacccagccccaucggcuaccugggccugcugagccagagaaccagagacaucuacaucagcagaagacugcugggcaccuucaccuggacccugagcgacagcgagggcaaggacacccccggcggcuacugccugaccagauggaugcugaucgaggccgagcugaagugcuucggcaacaccgccguggccaagugcaacgagaagcacgacgaggaguucugcgacaugcugagacuguucgacuucugcaagcaggccauccagagacugaaggcccccgcccagaugagcauccagcugaucaacaaggccgugaacgcccugaucaacgaccagcugaucaugaagaaccaccugagagacaucaugggcauccccuacugcaacuacagcaaguacugguaccugaaccacaccaccaccggcaagaccagccugcccaagugcuggcuggugagcaacggcagcuaccugaacgagacccacuucagcgacgacaucgagcagcaggccgacaacaugaucaccgagaugcugcagaaggaguacauggagagacagggcaagaccccccugggccugguggaccuguucguguucagcaccagcuucuaccugaucagcaucuuccugcaccuggugaagauccccacccacagacacaucgugggcaagagcugccccaagccccacagacugaaccacaugggcaucugcagcugcggccuguacaagcagcccggcgugcccgugaaguggaagagaugaggacuagucccuguucccagagcccacuuuuuuuucuuuuuuugaaauaaaauagccugucuuucagaucuaaaaaaaaaaaaaaaaaaaaaaaaaaaaaaaaaaaaaaaaaaaaaaaaaaaaaaaaaaaaaaaaaaaaaaaaaaaaaaaaaaaaaaaaaaaaaaaaaaaa

SEQ ID NO: 30236 - RNA, 1724 nt, Artificial Sequence
  mRNA product Design a-1 (A100) comprising derived and/or modified sequence from LASV(G1442-SLE-2011;Clade IV)__AIT17180__GPCmut6 (opt4)
aggagagucccgcagucggcguccagcggcucugcuuguucgugugugugucguugcaggccuuauucaagcuuaccaugggccagaucgugaccuucuuccaggaggugccccacgugaucgaggaggugaugaacaucgugcugaucgcccugagcauccuggccgugcugaagggccuguacaacguggccaccugcggccugaucggccuggugaccuuccugcugcugugcggcagaagcugcaccaccacccuguacaagggcguguacgagcugcagacccuggagcugaacauggagacccugaacaugugcaugccccugagcugcaccaagaacaacagccaccacuacaucagagugggcaacgagaccggccuggagcugacccugaccaacaccagcaucaucaaccacaaguucugcaaccugagcgacgcccacaagaagaaccuguacgaccacgcccugaugagcaucaucagcaccuuccaccugagcauccccaacuucaaccaguacgaggccaugagcugcgacuucaacggcggcaagaucagcgugcaguacaaccugagccacagcuacgccggcgacgccgccaaccacugcggcaccguggccaacggcgugcugcagaccuucaugagaauggccuggggcggcagcuacaucgcccuggacagcggcagaggcaacugggacugcaucaugaccagcuaccaguaccugaucauccagaacaccaccugggacgaccacugccaguucagcagacccagccccaucggcuaccugggccugcugagccagagaaccagagacguguacaucagcagaagacugcugggcaccuucaccuggacccugagcgacagcgagggcaaggacacccccggcggcuacugccugaccagauggaugcugaucgaggccgagcugaagugcuucggcaacaccgccguggccaagugcaacgagaagcacgacgaggaguucugcgacaugcugagacuguucgacuucugcaagcaggccauccagagacugaaggcccccgcccagaugagcauccagcugaucaacaaggccgugaacgcccugaucaacgaccagcugaucaugaagaaccaccugagagacaucaugggcauccccuacugcaacuacagcaaguacugguaccugaacaacaccgccaccggcaagaccagccugcccaagugcuggcugaucagcaacggcagcuaccugaacgagacccacuucagcgacgacaucgagcaggaggccgacaacaugaucaccgagaugcugcagaaggaguacauggagagacagggcaagaccccccugggccugguggaccuguucguguucagcaccagcuucuaccugaucagcaucuuccugcaccuggugaagauccccacccacagacacaucgugggcaagagcugccccaagccccacagacugaaccacaugggcaucugcagcugcggccuguacaagcagcccggcgugcccgugagauggaagagaugaggacuagucccuguucccagagcccacuuuuuuuucuuuuuuugaaauaaaauagccugucuuucagaucuaaaaaaaaaaaaaaaaaaaaaaaaaaaaaaaaaaaaaaaaaaaaaaaaaaaaaaaaaaaaaaaaaaaaaaaaaaaaaaaaaaaaaaaaaaaaaaaaaaaa

SEQ ID NO: 30237 - RNA, 1724 nt, Artificial Sequence
  mRNA product Design a-1 (A100) comprising derived and/or modified sequence from LASV(G3010-SLE-2013;Clade IV)__AIT17344__GPCmut6 (opt4)
aggagagucccgcagucggcguccagcggcucugcuuguucgugugugugucguugcaggccuuauucaagcuuaccaugggccagaucgugaccuucuuccaggaggugccccacgugaucgaggaggugaugaacaucgugcugaucgcccugagcauccuggccgugcugaagggccuguacaacuucgccaccugcggccuggugggccuggugaccuuccugcugcugugcggcagaagcugcaccaccagccuguacaagggcguguacgagcugcagacccuggagcugaacauggagacccugaacaugugcaugccccugagcugcaccaagaacaacagccaccacuacaucauggugggcaacgagaccggccuggagcugacccugaccaacaccagcaucaucaaccacaaguucugcaaccugagcgacgcccacaagaagaaccuguacaaccacgcccugaugagcaucaucagcaccuuccaccugagcauccccaacuucaaccaguacgaggccaugagcugcgacuucaacggcggcaagaucagcgugcaguacaaccugagccacagcuacgccggcgacgccgccagccacugcggcaccguggccaacggcgugcugcagaccuucaugagaauggccuggggcggcagcuacaucgcccuggacagcggcuacggcaagugggacugcaucaugaccagcuaccaguaccugaucauccagaacaccaccugggaggaccacugccaguucagcagacccagccccaucggcuaccugggccugcugagccagagaaccagagacaucuacaucagcagaagacugcugggcaccuucaccuggacccugagcgacagcgagggcaaggacacccccggcggcuacugccugaccagauggaugcugaucgaggccgagcugaagugcuucggcaacaccgccguggccaagugcaacgagaagcacgacgaggaguucugcgacaugcugagacuguucgacuucugcaagcaggccauccagagacugaagacccccgcccagaugagcauccagcugaucaacaaggccgugaacgcccugaucaacgaccagcugaucaugaagaaccaccugagagacaucaugggcauccccuacugcaacuacagcaaguacugguaccugaaccacaccaccaccggcaagaccagccugcccaagugcuggcuggugagcaacggcagcuaccugaacgagacccacuucagcgacgacaucgagcagcaggccgacaacaugaucaccgagaugcugcagaaggaguacauggagagacagggcaagaccccccugggccugguggaccuguucguguucagcaccagcuucuaccugaucagcaucuuccugcaccuggugaagauccccacccacagacacaucgugggcaagagcugccccaagccccacagacugaaccacaugggcaucugcagcugcggccuguacaagcagcccggcgugcccgugagauggaagagaugaggacuagucccuguucccagagcccacuuuuuuuucuuuuuuugaaauaaaauagccugucuuucagaucuaaaaaaaaaaaaaaaaaaaaaaaaaaaaaaaaaaaaaaaaaaaaaaaaaaaaaaaaaaaaaaaaaaaaaaaaaaaaaaaaaaaaaaaaaaaaaaaaaaaa

SEQ ID NO: 30238 - RNA, 1724 nt, Artificial Sequence
  mRNA product Design a-1 (A100) comprising derived and/or modified sequence from LASV(G502-SLE-2009;Clade IV)__AIT17126__GPCmut6 (opt4)
aggagagucccgcagucggcguccagcggcucugcuuguucgugugugugucguugcaggccuuauucaagcuuaccaugggccagaucgugaccuucuuccaggaggugccccacgugaucgaggaggugaugaacaucgugcugaucgcccugagcauccuggccgugcugaagggccuguacaacuucgccaccugcggccuggugggccugcugaccuuccugcugcugugcggcagaagcugcaccaccggccuguacaagggcguguacgagcugcagacccuggagcugaacauggagacccugaacaugugcaugccccugagcugcaccaagaacaacagccaccacuacaucauggugggcaacgagaccggccuggagcugacccugaccaacaccagcaucaucaaccacaaguucugcaaccugagcgacgcccacaagaagaaccuguacgaccacgcccugaugagcaucaucagcaccuuccaccugagcauccccaacuucaaccaguacgaggccaugagcugcgacuucaacggcggcaagaucagcgugcaguacaaccugagccacagcuacgccggcgacgccgccgaccacugcggcaccguggccaacggcgugcugcagaccuucaugagaauggccuggggcggcagcuacaucgcccuggacagcggcagaggcagaugggacugcaucaugaccagcuaccaguaccugaucauccagaacaccaccugggaggaccacugccaguucagcagacccagccccaucggcuaccugggccugcugagccagagaaccagagacaucuacaucagcagaagacugcugggcaccuucaccuggacccugagcgacagcgagggcaaggacacccccggcggcuacugccugaccagauggaugcugaucgaggccgagcugaagugcuucggcaacaccgccguggccaagugcaacgagaagcacgacgaggaguucugcgacaugcugagacuguucgacuucugcaagcaggccauccagagacugaaggcccccgcccagaugagcauccagcugaucaacaaggccgugaacgcccugaucaacgaccagcuggugaugaagaaccaccugagagacaucaugggcauccccuacugcaacuacagcagauacugguaccugaaccacaccaccaccggcagaaccagccugcccaagugcuggcuggugagcaacggcagcuaccugaacgagacccacuucagcgacgacaucgagcagcaggccgacaacaugaucaccgagaugcugcagaaggaguacauggagagacagggcaagaccccccugggccugguggaccuguucguguucagcaccagcuucuaccugaucagcaucuuccugcaccuggugaagauccccacccacagacacaucgugggcaagagcugccccaagccccacagacugaaccacaugggcaucugcagcugcggccuguacaagcagcccggcgugcccgugaaguggaagagaugaggacuagucccuguucccagagcccacuuuuuuuucuuuuuuugaaauaaaauagccugucuuucagaucuaaaaaaaaaaaaaaaaaaaaaaaaaaaaaaaaaaaaaaaaaaaaaaaaaaaaaaaaaaaaaaaaaaaaaaaaaaaaaaaaaaaaaaaaaaaaaaaaaaaa

SEQ ID NO: 30239 - RNA, 1724 nt, Artificial Sequence
  mRNA product Design a-1 (A100) comprising derived and/or modified sequence from LASV(G733-SLE-2010;Clade IV)__AIT17154__GPCmut6 (opt4)
aggagagucccgcagucggcguccagcggcucugcuuguucgugugugugucguugcaggccuuauucaagcuuaccaugggccagaucgugaccuucuuccaggaggugccccacgugaucgaggaggugaugaacaucgugcugaucgcccugagcauccuggccgugcugaagggccuguacaacuucgccaccugcggcaucgugggccuggugagcuuccugcugcugugcggcagaagcugcaccaccagccuguacaagggcguguacgagcugcagacccuggagcugaacauggagacccugaacaugugcaugccccugagcugcaccaagaacaacagccaccacuacaucauggugggcaacgagaccggccuggagcugacccugaccaacaccagcaucaucaaccacaaguucugcaaccugagcgacgcccacaagaagaaccuguacgaccacgcccugaugagcaucaucagcaccuuccaccugagcauccccaacuucaaccaguacgaggccaugagcugcgacuucaacggcggcaagaucagcgugcaguacaaccugagccacagcuacgccggcgacgccgccaaccacugcggcaccaucgccaacggcgugcugcagaccuucaugagaauggccuggggcggcagcuacaucgcccuggacagcggcagagacagaugggacugcaucaugaccagcuaccaguaccugaucauccagaacaccaccugggaggaccacugccaguucagcagacccagccccaucggcuaccugggccugcugagccagagaaccagagacaucuacaucagcagaagacugcugggcaccuucaccuggacccugagcgacagcgagggcaaggacacccccggcggcuacugccugaccagauggaugcugaucgaggccgagcugaagugcuucggcaacaccgccguggccaagugcaacgagaagcacgacgaggaguucugcgacaugcugagacuguucgacuucugcaagcaggccauccagagacugaaggcccccgcccagaugagcauccagcugaucaacaaggccgugaacgcccugaucaacgaccagcugaucaugaagaaccaccugagagacaucaugggcauccccuacugcaacuacagcaaguacugguaccugaaccacaccaccaccggcaagaccagccugcccaagugcuggcuggugagcaacggcagcuaccugaacgagacccacuucagcgacgacaucgagcagcaggccgacaacaugaucaccgagaugcugcagaaggaguacauggagagacagggcaagaccccccugggccugguggaccuguucguguucagcaccagcuucuaccugaucagcaucuuccugcaccuggugaagauccccacccacagacacguggugggcaagagcugccccaagccccacagacugaaccacaugggcaucugcagcugcggccuguacggccagcccggcgugcccgugaaguggaagagaugaggacuagucccuguucccagagcccacuuuuuuuucuuuuuuugaaauaaaauagccugucuuucagaucuaaaaaaaaaaaaaaaaaaaaaaaaaaaaaaaaaaaaaaaaaaaaaaaaaaaaaaaaaaaaaaaaaaaaaaaaaaaaaaaaaaaaaaaaaaaaaaaaaaaa

SEQ ID NO: 30240 - RNA, 1724 nt, Artificial Sequence
  mRNA product Design a-1 (A100) comprising derived and/or modified sequence from MOPV/LASV reassortant(IGS-1;Clade IV)__AFY05576__GPCmut6 (opt4)
aggagagucccgcagucggcguccagcggcucugcuuguucgugugugugucguugcaggccuuauucaagcuuaccaugggccagaucgugaccuucuuccaggaggugccccacgugaucgaggaggugaugaacaucgugcugaucgcccugagcgugcuggccgugcugaagggccuguacaacuucgccaccugcggccuggugggccuggugaccuuccugcugcugugcggcagaagcugcaccaccagccuguacaagggcguguacgagcugcagacccuggagcugaacauggagacccugaacaugugcaugccccugagcugcaccaagaacaacagccaccacuacaucauggugggcaacgagaccggccuggagcugacccugaccaacaccagcaucaucaaccacaaguucugcaaccugagcgacgcccacaagaagaaccuguacgaccacgcccugaugagcaucaucagcaccuuccaccugagcauccccaacuucaaccaguacgaggccaugagcugcgacuucaacggcggcaagaucagcgugcaguacaaccugagccacagcuacgccggcgacgccgccaaccacugcggcaccguggccaacggcgugcugcagaccuucaugagaauggccuggggcggcagcuacaucgcccuggacagcggcagaggcaacugggacugcaucaugaccagcuaccaguaccugaucauccagaacaccaccugggaggaccacugccaguucagcagacccagccccaucggcuaccugggccugcugagccagagaaccagagacaucuacaucagcagaagacugcugggcaccuucaccuggacccugagcgacagcgagggcgaggacacccccggcggcuacugccugaccagauggaugcugaucgaggccgagcugaagugcuucggcaacaccgccguggccaagugcaacgagaagcacgacgaggaguucugcgacaugcugagacuguucgacuucugcaagcaggccauccagagacugaaggcccccgcccagaugagcauccagcugaucaacaaggccgugaacgcccugaucaacgaccagcugaucaugaagaaccaccugagagacaucaugggcauccccuacugcaacuacagcaaguacugguaccugaaccacaccaccaccggcagaaccagccugcccaagugcuggcuggugagcaacggcagcuaccugaacgagacccacuucagcgacgacaucgagcagcaggccgacaacaugaucaccgagaugcugcagaaggaguacauggagagacagggcaagaccccccugggccugguggaccuguucguguucagcaccagcuucuaccugaucagcaucuuccugcaccuggugaagauccccacccacagacacaucgugggcaagagcugccccaagccccacagacugaaccacaugggcaucugcagcugcggccuguacaagcagcccggcgugcccgugaaguggaagagaugaggacuagucccuguucccagagcccacuuuuuuuucuuuuuuugaaauaaaauagccugucuuucagaucuaaaaaaaaaaaaaaaaaaaaaaaaaaaaaaaaaaaaaaaaaaaaaaaaaaaaaaaaaaaaaaaaaaaaaaaaaaaaaaaaaaaaaaaaaaaaaaaaaaaa

SEQ ID NO: 30241 - RNA, 1724 nt, Artificial Sequence
  mRNA product Design a-1 (A100) comprising derived and/or modified sequence from LASV(LM765-SLE-2012;Clade IV)__AIT17814__GPCmut6 (opt4)
aggagagucccgcagucggcguccagcggcucugcuuguucgugugugugucguugcaggccuuauucaagcuuaccaugggccagaucgugaccuucuuccaggaggugccccacgugaucgaggaggugaugaacaucgugcugaucgcccugagcauccuggccgugcugaagggccuguacaacuucgccaccugcggccuggugggccuggugaccuuccugcugcugugcggcagaagcugcaccaccagccuguacaagggcguguacgagcugcagacccuggagcugaacauggagacccugaacaugugcaugccccugagcugcaccaagaacaacagccaccacuacaucauggugggcaacgagaccggccuggagcugacccugaccaacaccagcaucaucgaccacaaguucugcaaccugagcgacgcccacagaaagaaccuguacgaccacgcccugaugagcaucaucagcaccuuccaccugagcauccccaacuucaaccaguacgaggccaugagcugcgacuucaacggcggcaagaucagcgugcaguacaaccugagccacagcuacgccaaggacgccgccgaccacugcggcaccguggccaacggcgugcugcagaccuucaugagaauggccuggggcggcagcuacaucgcccuggacagcggcagaggcagaugggacugcaucaugaccagcuaccaguaccugaucauccagaacaccaccugggaggaccacugccaguucagcagacccagccccaucggcuaccugggccugcugagccagagaaccagagacaucuacaucagcagaagacugcugggcaccuucaccuggacccugagcgacagcgagggcaaggacacccccggcggcuacugccugaccagauggaugcugaucgaggccgagcugaagugcuucggcaacaccgccguggccaagugcaacgagaagcacgacgaggaguucugcgacaugcugagacuguucgacuucugcaagcaggccauccagagacugaaggcccccgcccagaugagcauccagcugaucaacaaggccgugaacgcccugaucaacgaccagcugaucaugaagaaccaccugagagacaucaugggcauccccuacugcaacuacagcaaguacugguaccugaaccacaccaccaccggcaagaccagccugcccaagugcuggcuggugagcaacggcagcuaccugaacgagacccacuucagcgacgacaucgagcagcaggccgacaacaugaucaccgagaugcugcagaaggaguacauggagagacagggcaagaccccccugggccugguggaccuguucguguucagcaccagcuucuaccugaucagcaucuuccugcaccuggugaagauccccacccacagacacaucgugggcaagcccugccccaagccccacagacugaaccacaugggcaucugcagcugcggccuguacaagcagcccggcgugcccgugaaguggaagagaugaggacuagucccuguucccagagcccacuuuuuuuucuuuuuuugaaauaaaauagccugucuuucagaucuaaaaaaaaaaaaaaaaaaaaaaaaaaaaaaaaaaaaaaaaaaaaaaaaaaaaaaaaaaaaaaaaaaaaaaaaaaaaaaaaaaaaaaaaaaaaaaaaaaaa

SEQ ID NO: 30242 - RNA, 1724 nt, Artificial Sequence
  mRNA product Design a-1 (A100) comprising derived and/or modified sequence from LASV(LM776-SLE-2012;Clade IV)__AIT17824__GPCmut6 (opt4)
aggagagucccgcagucggcguccagcggcucugcuuguucgugugugugucguugcaggccuuauucaagcuuaccaugggccagaucgugaccuucuuccaggaggugccccacgugaucgaggaggugaugaacaucgugcugaucgcccugagcauccuggccgugcugaagggccuguacaacuucgccaccugcggccuggugggccuggugaccuuccugcugcugugcggcagaagcugcaccaccagcguguacaagggcguguacgagcugcagacccuggagcugaacauggagacccugaacaugugcaugccccugagcugcaccaagaacaacagccaccacuacaucauggugggcaacgagaccggccuggagcugacccugaccaacaccagcaucaucaaccacaaguucugcaaccugagcgacgcccacaagaagaaccuguacgaccacgcccugaugagcaucaucagcaccuuccaccugagcauccccaacuucaaccaguacgaggccaugagcugcgacuucaacggcggcaagaucagcgugcaguacaaccugagccacagcuacgccggcgacgccgccaaccacugcggcaccguggccaacggcgugcugcagaccuucaugagaauggccuggggcggcagcuacaucgcccuggacagcggccacggcaagugggacugcaucaugaccagcuaccaguaccugaucauccagaacaccaccugggaggaccacugccaguucagcagacccagccccaucggcuaccugggccugcugagccagagaaccagagacaucuacaucagcagaagacugcugggcaccuucaccuggacccugagcgacagcgagggcaaggacacccccggcggcuacugccugaccagauggaugcugaucgaggccgagcugaagugcuucggcaacaccgccguggccaagugcaacgagaagcacgacgaggaguucugcgacaugcugagacuguucgacuucugcaagcaggccauccagagacugaaggcccccgcccagaugagcauccagcugaucaacaaggccgugaacgcccugaucaacgaccagcugaucaugaagaaccaccugagagacaucaugggcauccccuacugcaacuacagcaaguacugguaccugaaccacaccaccaccggcaagaccagccugcccaagugcuggcuggugagcaacggcagcuaccugaacgagacccacuucagcgacgacaucgagcagcaggccgacaacaugaucaccgagaugcugcagaaggaguacauggagagacagggcaagaccccccugggccugguggaccuguucguguucagcaccagcuucuaccugaucagcaucuuccugcaccuggugaagauccccacccacagacacaucgugggcaagagcugccccaagccccacagacugaaccacaugggcaucugcagcugcggccuguacaagcagcccggcgugcccgugagauggaagagaugaggacuagucccuguucccagagcccacuuuuuuuucuuuuuuugaaauaaaauagccugucuuucagaucuaaaaaaaaaaaaaaaaaaaaaaaaaaaaaaaaaaaaaaaaaaaaaaaaaaaaaaaaaaaaaaaaaaaaaaaaaaaaaaaaaaaaaaaaaaaaaaaaaaaa

SEQ ID NO: 30243 - RNA, 1724 nt, Artificial Sequence
  mRNA product Design a-1 (A100) comprising derived and/or modified sequence from LASV(Mad39;Clade IV)__ANH09722__GPCmut6 (opt4)
aggagagucccgcagucggcguccagcggcucugcuuguucgugugugugucguugcaggccuuauucaagcuuaccaugggccagaucgugaccuucuuccaggaggugccccacgugaucgaggaggugaugaacaucgugcugaucgcccugagcauccuggccgugcugaagggccuguacaacguggccaccugcggccugaucggccuggugaccuuccugcugcugugcggcagaagcugcaccaccacccuguacaagggcguguacgagcugcaggcccuggagcugaacauggagacccugaacaugugcaugccccugagcugcaccaagaacaacagccaccacuacaucagagugggcaacgagaccggccuggagcugacccugaccaacaccagccugaucaaccacaaguucugcaaccugagcgacgcccacaagaagaaccuguacgaccacgcccugaugagcaucaucagcaccuuccaccugagcauccccaacuucaaccaguacgaggccaugagcugcgacuucaacgacggcaagaucagcgugcaguacaaccugagccacaccuacgccggcgacaccgccaaccacugcggcaccguggccaacggcgugcugcagaccuucaugagaauggccuggggcggcagcuacaucgcccuggacagcggcagaggcggcugggacugcaucaugaccagcuaccaguaccugaucauccagaacaccaccugggaggaccacugccaguucagcagacccagccccaucggcuaccugggccugcugagccagagaaccagagacaucuacaucagcagaagacugcugggcaccuucaccuggacccugagcgacagcgagggcaaggacacccccggcggcuacugccugaccagauggaugcugaucgaggccgagcugaagugcuucggcaacaccgccguggccaagugcaacgagaagcacgacgaggaguucugcgacaugcugagacuguucgacuucugcaagcaggccauccagagacugaaggcccccgcccagaugagcauccagcugaucaacaaggccgugaacgcccugaucaacgaccagcugaucaugaagaaccaccugagagacaucaugggcauccccuacugcaacuacagcaaguacugguaccugaaccacaccgugaccggcaagaccagccugcccaagugcuggcuggugagcaacggcagcuaccugaacgagacccacuucagcgacgacaucgagcagcaggccgacaacaugaucaccgagaugcugcagaaggaguacauggagagacagggcaagaccccccugggccugguggaccuguucguguucagcaccagcuucuaccugaucagcaucuuccugcaccuggugaagauccccacccacagacacguggugggcaagcccugccccaagccccacagacugaaccacaugggcaucugcagcugcggcuucuacaagcagcccggcgugcccgugagauggaagagaugaggacuagucccuguucccagagcccacuuuuuuuucuuuuuuugaaauaaaauagccugucuuucagaucuaaaaaaaaaaaaaaaaaaaaaaaaaaaaaaaaaaaaaaaaaaaaaaaaaaaaaaaaaaaaaaaaaaaaaaaaaaaaaaaaaaaaaaaaaaaaaaaaaaaa

SEQ ID NO: 30244 - RNA, 1724 nt, Artificial Sequence
  mRNA product Design a-1 (A100) comprising derived and/or modified sequence from LASV(Z0947-SLE-2011;Clade IV)__AIT17840__GPCmut6 (opt4)
aggagagucccgcagucggcguccagcggcucugcuuguucgugugugugucguugcaggccuuauucaagcuuaccaugggccagaucgugaccuucuuccaggaggugccccacgugaucgaggaggugaugaacaucgugcugaucgcccugagcauccuggccgugcugaagggccuguacaacuucgccaccugcggccuggugggccuggugaccuuccugcugcugugcggcagaagcugcaccaucagccuguacaagggcguguacgagcugcagacccuggagcugaacauggagacccugaacaugugcaugccccugagcugcaccaagaacaacagccaccacuacaucauggugggcaacgagaccggccuggagcugacccugaccaacaccagcaucaucaaccacaaguucugcaaccugagcgacgcccacaagaagaaccuguacgaccacgcccugaugagcaucaucagcaccuuccaccugagcauccccaacuucaaccaguacgaggccaugagcugcgacuucaacggcggcaagaucagcgugcaguacaaccugagccacagcuacgccggcgacgccgccaaccacugcggcaccguggccaacggcgugcugcagaccuucaugagaauggccuggggcggcagcuacaucgcccuggacagcggcagagacagaugggacugcaucaugaccagcuaccaguaccugaucauccagaacaccaccugggaggaccacugccaguucagcagacccagccccaucggcuaccugggccugcugagccagagaaccagagacaucuacaucagcagaagacugcugggcaccuucaccuggacccugagcgacagcgagggcaaggacacccccggcggcuacugccugaccagauggaugcugaucgaggccgagcugaagugcuucggcaacaccgccguggccaagugcaacgagaagcacgacgaggaguucugcgacaugcugagacuguucgacuucugcaagcaggccauccagagacugaaggcccccgcccagaugagcauccagcugaucaacaaggccgugaacgcccugaucaacgaccagcugaucaugaagaaccaccugagagacaucaugggcauccccuacugcaacuacagcaaguacugguaccugaaccacaccaccaccggcaagaccagccugcccaagugcuggcuggugagcaacggcagcuaccugaacgagacccacuucagcgacgacaucgagcagcaggccgacaacaugaucaccgagaugcugcagaaggaguacauggagagacagggcaagaccccccugggccugguggaccuguucguguucagcaccagcuucuaccugaucagcaucuuccugcaccuggugaagauccccacccacagacacaucgugggcaagcccugccccaagccccacagacugaaccacaugggcaucugcagcugcggccuguacaagcagcccggcgugcccgugaaguggaagagaugaggacuagucccuguucccagagcccacuuuuuuuucuuuuuuugaaauaaaauagccugucuuucagaucuaaaaaaaaaaaaaaaaaaaaaaaaaaaaaaaaaaaaaaaaaaaaaaaaaaaaaaaaaaaaaaaaaaaaaaaaaaaaaaaaaaaaaaaaaaaaaaaaaaaa

SEQ ID NO: 30245 - RNA, 1724 nt, Artificial Sequence
  mRNA product Design a-1 (A100) comprising derived and/or modified sequence from LASV(Josiah;Clade IV)__NP_694870__GPCmut6 (opt5)
aggagagucccgcagucggcguccagcggcucugcuuguucgugugugugucguugcaggccuuauucaagcuuaccaugggccagaucgugaccuucuuucaagaggucccccacguuauugaagaggugaugaacaucgugcugauugcccucagcguccuggcugugcuuaaggggcuguacaauuucgccacaugcggacucguuggccuggugacguuucuucugcucugugggagauccugcaccacaucucuguauaaaggagucuacgaacugcagacccucgagcugaacauggaaacacuuaauauguguaugccucugagcugcaccaagaacaauucccaucacuauaucauggugggcaacgagacagggcucgagcugacccuuacgaauaccucuauuaucaaccauaaauucuguaaucugagcgacgcgcacaagaaaaaccucuacgaucaugcucugauguccaucauuucuacauuucaccugagcaucccgaauuucaaccaguaugaagccauguccugcgacuuuaauggaggcaagauuagcguucaguacaaccucucucacuccuaugccggcgaugcugccaaucauugugggaccguggcuaacggaguccugcaaacauucaugcggauggccuggggcgggagcuacaucgcgcuugacucuggacgcggcaacugggauugcauuaugaccuccuaccaguaucugaucauucagaauacgacaugggaggaccacugucaguuuagcagacccucuccuaucggguaccucggacugcuuucccaacggacccgcgauaucuauauuagcagacggcugcucggcacauucaccuggacccuguccgacucugaaggcaaggauacacccgggggauacugccugacgcgcuggaugcucaucgaggccgagcugaaauguuuuggcaacaccgcuguggccaagugcaaugaaaaacaugacgaggaguucugcgauaugcuuagacuguuugacuucuguaagcaggcuauucagcggcucaaagccccugcgcagaugagcauccaacugauuaacaaggccgugaaugcucuuaucaacgaucagcugaucaugaagaaucaccuccgcgacauuauggggauccccuauugcaacuacuccaaauauugguaccugaaucacacaaccacaggaagaaccagccugccuaaguguuggcucgucucuaacggcuccuaccugaaugaaacgcauuucagcgacgauauugaacagcaagccgacaacaugaucacagagaugcuucagaaagaguauauggaacggcaggggaagaccccgcugggacucguugaucuguuuguguucucuaccagcuuuuaccugauuuccaucuuccuucaccucgugaaaauccccacacaucgccacauugucggcaagucuugcccuaaaccccauagacugaaucacaugggcaucuguagcugcgggcuguauaagcagccuggagugcccguuaaguggaaacggugaggacuagucccuguucccagagcccacuuuuuuuucuuuuuuugaaauaaaauagccugucuuucagaucuaaaaaaaaaaaaaaaaaaaaaaaaaaaaaaaaaaaaaaaaaaaaaaaaaaaaaaaaaaaaaaaaaaaaaaaaaaaaaaaaaaaaaaaaaaaaaaaaaaaa

SEQ ID NO: 30246 - RNA, 1721 nt, Artificial Sequence
  mRNA product Design a-1 (A100) comprising derived and/or modified sequence from LASV(LP;Clade I)__AAF86701__GPCmut6 (opt5)
aggagagucccgcagucggcguccagcggcucugcuuguucgugugugugucguugcaggccuuauucaagcuuaccaugggccagaucauuaccuucuuucaagaggugccccacgucaucgaagagguuaugaacauugugcugaucgcccucagccugcuugcuauucugaaggggcucuacaauaucgccacaugcggaaucauuggccugguggcguuccuuuuucugugugggaaauccugcucucucacgcugaagggaggcuaugaacugcagacccucgagcugaacauggaaacacuuaauauguguaugccucugagcugcaccaaaaacuccucucaucacuacaucagagucgggaaugagacaggacucgagcugacccuuacaaacaccagcauuaucaaucauaaguucuguaaccuguccgacgcucacaaaaagaaucucuaugaucaugcccugaugucuauuaucagcacguuucaccuguccauuccgaacuucaaucaguacgaagccaugagcugcgacuuuaacggcggcaagaucucugugcaguauaaucucucccacagcuacgcuggggaugccgcugagcauuguggaaccguugccaacggcgugcugcaaacauucaugcggauggcguggggagggcgcuauaucgcccuugacucuggcaaagggaauugggauugcauuaugaccuccuaccaguaccugaucauucagaacacaaccugggaagaccacugucaguuuagcagacccucuccuaucggauaucucggccugcuuucccaacggacgcgcgauauuuacaucagcagacggcugcucggcacauucaccuggacacuguccgacucugaggggaacgagacccccggaggcuauugccugacccgcuggaugcucaucgaagcugagcugaaguguuuugggaauacagccgucgcuaaaugcaacgaaaagcaugaugaggaguucugcgacaugcuuagacuguuugauuucuguaaacaggccauucggcgccucaaggcgccugcccagaugagcauccagcugauuaauaaggcugugaacgcccuuaucaaugaccaacugauuaugaaaaaccaccucagagauaucaugggaauccccuacugcaauuauuccaaguacugguaucugaaccacacgagcucuggccggaccucccugccuaaauguuggcucauuagcaaugggucuuaccugaacgaaacacaguucagcgacgacaucgagcagcaagcugauaauaugauuaccgaaaugcuucagaaggaguacaucgaacgccagggaaaaacaccgcugggccucguugacauuuuuaucuucuccaccucuuuuuaucugauuagcaucuuccugcaucuuaucaagauucccacgcacagacauaucgugggcaaaccuugccccaagccucaccggcucaaccauaugggggucuguuccugcggacuguacaagcaccccggcgugccgacaaaauggaagcgcugaggacuagucccuguucccagagcccacuuuuuuuucuuuuuuugaaauaaaauagccugucuuucagaucuaaaaaaaaaaaaaaaaaaaaaaaaaaaaaaaaaaaaaaaaaaaaaaaaaaaaaaaaaaaaaaaaaaaaaaaaaaaaaaaaaaaaaaaaaaaaaaaaaaaa

SEQ ID NO: 30247 - RNA, 1721 nt, Artificial Sequence
  mRNA product Design a-1 (A100) comprising derived and/or modified sequence from LASV(803213;Clade II)__AAF86703__GPCmut6 (opt5)
aggagagucccgcagucggcguccagcggcucugcuuguucgugugugugucguugcaggccuuauucaagcuuaccaugggccagaucauuaccuucuuucaagaggugccccacgucaucgaagagguuaugaacauugugcugaucgcccucagccugcuugcuauucugaaggggaucuacaauguggccacaugcggacucuucggccugaucuccuuucuucugcucugugggagaucuugcagcgucacguauaaaggaguguacgaacugcagacccuggagcucaacauggcgaaucugaacauguguaugccucuuuccugcacaaagaauaacucucaucacuauauuaugguuggcaaugaaaccgggcuggagcucacacugaccaacacaagcaucauuaaucauaaauucuguaaccuuuccgacgcucacaagaaaaaucuguacgaucaugcccucaugucuaucauuagcaccuuucaccuguccaucccgaacuucaaucaguaugaggccaugagcugcgacuuuaacggaggcaagauuucugugcaguacaaucugucccacagcuucgcugucgaugccgcuaaccauuguggcacgaucgccaacggggugcuccaaaccuuuaugcggauggcguggggaggcucuuauaucgcccuggacuccgggaagggaaauugggauugcauuaugacaagcuaccaguaccuuaucauucagaacaccacaugggaagaccacugucaguucucucgccccuccccuaucggcuaucuggggcuccugagccaaagaacccgggauauuuacaucucccgcagacuucugggaacguuuacauggacccucucugacagcgagggcaaugaagcucccggcggguauugccugacacgguggaugcugaucgaggccgagcucaaauguuucggaaacaccgcuguugccaagugcaaugaaaaacaugaugaggaauuuugcgacaugcugcgccuuuucgauuucuguaagcaggcgauuaaaagacugaagaccccugcccagauguccauccagcucauuaacaaggcugugaaugcccugaucaacgaccaacuuauuaugaaaaaucaucugcgggauaucaugggcauccccuacugcaacuauagccgcuacugguaucucaaucacacagucacggggaagaccucucugccuagauguuggcugguguccaacggaagcuaccucaaugagacacacuuuucugacgacauugaacagcaggcugauaacaugaucaccgagaugcugcaaaaagaguacauggaccggcagggcaagacaccgcuugggcugguggaucucuucgucuuuagcaccuccuucuaucugauuucuaucuuucugcaccuuguuaaaauucccacgcaucgccacaucgugggaaagccuugccccaaaccucauagacucaaucacaugggcauuuguagcugcggccuguacaagcaccccggggugccggucaaguggaaacggugaggacuagucccuguucccagagcccacuuuuuuuucuuuuuuugaaauaaaauagccugucuuucagaucuaaaaaaaaaaaaaaaaaaaaaaaaaaaaaaaaaaaaaaaaaaaaaaaaaaaaaaaaaaaaaaaaaaaaaaaaaaaaaaaaaaaaaaaaaaaaaaaaaaaa

SEQ ID NO: 30248 - RNA, 1721 nt, Artificial Sequence
  mRNA product Design a-1 (A100) comprising derived and/or modified sequence from LASV(GA391;Clade III)__CAA36645__GPCmut6 (opt5)
aggagagucccgcagucggcguccagcggcucugcuuguucgugugugugucguugcaggccuuauucaagcuuaccaugggccagaucgugaccuucuuucaagaggucccccacguuauugaagaggugaugaacaucgugcugauugcccucagcauccuggcuauucuuaaggggcuguacaaugucgccacaugcggacucaucggccuggugacguuccuucugcucuccgggagaucuuguagccugaucuauaaaggaaccuacgaacugcagacacucgagcugaacauggaaacccuuaauaugugcaugccucuguccuguacaaagaacaauucucaucacuauauucggguuggcaacgagaccgggcucgagcugacacuuaccaauacgagcauccugaaccauaaauuuugcaaucucuccgacgcgcacaagcgcaaccuguacgaucauucucugaugagcauuaucuccaccuuccaccucagcauuccgaauuuuaaccaguaugaagcuaugucuugugacuucaauggaggcaaaaucacagugcaguacaaccugucccacagcuuugccgucgaugccgcuggccauugcgggacccuugccaauggagugcugcaaacauucaugagaauggcuuggggcgggucuuauauugcccucgacuccggacggggcaacugggauuguaucaugaccagcuaccaguaccugaucauucagaacacgacaugggacgaucacugccaguuuucucgccccuccccuaucggguaucuuggacugcucagccaaagaacccgggacauuuacaucucccgcagacugcugggcacauucaccuggacccucucugauagcgagggcaaugaaacacccgggggauauugucugacgcgguggaugcuuauugaggcggagcugaagugcuuuggcaacaccgccguugcuaaguguaaugaaaaacaugacgaggaguucugcgauaugcuccgccuguuugacuucugcaagcaggccaucagacggcuuaaaaccccugcucagauguccauccagcugauuaacaaggccgugaaugcgcucaucaacgaucaacugauuaugaaaaaucaucugcgcgacaucauggggauucccuacuguaacuauagcagauacugguaucucaaucacacaucuacaggaaagaccucccugccucggugcuggcuuaucagcaacggcucuuaccugaaugaaacgaaguucagcgacgauaucgaacagcaggccgacaacaugauuacagagaugcuccaaaaagaguacaucgaucgccaggggaagaccccgcugggacuggucgaccuuuuuguguucuccaccucuuuuuaucucauuagcaucuuccugcaccuggugaaaauucccacacacagacauaucgucggcaagccuugucccaaaccucaccggcucaaucauaugggcauuugcuccugugggcuguacaagcagcccggaguuccggugagauggaaacgcugaggacuagucccuguucccagagcccacuuuuuuuucuuuuuuugaaauaaaauagccugucuuucagaucuaaaaaaaaaaaaaaaaaaaaaaaaaaaaaaaaaaaaaaaaaaaaaaaaaaaaaaaaaaaaaaaaaaaaaaaaaaaaaaaaaaaaaaaaaaaaaaaaaaaa

SEQ ID NO: 30249 - RNA, 1724 nt, Artificial Sequence
  mRNA product Design a-1 (A100) comprising derived and/or modified sequence from LASV(AV;Clade V)__CCA30314__GPCmut6 (opt5)
aggagagucccgcagucggcguccagcggcucugcuuguucgugugugugucguugcaggccuuauucaagcuuaccaugggccagaucgugaccuucuuucaagaggucccccacguuauugaagaggugaugaacaucgugcugauugcccucagcauccuggcuguccuuaaggggcuguacaauauugccacaugcggacucaucggccugaucacguuccuucugcucugugggagauccugcucuagcaaccuguauaaaggaguguacgaacugcagucccucgaccugaauauggagacccuuaacauguguaugccucugucuugcacaaagaauaacagccaucacuauauucggguuggcaaugauaccgggcucgaacugacacuuaccaacacauccauccugaaucauaaauuuuguaaccucucugacgcgcacaagaaagaucuguacgaccaugcucugaugagcauuaucuccaccuuccaccucagcauuccgaauuuuaaccaguaugaggccaugucuugcgauuucaauggaggcaagaucuccgugcaguacaaccugagccacucuuaugccauugacgcugccaaucauuguggcacggucgcuaacgggauccuucaaaccuuuaugcgcauggccuggggaggcuccuacaucgcgcuggauagcgggagaggaaacugggacugcauuaugacaucuuaccaguaucucaucauucagaauaccacaugggagaaccacugucaguucucccggcccagcccuaucggcuaccuggggcuucugucccaacgcaccagagauauuuauaucucucggcgccuccugggaacguuuacauggacccugagcgacuccgaaggcaaugccacacccggcggguacugccucaccagauggaugcugaucgaggcugaacuuaaguguuucggaaacaccgccguggcuaaaugcaaugagaagcaugaugaggaauuuugcgacaugcugcgccucuucgauuuuuguaaacaggccauuagccggcugaagucuccugcgcagauguccauccagcuuauuaacaaagccguuaaugcucugaucaacgaccaacucauuaugaagaaucaccugagagacaucaugggcauccccuauugcaacuacagcaaguauugguaccugaaucacacaauuacggggaaaaccucucucccuaaguguuggcuggugagcaacggauccuaccuuaaugagacacauuucucugaugacaucgaacagcaggccgauaacaugauuaccgagaugcugcaaaaagaauauauggagcggcagggcaagacaccgcucgggcuggucgaccuguucguguuuagcaccuccuucuaccuuaucagcauuuuucuccgccuggugaaaauccccacgcacagacauauugucggaaagccuugccccaaaccucaccggcugaaucauaugggcaucuguucuugcggccucuauaagcagcccgggguuccggugcgcuggaagagaugaggacuagucccuguucccagagcccacuuuuuuuucuuuuuuugaaauaaaauagccugucuuucagaucuaaaaaaaaaaaaaaaaaaaaaaaaaaaaaaaaaaaaaaaaaaaaaaaaaaaaaaaaaaaaaaaaaaaaaaaaaaaaaaaaaaaaaaaaaaaaaaaaaaaa

SEQ ID NO: 30250 - RNA, 1721 nt, Artificial Sequence
  mRNA product Design a-1 (A100) comprising derived and/or modified sequence from LASV(Togo/2016/7082;Clade VI)__AMR44577__GPCmut6 (opt5)
aggagagucccgcagucggcguccagcggcucugcuuguucgugugugugucguugcaggccuuauucaagcuuaccaugggccagaucauuaccuucuuucaagaggugccccacgucaucgaagagguuaugaacauugugcugaucgcccucagccugcuugcuauucugaaggggguguacaaugucgccacaugcggaaucaucggccucgugacguuccuguuucuuugugggagauccugcucucugauuuauaaaggaagcuacgaacuccagacccuggagcugaacauggaaacacucaauauguguaugccucuguccugcaccaagaacucuagccaucacuauauccggguuggcaaugagacagggcuugagcugacccucacaaacaccuccauuaucaaucauaaauucuguaaccugucugacgcgcacaagcgcaaucuuuacgaucaugcucugaugagcauucucuccacguuucaccugagcaucccgaacuucaaucaguaugaagccaugucuugcgacuuuaacggaggcaaaauuuccgugcaguacaaucugagccacgccuaugcugucgaugccgcugagcauuguggcaccguggccaacgggguucuccaaacauucaugagaauggcguggggaggcucuuacaucgcccuggacuccgggcggggaaauugggauugcaucaugaccagcuaccaguaucuuauuauccagaacacaaccugggaagaccacugucaguuuucucgccccuccccuauuggcuaccuggggcuccugagccaaagaacgcgggauaucuauauuucccgcagacuucugggaacauucaccuggacacucucugacagcgagggcaacgagacccccggcggguacugccugacccgguggaugcugaucgaagcugagcucaaguguuuuggaaauacagccguggcuaagugcaacgaaaaacaugaugaggaguucugcgacaugcugcgccuuuuugauuucuguaagcaggccauccagagacugaaauccccugcgcagaugagcauucaacucaucaauaaggccgucaacgcucugauuaaugaccagcuuaucaugaaaaaccaucugcgggauaugaugggcauucccuauugcaauuacucuaaguauugguaccucaaccacacguccagcgggcgcaccucucugccuaaguguuggcuggugagcaauggauccuaccucaacgaaacacacuucucugacgacaucgagcagcaagccgauaauaugaucaccgaaaugcugcagaaagaguauauugacagacagggcaagacaccgcuugggcugguggaucucuuugucuucagcaccuccuuuuaccugaucagcauuuuccugcaccuuaucaaaauucccacgcaucggcacaucguuggaaagccuugccccaaaccucaucgccucaaccacaugggcauuuguucuugcggccuguauaagcagcccggggugccgacaagauggaaacggugaggacuagucccuguucccagagcccacuuuuuuuucuuuuuuugaaauaaaauagccugucuuucagaucuaaaaaaaaaaaaaaaaaaaaaaaaaaaaaaaaaaaaaaaaaaaaaaaaaaaaaaaaaaaaaaaaaaaaaaaaaaaaaaaaaaaaaaaaaaaaaaaaaaaa

SEQ ID NO: 30251 - RNA, 1721 nt, Artificial Sequence
  mRNA product Design a-1 (A100) comprising derived and/or modified sequence from LASV(KAK-428;Clade n.d. (VII))__ANH09740__GPCmut6 (opt5)
aggagagucccgcagucggcguccagcggcucugcuuguucgugugugugucguugcaggccuuauucaagcuuaccaugggccagaucgugaccuucuuucaagaggucccccacguuauugaagaggugaugaacaucgugcugauugcccucagccugcuugcuauccugaaggggcucuacaauuucgccacaugcggagucauuggccugaucacguuucuucugcucugugggagauccugcucugcgaccuauaaaggacaguacgaacugcagacacuggagcucaacauggaaagccugaauauguguaugccucuuuccugcaccaagaacaauucucaucacuauauccgggcuggcaacaauacagggcuggagcucacccugacaaacaccagcauuaucucccauaaauucuguaaucuuucugacgcccacaagaaaaaccuguacgaucauacgcucaugagcauuaucaccacauuucaccuguccauuccgaauuucaaccaguaugaggccaugagcugcgacuuuaauggaggcaagaucucuauucaauacaaccugucccacagcuaugcuggcgaugccgcucagcauugugggaccguggccaauggaguucuccagacauucaugcgcauggcguggggcgggucuuaccuggcccuugacuccggaagacggggcugggauugcaucaucagcucuuaccaguaucugauuauccaaaacaccacgugggacgaucacugucaguuuucccgccccagcccuauuggguaccucggauucgugucccagaagacaagagacaucuauauuucucggcgccugcuuggcaccuuuacauggacccugagcgauuccgaaggccaugacaugcccgggggauacugccucaccagauggaugcugaucgaggcugaucugaaauguuucggcaacacagccgucgcuaagugcaaugaaaaacacgacgaggaguuuugcgauauguggcgccucuucgacuucuguaagcaggccauccaacggcugaaagcgccugcccagaugaacauucagcuuaucaauaaggcugugaacgcccugauuaaugaccaacucaugaugaagaaccaccugagagauaucauggggauucccuauugcaauuacagcaaauuuugguaucuuaacaauacgaccacaggacggaccucucugccucgcuguuggcucaucuccaacggcagcuaccugaaugaaacacauuucucugacgauaucgagcagcaggcugacaacaugauuaccgaaaugcugcagaaggaguacauggauagacaagggaaaacgccgcucggacugguugaccuuuuuguguucagcacauccuuuuaucugaucaccauuuuccuccaccuggucaagauccccacccaucggcacauugugggcaaaccuugccccaagccucaucgccugaaucacaugggcaucuguucuugcgggcuuuacaaacagcccggagugccggucagauggaagcggugaggacuagucccuguucccagagcccacuuuuuuuucuuuuuuugaaauaaaauagccugucuuucagaucuaaaaaaaaaaaaaaaaaaaaaaaaaaaaaaaaaaaaaaaaaaaaaaaaaaaaaaaaaaaaaaaaaaaaaaaaaaaaaaaaaaaaaaaaaaaaaaaaaaaa

SEQ ID NO: 30252 - RNA, 1721 nt, Artificial Sequence; identical to SEQ ID NO: 30246
  mRNA product Design a-1 (A100) comprising derived and/or modified sequence from LASV(Pinneo-NIG-1969;Clade I)__AIT17836__GPCmut6 (opt5)

SEQ ID NO: 30253 - RNA, 1721 nt, Artificial Sequence
  mRNA product Design a-1 (A100) comprising derived and/or modified sequence from LASV(ISTH0009-NIG-2011;Clade II)__AIT17404__GPCmut6 (opt5)
aggagagucccgcagucggcguccagcggcucugcuuguucgugugugugucguugcaggccuuauucaagcuuaccaugggccagaucauuaccuucuuucaagaggugccccacgucaucgaagagguuaugaacauugugcugaucgcccucagccugcuugcuauucugaaggggaucuacaauguggccacaugcggacucuucggccuggucuccuuucuucugcucugugggagaucuugcagcacgaccuauaaaggaguguacgaacugcagacacuggagcucgacauggcgucccugaacauguguaugccucuuucuugcaccaagaauaacagccaucacuauaucaugguuggcaaugaaacagggcuggagcucacccugacaaacaccuccauuaucaaucauaaauucuguaaccuuucugaugcucacaagaaaaaucuguacgaccaugcccucaugagcauuaucuccacguuucaccugagcauuccgaacuucaaucaguaugaggccaugucuugcgauuuuaacggaggcaagaucuccgugcaguacaaucugagccacgcuuaugccgucgacgcugccaaccauuguggcaccauugcgaauggggugcuccaaacauucaugcggauggccuggggaggcucuuacaucgcucuggauuccgggaagggaagcugggacugcaucaugaccucuuaccaguaucuuauuauccagaacacaaccugggaagaucacugucaguuuucccgccccagcccuauuggcuaccuggggcuccugucccaaagaacgcgggacaucuauauuucucgcagacuucugggaacauucaccuggacacucagcgauuccgagggcaacgaaacccccggcggguacugccugacccgguggaugcugaucgaggccgagcucaaauguuuuggaaauacagcuguugccaagugcaacgaaaaacaugacgaggaguucugcgauaugcugcgccuuuuugacuucuguaagcaggcgaucagacggcugaaaacgccugcccagaugagcauucagcucaucaauaaggcugugaacgcccugauuaaugaucaacuuaucaugaagaaccaucugcgcgacauuaugggcauccccuauugcaauuacucuaaauauugguaccucaaccacaccgucacagggaagaccucccugccuagauguuggcuggugagcaauggaucuuaccucaacgaaacacacuucagcgacgauaucgaacagcaggcugacaauaugauuaccgagcugcuucaaaaagaguauauggaucggcagggcaagacgccgcuggggcucguggaccuguuugucuucuccacaucuuuuuaccugaucagcauuuuccuucaccucaucaaaauucccacccaucgccacaucaccggaaagccuugccccaaaccucauagacugaaccacaugggcauuuguuccugcggccuguauaagcaccccgggguuccggugaaguggaaacggugaggacuagucccuguucccagagcccacuuuuuuuucuuuuuuugaaauaaaauagccugucuuucagaucuaaaaaaaaaaaaaaaaaaaaaaaaaaaaaaaaaaaaaaaaaaaaaaaaaaaaaaaaaaaaaaaaaaaaaaaaaaaaaaaaaaaaaaaaaaaaaaaaaaaa

SEQ ID NO: 30254 - RNA, 1721 nt, Artificial Sequence
  mRNA product Design a-1 (A100) comprising derived and/or modified sequence from LASV(ISTH2010-NIG-2012;Clade II)__AIT17482__GPCmut6 (opt5)
aggagagucccgcagucggcguccagcggcucugcuuguucgugugugugucguugcaggccuuauucaagcuuaccaugggccagaucauuaccuucuuucaagaggugccccacgucaucgaagagguuaugaacauugugcugaucgcccucagccugcuugcuauucugaaggggaucuacaauguggccacaugcggacucuucggccuggucuccuuucuucugcucugugggagaucuugcagcacgaccuauaaaggaguguacgaacugcagacacuggagcucgacauggcgucccugaacauguguaugccucuuucuugcaccaagaauaacagccaucacuauaucaugguuggcaaugaaacagggcuggagcucacccugacaaacaccuccauuaucaaucauaaauucuguaaccuuucugaugcucacaagaaaaaucuguacgaccaugcccucaugagcauuaucuccacguuucaccugagcauuccgaacuucaaucaguaugaggccaugucuugcgauuuuaacggaggcaagaucuccgugcaguacaaucugagccacgcuuaugccgucgacgcugccaaccauuguggcaccauugcgaauggggugcuccaaacauucaugcggauggccuggggaggcucuuacaucgcucuggauuccgggaagggaagcugggacugcaucaugaccucuuaccaguaucuuauuauccagaacauuacaugggaagaucacugucaguuuucccgccccagcccuaucggcuaccuggggcuccugucccaaagaacccgggacauuuauaucucucgcagacuucugggaacguucacauggacccucagcgauuccgagggcaacgaaacacccggcggguacugccugacccgguggaugcugaucgaggccgagcucaaauguuuuggaaauaccgcuguugccaagugcaacgaaaaacaugacgaggaguucugcgauaugcugcgccuuuuugacuucuguaagcaggcgauuagacggcugaaaacgccugcccagaugagcauccagcucauuaauaaggcugugaacgcccugaucaaugaucaacuuauuaugaagaaccaucugcgcgacaucaugggcauccccuauugcaauuacucuaaauauugguaccucaaccacacagucaccgggaagacaucccugccuagauguuggcuggugagcaauggaucuuaccucaacgaaacccacuucagcgacgauauugaacagcaggcugacaauaugaucacagagcugcuucaaaaagaguauauugaucggcagggcaagaccccgcuggggcucguggaccuguuugucuucuccacgucuuuuuaccugaucagcauuuuccuucaccucguuaaaauccccacacaucgccacguggugggaaagccuugccccaaaccucauagacugaaccacaugggcauuuguuccugcggccuguauaagcaccccggggucccggugaaguggaaacggugaggacuagucccuguucccagagcccacuuuuuuuucuuuuuuugaaauaaaauagccugucuuucagaucuaaaaaaaaaaaaaaaaaaaaaaaaaaaaaaaaaaaaaaaaaaaaaaaaaaaaaaaaaaaaaaaaaaaaaaaaaaaaaaaaaaaaaaaaaaaaaaaaaaaa

SEQ ID NO: 30255 - RNA, 1721 nt, Artificial Sequence
  mRNA product Design a-1 (A100) comprising derived and/or modified sequence from LASV(Lassa virus/H.sapiens-wt/NGA/2015/ISTH_0543;Clade II)__AVO03639__GPCmut6 (opt5)
aggagagucccgcagucggcguccagcggcucugcuuguucgugugugugucguugcaggccuuauucaagcuuaccaugggccagaucauuaccuucuuucaagaggugccccacgucaucgaagagguuaugaacauugugcugaucgcccucagccugcuugcuauucugaaggggaucuacaauguggccacaugcggacucuucggccuggucuccuuucuucugcucugugggagaucuugcagcacgaccuauaaaggaguguacgaacugcagacacuggagcucgacauggcgaaccugaauauguguaugccucuuuccugcaccaagaacaauucucaucacuauaucaugguuggcaacgaaacagggcuggagcucacccugacaaauaccagcauuaucaaccauaaauucuguaaucuuuccgaugcucacaagaaaaaccuguacgaccaugcccucaugucuauuaucagcacguuucaccuguccauuccgaauuucaaccaguaugaggccaugagcugcgauuuuaauggaggcaagaucucugugcaguacaaccugucccacaccuaugcugucgacgccgcuaaucauuguggcacaauugccaacggggugcuccaaaccuucaugcggauggcguggggaggcagcuacaucgcccuggauucugggaagggauccugggacugcaucaugacaagcuaccaguaucuuguuauucagaacaccacgugggaagaucacugucaguuuucucgccccuccccuaucggcuaccuggggcuccugagccaaagaacacgggacauuuauaucucccgcagacuucugggaaccuucacauggacccucucugauagcgagggcaaugaaacccccggcggguacugccugacacgguggaugcugauugaggcugagcucaaauguuuuggaaacacggccguggcuaagugcaaugaaaaacaugacgaggaguucugcgauaugcugcgccuuuuugacuucuguaagcaggccaucagacggcugaaaaccccugcgcagauguccauccagcucauuaacaaggccgucaaugcucugaucaacgaucaacuuauuaugaagaaucaucugcgcgacaucaugggcauucccuauugcaacuacagcaaauauugguaccucaaucacacagugaccgggaagacaucucugccuagauguuggcugguguccaacggaagcuaccucaaugaaacccacuucucugacgauaucgaacagcaggccgacaacaugaucacggagcugcuucaaaaagaguauauugaucggcagggcaagacaccgcuggggcucgucgaccuguuuguuuucagcaccuccuuuuaccugaucucuauuuuccuucaccucgugaaaauccccacccaucgccacauuacaggaaagccuugccccaaaccucauagacugaaucacaugggcaucuguagcugcggccuguauaagcaccccggggugccggucaaguggaaacggugaggacuagucccuguucccagagcccacuuuuuuuucuuuuuuugaaauaaaauagccugucuuucagaucuaaaaaaaaaaaaaaaaaaaaaaaaaaaaaaaaaaaaaaaaaaaaaaaaaaaaaaaaaaaaaaaaaaaaaaaaaaaaaaaaaaaaaaaaaaaaaaaaaaaa

SEQ ID NO: 30256 - RNA, 1721 nt, Artificial Sequence
  mRNA product Design a-1 (A100) comprising derived and/or modified sequence from LASV(Lassa virus/H.sapiens-wt/NGA/2016/ISTH_0009;Clade II)__AVO03571__GPCmut6 (opt5)
aggagagucccgcagucggcguccagcggcucugcuuguucgugugugugucguugcaggccuuauucaagcuuaccaugggccagaucauuaccuucuuucaagaggugccccacgucaucgaagagguuaugaacauugugcugaucgcccucagccugcuugcuauucugaaggggaucuacaauguggccacaugcggacuccugggccuugucuccuuccugcuccugugugggagaucuugcagcacgaccuauaaaggaguguacgaacugcagacacucgagcuggacauggcgucccuuaacauguguaugccucugucuugcaccaagaauaacagccaucacuauaucaugguuggcaaugaaacagggcucgagcugacccuuacaaacaccuccauuaucaaucauaaauuuuguaaccugucugaugcucacaagaaaaaucucuacgaccaugcccugaugagcauuaucuccacguuccaccugagcauuccgaacuuuaaucaguaugaggccaugucuugcgauuucaacggaggccggaucuccgugcaguacaaucucagccacucuuaugcugucgacgccgcuaaccauuguggcaccauugccaauggggugcugcaaacauuuaugcgcauggcguggggaggcuccuacaucgcccuugauagcgggaagggaucuugggacugcaucaugaccuccuaccaguaucugauuauccagaacacaaccugggaagaucacugucaguucagcagacccuccccuauuggcuaccucgggcugcuuucucaacggacgcgcgacaucuauauuagcagacggcugcucggaacauuuaccuggacacuguccgauagcgagggcaacgaaacccccggcggguacugccugacccgcuggaugcucaucgaggcugagcugaaguguuucggaaauacagccguugcuaaaugcaacgaaaagcaugacgaggaauuuugcgauaugcuuagacuguucgacuuuuguaaacaggccauccggcgccucaagacgccugcgcagaugucuauucagcugaucaauaaagccgugaacgcucuuauuaaugaucaacugaucaugaagaaccaccucagagacauuaugggcauccccuauugcaauuacuccaaguauugguaccugaaccacaccgucacagggaaaaccagccugccucgguguuggcucgugucuaauggaagcuaccugaacgagacacauuucuccgacgauaucgaacagcaggccgacaauaugauuaccgagcuucugcaaaaggaguauaucgaucgccagggcaaaacgccgcucgggcugguggaccuguucgucuuuucuaccagcuucuaccuuauuuccaucuuucuccaccugguuaagauucccacacauagacacaucaccggaaaaccuugccccaagccucaucggcugaaccacaugggcauuuguagcugcggccucuauaaucaccccggggugccggugaaauggaagcgcugaggacuagucccuguucccagagcccacuuuuuuuucuuuuuuugaaauaaaauagccugucuuucagaucuaaaaaaaaaaaaaaaaaaaaaaaaaaaaaaaaaaaaaaaaaaaaaaaaaaaaaaaaaaaaaaaaaaaaaaaaaaaaaaaaaaaaaaaaaaaaaaaaaaaa

SEQ ID NO: 30257 - RNA, 1721 nt, Artificial Sequence
  mRNA product Design a-1 (A100) comprising derived and/or modified sequence from LASV(Lassa virus/H.sapiens-wt/NGA/2016/ISTH_0017;Clade II)__AVO03567__GPCmut6 (opt5)
aggagagucccgcagucggcguccagcggcucugcuuguucgugugugugucguugcaggccuuauucaagcuuaccaugggccagaucauuaccuucuuucaagaggugccccacgucaucgaagagguuaugaacauugugcugaucgcccucagccugcuugcuauucugaaggggaucuacaauguggccacaugcggacucuucggccuggucuccuuucuucugcucugugggagaucuugcagcacgaccuauaaaggaguguacgaacugcagacacuggagcucgacauggcgucccugaacauguguaugccucuuucuugcaccaagaauaacagccaucacuauaucaugguuggcaaugaaacagggcuggagcucacccugacaaacaccuccauuaucaaucauaaauucuguaaccuuucugaugcucacaagaaaaaucuguacgaccaugcccucaugagcauuaucuccacguuucaccugagcauuccgaacuucaaucaguaugaggccaugucuugcgauuuuaacggaggcaagaucuccgugcaguacaaucugagccacaccuaugcuauugacgccgcuaaccauuguggcacaaucgccaaugggguccuccaaaccuucaugcggauggcguggggaggcucuuacaucgcccuggauuccgggaagggaagcugggacugcauuaugacaucuuaccaguaucuuaucauucagaacaccacgugggaagaucacugucaguuuucccgccccagcccuaucggcuaccuggggcuccugucccaaagaacacgggacauuuauaucucucgcagacuucugggaaccuucacauggacccucagcgauuccgagggcaacgaaacccccggcggguacugccugacacgguggaugcugaucgaggcugagcucaaauguuuuggaaauacggccguggcuaagugcaacgaaaaacaugacgaggaguucugcgauaugcugcgccuuuuugacuucuguaagcaggccauuagacggcugaaaaccccugcgcagaugagcauccagcucauuaauaaggccguuaacgcucugaucaaugaucaacuuauuaugaagaaccaucugcgcgacaucaugggcauccccuauugcaauuacucuaaauauugguaccucaaccacacagugaccgggaagacaucccugccuagauguuggcuggucagcaauggaucuuaccucaacgaaacccacuucagcgacgauauugaacagcaggccgacaauaugaucacggagcugcuucaaaaagaguauauggaucggcagggcaagacaccgcuggggcucguggaccuguuuguguucuccaccucuuuuuaccugauuagcaucuuccuucaccucguccgcauucccacccauagacacguuaucggaaaaccuugccccaagccucaucggcugaaccacaugggcauuuguuccugcggccuguauaaacaccccggggugccggugaaguggaagcgcugaggacuagucccuguucccagagcccacuuuuuuuucuuuuuuugaaauaaaauagccugucuuucagaucuaaaaaaaaaaaaaaaaaaaaaaaaaaaaaaaaaaaaaaaaaaaaaaaaaaaaaaaaaaaaaaaaaaaaaaaaaaaaaaaaaaaaaaaaaaaaaaaaaaaa

SEQ ID NO: 30258 - RNA, 1721 nt, Artificial Sequence
  mRNA product Design a-1 (A100) comprising derived and/or modified sequence from LASV(Lassa virus/H.sapiens-wt/NGA/2018/ISTH_0959;Clade II)__AVV65099__GPCmut6 (opt5)
aggagagucccgcagucggcguccagcggcucugcuuguucgugugugugucguugcaggccuuauucaagcuuaccaugggccagaucauuaccuucuuucaagaggugccccacgucaucgaagagguuaugaacauugugcugaucgcccucagccugcuugcuauucugaaggggaucuacaauguggucacaugcggacucuucggccugguguccuuucuucugcucugugggagaucuugcagcacgaccuauaaaggaguuuacgaacugcagacacuggagcucgacauggccucccugaacauguguaugccucuuucuugcaccaagaauaacagccaucacuauaucauggugggcaaugaaacagggcuggagcucacccugacaaacaccuccauuaucaaucauaaauucuguaaccuuucugaugcgcacaagaaaaaucuguacgaccaugcucucaugagcauuaucuccacguuucaccugagcauuccgaacuucaaucaguaugaggccaugucuugcgauuuuaacggaggcaagaucuccguccaguacaaucugagccacgccuaugcuauugacgccgcuaaccauuguggcaccaucgccaauggggugcuccaaacauucaugcggauggcguggggaggcucuuacaucgcccuggauuccgggaagggaagcugggacugcauuaugaccucuuaccaguaucuuaucauucagaacacaaccugggaagaucacugucaguuuucccgccccagcccuaucggcuaccuggggcuccugucccaaagaacgcgggacauuuauaucucucgcagacuucugggaacauucaccuggacacucagcgauuccgagggcaacgaaacccccggcggguacugccugacccgguggaugcugaucgaggcugagcucaaauguuuuggaaauacagccguugcuaagugcaacgaaaaacaugacgaggaguucugcgauaugcugcgccuuuuugacuucuguaagcaggccauuagacggcugaaaacgccugcgcagaugagcauccagcucauuaauaaggccgugaacgcucugaucaaugaucaacuuauuaugaagaaccaucugcgcgacaucaugggcauccccuauugcaauuacucuaaauauugguaccucaaccacaccgucacagggaagaccucccugccuagauguuggcuggugagcaauggaucuuaccucaacgaaacacacuucagcgacgauauugaacagcaggccgacaauaugaucaccgagcugcuucaaaaagaguauauugaucggcagggcaagacgccgcuggggcucguggaccuguuugucuucuccacaucuuuuuaccugaucagcauuuuccuucaccucguuaaaauccccacccaucgccacgugauuggaaagccuugccccaaaccucauagacugaaccacaugggcaucuguuccugcggccuguauaagcaccccggggugccggucaaguggaaacggugaggacuagucccuguucccagagcccacuuuuuuuucuuuuuuugaaauaaaauagccugucuuucagaucuaaaaaaaaaaaaaaaaaaaaaaaaaaaaaaaaaaaaaaaaaaaaaaaaaaaaaaaaaaaaaaaaaaaaaaaaaaaaaaaaaaaaaaaaaaaaaaaaaaaa

SEQ ID NO: 30259 - RNA, 1721 nt, Artificial Sequence
  mRNA product Design a-1 (A100) comprising derived and/or modified sequence from LASV(LASV003-NIG-2008;Clade II)__AIT17580__GPCmut6 (opt5)
aggagagucccgcagucggcguccagcggcucugcuuguucgugugugugucguugcaggccuuauucaagcuuaccaugggccagaucauuaccuucuuucaagaggugccccacgucaucgaagagguuaugaacauugugcugaucgcccucagccugcuugcuauucugaaggggaucuacaauguggccacaugcggacucuucggccuggucuccuuucuucugcucugugggagaucuugcagcacgaccuauaaaggaguguacgaacugcagacacuggagcucgacauggcgucccugaacauguguaugccucuuucuugcaccaagaauaacagccaucacuauaucaugguuggcaaugaaacagggcuggagcucacccugacaaacaccuccauuaucaaucauaaauucuguaaccuuucugaugcucacaagaaaaaucuguacgaccaugcccucaugagcauuaucuccacguuucaccugagcauuccgaacuucaaucaguaugaggccaugucuugcgauuuuaacggaggcaagaucuccgugcaguacaaucugagccacaccuaugcugucgacgccgcuaaccauuguggcacaauugccaauggggugcuccaaaccuucaugcggauggcguggggaggcucuuacaucgcccuggauuccgggaagggaagcugggacugcaucaugacaucuuaccaguaucuuauuauccagaacaccacgugggaagaucacugucaguuuucccgccccagcccuauuggcuaccuggggcuccugucccaaagaacacgggacaucuauauuucucgcagacuucugggaaccuucacauggacccucagcgauuccgagagcaacgaaacccccggcggcuacugccugacacgguggaugcugaucgaggcugagcucaaauguuuugggaauacggccguugcuaagugcaacgaaaaacaugacgaggaguucugcgauaugcugcgccuuuuugacuucuguaagcaggccaucagacggcugaaagcgccugcccagaugucuauucagcucaucaauaaggcugugaacgcccugauuaaugaucaacuuaucaugaagaaccaucugcgcgacauuaugggaauccccuauugcaauuacuccaaauauugguaccucaaccacaccgucacaggcagaaccagccugccucgguguuggcuggugucuaaugggagcuaccucaacgaaacacacuucuccgacgauaucgaacagcaggcugacaauaugauuaccgagcugcuucaaaaggaguauauggaucgccagggaaaaacgccgcugggccucguggaccuguuugucuucucuaccagcuuuuaccugaucuccauuuuccuucaccucguuaagauccccacacauagacacgugauugggaaaccuugccccaagccucaucggcugaaccacaugggaaucuguagcugcggccuguauaaacaccccggcgugccggucaaguggaagcgcugaggacuagucccuguucccagagcccacuuuuuuuucuuuuuuugaaauaaaauagccugucuuucagaucuaaaaaaaaaaaaaaaaaaaaaaaaaaaaaaaaaaaaaaaaaaaaaaaaaaaaaaaaaaaaaaaaaaaaaaaaaaaaaaaaaaaaaaaaaaaaaaaaaaaa

SEQ ID NO: 30260 - RNA, 1721 nt, Artificial Sequence
  mRNA product Design a-1 (A100) comprising derived and/or modified sequence from LASV(LASV035-NIG-2009;Clade II)__AIT17588__GPCmut6 (opt5)
aggagagucccgcagucggcguccagcggcucugcuuguucgugugugugucguugcaggccuuauucaagcuuaccaugggccagaucauuaccuucuuucaagaggugccccacgucaucgaagagguuaugaacauugugcugaucgcccucagccugcuugcuauucugaaggggaucuacaauguggccacaugcggacucuucggccuggucuccuuucuucugcucugugggagaucuugcagcacgaccuauaaaggaguguacgaacugcagacacuggagcucgacauggcgucccugaacauguguaugccucuuucuugcaccaagaauaacagccaucacuauaucaugguuggcaaugaaacagggcuggagcucacccugacaaacaccuccauuaucaaucauaaauucuguaaccuuucugaugcucacaagaaaaaucuguacgaccaugcccucaugagcauuaucuccacguuucaccugagcauuccgaacuucaaucaguaugaggccaugucuugcgauuuuaacggaggcaagaucuccgugcaguacaaucugagccacgcuuaugccgucgacgcugccaaccauuguggcaccauugcgaauggggugcuccaaacauucaugcggauggccuggggaggcucuuacaucgcucuggauuccgggaagggaagcugggacugcaucaugaccucuuaccaguaucuuauuauccagaacacaaccugggaagaucacugucaguuuucccgccccagcccuauuggcuaccuggggcuccugucccaaagaacgcgggacaucuauauuucucgcagacuucugggaacauucaccuggacacucagcgauuccgagggcaacgaaacccccggcggguacugccugacccgguggaugcugaucgaggccgagcucaaauguuuuggaaauacagcuguugccaagugcaacgaaaaacaugacgaggaguucugcgauaugcugcgccuuuuugacuucuguaagcaggcgaucagacggcugaaagccccugcucagaugagcauucagcucaucaauaaggccgugaacgcucugauuaaugaucaacuuaucaugaagaaccaucugcgcgacauuaugggcauccccuauugcaauuacucuaaauauugguaccucaaccacacggucaccgggaagacaucccugccuagauguuggcuggugagcaauggaucuuaccucaacgaaacccacuucagcgacgauaucgaacagcaggccgacaauaugauuacagagcugcuucaaaaagaguauaucgaucggcagggcaagaccccgcuggggcucguggaccuguuugucuucuccacgucuuuuuaccugauuagcaucuuccuucaccucguuaaaauucccacacaucgccacgugaucggaaagccuugccccaaaccucauagacugaaccacaugggcauuuguuccugcggccuguauaagcaccccggggugccggucaaguggaaacggugaggacuagucccuguucccagagcccacuuuuuuuucuuuuuuugaaauaaaauagccugucuuucagaucuaaaaaaaaaaaaaaaaaaaaaaaaaaaaaaaaaaaaaaaaaaaaaaaaaaaaaaaaaaaaaaaaaaaaaaaaaaaaaaaaaaaaaaaaaaaaaaaaaaaa

SEQ ID NO: 30261 - RNA, 1721 nt, Artificial Sequence
  mRNA product Design a-1 (A100) comprising derived and/or modified sequence from LASV(LASV1000-NIG-2009;Clade II)__AIT17782__GPCmut6 (opt5)
aggagagucccgcagucggcguccagcggcucugcuuguucgugugugugucguugcaggccuuauucaagcuuaccaugggccagaucauuaccuucuuucaagaggugccccacgucaucgaagagguuaugaacauugugcugaucgcccucagccugcuugcuauucugaaggggaucuacaauguggccacaugcggacucuucggccuggucuccuuucuucugcucugugggagaucuugcagcacgaccuauaaaggaguguacgaacugcagacacuggagcucgacauggcgucccugaacauguguaugccucuuucuugcaccaagaauaacagccaucacuauaucaugguuggcaaugaaacagggcuggagcucacccugacaaacaccuccauuaucaaucauaaauucuguaaccuuucugaugcucacaagaaaaaucuguacgaccaugcccucaugagcauuaucuccacguuucaccugagcauuccgaacuucaaucaguaugaggccaugucuugcgauuuuaacggaggcaagaucuccgugcaguacaaucugagccacaccuaugcugucgacgccgcuaaccauuguggcacaauugccaauggggugcuccaaaccuucaugcggauggcguggggaggcucuuacaucgcccuggauuccgggaagggaagcugggacugcaucaugacaucuuaccaguaucuuauuauccagaacaccacgugggaagaucacugucaguuuucccgccccagcccuauuggcuaccuggggcuccugucccaaagaacacgggacaucuauauuucucgcagacuucugggaaccuucacauggacccucagcgauuccgagggcaacgaaacccccggcggguacugccugacacgguggaugcugaucgaggcugagcucaaauguuuuggaaauacggccguugcuaagugcaacgaaaaacaugacgaggaguucugcgauaugcugcgccuuuuugacuucuguaagcaggccaucaaaagacugaagaccccugcgcagaugagcauucagcucaucaauaaggccgugaacgcucugauuaaugaucaacuuaucaugaaaaaccaucugcgggacauuaugggcauccccuauugcaauuacucuaaguauugguaccucaaccacacagucaccgggaaaacaucccugccucgcuguuggcuggugagcaauggaucuuaccucaacgaaacccacuucagcgacgauaucgaacagcaggccgacaauaugauuacggagcugcuucaaaaggaguauaucgauagacagggcaaaacaccgcuggggcucguggaccuguuugucuucuccaccucuuuuuaccugauuagcaucuuccuucaccucguuaagauucccacccaucggcacguggugggaaaaccuugccccaagccucaucgccugaaccacaugggcaucuguuccugcggccuguauaagcaccccggggucccggugaaauggaagagaugaggacuagucccuguucccagagcccacuuuuuuuucuuuuuuugaaauaaaauagccugucuuucagaucuaaaaaaaaaaaaaaaaaaaaaaaaaaaaaaaaaaaaaaaaaaaaaaaaaaaaaaaaaaaaaaaaaaaaaaaaaaaaaaaaaaaaaaaaaaaaaaaaaaaa

SEQ ID NO: 30262 - RNA, 1721 nt, Artificial Sequence
  mRNA product Design a-1 (A100) comprising derived and/or modified sequence from LASV(LASV221-NIG-2010;Clade II)__AIT17624__GPCmut6 (opt5)
aggagagucccgcagucggcguccagcggcucugcuuguucgugugugugucguugcaggccuuauucaagcuuaccaugggccagaucauuaccuucuuucaagaggugccccacgucaucgaagagguuaugaacauugugcugaucgcccucagccugcuugcuauucugaaggggaucuacaauguggccacaugcggacucuucggccuggucuccuuucuucugcucugugggagaucuugcagcacgaccuauaaaggaguguacgaacugcagacacuggagcucgacauggcgucccugaacauguguaugccucuuucuugcaccaagaauaacagccaucacuauaucaugguuggcaaugaaacagggcuggagcucacccugacaaacaccuccauuaucaaucauaaauucuguaaccuuucugaugcucacaagaaaaaucuguacgaccaugcccucaugagcauuaucuccacguuucaccugagcauuccgaacuucaaucaguaugaggccaugucuugcgauuuuaacggaggcaagaucuccgugcaguacaaucugagccacaccuaugcuauugacgccgcuaaccauuguggcacaaucgccaaugggguccuccaaaccuucaugcggauggcguggggaggcucuuacaucgcccuggauuccgggaagggaagcugggacugcauuaugacaucuuaccaguaucuuaucauucagaacaccacgugggaagaucacugucaguuuucccgccccagcccuaucggcuaccuggggcuccugucccaaagaacacgggacauuuauaucucucgcagacuucugggaaccuucacauggacccucagcgauuccgagggcaacgaaacccccggcggguacugccugacacgguggaugcugaucgaggcugagcucaaauguuuuggaaauacggccguggcuaagugcaacgaaaaacaugacgaggaguucugcgauaugcugcgccuuuuugacuucuguaagcaggccauuagacggcugaaaaccccugcgcagaugagcauccagcucauuaauaaggccguuaacgcucugaucaaugaucaacuuauuaugaagaaccaucugcgcgacaucaugggcauccccuauugcaauuacucuaaauauugguaccucaaccacacagugaccgggaagacaucccugccuagauguuggcuggucagcaauggaucuuaccucaacgaaacccacuucagcgacgauauugaacagcaggccgacaauaugaucacggagaugcugcaaaaagaguauauggaucggcagggcaagacaccgcuugggcugguggaccucuuuguguucuccaccucuuuuuaccugauuagcaucuuccugcaccuugucaaaauucccacccaucgccacguuaucggaaagccuugccccaaaccucauagacucaaccacaugggcauuuguuccugcggccuguauaagcaccccggggugccggugaaguggaaacggugaggacuagucccuguucccagagcccacuuuuuuuucuuuuuuugaaauaaaauagccugucuuucagaucuaaaaaaaaaaaaaaaaaaaaaaaaaaaaaaaaaaaaaaaaaaaaaaaaaaaaaaaaaaaaaaaaaaaaaaaaaaaaaaaaaaaaaaaaaaaaaaaaaaaa

SEQ ID NO: 30263 - RNA, 1721 nt, Artificial Sequence
  mRNA product Design a-1 (A100) comprising derived and/or modified sequence from LASV(LASV237-NIG-2010;Clade II)__AIT17638__GPCmut6 (opt5)
aggagagucccgcagucggcguccagcggcucugcuuguucgugugugugucguugcaggccuuauucaagcuuaccaugggccagaucauuaccuucuuucaagaggugccccacgucaucgaagagguuaugaacauugugcugaucgcccucagccugcuugcuauucugaaggggaucuacaauguggccacaugcggacucuucggccuggucuccuuucuucugcucugugggagaucuugcagcacgaccuauaaaggaguguacgaacugcagacacuggagcucgacauggcgucccugaacauguguaugccucuuucuugcaccaagaauaacagccaucacuauaucaugguuggcaaugaaacagggcuggagcucacccugacaaacaccuccauuaucaaucauaaauucuguaaccuuucugaugcucacaagaaagaccuguacgaucaugcccucaugagcauuaucuccacguuucaccugagcauuccgaauuucaaccaguaugaggccaugucuugcgacuuuaauggaggcaagaucuccgugcaguacaaccugagccacaccuaugcugucgaugccgcuaaucauuguggcacaauugccaacggggugcuccaaaccuucaugcggauggcguggggaggcucuuacaucgcccuggacuccgggaagggaagcugggauugcaucaugacaucuuaccaguaucuuauuauccagaauaccacgugggaagaccacugucaguuuucccgccccagcccuauuggcuaccuggggcuccugucccaaagaacacgggauaucuauauuucucgcagacuucugggaaccuucacauggacccucagcgacuccgagggcaacgaaacccccggcggguacugccugacacgguggaugcugaucgaggcugagcucaaauguuuuggaaacacggccguugcuaagugcaaugaaaaacaugaugaggaguucugcgacaugcugcgccuuuuugauuucuguaagcaggccaucagacggcugaaaaccccugcgcagaugagcauucagcucaucaacaaggccgugaaugcucugauuaacgaccaacuuaucaugaagaaucaucugcgcgacauuaugggcauccccuauugcaacuacucuaaauauugguaccucaaucacacagucaccgggaagacaucccugccuagauguuggcuggugagcaacggaucuuaccucaaugaaacccacuucagcgaugacaucgaacagcaggccgauaacaugauuacggagcugcuucaaaaagaguauauggaccggcagggcaagacaccgcuggggcucguggaucuguuugucuucuccaccucuuuuuaccugaucagcauuuuccuucaccucaucaaaauucccacccaucgccacaucacaggaaagccuugccccaaaccucauagacugaaucacaugggcauuuguuccugcggccuguauaagcaccccgggguuccggugaaguggaaacggugaggacuagucccuguucccagagcccacuuuuuuuucuuuuuuugaaauaaaauagccugucuuucagaucuaaaaaaaaaaaaaaaaaaaaaaaaaaaaaaaaaaaaaaaaaaaaaaaaaaaaaaaaaaaaaaaaaaaaaaaaaaaaaaaaaaaaaaaaaaaaaaaaaaaa

SEQ ID NO: 30264 - RNA, 1721 nt, Artificial Sequence
  mRNA product Design a-1 (A100) comprising derived and/or modified sequence from LASV(LASV253-NIG-2011;Clade II)__AIT17670__GPCmut6 (opt5)
aggagagucccgcagucggcguccagcggcucugcuuguucgugugugugucguugcaggccuuauucaagcuuaccaugggccagaucauuaccuucuuucaagaggugccccacgucaucgaagagguuaugaacauugugcugaucgcccucagccugcuugcuauucugaaggggaucuacaauguggccacaugcggacucuucggccuggucuccuuucuucugcucugugggagaucuugcagcacgaccuauaaaggaguguacgaacugcagacacuggagcucgacauggcgucccugaacauguguaugccucuuucuugcaccaagaauaacagccaucacuauaucaugguuggcaaugaaacagggcuggagcucacccugacaaacaccuccauuaucaaucauaaauucuguaaccuuucugaugcucacaagaaaaaucuguacgaccaugcccucaugagcauuaucuccacguuucaccugagcauuccgaacuucaaucaguaugaggccaugucuugcgauuuuaacggaggcaagaucuccgugcaguacaaucugagccacaccuaugcugucgacgccgcuaaccauuguggcacaauugccaauggggugcuccaaaccuucaugcggauggcguggggaggcucuuacaucgcccuggauuccgggaagggaagcugggacugcaucaugacaucuuaccaguaucuuauuauccagaacaccacgugggaagaucacugucaguuuucccgccccagcccuauuggcuaccuggggcuccugucccaaagaacacgggacaucuauauuucucgcagacuucugggaaccuucacauggacccucagcgauuccgagggcaacgaaacccccggcggguacugccugacacgguggaugcugaucgaggcugagcucaaauguuuuggaaauacggccguugcuaagugcaacgaaaaacaugacgaggaguucugcgauaugcugcgccuuuuugacuucuguaagcaggccaucagacggcugaaagcgccugcccagaugagcauucagcucaucaauaaggcugugaacgcccugauuaaugaucaacuuaucaugaagaaccaucugcgcgacauuaugggcauccccuauugcaauuacucuaaauauugguaccucaaccacaccgucacagggagaaccucccugccucgguguuggcuggugagcaauggaucuuaccucaacgaaacacacuucagcgacgauaucgaacagcaggcugacaauaugauuaccgagcugcuucaaaaggaguauaucgaucgccagggcaaaacgccgcuggggcucguggaccuguuugucuucuccacaucuuuuuaccugauuagcaucuuccuucaccucguuaagauucccacccauagacacaucauuggaaaaccuugccccaagccucaucggcugaaccacaugggcaucuguuccugcggccuguauaaacaccccggggugccggugaaguggaagcgcugaggacuagucccuguucccagagcccacuuuuuuuucuuuuuuugaaauaaaauagccugucuuucagaucuaaaaaaaaaaaaaaaaaaaaaaaaaaaaaaaaaaaaaaaaaaaaaaaaaaaaaaaaaaaaaaaaaaaaaaaaaaaaaaaaaaaaaaaaaaaaaaaaaaaa

SEQ ID NO: 30265 - RNA, 1721 nt, Artificial Sequence
  mRNA product Design a-1 (A100) comprising derived and/or modified sequence from LASV(LASV254-NIG-2011;Clade II)__AIT17674__GPCmut6 (opt5)
aggagagucccgcagucggcguccagcggcucugcuuguucgugugugugucguugcaggccuuauucaagcuuaccaugggccagaucauuaccuucuuucaagaggugccccacgucaucgaagagguuaugaacauugugcugaucgcccucagccugcuugcuauucugaaggggaucuacaauguggccacaugcggacucuucggccuggucuccuuucuucugcucugugggagaucuugcagcacgaccuauaaaggaguguacgaacugcagacacuggagcucgacaugaccaaccugaauauguguaugccucuuuccugcacaaagaacaauucucaucacuauaucaugguuggcaacgaaaccgggcuggagcucacacugaccaauacgagcauuaucaaccauaaauucuguaaucuuuccgaugcgcacaagaaaaaccuguacaaucaugcucucaugucuauuaucagcaccuuucaccuguccauuccgaacuucaaucaguaugaggccaugagcugcgacuuuaacggaggcaagaucucugugcaguacaaucugucccacagcuaugccgucgaugcugccaaccauuguggcacaauugcuaacggggugcuccaaaccuucaugcggauggccuggggaggcucuuacaucgcgcuggacuccgggaagggaaauugggauugcaucaugacaagcuaccaguaucuuauuauccagaacaccacgugggaagaccacugucaguuuucucgccccuccccuauuggcuaccuggggcuccugagccaaagaacacgggauaucuauauuucccgcagacuucugggaaccuucacauggacccucucugacagcgagggcaaugaaacccccggcggguacugccugacacgguggaugcugaucgaggccgagcucaaauguuuuggaaacacggcuguugccaagugcaaugaaaaacaugaugaggaguucugcgacaugcugcgccuuuuugauuucuguaagcaggcuaucagacggcugaaaaccccugcccaggcgaacauucagcucaucaauaaggccgugaacgcucugauuaaugaccaacuuaucaugaagaaccaucugcgcgauauuaugggcauccccuauugcaauuacuccaaauauugguaccucaaccacacagucaccgggaagacaagccugccuagauguuggcuggugucuaauggauccuaccucaacgaaacccacuucagcgacgacaucgaacagcaggccgauaauaugauuacggagcugcuucaaaaagaguauauggaccggcagggcaagacaccgcuggggcucguggaucuguuugucuucucuaccagcuuuuaccugaucuccauuuuccuucaccucguuaaaauccccacccaucgccacgugauuggaaagccuugccccaaaccucauagacugaaccacaugggcaucuguucuugcggccuguauaagcaccccggggugccggucaaguggaaacggugaggacuagucccuguucccagagcccacuuuuuuuucuuuuuuugaaauaaaauagccugucuuucagaucuaaaaaaaaaaaaaaaaaaaaaaaaaaaaaaaaaaaaaaaaaaaaaaaaaaaaaaaaaaaaaaaaaaaaaaaaaaaaaaaaaaaaaaaaaaaaaaaaaaaa

SEQ ID NO: 30266 - RNA, 1721 nt, Artificial Sequence
  mRNA product Design a-1 (A100) comprising derived and/or modified sequence from LASV(Nig08-A19;Clade III)__ADU56618__GPCmut6 (opt5)
aggagagucccgcagucggcguccagcggcucugcuuguucgugugugugucguugcaggccuuauucaagcuuaccaugggccagaucgugaccuucuuucaagaggucccccacguuauugaagaggugaugaacaucgugcugauugcccucagcauccuggcuauucuuaaggggcuguacaauaucgccacaugcggacucaucggccuggucacguuccuucugcucuccgggagaucuuguagcaugaccuauaaaggaguguacgaacugcagacacuggagcucaacaugaauacccugaacaugugcaugccucuuuccuguacaaagaauaacucucaucacuauauuaugguuggcaaugaaaccgggcuggagcucacacugaccaacacgagccuucugcaucacaaauuuugcaaucucuccgacgcgcauaagaaaaaccuguacgaucacacccugaugucuaucauuagcacauuccaccucuccaucccgaauuuuaaccaguaugaggcuaugagcugugacuucaauggaggcaagauuaccgugcaguacaaccugucucauuccuaugccaucgaugccgcuaaucacugcggcacagucgccaacggggugcuucaaaccuuuaugcggauggcuuggggaggcagcuacauugcccuggacucugggcgcggaaagugggauuguaucaugacguccuaccaguaucucaucauucagaacacaaccugggaagaccauugccaguucagcagacccucuccuaucggcuaccuggggcuucugucccaacggacacgcgauauuuauaucagcagacggcuccugggaaccuuuaccuggacacuguccgacucugagggcaaugaaacgcccggcggguacugucucacccgcuggaugcugauugaggcggagcuuaaaugcuucggaaacacagccguugcuaaguguaaugaaaaacacgaugaggaauuuugcgacaugcugagacucuucgauuuuugcaagcaggccauccggcgccugaaagcuccugcccagaugagcauccagcuuauuaacaaggcggugaaugcccugaucaacgaccaacucauuaugaagaaucaccugagagauaucaugggcauucccuauuguaacuacuccaaauauugguaccugaaucauaccagcacagggcggaccucucucccucgcugcuggcuggucuccaacggaagcuaccuuaaugagacgcacuucucugacgacaucgaacagcaggcugauaacaugaucacagagaugcugcaaaaggaguaucucgacagacagggcaaaaccccgcuggggcugguggaucuuuucguguuuagcaccuccuucuaccucauuucuaucuuucugcaucuggucaagauucccacacaccggcauaucguuggaaaaccuugucccaagccucaccgccucaaucacaugggcauuugcagcuguggccuguauaaacagcccggggugccggugagauggaagcggugaggacuagucccuguucccagagcccacuuuuuuuucuuuuuuugaaauaaaauagccugucuuucagaucuaaaaaaaaaaaaaaaaaaaaaaaaaaaaaaaaaaaaaaaaaaaaaaaaaaaaaaaaaaaaaaaaaaaaaaaaaaaaaaaaaaaaaaaaaaaaaaaaaaaa

SEQ ID NO: 30267 - RNA, 1724 nt, Artificial Sequence
  mRNA product Design a-1 (A100) comprising derived and/or modified sequence from LASV(G1180-SLE-2010;Clade IV)__AIT17168__GPCmut6 (opt5)
aggagagucccgcagucggcguccagcggcucugcuuguucgugugugugucguugcaggccuuauucaagcuuaccaugggccagaucgugaccuucuuucaagaggucccccacguuauugaagaggugaugaacaucgugcugauugcccucagcauccuggcuguccuuaaggggcuguacaauuucgccacaugcggacucgugggccugcuuacguuucugcuccugugugggagauccugcaccgcgucucgguauaaaggaguuuacgaacugcagacacucgagcugaacauggaaacccuuaauauguguaugccucugagcugcacaaagaacaauucccaucacuauauuauggugggcaacgagaccgggcucgagcugacacuuaccaauacgucuaucaucaaccauaaauucuguaaucugagcgacgcucacaagaaaaaccucuacgaucaugcccugauguccauuaucucuaccuuucaccugagcauuccgaauuucaaccaguaugaagccauguccugcgacuuuaauggaggcaagaucagcguccaguacaaccucucucacuccuaugcuggcgaugccgcuaaucauugugggacaguggccaacggaguucugcaaaccuucaugcgcauggcguggggcgggagcuacauugcccuugacucuggacacggcuccugggauugcaucaugacaagcuaccaguaucugauuauccagaacaccacgugggaggaccauugucaguuuucuagacccuccccuaucggguaccucggacugcuuagccaacggacacgcgauauuuauaucuccagacggcugcucggcaccuucacauggacccugucugacagcgaaggcaaggauacccccgggggauacugccugacacgcuggaugcucauugaggcugagcugaaauguuuuggcaauacggccguggcuaagugcaacgaaaaacacgacgaggaguucugcgauaugcuuagacuguuugacuucuguaagcaggccauccagcggcucaaagcgccugcccagauguccauucaacugaucaauaaggcugucaacgcccuuaucaaugaucagcugauuaugaagaaccaccuccgcgacaucauggggauucccuauugcaauuacagcaaauauugguaccugaaccauaccacaaccggaaagacaucucugccuaaauguuggcucguguccaauggcagcuaccugaacgaaacccacuucucugacgauaucgaacagcaagcugacaauaugauuacggagaugcuucagaaggaguauauggaaagacaggggaaaacaccgcugggacucguggaucuguuugucuucagcaccuccuuuuaccugaucucuaucuuccuucaucucguuaagauucccacccaccggcauaucgugggcaaaagcugcccuaagccccaccgccugaaccacaugggcauuuguuccugcgggcuguauaagcagccuggagugcccgucaaauggaagagaugaggacuagucccuguucccagagcccacuuuuuuuucuuuuuuugaaauaaaauagccugucuuucagaucuaaaaaaaaaaaaaaaaaaaaaaaaaaaaaaaaaaaaaaaaaaaaaaaaaaaaaaaaaaaaaaaaaaaaaaaaaaaaaaaaaaaaaaaaaaaaaaaaaaaa

SEQ ID NO: 30268 - RNA, 1724 nt, Artificial Sequence
  mRNA product Design a-1 (A100) comprising derived and/or modified sequence from LASV(G1442-SLE-2011;Clade IV)__AIT17180__GPCmut6 (opt5)
aggagagucccgcagucggcguccagcggcucugcuuguucgugugugugucguugcaggccuuauucaagcuuaccaugggccagaucgugaccuucuuucaagaggucccccacguuauugaagaggugaugaacaucgugcugauugcccucagcauccuggcuguccuuaaggggcuguacaauguggccacaugcggacucauuggccugguuacguuccuucugcucugugggagauccugcaccacaacccuguauaaaggaguguacgaacugcagacacucgagcugaacauggaaacccuuaauauguguaugccucugucuugcacaaagaacaauagccaucacuauauccgggucggcaacgagaccgggcucgagcugacgcuuaccaauacauccaucauuaaccauaaauuuuguaaucugucugacgcgcacaagaaaaaccucuacgaucaugcucugaugagcaucauuuccaccuuccaccugucuaucccgaauuuuaaccaguaugaagccaugagcugcgacuucaauggaggcaagauuuccgugcaguacaaccucagccacucuuaugccggcgaugcugccaaucauugugggacaguugcuaacggagugcugcaaaccuuuaugcgcauggccuggggcggguccuacaucgcgcuugacagcggaagaggcaacugggauugcauuaugacgucuuaccaguaucugaucauccagaauacaaccugggacgaucacugucaguucucccggcccagcccuauuggguaccucggacugcuuucucaacgcacaagagacgucuauaucucccggcgccugcucggcaccuuuaccuggacacugagcgauuccgagggcaaggacacgcccgggggauacugccugaccagauggaugcucauugaagccgagcugaaauguuucggcaacacagcuguggccaagugcaaugagaaacaugaugaagaguuuugcgacaugcuucggcuguucgauuuuuguaagcaggcuauccagcgccucaaagccccugcgcagaugucuauucaacugaucaacaaggccgugaaugcucuuaucaacgaccagcugauuaugaagaaucaccucagagacaucauggggauucccuauugcaacuacagcaaauauugguaccugaauaacaccgccacaggaaagaccucccugccuaaauguuggcucaucagcaauggcucuuaccugaacgaaacgcacuucuccgaugacauugagcaggaagcugauaauaugaucacagagaugcuucaaaaggaguauauggaacggcaggggaaaaccccgcugggacucgucgaccuguucguuuuuagcaccucuuucuaccugaucagcauuuuucuucaucucgugaagauccccacacaccgccauauugugggcaaauccugcccuaagccccacagacugaaccauaugggcaucuguucuugcgggcuguauaagcagccuggaguccccgugcgguggaaacgcugaggacuagucccuguucccagagcccacuuuuuuuucuuuuuuugaaauaaaauagccugucuuucagaucuaaaaaaaaaaaaaaaaaaaaaaaaaaaaaaaaaaaaaaaaaaaaaaaaaaaaaaaaaaaaaaaaaaaaaaaaaaaaaaaaaaaaaaaaaaaaaaaaaaaa

SEQ ID NO: 30269 - RNA, 1724 nt, Artificial Sequence
  mRNA product Design a-1 (A100) comprising derived and/or modified sequence from LASV(G3010-SLE-2013;Clade IV)__AIT17344__GPCmut6 (opt5)
aggagagucccgcagucggcguccagcggcucugcuuguucgugugugugucguugcaggccuuauucaagcuuaccaugggccagaucgugaccuucuuucaagaggucccccacguuauugaagaggugaugaacaucgugcugauugcccucagcauccuggcuguccuuaaggggcuguacaauuucgccacaugcggacucgugggccugguuacguuucuucugcucugugggagauccugcaccacaucucuguauaaaggaguguacgaacugcagacccucgagcugaacauggaaacacuuaauauguguaugccucugagcugcaccaagaacaauucccaucacuauauuauggucggcaacgagacagggcucgagcugacccuuacgaauaccucuaucaucaaccauaaauucuguaaucugagcgacgcgcacaagaaaaaccucuacaaucaugcucugauguccauuaucucuacauuucaccugagcauuccgaacuucaaucaguaugaagccauguccugcgauuuuaacggaggcaagaucagcgugcaguacaaucucucucacuccuaugccggcgacgcugccagccauugugggaccguugcuaacggagugcugcaaacauucaugcggauggccuggggcgggucuuacauugcgcuugauuccggauacggcaagugggacugcaucaugaccagcuaucaguaccugauuauccagaacacgacaugggaggaucacugucaguuuucucgccccuccccuaucggguaucucggacugcuuagccaaagaacccgggacauuuacaucucccgcagacugcucggcacauucaccuggacccugucugauagcgaaggcaaagacacacccgggggauauugccugacgcgguggaugcucauugaggccgagcugaaguguuuuggcaauaccgcugucgccaaaugcaacgaaaagcaugaugaggaguucugcgacaugcuucgccuguuugauuucuguaaacaggcuauccagagacucaagaccccugcccagauguccauucaacugaucaauaaggcggugaacgcccuuaucaaugaccagcugauuaugaaaaaccaccuccgggauaucauggggauucccuacugcaauuauagcaaguacugguaccugaaccacacaacaaccggaaaaacgucucugccuaaguguuggcucguguccaauggcagcuaucugaacgaaacacauuucucugacgacaucgaacagcaagcugauaauaugauuaccgagaugcuucagaaagaguacauggaacgccaggggaagaccccgcugggacucgucgaccuguuuguuuucagcacauccuuuuaucugaucucuaucuuccuucaccucgugaaaauucccacccauagacacaucgugggcaagagcugcccuaagccccaucggcugaaccacaugggcauuuguuccugcgggcuguacaaacagccuggaguccccgugcgcuggaagagaugaggacuagucccuguucccagagcccacuuuuuuuucuuuuuuugaaauaaaauagccugucuuucagaucuaaaaaaaaaaaaaaaaaaaaaaaaaaaaaaaaaaaaaaaaaaaaaaaaaaaaaaaaaaaaaaaaaaaaaaaaaaaaaaaaaaaaaaaaaaaaaaaaaaaa

SEQ ID NO: 30270 - RNA, 1724 nt, Artificial Sequence
  mRNA product Design a-1 (A100) comprising derived and/or modified sequence from LASV(G502-SLE-2009;Clade IV)__AIT17126__GPCmut6 (opt5)
aggagagucccgcagucggcguccagcggcucugcuuguucgugugugugucguugcaggccuuauucaagcuuaccaugggccagaucgugaccuucuuucaagaggucccccacguuauugaagaggugaugaacaucgugcugauugcccucagcauccuggcuguccuuaaggggcuguacaauuucgccacaugcggacucgugggccugcuuacguuucugcuccugugugggagauccugcaccacaggacuguauaaaggcguuuacgaacuccagacccuggagcuuaacauggaaacacugaauauguguaugccucucucuugcaccaagaacaauagccaucacuauauuaugguggggaacgagacaggacuggagcuuacccugacgaauaccuccaucaucaaccauaaauucuguaaucucucugacgcgcacaagaaaaaccuguacgaucaugcucugaugagcauuaucuccacauuucaccucucuauuccgaauuucaaccaguaugaagccaugagcugcgacuuuaauggcggcaagaucuccguccaguacaaccugagccacucuuaugccggggaugcugccgaccauuguggaaccguggcuaauggcguucuucaaacauucaugcggauggccuggggaggguccuacauugcgcuggauagcggccgcgggagaugggacugcaucaugaccucuuaccaguaucucauuauccagaacacgacaugggaggaucacugucaguuuucccggcccagcccuaucggauaccugggccuucugucucaacgcaccagagacauuuauaucucccggcgccuccugggcacauucaccuggacccugagcgauuccgaagggaaggacacacccggaggcuacugccucacgagauggaugcugauugaggccgagcuuaaauguuuugggaacaccgcuguggccaagugcaaugaaaaacaugaugaggaguucugcgacaugcugcggcucuuugauuucuguaagcaggcuauccagcgccugaaagccccugcgcagaugucuauucaacuuaucaacaaggccgucaaugcucugaucaacgaccagcucgugaugaagaaucaccugagagacauuaugggaauccccuauugcaacuacagccgguauugguaccugaaucacacaaccacaggccgcaccucccucccuaaauguuggcuggugagcaacgggucuuaccuuaaugaaacgcauuucuccgaugacauugaacagcaagccgauaacaugaucacagagaugcugcagaaggaguauauggaaagacagggaaaaaccccgcucggccuggucgaccuguuuguuuucagcaccucuuuuuaccuuauuagcaucuuccuccaccuggugaagauccccacacaucggcacauugugggcaaauccugcccuaagccccaucgccugaaucacauggggaucuguucuugcggacucuauaaacagccuggcguccccgugaaguggaagagaugaggacuagucccuguucccagagcccacuuuuuuuucuuuuuuugaaauaaaauagccugucuuucagaucuaaaaaaaaaaaaaaaaaaaaaaaaaaaaaaaaaaaaaaaaaaaaaaaaaaaaaaaaaaaaaaaaaaaaaaaaaaaaaaaaaaaaaaaaaaaaaaaaaaaa

SEQ ID NO: 30271 - RNA, 1724 nt, Artificial Sequence
  mRNA product Design a-1 (A100) comprising derived and/or modified sequence from LASV(G733-SLE-2010;Clade IV)__AIT17154__GPCmut6 (opt5)
aggagagucccgcagucggcguccagcggcucugcuuguucgugugugugucguugcaggccuuauucaagcuuaccaugggccagaucgugaccuucuuucaagaggucccccacguuauugaagaggugaugaacaucgugcugauugcccucagcauccuggcuguccuuaaggggcuguacaauuucgccacaugcggaauugugggccucguuuccuuucugcuucugugugggagaucuugcacgaccagccucuauaaaggaguguacgaacugcagacacuggagcucaacauggaaacccugaauauguguaugccucuuuccugcacaaagaacaauucucaucacuauaucauggucggcaacgagaccgggcuggagcucacacugaccaauacgagcaucauuaaccauaaauucuguaaucuuuccgacgcgcacaagaaaaaccuguacgaucaugcucucaugucuaucauuagcaccuuucaccuguccaucccgaauuucaaccaguaugaagccaugagcugcgacuuuaauggaggcaagauuucugugcaguacaaccugucccacagcuaugccggcgaugcugccaaucauugugggacaaucgcuaacggaguucuccaaaccuucaugcggauggccuggggcgggucuuacauugcgcuggacuccggacgcgauagaugggacugcaucaugacaagcuaccaguaucuuaucauucagaacaccacgugggaggaucacugucaguuuucucggcccuccccuaucggcuaccuggggcuccugagccaacgcacaagagacauuuauaucucccggcgccuucugggaaccuucacauggacccucucugauagcgaaggcaaggacacccccggcggguacugccugacaagauggaugcugauugaggccgagcucaaauguuuuggaaauacggcuguggccaagugcaacgaaaaacaugaugaggaguucugcgacaugcugcggcuuuuugauuucuguaagcaggcuauccagcgccugaaagccccugcgcagauguccauccaacucauuaauaaggccgucaacgcucugaucaaugaccagcuuauuaugaagaaccaccugagagacaucaugggcauucccuauugcaauuacagcaaauauugguaccucaaccacaccacaaccgggaagacaucucugccuaaauguuggcugguguccaauggaagcuaccucaacgaaacccauuucucugaugacaucgaacagcaagccgauaauaugaucacggagaugcugcagaaggaguauauggaacggcagggcaaaacaccgcuugggcugguggaccucuuugucuucagcaccuccuuuuaccugauuucuaucuuccugcaccuuguuaagauucccacccaucgccacguggugggaaaaagcugcccuaagccccauagacucaaccacaugggcaucuguuccugcggccuguaugggcagccuggaguccccgugaaguggaaacggugaggacuagucccuguucccagagcccacuuuuuuuucuuuuuuugaaauaaaauagccugucuuucagaucuaaaaaaaaaaaaaaaaaaaaaaaaaaaaaaaaaaaaaaaaaaaaaaaaaaaaaaaaaaaaaaaaaaaaaaaaaaaaaaaaaaaaaaaaaaaaaaaaaaaa

SEQ ID NO: 30272 - RNA, 1724 nt, Artificial Sequence
  mRNA product Design a-1 (A100) comprising derived and/or modified sequence from MOPV/LASV reassortant(IGS-1;Clade IV)__AFY05576__GPCmut6 (opt5)
aggagagucccgcagucggcguccagcggcucugcuuguucgugugugugucguugcaggccuuauucaagcuuaccaugggccagaucgugaccuucuuucaagaggucccccacguuauugaagaggugaugaacaucgugcugauugcccucagcguccuggcugugcuuaaggggcuguacaauuucgccacaugcggacucguuggccuggugacguuucuucugcucugugggagauccugcaccacaucucuguauaaaggagucuacgaacugcagacccucgagcugaacauggaaacacuuaauauguguaugccucugagcugcaccaagaacaauucccaucacuauaucauggugggcaacgagacagggcucgagcugacccuuacgaauaccucuauuaucaaccauaaauucuguaaucugagcgacgcgcacaagaaaaaccucuacgaucaugcucugauguccaucauuucuacauuucaccugagcaucccgaauuucaaccaguaugaagccauguccugcgacuuuaauggaggcaagauuagcguucaguacaaccucucucacuccuaugccggcgaugcugccaaucauugugggaccguggcuaacggaguccugcaaacauucaugcggauggccuggggcgggagcuacaucgcgcuugacucuggacgcggcaacugggauugcauuaugaccuccuaccaguaucugaucauucagaauacgacaugggaggaccacugucaguuuagcagacccucuccuaucggguaccucggacugcuuucccaacggacccgcgauaucuauauuagcagacggcugcucggcacauucaccuggacccuguccgacucugaaggcgaggauacacccgggggauacugccugacgcgcuggaugcucaucgaggccgaacugaaguguuuuggcaacaccgcuguggccaaaugcaaugagaagcaugacgaagaguucugcgauaugcuuagacuguuugacuucuguaaacaggcuauucagcggcucaaggccccugcgcagaugagcauccaacugauuaacaaagccgugaaugcucuuaucaacgaucagcugaucaugaagaaucaccuccgcgacauuauggggauccccuauugcaacuacuccaaguauugguaccugaaucacacaaccacaggaagaaccagccugccuaaauguuggcucgucucuaacggcuccuaccugaaugaaacgcauuucagcgacgauauugagcagcaagccgacaacaugaucacagagaugcuucagaaggaauauauggagcggcaggggaaaaccccgcugggacucguugaucuguuuguguucucuaccagcuuuuaccugauuuccaucuuccuucaccucgugaagauccccacacaucgccacauugucggcaaaucuugcccuaagccccauagacugaaucacaugggcaucuguagcugcgggcuguauaaacagccuggagugcccguuaaguggaagcggugaggacuagucccuguucccagagcccacuuuuuuuucuuuuuuugaaauaaaauagccugucuuucagaucuaaaaaaaaaaaaaaaaaaaaaaaaaaaaaaaaaaaaaaaaaaaaaaaaaaaaaaaaaaaaaaaaaaaaaaaaaaaaaaaaaaaaaaaaaaaaaaaaaaaa

SEQ ID NO: 30273 - RNA, 1724 nt, Artificial Sequence
  mRNA product Design a-1 (A100) comprising derived and/or modified sequence from LASV(LM765-SLE-2012;Clade IV)__AIT17814__GPCmut6 (opt5)
aggagagucccgcagucggcguccagcggcucugcuuguucgugugugugucguugcaggccuuauucaagcuuaccaugggccagaucgugaccuucuuucaagaggucccccacguuauugaagaggugaugaacaucgugcugauugcccucagcauccuggcuguccuuaaggggcuguacaauuucgccacaugcggacucgugggccugguuacguuucuucugcucugugggagauccugcaccacaucucuguauaaaggaguguacgaacugcagacccucgagcugaacauggaaacacuuaauauguguaugccucugagcugcaccaagaacaauucccaucacuauauuauggucggcaacgagacagggcucgagcugacccuuacgaauaccucuaucaucgaccauaaauucuguaaccugagcgaugcgcaccggaagaaucucuacgaccaugcucugauguccauuaucucuacauuucaccugagcauuccgaacuucaaucaguaugaagccauguccugcgauuuuaacggaggcaaaaucagcgugcaguacaaucucucucacuccuaugccaaggacgcugccgaucauuguggcaccguugcuaacggggugcugcaaacauucaugcgcauggccuggggaggcagcuacauugcgcuugacucugggagaggacggugggauugcaucaugaccuccuaccaguaucugauuauccagaauacgacaugggaggaccacugucaguuuagccgccccucuccuaucggcuaccucgggcugcuuucccaaagaacccgggauauuuauaucagccgcagacugcucggaacauucaccuggacccuguccgacucugaaggcaaggauacacccggcggguacugccugacgcgguggaugcucauugaggccgagcugaaauguuuuggaaacaccgcugucgccaagugcaacgaaaaacaugacgaggaguucugcgauaugcuucgccuguuugacuucuguaagcaggcuauccagagacucaaagccccugcgcagaugagcauucaacugaucaauaaggccgugaacgcucuuaucaaugaccagcugauuaugaagaaccaccuccgggauaucaugggcauucccuauugcaauuacuccaaauauugguaccugaaccacacaaccacagggaagaccagccugccuaaauguuggcucgugucuaauggauccuaccugaacgaaacgcauuucagcgacgauaucgaacagcaagccgacaauaugauuacagagaugcuucagaaggaguauauggaacgccagggcaaaaccccgcuggggcucgucgaucuguuuguuuucucuaccagcuuuuaccugaucuccaucuuccuucaccucgugaagauucccacacauagacacaucgugggaaaaccuugccccaagccucaucggcugaaccacaugggcauuuguucuugcggccuguauaagcagcccggggucccggugaaauggaagcgcugaggacuagucccuguucccagagcccacuuuuuuuucuuuuuuugaaauaaaauagccugucuuucagaucuaaaaaaaaaaaaaaaaaaaaaaaaaaaaaaaaaaaaaaaaaaaaaaaaaaaaaaaaaaaaaaaaaaaaaaaaaaaaaaaaaaaaaaaaaaaaaaaaaaaa

SEQ ID NO: 30274 - RNA, 1724 nt, Artificial Sequence
  mRNA product Design a-1 (A100) comprising derived and/or modified sequence from LASV(LM776-SLE-2012;Clade IV)__AIT17824__GPCmut6 (opt5)
aggagagucccgcagucggcguccagcggcucugcuuguucgugugugugucguugcaggccuuauucaagcuuaccaugggccagaucgugaccuucuuucaagaggucccccacguuauugaagaggugaugaacaucgugcugauugcccucagcauccuggcuguccuuaaggggcuguacaauuucgccacaugcggacucgugggccugguuacguuucuucugcucugugggagauccugcaccacaucuguguauaaaggagucuacgaacugcagacccuggagcucaacauggaaacacugaauauguguaugccucuuagcugcaccaagaacaauucccaucacuauauuauggugggcaacgagacagggcuggagcucacccugacgaauaccucuaucaucaaccauaaauucuguaaucuuagcgacgcgcacaagaaaaaccuguacgaucaugcucucauguccauuaucucuacauuucaccugagcauuccgaauuucaaccaguaugaagccauguccugcgacuuuaauggaggcaagaucagcguucaguacaaccugucucacuccuaugccggcgaugcugccaaucauugugggaccguggcuaacggaguccuccaaacauucaugcggauggccuggggcgggagcuacauugcgcuggacucuggacacggcaagugggauugcaucaugaccuccuaccaguaucuuauuauccagaacacgacaugggaggaccauugucaguuuagccgccccucuccuaucggguaccugggacuccugucccaaagaacccgggauauuuauaucagccgcagacuucugggcacauucaccuggacccucuccgacucugaaggcaaagauacacccgggggauacugccugacgcgguggaugcugauugaggccgagcucaaguguuuuggcaauaccgcuguggccaaaugcaacgaaaagcacgacgaggaguucugcgauaugcugcgccuuuuugacuucuguaaacaggcuauccagagacugaaggccccugcgcagaugagcauucaacucaucaauaaggccgugaacgcucugaucaaugaucagcuuauuaugaaaaaccaucugcgggacaucauggggauucccuauugcaauuacuccaaguauugguaccucaaccacacaaccacaggaaaaaccagccugccuaaguguuggcuggucucuaauggcuccuaccucaacgaaacgcacuucagcgacgauaucgaacagcaagccgacaauaugauuacagagaugcugcagaaagaguauauggaacgccaggggaagaccccgcuuggacugguugaucucuuuguguucucuaccagcuuuuaccugaucuccaucuuccugcaucuugugaaaauucccacacacagacauaucgucggcaagucuugcccuaagccccaccggcucaaccacaugggcauuuguagcugcgggcuguauaaacagccuggagugcccguucgcuggaagagaugaggacuagucccuguucccagagcccacuuuuuuuucuuuuuuugaaauaaaauagccugucuuucagaucuaaaaaaaaaaaaaaaaaaaaaaaaaaaaaaaaaaaaaaaaaaaaaaaaaaaaaaaaaaaaaaaaaaaaaaaaaaaaaaaaaaaaaaaaaaaaaaaaaaaa

SEQ ID NO: 30275 - RNA, 1724 nt, Artificial Sequence
  mRNA product Design a-1 (A100) comprising derived and/or modified sequence from LASV(Mad39;Clade IV)__ANH09722__GPCmut6 (opt5)
aggagagucccgcagucggcguccagcggcucugcuuguucgugugugugucguugcaggccuuauucaagcuuaccaugggccagaucgugaccuucuuucaagaggucccccacguuauugaagaggugaugaacaucgugcugauugcccucagcauccuggcuguccuuaaggggcuguacaauguggccacaugcggacucauuggccugguuacguuccuucugcucugugggagauccugcaccacaacccuguauaaaggaguguacgaacugcaggcgcucgagcugaacauggaaacacuuaauauguguaugccucugucuugcaccaagaacaauagccaucacuauauccgggucggcaacgagacagggcucgagcugacccuuacgaauaccucccugaucaaccauaaauuuuguaaucucucugacgcucacaagaaaaaccuguacgaucaugcccugaugagcauuaucuccacauuccaccucucuauuccgaauuuuaaccaguaugaagccaugagcugcgacuucaaugauggaaagaucuccgugcaguacaaccugagccacaccuaugcuggcgacacagccaaucauuguggcaccguugcuaacggggugcuucaaacguuuaugcgcauggccuggggaggcucuuacauugcgcuggauuccgggagaggaggcugggacugcaucaugacaagcuaccaguaucucauuauccagaacaccacaugggaggaucacugucaguucucucggcccuccccuaucggguaccugggacuucugagccaacgcaccagagacauuuauaucucucggcgccuccugggcaccuuuacauggacgcuguccgauagcgaaggcaaggacacccccgggggauacugccucacaagauggaugcugauugaggccgagcuuaaauguuucggcaauaccgcugucgccaagugcaacgaaaaacaugaugaggaauuuugcgacaugcugcgccucuucgauuuuuguaagcaggcuauccagcggcugaaagccccugcgcagauguccauucaacuuaucaauaaggccgugaacgcucugaucaaugaccagcucauuaugaagaaccaccugagagacaucauggggauucccuauugcaauuacucuaaauauugguaccugaaccacacagugaccggaaagacgagccucccuaaauguuggcuggucuccaauggcagcuaccuuaacgagacacauuucucugaugacaucgaacagcaagccgauaauaugauuaccgagaugcugcagaaggaguauauggaacggcaggggaaaaccccgcucggacugguugaccuguucguguuuuccaccagcuucuaccuuaucucuaucuuucuccaccuggugaagauucccacacaucgccacgucgugggcaaaccuugccccaagccucauagacugaaccacaugggcaucuguagcugcggguucuauaagcagcccggaguuccggugcgguggaaacgcugaggacuagucccuguucccagagcccacuuuuuuuucuuuuuuugaaauaaaauagccugucuuucagaucuaaaaaaaaaaaaaaaaaaaaaaaaaaaaaaaaaaaaaaaaaaaaaaaaaaaaaaaaaaaaaaaaaaaaaaaaaaaaaaaaaaaaaaaaaaaaaaaaaaaa

SEQ ID NO: 30276 - RNA, 1724 nt, Artificial Sequence
  mRNA product Design a-1 (A100) comprising derived and/or modified sequence from LASV(Z0947-SLE-2011;Clade IV)__AIT17840__GPCmut6 (opt5)
aggagagucccgcagucggcguccagcggcucugcuuguucgugugugugucguugcaggccuuauucaagcuuaccaugggccagaucgugaccuucuuucaagaggucccccacguuauugaagaggugaugaacaucgugcugauugcccucagcauccuggcuguccuuaaggggcuguacaauuucgccacaugcggacucgugggccugguuacguuucuucugcucugugggagauccugcaccauuucucuguauaaaggaguguacgaacugcagacacucgagcugaacauggaaacccuuaauauguguaugccucugagcugcacaaagaacaauucccaucacuauaucauggucggcaacgagaccgggcucgagcugacacuuaccaauacgucuaucauuaaccauaaauucuguaaucugagcgacgcgcacaagaaaaaccucuacgaucaugcucugauguccaucauuucuaccuuucaccugagcaucccgaauuucaaccaguaugaagccauguccugcgacuuuaauggaggcaagauuagcgugcaguacaaccucucucacuccuaugccggcgaugcugccaaucauugugggacaguugcuaacggagugcugcaaaccuucaugcggauggccuggggcgggagcuacaucgcgcuugacucuggacgcgauagaugggacugcauuaugacauccuaccaguaucugaucauccagaacaccacgugggaggaucacugucaguuuagccggcccucuccuauuggcuaccucgggcugcuuucccaacgcacaagagacaucuauauuagccggcgccugcucggaaccuucacauggacccuguccgauucugaaggcaaggacacccccggcggguacugccugacaagauggaugcucaucgaggccgagcugaaauguuuuggaaauacggcugucgccaagugcaacgaaaaacaugaugaggaguucugcgacaugcuucggcuguuugauuucuguaagcaggcuauucagcgccucaaagccccugcgcagaugagcauccaacugaucaauaaggccgugaacgcucuuauuaaugaccagcugaucaugaagaaccaccucagagacauuaugggcauccccuauugcaauuacuccaaauauugguaccugaaccacaccacaaccgggaagacaagccugccuaaauguuggcucgugucuaauggauccuaccugaacgaaacccauuucagcgaugacauugaacagcaagccgauaauaugaucacggagaugcuucagaaggaguauauggaacggcagggcaaaacaccgcuggggcucgucgaccuguuuguuuucucuaccagcuuuuaccugaucuccauuuuccuucaccucgugaagauccccacccaucgccacauugugggaaaaccuugccccaagccucauagacugaaccacaugggcaucuguucuugcggccuguauaagcagcccggggucccggugaaauggaagcggugaggacuagucccuguucccagagcccacuuuuuuuucuuuuuuugaaauaaaauagccugucuuucagaucuaaaaaaaaaaaaaaaaaaaaaaaaaaaaaaaaaaaaaaaaaaaaaaaaaaaaaaaaaaaaaaaaaaaaaaaaaaaaaaaaaaaaaaaaaaaaaaaaaaaa

SEQ ID NO: 30277 - RNA, 1736 nt, Artificial Sequence
  mRNA product Design a-2 (hSL-A64-N5) comprising derived and/or modified sequence from LASV(Josiah;Clade IV)__NP_694870__GPCmut6 (opt1)
aggagaguccgcucagccagguugcagaagcggcuuagcguguguccuaaucuucucucugcguguagguaggccugugccgcaaacaagcuuaccaugggccagaucgugaccuucuuccaggaggucccccacgugaucgaggaggugaugaacaucguccugaucgcccucagcgugcuggccgugcugaaggggcucuacaacuucgcgaccugcggccuggucgggcuggugacguuccuccugcugugcggccgcuccugcaccaccagccucuacaaggggguguacgagcugcagacccuggagcucaacauggagacgcugaacaugugcaugccgcuguccugcaccaagaacaacagccaccacuacaucauggucggcaacgagaccggccucgagcugacgcugaccaacaccuccaucaucaaccacaaguucugcaaccucagcgacgcccacaagaagaaccuguacgaccacgcccugauguccaucaucagcaccuuccaccucuccauccccaacuucaaccaguacgaggccaugagcugcgacuucaacgggggcaagaucuccgugcaguacaaccugagccacuccuacgccggggacgcggccaaccacugcggcacgguggccaacgggguccugcagaccuucaugcggauggccuggggcggcagcuacaucgcgcucgacuccgggcgcggcaacugggacugcaucaugaccagcuaccaguaccugaucauccagaacaccacgugggaggaccacugccaguucucccggcccagccccaucggguaccugggccuccugucccagcgcacccgggacaucuacaucagccgccggcugcucggcaccuucaccuggacgcugagcgacuccgaggggaaggacaccccgggcggguacugccugacccgcuggaugcucaucgaggccgagcugaagugcuucggcaacaccgccguggccaagugcaacgagaagcacgacgaggaguucugcgacaugcugcggcuguucgacuucugcaagcaggccauccagcgccugaaggcgcccgcccagaugagcauccagcugaucaacaaggccgugaacgcccucaucaacgaccagcugaucaugaagaaccaccuccgggacaucauggggauccccuacugcaacuacuccaaguacugguaccucaaccacacgaccaccggccgcaccagccugcccaagugcuggcuggucuccaacggcagcuaccucaacgagacgcacuucuccgacgacaucgagcagcaggccgacaacaugaucaccgagaugcugcagaaggaguacauggagcggcaggggaagacgccccugggccucguggaccuguucguguucagcaccuccuucuaccugaucagcaucuuccugcaccucgucaagaucccgacccaccgccacaucguggggaaguccugccccaagccccaccggcugaaccacaugggcaucugcagcugcgggcuguacaagcagcccggcgugccggucaaguggaagcgcugaggacuagucccuguucccagagcccacuuuuuuuucuuuuuuugaaauaaaauagccugucuuucagaucucaaaggcucuuuucagagccaccaaaaaaaaaaaaaaaaaaaaaaaaaaaaaaaaaaaaaaaaaaaaaaaaaaaaaaaaaaaaaaaaagaauu

SEQ ID NO: 30278 - RNA, 1733 nt, Artificial Sequence
  mRNA product Design a-2 (hSL-A64-N5) comprising derived and/or modified sequence from LASV(LP;Clade I)__AAF86701__GPCmut6 (opt1)
aggagaguccgcucagccagguugcagaagcggcuuagcguguguccuaaucuucucucugcguguagguaggccugugccgcaaacaagcuuaccaugggccagaucaucaccuucuuccaggaggugccccacgucaucgaggaggugaugaacaucgugcugaucgcccucagccugcuggccauccucaaggggcuguacaacaucgcgaccugcggcaucaucgggcuggucgccuuccucuuccugugcggcaaguccugcagccugacgcucaagggcggguacgagcugcagacccuggagcucaacauggagacccugaacaugugcaugccgcuguccugcacgaagaacagcucccaccacuacauccgcgugggcaacgagaccgggcucgagcugacccugaccaacacgagcaucaucaaccacaaguucugcaaccucuccgacgcccacaagaagaaccuguacgaccacgcccugaugagcaucaucuccaccuuccaccucagcauccccaacuucaaccaguacgaggccauguccugcgacuucaacggcgggaagaucagcgugcaguacaaccugucccacagcuacgcgggcgacgccgccgagcacugcgggaccgucgccaacggcgugcugcagaccuucaugcggauggcguggggcgggcgcuacaucgcccucgacuccggcaaggggaacugggacugcaucaugacgagcuaccaguaccugaucauccagaacaccaccugggaggaccacugccaguucucccggcccagccccaucggcuaccugggccuccugucccagcgcacccgggacaucuacaucagccgccggcugcucgggacguucaccuggacccugagcgacuccgagggcaacgagacccccgggggcuacugccugacgcgcuggaugcucaucgaggccgagcugaagugcuucgggaacaccgccguggccaagugcaacgagaagcacgacgaggaguucugcgacaugcugcggcuguucgacuucugcaagcaggcgauccgccggcugaaggcccccgcccagaugagcauccagcugaucaacaaggccgucaacgcccucaucaacgaccagcugaucaugaagaaccaccuccgcgacaucaugggcauccccuacugcaacuacuccaaguacugguaccucaaccacaccagcuccggccggaccagccugcccaagugcuggcugaucuccaacgggagcuaccucaacgagacgcaguucuccgacgacaucgagcagcaggcggacaacaugaucaccgagaugcugcagaaggaguacaucgagcgccagggcaagaccccgcuggggcucguggacaucuucaucuucagcaccuccuucuaccugaucagcaucuuccugcaccugaucaagaucccgacgcaccggcacaucgugggcaagcccugccccaagccccaccgccucaaccacaugggggucugcuccugcggccuguacaagcacccgggcgugcccaccaaguggaagcggugaggacuagucccuguucccagagcccacuuuuuuuucuuuuuuugaaauaaaauagccugucuuucagaucucaaaggcucuuuucagagccaccaaaaaaaaaaaaaaaaaaaaaaaaaaaaaaaaaaaaaaaaaaaaaaaaaaaaaaaaaaaaaaaaagaauu

SEQ ID NO: 30279 - RNA, 1733 nt, Artificial Sequence
  mRNA product Design a-2 (hSL-A64-N5) comprising derived and/or modified sequence from LASV(803213;Clade II)__AAF86703__GPCmut6 (opt1)
aggagaguccgcucagccagguugcagaagcggcuuagcguguguccuaaucuucucucugcguguagguaggccugugccgcaaacaagcuuaccaugggccagaucaucaccuucuuccaggaggugccccacgucaucgaggaggugaugaacaucgugcugaucgcccucagccugcuggccauccucaaggggaucuacaacgucgcgaccugcggccuguucgggcugaucuccuuccuccugcugugcggccgcagcugcuccgugacguacaaggggguguacgagcuccagacccuggagcugaacauggccaaccucaacaugugcaugccgcugagcugcaccaagaacaacucccaccacuacaucauggucggcaacgagacgggccuggagcucacccugaccaacaccagcaucaucaaccacaaguucugcaaccuguccgacgcccacaagaagaaccucuacgaccacgcccugaugagcaucaucuccacguuccaccugagcauccccaacuucaaccaguacgaggccauguccugcgacuucaacgggggcaagaucagcgugcaguacaaccucucccacagcuucgcgguggacgccgccaaccacugcgggaccaucgccaacggcguccugcagaccuucaugcggauggcguggggcggguccuacaucgcccuggacagcggcaaggggaacugggacugcaucaugaccuccuaccaguaccucaucauccagaacacgaccugggaggaccacugccaguucagccgccccucccccaucggcuaccuggggcugcucagccagcggacccgcgacaucuacaucagccggcgccugcugggcaccuucacguggacccucuccgacagcgagggcaacgaggcccccgggggcuacugccugacccgguggaugcugaucgaggccgagcucaagugcuucgggaacaccgccguggcgaagugcaacgagaagcacgacgaggaguucugcgacaugcugcgccuguucgacuucugcaagcaggccaucaagcggcucaagacgcccgcccagauguccauccagcugaucaacaaggccgugaacgcccugaucaacgaccagcucaucaugaagaaccaccuccgcgacaucaugggcauccccuacugcaacuacagccgguacugguaccugaaccacaccgucaccgggaagaccucccugccccgcugcuggcuggugagcaacggcuccuaccugaacgagacgcacuucagcgacgacaucgagcagcaggcggacaacaugaucaccgagaugcuccagaaggaguacauggaccggcagggcaagaccccgcuggggcugguggaccucuucgucuucuccaccagcuucuaccugaucuccaucuuccugcaccuggugaagaucccgacgcaccgccacaucgugggcaagcccugccccaagccccaccggcucaaccacauggggaucugcagcugcggccuguacaagcacccggggguccccgugaaguggaagcgcugaggacuagucccuguucccagagcccacuuuuuuuucuuuuuuugaaauaaaauagccugucuuucagaucucaaaggcucuuuucagagccaccaaaaaaaaaaaaaaaaaaaaaaaaaaaaaaaaaaaaaaaaaaaaaaaaaaaaaaaaaaaaaaaaagaauu

SEQ ID NO: 30280 - RNA, 1733 nt, Artificial Sequence
  mRNA product Design a-2 (hSL-A64-N5) comprising derived and/or modified sequence from LASV(GA391;Clade III)__CAA36645__GPCmut6 (opt1)
aggagaguccgcucagccagguugcagaagcggcuuagcguguguccuaaucuucucucugcguguagguaggccugugccgcaaacaagcuuaccaugggccagaucgugaccuucuuccaggaggucccccacgugaucgaggaggugaugaacaucguccugaucgcccucagcauccuggccauccugaaggggcucuacaacguggcgaccugcggccugaucgggcuggugacguuccuccugcuguccggccgcagcugcucccucaucuacaaggggaccuacgagcugcagacccuggagcucaacauggagacccugaacaugugcaugccgcugagcugcaccaagaacaacucccaccacuacauccgggucggcaacgagaccggccucgagcugacccugacgaacaccagcauccucaaccacaaguucugcaaccuguccgacgcccacaagcgcaaccuguacgaccacagccucauguccaucaucagcaccuuccaccuguccauccccaacuucaaccaguacgaggccaugagcugcgacuucaacgggggcaagaucaccgugcaguacaaccugucccacagcuucgccguggacgccgcggggcacugcggcacgcucgccaacgggguccugcagaccuucaugcggauggccuggggcggcuccuacaucgcccuggacagcgggcgcggcaacugggacugcaucaugaccuccuaccaguaccucaucauccagaacaccacgugggacgaccacugccaguucagccggcccucccccaucggguaccugggccugcucagccagcgcacccgggacaucuacaucagccgccggcugcugggcaccuucaccuggacgcucuccgacagcgaggggaacgagaccccgggcggguacugccugacccgcuggaugcugaucgaggcggagcucaagugcuucggcaacaccgccguggccaagugcaacgagaagcacgacgaggaguucugcgacaugcugcggcuguucgacuucugcaagcaggccauccgccggcucaagacgcccgcccagauguccauccagcugaucaacaaggcggugaacgcccugaucaacgaccagcucaucaugaagaaccaccuccgcgacaucauggggauccccuacugcaacuacagccgguacugguaccugaaccacaccuccaccggcaagaccagccugccccgcugcuggcugaucuccaacggcagcuaccugaacgagacgaaguucuccgacgacaucgagcagcaggccgacaacaugaucaccgagaugcuccagaaggaguacaucgaccggcaggggaagacgccccugggccuggucgaccuguucguguucagcaccuccuucuaccucaucagcaucuuccugcaccuggugaagaucccgacccaccgccacaucgucgggaagcccugccccaagccccaccggcucaaccacaugggcaucugcuccugcgggcuguacaagcagccgggcgugcccgugcgcuggaagcggugaggacuagucccuguucccagagcccacuuuuuuuucuuuuuuugaaauaaaauagccugucuuucagaucucaaaggcucuuuucagagccaccaaaaaaaaaaaaaaaaaaaaaaaaaaaaaaaaaaaaaaaaaaaaaaaaaaaaaaaaaaaaaaaaagaauu

SEQ ID NO: 30281 - RNA, 1736 nt, Artificial Sequence
  mRNA product Design a-2 (hSL-A64-N5) comprising derived and/or modified sequence from LASV(AV;Clade V)__CCA30314__GPCmut6 (opt1)
aggagaguccgcucagccagguugcagaagcggcuuagcguguguccuaaucuucucucugcguguagguaggccugugccgcaaacaagcuuaccaugggccagaucgugaccuucuuccaggaggucccccacgugaucgaggaggugaugaacaucguccugaucgcccucagcauccuggccgugcugaaggggcucuacaacaucgcgaccugcggccugaucgggcugaucacguuccuccugcugugcggccgcuccugcagcuccaaccucuacaaggggguguacgagcugcagagccuggaccucaacauggagacccugaacaugugcaugccgcuguccugcaccaagaacaacagccaccacuacauccgggucggcaacgacacgggccucgagcugacccugaccaacaccuccauccucaaccacaaguucugcaaccugagcgacgcccacaagaaggaccuguacgaccacgcccucauguccaucaucagcacguuccaccuguccauccccaacuucaaccaguacgaggccaugagcugcgacuucaacgggggcaagaucuccgugcaguacaaccugagccacuccuacgccaucgacgcggccaaccacugcgggaccguggccaacggcauccuccagaccuucaugcgcauggccuggggcgggagcuacaucgcgcuggacuccggccgggggaacugggacugcaucaugaccagcuaccaguaccugaucauccagaacacgaccugggagaaccacugccaguucucccgccccagccccaucggcuaccucgggcugcugagccagcggacccgcgacaucuacaucucccggcgccuccugggcaccuucacguggacccugagcgacuccgagggcaacgccacccccgggggcuacugccucacccgguggaugcugaucgaggccgagcugaagugcuucgggaacacggccgucgccaagugcaacgagaagcacgacgaggaguucugcgacaugcuccgccuguucgacuucugcaagcaggcgaucagccggcugaagucccccgcccagaugagcauccagcucaucaacaaggccgugaacgcccugaucaacgaccagcugaucaugaagaaccaccuccgcgacaucaugggcauccccuacugcaacuacuccaaguacugguaccugaaccacaccaucaccgggaagaccagccugcccaagugcuggcucguguccaacggcagcuaccugaacgagacgcacuucuccgacgacaucgagcagcaggccgacaacaugaucaccgagaugcugcagaaggaguacauggagcggcagggcaagaccccgcucgggcuggucgaccuguucguguucagcaccuccuucuaccugaucagcaucuuccuccgccuggugaagaucccgacgcaccggcacaucgucggcaagcccugccccaagccccaccgccugaaccacauggggaucugcuccugcggccucuacaagcagccgggggugcccgugcgguggaagcgcugaggacuagucccuguucccagagcccacuuuuuuuucuuuuuuugaaauaaaauagccugucuuucagaucucaaaggcucuuuucagagccaccaaaaaaaaaaaaaaaaaaaaaaaaaaaaaaaaaaaaaaaaaaaaaaaaaaaaaaaaaaaaaaaaagaauu

SEQ ID NO: 30282 - RNA, 1733 nt, Artificial Sequence
  mRNA product Design a-2 (hSL-A64-N5) comprising derived and/or modified sequence from LASV(Togo/2016/7082;Clade VI)__AMR44577__GPCmut6 (opt1)
aggagaguccgcucagccagguugcagaagcggcuuagcguguguccuaaucuucucucugcguguagguaggccugugccgcaaacaagcuuaccaugggccagaucaucaccuucuuccaggaggugccccacgucaucgaggaggugaugaacaucgugcugaucgcccucagccugcuggccauccucaagggggucuacaacguggcgaccugcggcaucaucgggcuggugacguuccuguuccucugcggccgcuccugcagccugaucuacaagggguccuacgagcugcagacccucgagcugaacauggagacccugaacaugugcaugccgcucagcugcacgaagaacuccagccaccacuacauccgggucggcaacgagaccggccuggagcugacccucaccaacacguccaucaucaaccacaaguucugcaaccugagcgacgcccacaagcgcaaccuguacgaccacgcccucauguccauccugagcaccuuccaccuguccauccccaacuucaaccaguacgaggccaugagcugcgacuucaacgggggcaagaucuccgugcaguacaaccucagccacgccuacgcgguggacgccgccgagcacugcgggaccgucgccaacggcgugcugcagaccuucaugcggauggcguggggcggguccuacaucgcccuggacagcggccgcgggaacugggacugcaucaugacguccuaccaguaccucaucauccagaacaccaccugggaggaccacugccaguucagccggcccucccccaucggcuaccuggggcugcucagccagcgcacccgggacaucuacaucagccgccggcugcugggcacguucaccuggacccucuccgacagcgagggcaacgagacccccgggggcuacugccugacgcgcuggaugcugaucgaggccgagcucaagugcuucgggaacaccgccguggccaagugcaacgagaagcacgacgaggaguucugcgacaugcugcggcuguucgacuucugcaagcaggcgauccagcgccucaagucccccgcccagaugagcauccagcugaucaacaaggccgucaacgcccugaucaacgaccagcucaucaugaagaaccaccuccgggacaugaugggcauccccuacugcaacuacuccaaguacugguaccugaaccacaccagcuccgggcgcaccagccugcccaagugcuggcugguguccaacggcagcuaccugaacgagacgcacuucuccgacgacaucgagcagcaggccgacaacaugaucaccgagaugcuccagaaggaguacaucgaccggcagggcaagaccccgcuggggcugguggaccucuucgucuucagcaccuccuucuaccugaucagcaucuuccugcaccugaucaagaucccgacgcaccgccacaucgugggcaagcccugccccaagccccaccggcucaaccacauggggaucugcuccugcggccuguacaagcagccgggggugcccacccgcuggaagcggugaggacuagucccuguucccagagcccacuuuuuuuucuuuuuuugaaauaaaauagccugucuuucagaucucaaaggcucuuuucagagccaccaaaaaaaaaaaaaaaaaaaaaaaaaaaaaaaaaaaaaaaaaaaaaaaaaaaaaaaaaaaaaaaaagaauu

SEQ ID NO: 30283 - RNA, 1733 nt, Artificial Sequence
  mRNA product Design a-2 (hSL-A64-N5) comprising derived and/or modified sequence from LASV(KAK-428;Clade n.d. (VII))__ANH09740__GPCmut6 (opt1)
aggagaguccgcucagccagguugcagaagcggcuuagcguguguccuaaucuucucucugcguguagguaggccugugccgcaaacaagcuuaccaugggccagaucgugaccuucuuccaggaggucccccacgugaucgaggaggugaugaacaucguccugaucgcccucagccugcuggccauccucaaggggcuguacaacuucgcgaccugcggcgugaucgggcugaucacguuccuccugcugugcggccgcuccugcagcgccaccuacaaggggcaguacgagcuccagacccuggagcugaacauggagucccucaacaugugcaugccgcugagcugcacgaagaacaacucccaccacuacauccgggccggcaacaacaccggccuggagcucacccugaccaacacgagcaucaucucccacaaguucugcaaccugagcgacgcccacaagaagaaccucuacgaccacacccugauguccaucaucaccaccuuccaccugagcauccccaacuucaaccaguacgaggccauguccugcgacuucaacgggggcaagaucagcauccaguacaaccucucccacagcuacgcgggggacgccgcccagcacugcggcacgguggccaacgggguccugcagaccuucaugcgcauggcguggggcggcuccuaccuggcccucgacagcgggcggcgcggcugggacugcaucaucuccagcuaccaguaccugaucauccagaacaccaccugggacgaccacugccaguucucccggcccagccccaucggguaccugggcuucgugagccagaagacgcgcgacaucuacaucucccggcgccuccugggcaccuucaccuggacccugagcgacuccgaggggcacgacaugccgggcggguacugccucacgcgguggaugcugaucgaggccgaccugaagugcuucggcaacaccgccguggccaagugcaacgagaagcacgacgaggaguucugcgacauguggcgccucuucgacuucugcaagcaggcgauccagcggcugaaggcccccgcccagaugaacauccagcugaucaacaaggccgucaacgcccucaucaacgaccagcugaugaugaagaaccaccuccgcgacaucauggggauccccuacugcaacuacagcaaguucugguaccugaacaacaccaccacgggccggaccucccugccccgcugcuggcugaucagcaacggcuccuaccucaacgagacccacuucagcgacgacaucgagcagcaggcggacaacaugaucaccgagaugcugcagaaggaguacauggaccggcaggggaagacgccccugggccucguggaccuguucguguucuccaccagcuucuaccugaucaccaucuuccuccaccuggucaagaucccgacccaccgccacaucguggggaagcccugccccaagccccaccggcugaaccacaugggcaucugcuccugcgggcuguacaagcagccgggcgugcccguccgcuggaagcggugaggacuagucccuguucccagagcccacuuuuuuuucuuuuuuugaaauaaaauagccugucuuucagaucucaaaggcucuuuucagagccaccaaaaaaaaaaaaaaaaaaaaaaaaaaaaaaaaaaaaaaaaaaaaaaaaaaaaaaaaaaaaaaaaagaauu

SEQ ID NO: 30284 - RNA, 1733 nt, Artificial Sequence; identical to SEQ ID NO: 30278
  mRNA product Design a-2 (hSL-A64-N5) comprising derived and/or modified sequence from LASV(Pinneo-NIG-1969;Clade I)__AIT17836__GPCmut6 (opt1)

SEQ ID NO: 30285 - RNA, 1733 nt, Artificial Sequence
  mRNA product Design a-2 (hSL-A64-N5) comprising derived and/or modified sequence from LASV(ISTH0009-NIG-2011;Clade II)__AIT17404__GPCmut6 (opt1)
aggagaguccgcucagccagguugcagaagcggcuuagcguguguccuaaucuucucucugcguguagguaggccugugccgcaaacaagcuuaccaugggccagaucaucaccuucuuccaggaggugccccacgucaucgaggaggugaugaacaucgugcugaucgcccucagccugcuggccauccucaaggggaucuacaacgucgcgaccugcggccuguucgggcugguguccuuccuccugcugugcggccgcagcugcuccacgaccuacaaggggguguacgagcuccagacccuggagcuggacauggccagccucaacaugugcaugccgcuguccugcacgaagaacaacagccaccacuacaucauggucggcaacgagaccggccuggagcucacccugaccaacacguccaucaucaaccacaaguucugcaaccugagcgacgcccacaagaagaaccucuacgaccacgcccugauguccaucaucagcaccuuccaccuguccauccccaacuucaaccaguacgaggccaugagcugcgacuucaacgggggcaagaucuccgugcaguacaaccucagccacgcguacgccguggacgccgccaaccacugcgggaccaucgcgaacggcguccugcagaccuucaugcggauggccuggggcggguccuacaucgcccuggacagcggcaagggguccugggacugcaucaugacgagcuaccaguaccucaucauccagaacaccaccugggaggaccacugccaguucucccgccccagccccaucggcuaccuggggcugcucagccagcggacccgcgacaucuacaucucccggcgccugcugggcacguucaccuggacccucagcgacuccgagggcaacgagacccccgggggcuacugccugacgcgguggaugcugaucgaggccgagcucaagugcuucgggaacaccgccguggcgaagugcaacgagaagcacgacgaggaguucugcgacaugcugcgccuguucgacuucugcaagcaggccauccggcgccucaagacccccgcccagaugagcauccagcugaucaacaaggccgugaacgcccugaucaacgaccagcucaucaugaagaaccaccuccgggacaucaugggcaucccguacugcaacuacuccaaguacugguaccugaaccacaccgucacggggaagaccagccugccccgcugcuggcugguguccaacggcagcuaccugaacgagacccacuucuccgacgacaucgagcagcaggcggacaacaugaucaccgagcuccugcagaaggaguacauggaccggcagggcaagacgccccuggggcucguggaccuguucgucuucagcaccuccuucuaccugaucagcaucuuccugcaccucaucaagaucccgacccaccgccacaucaccggcaagcccugccccaagccccaccggcugaaccacauggggaucugcuccugcggccuguacaagcacccgggggugcccgugaaguggaagcgcugaggacuagucccuguucccagagcccacuuuuuuuucuuuuuuugaaauaaaauagccugucuuucagaucucaaaggcucuuuucagagccaccaaaaaaaaaaaaaaaaaaaaaaaaaaaaaaaaaaaaaaaaaaaaaaaaaaaaaaaaaaaaaaaaagaauu

SEQ ID NO: 30286 - RNA, 1733 nt, Artificial Sequence
  mRNA product Design a-2 (hSL-A64-N5) comprising derived and/or modified sequence from LASV(ISTH2010-NIG-2012;Clade II)__AIT17482__GPCmut6 (opt1)
aggagaguccgcucagccagguugcagaagcggcuuagcguguguccuaaucuucucucugcguguagguaggccugugccgcaaacaagcuuaccaugggccagaucaucaccuucuuccaggaggugccccacgucaucgaggaggugaugaacaucgugcugaucgcccucagccugcuggccauccucaaggggaucuacaacgucgcgaccugcggccuguucgggcugguguccuuccuccugcugugcggccgcagcugcuccacgaccuacaaggggguguacgagcuccagacccuggagcuggacauggccagccucaacaugugcaugccgcuguccugcacgaagaacaacagccaccacuacaucauggucggcaacgagaccggccuggagcucacccugaccaacacguccaucaucaaccacaaguucugcaaccugagcgacgcccacaagaagaaccucuacgaccacgcccugauguccaucaucagcaccuuccaccuguccauccccaacuucaaccaguacgaggccaugagcugcgacuucaacgggggcaagaucuccgugcaguacaaccucagccacgcguacgccguggacgccgccaaccacugcgggaccaucgcgaacggcguccugcagaccuucaugcggauggccuggggcggguccuacaucgcccuggacagcggcaagggguccugggacugcaucaugacgagcuaccaguaccucaucauccagaacaucaccugggaggaccacugccaguucucccgccccagccccaucggcuaccuggggcugcucagccagcggacccgcgacaucuacaucucccggcgccugcugggcaccuucacguggacccucagcgacuccgagggcaacgagacccccgggggcuacugccugacccgguggaugcugaucgaggccgagcucaagugcuucgggaacacggccguggcgaagugcaacgagaagcacgacgaggaguucugcgacaugcugcgccuguucgacuucugcaagcaggccauccggcgccucaagacccccgcccagaugagcauccagcugaucaacaaggccgugaacgcccugaucaacgaccagcucaucaugaagaaccaccuccgggacaucaugggcauccccuacugcaacuacuccaaguacugguaccugaaccacaccgucaccgggaagacgagccugccccgcugcuggcugguguccaacggcagcuaccugaacgagacccacuucuccgacgacaucgagcagcaggcggacaacaugaucaccgagcuccugcagaaggaguacaucgaccggcagggcaagaccccgcuggggcucguggaccuguucgucuucagcacguccuucuaccugaucagcaucuuccugcaccucgugaagaucccgacccaccgccacguggucggcaagcccugccccaagccccaccggcugaaccacauggggaucugcuccugcggccuguacaagcacccgggggugcccgugaaguggaagcgcugaggacuagucccuguucccagagcccacuuuuuuuucuuuuuuugaaauaaaauagccugucuuucagaucucaaaggcucuuuucagagccaccaaaaaaaaaaaaaaaaaaaaaaaaaaaaaaaaaaaaaaaaaaaaaaaaaaaaaaaaaaaaaaaaagaauu

SEQ ID NO: 30287 - RNA, 1733 nt, Artificial Sequence
  mRNA product Design a-2 (hSL-A64-N5) comprising derived and/or modified sequence from LASV(Lassa virus/H.sapiens-wt/NGA/2015/ISTH_0543;Clade II)__AVO03639__GPCmut6 (opt1)
aggagaguccgcucagccagguugcagaagcggcuuagcguguguccuaaucuucucucugcguguagguaggccugugccgcaaacaagcuuaccaugggccagaucaucaccuucuuccaggaggugccccacgucaucgaggaggugaugaacaucgugcugaucgcccucagccugcuggccauccucaaggggaucuacaacgucgcgaccugcggccuguucgggcugguguccuuccuccugcugugcggccgcagcugcuccacgaccuacaaggggguguacgagcuccagacccuggagcuggacauggccaaccucaacaugugcaugccgcugagcugcacgaagaacaacucccaccacuacaucauggucggcaacgagaccggccuggagcucacccugaccaacacgagcaucaucaaccacaaguucugcaaccuguccgacgcccacaagaagaaccucuacgaccacgcccugaugagcaucaucuccaccuuccaccugagcauccccaacuucaaccaguacgaggccauguccugcgacuucaacgggggcaagaucagcgugcaguacaaccucucccacaccuacgcgguggacgccgccaaccacugcgggaccaucgccaacggcguccugcagacguucaugcggauggcguggggcgggagcuacaucgcccuggacuccggcaaggggagcugggacugcaucaugaccuccuaccaguaccucgugauccagaacaccaccugggaggaccacugccaguucagccgccccucccccaucggcuaccuggggcugcucagccagcggacgcgcgacaucuacaucagccggcgccugcugggcaccuucaccuggacccucuccgacagcgagggcaacgagacgcccgggggcuacugccugacccgguggaugcugaucgaggccgagcucaagugcuucgggaacaccgccguggccaagugcaacgagaagcacgacgaggaguucugcgacaugcugcgccuguucgacuucugcaagcaggcgauccggcgccucaagacccccgcccagauguccauccagcugaucaacaaggccgucaacgcccugaucaacgaccagcucaucaugaagaaccaccuccgggacaucaugggcauccccuacugcaacuacagcaaguacugguaccugaaccacacggugaccgggaagaccucccugccccgcugcuggcuggugagcaacggcuccuaccugaacgagacccacuucagcgacgacaucgagcagcaggccgacaacaugaucacggagcuccugcagaaggaguacaucgaccggcagggcaagaccccgcuggggcucgucgaccuguucguguucuccaccagcuucuaccugaucuccaucuuccugcaccucgugaagaucccgacccaccgccacaucacgggcaagcccugccccaagccccaccggcugaaccacauggggaucugcagcugcggccuguacaagcacccggggguccccgugaaguggaagcgcugaggacuagucccuguucccagagcccacuuuuuuuucuuuuuuugaaauaaaauagccugucuuucagaucucaaaggcucuuuucagagccaccaaaaaaaaaaaaaaaaaaaaaaaaaaaaaaaaaaaaaaaaaaaaaaaaaaaaaaaaaaaaaaaaagaauu

SEQ ID NO: 30288 - RNA, 1733 nt, Artificial Sequence
  mRNA product Design a-2 (hSL-A64-N5) comprising derived and/or modified sequence from LASV(Lassa virus/H.sapiens-wt/NGA/2016/ISTH_0009;Clade II)__AVO03571__GPCmut6 (opt1)
aggagaguccgcucagccagguugcagaagcggcuuagcguguguccuaaucuucucucugcguguagguaggccugugccgcaaacaagcuuaccaugggccagaucaucaccuucuuccaggaggugccccacgucaucgaggaggugaugaacaucgugcugaucgcccucagccugcuggccauccucaaggggaucuacaacgucgcgaccugcggccugcuggggcucguguccuuccugcugcucugcggccgcagcugcuccacgaccuacaaggggguguacgagcugcagacccuggagcucgacauggccagccugaacaugugcaugccgcuguccugcacgaagaacaacagccaccacuacaucauggucggcaacgagaccggccucgagcugacccugaccaacacguccaucaucaaccacaaguucugcaaccucagcgacgcccacaagaagaaccuguacgaccacgcccugauguccaucaucagcaccuuccaccucuccauccccaacuucaaccaguacgaggccaugagcugcgacuucaacgggggccggaucuccgugcaguacaaccugagccacuccuacgcgguggacgccgccaaccacugcgggaccaucgccaacggcguccugcagaccuucaugcgcauggcguggggcgggagcuacaucgcccucgacuccggcaaggggagcugggacugcaucaugacguccuaccaguaccugaucauccagaacaccaccugggaggaccacugccaguucagccggcccagccccaucggcuaccuggggcuccugucccagcgcacccgggacaucuacaucagccgccggcugcucggcacguucaccuggacccuguccgacagcgagggcaacgagacccccgggggcuacugccugacgcgcuggaugcucaucgaggccgagcugaagugcuucgggaacaccgccguggccaagugcaacgagaagcacgacgaggaguucugcgacaugcugcggcuguucgacuucugcaagcaggcgauccgccggcugaagacccccgcccagauguccauccagcugaucaacaaggccgugaacgcccucaucaacgaccagcugaucaugaagaaccaccuccgcgacaucaugggcaucccguacugcaacuacagcaaguacugguaccucaaccacaccgucacggggaagaccucccugccccggugcuggcuggugagcaacggcuccuaccucaacgagacccacuucagcgacgacaucgagcagcaggccgacaacaugaucaccgagcugcugcagaaggaguacaucgaccgccagggcaagacgccccucgggcugguggaccuguucgucuucuccaccagcuucuaccugaucuccaucuuccuccaccuggugaagaucccgacccaccggcacaucaccggcaagcccugccccaagccccaccgccugaaccacauggggaucugcagcugcggccucuacaaccacccgggggugcccgucaaguggaagcggugaggacuagucccuguucccagagcccacuuuuuuuucuuuuuuugaaauaaaauagccugucuuucagaucucaaaggcucuuuucagagccaccaaaaaaaaaaaaaaaaaaaaaaaaaaaaaaaaaaaaaaaaaaaaaaaaaaaaaaaaaaaaaaaaagaauu

SEQ ID NO: 30289 - RNA, 1733 nt, Artificial Sequence
  mRNA product Design a-2 (hSL-A64-N5) comprising derived and/or modified sequence from LASV(Lassa virus/H.sapiens-wt/NGA/2016/ISTH_0017;Clade II)__AVO03567__GPCmut6 (opt1)
aggagaguccgcucagccagguugcagaagcggcuuagcguguguccuaaucuucucucugcguguagguaggccugugccgcaaacaagcuuaccaugggccagaucaucaccuucuuccaggaggugccccacgucaucgaggaggugaugaacaucgugcugaucgcccucagccugcuggccauccucaaggggaucuacaacgucgcgaccugcggccuguucgggcugguguccuuccuccugcugugcggccgcagcugcuccacgaccuacaaggggguguacgagcuccagacccuggagcuggacauggccagccucaacaugugcaugccgcuguccugcacgaagaacaacagccaccacuacaucauggucggcaacgagaccggccuggagcucacccugaccaacacguccaucaucaaccacaaguucugcaaccugagcgacgcccacaagaagaaccucuacgaccacgcccugauguccaucaucagcaccuuccaccuguccauccccaacuucaaccaguacgaggccaugagcugcgacuucaacgggggcaagaucuccgugcaguacaaccucagccacaccuacgcgaucgacgccgccaaccacugcgggaccaucgccaacggcgugcugcagacguucaugcggauggcguggggcggguccuacaucgcccuggacagcggcaagggguccugggacugcaucaugaccagcuaccaguaccucaucauccagaacaccaccugggaggaccacugccaguucucccgccccagccccaucggcuaccuggggcugcucagccagcggacgcgcgacaucuacaucucccggcgccugcugggcaccuucaccuggacccucagcgacuccgagggcaacgagacgcccgggggcuacugccugacccgguggaugcugaucgaggccgagcucaagugcuucgggaacaccgccgucgccaagugcaacgagaagcacgacgaggaguucugcgacaugcugcgccuguucgacuucugcaagcaggcgauccggcgccucaagacccccgcccagaugagcauccagcugaucaacaaggccgugaacgcccugaucaacgaccagcucaucaugaagaaccaccuccgggacaucaugggcauccccuacugcaacuacuccaaguacugguaccugaaccacacggugaccgggaagaccagccugccccgcugcuggcuggucuccaacggcagcuaccugaacgagacccacuucuccgacgacaucgagcagcaggccgacaacaugaucacggagcuccugcagaaggaguacauggaccggcagggcaagaccccgcuggggcucguggaccuguucguguucagcaccuccuucuaccugaucagcaucuuccugcaccucguccgcaucccgacccaccggcacgugaucggcaagcccugccccaagccccaccgccugaaccacauggggaucugcuccugcggccuguacaagcacccgggggugcccgucaaguggaagcggugaggacuagucccuguucccagagcccacuuuuuuuucuuuuuuugaaauaaaauagccugucuuucagaucucaaaggcucuuuucagagccaccaaaaaaaaaaaaaaaaaaaaaaaaaaaaaaaaaaaaaaaaaaaaaaaaaaaaaaaaaaaaaaaaagaauu

SEQ ID NO: 30290 - RNA, 1733 nt, Artificial Sequence
  mRNA product Design a-2 (hSL-A64-N5) comprising derived and/or modified sequence from LASV(Lassa virus/H.sapiens-wt/NGA/2018/ISTH_0959;Clade II)__AVV65099__GPCmut6 (opt1)
aggagaguccgcucagccagguugcagaagcggcuuagcguguguccuaaucuucucucugcguguagguaggccugugccgcaaacaagcuuaccaugggccagaucaucaccuucuuccaggaggugccccacgucaucgaggaggugaugaacaucgugcugaucgcccucagccugcuggccauccucaaggggaucuacaacgucgugaccugcggccuguucgggcugguguccuuccuccugcugugcggccgcagcugcuccacgaccuacaagggggucuacgagcuccagacccuggagcuggacauggcgagccucaacaugugcaugccgcuguccugcacgaagaacaacagccaccacuacaucauggugggcaacgagaccggccuggagcucacccugaccaacacguccaucaucaaccacaaguucugcaaccugagcgacgcccacaagaagaaccucuacgaccacgcccugauguccaucaucagcaccuuccaccuguccauccccaacuucaaccaguacgaggccaugagcugcgacuucaacgggggcaagaucuccgugcaguacaaccucagccacgccuacgcgaucgacgccgccaaccacugcgggaccaucgccaacggcguccugcagaccuucaugcggauggcguggggcggguccuacaucgcccuggacagcggcaagggguccugggacugcaucaugacgagcuaccaguaccucaucauccagaacaccaccugggaggaccacugccaguucucccgccccagccccaucggcuaccuggggcugcucagccagcggacccgcgacaucuacaucucccggcgccugcugggcacguucaccuggacccucagcgacuccgagggcaacgagacccccgggggcuacugccugacgcgguggaugcugaucgaggccgagcucaagugcuucgggaacaccgccguggccaagugcaacgagaagcacgacgaggaguucugcgacaugcugcgccuguucgacuucugcaagcaggcgauccggcgccucaagacccccgcccagaugagcauccagcugaucaacaaggccgugaacgcccugaucaacgaccagcucaucaugaagaaccaccuccgggacaucaugggcaucccguacugcaacuacuccaaguacugguaccugaaccacaccgucacggggaagaccagccugccccgcugcuggcugguguccaacggcagcuaccugaacgagacccacuucuccgacgacaucgagcagcaggccgacaacaugaucaccgagcuccugcagaaggaguacaucgaccggcagggcaagacgccccuggggcucguggaccuguucgucuucagcaccuccuucuaccugaucagcaucuuccugcaccucgugaagaucccgacccaccgccacgugaucggcaagcccugccccaagccccaccggcugaaccacauggggaucugcuccugcggccuguacaagcacccggggguccccgugaaguggaagcgcugaggacuagucccuguucccagagcccacuuuuuuuucuuuuuuugaaauaaaauagccugucuuucagaucucaaaggcucuuuucagagccaccaaaaaaaaaaaaaaaaaaaaaaaaaaaaaaaaaaaaaaaaaaaaaaaaaaaaaaaaaaaaaaaaagaauu

SEQ ID NO: 30291 - RNA, 1733 nt, Artificial Sequence
  mRNA product Design a-2 (hSL-A64-N5) comprising derived and/or modified sequence from LASV(LASV003-NIG-2008;Clade II)__AIT17580__GPCmut6 (opt1)
aggagaguccgcucagccagguugcagaagcggcuuagcguguguccuaaucuucucucugcguguagguaggccugugccgcaaacaagcuuaccaugggccagaucaucaccuucuuccaggaggugccccacgucaucgaggaggugaugaacaucgugcugaucgcccucagccugcuggccauccucaaggggaucuacaacgucgcgaccugcggccuguucgggcugguguccuuccuccugcugugcggccgcagcugcuccacgaccuacaaggggguguacgagcuccagacccuggagcuggacauggccagccucaacaugugcaugccgcuguccugcacgaagaacaacagccaccacuacaucauggucggcaacgagaccggccuggagcucacccugaccaacacguccaucaucaaccacaaguucugcaaccugagcgacgcccacaagaagaaccucuacgaccacgcccugauguccaucaucagcaccuuccaccuguccauccccaacuucaaccaguacgaggccaugagcugcgacuucaacgggggcaagaucuccgugcaguacaaccucagccacaccuacgcgguggacgccgccaaccacugcgggaccaucgccaacggcguccugcagacguucaugcggauggcguggggcggguccuacaucgcccuggacagcggcaagggguccugggacugcaucaugaccagcuaccaguaccucaucauccagaacaccaccugggaggaccacugccaguucucccgccccagccccaucggcuaccuggggcugcucagccagcggacgcgcgacaucuacaucucccggcgccugcugggcaccuucaccuggacccucagcgacuccgagagcaacgagacgccgggcggguacugccugacccgguggaugcugaucgaggccgagcucaagugcuucggcaacaccgccguggccaagugcaacgagaagcacgacgaggaguucugcgacaugcugcgccuguucgacuucugcaagcaggcgauccggcgccucaaggcccccgcccagauguccauccagcugaucaacaaggccgugaacgcccugaucaacgaccagcucaucaugaagaaccaccuccgggacaucauggggauccccuacugcaacuacagcaaguacugguaccugaaccacaccgucacgggccgcaccucccugccccggugcuggcuggugagcaacggguccuaccugaacgagacccacuucagcgacgacaucgagcagcaggcggacaacaugaucaccgagcuccugcagaaggaguacauggaccgccagggcaagacgccccugggccucguggaccuguucgucuucuccaccagcuucuaccugaucuccaucuuccugcaccucgugaagaucccgacccaccggcacgugaucgggaagcccugccccaagccccaccgccugaaccacaugggcaucugcagcugcgggcuguacaagcacccgggcguccccgugaaguggaagcggugaggacuagucccuguucccagagcccacuuuuuuuucuuuuuuugaaauaaaauagccugucuuucagaucucaaaggcucuuuucagagccaccaaaaaaaaaaaaaaaaaaaaaaaaaaaaaaaaaaaaaaaaaaaaaaaaaaaaaaaaaaaaaaaaagaauu

SEQ ID NO: 30292 - RNA, 1733 nt, Artificial Sequence
  mRNA product Design a-2 (hSL-A64-N5) comprising derived and/or modified sequence from LASV(LASV035-NIG-2009;Clade II)__AIT17588__GPCmut6 (opt1)
aggagaguccgcucagccagguugcagaagcggcuuagcguguguccuaaucuucucucugcguguagguaggccugugccgcaaacaagcuuaccaugggccagaucaucaccuucuuccaggaggugccccacgucaucgaggaggugaugaacaucgugcugaucgcccucagccugcuggccauccucaaggggaucuacaacgucgcgaccugcggccuguucgggcugguguccuuccuccugcugugcggccgcagcugcuccacgaccuacaaggggguguacgagcuccagacccuggagcuggacauggccagccucaacaugugcaugccgcuguccugcacgaagaacaacagccaccacuacaucauggucggcaacgagaccggccuggagcucacccugaccaacacguccaucaucaaccacaaguucugcaaccugagcgacgcccacaagaagaaccucuacgaccacgcccugauguccaucaucagcaccuuccaccuguccauccccaacuucaaccaguacgaggccaugagcugcgacuucaacgggggcaagaucuccgugcaguacaaccucagccacgcguacgccguggacgccgccaaccacugcgggaccaucgcgaacggcguccugcagaccuucaugcggauggccuggggcggguccuacaucgcccuggacagcggcaagggguccugggacugcaucaugacgagcuaccaguaccucaucauccagaacaccaccugggaggaccacugccaguucucccgccccagccccaucggcuaccuggggcugcucagccagcggacccgcgacaucuacaucucccggcgccugcugggcacguucaccuggacccucagcgacuccgagggcaacgagacccccgggggcuacugccugacgcgguggaugcugaucgaggccgagcucaagugcuucgggaacaccgccguggcgaagugcaacgagaagcacgacgaggaguucugcgacaugcugcgccuguucgacuucugcaagcaggccauccggcgccucaaggcccccgcccagaugagcauccagcugaucaacaaggccgugaacgcgcugaucaacgaccagcucaucaugaagaaccaccuccgggacaucaugggcauccccuacugcaacuacuccaaguacugguaccugaaccacaccgucaccgggaagacgagccugccccgcugcuggcugguguccaacggcagcuaccugaacgagacccacuucuccgacgacaucgagcagcaggccgacaacaugaucaccgagcuccugcagaaggaguacaucgaccggcagggcaagaccccgcuggggcucguggaccuguucgucuucagcacguccuucuaccugaucagcaucuuccugcaccucgugaagaucccgacccaccgccacgugaucggcaagcccugccccaagccccaccggcugaaccacauggggaucugcuccugcggccuguacaagcacccggggguccccgugaaguggaagcgcugaggacuagucccuguucccagagcccacuuuuuuuucuuuuuuugaaauaaaauagccugucuuucagaucucaaaggcucuuuucagagccaccaaaaaaaaaaaaaaaaaaaaaaaaaaaaaaaaaaaaaaaaaaaaaaaaaaaaaaaaaaaaaaaaagaauu

SEQ ID NO: 30293 - RNA, 1733 nt, Artificial Sequence
  mRNA product Design a-2 (hSL-A64-N5) comprising derived and/or modified sequence from LASV(LASV1000-NIG-2009;Clade II)__AIT17782__GPCmut6 (opt1)
aggagaguccgcucagccagguugcagaagcggcuuagcguguguccuaaucuucucucugcguguagguaggccugugccgcaaacaagcuuaccaugggccagaucaucaccuucuuccaggaggugccccacgucaucgaggaggugaugaacaucgugcugaucgcccucagccugcuggccauccucaaggggaucuacaacgucgcgaccugcggccuguucgggcugguguccuuccuccugcugugcggccgcagcugcuccacgaccuacaaggggguguacgagcuccagacccuggagcuggacauggccagccucaacaugugcaugccgcuguccugcacgaagaacaacagccaccacuacaucauggucggcaacgagaccggccuggagcucacccugaccaacacguccaucaucaaccacaaguucugcaaccugagcgacgcccacaagaagaaccucuacgaccacgcccugauguccaucaucagcaccuuccaccuguccauccccaacuucaaccaguacgaggccaugagcugcgacuucaacgggggcaagaucuccgugcaguacaaccucagccacaccuacgcgguggacgccgccaaccacugcgggaccaucgccaacggcguccugcagacguucaugcggauggcguggggcggguccuacaucgcccuggacagcggcaagggguccugggacugcaucaugaccagcuaccaguaccucaucauccagaacaccaccugggaggaccacugccaguucucccgccccagccccaucggcuaccuggggcugcucagccagcggacgcgcgacaucuacaucucccggcgccugcugggcaccuucaccuggacccucagcgacuccgagggcaacgagacgcccgggggcuacugccugacccgguggaugcugaucgaggccgagcucaagugcuucgggaacaccgccguggccaagugcaacgagaagcacgacgaggaguucugcgacaugcugcgccuguucgacuucugcaagcaggcgaucaagcggcucaagacccccgcccagaugagcauccagcugaucaacaaggccgugaacgcccugaucaacgaccagcucaucaugaagaaccaccuccgcgacaucaugggcauccccuacugcaacuacuccaaguacugguaccugaaccacacggucaccgggaagaccagccugccccggugcuggcugguguccaacggcagcuaccugaacgagacccacuucuccgacgacaucgagcagcaggccgacaacaugaucacggagcuccugcagaaggaguacaucgaccgccagggcaagaccccgcuggggcucguggaccuguucgucuucagcaccuccuucuaccugaucagcaucuuccugcaccucgugaagaucccgacccaccggcacguggucggcaagcccugccccaagccccaccgccugaaccacauggggaucugcuccugcggccuguacaagcacccgggggugcccgugaaguggaagcggugaggacuagucccuguucccagagcccacuuuuuuuucuuuuuuugaaauaaaauagccugucuuucagaucucaaaggcucuuuucagagccaccaaaaaaaaaaaaaaaaaaaaaaaaaaaaaaaaaaaaaaaaaaaaaaaaaaaaaaaaaaaaaaaaagaauu

SEQ ID NO: 30294 - RNA, 1733 nt, Artificial Sequence
  mRNA product Design a-2 (hSL-A64-N5) comprising derived and/or modified sequence from LASV(LASV221-NIG-2010;Clade II)__AIT17624__GPCmut6 (opt1)
aggagaguccgcucagccagguugcagaagcggcuuagcguguguccuaaucuucucucugcguguagguaggccugugccgcaaacaagcuuaccaugggccagaucaucaccuucuuccaggaggugccccacgucaucgaggaggugaugaacaucgugcugaucgcccucagccugcuggccauccucaaggggaucuacaacgucgcgaccugcggccuguucgggcugguguccuuccuccugcugugcggccgcagcugcuccacgaccuacaaggggguguacgagcuccagacccuggagcuggacauggccagccucaacaugugcaugccgcuguccugcacgaagaacaacagccaccacuacaucauggucggcaacgagaccggccuggagcucacccugaccaacacguccaucaucaaccacaaguucugcaaccugagcgacgcccacaagaagaaccucuacgaccacgcccugauguccaucaucagcaccuuccaccuguccauccccaacuucaaccaguacgaggccaugagcugcgacuucaacgggggcaagaucuccgugcaguacaaccucagccacaccuacgcgaucgacgccgccaaccacugcgggaccaucgccaacggcgugcugcagacguucaugcggauggcguggggcggguccuacaucgcccuggacagcggcaagggguccugggacugcaucaugaccagcuaccaguaccucaucauccagaacaccaccugggaggaccacugccaguucucccgccccagccccaucggcuaccuggggcugcucagccagcggacgcgcgacaucuacaucucccggcgccugcugggcaccuucaccuggacccucagcgacuccgagggcaacgagacgcccgggggcuacugccugacccgguggaugcugaucgaggccgagcucaagugcuucgggaacaccgccgucgccaagugcaacgagaagcacgacgaggaguucugcgacaugcugcgccuguucgacuucugcaagcaggcgauccggcgccucaagacccccgcccagaugagcauccagcugaucaacaaggccgugaacgcccugaucaacgaccagcucaucaugaagaaccaccuccgggacaucaugggcauccccuacugcaacuacuccaaguacugguaccugaaccacacggugaccgggaagaccagccugccccgcugcuggcuggucuccaacggcagcuaccugaacgagacccacuucuccgacgacaucgagcagcaggccgacaacaugaucacggagaugcuccagaaggaguacauggaccggcagggcaagaccccgcuggggcugguggaccucuucguguucagcaccuccuucuaccugaucagcaucuuccugcaccuggucaagaucccgacccaccgccacgugaucggcaagcccugccccaagccccaccggcucaaccacauggggaucugcuccugcggccuguacaagcacccgggggugcccgucaaguggaagcgcugaggacuagucccuguucccagagcccacuuuuuuuucuuuuuuugaaauaaaauagccugucuuucagaucucaaaggcucuuuucagagccaccaaaaaaaaaaaaaaaaaaaaaaaaaaaaaaaaaaaaaaaaaaaaaaaaaaaaaaaaaaaaaaaaagaauu

SEQ ID NO: 30295 - RNA, 1733 nt, Artificial Sequence
  mRNA product Design a-2 (hSL-A64-N5) comprising derived and/or modified sequence from LASV(LASV237-NIG-2010;Clade II)__AIT17638__GPCmut6 (opt1)
aggagaguccgcucagccagguugcagaagcggcuuagcguguguccuaaucuucucucugcguguagguaggccugugccgcaaacaagcuuaccaugggccagaucaucaccuucuuccaggaggugccccacgucaucgaggaggugaugaacaucgugcugaucgcccucagccugcuggccauccucaaggggaucuacaacgucgcgaccugcggccuguucgggcugguguccuuccuccugcugugcggccgcagcugcuccacgaccuacaaggggguguacgagcuccagacccuggagcuggacauggccagccucaacaugugcaugccgcuguccugcacgaagaacaacagccaccacuacaucauggucggcaacgagaccggccuggagcucacccugaccaacacguccaucaucaaccacaaguucugcaaccugagcgacgcccacaagaaggaccucuacgaccacgcccugauguccaucaucagcaccuuccaccuguccauccccaacuucaaccaguacgaggccaugagcugcgacuucaacgggggcaagaucuccgugcaguacaaccucagccacaccuacgcgguggacgccgccaaccacugcgggaccaucgccaacggcguccugcagacguucaugcggauggcguggggcggguccuacaucgcccuggacagcggcaagggguccugggacugcaucaugaccagcuaccaguaccucaucauccagaacaccaccugggaggaccacugccaguucucccgccccagccccaucggcuaccuggggcugcucagccagcggacgcgcgacaucuacaucucccggcgccugcugggcaccuucaccuggacccucagcgacuccgagggcaacgagacgcccgggggcuacugccugacccgguggaugcugaucgaggccgagcucaagugcuucgggaacaccgccguggccaagugcaacgagaagcacgacgaggaguucugcgacaugcugcgccuguucgacuucugcaagcaggcgauccggcgccucaagacccccgcccagaugagcauccagcugaucaacaaggccgugaacgcccugaucaacgaccagcucaucaugaagaaccaccuccgggacaucaugggcauccccuacugcaacuacuccaaguacugguaccugaaccacacggucaccgggaagaccagccugccccgcugcuggcugguguccaacggcagcuaccugaacgagacccacuucuccgacgacaucgagcagcaggccgacaacaugaucacggagcuccugcagaaggaguacauggaccggcagggcaagaccccgcuggggcucguggaccuguucgucuucagcaccuccuucuaccugaucagcaucuuccugcaccucaucaagaucccgacccaccgccacaucacgggcaagcccugccccaagccccaccggcugaaccacauggggaucugcuccugcggccuguacaagcacccgggggugcccgugaaguggaagcgcugaggacuagucccuguucccagagcccacuuuuuuuucuuuuuuugaaauaaaauagccugucuuucagaucucaaaggcucuuuucagagccaccaaaaaaaaaaaaaaaaaaaaaaaaaaaaaaaaaaaaaaaaaaaaaaaaaaaaaaaaaaaaaaaaagaauu

SEQ ID NO: 30296 - RNA, 1733 nt, Artificial Sequence
  mRNA product Design a-2 (hSL-A64-N5) comprising derived and/or modified sequence from LASV(LASV253-NIG-2011;Clade II)__AIT17670__GPCmut6 (opt1)
aggagaguccgcucagccagguugcagaagcggcuuagcguguguccuaaucuucucucugcguguagguaggccugugccgcaaacaagcuuaccaugggccagaucaucaccuucuuccaggaggugccccacgucaucgaggaggugaugaacaucgugcugaucgcccucagccugcuggccauccucaaggggaucuacaacgucgcgaccugcggccuguucgggcugguguccuuccuccugcugugcggccgcagcugcuccacgaccuacaaggggguguacgagcuccagacccuggagcuggacauggccagccucaacaugugcaugccgcuguccugcacgaagaacaacagccaccacuacaucauggucggcaacgagaccggccuggagcucacccugaccaacacguccaucaucaaccacaaguucugcaaccugagcgacgcccacaagaagaaccucuacgaccacgcccugauguccaucaucagcaccuuccaccuguccauccccaacuucaaccaguacgaggccaugagcugcgacuucaacgggggcaagaucuccgugcaguacaaccucagccacaccuacgcgguggacgccgccaaccacugcgggaccaucgccaacggcguccugcagacguucaugcggauggcguggggcggguccuacaucgcccuggacagcggcaagggguccugggacugcaucaugaccagcuaccaguaccucaucauccagaacaccaccugggaggaccacugccaguucucccgccccagccccaucggcuaccuggggcugcucagccagcggacgcgcgacaucuacaucucccggcgccugcugggcaccuucaccuggacccucagcgacuccgagggcaacgagacgcccgggggcuacugccugacccgguggaugcugaucgaggccgagcucaagugcuucgggaacaccgccguggccaagugcaacgagaagcacgacgaggaguucugcgacaugcugcgccuguucgacuucugcaagcaggcgauccggcgccucaaggcccccgcccagaugagcauccagcugaucaacaaggccgugaacgcccugaucaacgaccagcucaucaugaagaaccaccuccgggacaucaugggcaucccguacugcaacuacuccaaguacugguaccugaaccacaccgucacggggcgcaccagccugccccggugcuggcugguguccaacggcagcuaccugaacgagacccacuucuccgacgacaucgagcagcaggcggacaacaugaucaccgagcuccugcagaaggaguacaucgaccgccagggcaagacgccccuggggcucguggaccuguucgucuucagcaccuccuucuaccugaucagcaucuuccugcaccucgugaagaucccgacccaccggcacaucaucggcaagcccugccccaagccccaccgccugaaccacauggggaucugcuccugcggccuguacaagcacccgggggugcccgucaaguggaagcggugaggacuagucccuguucccagagcccacuuuuuuuucuuuuuuugaaauaaaauagccugucuuucagaucucaaaggcucuuuucagagccaccaaaaaaaaaaaaaaaaaaaaaaaaaaaaaaaaaaaaaaaaaaaaaaaaaaaaaaaaaaaaaaaaagaauu

SEQ ID NO: 30297 - RNA, 1733 nt, Artificial Sequence
  mRNA product Design a-2 (hSL-A64-N5) comprising derived and/or modified sequence from LASV(LASV254-NIG-2011;Clade II)__AIT17674__GPCmut6 (opt1)
aggagaguccgcucagccagguugcagaagcggcuuagcguguguccuaaucuucucucugcguguagguaggccugugccgcaaacaagcuuaccaugggccagaucaucaccuucuuccaggaggugccccacgucaucgaggaggugaugaacaucgugcugaucgcccucagccugcuggccauccucaaggggaucuacaacgucgcgaccugcggccuguucgggcugguguccuuccuccugcugugcggccgcagcugcuccacgaccuacaaggggguguacgagcuccagacccuggagcuggacaugaccaaccucaacaugugcaugccgcugagcugcaccaagaacaacucccaccacuacaucauggucggcaacgagaccggccuggagcucacccugacgaacaccagcaucaucaaccacaaguucugcaaccuguccgacgcccacaagaagaaccucuacaaccacgcccugaugagcaucaucuccaccuuccaccugagcauccccaacuucaaccaguacgaggccauguccugcgacuucaacgggggcaagaucagcgugcaguacaaccucucccacagcuacgccguggacgcggccaaccacugcgggaccaucgccaacggcguccugcagacguucaugcggauggccuggggcggguccuacaucgcgcuggacagcggcaaggggaacugggacugcaucaugaccuccuaccaguaccucaucauccagaacaccaccugggaggaccacugccaguucagccgccccucccccaucggcuaccuggggcugcucagccagcggacgcgcgacaucuacaucagccggcgccugcugggcaccuucaccuggacccucuccgacagcgagggcaacgagacgcccgggggcuacugccugacccgguggaugcugaucgaggccgagcucaagugcuucgggaacaccgccguggccaagugcaacgagaagcacgacgaggaguucugcgacaugcugcgccuguucgacuucugcaagcaggccauccggcgccucaagacccccgcgcaggccaacauccagcugaucaacaaggccgugaacgcccugaucaacgaccagcucaucaugaagaaccaccuccgggacaucaugggcauccccuacugcaacuacuccaaguacugguaccugaaccacacggucaccgggaagaccagccugccccgcugcuggcugguguccaacggcagcuaccugaacgagacccacuucuccgacgacaucgagcagcaggccgacaacaugaucacggagcuccugcagaaggaguacauggaccggcagggcaagaccccgcuggggcucguggaccuguucgucuucagcaccuccuucuaccugaucagcaucuuccugcaccucgugaagaucccgacccaccgccacgugaucggcaagcccugccccaagccccaccggcugaaccacauggggaucugcuccugcggccuguacaagcacccggggguccccgugaaguggaagcgcugaggacuagucccuguucccagagcccacuuuuuuuucuuuuuuugaaauaaaauagccugucuuucagaucucaaaggcucuuuucagagccaccaaaaaaaaaaaaaaaaaaaaaaaaaaaaaaaaaaaaaaaaaaaaaaaaaaaaaaaaaaaaaaaaagaauu

SEQ ID NO: 30298 - RNA, 1733 nt, Artificial Sequence
  mRNA product Design a-2 (hSL-A64-N5) comprising derived and/or modified sequence from LASV(Nig08-A19;Clade III)__ADU56618__GPCmut6 (opt1)
aggagaguccgcucagccagguugcagaagcggcuuagcguguguccuaaucuucucucugcguguagguaggccugugccgcaaacaagcuuaccaugggccagaucgugaccuucuuccaggaggucccccacgugaucgaggaggugaugaacaucguccugaucgcccucagcauccuggccauccugaaggggcucuacaacaucgcgaccugcggccugaucgggcuggugacguuccuccugcuguccggccgcagcugcuccaugaccuacaaggggguguacgagcuccagacccuggagcugaacaugaacacccucaacaugugcaugccgcugagcugcaccaagaacaacucccaccacuacaucauggucggcaacgagaccggccuggagcucacccugacgaacaccagccugcuccaccacaaguucugcaaccuguccgacgcccacaagaagaaccuguacgaccacacccucaugagcaucaucuccaccuuccaccugagcauccccaacuucaaccaguacgaggccauguccugcgacuucaacgggggcaagaucacggugcaguacaaccugagccacuccuacgccaucgacgccgcgaaccacugcgggaccguggccaacggcguccuccagaccuucaugcggauggccuggggcgggagcuacaucgcccuggacuccggccgcgggaagugggacugcaucaugaccagcuaccaguaccugaucauccagaacacgaccugggaggaccacugccaguucucccggcccagccccaucggcuaccucgggcugcugucccagcgcacccgggacaucuacaucagccgccggcuccugggcaccuucacguggacccugagcgacuccgagggcaacgagacccccgggggcuacugccucacccgcuggaugcugaucgaggcggagcugaagugcuucgggaacacggccguggccaagugcaacgagaagcacgacgaggaguucugcgacaugcuccggcuguucgacuucugcaagcaggccauccgccggcugaaggcccccgcgcagaugagcauccagcucaucaacaaggccgugaacgcccugaucaacgaccagcugaucaugaagaaccaccuccgcgacaucaugggcauccccuacugcaacuacuccaaguacugguaccugaaccacaccagcaccgggcggaccucccugccccgcugcuggcucgucagcaacggcuccuaccugaacgagacgcacuucagcgacgacaucgagcagcaggccgacaacaugaucaccgagaugcugcagaaggaguaccucgaccggcagggcaagaccccgcuggggcugguggaccuguucguguucuccaccagcuucuaccucaucuccaucuuccugcaccuggucaagaucccgacgcaccgccacaucgugggcaagcccugccccaagccccaccggcucaaccacauggggaucugcagcugcggccuguacaagcagccgggggugcccguccgcuggaagcggugaggacuagucccuguucccagagcccacuuuuuuuucuuuuuuugaaauaaaauagccugucuuucagaucucaaaggcucuuuucagagccaccaaaaaaaaaaaaaaaaaaaaaaaaaaaaaaaaaaaaaaaaaaaaaaaaaaaaaaaaaaaaaaaaagaauu

SEQ ID NO: 30299 - RNA, 1736 nt, Artificial Sequence
  mRNA product Design a-2 (hSL-A64-N5) comprising derived and/or modified sequence from LASV(G1180-SLE-2010;Clade IV)__AIT17168__GPCmut6 (opt1)
aggagaguccgcucagccagguugcagaagcggcuuagcguguguccuaaucuucucucugcguguagguaggccugugccgcaaacaagcuuaccaugggccagaucgugaccuucuuccaggaggucccccacgugaucgaggaggugaugaacaucguccugaucgcccucagcauccuggccgugcugaaggggcucuacaacuucgcgaccugcggccugguggggcugcucaccuuccugcugcucugcggccgcuccugcaccgccagccgguacaagggggucuacgagcugcagacccuggagcucaacauggagacccugaacaugugcaugccgcuguccugcaccaagaacaacagccaccacuacaucauggugggcaacgagaccggccucgagcugacccugacgaacaccuccaucaucaaccacaaguucugcaaccucagcgacgcccacaagaagaaccuguacgaccacgcccugauguccaucaucagcaccuuccaccucuccauccccaacuucaaccaguacgaggccaugagcugcgacuucaacgggggcaagaucuccgugcaguacaaccugagccacuccuacgcgggggacgccgccaaccacugcggcaccgucgccaacggggugcugcagacguucaugcgcauggcguggggcggcagcuacaucgcccucgacuccgggcacggcagcugggacugcaucaugaccuccuaccaguaccugaucauccagaacaccaccugggaggaccacugccaguucagccggcccucccccaucggguaccugggccuccugagccagcgcacgcgggacaucuacaucagccgccggcugcucggcaccuucaccuggacccuguccgacagcgaggggaaggacacgccgggcggguacugccugacccgcuggaugcucaucgaggccgagcugaagugcuucggcaacaccgccguggccaagugcaacgagaagcacgacgaggaguucugcgacaugcugcggcuguucgacuucugcaagcaggcgauccagcgccugaaggcccccgcccagauguccauccagcugaucaacaaggccgucaacgcccucaucaacgaccagcugaucaugaagaaccaccuccgggacaucauggggauccccuacugcaacuacagcaaguacugguaccucaaccacaccacgaccggcaagaccucccugcccaagugcuggcuggugagcaacggcuccuaccucaacgagacccacuucagcgacgacaucgagcagcaggcggacaacaugaucacggagaugcugcagaaggaguacauggagcgccaggggaagacgccccugggccucguggaccuguucgucuucuccaccagcuucuaccugaucuccaucuuccugcaccucgugaagaucccgacccaccggcacaucgugggcaagagcugccccaagccccaccgccugaaccacauggggaucugcuccugcgggcuguacaagcagcccggcgucccggugaaguggaagcggugaggacuagucccuguucccagagcccacuuuuuuuucuuuuuuugaaauaaaauagccugucuuucagaucucaaaggcucuuuucagagccaccaaaaaaaaaaaaaaaaaaaaaaaaaaaaaaaaaaaaaaaaaaaaaaaaaaaaaaaaaaaaaaaaagaauu

SEQ ID NO: 30300 - RNA, 1736 nt, Artificial Sequence
  mRNA product Design a-2 (hSL-A64-N5) comprising derived and/or modified sequence from LASV(G1442-SLE-2011;Clade IV)__AIT17180__GPCmut6 (opt1)
aggagaguccgcucagccagguugcagaagcggcuuagcguguguccuaaucuucucucugcguguagguaggccugugccgcaaacaagcuuaccaugggccagaucgugaccuucuuccaggaggucccccacgugaucgaggaggugaugaacaucguccugaucgcccucagcauccuggccgugcugaaggggcucuacaacguggcgaccugcggccugaucgggcuggucacguuccuccugcugugcggccgcuccugcaccaccacccucuacaaggggguguacgagcugcagacgcuggagcucaacauggagacccugaacaugugcaugccgcugagcugcaccaagaacaacucccaccacuacauccgggugggcaacgagacgggccucgagcugacccugaccaacaccagcaucaucaaccacaaguucugcaaccucuccgacgcccacaagaagaaccuguacgaccacgcccugaugagcaucaucuccacguuccaccucagcauccccaacuucaaccaguacgaggccauguccugcgacuucaacgggggcaagaucagcguccaguacaaccugucccacagcuacgccggggacgcggccaaccacugcggcaccguggccaacggggugcugcagaccuucaugcgcauggccuggggcggcuccuacaucgcgcucgacagcgggcggggcaacugggacugcaucaugaccuccuaccaguaccugaucauccagaacacgaccugggacgaccacugccaguucagccgccccucccccaucggguaccugggccuccugagccagcggacccgcgacgucuacaucucccggcgccugcucggcaccuucacguggacccugagcgacagcgaggggaaggacaccccgggcggguacugccugacccgguggaugcucaucgaggccgagcugaagugcuucggcaacacggccguggccaagugcaacgagaagcacgacgaggaguucugcgacaugcugcgccucuucgacuucugcaagcaggccauccagcggcugaaggcgcccgcccagauguccauccagcugaucaacaaggccgugaacgcccucaucaacgaccagcugaucaugaagaaccaccuccgcgacaucauggggauccccuacugcaacuacagcaaguacugguaccugaacaacaccgccaccggcaagaccucccugcccaagugcuggcugaucagcaacggcuccuaccucaacgagacgcacuucagcgacgacaucgagcaggaggcggacaacaugaucaccgagaugcugcagaaggaguacauggagcggcaggggaagacgccccugggccucgucgaccuguucguguucuccaccagcuucuaccugaucuccaucuuccugcaccucgugaagaucccgacccaccgccacaucgucggcaagagcugccccaagccccaccggcugaaccacauggggaucugcuccugcgggcuguacaagcagcccggcgugccggugcgcuggaagcggugaggacuagucccuguucccagagcccacuuuuuuuucuuuuuuugaaauaaaauagccugucuuucagaucucaaaggcucuuuucagagccaccaaaaaaaaaaaaaaaaaaaaaaaaaaaaaaaaaaaaaaaaaaaaaaaaaaaaaaaaaaaaaaaaagaauu

SEQ ID NO: 30301 - RNA, 1736 nt, Artificial Sequence
  mRNA product Design a-2 (hSL-A64-N5) comprising derived and/or modified sequence from LASV(G3010-SLE-2013;Clade IV)__AIT17344__GPCmut6 (opt1)
aggagaguccgcucagccagguugcagaagcggcuuagcguguguccuaaucuucucucugcguguagguaggccugugccgcaaacaagcuuaccaugggccagaucgugaccuucuuccaggaggucccccacgugaucgaggaggugaugaacaucguccugaucgcccucagcauccuggccgugcugaaggggcucuacaacuucgcgaccugcggccugguggggcuggucacguuccuccugcugugcggccgcuccugcaccaccagccucuacaaggggguguacgagcugcagacccuggagcucaacauggagacgcugaacaugugcaugccgcuguccugcaccaagaacaacagccaccacuacaucauggugggcaacgagaccggccucgagcugacgcugaccaacaccuccaucaucaaccacaaguucugcaaccucagcgacgcccacaagaagaaccuguacaaccacgcccugauguccaucaucagcaccuuccaccucuccauccccaacuucaaccaguacgaggccaugagcugcgacuucaacgggggcaagaucuccguccaguacaaccugagccacuccuacgccggggacgcggccagccacugcggcacgguggccaacggggugcugcagaccuucaugcggauggccuggggcggcuccuacaucgcgcucgacagcggguacggcaagugggacugcaucaugaccuccuaccaguaccugaucauccagaacaccacgugggaggaccacugccaguucagccgccccucccccaucggguaccugggccuccugagccagcggacccgcgacaucuacaucagccggcgccugcucggcaccuucaccuggacgcuguccgacagcgaggggaaggacaccccgggcggguacugccugacccgguggaugcucaucgaggccgagcugaagugcuucggcaacaccgccgucgccaagugcaacgagaagcacgacgaggaguucugcgacaugcugcgccucuucgacuucugcaagcaggccauccagcggcugaagacgcccgcgcagauguccauccagcugaucaacaaggccgugaacgcccucaucaacgaccagcugaucaugaagaaccaccuccgcgacaucauggggauccccuacugcaacuacagcaaguacugguaccugaaccacaccaccaccggcaagacgucccugcccaagugcuggcuggugagcaacggcuccuaccucaacgagacccacuucagcgacgacaucgagcagcaggccgacaacaugaucaccgagaugcugcagaaggaguacauggagcggcaggggaagacgccccugggccucgucgaccuguucguguucuccaccagcuucuaccugaucuccaucuuccugcaccucgugaagaucccgacccaccgccacaucgucggcaagagcugccccaagccccaccggcugaaccacauggggaucugcuccugcgggcuguacaagcagcccggcgugccggugcgcuggaagcggugaggacuagucccuguucccagagcccacuuuuuuuucuuuuuuugaaauaaaauagccugucuuucagaucucaaaggcucuuuucagagccaccaaaaaaaaaaaaaaaaaaaaaaaaaaaaaaaaaaaaaaaaaaaaaaaaaaaaaaaaaaaaaaaaagaauu

SEQ ID NO: 30302 - RNA, 1736 nt, Artificial Sequence
  mRNA product Design a-2 (hSL-A64-N5) comprising derived and/or modified sequence from LASV(G502-SLE-2009;Clade IV)__AIT17126__GPCmut6 (opt1)
aggagaguccgcucagccagguugcagaagcggcuuagcguguguccuaaucuucucucugcguguagguaggccugugccgcaaacaagcuuaccaugggccagaucgugaccuucuuccaggaggucccccacgugaucgaggaggugaugaacaucguccugaucgcccucagcauccuggccgugcugaaggggcucuacaacuucgcgaccugcggccugguggggcugcucacguuccugcugcucugcggccgcuccugcaccaccgggcuguacaagggcgucuacgagcugcagacccucgagcugaacauggagacgcugaacaugugcaugccgcucagcugcaccaagaacaacucccaccacuacaucauggugggcaacgagaccgggcuggagcugacgcucaccaacaccagcaucaucaaccacaaguucugcaaccuguccgacgcccacaagaagaaccuguacgaccacgcccucaugagcaucaucuccaccuuccaccugagcauccccaacuucaaccaguacgaggccauguccugcgacuucaacggcgggaagaucagcgugcaguacaaccugucccacagcuacgccggcgacgcggccgaccacugcgggacggucgccaacggcgugcuccagaccuucaugcggauggccuggggcggguccuacaucgcgcuggacagcggccgcgggcggugggacugcaucaugaccuccuaccaguaccugaucauccagaacaccacgugggaggaccacugccaguucagccgccccucccccaucggcuaccucggccugcugagccagcggacccgcgacaucuacaucucccggcgccuccuggggaccuucaccuggacgcugagcgacagcgagggcaaggacacccccgggggcuacugccucacccgguggaugcugaucgaggccgagcugaagugcuucgggaacaccgccguggccaagugcaacgagaagcacgacgaggaguucugcgacaugcuccgccuguucgacuucugcaagcaggccauccagcggcugaaggcgcccgcccagauguccauccagcucaucaacaaggccgucaacgcccugaucaacgaccagcuggugaugaagaaccaccuccgcgacaucaugggcauccccuacugcaacuacagccgguacugguaccugaaccacacgaccaccggccgcaccucccugcccaagugcuggcucgugagcaacggguccuaccugaacgagacgcacuucagcgacgacaucgagcagcaggccgacaacaugaucaccgagaugcugcagaaggaguacauggagcggcagggcaagaccccgcucgggcuggucgaccuguucguguucuccaccagcuucuaccugaucuccaucuuccuccaccuggugaagaucccgacgcaccgccacaucgucggcaagagcugccccaagccccaccggcugaaccacauggggaucugcuccugcggccucuacaagcagcccggcgugccggugaaguggaagcgcugaggacuagucccuguucccagagcccacuuuuuuuucuuuuuuugaaauaaaauagccugucuuucagaucucaaaggcucuuuucagagccaccaaaaaaaaaaaaaaaaaaaaaaaaaaaaaaaaaaaaaaaaaaaaaaaaaaaaaaaaaaaaaaaaagaauu

SEQ ID NO: 30303 - RNA, 1736 nt, Artificial Sequence
  mRNA product Design a-2 (hSL-A64-N5) comprising derived and/or modified sequence from LASV(G733-SLE-2010;Clade IV)__AIT17154__GPCmut6 (opt1)
aggagaguccgcucagccagguugcagaagcggcuuagcguguguccuaaucuucucucugcguguagguaggccugugccgcaaacaagcuuaccaugggccagaucgugaccuucuuccaggaggucccccacgugaucgaggaggugaugaacaucguccugaucgcccucagcauccuggccgugcugaaggggcucuacaacuucgcgaccugcggcaucguggggcuggucuccuuccugcuccugugcggccgcagcugcacgaccucccuguacaaggggguguacgagcuccagacccuggagcugaacauggagacccucaacaugugcaugccgcugagcugcaccaagaacaacucccaccacuacaucauggugggcaacgagaccggccuggagcucacccugacgaacaccagcaucaucaaccacaaguucugcaaccuguccgacgcccacaagaagaaccucuacgaccacgcccugaugagcaucaucuccaccuuccaccugagcauccccaacuucaaccaguacgaggccauguccugcgacuucaacgggggcaagaucagcguccaguacaaccucucccacagcuacgccggggacgcggccaaccacugcggcaccaucgccaacggggugcugcagacguucaugcggauggccuggggcggcuccuacaucgcgcuggacagcgggcgcgaccggugggacugcaucaugaccuccuaccaguaccucaucauccagaacaccaccugggaggaccacugccaguucagccgccccucccccaucggcuaccuggggcugcucagccagcggacgcgcgacaucuacaucagccggcgccugcugggcaccuucaccuggacccucuccgacagcgagggcaaggacacgcccgggggcuacugccugacccgguggaugcugaucgaggccgagcucaagugcuucgggaacaccgccguggccaagugcaacgagaagcacgacgaggaguucugcgacaugcugcgccuguucgacuucugcaagcaggccauccagcggcucaaggcgcccgcccagauguccauccagcugaucaacaaggccgucaacgcccugaucaacgaccagcucaucaugaagaaccaccuccgcgacaucaugggcauccccuacugcaacuacagcaaguacugguaccugaaccacaccacgaccgggaagaccucccugcccaagugcuggcuggugagcaacggcuccuaccugaacgagacccacuucagcgacgacaucgagcagcaggccgacaacaugaucacggagaugcuccagaaggaguacauggagcggcagggcaagaccccgcuggggcugguggaccucuucgucuucuccaccagcuucuaccugaucuccaucuuccugcaccuggugaagaucccgacccaccgccacguggucggcaagagcugccccaagccccaccggcucaaccacauggggaucugcuccugcggccuguacgggcagcccggcgugccggugaaguggaagcgcugaggacuagucccuguucccagagcccacuuuuuuuucuuuuuuugaaauaaaauagccugucuuucagaucucaaaggcucuuuucagagccaccaaaaaaaaaaaaaaaaaaaaaaaaaaaaaaaaaaaaaaaaaaaaaaaaaaaaaaaaaaaaaaaaagaauu

SEQ ID NO: 30304 - RNA, 1736 nt, Artificial Sequence
  mRNA product Design a-2 (hSL-A64-N5) comprising derived and/or modified sequence from MOPV/LASV reassortant(IGS-1;Clade IV)__AFY05576__GPCmut6 (opt1)
aggagaguccgcucagccagguugcagaagcggcuuagcguguguccuaaucuucucucugcguguagguaggccugugccgcaaacaagcuuaccaugggccagaucgugaccuucuuccaggaggucccccacgugaucgaggaggugaugaacaucguccugaucgcccucagcgugcuggccgugcugaaggggcucuacaacuucgcgaccugcggccuggucgggcuggugacguuccuccugcugugcggccgcuccugcaccaccagccucuacaaggggguguacgagcugcagacccuggagcucaacauggagacgcugaacaugugcaugccgcuguccugcaccaagaacaacagccaccacuacaucauggucggcaacgagaccggccucgagcugacgcugaccaacaccuccaucaucaaccacaaguucugcaaccucagcgacgcccacaagaagaaccuguacgaccacgcccugauguccaucaucagcaccuuccaccucuccauccccaacuucaaccaguacgaggccaugagcugcgacuucaacgggggcaagaucuccgugcaguacaaccugagccacuccuacgccggggacgcggccaaccacugcggcacgguggccaacgggguccugcagaccuucaugcggauggccuggggcggcagcuacaucgcgcucgacuccgggcgcggcaacugggacugcaucaugaccagcuaccaguaccugaucauccagaacaccacgugggaggaccacugccaguucucccggcccagccccaucggguaccugggccuccugucccagcgcacccgggacaucuacaucagccgccggcugcucggcaccuucaccuggacgcugagcgacuccgagggggaggacaccccgggcggguacugccugacccgcuggaugcucaucgaggccgagcugaagugcuucggcaacaccgccguggccaagugcaacgagaagcacgacgaggaguucugcgacaugcugcggcuguucgacuucugcaagcaggccauccagcgccugaaggcgcccgcccagaugagcauccagcugaucaacaaggccgugaacgcccucaucaacgaccagcugaucaugaagaaccaccuccgggacaucauggggauccccuacugcaacuacuccaaguacugguaccucaaccacacgaccaccggccgcaccagccugcccaagugcuggcuggucuccaacggcagcuaccucaacgagacgcacuucuccgacgacaucgagcagcaggccgacaacaugaucaccgagaugcugcagaaggaguacauggagcggcaggggaagacgccccugggccucguggaccuguucguguucagcaccuccuucuaccugaucagcaucuuccugcaccucgucaagaucccgacccaccgccacaucguggggaaguccugccccaagccccaccggcugaaccacaugggcaucugcagcugcgggcuguacaagcagcccggcgugccggucaaguggaagcgcugaggacuagucccuguucccagagcccacuuuuuuuucuuuuuuugaaauaaaauagccugucuuucagaucucaaaggcucuuuucagagccaccaaaaaaaaaaaaaaaaaaaaaaaaaaaaaaaaaaaaaaaaaaaaaaaaaaaaaaaaaaaaaaaaagaauu

SEQ ID NO: 30305 - RNA, 1736 nt, Artificial Sequence
  mRNA product Design a-2 (hSL-A64-N5) comprising derived and/or modified sequence from LASV(LM765-SLE-2012;Clade IV)__AIT17814__GPCmut6 (opt1)
aggagaguccgcucagccagguugcagaagcggcuuagcguguguccuaaucuucucucugcguguagguaggccugugccgcaaacaagcuuaccaugggccagaucgugaccuucuuccaggaggucccccacgugaucgaggaggugaugaacaucguccugaucgcccucagcauccuggccgugcugaaggggcucuacaacuucgcgaccugcggccugguggggcuggucacguuccuccugcugugcggccgcuccugcaccaccagccucuacaaggggguguacgagcugcagacccuggagcucaacauggagacgcugaacaugugcaugccgcuguccugcaccaagaacaacagccaccacuacaucauggugggcaacgagaccggccucgagcugacgcugaccaacaccuccaucaucgaccacaaguucugcaaccucagcgacgcccaccggaagaaccuguacgaccacgcccugauguccaucaucagcaccuuccaccucuccauccccaacuucaaccaguacgaggccaugagcugcgacuucaacgggggcaagaucuccguccaguacaaccugagccacuccuacgccaaggacgcggccgaccacugcgggacgguggccaacggcgugcugcagaccuucaugcgcauggccuggggcgggagcuacaucgcgcucgacuccggccgggggcgcugggacugcaucaugaccagcuaccaguaccugaucauccagaacaccacgugggaggaccacugccaguucucccggcccagccccaucggcuaccuggggcuccugucccagcgcacccgggacaucuacaucagccgccggcugcucggcaccuucaccuggacgcugagcgacuccgagggcaaggacacccccgggggcuacugccugacccgcuggaugcucaucgaggccgagcugaagugcuucgggaacaccgccgucgccaagugcaacgagaagcacgacgaggaguucugcgacaugcugcggcuguucgacuucugcaagcaggccauccagcgccugaaggcgcccgcccagaugagcauccagcugaucaacaaggccgugaacgcccucaucaacgaccagcugaucaugaagaaccaccuccgggacaucaugggcauccccuacugcaacuacuccaaguacugguaccucaaccacacgaccaccgggaagaccagccugcccaagugcuggcugguguccaacggcagcuaccucaacgagacgcacuucuccgacgacaucgagcagcaggccgacaacaugaucaccgagaugcugcagaaggaguacauggagcgccagggcaagaccccgcuggggcucgucgaccuguucguguucagcaccuccuucuaccugaucagcaucuuccugcaccucgugaagaucccgacgcaccggcacaucgucggcaagcccugccccaagccccaccgccugaaccacauggggaucugcuccugcggccuguacaagcagccgggggugcccgugaaguggaagcggugaggacuagucccuguucccagagcccacuuuuuuuucuuuuuuugaaauaaaauagccugucuuucagaucucaaaggcucuuuucagagccaccaaaaaaaaaaaaaaaaaaaaaaaaaaaaaaaaaaaaaaaaaaaaaaaaaaaaaaaaaaaaaaaaagaauu

SEQ ID NO: 30306 - RNA, 1736 nt, Artificial Sequence
  mRNA product Design a-2 (hSL-A64-N5) comprising derived and/or modified sequence from LASV(LM776-SLE-2012;Clade IV)__AIT17824__GPCmut6 (opt1)
aggagaguccgcucagccagguugcagaagcggcuuagcguguguccuaaucuucucucugcguguagguaggccugugccgcaaacaagcuuaccaugggccagaucgugaccuucuuccaggaggucccccacgugaucgaggaggugaugaacaucguccugaucgcccucagcauccuggccgugcugaaggggcucuacaacuucgcgaccugcggccugguggggcuggucacguuccuccugcugugcggccgcuccugcaccaccagcguguacaaggggguguacgagcuccagacccuggagcugaacauggagacgcucaacaugugcaugccgcuguccugcaccaagaacaacagccaccacuacaucauggucggcaacgagaccggccuggagcucacgcugaccaacaccuccaucaucaaccacaaguucugcaaccugagcgacgcccacaagaagaaccucuacgaccacgcccugauguccaucaucagcaccuuccaccuguccauccccaacuucaaccaguacgaggccaugagcugcgacuucaacgggggcaagaucuccgugcaguacaaccucagccacuccuacgccggggacgcggccaaccacugcggcacgguggccaacgggguccugcagaccuucaugcggauggccuggggcggcagcuacaucgcgcuggacuccgggcacggcaagugggacugcaucaugaccagcuaccaguaccucaucauccagaacaccacgugggaggaccacugccaguucucccgccccagccccaucggguaccugggccugcucucccagcggacccgcgacaucuacaucagccggcgccugcugggcaccuucaccuggacgcucagcgacuccgaggggaaggacaccccgggcggguacugccugacccgguggaugcugaucgaggccgagcucaagugcuucggcaacaccgccguggccaagugcaacgagaagcacgacgaggaguucugcgacaugcugcgccuguucgacuucugcaagcaggccauccagcggcucaaggcgcccgcccagaugagcauccagcugaucaacaaggccgugaacgcccugaucaacgaccagcucaucaugaagaaccaccuccgcgacaucauggggauccccuacugcaacuacuccaaguacugguaccugaaccacacgaccaccggcaagaccagccugcccaagugcuggcuggucuccaacggcagcuaccugaacgagacgcacuucuccgacgacaucgagcagcaggccgacaacaugaucaccgagaugcuccagaaggaguacauggagcggcaggggaagacgccccugggccugguggaccucuucguguucagcaccuccuucuaccugaucagcaucuuccugcaccuggucaagaucccgacccaccgccacaucguggggaaguccugccccaagccccaccggcucaaccacaugggcaucugcagcugcgggcuguacaagcagcccggcgugccgguccgcuggaagcggugaggacuagucccuguucccagagcccacuuuuuuuucuuuuuuugaaauaaaauagccugucuuucagaucucaaaggcucuuuucagagccaccaaaaaaaaaaaaaaaaaaaaaaaaaaaaaaaaaaaaaaaaaaaaaaaaaaaaaaaaaaaaaaaaagaauu

SEQ ID NO: 30307 - RNA, 1736 nt, Artificial Sequence
  mRNA product Design a-2 (hSL-A64-N5) comprising derived and/or modified sequence from LASV(Mad39;Clade IV)__ANH09722__GPCmut6 (opt1)
aggagaguccgcucagccagguugcagaagcggcuuagcguguguccuaaucuucucucugcguguagguaggccugugccgcaaacaagcuuaccaugggccagaucgugaccuucuuccaggaggucccccacgugaucgaggaggugaugaacaucguccugaucgcccucagcauccuggccgugcugaaggggcucuacaacguggcgaccugcggccugaucgggcuggucacguuccuccugcugugcggccgcuccugcaccaccacccucuacaaggggguguacgagcugcaggcccuggagcucaacauggagacgcugaacaugugcaugccgcugagcugcaccaagaacaacucccaccacuacauccgggugggcaacgagaccggccucgagcugacgcugaccaacaccagccucaucaaccacaaguucugcaaccuguccgacgcccacaagaagaaccuguacgaccacgcccucaugagcaucaucuccaccuuccaccugagcauccccaacuucaaccaguacgaggccauguccugcgacuucaacgacgggaagaucagcguccaguacaaccugucccacacguacgcgggcgacaccgccaaccacugcgggaccguggccaacggcgugcuccagaccuucaugcgcauggccuggggcgggagcuacaucgcgcuggacuccggccgcgggggcugggacugcaucaugacgagcuaccaguaccugaucauccagaacaccaccugggaggaccacugccaguucucccggcccagccccaucggguaccucggccugcugucccagcggacccgcgacaucuacaucagccggcgccuccugggcacguucaccuggacccuguccgacagcgaggggaaggacaccccgggcggguacugccucacgcgguggaugcugaucgaggccgagcugaagugcuucggcaacaccgccgucgccaagugcaacgagaagcacgacgaggaguucugcgacaugcuccgccuguucgacuucugcaagcaggccauccagcggcugaaggcgcccgcccagaugagcauccagcucaucaacaaggccgugaacgcccugaucaacgaccagcugaucaugaagaaccaccuccgcgacaucauggggauccccuacugcaacuacuccaaguacugguaccugaaccacaccgugaccggcaagacgagccugcccaagugcuggcucgucuccaacggcagcuaccugaacgagacccacuucuccgacgacaucgagcagcaggccgacaacaugaucaccgagaugcugcagaaggaguacauggagcggcaggggaagacgccccucggccugguggaccuguucguguucagcaccuccuucuaccugaucagcaucuuccuccaccuggucaagaucccgacccaccgccacgugguggggaagcccugccccaagccccaccggcugaaccacaugggcaucugcuccugcggguucuacaagcagccgggcguccccgugcgcuggaagcggugaggacuagucccuguucccagagcccacuuuuuuuucuuuuuuugaaauaaaauagccugucuuucagaucucaaaggcucuuuucagagccaccaaaaaaaaaaaaaaaaaaaaaaaaaaaaaaaaaaaaaaaaaaaaaaaaaaaaaaaaaaaaaaaaagaauu

SEQ ID NO: 30308 - RNA, 1736 nt, Artificial Sequence
  mRNA product Design a-2 (hSL-A64-N5) comprising derived and/or modified sequence from LASV(Z0947-SLE-2011;Clade IV)__AIT17840__GPCmut6 (opt1)
aggagaguccgcucagccagguugcagaagcggcuuagcguguguccuaaucuucucucugcguguagguaggccugugccgcaaacaagcuuaccaugggccagaucgugaccuucuuccaggaggucccccacgugaucgaggaggugaugaacaucguccugaucgcccucagcauccuggccgugcugaaggggcucuacaacuucgcgaccugcggccugguggggcuggucacguuccuccugcugugcggccgcuccugcaccaucagccucuacaaggggguguacgagcugcagacccuggagcucaacauggagacccugaacaugugcaugccgcuguccugcaccaagaacaacagccaccacuacaucauggugggcaacgagaccggccucgagcugacccugacgaacaccuccaucaucaaccacaaguucugcaaccucagcgacgcccacaagaagaaccuguacgaccacgcccugauguccaucaucagcaccuuccaccucuccauccccaacuucaaccaguacgaggccaugagcugcgacuucaacgggggcaagaucuccguccaguacaaccugagccacuccuacgccggggacgcggccaaccacugcggcaccguggccaacggggugcugcagacguucaugcggauggccuggggcggcagcuacaucgcgcucgacuccgggcgcgaccggugggacugcaucaugaccagcuaccaguaccugaucauccagaacaccaccugggaggaccacugccaguucucccgccccagccccaucggcuaccuggggcuccugucccagcggacgcgcgacaucuacaucagccggcgccugcucggcaccuucaccuggacccugagcgacuccgagggcaaggacacgcccgggggcuacugccugacccgguggaugcucaucgaggccgagcugaagugcuucgggaacaccgccgucgccaagugcaacgagaagcacgacgaggaguucugcgacaugcugcgccucuucgacuucugcaagcaggccauccagcggcugaaggcgcccgcccagaugagcauccagcugaucaacaaggccgugaacgcccucaucaacgaccagcugaucaugaagaaccaccuccgcgacaucaugggcauccccuacugcaacuacuccaaguacugguaccugaaccacaccacgaccgggaagaccagccugcccaagugcuggcugguguccaacggcagcuaccucaacgagacccacuucuccgacgacaucgagcagcaggccgacaacaugaucacggagaugcugcagaaggaguacauggagcggcagggcaagaccccgcuggggcucgucgaccuguucguguucagcaccuccuucuaccugaucagcaucuuccugcaccucgugaagaucccgacccaccgccacaucgucggcaagcccugccccaagccccaccggcugaaccacauggggaucugcuccugcggccuguacaagcagccgggggugcccgugaaguggaagcgcugaggacuagucccuguucccagagcccacuuuuuuuucuuuuuuugaaauaaaauagccugucuuucagaucucaaaggcucuuuucagagccaccaaaaaaaaaaaaaaaaaaaaaaaaaaaaaaaaaaaaaaaaaaaaaaaaaaaaaaaaaaaaaaaaagaauu

SEQ ID NO: 30309 - RNA, 1736 nt, Artificial Sequence
  mRNA product Design a-2 (hSL-A64-N5) comprising derived and/or modified sequence from LASV(Josiah;Clade IV)__NP_694870__GPCmut6 (opt1)
aggagaguccgcucagccagguugcagaagcggcuuagcguguguccuaaucuucucucugcguguagguaggccugugccgcaaacaagcuuaccaugggccagaucgugaccuucuuccaggaggucccccacgugaucgaggaggugaugaacaucguccugaucgcccucagcgugcuggccgugcugaaggggcucuacaacuucgcgaccugcggccuggucgggcuggugacguuccuccugcugugcggccgcuccugcaccaccagccucuacaaggggguguacgagcugcagacccuggagcucaacauggagacgcugaacaugugcaugccgcuguccugcaccaagaacaacagccaccacuacaucauggucggcaacgagaccggccucgagcugacccugacgaacaccuccaucaucaaccacaaguucugcaaccucagcgacgcccacaagaagaaccuguacgaccacgcccugauguccaucaucagcaccuuccaccucuccauccccaacuucaaccaguacgaggccaugagcugcgacuucaacgggggcaagaucuccgugcaguacaaccugagccacuccuacgccggggacgcggccaaccacugcggcaccguggccaacgggguccugcagacguucaugcggauggccuggggcggcagcuacaucgcgcucgacuccgggcgcggcaacugggacugcaucaugaccagcuaccaguaccugaucauccagaacaccaccugggaggaccacugccaguucucccggcccagccccaucggguaccugggccuccugucccagcgcacgcgggacaucuacaucagccgccggcugcucggcaccuucaccuggacccugagcgacuccgaggggaaggacacgccgggcggguacugccugacccgcuggaugcucaucgaggccgagcugaagugcuucggcaacaccgccguggccaagugcaacgagaagcacgacgaggaguucugcgacaugcugcggcuguucgacuucugcaagcaggccauccagcgccugaaggcgcccgcccagaugagcauccagcugaucaacaaggccgugaacgcccucaucaacgaccagcugaucaugaagaaccaccuccgggacaucauggggauccccuacugcaacuacuccaaguacugguaccucaaccacaccacgaccggccgcaccagccugcccaagugcuggcuggucuccaacggcagcuaccucaacgagacccacuucuccgacgacaucgagcagcaggccgacaacaugaucacggagaugcugcagaaggaguacauggagcggcaggggaagaccccgcugggccugguggaccucuucguguucagcaccuccuucuaccugaucagcaucuuccugcaccucgucaagauccccacccaccgccacaucguggggaaguccugccccaagccccaccggcugaaccacaugggcaucugcagcugcgggcuguacaagcagccgggcgugcccgucaaguggaagcgcugaggacuagucccuguucccagagcccacuuuuuuuucuuuuuuugaaauaaaauagccugucuuucagaucucaaaggcucuuuucagagccaccaaaaaaaaaaaaaaaaaaaaaaaaaaaaaaaaaaaaaaaaaaaaaaaaaaaaaaaaaaaaaaaaagaauu

SEQ ID NO: 30310 - RNA, 1733 nt, Artificial Sequence
  mRNA product Design a-2 (hSL-A64-N5) comprising derived and/or modified sequence from LASV(LP;Clade I)__AAF86701__GPCmut6 (opt1)
aggagaguccgcucagccagguugcagaagcggcuuagcguguguccuaaucuucucucugcguguagguaggccugugccgcaaacaagcuuaccaugggccagaucaucaccuucuuccaggaggugccccacgucaucgaggaggugaugaacaucgugcugaucgcccucagccugcuggccauccucaaggggcuguacaacaucgcgaccugcggcaucaucgggcuggucgccuuccucuuccugugcggcaaguccugcagccugacgcucaagggcggguacgagcugcagacccuggagcucaacauggagacccugaacaugugcaugccgcuguccugcaccaagaacagcucccaccacuacauccgcgugggcaacgagacggggcucgagcugacccugaccaacaccagcaucaucaaccacaaguucugcaaccucuccgacgcccacaagaagaaccuguacgaccacgcccugaugagcaucaucuccacguuccaccucagcauccccaacuucaaccaguacgaggccauguccugcgacuucaacggcgggaagaucagcgugcaguacaaccugucccacagcuacgcgggcgacgccgccgagcacugcgggaccgucgccaacggcgugcugcagaccuucaugcggauggcguggggcgggcgcuacaucgcccucgacuccggcaaggggaacugggacugcaucaugaccagcuaccaguaccugaucauccagaacacgaccugggaggaccacugccaguucucccggcccagccccaucggcuaccugggccuccugucccagcgcacccgggacaucuacaucagccgccggcugcucgggaccuucacguggacccugagcgacuccgagggcaacgagacccccgggggcuacugccugacccgcuggaugcucaucgaggccgagcugaagugcuucgggaacacggccguggccaagugcaacgagaagcacgacgaggaguucugcgacaugcugcggcuguucgacuucugcaagcaggcgauccgccggcugaaggccccggcccagaugagcauccagcugaucaacaaggccgucaacgcccucaucaacgaccagcugaucaugaagaaccaccuccgcgacaucaugggcauccccuacugcaacuacuccaaguacugguaccucaaccacaccagcuccggccggaccagccugcccaagugcuggcugaucuccaacgggagcuaccucaacgagacccaguucuccgacgacaucgagcagcaggcggacaacaugaucacggagaugcugcagaaggaguacaucgagcgccagggcaagaccccgcuggggcugguggacaucuucaucuucagcaccuccuucuaccucaucagcaucuuccugcaccugaucaagauccccacccaccggcacaucgugggcaagcccugccccaagccgcaccgccucaaccacaugggggucugcuccugcggccuguacaagcaccccggcgugcccacgaaguggaagcggugaggacuagucccuguucccagagcccacuuuuuuuucuuuuuuugaaauaaaauagccugucuuucagaucucaaaggcucuuuucagagccaccaaaaaaaaaaaaaaaaaaaaaaaaaaaaaaaaaaaaaaaaaaaaaaaaaaaaaaaaaaaaaaaaagaauu

SEQ ID NO: 30311 - RNA, 1733 nt, Artificial Sequence
  mRNA product Design a-2 (hSL-A64-N5) comprising derived and/or modified sequence from LASV(803213;Clade II)__AAF86703__GPCmut6 (opt1)
aggagaguccgcucagccagguugcagaagcggcuuagcguguguccuaaucuucucucugcguguagguaggccugugccgcaaacaagcuuaccaugggccagaucaucaccuucuuccaggaggugccccacgucaucgaggaggugaugaacaucgugcugaucgcccucagccugcuggccauccucaaggggaucuacaacgucgcgaccugcggccuguucgggcugaucuccuuccuccugcugugcggccgcagcugcuccgugacguacaaggggguguacgagcuccagacccuggagcugaacauggccaaccucaacaugugcaugccgcugagcugcaccaagaacaacucccaccacuacaucauggucggcaacgagaccggccuggagcucacgcugaccaacaccagcaucaucaaccacaaguucugcaaccuguccgacgcccacaagaagaaccucuacgaccacgcccugaugagcaucaucuccaccuuccaccugagcauccccaacuucaaccaguacgaggccauguccugcgacuucaacgggggcaagaucagcgugcaguacaaccucucccacagcuucgcgguggacgccgccaaccacugcgggacgaucgccaacggcguccugcagaccuucaugcggauggcguggggcggguccuacaucgcccuggacagcggcaaggggaacugggacugcaucaugaccuccuaccaguaccucaucauccagaacaccacgugggaggaccacugccaguucagccgccccucccccaucggcuaccuggggcugcucagccagcggacccgcgacaucuacaucagccggcgccugcugggcaccuucaccuggacgcucuccgacagcgagggcaacgaggcccccgggggcuacugccugacccgguggaugcugaucgaggccgagcucaagugcuucgggaacaccgccguggcgaagugcaacgagaagcacgacgaggaguucugcgacaugcugcgccuguucgacuucugcaagcaggccaucaagcggcucaagaccccggcccagauguccauccagcugaucaacaaggccgugaacgcccugaucaacgaccagcucaucaugaagaaccaccuccgcgacaucaugggcauccccuacugcaacuacagccgguacugguaccugaaccacacggucaccgggaagaccucccugccccgcugcuggcuggugagcaacggcuccuaccugaacgagacccacuucagcgacgacaucgagcagcaggcggacaacaugaucacggagaugcuccagaaggaguacauggaccggcagggcaagaccccgcuggggcugguggaccuguucgucuucuccaccagcuucuaccucaucuccaucuuccugcaccuggugaagauccccacccaccgccacaucgugggcaagcccugccccaagccgcaccggcucaaccacauggggaucugcagcugcggccuguacaagcaccccgggguccccgugaaguggaagcgcugaggacuagucccuguucccagagcccacuuuuuuuucuuuuuuugaaauaaaauagccugucuuucagaucucaaaggcucuuuucagagccaccaaaaaaaaaaaaaaaaaaaaaaaaaaaaaaaaaaaaaaaaaaaaaaaaaaaaaaaaaaaaaaaaagaauu

SEQ ID NO: 30312 - RNA, 1733 nt, Artificial Sequence
  mRNA product Design a-2 (hSL-A64-N5) comprising derived and/or modified sequence from LASV(GA391;Clade III)__CAA36645__GPCmut6 (opt1)
aggagaguccgcucagccagguugcagaagcggcuuagcguguguccuaaucuucucucugcguguagguaggccugugccgcaaacaagcuuaccaugggccagaucgugaccuucuuccaggaggucccccacgugaucgaggaggugaugaacaucguccugaucgcccucagcauccuggccauccugaaggggcucuacaacguggcgaccugcggccugaucgggcuggugacguuccuccugcuguccggccgcagcugcucccucaucuacaaggggaccuacgagcugcagacccuggagcucaacauggagacccugaacaugugcaugccgcugagcugcacgaagaacaacucccaccacuacauccgggucggcaacgagaccggccucgagcugacccugaccaacacgagcauccucaaccacaaguucugcaaccuguccgacgcccacaagcgcaaccuguacgaccacagccucauguccaucaucagcaccuuccaccuguccauccccaacuucaaccaguacgaggccaugagcugcgacuucaacgggggcaagaucaccgugcaguacaaccugucccacagcuucgccguggacgccgcggggcacugcggcacccucgccaacgggguccugcagacguucaugcggauggccuggggcggcuccuacaucgcccuggacagcgggcgcggcaacugggacugcaucaugaccuccuaccaguaccucaucauccagaacaccaccugggacgaccacugccaguucagccggcccucccccaucggguaccugggccugcucagccagcgcacgcgggacaucuacaucagccgccggcugcugggcaccuucaccuggacccucuccgacagcgaggggaacgagacgccgggcggguacugccugacccgcuggaugcugaucgaggcggagcucaagugcuucggcaacaccgccguggccaagugcaacgagaagcacgacgaggaguucugcgacaugcugcggcuguucgacuucugcaagcaggccauccgccggcucaagacccccgcccagauguccauccagcugaucaacaaggcggugaacgcccugaucaacgaccagcucaucaugaagaaccaccuccgcgacaucauggggauccccuacugcaacuacagccgguacugguaccugaaccacacguccaccggcaagaccagccugccccgcugcuggcugaucuccaacggcagcuaccugaacgagaccaaguucuccgacgacaucgagcagcaggccgacaacaugaucacggagaugcugcagaaggaguacaucgaccggcaggggaagaccccgcucggccuggucgaccuguucguguucagcaccuccuucuaccucaucagcaucuuccugcaccuggugaagauccccacccaccgccacaucgucgggaagcccugccccaagccgcaccggcucaaccacaugggcaucugcuccugcgggcuguacaagcagcccggcgugcccgugcgcuggaagcggugaggacuagucccuguucccagagcccacuuuuuuuucuuuuuuugaaauaaaauagccugucuuucagaucucaaaggcucuuuucagagccaccaaaaaaaaaaaaaaaaaaaaaaaaaaaaaaaaaaaaaaaaaaaaaaaaaaaaaaaaaaaaaaaaagaauu

SEQ ID NO: 30313 - RNA, 1736 nt, Artificial Sequence
  mRNA product Design a-2 (hSL-A64-N5) comprising derived and/or modified sequence from LASV(AV;Clade V)__CCA30314__GPCmut6 (opt1)
aggagaguccgcucagccagguugcagaagcggcuuagcguguguccuaaucuucucucugcguguagguaggccugugccgcaaacaagcuuaccaugggccagaucgugaccuucuuccaggaggucccccacgugaucgaggaggugaugaacaucguccugaucgcccucagcauccuggccgugcugaaggggcucuacaacaucgcgaccugcggccugaucgggcugaucacguuccuccugcugugcggccgcuccugcagcuccaaccucuacaaggggguguacgagcugcagagccuggaccucaacauggagacccugaacaugugcaugccgcuguccugcaccaagaacaacagccaccacuacauccgggucggcaacgacaccggccucgagcugacgcugaccaacaccuccauccucaaccacaaguucugcaaccugagcgacgcccacaagaaggaccuguacgaccacgcccucauguccaucaucagcaccuuccaccuguccauccccaacuucaaccaguacgaggccaugagcugcgacuucaacgggggcaagaucuccgugcaguacaaccugagccacuccuacgccaucgacgcggccaaccacugcgggacgguggccaacggcauccuccagaccuucaugcgcauggccuggggcgggagcuacaucgcgcuggacuccggccgggggaacugggacugcaucaugaccagcuaccaguaccugaucauccagaacaccacgugggagaaccacugccaguucucccgccccagccccaucggcuaccucgggcugcugagccagcggacccgcgacaucuacaucucccggcgccuccugggcaccuucaccuggacgcugagcgacuccgagggcaacgccacccccgggggcuacugccucacccgguggaugcugaucgaggccgagcugaagugcuucgggaacaccgccgucgccaagugcaacgagaagcacgacgaggaguucugcgacaugcuccgccuguucgacuucugcaagcaggcgaucagccggcugaaguccccggcccagaugagcauccagcucaucaacaaggccgugaacgcccugaucaacgaccagcugaucaugaagaaccaccuccgcgacaucaugggcauccccuacugcaacuacuccaaguacugguaccugaaccacacgaucaccgggaagaccagccugcccaagugcuggcucguguccaacggcagcuaccugaacgagacccacuucuccgacgacaucgagcagcaggccgacaacaugaucacggagaugcugcagaaggaguacauggagcggcagggcaagaccccgcuggggcucgucgaccuguucguguucagcaccuccuucuaccugaucagcaucuuccuccgccuggugaagauccccacccaccggcacaucgucggcaagcccugccccaagccgcaccgccugaaccacauggggaucugcuccugcggccucuacaagcagcccggggugcccgugcgguggaagcgcugaggacuagucccuguucccagagcccacuuuuuuuucuuuuuuugaaauaaaauagccugucuuucagaucucaaaggcucuuuucagagccaccaaaaaaaaaaaaaaaaaaaaaaaaaaaaaaaaaaaaaaaaaaaaaaaaaaaaaaaaaaaaaaaaagaauu

SEQ ID NO: 30314 - RNA, 1733 nt, Artificial Sequence
  mRNA product Design a-2 (hSL-A64-N5) comprising derived and/or modified sequence from LASV(Togo/2016/7082;Clade VI)__AMR44577__GPCmut6 (opt1)
aggagaguccgcucagccagguugcagaagcggcuuagcguguguccuaaucuucucucugcguguagguaggccugugccgcaaacaagcuuaccaugggccagaucaucaccuucuuccaggaggugccccacgucaucgaggaggugaugaacaucgugcugaucgcccucagccugcuggccauccucaagggggucuacaacguggcgaccugcggcaucaucgggcuggugacguuccuguuccucugcggccgcuccugcagccugaucuacaagggguccuacgagcugcagacccucgagcugaacauggagacccugaacaugugcaugccgcucagcugcaccaagaacuccagccaccacuacauccgggucggcaacgagacgggccuggagcugacccucaccaacaccuccaucaucaaccacaaguucugcaaccugagcgacgcccacaagcgcaaccuguacgaccacgcccucauguccauccugagcacguuccaccuguccauccccaacuucaaccaguacgaggccaugagcugcgacuucaacgggggcaagaucuccgugcaguacaaccucagccacgccuacgcgguggacgccgccgagcacugcgggaccgucgccaacggcgugcugcagaccuucaugcggauggcguggggcggguccuacaucgcccuggacagcggccgcgggaacugggacugcaucaugaccuccuaccaguaccucaucauccagaacacgaccugggaggaccacugccaguucagccggcccucccccaucggcuaccuggggcugcucagccagcgcacccgggacaucuacaucagccgccggcugcugggcaccuucacguggacccucuccgacagcgagggcaacgagacccccgggggcuacugccugacccgcuggaugcugaucgaggccgagcucaagugcuucgggaacacggccguggccaagugcaacgagaagcacgacgaggaguucugcgacaugcugcggcuguucgacuucugcaagcaggcgauccagcgccucaaguccccggcccagaugagcauccagcugaucaacaaggccgucaacgcccugaucaacgaccagcucaucaugaagaaccaccuccgggacaugaugggcauccccuacugcaacuacuccaaguacugguaccugaaccacaccagcuccgggcgcaccagccugcccaagugcuggcugguguccaacggcagcuaccugaacgagacccacuucuccgacgacaucgagcagcaggccgacaacaugaucacggagaugcuccagaaggaguacaucgaccggcagggcaagaccccgcuggggcugguggaccuguucgucuucagcaccuccuucuaccucaucagcaucuuccugcaccugaucaagauccccacccaccgccacaucgugggcaagcccugccccaagccgcaccggcucaaccacauggggaucugcuccugcggccuguacaagcagcccggggugcccacgcgcuggaagcggugaggacuagucccuguucccagagcccacuuuuuuuucuuuuuuugaaauaaaauagccugucuuucagaucucaaaggcucuuuucagagccaccaaaaaaaaaaaaaaaaaaaaaaaaaaaaaaaaaaaaaaaaaaaaaaaaaaaaaaaaaaaaaaaaagaauu

SEQ ID NO: 30315 - RNA, 1733 nt, Artificial Sequence
  mRNA product Design a-2 (hSL-A64-N5) comprising derived and/or modified sequence from LASV(KAK-428;Clade n.d. (VII))__ANH09740__GPCmut6 (opt1)
aggagaguccgcucagccagguugcagaagcggcuuagcguguguccuaaucuucucucugcguguagguaggccugugccgcaaacaagcuuaccaugggccagaucgugaccuucuuccaggaggucccccacgugaucgaggaggugaugaacaucguccugaucgcccucagccugcuggccauccucaaggggcuguacaacuucgcgaccugcggcgugaucgggcugaucacguuccuccugcugugcggccgcuccugcagcgccaccuacaaggggcaguacgagcuccagacccuggagcugaacauggagucccucaacaugugcaugccgcugagcugcaccaagaacaacucccaccacuacauccgggccggcaacaacacgggccuggagcucacccugaccaacaccagcaucaucucccacaaguucugcaaccugagcgacgcccacaagaagaaccucuacgaccacacgcugauguccaucaucaccaccuuccaccugagcauccccaacuucaaccaguacgaggccauguccugcgacuucaacgggggcaagaucagcauccaguacaaccucucccacagcuacgcgggggacgccgcccagcacugcggcaccguggccaacgggguccugcagacguucaugcgcauggcguggggcggcuccuaccuggcccucgacagcgggcggcgcggcugggacugcaucaucuccagcuaccaguaccugaucauccagaacaccaccugggacgaccacugccaguucucccggcccagccccaucggguaccugggcuucgugagccagaagacccgcgacaucuacaucucccggcgccuccugggcacguucaccuggacccugagcgacuccgaggggcacgacaugccgggcggguacugccucacccgguggaugcugaucgaggccgaccugaagugcuucggcaacacggccguggccaagugcaacgagaagcacgacgaggaguucugcgacauguggcgccucuucgacuucugcaagcaggcgauccagcggcugaaggcccccgcccagaugaacauccagcugaucaacaaggccgucaacgcccucaucaacgaccagcugaugaugaagaaccaccuccgcgacaucauggggauccccuacugcaacuacagcaaguucugguaccugaacaacaccaccaccggccggacgucccugccccgcugcuggcugaucagcaacggcuccuaccucaacgagacccacuucagcgacgacaucgagcagcaggcggacaacaugaucaccgagaugcugcagaaggaguacauggaccggcaggggaagaccccgcugggccucguggaccuguucguguucuccacgagcuucuaccugaucaccaucuuccugcaccucgucaagauccccacccaccgccacaucguggggaagcccugccccaagccgcaccggcugaaccacaugggcaucugcuccugcgggcuguacaagcagcccggcgugcccguccgcuggaagcggugaggacuagucccuguucccagagcccacuuuuuuuucuuuuuuugaaauaaaauagccugucuuucagaucucaaaggcucuuuucagagccaccaaaaaaaaaaaaaaaaaaaaaaaaaaaaaaaaaaaaaaaaaaaaaaaaaaaaaaaaaaaaaaaaagaauu

SEQ ID NO: 30316 - RNA, 1733 nt, Artificial Sequence; identical to SEQ ID NO: 30310
  mRNA product Design a-2 (hSL-A64-N5) comprising derived and/or modified sequence from LASV(Pinneo-NIG-1969;Clade I)__AIT17836__GPCmut6 (opt1)

SEQ ID NO: 30317 - RNA, 1733 nt, Artificial Sequence
  mRNA product Design a-2 (hSL-A64-N5) comprising derived and/or modified sequence from LASV(ISTH0009-NIG-2011;Clade II)__AIT17404__GPCmut6 (opt1)
aggagaguccgcucagccagguugcagaagcggcuuagcguguguccuaaucuucucucugcguguagguaggccugugccgcaaacaagcuuaccaugggccagaucaucaccuucuuccaggaggugccccacgucaucgaggaggugaugaacaucgugcugaucgcccucagccugcuggccauccucaaggggaucuacaacgucgcgaccugcggccuguucgggcugguguccuuccuccugcugugcggccgcagcugcuccacgaccuacaaggggguguacgagcuccagacccuggagcuggacauggccagccucaacaugugcaugccgcuguccugcaccaagaacaacagccaccacuacaucauggucggcaacgagacgggccuggagcucacccugaccaacaccuccaucaucaaccacaaguucugcaaccugagcgacgcccacaagaagaaccucuacgaccacgcccugauguccaucaucagcacguuccaccuguccauccccaacuucaaccaguacgaggccaugagcugcgacuucaacgggggcaagaucuccgugcaguacaaccucagccacgcguacgccguggacgccgccaaccacugcgggaccaucgcgaacggcguccugcagaccuucaugcggauggccuggggcggguccuacaucgcccuggacagcggcaagggguccugggacugcaucaugaccagcuaccaguaccucaucauccagaacacgaccugggaggaccacugccaguucucccgccccagccccaucggcuaccuggggcugcucagccagcggacccgcgacaucuacaucucccggcgccugcugggcaccuucacguggacccucagcgacuccgagggcaacgagacccccgggggcuacugccugacccgguggaugcugaucgaggccgagcucaagugcuucgggaacacggccguggcgaagugcaacgagaagcacgacgaggaguucugcgacaugcugcgccuguucgacuucugcaagcaggccauccggcgccucaagaccccggcccagaugagcauccagcugaucaacaaggccgugaacgcccugaucaacgaccagcucaucaugaagaaccaccuccgggacaucaugggcauccccuacugcaacuacuccaaguacugguaccugaaccacaccgucaccgggaagacgagccugccccgcugcuggcugguguccaacggcagcuaccugaacgagacccacuucuccgacgacaucgagcagcaggcggacaacaugaucaccgagcuccugcagaaggaguacauggaccggcagggcaagaccccgcuggggcugguggaccucuucgucuucagcacguccuucuaccugaucagcaucuuccugcaccucaucaagauccccacccaccgccacaucaccggcaagcccugccccaagccgcaccggcugaaccacauggggaucugcuccugcggccuguacaagcaccccggggugcccgugaaguggaagcgcugaggacuagucccuguucccagagcccacuuuuuuuucuuuuuuugaaauaaaauagccugucuuucagaucucaaaggcucuuuucagagccaccaaaaaaaaaaaaaaaaaaaaaaaaaaaaaaaaaaaaaaaaaaaaaaaaaaaaaaaaaaaaaaaaagaauu

SEQ ID NO: 30318 - RNA, 1733 nt, Artificial Sequence
  mRNA product Design a-2 (hSL-A64-N5) comprising derived and/or modified sequence from LASV(ISTH2010-NIG-2012;Clade II)__AIT17482__GPCmut6 (opt1)
aggagaguccgcucagccagguugcagaagcggcuuagcguguguccuaaucuucucucugcguguagguaggccugugccgcaaacaagcuuaccaugggccagaucaucaccuucuuccaggaggugccccacgucaucgaggaggugaugaacaucgugcugaucgcccucagccugcuggccauccucaaggggaucuacaacgucgcgaccugcggccuguucgggcugguguccuuccuccugcugugcggccgcagcugcuccacgaccuacaaggggguguacgagcuccagacccuggagcuggacauggccagccucaacaugugcaugccgcuguccugcaccaagaacaacagccaccacuacaucauggucggcaacgagacgggccuggagcucacccugaccaacaccuccaucaucaaccacaaguucugcaaccugagcgacgcccacaagaagaaccucuacgaccacgcccugauguccaucaucagcacguuccaccuguccauccccaacuucaaccaguacgaggccaugagcugcgacuucaacgggggcaagaucuccgugcaguacaaccucagccacgcguacgccguggacgccgccaaccacugcgggaccaucgcgaacggcguccugcagaccuucaugcggauggccuggggcggguccuacaucgcccuggacagcggcaagggguccugggacugcaucaugaccagcuaccaguaccucaucauccagaacaucacgugggaggaccacugccaguucucccgccccagccccaucggcuaccuggggcugcucagccagcggacccgcgacaucuacaucucccggcgccugcugggcaccuucaccuggacgcucagcgacuccgagggcaacgagacccccgggggcuacugccugacccgguggaugcugaucgaggccgagcucaagugcuucgggaacaccgccguggcgaagugcaacgagaagcacgacgaggaguucugcgacaugcugcgccuguucgacuucugcaagcaggccauccggcgccucaagacgccggcccagaugagcauccagcugaucaacaaggccgugaacgcccugaucaacgaccagcucaucaugaagaaccaccuccgggacaucaugggcauccccuacugcaacuacuccaaguacugguaccugaaccacaccgucaccgggaagaccagccugccccgcugcuggcugguguccaacggcagcuaccugaacgagacgcacuucuccgacgacaucgagcagcaggcggacaacaugaucaccgagcuccugcagaaggaguacaucgaccggcagggcaagaccccgcuggggcugguggaccucuucgucuucagcaccuccuucuaccugaucagcaucuuccugcaccucgugaagauccccacgcaccgccacguggucggcaagcccugccccaagccgcaccggcugaaccacauggggaucugcuccugcggccuguacaagcaccccggggugcccgugaaguggaagcgcugaggacuagucccuguucccagagcccacuuuuuuuucuuuuuuugaaauaaaauagccugucuuucagaucucaaaggcucuuuucagagccaccaaaaaaaaaaaaaaaaaaaaaaaaaaaaaaaaaaaaaaaaaaaaaaaaaaaaaaaaaaaaaaaaagaauu

SEQ ID NO: 30319 - RNA, 1733 nt, Artificial Sequence
  mRNA product Design a-2 (hSL-A64-N5) comprising derived and/or modified sequence from LASV(Lassa virus/H.sapiens-wt/NGA/2015/ISTH_0543;Clade II)__AVO03639__GPCmut6 (opt1)
aggagaguccgcucagccagguugcagaagcggcuuagcguguguccuaaucuucucucugcguguagguaggccugugccgcaaacaagcuuaccaugggccagaucaucaccuucuuccaggaggugccccacgucaucgaggaggugaugaacaucgugcugaucgcccucagccugcuggccauccucaaggggaucuacaacgucgcgaccugcggccuguucgggcugguguccuuccuccugcugugcggccgcagcugcuccacgaccuacaaggggguguacgagcuccagacccuggagcuggacauggccaaccucaacaugugcaugccgcugagcugcaccaagaacaacucccaccacuacaucauggucggcaacgagacgggccuggagcucacccugaccaacaccagcaucaucaaccacaaguucugcaaccuguccgacgcccacaagaagaaccucuacgaccacgcccugaugagcaucaucuccacguuccaccugagcauccccaacuucaaccaguacgaggccauguccugcgacuucaacgggggcaagaucagcgugcaguacaaccucucccacaccuacgcgguggacgccgccaaccacugcgggaccaucgccaacggcguccugcagaccuucaugcggauggcguggggcgggagcuacaucgcccuggacuccggcaaggggagcugggacugcaucaugacguccuaccaguaccucgugauccagaacaccaccugggaggaccacugccaguucagccgccccucccccaucggcuaccuggggcugcucagccagcggacccgcgacaucuacaucagccggcgccugcugggcacguucaccuggacccucuccgacagcgagggcaacgagacccccgggggcuacugccugacgcgguggaugcugaucgaggccgagcucaagugcuucgggaacaccgccguggccaagugcaacgagaagcacgacgaggaguucugcgacaugcugcgccuguucgacuucugcaagcaggcgauccggcgccucaagaccccggcccagauguccauccagcugaucaacaaggccgucaacgcccugaucaacgaccagcucaucaugaagaaccaccuccgggacaucaugggcauccccuacugcaacuacagcaaguacugguaccugaaccacaccgugacggggaagaccucccugccccgcugcuggcuggugagcaacggcuccuaccugaacgagacccacuucagcgacgacaucgagcagcaggccgacaacaugaucaccgagcuccugcagaaggaguacaucgaccggcagggcaagacgccgcuggggcuggucgaccucuucguguucuccaccagcuucuaccugaucuccaucuuccugcaccucgugaagauccccacccaccgccacaucaccggcaagcccugccccaagccgcaccggcugaaccacauggggaucugcagcugcggccuguacaagcaccccgggguccccgugaaguggaagcgcugaggacuagucccuguucccagagcccacuuuuuuuucuuuuuuugaaauaaaauagccugucuuucagaucucaaaggcucuuuucagagccaccaaaaaaaaaaaaaaaaaaaaaaaaaaaaaaaaaaaaaaaaaaaaaaaaaaaaaaaaaaaaaaaaagaauu

SEQ ID NO: 30320 - RNA, 1733 nt, Artificial Sequence
  mRNA product Design a-2 (hSL-A64-N5) comprising derived and/or modified sequence from LASV(Lassa virus/H.sapiens-wt/NGA/2016/ISTH_0009;Clade II)__AVO03571__GPCmut6 (opt1)
aggagaguccgcucagccagguugcagaagcggcuuagcguguguccuaaucuucucucugcguguagguaggccugugccgcaaacaagcuuaccaugggccagaucaucaccuucuuccaggaggugccccacgucaucgaggaggugaugaacaucgugcugaucgcccucagccugcuggccauccucaaggggaucuacaacgucgcgaccugcggccugcuggggcucguguccuuccugcugcucugcggccgcagcugcuccacgaccuacaaggggguguacgagcugcagacccuggagcucgacauggccagccugaacaugugcaugccgcuguccugcaccaagaacaacagccaccacuacaucauggucggcaacgagacgggccucgagcugacccugaccaacaccuccaucaucaaccacaaguucugcaaccucagcgacgcccacaagaagaaccuguacgaccacgcccugauguccaucaucagcacguuccaccucuccauccccaacuucaaccaguacgaggccaugagcugcgacuucaacgggggccggaucuccgugcaguacaaccugagccacuccuacgcgguggacgccgccaaccacugcgggaccaucgccaacggcguccugcagaccuucaugcgcauggcguggggcgggagcuacaucgcccucgacuccggcaaggggagcugggacugcaucaugaccuccuaccaguaccugaucauccagaacacgaccugggaggaccacugccaguucagccggcccagccccaucggcuaccuggggcuccugucccagcgcacccgggacaucuacaucagccgccggcugcucggcaccuucacguggacccuguccgacagcgagggcaacgagacccccgggggcuacugccugacccgcuggaugcucaucgaggccgagcugaagugcuucgggaacacggccguggccaagugcaacgagaagcacgacgaggaguucugcgacaugcugcggcuguucgacuucugcaagcaggcgauccgccggcugaagaccccggcccagauguccauccagcugaucaacaaggccgugaacgcccucaucaacgaccagcugaucaugaagaaccaccuccgcgacaucaugggcauccccuacugcaacuacagcaaguacugguaccucaaccacaccgucaccgggaagacgucccugccccggugcuggcuggugagcaacggcuccuaccucaacgagacccacuucagcgacgacaucgagcagcaggccgacaacaugaucaccgagcugcugcagaaggaguacaucgaccgccagggcaagaccccgcuggggcucguggaccuguucgucuucuccacgagcuucuaccugaucuccaucuuccuccaccuggugaagauccccacccaccggcacaucaccggcaagcccugccccaagccgcaccgccugaaccacauggggaucugcagcugcggccucuacaaccaccccggggugcccgucaaguggaagcggugaggacuagucccuguucccagagcccacuuuuuuuucuuuuuuugaaauaaaauagccugucuuucagaucucaaaggcucuuuucagagccaccaaaaaaaaaaaaaaaaaaaaaaaaaaaaaaaaaaaaaaaaaaaaaaaaaaaaaaaaaaaaaaaaagaauu

SEQ ID NO: 30321 - RNA, 1733 nt, Artificial Sequence
  mRNA product Design a-2 (hSL-A64-N5) comprising derived and/or modified sequence from LASV(Lassa virus/H.sapiens-wt/NGA/2016/ISTH_0017;Clade II)__AVO03567__GPCmut6 (opt1)
aggagaguccgcucagccagguugcagaagcggcuuagcguguguccuaaucuucucucugcguguagguaggccugugccgcaaacaagcuuaccaugggccagaucaucaccuucuuccaggaggugccccacgucaucgaggaggugaugaacaucgugcugaucgcccucagccugcuggccauccucaaggggaucuacaacgucgcgaccugcggccuguucgggcugguguccuuccuccugcugugcggccgcagcugcuccacgaccuacaaggggguguacgagcuccagacccuggagcuggacauggccagccucaacaugugcaugccgcuguccugcaccaagaacaacagccaccacuacaucauggucggcaacgagacgggccuggagcucacccugaccaacaccuccaucaucaaccacaaguucugcaaccugagcgacgcccacaagaagaaccucuacgaccacgcccugauguccaucaucagcacguuccaccuguccauccccaacuucaaccaguacgaggccaugagcugcgacuucaacgggggcaagaucuccgugcaguacaaccucagccacaccuacgcgaucgacgccgccaaccacugcgggaccaucgccaacggcgugcugcagaccuucaugcggauggcguggggcggguccuacaucgcccuggacagcggcaagggguccugggacugcaucaugacgagcuaccaguaccucaucauccagaacaccaccugggaggaccacugccaguucucccgccccagccccaucggcuaccuggggcugcucagccagcggacccgcgacaucuacaucucccggcgccugcugggcacguucaccuggacccucagcgacuccgagggcaacgagacccccgggggcuacugccugacgcgguggaugcugaucgaggccgagcucaagugcuucgggaacaccgccgucgccaagugcaacgagaagcacgacgaggaguucugcgacaugcugcgccuguucgacuucugcaagcaggcgauccggcgccucaagaccccggcccagaugagcauccagcugaucaacaaggccgugaacgcccugaucaacgaccagcucaucaugaagaaccaccuccgggacaucaugggcauccccuacugcaacuacuccaaguacugguaccugaaccacaccgugacggggaagaccagccugccccgcugcuggcuggucuccaacggcagcuaccugaacgagacccacuucuccgacgacaucgagcagcaggccgacaacaugaucaccgagcuccugcagaaggaguacauggaccggcagggcaagacgccgcuggggcugguggaccucuucguguucagcaccuccuucuaccugaucagcaucuuccugcaccucguccgcauccccacccaccggcacgugaucggcaagcccugccccaagccgcaccgccugaaccacauggggaucugcuccugcggccuguacaagcaccccggggugcccgucaaguggaagcggugaggacuagucccuguucccagagcccacuuuuuuuucuuuuuuugaaauaaaauagccugucuuucagaucucaaaggcucuuuucagagccaccaaaaaaaaaaaaaaaaaaaaaaaaaaaaaaaaaaaaaaaaaaaaaaaaaaaaaaaaaaaaaaaaagaauu

SEQ ID NO: 30322 - RNA, 1733 nt, Artificial Sequence
  mRNA product Design a-2 (hSL-A64-N5) comprising derived and/or modified sequence from LASV(Lassa virus/H.sapiens-wt/NGA/2018/ISTH_0959;Clade II)__AVV65099__GPCmut6 (opt1)
aggagaguccgcucagccagguugcagaagcggcuuagcguguguccuaaucuucucucugcguguagguaggccugugccgcaaacaagcuuaccaugggccagaucaucaccuucuuccaggaggugccccacgucaucgaggaggugaugaacaucgugcugaucgcccucagccugcuggccauccucaaggggaucuacaacgucgugaccugcggccuguucgggcugguguccuuccuccugcugugcggccgcagcugcuccacgaccuacaagggggucuacgagcuccagacccuggagcuggacauggcgagccucaacaugugcaugccgcuguccugcaccaagaacaacagccaccacuacaucauggugggcaacgagacgggccuggagcucacccugaccaacaccuccaucaucaaccacaaguucugcaaccugagcgacgcccacaagaagaaccucuacgaccacgcccugauguccaucaucagcacguuccaccuguccauccccaacuucaaccaguacgaggccaugagcugcgacuucaacgggggcaagaucuccgugcaguacaaccucagccacgccuacgcgaucgacgccgccaaccacugcgggaccaucgccaacggcguccugcagaccuucaugcggauggcguggggcggguccuacaucgcccuggacagcggcaagggguccugggacugcaucaugaccagcuaccaguaccucaucauccagaacacgaccugggaggaccacugccaguucucccgccccagccccaucggcuaccuggggcugcucagccagcggacccgcgacaucuacaucucccggcgccugcugggcaccuucacguggacccucagcgacuccgagggcaacgagacccccgggggcuacugccugacccgguggaugcugaucgaggccgagcucaagugcuucgggaacacggccguggccaagugcaacgagaagcacgacgaggaguucugcgacaugcugcgccuguucgacuucugcaagcaggcgauccggcgccucaagaccccggcccagaugagcauccagcugaucaacaaggccgugaacgcccugaucaacgaccagcucaucaugaagaaccaccuccgggacaucaugggcauccccuacugcaacuacuccaaguacugguaccugaaccacaccgucaccgggaagacgagccugccccgcugcuggcugguguccaacggcagcuaccugaacgagacccacuucuccgacgacaucgagcagcaggccgacaacaugaucaccgagcuccugcagaaggaguacaucgaccggcagggcaagaccccgcuggggcugguggaccucuucgucuucagcacguccuucuaccugaucagcaucuuccugcaccucgugaagauccccacccaccgccacgugaucggcaagcccugccccaagccgcaccggcugaaccacauggggaucugcuccugcggccuguacaagcaccccgggguccccgugaaguggaagcgcugaggacuagucccuguucccagagcccacuuuuuuuucuuuuuuugaaauaaaauagccugucuuucagaucucaaaggcucuuuucagagccaccaaaaaaaaaaaaaaaaaaaaaaaaaaaaaaaaaaaaaaaaaaaaaaaaaaaaaaaaaaaaaaaaagaauu

SEQ ID NO: 30323 - RNA, 1733 nt, Artificial Sequence
  mRNA product Design a-2 (hSL-A64-N5) comprising derived and/or modified sequence from LASV(LASV003-NIG-2008;Clade II)__AIT17580__GPCmut6 (opt1)
aggagaguccgcucagccagguugcagaagcggcuuagcguguguccuaaucuucucucugcguguagguaggccugugccgcaaacaagcuuaccaugggccagaucaucaccuucuuccaggaggugccccacgucaucgaggaggugaugaacaucgugcugaucgcccucagccugcuggccauccucaaggggaucuacaacgucgcgaccugcggccuguucgggcugguguccuuccuccugcugugcggccgcagcugcuccacgaccuacaaggggguguacgagcuccagacccuggagcuggacauggccagccucaacaugugcaugccgcuguccugcaccaagaacaacagccaccacuacaucauggucggcaacgagacgggccuggagcucacccugaccaacaccuccaucaucaaccacaaguucugcaaccugagcgacgcccacaagaagaaccucuacgaccacgcccugauguccaucaucagcacguuccaccuguccauccccaacuucaaccaguacgaggccaugagcugcgacuucaacgggggcaagaucuccgugcaguacaaccucagccacaccuacgcgguggacgccgccaaccacugcgggaccaucgccaacggcguccugcagaccuucaugcggauggcguggggcggguccuacaucgcccuggacagcggcaagggguccugggacugcaucaugacgagcuaccaguaccucaucauccagaacaccaccugggaggaccacugccaguucucccgccccagccccaucggcuaccuggggcugcucagccagcggacccgcgacaucuacaucucccggcgccugcugggcacguucaccuggacccucagcgacuccgagagcaacgagaccccgggcggguacugccugacgcgguggaugcugaucgaggccgagcucaagugcuucggcaacaccgccguggccaagugcaacgagaagcacgacgaggaguucugcgacaugcugcgccuguucgacuucugcaagcaggcgauccggcgccucaaggcccccgcccagauguccauccagcugaucaacaaggccgugaacgcccugaucaacgaccagcucaucaugaagaaccaccuccgggacaucauggggauccccuacugcaacuacagcaaguacugguaccugaaccacaccgucaccggccgcacgucccugccccggugcuggcuggugagcaacggguccuaccugaacgagacccacuucagcgacgacaucgagcagcaggcggacaacaugaucaccgagcuccugcagaaggaguacauggaccgccagggcaagaccccgcugggccugguggaccucuucgucuucuccacgagcuucuaccugaucuccaucuuccugcaccucgugaagauccccacccaccggcacgugaucgggaagcccugccccaagccgcaccgccugaaccacaugggcaucugcagcugcgggcuguacaagcaccccggcguccccgugaaguggaagcggugaggacuagucccuguucccagagcccacuuuuuuuucuuuuuuugaaauaaaauagccugucuuucagaucucaaaggcucuuuucagagccaccaaaaaaaaaaaaaaaaaaaaaaaaaaaaaaaaaaaaaaaaaaaaaaaaaaaaaaaaaaaaaaaaagaauu

SEQ ID NO: 30324 - RNA, 1733 nt, Artificial Sequence
  mRNA product Design a-2 (hSL-A64-N5) comprising derived and/or modified sequence from LASV(LASV035-NIG-2009;Clade II)__AIT17588__GPCmut6 (opt1)
aggagaguccgcucagccagguugcagaagcggcuuagcguguguccuaaucuucucucugcguguagguaggccugugccgcaaacaagcuuaccaugggccagaucaucaccuucuuccaggaggugccccacgucaucgaggaggugaugaacaucgugcugaucgcccucagccugcuggccauccucaaggggaucuacaacgucgcgaccugcggccuguucgggcugguguccuuccuccugcugugcggccgcagcugcuccacgaccuacaaggggguguacgagcuccagacccuggagcuggacauggccagccucaacaugugcaugccgcuguccugcaccaagaacaacagccaccacuacaucauggucggcaacgagacgggccuggagcucacccugaccaacaccuccaucaucaaccacaaguucugcaaccugagcgacgcccacaagaagaaccucuacgaccacgcccugauguccaucaucagcacguuccaccuguccauccccaacuucaaccaguacgaggccaugagcugcgacuucaacgggggcaagaucuccgugcaguacaaccucagccacgcguacgccguggacgccgccaaccacugcgggaccaucgcgaacggcguccugcagaccuucaugcggauggccuggggcggguccuacaucgcccuggacagcggcaagggguccugggacugcaucaugaccagcuaccaguaccucaucauccagaacacgaccugggaggaccacugccaguucucccgccccagccccaucggcuaccuggggcugcucagccagcggacccgcgacaucuacaucucccggcgccugcugggcaccuucacguggacccucagcgacuccgagggcaacgagacccccgggggcuacugccugacccgguggaugcugaucgaggccgagcucaagugcuucgggaacacggccguggcgaagugcaacgagaagcacgacgaggaguucugcgacaugcugcgccuguucgacuucugcaagcaggccauccggcgccucaaggccccggcccagaugagcauccagcugaucaacaaggccgugaacgcgcugaucaacgaccagcucaucaugaagaaccaccuccgggacaucaugggcauccccuacugcaacuacuccaaguacugguaccugaaccacaccgucaccgggaagaccagccugccccgcugcuggcugguguccaacggcagcuaccugaacgagacgcacuucuccgacgacaucgagcagcaggccgacaacaugaucaccgagcuccugcagaaggaguacaucgaccggcagggcaagaccccgcuggggcugguggaccucuucgucuucagcaccuccuucuaccugaucagcaucuuccugcaccucgugaagauccccacgcaccgccacgugaucggcaagcccugccccaagccgcaccggcugaaccacauggggaucugcuccugcggccuguacaagcaccccgggguccccgugaaguggaagcgcugaggacuagucccuguucccagagcccacuuuuuuuucuuuuuuugaaauaaaauagccugucuuucagaucucaaaggcucuuuucagagccaccaaaaaaaaaaaaaaaaaaaaaaaaaaaaaaaaaaaaaaaaaaaaaaaaaaaaaaaaaaaaaaaaagaauu

SEQ ID NO: 30325 - RNA, 1733 nt, Artificial Sequence
  mRNA product Design a-2 (hSL-A64-N5) comprising derived and/or modified sequence from LASV(LASV1000-NIG-2009;Clade II)__AIT17782__GPCmut6 (opt1)
aggagaguccgcucagccagguugcagaagcggcuuagcguguguccuaaucuucucucugcguguagguaggccugugccgcaaacaagcuuaccaugggccagaucaucaccuucuuccaggaggugccccacgucaucgaggaggugaugaacaucgugcugaucgcccucagccugcuggccauccucaaggggaucuacaacgucgcgaccugcggccuguucgggcugguguccuuccuccugcugugcggccgcagcugcuccacgaccuacaaggggguguacgagcuccagacccuggagcuggacauggccagccucaacaugugcaugccgcuguccugcaccaagaacaacagccaccacuacaucauggucggcaacgagacgggccuggagcucacccugaccaacaccuccaucaucaaccacaaguucugcaaccugagcgacgcccacaagaagaaccucuacgaccacgcccugauguccaucaucagcacguuccaccuguccauccccaacuucaaccaguacgaggccaugagcugcgacuucaacgggggcaagaucuccgugcaguacaaccucagccacaccuacgcgguggacgccgccaaccacugcgggaccaucgccaacggcguccugcagaccuucaugcggauggcguggggcggguccuacaucgcccuggacagcggcaagggguccugggacugcaucaugacgagcuaccaguaccucaucauccagaacaccaccugggaggaccacugccaguucucccgccccagccccaucggcuaccuggggcugcucagccagcggacccgcgacaucuacaucucccggcgccugcugggcacguucaccuggacccucagcgacuccgagggcaacgagacccccgggggcuacugccugacgcgguggaugcugaucgaggccgagcucaagugcuucgggaacaccgccguggccaagugcaacgagaagcacgacgaggaguucugcgacaugcugcgccuguucgacuucugcaagcaggcgaucaagcggcucaagaccccggcccagaugagcauccagcugaucaacaaggccgugaacgcccugaucaacgaccagcucaucaugaagaaccaccuccgcgacaucaugggcauccccuacugcaacuacuccaaguacugguaccugaaccacaccgucacggggaagaccagccugccccggugcuggcugguguccaacggcagcuaccugaacgagacccacuucuccgacgacaucgagcagcaggccgacaacaugaucaccgagcuccugcagaaggaguacaucgaccgccagggcaagacgccgcuggggcugguggaccucuucgucuucagcaccuccuucuaccugaucagcaucuuccugcaccucgugaagauccccacccaccggcacguggucggcaagcccugccccaagccgcaccgccugaaccacauggggaucugcuccugcggccuguacaagcaccccggggugcccgugaaguggaagcggugaggacuagucccuguucccagagcccacuuuuuuuucuuuuuuugaaauaaaauagccugucuuucagaucucaaaggcucuuuucagagccaccaaaaaaaaaaaaaaaaaaaaaaaaaaaaaaaaaaaaaaaaaaaaaaaaaaaaaaaaaaaaaaaaagaauu

SEQ ID NO: 30326 - RNA, 1733 nt, Artificial Sequence
  mRNA product Design a-2 (hSL-A64-N5) comprising derived and/or modified sequence from LASV(LASV221-NIG-2010;Clade II)__AIT17624__GPCmut6 (opt1)
aggagaguccgcucagccagguugcagaagcggcuuagcguguguccuaaucuucucucugcguguagguaggccugugccgcaaacaagcuuaccaugggccagaucaucaccuucuuccaggaggugccccacgucaucgaggaggugaugaacaucgugcugaucgcccucagccugcuggccauccucaaggggaucuacaacgucgcgaccugcggccuguucgggcugguguccuuccuccugcugugcggccgcagcugcuccacgaccuacaaggggguguacgagcuccagacccuggagcuggacauggccagccucaacaugugcaugccgcuguccugcaccaagaacaacagccaccacuacaucauggucggcaacgagacgggccuggagcucacccugaccaacaccuccaucaucaaccacaaguucugcaaccugagcgacgcccacaagaagaaccucuacgaccacgcccugauguccaucaucagcacguuccaccuguccauccccaacuucaaccaguacgaggccaugagcugcgacuucaacgggggcaagaucuccgugcaguacaaccucagccacaccuacgcgaucgacgccgccaaccacugcgggaccaucgccaacggcgugcugcagaccuucaugcggauggcguggggcggguccuacaucgcccuggacagcggcaagggguccugggacugcaucaugacgagcuaccaguaccucaucauccagaacaccaccugggaggaccacugccaguucucccgccccagccccaucggcuaccuggggcugcucagccagcggacccgcgacaucuacaucucccggcgccugcugggcacguucaccuggacccucagcgacuccgagggcaacgagacccccgggggcuacugccugacgcgguggaugcugaucgaggccgagcucaagugcuucgggaacaccgccgucgccaagugcaacgagaagcacgacgaggaguucugcgacaugcugcgccuguucgacuucugcaagcaggcgauccggcgccucaagaccccggcccagaugagcauccagcugaucaacaaggccgugaacgcccugaucaacgaccagcucaucaugaagaaccaccuccgggacaucaugggcauccccuacugcaacuacuccaaguacugguaccugaaccacaccgugacggggaagaccagccugccccgcugcuggcuggucuccaacggcagcuaccugaacgagacccacuucuccgacgacaucgagcagcaggccgacaacaugaucaccgagaugcuccagaaggaguacauggaccggcagggcaagacgccgcuggggcugguggaccuguucguguucagcaccuccuucuaccucaucagcaucuuccugcaccuggucaagauccccacccaccgccacgugaucggcaagcccugccccaagccgcaccggcucaaccacauggggaucugcuccugcggccuguacaagcaccccggggugcccgucaaguggaagcgcugaggacuagucccuguucccagagcccacuuuuuuuucuuuuuuugaaauaaaauagccugucuuucagaucucaaaggcucuuuucagagccaccaaaaaaaaaaaaaaaaaaaaaaaaaaaaaaaaaaaaaaaaaaaaaaaaaaaaaaaaaaaaaaaaagaauu

SEQ ID NO: 30327 - RNA, 1733 nt, Artificial Sequence
  mRNA product Design a-2 (hSL-A64-N5) comprising derived and/or modified sequence from LASV(LASV237-NIG-2010;Clade II)__AIT17638__GPCmut6 (opt1)
aggagaguccgcucagccagguugcagaagcggcuuagcguguguccuaaucuucucucugcguguagguaggccugugccgcaaacaagcuuaccaugggccagaucaucaccuucuuccaggaggugccccacgucaucgaggaggugaugaacaucgugcugaucgcccucagccugcuggccauccucaaggggaucuacaacgucgcgaccugcggccuguucgggcugguguccuuccuccugcugugcggccgcagcugcuccacgaccuacaaggggguguacgagcuccagacccuggagcuggacauggccagccucaacaugugcaugccgcuguccugcaccaagaacaacagccaccacuacaucauggucggcaacgagacgggccuggagcucacccugaccaacaccuccaucaucaaccacaaguucugcaaccugagcgacgcccacaagaaggaccucuacgaccacgcccugauguccaucaucagcacguuccaccuguccauccccaacuucaaccaguacgaggccaugagcugcgacuucaacgggggcaagaucuccgugcaguacaaccucagccacaccuacgcgguggacgccgccaaccacugcgggaccaucgccaacggcguccugcagaccuucaugcggauggcguggggcggguccuacaucgcccuggacagcggcaagggguccugggacugcaucaugacgagcuaccaguaccucaucauccagaacaccaccugggaggaccacugccaguucucccgccccagccccaucggcuaccuggggcugcucagccagcggacccgcgacaucuacaucucccggcgccugcugggcacguucaccuggacccucagcgacuccgagggcaacgagacccccgggggcuacugccugacgcgguggaugcugaucgaggccgagcucaagugcuucgggaacaccgccguggccaagugcaacgagaagcacgacgaggaguucugcgacaugcugcgccuguucgacuucugcaagcaggcgauccggcgccucaagaccccggcccagaugagcauccagcugaucaacaaggccgugaacgcccugaucaacgaccagcucaucaugaagaaccaccuccgggacaucaugggcauccccuacugcaacuacuccaaguacugguaccugaaccacaccgucacggggaagaccagccugccccgcugcuggcugguguccaacggcagcuaccugaacgagacccacuucuccgacgacaucgagcagcaggccgacaacaugaucaccgagcuccugcagaaggaguacauggaccggcagggcaagacgccgcuggggcugguggaccucuucgucuucagcaccuccuucuaccugaucagcaucuuccugcaccucaucaagauccccacccaccgccacaucaccggcaagcccugccccaagccgcaccggcugaaccacauggggaucugcuccugcggccuguacaagcaccccggggugcccgugaaguggaagcgcugaggacuagucccuguucccagagcccacuuuuuuuucuuuuuuugaaauaaaauagccugucuuucagaucucaaaggcucuuuucagagccaccaaaaaaaaaaaaaaaaaaaaaaaaaaaaaaaaaaaaaaaaaaaaaaaaaaaaaaaaaaaaaaaaagaauu

SEQ ID NO: 30328 - RNA, 1733 nt, Artificial Sequence
  mRNA product Design a-2 (hSL-A64-N5) comprising derived and/or modified sequence from LASV(LASV253-NIG-2011;Clade II)__AIT17670__GPCmut6 (opt1)
aggagaguccgcucagccagguugcagaagcggcuuagcguguguccuaaucuucucucugcguguagguaggccugugccgcaaacaagcuuaccaugggccagaucaucaccuucuuccaggaggugccccacgucaucgaggaggugaugaacaucgugcugaucgcccucagccugcuggccauccucaaggggaucuacaacgucgcgaccugcggccuguucgggcugguguccuuccuccugcugugcggccgcagcugcuccacgaccuacaaggggguguacgagcuccagacccuggagcuggacauggccagccucaacaugugcaugccgcuguccugcaccaagaacaacagccaccacuacaucauggucggcaacgagacgggccuggagcucacccugaccaacaccuccaucaucaaccacaaguucugcaaccugagcgacgcccacaagaagaaccucuacgaccacgcccugauguccaucaucagcacguuccaccuguccauccccaacuucaaccaguacgaggccaugagcugcgacuucaacgggggcaagaucuccgugcaguacaaccucagccacaccuacgcgguggacgccgccaaccacugcgggaccaucgccaacggcguccugcagaccuucaugcggauggcguggggcggguccuacaucgcccuggacagcggcaagggguccugggacugcaucaugacgagcuaccaguaccucaucauccagaacaccaccugggaggaccacugccaguucucccgccccagccccaucggcuaccuggggcugcucagccagcggacccgcgacaucuacaucucccggcgccugcugggcacguucaccuggacccucagcgacuccgagggcaacgagacccccgggggcuacugccugacgcgguggaugcugaucgaggccgagcucaagugcuucgggaacaccgccguggccaagugcaacgagaagcacgacgaggaguucugcgacaugcugcgccuguucgacuucugcaagcaggcgauccggcgccucaaggccccggcccagaugagcauccagcugaucaacaaggccgugaacgcccugaucaacgaccagcucaucaugaagaaccaccuccgggacaucaugggcauccccuacugcaacuacuccaaguacugguaccugaaccacaccgucaccgggcgcacgagccugccccggugcuggcugguguccaacggcagcuaccugaacgagacccacuucuccgacgacaucgagcagcaggcggacaacaugaucaccgagcuccugcagaaggaguacaucgaccgccagggcaagaccccgcuggggcugguggaccucuucgucuucagcacguccuucuaccugaucagcaucuuccugcaccucgugaagauccccacccaccggcacaucaucggcaagcccugccccaagccgcaccgccugaaccacauggggaucugcuccugcggccuguacaagcaccccggggugcccgucaaguggaagcggugaggacuagucccuguucccagagcccacuuuuuuuucuuuuuuugaaauaaaauagccugucuuucagaucucaaaggcucuuuucagagccaccaaaaaaaaaaaaaaaaaaaaaaaaaaaaaaaaaaaaaaaaaaaaaaaaaaaaaaaaaaaaaaaaagaauu

SEQ ID NO: 30329 - RNA, 1733 nt, Artificial Sequence
  mRNA product Design a-2 (hSL-A64-N5) comprising derived and/or modified sequence from LASV(LASV254-NIG-2011;Clade II)__AIT17674__GPCmut6 (opt1)
aggagaguccgcucagccagguugcagaagcggcuuagcguguguccuaaucuucucucugcguguagguaggccugugccgcaaacaagcuuaccaugggccagaucaucaccuucuuccaggaggugccccacgucaucgaggaggugaugaacaucgugcugaucgcccucagccugcuggccauccucaaggggaucuacaacgucgcgaccugcggccuguucgggcugguguccuuccuccugcugugcggccgcagcugcuccacgaccuacaaggggguguacgagcuccagacccuggagcuggacaugaccaaccucaacaugugcaugccgcugagcugcacgaagaacaacucccaccacuacaucauggucggcaacgagaccggccuggagcucacccugaccaacacgagcaucaucaaccacaaguucugcaaccuguccgacgcccacaagaagaaccucuacaaccacgcccugaugagcaucaucuccaccuuccaccugagcauccccaacuucaaccaguacgaggccauguccugcgacuucaacgggggcaagaucagcgugcaguacaaccucucccacagcuacgccguggacgcggccaaccacugcgggaccaucgccaacggcguccugcagaccuucaugcggauggccuggggcggguccuacaucgcgcuggacagcggcaaggggaacugggacugcaucaugacguccuaccaguaccucaucauccagaacaccaccugggaggaccacugccaguucagccgccccucccccaucggcuaccuggggcugcucagccagcggacccgcgacaucuacaucagccggcgccugcugggcacguucaccuggacccucuccgacagcgagggcaacgagacccccgggggcuacugccugacgcgguggaugcugaucgaggccgagcucaagugcuucgggaacaccgccguggccaagugcaacgagaagcacgacgaggaguucugcgacaugcugcgccuguucgacuucugcaagcaggccauccggcgccucaagaccccggcgcaggccaacauccagcugaucaacaaggccgugaacgcccugaucaacgaccagcucaucaugaagaaccaccuccgggacaucaugggcauccccuacugcaacuacuccaaguacugguaccugaaccacaccgucacggggaagaccagccugccccgcugcuggcugguguccaacggcagcuaccugaacgagacccacuucuccgacgacaucgagcagcaggccgacaacaugaucaccgagcuccugcagaaggaguacauggaccggcagggcaagacgccgcuggggcugguggaccucuucgucuucagcaccuccuucuaccugaucagcaucuuccugcaccucgugaagauccccacccaccgccacgugaucggcaagcccugccccaagccgcaccggcugaaccacauggggaucugcuccugcggccuguacaagcaccccgggguccccgugaaguggaagcgcugaggacuagucccuguucccagagcccacuuuuuuuucuuuuuuugaaauaaaauagccugucuuucagaucucaaaggcucuuuucagagccaccaaaaaaaaaaaaaaaaaaaaaaaaaaaaaaaaaaaaaaaaaaaaaaaaaaaaaaaaaaaaaaaaagaauu

SEQ ID NO: 30330 - RNA, 1733 nt, Artificial Sequence
  mRNA product Design a-2 (hSL-A64-N5) comprising derived and/or modified sequence from LASV(Nig08-A19;Clade III)__ADU56618__GPCmut6 (opt1)
aggagaguccgcucagccagguugcagaagcggcuuagcguguguccuaaucuucucucugcguguagguaggccugugccgcaaacaagcuuaccaugggccagaucgugaccuucuuccaggaggucccccacgugaucgaggaggugaugaacaucguccugaucgcccucagcauccuggccauccugaaggggcucuacaacaucgcgaccugcggccugaucgggcuggugacguuccuccugcuguccggccgcagcugcuccaugaccuacaaggggguguacgagcuccagacccuggagcugaacaugaacacccucaacaugugcaugccgcugagcugcacgaagaacaacucccaccacuacaucauggucggcaacgagaccggccuggagcucacccugaccaacacgagccugcuccaccacaaguucugcaaccuguccgacgcccacaagaagaaccuguacgaccacacccucaugagcaucaucuccaccuuccaccugagcauccccaacuucaaccaguacgaggccauguccugcgacuucaacgggggcaagaucaccgugcaguacaaccugagccacuccuacgccaucgacgccgcgaaccacugcgggacgguggccaacggcguccuccagaccuucaugcggauggccuggggcgggagcuacaucgcccuggacuccggccgcgggaagugggacugcaucaugaccagcuaccaguaccugaucauccagaacaccacgugggaggaccacugccaguucucccggcccagccccaucggcuaccucgggcugcugucccagcgcacccgggacaucuacaucagccgccggcuccugggcaccuucaccuggacgcugagcgacuccgagggcaacgagacccccgggggcuacugccucacccgcuggaugcugaucgaggcggagcugaagugcuucgggaacaccgccguggccaagugcaacgagaagcacgacgaggaguucugcgacaugcuccggcuguucgacuucugcaagcaggccauccgccggcugaaggccccggcgcagaugagcauccagcucaucaacaaggccgugaacgcccugaucaacgaccagcugaucaugaagaaccaccuccgcgacaucaugggcauccccuacugcaacuacuccaaguacugguaccugaaccacacgagcaccgggcggaccucccugccccgcugcuggcucgucagcaacggcuccuaccugaacgagacccacuucagcgacgacaucgagcagcaggccgacaacaugaucacggagaugcugcagaaggaguaccuggaccggcagggcaagaccccgcucgggcugguggaccuguucguguucuccaccagcuucuaccucaucuccaucuuccugcaccuggucaagauccccacccaccgccacaucgugggcaagcccugccccaagccgcaccggcucaaccacauggggaucugcagcugcggccuguacaagcagcccggggugcccguccgcuggaagcggugaggacuagucccuguucccagagcccacuuuuuuuucuuuuuuugaaauaaaauagccugucuuucagaucucaaaggcucuuuucagagccaccaaaaaaaaaaaaaaaaaaaaaaaaaaaaaaaaaaaaaaaaaaaaaaaaaaaaaaaaaaaaaaaaagaauu

SEQ ID NO: 30331 - RNA, 1736 nt, Artificial Sequence
  mRNA product Design a-2 (hSL-A64-N5) comprising derived and/or modified sequence from LASV(G1180-SLE-2010;Clade IV)__AIT17168__GPCmut6 (opt1)
aggagaguccgcucagccagguugcagaagcggcuuagcguguguccuaaucuucucucugcguguagguaggccugugccgcaaacaagcuuaccaugggccagaucgugaccuucuuccaggaggucccccacgugaucgaggaggugaugaacaucguccugaucgcccucagcauccuggccgugcugaaggggcucuacaacuucgcgaccugcggccugguggggcugcucacguuccugcugcucugcggccgcuccugcaccgccagccgguacaagggggucuacgagcugcagacccuggagcucaacauggagacccugaacaugugcaugccgcuguccugcacgaagaacaacagccaccacuacaucauggugggcaacgagaccggccucgagcugacccugaccaacacguccaucaucaaccacaaguucugcaaccucagcgacgcccacaagaagaaccuguacgaccacgcccugauguccaucaucagcaccuuccaccucuccauccccaacuucaaccaguacgaggccaugagcugcgacuucaacgggggcaagaucuccgugcaguacaaccugagccacuccuacgcgggggacgccgccaaccacugcggcaccgucgccaacggggugcugcagaccuucaugcgcauggcguggggcggcagcuacaucgcccucgacuccgggcacggcagcugggacugcaucaugacguccuaccaguaccugaucauccagaacaccaccugggaggaccacugccaguucagccggcccucccccaucggguaccugggccuccugagccagcgcacccgggacaucuacaucagccgccggcugcucggcacguucaccuggacccuguccgacagcgaggggaaggacaccccgggcggguacugccugacgcgcuggaugcucaucgaggccgagcugaagugcuucggcaacaccgccguggccaagugcaacgagaagcacgacgaggaguucugcgacaugcugcggcuguucgacuucugcaagcaggcgauccagcgccugaaggcccccgcccagauguccauccagcugaucaacaaggccgucaacgcccucaucaacgaccagcugaucaugaagaaccaccuccgggacaucauggggauccccuacugcaacuacagcaaguacugguaccucaaccacaccaccacgggcaagaccucccugcccaagugcuggcuggugagcaacggcuccuaccucaacgagacccacuucagcgacgacaucgagcagcaggcggacaacaugaucaccgagaugcugcagaaggaguacauggagcgccaggggaagacgccgcugggccugguggaccucuucgucuucuccaccagcuucuaccugaucuccaucuuccugcaccucgugaagauccccacccaccggcacaucgugggcaagagcugccccaagccccaccgccugaaccacauggggaucugcuccugcgggcuguacaagcagccgggcguccccgugaaguggaagcggugaggacuagucccuguucccagagcccacuuuuuuuucuuuuuuugaaauaaaauagccugucuuucagaucucaaaggcucuuuucagagccaccaaaaaaaaaaaaaaaaaaaaaaaaaaaaaaaaaaaaaaaaaaaaaaaaaaaaaaaaaaaaaaaaagaauu

SEQ ID NO: 30332 - RNA, 1736 nt, Artificial Sequence
  mRNA product Design a-2 (hSL-A64-N5) comprising derived and/or modified sequence from LASV(G1442-SLE-2011;Clade IV)__AIT17180__GPCmut6 (opt1)
aggagaguccgcucagccagguugcagaagcggcuuagcguguguccuaaucuucucucugcguguagguaggccugugccgcaaacaagcuuaccaugggccagaucgugaccuucuuccaggaggucccccacgugaucgaggaggugaugaacaucguccugaucgcccucagcauccuggccgugcugaaggggcucuacaacguggcgaccugcggccugaucgggcuggucacguuccuccugcugugcggccgcuccugcaccaccacccucuacaaggggguguacgagcugcagacgcuggagcucaacauggagacccugaacaugugcaugccgcugagcugcaccaagaacaacucccaccacuacauccgggugggcaacgagaccggccucgagcugacgcugaccaacaccagcaucaucaaccacaaguucugcaaccucuccgacgcccacaagaagaaccuguacgaccacgcccugaugagcaucaucuccaccuuccaccucagcauccccaacuucaaccaguacgaggccauguccugcgacuucaacgggggcaagaucagcguccaguacaaccugucccacagcuacgccggggacgcggccaaccacugcggcacgguggccaacggggugcugcagaccuucaugcgcauggccuggggcggcuccuacaucgcgcucgacagcgggcggggcaacugggacugcaucaugaccuccuaccaguaccugaucauccagaacaccacgugggacgaccacugccaguucagccgccccucccccaucggguaccugggccuccugagccagcggacccgcgacgucuacaucucccggcgccugcucggcaccuucaccuggacgcugagcgacagcgaggggaaggacaccccgggcggguacugccugacccgguggaugcucaucgaggccgagcugaagugcuucggcaacaccgccguggccaagugcaacgagaagcacgacgaggaguucugcgacaugcugcgccucuucgacuucugcaagcaggccauccagcggcugaaggcgcccgcccagauguccauccagcugaucaacaaggccgugaacgcccucaucaacgaccagcugaucaugaagaaccaccuccgcgacaucauggggauccccuacugcaacuacagcaaguacugguaccugaacaacacggccaccggcaagaccucccugcccaagugcuggcugaucagcaacggcuccuaccucaacgagacccacuucagcgacgacaucgagcaggaggcggacaacaugaucacggagaugcugcagaaggaguacauggagcggcaggggaagaccccgcugggccuggucgaccucuucguguucuccaccagcuucuaccugaucuccaucuuccugcaccucgugaagauccccacccaccgccacaucgucggcaagagcugccccaagccccaccggcugaaccacauggggaucugcuccugcgggcuguacaagcagccgggcgugcccgugcgcuggaagcggugaggacuagucccuguucccagagcccacuuuuuuuucuuuuuuugaaauaaaauagccugucuuucagaucucaaaggcucuuuucagagccaccaaaaaaaaaaaaaaaaaaaaaaaaaaaaaaaaaaaaaaaaaaaaaaaaaaaaaaaaaaaaaaaaagaauu

SEQ ID NO: 30333 - RNA, 1736 nt, Artificial Sequence
  mRNA product Design a-2 (hSL-A64-N5) comprising derived and/or modified sequence from LASV(G3010-SLE-2013;Clade IV)__AIT17344__GPCmut6 (opt1)
aggagaguccgcucagccagguugcagaagcggcuuagcguguguccuaaucuucucucugcguguagguaggccugugccgcaaacaagcuuaccaugggccagaucgugaccuucuuccaggaggucccccacgugaucgaggaggugaugaacaucguccugaucgcccucagcauccuggccgugcugaaggggcucuacaacuucgcgaccugcggccugguggggcuggucacguuccuccugcugugcggccgcuccugcaccaccagccucuacaaggggguguacgagcugcagacccuggagcucaacauggagacgcugaacaugugcaugccgcuguccugcaccaagaacaacagccaccacuacaucauggugggcaacgagaccggccucgagcugacccugacgaacaccuccaucaucaaccacaaguucugcaaccucagcgacgcccacaagaagaaccuguacaaccacgcccugauguccaucaucagcaccuuccaccucuccauccccaacuucaaccaguacgaggccaugagcugcgacuucaacgggggcaagaucuccguccaguacaaccugagccacuccuacgccggggacgcggccagccacugcggcaccguggccaacggggugcugcagacguucaugcggauggccuggggcggcuccuacaucgcgcucgacagcggguacggcaagugggacugcaucaugaccuccuaccaguaccugaucauccagaacaccaccugggaggaccacugccaguucagccgccccucccccaucggguaccugggccuccugagccagcggacgcgcgacaucuacaucagccggcgccugcucggcaccuucaccuggacccuguccgacagcgaggggaaggacacgccgggcggguacugccugacccgguggaugcucaucgaggccgagcugaagugcuucggcaacaccgccgucgccaagugcaacgagaagcacgacgaggaguucugcgacaugcugcgccucuucgacuucugcaagcaggccauccagcggcugaagacccccgcgcagauguccauccagcugaucaacaaggccgugaacgcccucaucaacgaccagcugaucaugaagaaccaccuccgcgacaucauggggauccccuacugcaacuacagcaaguacugguaccugaaccacacgaccaccggcaagaccucccugcccaagugcuggcuggugagcaacggcuccuaccucaacgagacgcacuucagcgacgacaucgagcagcaggccgacaacaugaucaccgagaugcugcagaaggaguacauggagcggcaggggaagaccccgcugggccuggucgaccucuucguguucuccaccagcuucuaccugaucuccaucuuccugcaccucgugaagauccccacgcaccgccacaucgucggcaagagcugccccaagccccaccggcugaaccacauggggaucugcuccugcgggcuguacaagcagccgggcgugcccgugcgcuggaagcggugaggacuagucccuguucccagagcccacuuuuuuuucuuuuuuugaaauaaaauagccugucuuucagaucucaaaggcucuuuucagagccaccaaaaaaaaaaaaaaaaaaaaaaaaaaaaaaaaaaaaaaaaaaaaaaaaaaaaaaaaaaaaaaaaagaauu

SEQ ID NO: 30334 - RNA, 1736 nt, Artificial Sequence
  mRNA product Design a-2 (hSL-A64-N5) comprising derived and/or modified sequence from LASV(G502-SLE-2009;Clade IV)__AIT17126__GPCmut6 (opt1)
aggagaguccgcucagccagguugcagaagcggcuuagcguguguccuaaucuucucucugcguguagguaggccugugccgcaaacaagcuuaccaugggccagaucgugaccuucuuccaggaggucccccacgugaucgaggaggugaugaacaucguccugaucgcccucagcauccuggccgugcugaaggggcucuacaacuucgcgaccugcggccugguggggcugcucacguuccugcugcucugcggccgcuccugcaccaccgggcuguacaagggcgucuacgagcugcagacccucgagcugaacauggagacgcugaacaugugcaugccgcucagcugcaccaagaacaacucccaccacuacaucauggugggcaacgagaccgggcuggagcugacccucacgaacaccagcaucaucaaccacaaguucugcaaccuguccgacgcccacaagaagaaccuguacgaccacgcccucaugagcaucaucuccaccuuccaccugagcauccccaacuucaaccaguacgaggccauguccugcgacuucaacggcgggaagaucagcgugcaguacaaccugucccacagcuacgccggcgacgcggccgaccacugcgggaccgucgccaacggcgugcuccagacguucaugcggauggccuggggcggguccuacaucgcgcuggacagcggccgcgggcggugggacugcaucaugaccuccuaccaguaccugaucauccagaacaccaccugggaggaccacugccaguucagccgccccucccccaucggcuaccucggccugcugagccagcggacgcgcgacaucuacaucucccggcgccuccuggggaccuucaccuggacccugagcgacagcgagggcaaggacacgcccgggggcuacugccucacccgguggaugcugaucgaggccgagcugaagugcuucgggaacaccgccguggccaagugcaacgagaagcacgacgaggaguucugcgacaugcuccgccuguucgacuucugcaagcaggccauccagcggcugaaggcgccggcccagauguccauccagcucaucaacaaggccgucaacgcccugaucaacgaccagcuggugaugaagaaccaccuccgcgacaucaugggcauccccuacugcaacuacagccgguacugguaccugaaccacaccacgaccggccgcaccucccugcccaagugcuggcucgugagcaacggguccuaccugaacgagacccacuucagcgacgacaucgagcagcaggccgacaacaugaucacggagaugcugcagaaggaguacauggagcggcagggcaagaccccgcuggggcucgucgaccuguucguguucuccaccagcuucuaccugaucuccaucuuccuccaccuggugaagauccccacccaccgccacaucgucggcaagagcugccccaagccccaccggcugaaccacauggggaucugcuccugcggccucuacaagcagccgggcgugcccgugaaguggaagcgcugaggacuagucccuguucccagagcccacuuuuuuuucuuuuuuugaaauaaaauagccugucuuucagaucucaaaggcucuuuucagagccaccaaaaaaaaaaaaaaaaaaaaaaaaaaaaaaaaaaaaaaaaaaaaaaaaaaaaaaaaaaaaaaaaagaauu

SEQ ID NO: 30335 - RNA, 1736 nt, Artificial Sequence
  mRNA product Design a-2 (hSL-A64-N5) comprising derived and/or modified sequence from LASV(G733-SLE-2010;Clade IV)__AIT17154__GPCmut6 (opt1)
aggagaguccgcucagccagguugcagaagcggcuuagcguguguccuaaucuucucucugcguguagguaggccugugccgcaaacaagcuuaccaugggccagaucgugaccuucuuccaggaggucccccacgugaucgaggaggugaugaacaucguccugaucgcccucagcauccuggccgugcugaaggggcucuacaacuucgcgaccugcggcaucguggggcuggucuccuuccugcuccugugcggccgcagcugcacgaccucccuguacaaggggguguacgagcuccagacccuggagcugaacauggagacccucaacaugugcaugccgcugagcugcacgaagaacaacucccaccacuacaucauggugggcaacgagaccggccuggagcucacccugaccaacacgagcaucaucaaccacaaguucugcaaccuguccgacgcccacaagaagaaccucuacgaccacgcccugaugagcaucaucuccaccuuccaccugagcauccccaacuucaaccaguacgaggccauguccugcgacuucaacgggggcaagaucagcguccaguacaaccucucccacagcuacgccggggacgcggccaaccacugcggcaccaucgccaacggggugcugcagaccuucaugcggauggccuggggcggcuccuacaucgcgcuggacagcgggcgcgaccggugggacugcaucaugacguccuaccaguaccucaucauccagaacaccaccugggaggaccacugccaguucagccgccccucccccaucggcuaccuggggcugcucagccagcggacccgcgacaucuacaucagccggcgccugcugggcacguucaccuggacccucuccgacagcgagggcaaggacacccccgggggcuacugccugacgcgguggaugcugaucgaggccgagcucaagugcuucgggaacaccgccguggccaagugcaacgagaagcacgacgaggaguucugcgacaugcugcgccuguucgacuucugcaagcaggccauccagcggcucaaggcgccggcccagauguccauccagcugaucaacaaggccgucaacgcccugaucaacgaccagcucaucaugaagaaccaccuccgcgacaucaugggcauccccuacugcaacuacagcaaguacugguaccugaaccacaccaccacggggaagaccucccugcccaagugcuggcuggugagcaacggcuccuaccugaacgagacccacuucagcgacgacaucgagcagcaggccgacaacaugaucaccgagaugcuccagaaggaguacauggagcggcagggcaagacgccgcuggggcugguggaccuguucgucuucuccaccagcuucuaccucaucuccaucuuccugcaccuggugaagauccccacccaccgccacguggucggcaagagcugccccaagccccaccggcucaaccacauggggaucugcuccugcggccuguacgggcagccgggcgugcccgugaaguggaagcgcugaggacuagucccuguucccagagcccacuuuuuuuucuuuuuuugaaauaaaauagccugucuuucagaucucaaaggcucuuuucagagccaccaaaaaaaaaaaaaaaaaaaaaaaaaaaaaaaaaaaaaaaaaaaaaaaaaaaaaaaaaaaaaaaaagaauu

SEQ ID NO: 30336 - RNA, 1736 nt, Artificial Sequence
  mRNA product Design a-2 (hSL-A64-N5) comprising derived and/or modified sequence from MOPV/LASV reassortant(IGS-1;Clade IV)__AFY05576__GPCmut6 (opt1)
aggagaguccgcucagccagguugcagaagcggcuuagcguguguccuaaucuucucucugcguguagguaggccugugccgcaaacaagcuuaccaugggccagaucgugaccuucuuccaggaggucccccacgugaucgaggaggugaugaacaucguccugaucgcccucagcgugcuggccgugcugaaggggcucuacaacuucgcgaccugcggccuggucgggcuggugacguuccuccugcugugcggccgcuccugcaccaccagccucuacaaggggguguacgagcugcagacccuggagcucaacauggagacgcugaacaugugcaugccgcuguccugcaccaagaacaacagccaccacuacaucauggucggcaacgagaccggccucgagcugacccugacgaacaccuccaucaucaaccacaaguucugcaaccucagcgacgcccacaagaagaaccuguacgaccacgcccugauguccaucaucagcaccuuccaccucuccauccccaacuucaaccaguacgaggccaugagcugcgacuucaacgggggcaagaucuccgugcaguacaaccugagccacuccuacgccggggacgcggccaaccacugcggcaccguggccaacgggguccugcagacguucaugcggauggccuggggcggcagcuacaucgcgcucgacuccgggcgcggcaacugggacugcaucaugaccagcuaccaguaccugaucauccagaacaccaccugggaggaccacugccaguucucccggcccagccccaucggguaccugggccuccugucccagcgcacgcgggacaucuacaucagccgccggcugcucggcaccuucaccuggacccugagcgacuccgagggggaggacacgccgggcggguacugccugacccgcuggaugcucaucgaggccgagcugaagugcuucggcaacaccgccguggccaagugcaacgagaagcacgacgaggaguucugcgacaugcugcggcuguucgacuucugcaagcaggccauccagcgccugaaggcgcccgcccagaugagcauccagcugaucaacaaggccgugaacgcccucaucaacgaccagcugaucaugaagaaccaccuccgggacaucauggggauccccuacugcaacuacuccaaguacugguaccucaaccacaccacgaccggccgcaccagccugcccaagugcuggcuggucuccaacggcagcuaccucaacgagacccacuucuccgacgacaucgagcagcaggccgacaacaugaucacggagaugcugcagaaggaguacauggagcggcaggggaagaccccgcugggccugguggaccucuucguguucagcaccuccuucuaccugaucagcaucuuccugcaccucgucaagauccccacccaccgccacaucguggggaaguccugccccaagccccaccggcugaaccacaugggcaucugcagcugcgggcuguacaagcagccgggcgugcccgucaaguggaagcgcugaggacuagucccuguucccagagcccacuuuuuuuucuuuuuuugaaauaaaauagccugucuuucagaucucaaaggcucuuuucagagccaccaaaaaaaaaaaaaaaaaaaaaaaaaaaaaaaaaaaaaaaaaaaaaaaaaaaaaaaaaaaaaaaaagaauu

SEQ ID NO: 30337 - RNA, 1736 nt, Artificial Sequence
  mRNA product Design a-2 (hSL-A64-N5) comprising derived and/or modified sequence from LASV(LM765-SLE-2012;Clade IV)__AIT17814__GPCmut6 (opt1)
aggagaguccgcucagccagguugcagaagcggcuuagcguguguccuaaucuucucucugcguguagguaggccugugccgcaaacaagcuuaccaugggccagaucgugaccuucuuccaggaggucccccacgugaucgaggaggugaugaacaucguccugaucgcccucagcauccuggccgugcugaaggggcucuacaacuucgcgaccugcggccugguggggcuggucacguuccuccugcugugcggccgcuccugcaccaccagccucuacaaggggguguacgagcugcagacccuggagcucaacauggagacgcugaacaugugcaugccgcuguccugcaccaagaacaacagccaccacuacaucauggugggcaacgagaccggccucgagcugacccugacgaacaccuccaucaucgaccacaaguucugcaaccucagcgacgcccaccggaagaaccuguacgaccacgcccugauguccaucaucagcaccuuccaccucuccauccccaacuucaaccaguacgaggccaugagcugcgacuucaacgggggcaagaucuccguccaguacaaccugagccacuccuacgccaaggacgcggccgaccacugcgggaccguggccaacggcgugcugcagacguucaugcgcauggccuggggcgggagcuacaucgcgcucgacuccggccgggggcgcugggacugcaucaugaccagcuaccaguaccugaucauccagaacaccaccugggaggaccacugccaguucucccggcccagccccaucggcuaccuggggcuccugucccagcgcacgcgggacaucuacaucagccgccggcugcucggcaccuucaccuggacccugagcgacuccgagggcaaggacacgcccgggggcuacugccugacccgcuggaugcucaucgaggccgagcugaagugcuucgggaacaccgccgucgccaagugcaacgagaagcacgacgaggaguucugcgacaugcugcggcuguucgacuucugcaagcaggccauccagcgccugaaggcgccggcccagaugagcauccagcugaucaacaaggccgugaacgcccucaucaacgaccagcugaucaugaagaaccaccuccgggacaucaugggcauccccuacugcaacuacuccaaguacugguaccucaaccacaccacgaccgggaagaccagccugcccaagugcuggcugguguccaacggcagcuaccucaacgagacccacuucuccgacgacaucgagcagcaggccgacaacaugaucacggagaugcugcagaaggaguacauggagcgccagggcaagaccccgcuggggcuggucgaccucuucguguucagcaccuccuucuaccugaucagcaucuuccugcaccucgugaagauccccacccaccggcacaucgucggcaagcccugccccaagccgcaccgccugaaccacauggggaucugcuccugcggccuguacaagcagcccggggugcccgugaaguggaagcggugaggacuagucccuguucccagagcccacuuuuuuuucuuuuuuugaaauaaaauagccugucuuucagaucucaaaggcucuuuucagagccaccaaaaaaaaaaaaaaaaaaaaaaaaaaaaaaaaaaaaaaaaaaaaaaaaaaaaaaaaaaaaaaaaagaauu

SEQ ID NO: 30338 - RNA, 1736 nt, Artificial Sequence
  mRNA product Design a-2 (hSL-A64-N5) comprising derived and/or modified sequence from LASV(LM776-SLE-2012;Clade IV)__AIT17824__GPCmut6 (opt1)
aggagaguccgcucagccagguugcagaagcggcuuagcguguguccuaaucuucucucugcguguagguaggccugugccgcaaacaagcuuaccaugggccagaucgugaccuucuuccaggaggucccccacgugaucgaggaggugaugaacaucguccugaucgcccucagcauccuggccgugcugaaggggcucuacaacuucgcgaccugcggccugguggggcuggucacguuccuccugcugugcggccgcuccugcaccaccagcguguacaaggggguguacgagcuccagacccuggagcugaacauggagacgcucaacaugugcaugccgcuguccugcaccaagaacaacagccaccacuacaucauggucggcaacgagaccggccuggagcucacccugacgaacaccuccaucaucaaccacaaguucugcaaccugagcgacgcccacaagaagaaccucuacgaccacgcccugauguccaucaucagcaccuuccaccuguccauccccaacuucaaccaguacgaggccaugagcugcgacuucaacgggggcaagaucuccgugcaguacaaccucagccacuccuacgccggggacgcggccaaccacugcggcaccguggccaacgggguccugcagacguucaugcggauggccuggggcggcagcuacaucgcgcuggacuccgggcacggcaagugggacugcaucaugaccagcuaccaguaccucaucauccagaacaccaccugggaggaccacugccaguucucccgccccagccccaucggguaccugggccugcucucccagcggacgcgcgacaucuacaucagccggcgccugcugggcaccuucaccuggacccucagcgacuccgaggggaaggacacgccgggcggguacugccugacccgguggaugcugaucgaggccgagcucaagugcuucggcaacaccgccguggccaagugcaacgagaagcacgacgaggaguucugcgacaugcugcgccuguucgacuucugcaagcaggccauccagcggcucaaggcgcccgcccagaugagcauccagcugaucaacaaggccgugaacgcccugaucaacgaccagcucaucaugaagaaccaccuccgcgacaucauggggauccccuacugcaacuacuccaaguacugguaccugaaccacaccacgaccggcaagaccagccugcccaagugcuggcuggucuccaacggcagcuaccugaacgagacccacuucuccgacgacaucgagcagcaggccgacaacaugaucacggagaugcuccagaaggaguacauggagcggcaggggaagaccccgcugggccugguggaccuguucguguucagcaccuccuucuaccucaucagcaucuuccugcaccuggucaagauccccacccaccgccacaucguggggaaguccugccccaagccccaccggcucaaccacaugggcaucugcagcugcgggcuguacaagcagccgggcgugcccguccgcuggaagcggugaggacuagucccuguucccagagcccacuuuuuuuucuuuuuuugaaauaaaauagccugucuuucagaucucaaaggcucuuuucagagccaccaaaaaaaaaaaaaaaaaaaaaaaaaaaaaaaaaaaaaaaaaaaaaaaaaaaaaaaaaaaaaaaaagaauu

SEQ ID NO: 30339 - RNA, 1736 nt, Artificial Sequence
  mRNA product Design a-2 (hSL-A64-N5) comprising derived and/or modified sequence from LASV(Mad39;Clade IV)__ANH09722__GPCmut6 (opt1)
aggagaguccgcucagccagguugcagaagcggcuuagcguguguccuaaucuucucucugcguguagguaggccugugccgcaaacaagcuuaccaugggccagaucgugaccuucuuccaggaggucccccacgugaucgaggaggugaugaacaucguccugaucgcccucagcauccuggccgugcugaaggggcucuacaacguggcgaccugcggccugaucgggcuggucacguuccuccugcugugcggccgcuccugcaccaccacccucuacaaggggguguacgagcugcaggcccuggagcucaacauggagacgcugaacaugugcaugccgcugagcugcaccaagaacaacucccaccacuacauccgggugggcaacgagaccggccucgagcugacccugacgaacaccagccucaucaaccacaaguucugcaaccuguccgacgcccacaagaagaaccuguacgaccacgcccucaugagcaucaucuccaccuuccaccugagcauccccaacuucaaccaguacgaggccauguccugcgacuucaacgacgggaagaucagcguccaguacaaccugucccacaccuacgcgggcgacacggccaaccacugcgggaccguggccaacggcgugcuccagaccuucaugcgcauggccuggggcgggagcuacaucgcgcuggacuccggccgcgggggcugggacugcaucaugaccagcuaccaguaccugaucauccagaacacgaccugggaggaccacugccaguucucccggcccagccccaucggguaccucggccugcugucccagcggacccgcgacaucuacaucagccggcgccuccugggcaccuucacguggacccuguccgacagcgaggggaaggacaccccgggcggguacugccucacccgguggaugcugaucgaggccgagcugaagugcuucggcaacacggccgucgccaagugcaacgagaagcacgacgaggaguucugcgacaugcuccgccuguucgacuucugcaagcaggccauccagcggcugaaggcgcccgcccagaugagcauccagcucaucaacaaggccgugaacgcccugaucaacgaccagcugaucaugaagaaccaccuccgcgacaucauggggauccccuacugcaacuacuccaaguacugguaccugaaccacaccgugaccggcaagaccagccugcccaagugcuggcucgucuccaacggcagcuaccugaacgagacgcacuucuccgacgacaucgagcagcaggccgacaacaugaucaccgagaugcugcagaaggaguacauggagcggcaggggaagaccccgcugggccucguggaccuguucguguucagcaccuccuucuaccugaucagcaucuuccuccaccuggucaagauccccacgcaccgccacgugguggggaagcccugccccaagccgcaccggcugaaccacaugggcaucugcuccugcggguucuacaagcagcccggcguccccgugcgcuggaagcggugaggacuagucccuguucccagagcccacuuuuuuuucuuuuuuugaaauaaaauagccugucuuucagaucucaaaggcucuuuucagagccaccaaaaaaaaaaaaaaaaaaaaaaaaaaaaaaaaaaaaaaaaaaaaaaaaaaaaaaaaaaaaaaaaagaauu

SEQ ID NO: 30340 - RNA, 1736 nt, Artificial Sequence
  mRNA product Design a-2 (hSL-A64-N5) comprising derived and/or modified sequence from LASV(Z0947-SLE-2011;Clade IV)__AIT17840__GPCmut6 (opt1)
aggagaguccgcucagccagguugcagaagcggcuuagcguguguccuaaucuucucucugcguguagguaggccugugccgcaaacaagcuuaccaugggccagaucgugaccuucuuccaggaggucccccacgugaucgaggaggugaugaacaucguccugaucgcccucagcauccuggccgugcugaaggggcucuacaacuucgcgaccugcggccugguggggcuggucacguuccuccugcugugcggccgcuccugcaccaucagccucuacaaggggguguacgagcugcagacccuggagcucaacauggagacccugaacaugugcaugccgcuguccugcacgaagaacaacagccaccacuacaucauggugggcaacgagaccggccucgagcugacccugaccaacacguccaucaucaaccacaaguucugcaaccucagcgacgcccacaagaagaaccuguacgaccacgcccugauguccaucaucagcaccuuccaccucuccauccccaacuucaaccaguacgaggccaugagcugcgacuucaacgggggcaagaucuccguccaguacaaccugagccacuccuacgccggggacgcggccaaccacugcggcaccguggccaacggggugcugcagaccuucaugcggauggccuggggcggcagcuacaucgcgcucgacuccgggcgcgaccggugggacugcaucaugacgagcuaccaguaccugaucauccagaacaccaccugggaggaccacugccaguucucccgccccagccccaucggcuaccuggggcuccugucccagcggacccgcgacaucuacaucagccggcgccugcucggcacguucaccuggacccugagcgacuccgagggcaaggacacccccgggggcuacugccugacgcgguggaugcucaucgaggccgagcugaagugcuucgggaacaccgccgucgccaagugcaacgagaagcacgacgaggaguucugcgacaugcugcgccucuucgacuucugcaagcaggccauccagcggcugaaggcgccggcccagaugagcauccagcugaucaacaaggccgugaacgcccucaucaacgaccagcugaucaugaagaaccaccuccgcgacaucaugggcauccccuacugcaacuacuccaaguacugguaccugaaccacaccaccacggggaagaccagccugcccaagugcuggcugguguccaacggcagcuaccucaacgagacccacuucuccgacgacaucgagcagcaggccgacaacaugaucaccgagaugcugcagaaggaguacauggagcggcagggcaagacgccgcuggggcuggucgaccucuucguguucagcaccuccuucuaccugaucagcaucuuccugcaccucgugaagauccccacccaccgccacaucgucggcaagcccugccccaagccgcaccggcugaaccacauggggaucugcuccugcggccuguacaagcagcccggggugcccgugaaguggaagcgcugaggacuagucccuguucccagagcccacuuuuuuuucuuuuuuugaaauaaaauagccugucuuucagaucucaaaggcucuuuucagagccaccaaaaaaaaaaaaaaaaaaaaaaaaaaaaaaaaaaaaaaaaaaaaaaaaaaaaaaaaaaaaaaaaagaauu

SEQ ID NO: 30341 - RNA, 1736 nt, Artificial Sequence
  mRNA product Design a-2 (hSL-A64-N5) comprising derived and/or modified sequence from LASV(Josiah;Clade IV)__NP_694870__GPCmut6 (opt4)
aggagaguccgcucagccagguugcagaagcggcuuagcguguguccuaaucuucucucugcguguagguaggccugugccgcaaacaagcuuaccaugggccagaucgugaccuucuuccaggaggugccccacgugaucgaggaggugaugaacaucgugcugaucgcccugagcgugcuggccgugcugaagggccuguacaacuucgccaccugcggccuggugggccuggugaccuuccugcugcugugcggcagaagcugcaccaccagccuguacaagggcguguacgagcugcagacccuggagcugaacauggagacccugaacaugugcaugccccugagcugcaccaagaacaacagccaccacuacaucauggugggcaacgagaccggccuggagcugacccugaccaacaccagcaucaucaaccacaaguucugcaaccugagcgacgcccacaagaagaaccuguacgaccacgcccugaugagcaucaucagcaccuuccaccugagcauccccaacuucaaccaguacgaggccaugagcugcgacuucaacggcggcaagaucagcgugcaguacaaccugagccacagcuacgccggcgacgccgccaaccacugcggcaccguggccaacggcgugcugcagaccuucaugagaauggccuggggcggcagcuacaucgcccuggacagcggcagaggcaacugggacugcaucaugaccagcuaccaguaccugaucauccagaacaccaccugggaggaccacugccaguucagcagacccagccccaucggcuaccugggccugcugagccagagaaccagagacaucuacaucagcagaagacugcugggcaccuucaccuggacccugagcgacagcgagggcaaggacacccccggcggcuacugccugaccagauggaugcugaucgaggccgagcugaagugcuucggcaacaccgccguggccaagugcaacgagaagcacgacgaggaguucugcgacaugcugagacuguucgacuucugcaagcaggccauccagagacugaaggcccccgcccagaugagcauccagcugaucaacaaggccgugaacgcccugaucaacgaccagcugaucaugaagaaccaccugagagacaucaugggcauccccuacugcaacuacagcaaguacugguaccugaaccacaccaccaccggcagaaccagccugcccaagugcuggcuggugagcaacggcagcuaccugaacgagacccacuucagcgacgacaucgagcagcaggccgacaacaugaucaccgagaugcugcagaaggaguacauggagagacagggcaagaccccccugggccugguggaccuguucguguucagcaccagcuucuaccugaucagcaucuuccugcaccuggugaagauccccacccacagacacaucgugggcaagagcugccccaagccccacagacugaaccacaugggcaucugcagcugcggccuguacaagcagcccggcgugcccgugaaguggaagagaugaggacuagucccuguucccagagcccacuuuuuuuucuuuuuuugaaauaaaauagccugucuuucagaucucaaaggcucuuuucagagccaccaaaaaaaaaaaaaaaaaaaaaaaaaaaaaaaaaaaaaaaaaaaaaaaaaaaaaaaaaaaaaaaaagaauu

SEQ ID NO: 30342 - RNA, 1733 nt, Artificial Sequence
  mRNA product Design a-2 (hSL-A64-N5) comprising derived and/or modified sequence from LASV(LP;Clade I)__AAF86701__GPCmut6 (opt4)
aggagaguccgcucagccagguugcagaagcggcuuagcguguguccuaaucuucucucugcguguagguaggccugugccgcaaacaagcuuaccaugggccagaucaucaccuucuuccaggaggugccccacgugaucgaggaggugaugaacaucgugcugaucgcccugagccugcuggccauccugaagggccuguacaacaucgccaccugcggcaucaucggccugguggccuuccuguuccugugcggcaagagcugcagccugacccugaagggcggcuacgagcugcagacccuggagcugaacauggagacccugaacaugugcaugccccugagcugcaccaagaacagcagccaccacuacaucagagugggcaacgagaccggccuggagcugacccugaccaacaccagcaucaucaaccacaaguucugcaaccugagcgacgcccacaagaagaaccuguacgaccacgcccugaugagcaucaucagcaccuuccaccugagcauccccaacuucaaccaguacgaggccaugagcugcgacuucaacggcggcaagaucagcgugcaguacaaccugagccacagcuacgccggcgacgccgccgagcacugcggcaccguggccaacggcgugcugcagaccuucaugagaauggccuggggcggcagauacaucgcccuggacagcggcaagggcaacugggacugcaucaugaccagcuaccaguaccugaucauccagaacaccaccugggaggaccacugccaguucagcagacccagccccaucggcuaccugggccugcugagccagagaaccagagacaucuacaucagcagaagacugcugggcaccuucaccuggacccugagcgacagcgagggcaacgagacccccggcggcuacugccugaccagauggaugcugaucgaggccgagcugaagugcuucggcaacaccgccguggccaagugcaacgagaagcacgacgaggaguucugcgacaugcugagacuguucgacuucugcaagcaggccaucagaagacugaaggcccccgcccagaugagcauccagcugaucaacaaggccgugaacgcccugaucaacgaccagcugaucaugaagaaccaccugagagacaucaugggcauccccuacugcaacuacagcaaguacugguaccugaaccacaccagcagcggcagaaccagccugcccaagugcuggcugaucagcaacggcagcuaccugaacgagacccaguucagcgacgacaucgagcagcaggccgacaacaugaucaccgagaugcugcagaaggaguacaucgagagacagggcaagaccccccugggccugguggacaucuucaucuucagcaccagcuucuaccugaucagcaucuuccugcaccugaucaagauccccacccacagacacaucgugggcaagcccugccccaagccccacagacugaaccacaugggcgugugcagcugcggccuguacaagcaccccggcgugcccaccaaguggaagagaugaggacuagucccuguucccagagcccacuuuuuuuucuuuuuuugaaauaaaauagccugucuuucagaucucaaaggcucuuuucagagccaccaaaaaaaaaaaaaaaaaaaaaaaaaaaaaaaaaaaaaaaaaaaaaaaaaaaaaaaaaaaaaaaaagaauu

SEQ ID NO: 30343 - RNA, 1733 nt, Artificial Sequence
  mRNA product Design a-2 (hSL-A64-N5) comprising derived and/or modified sequence from LASV(803213;Clade II)__AAF86703__GPCmut6 (opt4)
aggagaguccgcucagccagguugcagaagcggcuuagcguguguccuaaucuucucucugcguguagguaggccugugccgcaaacaagcuuaccaugggccagaucaucaccuucuuccaggaggugccccacgugaucgaggaggugaugaacaucgugcugaucgcccugagccugcuggccauccugaagggcaucuacaacguggccaccugcggccuguucggccugaucagcuuccugcugcugugcggcagaagcugcagcgugaccuacaagggcguguacgagcugcagacccuggagcugaacauggccaaccugaacaugugcaugccccugagcugcaccaagaacaacagccaccacuacaucauggugggcaacgagaccggccuggagcugacccugaccaacaccagcaucaucaaccacaaguucugcaaccugagcgacgcccacaagaagaaccuguacgaccacgcccugaugagcaucaucagcaccuuccaccugagcauccccaacuucaaccaguacgaggccaugagcugcgacuucaacggcggcaagaucagcgugcaguacaaccugagccacagcuucgccguggacgccgccaaccacugcggcaccaucgccaacggcgugcugcagaccuucaugagaauggccuggggcggcagcuacaucgcccuggacagcggcaagggcaacugggacugcaucaugaccagcuaccaguaccugaucauccagaacaccaccugggaggaccacugccaguucagcagacccagccccaucggcuaccugggccugcugagccagagaaccagagacaucuacaucagcagaagacugcugggcaccuucaccuggacccugagcgacagcgagggcaacgaggcccccggcggcuacugccugaccagauggaugcugaucgaggccgagcugaagugcuucggcaacaccgccguggccaagugcaacgagaagcacgacgaggaguucugcgacaugcugagacuguucgacuucugcaagcaggccaucaagagacugaagacccccgcccagaugagcauccagcugaucaacaaggccgugaacgcccugaucaacgaccagcugaucaugaagaaccaccugagagacaucaugggcauccccuacugcaacuacagcagauacugguaccugaaccacaccgugaccggcaagaccagccugcccagaugcuggcuggugagcaacggcagcuaccugaacgagacccacuucagcgacgacaucgagcagcaggccgacaacaugaucaccgagaugcugcagaaggaguacauggacagacagggcaagaccccccugggccugguggaccuguucguguucagcaccagcuucuaccugaucagcaucuuccugcaccuggugaagauccccacccacagacacaucgugggcaagcccugccccaagccccacagacugaaccacaugggcaucugcagcugcggccuguacaagcaccccggcgugcccgugaaguggaagagaugaggacuagucccuguucccagagcccacuuuuuuuucuuuuuuugaaauaaaauagccugucuuucagaucucaaaggcucuuuucagagccaccaaaaaaaaaaaaaaaaaaaaaaaaaaaaaaaaaaaaaaaaaaaaaaaaaaaaaaaaaaaaaaaaagaauu

SEQ ID NO: 30344 - RNA, 1733 nt, Artificial Sequence
  mRNA product Design a-2 (hSL-A64-N5) comprising derived and/or modified sequence from LASV(GA391;Clade III)__CAA36645__GPCmut6 (opt4)
aggagaguccgcucagccagguugcagaagcggcuuagcguguguccuaaucuucucucugcguguagguaggccugugccgcaaacaagcuuaccaugggccagaucgugaccuucuuccaggaggugccccacgugaucgaggaggugaugaacaucgugcugaucgcccugagcauccuggccauccugaagggccuguacaacguggccaccugcggccugaucggccuggugaccuuccugcugcugagcggcagaagcugcagccugaucuacaagggcaccuacgagcugcagacccuggagcugaacauggagacccugaacaugugcaugccccugagcugcaccaagaacaacagccaccacuacaucagagugggcaacgagaccggccuggagcugacccugaccaacaccagcauccugaaccacaaguucugcaaccugagcgacgcccacaagagaaaccuguacgaccacagccugaugagcaucaucagcaccuuccaccugagcauccccaacuucaaccaguacgaggccaugagcugcgacuucaacggcggcaagaucaccgugcaguacaaccugagccacagcuucgccguggacgccgccggccacugcggcacccuggccaacggcgugcugcagaccuucaugagaauggccuggggcggcagcuacaucgcccuggacagcggcagaggcaacugggacugcaucaugaccagcuaccaguaccugaucauccagaacaccaccugggacgaccacugccaguucagcagacccagccccaucggcuaccugggccugcugagccagagaaccagagacaucuacaucagcagaagacugcugggcaccuucaccuggacccugagcgacagcgagggcaacgagacccccggcggcuacugccugaccagauggaugcugaucgaggccgagcugaagugcuucggcaacaccgccguggccaagugcaacgagaagcacgacgaggaguucugcgacaugcugagacuguucgacuucugcaagcaggccaucagaagacugaagacccccgcccagaugagcauccagcugaucaacaaggccgugaacgcccugaucaacgaccagcugaucaugaagaaccaccugagagacaucaugggcauccccuacugcaacuacagcagauacugguaccugaaccacaccagcaccggcaagaccagccugcccagaugcuggcugaucagcaacggcagcuaccugaacgagaccaaguucagcgacgacaucgagcagcaggccgacaacaugaucaccgagaugcugcagaaggaguacaucgacagacagggcaagaccccccugggccugguggaccuguucguguucagcaccagcuucuaccugaucagcaucuuccugcaccuggugaagauccccacccacagacacaucgugggcaagcccugccccaagccccacagacugaaccacaugggcaucugcagcugcggccuguacaagcagcccggcgugcccgugagauggaagagaugaggacuagucccuguucccagagcccacuuuuuuuucuuuuuuugaaauaaaauagccugucuuucagaucucaaaggcucuuuucagagccaccaaaaaaaaaaaaaaaaaaaaaaaaaaaaaaaaaaaaaaaaaaaaaaaaaaaaaaaaaaaaaaaaagaauu

SEQ ID NO: 30345 - RNA, 1736 nt, Artificial Sequence
  mRNA product Design a-2 (hSL-A64-N5) comprising derived and/or modified sequence from LASV(AV;Clade V)__CCA30314__GPCmut6 (opt4)
aggagaguccgcucagccagguugcagaagcggcuuagcguguguccuaaucuucucucugcguguagguaggccugugccgcaaacaagcuuaccaugggccagaucgugaccuucuuccaggaggugccccacgugaucgaggaggugaugaacaucgugcugaucgcccugagcauccuggccgugcugaagggccuguacaacaucgccaccugcggccugaucggccugaucaccuuccugcugcugugcggcagaagcugcagcagcaaccuguacaagggcguguacgagcugcagagccuggaccugaacauggagacccugaacaugugcaugccccugagcugcaccaagaacaacagccaccacuacaucagagugggcaacgacaccggccuggagcugacccugaccaacaccagcauccugaaccacaaguucugcaaccugagcgacgcccacaagaaggaccuguacgaccacgcccugaugagcaucaucagcaccuuccaccugagcauccccaacuucaaccaguacgaggccaugagcugcgacuucaacggcggcaagaucagcgugcaguacaaccugagccacagcuacgccaucgacgccgccaaccacugcggcaccguggccaacggcauccugcagaccuucaugagaauggccuggggcggcagcuacaucgcccuggacagcggcagaggcaacugggacugcaucaugaccagcuaccaguaccugaucauccagaacaccaccugggagaaccacugccaguucagcagacccagccccaucggcuaccugggccugcugagccagagaaccagagacaucuacaucagcagaagacugcugggcaccuucaccuggacccugagcgacagcgagggcaacgccacccccggcggcuacugccugaccagauggaugcugaucgaggccgagcugaagugcuucggcaacaccgccguggccaagugcaacgagaagcacgacgaggaguucugcgacaugcugagacuguucgacuucugcaagcaggccaucagcagacugaagagccccgcccagaugagcauccagcugaucaacaaggccgugaacgcccugaucaacgaccagcugaucaugaagaaccaccugagagacaucaugggcauccccuacugcaacuacagcaaguacugguaccugaaccacaccaucaccggcaagaccagccugcccaagugcuggcuggugagcaacggcagcuaccugaacgagacccacuucagcgacgacaucgagcagcaggccgacaacaugaucaccgagaugcugcagaaggaguacauggagagacagggcaagaccccccugggccugguggaccuguucguguucagcaccagcuucuaccugaucagcaucuuccugagacuggugaagauccccacccacagacacaucgugggcaagcccugccccaagccccacagacugaaccacaugggcaucugcagcugcggccuguacaagcagcccggcgugcccgugagauggaagagaugaggacuagucccuguucccagagcccacuuuuuuuucuuuuuuugaaauaaaauagccugucuuucagaucucaaaggcucuuuucagagccaccaaaaaaaaaaaaaaaaaaaaaaaaaaaaaaaaaaaaaaaaaaaaaaaaaaaaaaaaaaaaaaaaagaauu

SEQ ID NO: 30346 - RNA, 1733 nt, Artificial Sequence
  mRNA product Design a-2 (hSL-A64-N5) comprising derived and/or modified sequence from LASV(Togo/2016/7082;Clade VI)__AMR44577__GPCmut6 (opt4)
aggagaguccgcucagccagguugcagaagcggcuuagcguguguccuaaucuucucucugcguguagguaggccugugccgcaaacaagcuuaccaugggccagaucaucaccuucuuccaggaggugccccacgugaucgaggaggugaugaacaucgugcugaucgcccugagccugcuggccauccugaagggcguguacaacguggccaccugcggcaucaucggccuggugaccuuccuguuccugugcggcagaagcugcagccugaucuacaagggcagcuacgagcugcagacccuggagcugaacauggagacccugaacaugugcaugccccugagcugcaccaagaacagcagccaccacuacaucagagugggcaacgagaccggccuggagcugacccugaccaacaccagcaucaucaaccacaaguucugcaaccugagcgacgcccacaagagaaaccuguacgaccacgcccugaugagcauccugagcaccuuccaccugagcauccccaacuucaaccaguacgaggccaugagcugcgacuucaacggcggcaagaucagcgugcaguacaaccugagccacgccuacgccguggacgccgccgagcacugcggcaccguggccaacggcgugcugcagaccuucaugagaauggccuggggcggcagcuacaucgcccuggacagcggcagaggcaacugggacugcaucaugaccagcuaccaguaccugaucauccagaacaccaccugggaggaccacugccaguucagcagacccagccccaucggcuaccugggccugcugagccagagaaccagagacaucuacaucagcagaagacugcugggcaccuucaccuggacccugagcgacagcgagggcaacgagacccccggcggcuacugccugaccagauggaugcugaucgaggccgagcugaagugcuucggcaacaccgccguggccaagugcaacgagaagcacgacgaggaguucugcgacaugcugagacuguucgacuucugcaagcaggccauccagagacugaagagccccgcccagaugagcauccagcugaucaacaaggccgugaacgcccugaucaacgaccagcugaucaugaagaaccaccugagagacaugaugggcauccccuacugcaacuacagcaaguacugguaccugaaccacaccagcagcggcagaaccagccugcccaagugcuggcuggugagcaacggcagcuaccugaacgagacccacuucagcgacgacaucgagcagcaggccgacaacaugaucaccgagaugcugcagaaggaguacaucgacagacagggcaagaccccccugggccugguggaccuguucguguucagcaccagcuucuaccugaucagcaucuuccugcaccugaucaagauccccacccacagacacaucgugggcaagcccugccccaagccccacagacugaaccacaugggcaucugcagcugcggccuguacaagcagcccggcgugcccaccagauggaagagaugaggacuagucccuguucccagagcccacuuuuuuuucuuuuuuugaaauaaaauagccugucuuucagaucucaaaggcucuuuucagagccaccaaaaaaaaaaaaaaaaaaaaaaaaaaaaaaaaaaaaaaaaaaaaaaaaaaaaaaaaaaaaaaaaagaauu

SEQ ID NO: 30347 - RNA, 1733 nt, Artificial Sequence
  mRNA product Design a-2 (hSL-A64-N5) comprising derived and/or modified sequence from LASV(KAK-428;Clade n.d. (VII))__ANH09740__GPCmut6 (opt4)
aggagaguccgcucagccagguugcagaagcggcuuagcguguguccuaaucuucucucugcguguagguaggccugugccgcaaacaagcuuaccaugggccagaucgugaccuucuuccaggaggugccccacgugaucgaggaggugaugaacaucgugcugaucgcccugagccugcuggccauccugaagggccuguacaacuucgccaccugcggcgugaucggccugaucaccuuccugcugcugugcggcagaagcugcagcgccaccuacaagggccaguacgagcugcagacccuggagcugaacauggagagccugaacaugugcaugccccugagcugcaccaagaacaacagccaccacuacaucagagccggcaacaacaccggccuggagcugacccugaccaacaccagcaucaucagccacaaguucugcaaccugagcgacgcccacaagaagaaccuguacgaccacacccugaugagcaucaucaccaccuuccaccugagcauccccaacuucaaccaguacgaggccaugagcugcgacuucaacggcggcaagaucagcauccaguacaaccugagccacagcuacgccggcgacgccgcccagcacugcggcaccguggccaacggcgugcugcagaccuucaugagaauggccuggggcggcagcuaccuggcccuggacagcggcagaagaggcugggacugcaucaucagcagcuaccaguaccugaucauccagaacaccaccugggacgaccacugccaguucagcagacccagccccaucggcuaccugggcuucgugagccagaagaccagagacaucuacaucagcagaagacugcugggcaccuucaccuggacccugagcgacagcgagggccacgacaugcccggcggcuacugccugaccagauggaugcugaucgaggccgaccugaagugcuucggcaacaccgccguggccaagugcaacgagaagcacgacgaggaguucugcgacauguggagacuguucgacuucugcaagcaggccauccagagacugaaggcccccgcccagaugaacauccagcugaucaacaaggccgugaacgcccugaucaacgaccagcugaugaugaagaaccaccugagagacaucaugggcauccccuacugcaacuacagcaaguucugguaccugaacaacaccaccaccggcagaaccagccugcccagaugcuggcugaucagcaacggcagcuaccugaacgagacccacuucagcgacgacaucgagcagcaggccgacaacaugaucaccgagaugcugcagaaggaguacauggacagacagggcaagaccccccugggccugguggaccuguucguguucagcaccagcuucuaccugaucaccaucuuccugcaccuggugaagauccccacccacagacacaucgugggcaagcccugccccaagccccacagacugaaccacaugggcaucugcagcugcggccuguacaagcagcccggcgugcccgugagauggaagagaugaggacuagucccuguucccagagcccacuuuuuuuucuuuuuuugaaauaaaauagccugucuuucagaucucaaaggcucuuuucagagccaccaaaaaaaaaaaaaaaaaaaaaaaaaaaaaaaaaaaaaaaaaaaaaaaaaaaaaaaaaaaaaaaaagaauu

SEQ ID NO: 30348 - RNA, 1733 nt, Artificial Sequence; identical to SEQ ID NO: 30342
  mRNA product Design a-2 (hSL-A64-N5) comprising derived and/or modified sequence from LASV(Pinneo-NIG-1969;Clade I)__AIT17836__GPCmut6 (opt4)

SEQ ID NO: 30349 - RNA, 1733 nt, Artificial Sequence
  mRNA product Design a-2 (hSL-A64-N5) comprising derived and/or modified sequence from LASV(ISTH0009-NIG-2011;Clade II)__AIT17404__GPCmut6 (opt4)
aggagaguccgcucagccagguugcagaagcggcuuagcguguguccuaaucuucucucugcguguagguaggccugugccgcaaacaagcuuaccaugggccagaucaucaccuucuuccaggaggugccccacgugaucgaggaggugaugaacaucgugcugaucgcccugagccugcuggccauccugaagggcaucuacaacguggccaccugcggccuguucggccuggugagcuuccugcugcugugcggcagaagcugcagcaccaccuacaagggcguguacgagcugcagacccuggagcuggacauggccagccugaacaugugcaugccccugagcugcaccaagaacaacagccaccacuacaucauggugggcaacgagaccggccuggagcugacccugaccaacaccagcaucaucaaccacaaguucugcaaccugagcgacgcccacaagaagaaccuguacgaccacgcccugaugagcaucaucagcaccuuccaccugagcauccccaacuucaaccaguacgaggccaugagcugcgacuucaacggcggcaagaucagcgugcaguacaaccugagccacgccuacgccguggacgccgccaaccacugcggcaccaucgccaacggcgugcugcagaccuucaugagaauggccuggggcggcagcuacaucgcccuggacagcggcaagggcagcugggacugcaucaugaccagcuaccaguaccugaucauccagaacaccaccugggaggaccacugccaguucagcagacccagccccaucggcuaccugggccugcugagccagagaaccagagacaucuacaucagcagaagacugcugggcaccuucaccuggacccugagcgacagcgagggcaacgagacccccggcggcuacugccugaccagauggaugcugaucgaggccgagcugaagugcuucggcaacaccgccguggccaagugcaacgagaagcacgacgaggaguucugcgacaugcugagacuguucgacuucugcaagcaggccaucagaagacugaagacccccgcccagaugagcauccagcugaucaacaaggccgugaacgcccugaucaacgaccagcugaucaugaagaaccaccugagagacaucaugggcauccccuacugcaacuacagcaaguacugguaccugaaccacaccgugaccggcaagaccagccugcccagaugcuggcuggugagcaacggcagcuaccugaacgagacccacuucagcgacgacaucgagcagcaggccgacaacaugaucaccgagcugcugcagaaggaguacauggacagacagggcaagaccccccugggccugguggaccuguucguguucagcaccagcuucuaccugaucagcaucuuccugcaccugaucaagauccccacccacagacacaucaccggcaagcccugccccaagccccacagacugaaccacaugggcaucugcagcugcggccuguacaagcaccccggcgugcccgugaaguggaagagaugaggacuagucccuguucccagagcccacuuuuuuuucuuuuuuugaaauaaaauagccugucuuucagaucucaaaggcucuuuucagagccaccaaaaaaaaaaaaaaaaaaaaaaaaaaaaaaaaaaaaaaaaaaaaaaaaaaaaaaaaaaaaaaaaagaauu

SEQ ID NO: 30350 - RNA, 1733 nt, Artificial Sequence
  mRNA product Design a-2 (hSL-A64-N5) comprising derived and/or modified sequence from LASV(ISTH2010-NIG-2012;Clade II)__AIT17482__GPCmut6 (opt4)
aggagaguccgcucagccagguugcagaagcggcuuagcguguguccuaaucuucucucugcguguagguaggccugugccgcaaacaagcuuaccaugggccagaucaucaccuucuuccaggaggugccccacgugaucgaggaggugaugaacaucgugcugaucgcccugagccugcuggccauccugaagggcaucuacaacguggccaccugcggccuguucggccuggugagcuuccugcugcugugcggcagaagcugcagcaccaccuacaagggcguguacgagcugcagacccuggagcuggacauggccagccugaacaugugcaugccccugagcugcaccaagaacaacagccaccacuacaucauggugggcaacgagaccggccuggagcugacccugaccaacaccagcaucaucaaccacaaguucugcaaccugagcgacgcccacaagaagaaccuguacgaccacgcccugaugagcaucaucagcaccuuccaccugagcauccccaacuucaaccaguacgaggccaugagcugcgacuucaacggcggcaagaucagcgugcaguacaaccugagccacgccuacgccguggacgccgccaaccacugcggcaccaucgccaacggcgugcugcagaccuucaugagaauggccuggggcggcagcuacaucgcccuggacagcggcaagggcagcugggacugcaucaugaccagcuaccaguaccugaucauccagaacaucaccugggaggaccacugccaguucagcagacccagccccaucggcuaccugggccugcugagccagagaaccagagacaucuacaucagcagaagacugcugggcaccuucaccuggacccugagcgacagcgagggcaacgagacccccggcggcuacugccugaccagauggaugcugaucgaggccgagcugaagugcuucggcaacaccgccguggccaagugcaacgagaagcacgacgaggaguucugcgacaugcugagacuguucgacuucugcaagcaggccaucagaagacugaagacccccgcccagaugagcauccagcugaucaacaaggccgugaacgcccugaucaacgaccagcugaucaugaagaaccaccugagagacaucaugggcauccccuacugcaacuacagcaaguacugguaccugaaccacaccgugaccggcaagaccagccugcccagaugcuggcuggugagcaacggcagcuaccugaacgagacccacuucagcgacgacaucgagcagcaggccgacaacaugaucaccgagcugcugcagaaggaguacaucgacagacagggcaagaccccccugggccugguggaccuguucguguucagcaccagcuucuaccugaucagcaucuuccugcaccuggugaagauccccacccacagacacguggugggcaagcccugccccaagccccacagacugaaccacaugggcaucugcagcugcggccuguacaagcaccccggcgugcccgugaaguggaagagaugaggacuagucccuguucccagagcccacuuuuuuuucuuuuuuugaaauaaaauagccugucuuucagaucucaaaggcucuuuucagagccaccaaaaaaaaaaaaaaaaaaaaaaaaaaaaaaaaaaaaaaaaaaaaaaaaaaaaaaaaaaaaaaaaagaauu

SEQ ID NO: 30351 - RNA, 1733 nt, Artificial Sequence
  mRNA product Design a-2 (hSL-A64-N5) comprising derived and/or modified sequence from LASV(Lassa virus/H.sapiens-wt/NGA/2015/ISTH_0543;Clade II)__AVO03639__GPCmut6 (opt4)
aggagaguccgcucagccagguugcagaagcggcuuagcguguguccuaaucuucucucugcguguagguaggccugugccgcaaacaagcuuaccaugggccagaucaucaccuucuuccaggaggugccccacgugaucgaggaggugaugaacaucgugcugaucgcccugagccugcuggccauccugaagggcaucuacaacguggccaccugcggccuguucggccuggugagcuuccugcugcugugcggcagaagcugcagcaccaccuacaagggcguguacgagcugcagacccuggagcuggacauggccaaccugaacaugugcaugccccugagcugcaccaagaacaacagccaccacuacaucauggugggcaacgagaccggccuggagcugacccugaccaacaccagcaucaucaaccacaaguucugcaaccugagcgacgcccacaagaagaaccuguacgaccacgcccugaugagcaucaucagcaccuuccaccugagcauccccaacuucaaccaguacgaggccaugagcugcgacuucaacggcggcaagaucagcgugcaguacaaccugagccacaccuacgccguggacgccgccaaccacugcggcaccaucgccaacggcgugcugcagaccuucaugagaauggccuggggcggcagcuacaucgcccuggacagcggcaagggcagcugggacugcaucaugaccagcuaccaguaccuggugauccagaacaccaccugggaggaccacugccaguucagcagacccagccccaucggcuaccugggccugcugagccagagaaccagagacaucuacaucagcagaagacugcugggcaccuucaccuggacccugagcgacagcgagggcaacgagacccccggcggcuacugccugaccagauggaugcugaucgaggccgagcugaagugcuucggcaacaccgccguggccaagugcaacgagaagcacgacgaggaguucugcgacaugcugagacuguucgacuucugcaagcaggccaucagaagacugaagacccccgcccagaugagcauccagcugaucaacaaggccgugaacgcccugaucaacgaccagcugaucaugaagaaccaccugagagacaucaugggcauccccuacugcaacuacagcaaguacugguaccugaaccacaccgugaccggcaagaccagccugcccagaugcuggcuggugagcaacggcagcuaccugaacgagacccacuucagcgacgacaucgagcagcaggccgacaacaugaucaccgagcugcugcagaaggaguacaucgacagacagggcaagaccccccugggccugguggaccuguucguguucagcaccagcuucuaccugaucagcaucuuccugcaccuggugaagauccccacccacagacacaucaccggcaagcccugccccaagccccacagacugaaccacaugggcaucugcagcugcggccuguacaagcaccccggcgugcccgugaaguggaagagaugaggacuagucccuguucccagagcccacuuuuuuuucuuuuuuugaaauaaaauagccugucuuucagaucucaaaggcucuuuucagagccaccaaaaaaaaaaaaaaaaaaaaaaaaaaaaaaaaaaaaaaaaaaaaaaaaaaaaaaaaaaaaaaaaagaauu

SEQ ID NO: 30352 - RNA, 1733 nt, Artificial Sequence
  mRNA product Design a-2 (hSL-A64-N5) comprising derived and/or modified sequence from LASV(Lassa virus/H.sapiens-wt/NGA/2016/ISTH_0009;Clade II)__AVO03571__GPCmut6 (opt4)
aggagaguccgcucagccagguugcagaagcggcuuagcguguguccuaaucuucucucugcguguagguaggccugugccgcaaacaagcuuaccaugggccagaucaucaccuucuuccaggaggugccccacgugaucgaggaggugaugaacaucgugcugaucgcccugagccugcuggccauccugaagggcaucuacaacguggccaccugcggccugcugggccuggugagcuuccugcugcugugcggcagaagcugcagcaccaccuacaagggcguguacgagcugcagacccuggagcuggacauggccagccugaacaugugcaugccccugagcugcaccaagaacaacagccaccacuacaucauggugggcaacgagaccggccuggagcugacccugaccaacaccagcaucaucaaccacaaguucugcaaccugagcgacgcccacaagaagaaccuguacgaccacgcccugaugagcaucaucagcaccuuccaccugagcauccccaacuucaaccaguacgaggccaugagcugcgacuucaacggcggcagaaucagcgugcaguacaaccugagccacagcuacgccguggacgccgccaaccacugcggcaccaucgccaacggcgugcugcagaccuucaugagaauggccuggggcggcagcuacaucgcccuggacagcggcaagggcagcugggacugcaucaugaccagcuaccaguaccugaucauccagaacaccaccugggaggaccacugccaguucagcagacccagccccaucggcuaccugggccugcugagccagagaaccagagacaucuacaucagcagaagacugcugggcaccuucaccuggacccugagcgacagcgagggcaacgagacccccggcggcuacugccugaccagauggaugcugaucgaggccgagcugaagugcuucggcaacaccgccguggccaagugcaacgagaagcacgacgaggaguucugcgacaugcugagacuguucgacuucugcaagcaggccaucagaagacugaagacccccgcccagaugagcauccagcugaucaacaaggccgugaacgcccugaucaacgaccagcugaucaugaagaaccaccugagagacaucaugggcauccccuacugcaacuacagcaaguacugguaccugaaccacaccgugaccggcaagaccagccugcccagaugcuggcuggugagcaacggcagcuaccugaacgagacccacuucagcgacgacaucgagcagcaggccgacaacaugaucaccgagcugcugcagaaggaguacaucgacagacagggcaagaccccccugggccugguggaccuguucguguucagcaccagcuucuaccugaucagcaucuuccugcaccuggugaagauccccacccacagacacaucaccggcaagcccugccccaagccccacagacugaaccacaugggcaucugcagcugcggccuguacaaccaccccggcgugcccgugaaguggaagagaugaggacuagucccuguucccagagcccacuuuuuuuucuuuuuuugaaauaaaauagccugucuuucagaucucaaaggcucuuuucagagccaccaaaaaaaaaaaaaaaaaaaaaaaaaaaaaaaaaaaaaaaaaaaaaaaaaaaaaaaaaaaaaaaaagaauu

SEQ ID NO: 30353 - RNA, 1733 nt, Artificial Sequence
  mRNA product Design a-2 (hSL-A64-N5) comprising derived and/or modified sequence from LASV(Lassa virus/H.sapiens-wt/NGA/2016/ISTH_0017;Clade II)__AVO03567__GPCmut6 (opt4)
aggagaguccgcucagccagguugcagaagcggcuuagcguguguccuaaucuucucucugcguguagguaggccugugccgcaaacaagcuuaccaugggccagaucaucaccuucuuccaggaggugccccacgugaucgaggaggugaugaacaucgugcugaucgcccugagccugcuggccauccugaagggcaucuacaacguggccaccugcggccuguucggccuggugagcuuccugcugcugugcggcagaagcugcagcaccaccuacaagggcguguacgagcugcagacccuggagcuggacauggccagccugaacaugugcaugccccugagcugcaccaagaacaacagccaccacuacaucauggugggcaacgagaccggccuggagcugacccugaccaacaccagcaucaucaaccacaaguucugcaaccugagcgacgcccacaagaagaaccuguacgaccacgcccugaugagcaucaucagcaccuuccaccugagcauccccaacuucaaccaguacgaggccaugagcugcgacuucaacggcggcaagaucagcgugcaguacaaccugagccacaccuacgccaucgacgccgccaaccacugcggcaccaucgccaacggcgugcugcagaccuucaugagaauggccuggggcggcagcuacaucgcccuggacagcggcaagggcagcugggacugcaucaugaccagcuaccaguaccugaucauccagaacaccaccugggaggaccacugccaguucagcagacccagccccaucggcuaccugggccugcugagccagagaaccagagacaucuacaucagcagaagacugcugggcaccuucaccuggacccugagcgacagcgagggcaacgagacccccggcggcuacugccugaccagauggaugcugaucgaggccgagcugaagugcuucggcaacaccgccguggccaagugcaacgagaagcacgacgaggaguucugcgacaugcugagacuguucgacuucugcaagcaggccaucagaagacugaagacccccgcccagaugagcauccagcugaucaacaaggccgugaacgcccugaucaacgaccagcugaucaugaagaaccaccugagagacaucaugggcauccccuacugcaacuacagcaaguacugguaccugaaccacaccgugaccggcaagaccagccugcccagaugcuggcuggugagcaacggcagcuaccugaacgagacccacuucagcgacgacaucgagcagcaggccgacaacaugaucaccgagcugcugcagaaggaguacauggacagacagggcaagaccccccugggccugguggaccuguucguguucagcaccagcuucuaccugaucagcaucuuccugcaccuggugagaauccccacccacagacacgugaucggcaagcccugccccaagccccacagacugaaccacaugggcaucugcagcugcggccuguacaagcaccccggcgugcccgugaaguggaagagaugaggacuagucccuguucccagagcccacuuuuuuuucuuuuuuugaaauaaaauagccugucuuucagaucucaaaggcucuuuucagagccaccaaaaaaaaaaaaaaaaaaaaaaaaaaaaaaaaaaaaaaaaaaaaaaaaaaaaaaaaaaaaaaaaagaauu

SEQ ID NO: 30354 - RNA, 1733 nt, Artificial Sequence
  mRNA product Design a-2 (hSL-A64-N5) comprising derived and/or modified sequence from LASV(Lassa virus/H.sapiens-wt/NGA/2018/ISTH_0959;Clade II)__AVV65099__GPCmut6 (opt4)
aggagaguccgcucagccagguugcagaagcggcuuagcguguguccuaaucuucucucugcguguagguaggccugugccgcaaacaagcuuaccaugggccagaucaucaccuucuuccaggaggugccccacgugaucgaggaggugaugaacaucgugcugaucgcccugagccugcuggccauccugaagggcaucuacaacguggugaccugcggccuguucggccuggugagcuuccugcugcugugcggcagaagcugcagcaccaccuacaagggcguguacgagcugcagacccuggagcuggacauggccagccugaacaugugcaugccccugagcugcaccaagaacaacagccaccacuacaucauggugggcaacgagaccggccuggagcugacccugaccaacaccagcaucaucaaccacaaguucugcaaccugagcgacgcccacaagaagaaccuguacgaccacgcccugaugagcaucaucagcaccuuccaccugagcauccccaacuucaaccaguacgaggccaugagcugcgacuucaacggcggcaagaucagcgugcaguacaaccugagccacgccuacgccaucgacgccgccaaccacugcggcaccaucgccaacggcgugcugcagaccuucaugagaauggccuggggcggcagcuacaucgcccuggacagcggcaagggcagcugggacugcaucaugaccagcuaccaguaccugaucauccagaacaccaccugggaggaccacugccaguucagcagacccagccccaucggcuaccugggccugcugagccagagaaccagagacaucuacaucagcagaagacugcugggcaccuucaccuggacccugagcgacagcgagggcaacgagacccccggcggcuacugccugaccagauggaugcugaucgaggccgagcugaagugcuucggcaacaccgccguggccaagugcaacgagaagcacgacgaggaguucugcgacaugcugagacuguucgacuucugcaagcaggccaucagaagacugaagacccccgcccagaugagcauccagcugaucaacaaggccgugaacgcccugaucaacgaccagcugaucaugaagaaccaccugagagacaucaugggcauccccuacugcaacuacagcaaguacugguaccugaaccacaccgugaccggcaagaccagccugcccagaugcuggcuggugagcaacggcagcuaccugaacgagacccacuucagcgacgacaucgagcagcaggccgacaacaugaucaccgagcugcugcagaaggaguacaucgacagacagggcaagaccccccugggccugguggaccuguucguguucagcaccagcuucuaccugaucagcaucuuccugcaccuggugaagauccccacccacagacacgugaucggcaagcccugccccaagccccacagacugaaccacaugggcaucugcagcugcggccuguacaagcaccccggcgugcccgugaaguggaagagaugaggacuagucccuguucccagagcccacuuuuuuuucuuuuuuugaaauaaaauagccugucuuucagaucucaaaggcucuuuucagagccaccaaaaaaaaaaaaaaaaaaaaaaaaaaaaaaaaaaaaaaaaaaaaaaaaaaaaaaaaaaaaaaaaagaauu

SEQ ID NO: 30355 - RNA, 1733 nt, Artificial Sequence
  mRNA product Design a-2 (hSL-A64-N5) comprising derived and/or modified sequence from LASV(LASV003-NIG-2008;Clade II)__AIT17580__GPCmut6 (opt4)
aggagaguccgcucagccagguugcagaagcggcuuagcguguguccuaaucuucucucugcguguagguaggccugugccgcaaacaagcuuaccaugggccagaucaucaccuucuuccaggaggugccccacgugaucgaggaggugaugaacaucgugcugaucgcccugagccugcuggccauccugaagggcaucuacaacguggccaccugcggccuguucggccuggugagcuuccugcugcugugcggcagaagcugcagcaccaccuacaagggcguguacgagcugcagacccuggagcuggacauggccagccugaacaugugcaugccccugagcugcaccaagaacaacagccaccacuacaucauggugggcaacgagaccggccuggagcugacccugaccaacaccagcaucaucaaccacaaguucugcaaccugagcgacgcccacaagaagaaccuguacgaccacgcccugaugagcaucaucagcaccuuccaccugagcauccccaacuucaaccaguacgaggccaugagcugcgacuucaacggcggcaagaucagcgugcaguacaaccugagccacaccuacgccguggacgccgccaaccacugcggcaccaucgccaacggcgugcugcagaccuucaugagaauggccuggggcggcagcuacaucgcccuggacagcggcaagggcagcugggacugcaucaugaccagcuaccaguaccugaucauccagaacaccaccugggaggaccacugccaguucagcagacccagccccaucggcuaccugggccugcugagccagagaaccagagacaucuacaucagcagaagacugcugggcaccuucaccuggacccugagcgacagcgagagcaacgagacccccggcggcuacugccugaccagauggaugcugaucgaggccgagcugaagugcuucggcaacaccgccguggccaagugcaacgagaagcacgacgaggaguucugcgacaugcugagacuguucgacuucugcaagcaggccaucagaagacugaaggcccccgcccagaugagcauccagcugaucaacaaggccgugaacgcccugaucaacgaccagcugaucaugaagaaccaccugagagacaucaugggcauccccuacugcaacuacagcaaguacugguaccugaaccacaccgugaccggcagaaccagccugcccagaugcuggcuggugagcaacggcagcuaccugaacgagacccacuucagcgacgacaucgagcagcaggccgacaacaugaucaccgagcugcugcagaaggaguacauggacagacagggcaagaccccccugggccugguggaccuguucguguucagcaccagcuucuaccugaucagcaucuuccugcaccuggugaagauccccacccacagacacgugaucggcaagcccugccccaagccccacagacugaaccacaugggcaucugcagcugcggccuguacaagcaccccggcgugcccgugaaguggaagagaugaggacuagucccuguucccagagcccacuuuuuuuucuuuuuuugaaauaaaauagccugucuuucagaucucaaaggcucuuuucagagccaccaaaaaaaaaaaaaaaaaaaaaaaaaaaaaaaaaaaaaaaaaaaaaaaaaaaaaaaaaaaaaaaaagaauu

SEQ ID NO: 30356 - RNA, 1733 nt, Artificial Sequence
  mRNA product Design a-2 (hSL-A64-N5) comprising derived and/or modified sequence from LASV(LASV035-NIG-2009;Clade II)__AIT17588__GPCmut6 (opt4)
aggagaguccgcucagccagguugcagaagcggcuuagcguguguccuaaucuucucucugcguguagguaggccugugccgcaaacaagcuuaccaugggccagaucaucaccuucuuccaggaggugccccacgugaucgaggaggugaugaacaucgugcugaucgcccugagccugcuggccauccugaagggcaucuacaacguggccaccugcggccuguucggccuggugagcuuccugcugcugugcggcagaagcugcagcaccaccuacaagggcguguacgagcugcagacccuggagcuggacauggccagccugaacaugugcaugccccugagcugcaccaagaacaacagccaccacuacaucauggugggcaacgagaccggccuggagcugacccugaccaacaccagcaucaucaaccacaaguucugcaaccugagcgacgcccacaagaagaaccuguacgaccacgcccugaugagcaucaucagcaccuuccaccugagcauccccaacuucaaccaguacgaggccaugagcugcgacuucaacggcggcaagaucagcgugcaguacaaccugagccacgccuacgccguggacgccgccaaccacugcggcaccaucgccaacggcgugcugcagaccuucaugagaauggccuggggcggcagcuacaucgcccuggacagcggcaagggcagcugggacugcaucaugaccagcuaccaguaccugaucauccagaacaccaccugggaggaccacugccaguucagcagacccagccccaucggcuaccugggccugcugagccagagaaccagagacaucuacaucagcagaagacugcugggcaccuucaccuggacccugagcgacagcgagggcaacgagacccccggcggcuacugccugaccagauggaugcugaucgaggccgagcugaagugcuucggcaacaccgccguggccaagugcaacgagaagcacgacgaggaguucugcgacaugcugagacuguucgacuucugcaagcaggccaucagaagacugaaggcccccgcccagaugagcauccagcugaucaacaaggccgugaacgcccugaucaacgaccagcugaucaugaagaaccaccugagagacaucaugggcauccccuacugcaacuacagcaaguacugguaccugaaccacaccgugaccggcaagaccagccugcccagaugcuggcuggugagcaacggcagcuaccugaacgagacccacuucagcgacgacaucgagcagcaggccgacaacaugaucaccgagcugcugcagaaggaguacaucgacagacagggcaagaccccccugggccugguggaccuguucguguucagcaccagcuucuaccugaucagcaucuuccugcaccuggugaagauccccacccacagacacgugaucggcaagcccugccccaagccccacagacugaaccacaugggcaucugcagcugcggccuguacaagcaccccggcgugcccgugaaguggaagagaugaggacuagucccuguucccagagcccacuuuuuuuucuuuuuuugaaauaaaauagccugucuuucagaucucaaaggcucuuuucagagccaccaaaaaaaaaaaaaaaaaaaaaaaaaaaaaaaaaaaaaaaaaaaaaaaaaaaaaaaaaaaaaaaaagaauu

SEQ ID NO: 30357 - RNA, 1733 nt, Artificial Sequence
  mRNA product Design a-2 (hSL-A64-N5) comprising derived and/or modified sequence from LASV(LASV1000-NIG-2009;Clade II)__AIT17782__GPCmut6 (opt4)
aggagaguccgcucagccagguugcagaagcggcuuagcguguguccuaaucuucucucugcguguagguaggccugugccgcaaacaagcuuaccaugggccagaucaucaccuucuuccaggaggugccccacgugaucgaggaggugaugaacaucgugcugaucgcccugagccugcuggccauccugaagggcaucuacaacguggccaccugcggccuguucggccuggugagcuuccugcugcugugcggcagaagcugcagcaccaccuacaagggcguguacgagcugcagacccuggagcuggacauggccagccugaacaugugcaugccccugagcugcaccaagaacaacagccaccacuacaucauggugggcaacgagaccggccuggagcugacccugaccaacaccagcaucaucaaccacaaguucugcaaccugagcgacgcccacaagaagaaccuguacgaccacgcccugaugagcaucaucagcaccuuccaccugagcauccccaacuucaaccaguacgaggccaugagcugcgacuucaacggcggcaagaucagcgugcaguacaaccugagccacaccuacgccguggacgccgccaaccacugcggcaccaucgccaacggcgugcugcagaccuucaugagaauggccuggggcggcagcuacaucgcccuggacagcggcaagggcagcugggacugcaucaugaccagcuaccaguaccugaucauccagaacaccaccugggaggaccacugccaguucagcagacccagccccaucggcuaccugggccugcugagccagagaaccagagacaucuacaucagcagaagacugcugggcaccuucaccuggacccugagcgacagcgagggcaacgagacccccggcggcuacugccugaccagauggaugcugaucgaggccgagcugaagugcuucggcaacaccgccguggccaagugcaacgagaagcacgacgaggaguucugcgacaugcugagacuguucgacuucugcaagcaggccaucaagagacugaagacccccgcccagaugagcauccagcugaucaacaaggccgugaacgcccugaucaacgaccagcugaucaugaagaaccaccugagagacaucaugggcauccccuacugcaacuacagcaaguacugguaccugaaccacaccgugaccggcaagaccagccugcccagaugcuggcuggugagcaacggcagcuaccugaacgagacccacuucagcgacgacaucgagcagcaggccgacaacaugaucaccgagcugcugcagaaggaguacaucgacagacagggcaagaccccccugggccugguggaccuguucguguucagcaccagcuucuaccugaucagcaucuuccugcaccuggugaagauccccacccacagacacguggugggcaagcccugccccaagccccacagacugaaccacaugggcaucugcagcugcggccuguacaagcaccccggcgugcccgugaaguggaagagaugaggacuagucccuguucccagagcccacuuuuuuuucuuuuuuugaaauaaaauagccugucuuucagaucucaaaggcucuuuucagagccaccaaaaaaaaaaaaaaaaaaaaaaaaaaaaaaaaaaaaaaaaaaaaaaaaaaaaaaaaaaaaaaaaagaauu

SEQ ID NO: 30358 - RNA, 1733 nt, Artificial Sequence
  mRNA product Design a-2 (hSL-A64-N5) comprising derived and/or modified sequence from LASV(LASV221-NIG-2010;Clade II)__AIT17624__GPCmut6 (opt4)
aggagaguccgcucagccagguugcagaagcggcuuagcguguguccuaaucuucucucugcguguagguaggccugugccgcaaacaagcuuaccaugggccagaucaucaccuucuuccaggaggugccccacgugaucgaggaggugaugaacaucgugcugaucgcccugagccugcuggccauccugaagggcaucuacaacguggccaccugcggccuguucggccuggugagcuuccugcugcugugcggcagaagcugcagcaccaccuacaagggcguguacgagcugcagacccuggagcuggacauggccagccugaacaugugcaugccccugagcugcaccaagaacaacagccaccacuacaucauggugggcaacgagaccggccuggagcugacccugaccaacaccagcaucaucaaccacaaguucugcaaccugagcgacgcccacaagaagaaccuguacgaccacgcccugaugagcaucaucagcaccuuccaccugagcauccccaacuucaaccaguacgaggccaugagcugcgacuucaacggcggcaagaucagcgugcaguacaaccugagccacaccuacgccaucgacgccgccaaccacugcggcaccaucgccaacggcgugcugcagaccuucaugagaauggccuggggcggcagcuacaucgcccuggacagcggcaagggcagcugggacugcaucaugaccagcuaccaguaccugaucauccagaacaccaccugggaggaccacugccaguucagcagacccagccccaucggcuaccugggccugcugagccagagaaccagagacaucuacaucagcagaagacugcugggcaccuucaccuggacccugagcgacagcgagggcaacgagacccccggcggcuacugccugaccagauggaugcugaucgaggccgagcugaagugcuucggcaacaccgccguggccaagugcaacgagaagcacgacgaggaguucugcgacaugcugagacuguucgacuucugcaagcaggccaucagaagacugaagacccccgcccagaugagcauccagcugaucaacaaggccgugaacgcccugaucaacgaccagcugaucaugaagaaccaccugagagacaucaugggcauccccuacugcaacuacagcaaguacugguaccugaaccacaccgugaccggcaagaccagccugcccagaugcuggcuggugagcaacggcagcuaccugaacgagacccacuucagcgacgacaucgagcagcaggccgacaacaugaucaccgagaugcugcagaaggaguacauggacagacagggcaagaccccccugggccugguggaccuguucguguucagcaccagcuucuaccugaucagcaucuuccugcaccuggugaagauccccacccacagacacgugaucggcaagcccugccccaagccccacagacugaaccacaugggcaucugcagcugcggccuguacaagcaccccggcgugcccgugaaguggaagagaugaggacuagucccuguucccagagcccacuuuuuuuucuuuuuuugaaauaaaauagccugucuuucagaucucaaaggcucuuuucagagccaccaaaaaaaaaaaaaaaaaaaaaaaaaaaaaaaaaaaaaaaaaaaaaaaaaaaaaaaaaaaaaaaaagaauu

SEQ ID NO: 30359 - RNA, 1733 nt, Artificial Sequence
  mRNA product Design a-2 (hSL-A64-N5) comprising derived and/or modified sequence from LASV(LASV237-NIG-2010;Clade II)__AIT17638__GPCmut6 (opt4)
aggagaguccgcucagccagguugcagaagcggcuuagcguguguccuaaucuucucucugcguguagguaggccugugccgcaaacaagcuuaccaugggccagaucaucaccuucuuccaggaggugccccacgugaucgaggaggugaugaacaucgugcugaucgcccugagccugcuggccauccugaagggcaucuacaacguggccaccugcggccuguucggccuggugagcuuccugcugcugugcggcagaagcugcagcaccaccuacaagggcguguacgagcugcagacccuggagcuggacauggccagccugaacaugugcaugccccugagcugcaccaagaacaacagccaccacuacaucauggugggcaacgagaccggccuggagcugacccugaccaacaccagcaucaucaaccacaaguucugcaaccugagcgacgcccacaagaaggaccuguacgaccacgcccugaugagcaucaucagcaccuuccaccugagcauccccaacuucaaccaguacgaggccaugagcugcgacuucaacggcggcaagaucagcgugcaguacaaccugagccacaccuacgccguggacgccgccaaccacugcggcaccaucgccaacggcgugcugcagaccuucaugagaauggccuggggcggcagcuacaucgcccuggacagcggcaagggcagcugggacugcaucaugaccagcuaccaguaccugaucauccagaacaccaccugggaggaccacugccaguucagcagacccagccccaucggcuaccugggccugcugagccagagaaccagagacaucuacaucagcagaagacugcugggcaccuucaccuggacccugagcgacagcgagggcaacgagacccccggcggcuacugccugaccagauggaugcugaucgaggccgagcugaagugcuucggcaacaccgccguggccaagugcaacgagaagcacgacgaggaguucugcgacaugcugagacuguucgacuucugcaagcaggccaucagaagacugaagacccccgcccagaugagcauccagcugaucaacaaggccgugaacgcccugaucaacgaccagcugaucaugaagaaccaccugagagacaucaugggcauccccuacugcaacuacagcaaguacugguaccugaaccacaccgugaccggcaagaccagccugcccagaugcuggcuggugagcaacggcagcuaccugaacgagacccacuucagcgacgacaucgagcagcaggccgacaacaugaucaccgagcugcugcagaaggaguacauggacagacagggcaagaccccccugggccugguggaccuguucguguucagcaccagcuucuaccugaucagcaucuuccugcaccugaucaagauccccacccacagacacaucaccggcaagcccugccccaagccccacagacugaaccacaugggcaucugcagcugcggccuguacaagcaccccggcgugcccgugaaguggaagagaugaggacuagucccuguucccagagcccacuuuuuuuucuuuuuuugaaauaaaauagccugucuuucagaucucaaaggcucuuuucagagccaccaaaaaaaaaaaaaaaaaaaaaaaaaaaaaaaaaaaaaaaaaaaaaaaaaaaaaaaaaaaaaaaaagaauu

SEQ ID NO: 30360 - RNA, 1733 nt, Artificial Sequence
  mRNA product Design a-2 (hSL-A64-N5) comprising derived and/or modified sequence from LASV(LASV253-NIG-2011;Clade II)__AIT17670__GPCmut6 (opt4)
aggagaguccgcucagccagguugcagaagcggcuuagcguguguccuaaucuucucucugcguguagguaggccugugccgcaaacaagcuuaccaugggccagaucaucaccuucuuccaggaggugccccacgugaucgaggaggugaugaacaucgugcugaucgcccugagccugcuggccauccugaagggcaucuacaacguggccaccugcggccuguucggccuggugagcuuccugcugcugugcggcagaagcugcagcaccaccuacaagggcguguacgagcugcagacccuggagcuggacauggccagccugaacaugugcaugccccugagcugcaccaagaacaacagccaccacuacaucauggugggcaacgagaccggccuggagcugacccugaccaacaccagcaucaucaaccacaaguucugcaaccugagcgacgcccacaagaagaaccuguacgaccacgcccugaugagcaucaucagcaccuuccaccugagcauccccaacuucaaccaguacgaggccaugagcugcgacuucaacggcggcaagaucagcgugcaguacaaccugagccacaccuacgccguggacgccgccaaccacugcggcaccaucgccaacggcgugcugcagaccuucaugagaauggccuggggcggcagcuacaucgcccuggacagcggcaagggcagcugggacugcaucaugaccagcuaccaguaccugaucauccagaacaccaccugggaggaccacugccaguucagcagacccagccccaucggcuaccugggccugcugagccagagaaccagagacaucuacaucagcagaagacugcugggcaccuucaccuggacccugagcgacagcgagggcaacgagacccccggcggcuacugccugaccagauggaugcugaucgaggccgagcugaagugcuucggcaacaccgccguggccaagugcaacgagaagcacgacgaggaguucugcgacaugcugagacuguucgacuucugcaagcaggccaucagaagacugaaggcccccgcccagaugagcauccagcugaucaacaaggccgugaacgcccugaucaacgaccagcugaucaugaagaaccaccugagagacaucaugggcauccccuacugcaacuacagcaaguacugguaccugaaccacaccgugaccggcagaaccagccugcccagaugcuggcuggugagcaacggcagcuaccugaacgagacccacuucagcgacgacaucgagcagcaggccgacaacaugaucaccgagcugcugcagaaggaguacaucgacagacagggcaagaccccccugggccugguggaccuguucguguucagcaccagcuucuaccugaucagcaucuuccugcaccuggugaagauccccacccacagacacaucaucggcaagcccugccccaagccccacagacugaaccacaugggcaucugcagcugcggccuguacaagcaccccggcgugcccgugaaguggaagagaugaggacuagucccuguucccagagcccacuuuuuuuucuuuuuuugaaauaaaauagccugucuuucagaucucaaaggcucuuuucagagccaccaaaaaaaaaaaaaaaaaaaaaaaaaaaaaaaaaaaaaaaaaaaaaaaaaaaaaaaaaaaaaaaaagaauu

SEQ ID NO: 30361 - RNA, 1733 nt, Artificial Sequence
  mRNA product Design a-2 (hSL-A64-N5) comprising derived and/or modified sequence from LASV(LASV254-NIG-2011;Clade II)__AIT17674__GPCmut6 (opt4)
aggagaguccgcucagccagguugcagaagcggcuuagcguguguccuaaucuucucucugcguguagguaggccugugccgcaaacaagcuuaccaugggccagaucaucaccuucuuccaggaggugccccacgugaucgaggaggugaugaacaucgugcugaucgcccugagccugcuggccauccugaagggcaucuacaacguggccaccugcggccuguucggccuggugagcuuccugcugcugugcggcagaagcugcagcaccaccuacaagggcguguacgagcugcagacccuggagcuggacaugaccaaccugaacaugugcaugccccugagcugcaccaagaacaacagccaccacuacaucauggugggcaacgagaccggccuggagcugacccugaccaacaccagcaucaucaaccacaaguucugcaaccugagcgacgcccacaagaagaaccuguacaaccacgcccugaugagcaucaucagcaccuuccaccugagcauccccaacuucaaccaguacgaggccaugagcugcgacuucaacggcggcaagaucagcgugcaguacaaccugagccacagcuacgccguggacgccgccaaccacugcggcaccaucgccaacggcgugcugcagaccuucaugagaauggccuggggcggcagcuacaucgcccuggacagcggcaagggcaacugggacugcaucaugaccagcuaccaguaccugaucauccagaacaccaccugggaggaccacugccaguucagcagacccagccccaucggcuaccugggccugcugagccagagaaccagagacaucuacaucagcagaagacugcugggcaccuucaccuggacccugagcgacagcgagggcaacgagacccccggcggcuacugccugaccagauggaugcugaucgaggccgagcugaagugcuucggcaacaccgccguggccaagugcaacgagaagcacgacgaggaguucugcgacaugcugagacuguucgacuucugcaagcaggccaucagaagacugaagacccccgcccaggccaacauccagcugaucaacaaggccgugaacgcccugaucaacgaccagcugaucaugaagaaccaccugagagacaucaugggcauccccuacugcaacuacagcaaguacugguaccugaaccacaccgugaccggcaagaccagccugcccagaugcuggcuggugagcaacggcagcuaccugaacgagacccacuucagcgacgacaucgagcagcaggccgacaacaugaucaccgagcugcugcagaaggaguacauggacagacagggcaagaccccccugggccugguggaccuguucguguucagcaccagcuucuaccugaucagcaucuuccugcaccuggugaagauccccacccacagacacgugaucggcaagcccugccccaagccccacagacugaaccacaugggcaucugcagcugcggccuguacaagcaccccggcgugcccgugaaguggaagagaugaggacuagucccuguucccagagcccacuuuuuuuucuuuuuuugaaauaaaauagccugucuuucagaucucaaaggcucuuuucagagccaccaaaaaaaaaaaaaaaaaaaaaaaaaaaaaaaaaaaaaaaaaaaaaaaaaaaaaaaaaaaaaaaaagaauu

SEQ ID NO: 30362 - RNA, 1733 nt, Artificial Sequence
  mRNA product Design a-2 (hSL-A64-N5) comprising derived and/or modified sequence from LASV(Nig08-A19;Clade III)__ADU56618__GPCmut6 (opt4)
aggagaguccgcucagccagguugcagaagcggcuuagcguguguccuaaucuucucucugcguguagguaggccugugccgcaaacaagcuuaccaugggccagaucgugaccuucuuccaggaggugccccacgugaucgaggaggugaugaacaucgugcugaucgcccugagcauccuggccauccugaagggccuguacaacaucgccaccugcggccugaucggccuggugaccuuccugcugcugagcggcagaagcugcagcaugaccuacaagggcguguacgagcugcagacccuggagcugaacaugaacacccugaacaugugcaugccccugagcugcaccaagaacaacagccaccacuacaucauggugggcaacgagaccggccuggagcugacccugaccaacaccagccugcugcaccacaaguucugcaaccugagcgacgcccacaagaagaaccuguacgaccacacccugaugagcaucaucagcaccuuccaccugagcauccccaacuucaaccaguacgaggccaugagcugcgacuucaacggcggcaagaucaccgugcaguacaaccugagccacagcuacgccaucgacgccgccaaccacugcggcaccguggccaacggcgugcugcagaccuucaugagaauggccuggggcggcagcuacaucgcccuggacagcggcagaggcaagugggacugcaucaugaccagcuaccaguaccugaucauccagaacaccaccugggaggaccacugccaguucagcagacccagccccaucggcuaccugggccugcugagccagagaaccagagacaucuacaucagcagaagacugcugggcaccuucaccuggacccugagcgacagcgagggcaacgagacccccggcggcuacugccugaccagauggaugcugaucgaggccgagcugaagugcuucggcaacaccgccguggccaagugcaacgagaagcacgacgaggaguucugcgacaugcugagacuguucgacuucugcaagcaggccaucagaagacugaaggcccccgcccagaugagcauccagcugaucaacaaggccgugaacgcccugaucaacgaccagcugaucaugaagaaccaccugagagacaucaugggcauccccuacugcaacuacagcaaguacugguaccugaaccacaccagcaccggcagaaccagccugcccagaugcuggcuggugagcaacggcagcuaccugaacgagacccacuucagcgacgacaucgagcagcaggccgacaacaugaucaccgagaugcugcagaaggaguaccuggacagacagggcaagaccccccugggccugguggaccuguucguguucagcaccagcuucuaccugaucagcaucuuccugcaccuggugaagauccccacccacagacacaucgugggcaagcccugccccaagccccacagacugaaccacaugggcaucugcagcugcggccuguacaagcagcccggcgugcccgugagauggaagagaugaggacuagucccuguucccagagcccacuuuuuuuucuuuuuuugaaauaaaauagccugucuuucagaucucaaaggcucuuuucagagccaccaaaaaaaaaaaaaaaaaaaaaaaaaaaaaaaaaaaaaaaaaaaaaaaaaaaaaaaaaaaaaaaaagaauu

SEQ ID NO: 30363 - RNA, 1736 nt, Artificial Sequence
  mRNA product Design a-2 (hSL-A64-N5) comprising derived and/or modified sequence from LASV(G1180-SLE-2010;Clade IV)__AIT17168__GPCmut6 (opt4)
aggagaguccgcucagccagguugcagaagcggcuuagcguguguccuaaucuucucucugcguguagguaggccugugccgcaaacaagcuuaccaugggccagaucgugaccuucuuccaggaggugccccacgugaucgaggaggugaugaacaucgugcugaucgcccugagcauccuggccgugcugaagggccuguacaacuucgccaccugcggccuggugggccugcugaccuuccugcugcugugcggcagaagcugcaccgccagcagauacaagggcguguacgagcugcagacccuggagcugaacauggagacccugaacaugugcaugccccugagcugcaccaagaacaacagccaccacuacaucauggugggcaacgagaccggccuggagcugacccugaccaacaccagcaucaucaaccacaaguucugcaaccugagcgacgcccacaagaagaaccuguacgaccacgcccugaugagcaucaucagcaccuuccaccugagcauccccaacuucaaccaguacgaggccaugagcugcgacuucaacggcggcaagaucagcgugcaguacaaccugagccacagcuacgccggcgacgccgccaaccacugcggcaccguggccaacggcgugcugcagaccuucaugagaauggccuggggcggcagcuacaucgcccuggacagcggccacggcagcugggacugcaucaugaccagcuaccaguaccugaucauccagaacaccaccugggaggaccacugccaguucagcagacccagccccaucggcuaccugggccugcugagccagagaaccagagacaucuacaucagcagaagacugcugggcaccuucaccuggacccugagcgacagcgagggcaaggacacccccggcggcuacugccugaccagauggaugcugaucgaggccgagcugaagugcuucggcaacaccgccguggccaagugcaacgagaagcacgacgaggaguucugcgacaugcugagacuguucgacuucugcaagcaggccauccagagacugaaggcccccgcccagaugagcauccagcugaucaacaaggccgugaacgcccugaucaacgaccagcugaucaugaagaaccaccugagagacaucaugggcauccccuacugcaacuacagcaaguacugguaccugaaccacaccaccaccggcaagaccagccugcccaagugcuggcuggugagcaacggcagcuaccugaacgagacccacuucagcgacgacaucgagcagcaggccgacaacaugaucaccgagaugcugcagaaggaguacauggagagacagggcaagaccccccugggccugguggaccuguucguguucagcaccagcuucuaccugaucagcaucuuccugcaccuggugaagauccccacccacagacacaucgugggcaagagcugccccaagccccacagacugaaccacaugggcaucugcagcugcggccuguacaagcagcccggcgugcccgugaaguggaagagaugaggacuagucccuguucccagagcccacuuuuuuuucuuuuuuugaaauaaaauagccugucuuucagaucucaaaggcucuuuucagagccaccaaaaaaaaaaaaaaaaaaaaaaaaaaaaaaaaaaaaaaaaaaaaaaaaaaaaaaaaaaaaaaaaagaauu

SEQ ID NO: 30364 - RNA, 1736 nt, Artificial Sequence
  mRNA product Design a-2 (hSL-A64-N5) comprising derived and/or modified sequence from LASV(G1442-SLE-2011;Clade IV)__AIT17180__GPCmut6 (opt4)
aggagaguccgcucagccagguugcagaagcggcuuagcguguguccuaaucuucucucugcguguagguaggccugugccgcaaacaagcuuaccaugggccagaucgugaccuucuuccaggaggugccccacgugaucgaggaggugaugaacaucgugcugaucgcccugagcauccuggccgugcugaagggccuguacaacguggccaccugcggccugaucggccuggugaccuuccugcugcugugcggcagaagcugcaccaccacccuguacaagggcguguacgagcugcagacccuggagcugaacauggagacccugaacaugugcaugccccugagcugcaccaagaacaacagccaccacuacaucagagugggcaacgagaccggccuggagcugacccugaccaacaccagcaucaucaaccacaaguucugcaaccugagcgacgcccacaagaagaaccuguacgaccacgcccugaugagcaucaucagcaccuuccaccugagcauccccaacuucaaccaguacgaggccaugagcugcgacuucaacggcggcaagaucagcgugcaguacaaccugagccacagcuacgccggcgacgccgccaaccacugcggcaccguggccaacggcgugcugcagaccuucaugagaauggccuggggcggcagcuacaucgcccuggacagcggcagaggcaacugggacugcaucaugaccagcuaccaguaccugaucauccagaacaccaccugggacgaccacugccaguucagcagacccagccccaucggcuaccugggccugcugagccagagaaccagagacguguacaucagcagaagacugcugggcaccuucaccuggacccugagcgacagcgagggcaaggacacccccggcggcuacugccugaccagauggaugcugaucgaggccgagcugaagugcuucggcaacaccgccguggccaagugcaacgagaagcacgacgaggaguucugcgacaugcugagacuguucgacuucugcaagcaggccauccagagacugaaggcccccgcccagaugagcauccagcugaucaacaaggccgugaacgcccugaucaacgaccagcugaucaugaagaaccaccugagagacaucaugggcauccccuacugcaacuacagcaaguacugguaccugaacaacaccgccaccggcaagaccagccugcccaagugcuggcugaucagcaacggcagcuaccugaacgagacccacuucagcgacgacaucgagcaggaggccgacaacaugaucaccgagaugcugcagaaggaguacauggagagacagggcaagaccccccugggccugguggaccuguucguguucagcaccagcuucuaccugaucagcaucuuccugcaccuggugaagauccccacccacagacacaucgugggcaagagcugccccaagccccacagacugaaccacaugggcaucugcagcugcggccuguacaagcagcccggcgugcccgugagauggaagagaugaggacuagucccuguucccagagcccacuuuuuuuucuuuuuuugaaauaaaauagccugucuuucagaucucaaaggcucuuuucagagccaccaaaaaaaaaaaaaaaaaaaaaaaaaaaaaaaaaaaaaaaaaaaaaaaaaaaaaaaaaaaaaaaaagaauu

SEQ ID NO: 30365 - RNA, 1736 nt, Artificial Sequence
  mRNA product Design a-2 (hSL-A64-N5) comprising derived and/or modified sequence from LASV(G3010-SLE-2013;Clade IV)__AIT17344__GPCmut6 (opt4)
aggagaguccgcucagccagguugcagaagcggcuuagcguguguccuaaucuucucucugcguguagguaggccugugccgcaaacaagcuuaccaugggccagaucgugaccuucuuccaggaggugccccacgugaucgaggaggugaugaacaucgugcugaucgcccugagcauccuggccgugcugaagggccuguacaacuucgccaccugcggccuggugggccuggugaccuuccugcugcugugcggcagaagcugcaccaccagccuguacaagggcguguacgagcugcagacccuggagcugaacauggagacccugaacaugugcaugccccugagcugcaccaagaacaacagccaccacuacaucauggugggcaacgagaccggccuggagcugacccugaccaacaccagcaucaucaaccacaaguucugcaaccugagcgacgcccacaagaagaaccuguacaaccacgcccugaugagcaucaucagcaccuuccaccugagcauccccaacuucaaccaguacgaggccaugagcugcgacuucaacggcggcaagaucagcgugcaguacaaccugagccacagcuacgccggcgacgccgccagccacugcggcaccguggccaacggcgugcugcagaccuucaugagaauggccuggggcggcagcuacaucgcccuggacagcggcuacggcaagugggacugcaucaugaccagcuaccaguaccugaucauccagaacaccaccugggaggaccacugccaguucagcagacccagccccaucggcuaccugggccugcugagccagagaaccagagacaucuacaucagcagaagacugcugggcaccuucaccuggacccugagcgacagcgagggcaaggacacccccggcggcuacugccugaccagauggaugcugaucgaggccgagcugaagugcuucggcaacaccgccguggccaagugcaacgagaagcacgacgaggaguucugcgacaugcugagacuguucgacuucugcaagcaggccauccagagacugaagacccccgcccagaugagcauccagcugaucaacaaggccgugaacgcccugaucaacgaccagcugaucaugaagaaccaccugagagacaucaugggcauccccuacugcaacuacagcaaguacugguaccugaaccacaccaccaccggcaagaccagccugcccaagugcuggcuggugagcaacggcagcuaccugaacgagacccacuucagcgacgacaucgagcagcaggccgacaacaugaucaccgagaugcugcagaaggaguacauggagagacagggcaagaccccccugggccugguggaccuguucguguucagcaccagcuucuaccugaucagcaucuuccugcaccuggugaagauccccacccacagacacaucgugggcaagagcugccccaagccccacagacugaaccacaugggcaucugcagcugcggccuguacaagcagcccggcgugcccgugagauggaagagaugaggacuagucccuguucccagagcccacuuuuuuuucuuuuuuugaaauaaaauagccugucuuucagaucucaaaggcucuuuucagagccaccaaaaaaaaaaaaaaaaaaaaaaaaaaaaaaaaaaaaaaaaaaaaaaaaaaaaaaaaaaaaaaaaagaauu

SEQ ID NO: 30366 - RNA, 1736 nt, Artificial Sequence
  mRNA product Design a-2 (hSL-A64-N5) comprising derived and/or modified sequence from LASV(G502-SLE-2009;Clade IV)__AIT17126__GPCmut6 (opt4)
aggagaguccgcucagccagguugcagaagcggcuuagcguguguccuaaucuucucucugcguguagguaggccugugccgcaaacaagcuuaccaugggccagaucgugaccuucuuccaggaggugccccacgugaucgaggaggugaugaacaucgugcugaucgcccugagcauccuggccgugcugaagggccuguacaacuucgccaccugcggccuggugggccugcugaccuuccugcugcugugcggcagaagcugcaccaccggccuguacaagggcguguacgagcugcagacccuggagcugaacauggagacccugaacaugugcaugccccugagcugcaccaagaacaacagccaccacuacaucauggugggcaacgagaccggccuggagcugacccugaccaacaccagcaucaucaaccacaaguucugcaaccugagcgacgcccacaagaagaaccuguacgaccacgcccugaugagcaucaucagcaccuuccaccugagcauccccaacuucaaccaguacgaggccaugagcugcgacuucaacggcggcaagaucagcgugcaguacaaccugagccacagcuacgccggcgacgccgccgaccacugcggcaccguggccaacggcgugcugcagaccuucaugagaauggccuggggcggcagcuacaucgcccuggacagcggcagaggcagaugggacugcaucaugaccagcuaccaguaccugaucauccagaacaccaccugggaggaccacugccaguucagcagacccagccccaucggcuaccugggccugcugagccagagaaccagagacaucuacaucagcagaagacugcugggcaccuucaccuggacccugagcgacagcgagggcaaggacacccccggcggcuacugccugaccagauggaugcugaucgaggccgagcugaagugcuucggcaacaccgccguggccaagugcaacgagaagcacgacgaggaguucugcgacaugcugagacuguucgacuucugcaagcaggccauccagagacugaaggcccccgcccagaugagcauccagcugaucaacaaggccgugaacgcccugaucaacgaccagcuggugaugaagaaccaccugagagacaucaugggcauccccuacugcaacuacagcagauacugguaccugaaccacaccaccaccggcagaaccagccugcccaagugcuggcuggugagcaacggcagcuaccugaacgagacccacuucagcgacgacaucgagcagcaggccgacaacaugaucaccgagaugcugcagaaggaguacauggagagacagggcaagaccccccugggccugguggaccuguucguguucagcaccagcuucuaccugaucagcaucuuccugcaccuggugaagauccccacccacagacacaucgugggcaagagcugccccaagccccacagacugaaccacaugggcaucugcagcugcggccuguacaagcagcccggcgugcccgugaaguggaagagaugaggacuagucccuguucccagagcccacuuuuuuuucuuuuuuugaaauaaaauagccugucuuucagaucucaaaggcucuuuucagagccaccaaaaaaaaaaaaaaaaaaaaaaaaaaaaaaaaaaaaaaaaaaaaaaaaaaaaaaaaaaaaaaaaagaauu

SEQ ID NO: 30367 - RNA, 1736 nt, Artificial Sequence
  mRNA product Design a-2 (hSL-A64-N5) comprising derived and/or modified sequence from LASV(G733-SLE-2010;Clade IV)__AIT17154__GPCmut6 (opt4)
aggagaguccgcucagccagguugcagaagcggcuuagcguguguccuaaucuucucucugcguguagguaggccugugccgcaaacaagcuuaccaugggccagaucgugaccuucuuccaggaggugccccacgugaucgaggaggugaugaacaucgugcugaucgcccugagcauccuggccgugcugaagggccuguacaacuucgccaccugcggcaucgugggccuggugagcuuccugcugcugugcggcagaagcugcaccaccagccuguacaagggcguguacgagcugcagacccuggagcugaacauggagacccugaacaugugcaugccccugagcugcaccaagaacaacagccaccacuacaucauggugggcaacgagaccggccuggagcugacccugaccaacaccagcaucaucaaccacaaguucugcaaccugagcgacgcccacaagaagaaccuguacgaccacgcccugaugagcaucaucagcaccuuccaccugagcauccccaacuucaaccaguacgaggccaugagcugcgacuucaacggcggcaagaucagcgugcaguacaaccugagccacagcuacgccggcgacgccgccaaccacugcggcaccaucgccaacggcgugcugcagaccuucaugagaauggccuggggcggcagcuacaucgcccuggacagcggcagagacagaugggacugcaucaugaccagcuaccaguaccugaucauccagaacaccaccugggaggaccacugccaguucagcagacccagccccaucggcuaccugggccugcugagccagagaaccagagacaucuacaucagcagaagacugcugggcaccuucaccuggacccugagcgacagcgagggcaaggacacccccggcggcuacugccugaccagauggaugcugaucgaggccgagcugaagugcuucggcaacaccgccguggccaagugcaacgagaagcacgacgaggaguucugcgacaugcugagacuguucgacuucugcaagcaggccauccagagacugaaggcccccgcccagaugagcauccagcugaucaacaaggccgugaacgcccugaucaacgaccagcugaucaugaagaaccaccugagagacaucaugggcauccccuacugcaacuacagcaaguacugguaccugaaccacaccaccaccggcaagaccagccugcccaagugcuggcuggugagcaacggcagcuaccugaacgagacccacuucagcgacgacaucgagcagcaggccgacaacaugaucaccgagaugcugcagaaggaguacauggagagacagggcaagaccccccugggccugguggaccuguucguguucagcaccagcuucuaccugaucagcaucuuccugcaccuggugaagauccccacccacagacacguggugggcaagagcugccccaagccccacagacugaaccacaugggcaucugcagcugcggccuguacggccagcccggcgugcccgugaaguggaagagaugaggacuagucccuguucccagagcccacuuuuuuuucuuuuuuugaaauaaaauagccugucuuucagaucucaaaggcucuuuucagagccaccaaaaaaaaaaaaaaaaaaaaaaaaaaaaaaaaaaaaaaaaaaaaaaaaaaaaaaaaaaaaaaaaagaauu

SEQ ID NO: 30368 - RNA, 1736 nt, Artificial Sequence
  mRNA product Design a-2 (hSL-A64-N5) comprising derived and/or modified sequence from MOPV/LASV reassortant(IGS-1;Clade IV)__AFY05576__GPCmut6 (opt4)
aggagaguccgcucagccagguugcagaagcggcuuagcguguguccuaaucuucucucugcguguagguaggccugugccgcaaacaagcuuaccaugggccagaucgugaccuucuuccaggaggugccccacgugaucgaggaggugaugaacaucgugcugaucgcccugagcgugcuggccgugcugaagggccuguacaacuucgccaccugcggccuggugggccuggugaccuuccugcugcugugcggcagaagcugcaccaccagccuguacaagggcguguacgagcugcagacccuggagcugaacauggagacccugaacaugugcaugccccugagcugcaccaagaacaacagccaccacuacaucauggugggcaacgagaccggccuggagcugacccugaccaacaccagcaucaucaaccacaaguucugcaaccugagcgacgcccacaagaagaaccuguacgaccacgcccugaugagcaucaucagcaccuuccaccugagcauccccaacuucaaccaguacgaggccaugagcugcgacuucaacggcggcaagaucagcgugcaguacaaccugagccacagcuacgccggcgacgccgccaaccacugcggcaccguggccaacggcgugcugcagaccuucaugagaauggccuggggcggcagcuacaucgcccuggacagcggcagaggcaacugggacugcaucaugaccagcuaccaguaccugaucauccagaacaccaccugggaggaccacugccaguucagcagacccagccccaucggcuaccugggccugcugagccagagaaccagagacaucuacaucagcagaagacugcugggcaccuucaccuggacccugagcgacagcgagggcgaggacacccccggcggcuacugccugaccagauggaugcugaucgaggccgagcugaagugcuucggcaacaccgccguggccaagugcaacgagaagcacgacgaggaguucugcgacaugcugagacuguucgacuucugcaagcaggccauccagagacugaaggcccccgcccagaugagcauccagcugaucaacaaggccgugaacgcccugaucaacgaccagcugaucaugaagaaccaccugagagacaucaugggcauccccuacugcaacuacagcaaguacugguaccugaaccacaccaccaccggcagaaccagccugcccaagugcuggcuggugagcaacggcagcuaccugaacgagacccacuucagcgacgacaucgagcagcaggccgacaacaugaucaccgagaugcugcagaaggaguacauggagagacagggcaagaccccccugggccugguggaccuguucguguucagcaccagcuucuaccugaucagcaucuuccugcaccuggugaagauccccacccacagacacaucgugggcaagagcugccccaagccccacagacugaaccacaugggcaucugcagcugcggccuguacaagcagcccggcgugcccgugaaguggaagagaugaggacuagucccuguucccagagcccacuuuuuuuucuuuuuuugaaauaaaauagccugucuuucagaucucaaaggcucuuuucagagccaccaaaaaaaaaaaaaaaaaaaaaaaaaaaaaaaaaaaaaaaaaaaaaaaaaaaaaaaaaaaaaaaaagaauu

SEQ ID NO: 30369 - RNA, 1736 nt, Artificial Sequence
  mRNA product Design a-2 (hSL-A64-N5) comprising derived and/or modified sequence from LASV(LM765-SLE-2012;Clade IV)__AIT17814__GPCmut6 (opt4)
aggagaguccgcucagccagguugcagaagcggcuuagcguguguccuaaucuucucucugcguguagguaggccugugccgcaaacaagcuuaccaugggccagaucgugaccuucuuccaggaggugccccacgugaucgaggaggugaugaacaucgugcugaucgcccugagcauccuggccgugcugaagggccuguacaacuucgccaccugcggccuggugggccuggugaccuuccugcugcugugcggcagaagcugcaccaccagccuguacaagggcguguacgagcugcagacccuggagcugaacauggagacccugaacaugugcaugccccugagcugcaccaagaacaacagccaccacuacaucauggugggcaacgagaccggccuggagcugacccugaccaacaccagcaucaucgaccacaaguucugcaaccugagcgacgcccacagaaagaaccuguacgaccacgcccugaugagcaucaucagcaccuuccaccugagcauccccaacuucaaccaguacgaggccaugagcugcgacuucaacggcggcaagaucagcgugcaguacaaccugagccacagcuacgccaaggacgccgccgaccacugcggcaccguggccaacggcgugcugcagaccuucaugagaauggccuggggcggcagcuacaucgcccuggacagcggcagaggcagaugggacugcaucaugaccagcuaccaguaccugaucauccagaacaccaccugggaggaccacugccaguucagcagacccagccccaucggcuaccugggccugcugagccagagaaccagagacaucuacaucagcagaagacugcugggcaccuucaccuggacccugagcgacagcgagggcaaggacacccccggcggcuacugccugaccagauggaugcugaucgaggccgagcugaagugcuucggcaacaccgccguggccaagugcaacgagaagcacgacgaggaguucugcgacaugcugagacuguucgacuucugcaagcaggccauccagagacugaaggcccccgcccagaugagcauccagcugaucaacaaggccgugaacgcccugaucaacgaccagcugaucaugaagaaccaccugagagacaucaugggcauccccuacugcaacuacagcaaguacugguaccugaaccacaccaccaccggcaagaccagccugcccaagugcuggcuggugagcaacggcagcuaccugaacgagacccacuucagcgacgacaucgagcagcaggccgacaacaugaucaccgagaugcugcagaaggaguacauggagagacagggcaagaccccccugggccugguggaccuguucguguucagcaccagcuucuaccugaucagcaucuuccugcaccuggugaagauccccacccacagacacaucgugggcaagcccugccccaagccccacagacugaaccacaugggcaucugcagcugcggccuguacaagcagcccggcgugcccgugaaguggaagagaugaggacuagucccuguucccagagcccacuuuuuuuucuuuuuuugaaauaaaauagccugucuuucagaucucaaaggcucuuuucagagccaccaaaaaaaaaaaaaaaaaaaaaaaaaaaaaaaaaaaaaaaaaaaaaaaaaaaaaaaaaaaaaaaaagaauu

SEQ ID NO: 30370 - RNA, 1736 nt, Artificial Sequence
  mRNA product Design a-2 (hSL-A64-N5) comprising derived and/or modified sequence from LASV(LM776-SLE-2012;Clade IV)__AIT17824__GPCmut6 (opt4)
aggagaguccgcucagccagguugcagaagcggcuuagcguguguccuaaucuucucucugcguguagguaggccugugccgcaaacaagcuuaccaugggccagaucgugaccuucuuccaggaggugccccacgugaucgaggaggugaugaacaucgugcugaucgcccugagcauccuggccgugcugaagggccuguacaacuucgccaccugcggccuggugggccuggugaccuuccugcugcugugcggcagaagcugcaccaccagcguguacaagggcguguacgagcugcagacccuggagcugaacauggagacccugaacaugugcaugccccugagcugcaccaagaacaacagccaccacuacaucauggugggcaacgagaccggccuggagcugacccugaccaacaccagcaucaucaaccacaaguucugcaaccugagcgacgcccacaagaagaaccuguacgaccacgcccugaugagcaucaucagcaccuuccaccugagcauccccaacuucaaccaguacgaggccaugagcugcgacuucaacggcggcaagaucagcgugcaguacaaccugagccacagcuacgccggcgacgccgccaaccacugcggcaccguggccaacggcgugcugcagaccuucaugagaauggccuggggcggcagcuacaucgcccuggacagcggccacggcaagugggacugcaucaugaccagcuaccaguaccugaucauccagaacaccaccugggaggaccacugccaguucagcagacccagccccaucggcuaccugggccugcugagccagagaaccagagacaucuacaucagcagaagacugcugggcaccuucaccuggacccugagcgacagcgagggcaaggacacccccggcggcuacugccugaccagauggaugcugaucgaggccgagcugaagugcuucggcaacaccgccguggccaagugcaacgagaagcacgacgaggaguucugcgacaugcugagacuguucgacuucugcaagcaggccauccagagacugaaggcccccgcccagaugagcauccagcugaucaacaaggccgugaacgcccugaucaacgaccagcugaucaugaagaaccaccugagagacaucaugggcauccccuacugcaacuacagcaaguacugguaccugaaccacaccaccaccggcaagaccagccugcccaagugcuggcuggugagcaacggcagcuaccugaacgagacccacuucagcgacgacaucgagcagcaggccgacaacaugaucaccgagaugcugcagaaggaguacauggagagacagggcaagaccccccugggccugguggaccuguucguguucagcaccagcuucuaccugaucagcaucuuccugcaccuggugaagauccccacccacagacacaucgugggcaagagcugccccaagccccacagacugaaccacaugggcaucugcagcugcggccuguacaagcagcccggcgugcccgugagauggaagagaugaggacuagucccuguucccagagcccacuuuuuuuucuuuuuuugaaauaaaauagccugucuuucagaucucaaaggcucuuuucagagccaccaaaaaaaaaaaaaaaaaaaaaaaaaaaaaaaaaaaaaaaaaaaaaaaaaaaaaaaaaaaaaaaaagaauu

SEQ ID NO: 30371 - RNA, 1736 nt, Artificial Sequence
  mRNA product Design a-2 (hSL-A64-N5) comprising derived and/or modified sequence from LASV(Mad39;Clade IV)__ANH09722__GPCmut6 (opt4)
aggagaguccgcucagccagguugcagaagcggcuuagcguguguccuaaucuucucucugcguguagguaggccugugccgcaaacaagcuuaccaugggccagaucgugaccuucuuccaggaggugccccacgugaucgaggaggugaugaacaucgugcugaucgcccugagcauccuggccgugcugaagggccuguacaacguggccaccugcggccugaucggccuggugaccuuccugcugcugugcggcagaagcugcaccaccacccuguacaagggcguguacgagcugcaggcccuggagcugaacauggagacccugaacaugugcaugccccugagcugcaccaagaacaacagccaccacuacaucagagugggcaacgagaccggccuggagcugacccugaccaacaccagccugaucaaccacaaguucugcaaccugagcgacgcccacaagaagaaccuguacgaccacgcccugaugagcaucaucagcaccuuccaccugagcauccccaacuucaaccaguacgaggccaugagcugcgacuucaacgacggcaagaucagcgugcaguacaaccugagccacaccuacgccggcgacaccgccaaccacugcggcaccguggccaacggcgugcugcagaccuucaugagaauggccuggggcggcagcuacaucgcccuggacagcggcagaggcggcugggacugcaucaugaccagcuaccaguaccugaucauccagaacaccaccugggaggaccacugccaguucagcagacccagccccaucggcuaccugggccugcugagccagagaaccagagacaucuacaucagcagaagacugcugggcaccuucaccuggacccugagcgacagcgagggcaaggacacccccggcggcuacugccugaccagauggaugcugaucgaggccgagcugaagugcuucggcaacaccgccguggccaagugcaacgagaagcacgacgaggaguucugcgacaugcugagacuguucgacuucugcaagcaggccauccagagacugaaggcccccgcccagaugagcauccagcugaucaacaaggccgugaacgcccugaucaacgaccagcugaucaugaagaaccaccugagagacaucaugggcauccccuacugcaacuacagcaaguacugguaccugaaccacaccgugaccggcaagaccagccugcccaagugcuggcuggugagcaacggcagcuaccugaacgagacccacuucagcgacgacaucgagcagcaggccgacaacaugaucaccgagaugcugcagaaggaguacauggagagacagggcaagaccccccugggccugguggaccuguucguguucagcaccagcuucuaccugaucagcaucuuccugcaccuggugaagauccccacccacagacacguggugggcaagcccugccccaagccccacagacugaaccacaugggcaucugcagcugcggcuucuacaagcagcccggcgugcccgugagauggaagagaugaggacuagucccuguucccagagcccacuuuuuuuucuuuuuuugaaauaaaauagccugucuuucagaucucaaaggcucuuuucagagccaccaaaaaaaaaaaaaaaaaaaaaaaaaaaaaaaaaaaaaaaaaaaaaaaaaaaaaaaaaaaaaaaaagaauu

SEQ ID NO: 30372 - RNA, 1736 nt, Artificial Sequence
  mRNA product Design a-2 (hSL-A64-N5) comprising derived and/or modified sequence from LASV(Z0947-SLE-2011;Clade IV)__AIT17840__GPCmut6 (opt4)
aggagaguccgcucagccagguugcagaagcggcuuagcguguguccuaaucuucucucugcguguagguaggccugugccgcaaacaagcuuaccaugggccagaucgugaccuucuuccaggaggugccccacgugaucgaggaggugaugaacaucgugcugaucgcccugagcauccuggccgugcugaagggccuguacaacuucgccaccugcggccuggugggccuggugaccuuccugcugcugugcggcagaagcugcaccaucagccuguacaagggcguguacgagcugcagacccuggagcugaacauggagacccugaacaugugcaugccccugagcugcaccaagaacaacagccaccacuacaucauggugggcaacgagaccggccuggagcugacccugaccaacaccagcaucaucaaccacaaguucugcaaccugagcgacgcccacaagaagaaccuguacgaccacgcccugaugagcaucaucagcaccuuccaccugagcauccccaacuucaaccaguacgaggccaugagcugcgacuucaacggcggcaagaucagcgugcaguacaaccugagccacagcuacgccggcgacgccgccaaccacugcggcaccguggccaacggcgugcugcagaccuucaugagaauggccuggggcggcagcuacaucgcccuggacagcggcagagacagaugggacugcaucaugaccagcuaccaguaccugaucauccagaacaccaccugggaggaccacugccaguucagcagacccagccccaucggcuaccugggccugcugagccagagaaccagagacaucuacaucagcagaagacugcugggcaccuucaccuggacccugagcgacagcgagggcaaggacacccccggcggcuacugccugaccagauggaugcugaucgaggccgagcugaagugcuucggcaacaccgccguggccaagugcaacgagaagcacgacgaggaguucugcgacaugcugagacuguucgacuucugcaagcaggccauccagagacugaaggcccccgcccagaugagcauccagcugaucaacaaggccgugaacgcccugaucaacgaccagcugaucaugaagaaccaccugagagacaucaugggcauccccuacugcaacuacagcaaguacugguaccugaaccacaccaccaccggcaagaccagccugcccaagugcuggcuggugagcaacggcagcuaccugaacgagacccacuucagcgacgacaucgagcagcaggccgacaacaugaucaccgagaugcugcagaaggaguacauggagagacagggcaagaccccccugggccugguggaccuguucguguucagcaccagcuucuaccugaucagcaucuuccugcaccuggugaagauccccacccacagacacaucgugggcaagcccugccccaagccccacagacugaaccacaugggcaucugcagcugcggccuguacaagcagcccggcgugcccgugaaguggaagagaugaggacuagucccuguucccagagcccacuuuuuuuucuuuuuuugaaauaaaauagccugucuuucagaucucaaaggcucuuuucagagccaccaaaaaaaaaaaaaaaaaaaaaaaaaaaaaaaaaaaaaaaaaaaaaaaaaaaaaaaaaaaaaaaaagaauu

SEQ ID NO: 30373 - RNA, 1736 nt, Artificial Sequence
  mRNA product Design a-2 (hSL-A64-N5) comprising derived and/or modified sequence from LASV(Josiah;Clade IV)__NP_694870__GPCmut6 (opt5)
aggagaguccgcucagccagguugcagaagcggcuuagcguguguccuaaucuucucucugcguguagguaggccugugccgcaaacaagcuuaccaugggccagaucgugaccuucuuucaagaggucccccacguuauugaagaggugaugaacaucgugcugauugcccucagcguccuggcugugcuuaaggggcuguacaauuucgccacaugcggacucguuggccuggugacguuucuucugcucugugggagauccugcaccacaucucuguauaaaggagucuacgaacugcagacccucgagcugaacauggaaacacuuaauauguguaugccucugagcugcaccaagaacaauucccaucacuauaucauggugggcaacgagacagggcucgagcugacccuuacgaauaccucuauuaucaaccauaaauucuguaaucugagcgacgcgcacaagaaaaaccucuacgaucaugcucugauguccaucauuucuacauuucaccugagcaucccgaauuucaaccaguaugaagccauguccugcgacuuuaauggaggcaagauuagcguucaguacaaccucucucacuccuaugccggcgaugcugccaaucauugugggaccguggcuaacggaguccugcaaacauucaugcggauggccuggggcgggagcuacaucgcgcuugacucuggacgcggcaacugggauugcauuaugaccuccuaccaguaucugaucauucagaauacgacaugggaggaccacugucaguuuagcagacccucuccuaucggguaccucggacugcuuucccaacggacccgcgauaucuauauuagcagacggcugcucggcacauucaccuggacccuguccgacucugaaggcaaggauacacccgggggauacugccugacgcgcuggaugcucaucgaggccgagcugaaauguuuuggcaacaccgcuguggccaagugcaaugaaaaacaugacgaggaguucugcgauaugcuuagacuguuugacuucuguaagcaggcuauucagcggcucaaagccccugcgcagaugagcauccaacugauuaacaaggccgugaaugcucuuaucaacgaucagcugaucaugaagaaucaccuccgcgacauuauggggauccccuauugcaacuacuccaaauauugguaccugaaucacacaaccacaggaagaaccagccugccuaaguguuggcucgucucuaacggcuccuaccugaaugaaacgcauuucagcgacgauauugaacagcaagccgacaacaugaucacagagaugcuucagaaagaguauauggaacggcaggggaagaccccgcugggacucguugaucuguuuguguucucuaccagcuuuuaccugauuuccaucuuccuucaccucgugaaaauccccacacaucgccacauugucggcaagucuugcccuaaaccccauagacugaaucacaugggcaucuguagcugcgggcuguauaagcagccuggagugcccguuaaguggaaacggugaggacuagucccuguucccagagcccacuuuuuuuucuuuuuuugaaauaaaauagccugucuuucagaucucaaaggcucuuuucagagccaccaaaaaaaaaaaaaaaaaaaaaaaaaaaaaaaaaaaaaaaaaaaaaaaaaaaaaaaaaaaaaaaaagaauu

SEQ ID NO: 30374 - RNA, 1733 nt, Artificial Sequence
  mRNA product Design a-2 (hSL-A64-N5) comprising derived and/or modified sequence from LASV(LP;Clade I)__AAF86701__GPCmut6 (opt5)
aggagaguccgcucagccagguugcagaagcggcuuagcguguguccuaaucuucucucugcguguagguaggccugugccgcaaacaagcuuaccaugggccagaucauuaccuucuuucaagaggugccccacgucaucgaagagguuaugaacauugugcugaucgcccucagccugcuugcuauucugaaggggcucuacaauaucgccacaugcggaaucauuggccugguggcguuccuuuuucugugugggaaauccugcucucucacgcugaagggaggcuaugaacugcagacccucgagcugaacauggaaacacuuaauauguguaugccucugagcugcaccaaaaacuccucucaucacuacaucagagucgggaaugagacaggacucgagcugacccuuacaaacaccagcauuaucaaucauaaguucuguaaccuguccgacgcucacaaaaagaaucucuaugaucaugcccugaugucuauuaucagcacguuucaccuguccauuccgaacuucaaucaguacgaagccaugagcugcgacuuuaacggcggcaagaucucugugcaguauaaucucucccacagcuacgcuggggaugccgcugagcauuguggaaccguugccaacggcgugcugcaaacauucaugcggauggcguggggagggcgcuauaucgcccuugacucuggcaaagggaauugggauugcauuaugaccuccuaccaguaccugaucauucagaacacaaccugggaagaccacugucaguuuagcagacccucuccuaucggauaucucggccugcuuucccaacggacgcgcgauauuuacaucagcagacggcugcucggcacauucaccuggacacuguccgacucugaggggaacgagacccccggaggcuauugccugacccgcuggaugcucaucgaagcugagcugaaguguuuugggaauacagccgucgcuaaaugcaacgaaaagcaugaugaggaguucugcgacaugcuuagacuguuugauuucuguaaacaggccauucggcgccucaaggcgccugcccagaugagcauccagcugauuaauaaggcugugaacgcccuuaucaaugaccaacugauuaugaaaaaccaccucagagauaucaugggaauccccuacugcaauuauuccaaguacugguaucugaaccacacgagcucuggccggaccucccugccuaaauguuggcucauuagcaaugggucuuaccugaacgaaacacaguucagcgacgacaucgagcagcaagcugauaauaugauuaccgaaaugcuucagaaggaguacaucgaacgccagggaaaaacaccgcugggccucguugacauuuuuaucuucuccaccucuuuuuaucugauuagcaucuuccugcaucuuaucaagauucccacgcacagacauaucgugggcaaaccuugccccaagccucaccggcucaaccauaugggggucuguuccugcggacuguacaagcaccccggcgugccgacaaaauggaagcgcugaggacuagucccuguucccagagcccacuuuuuuuucuuuuuuugaaauaaaauagccugucuuucagaucucaaaggcucuuuucagagccaccaaaaaaaaaaaaaaaaaaaaaaaaaaaaaaaaaaaaaaaaaaaaaaaaaaaaaaaaaaaaaaaaagaauu

SEQ ID NO: 30375 - RNA, 1733 nt, Artificial Sequence
  mRNA product Design a-2 (hSL-A64-N5) comprising derived and/or modified sequence from LASV(803213;Clade II)__AAF86703__GPCmut6 (opt5)
aggagaguccgcucagccagguugcagaagcggcuuagcguguguccuaaucuucucucugcguguagguaggccugugccgcaaacaagcuuaccaugggccagaucauuaccuucuuucaagaggugccccacgucaucgaagagguuaugaacauugugcugaucgcccucagccugcuugcuauucugaaggggaucuacaauguggccacaugcggacucuucggccugaucuccuuucuucugcucugugggagaucuugcagcgucacguauaaaggaguguacgaacugcagacccuggagcucaacauggcgaaucugaacauguguaugccucuuuccugcacaaagaauaacucucaucacuauauuaugguuggcaaugaaaccgggcuggagcucacacugaccaacacaagcaucauuaaucauaaauucuguaaccuuuccgacgcucacaagaaaaaucuguacgaucaugcccucaugucuaucauuagcaccuuucaccuguccaucccgaacuucaaucaguaugaggccaugagcugcgacuuuaacggaggcaagauuucugugcaguacaaucugucccacagcuucgcugucgaugccgcuaaccauuguggcacgaucgccaacggggugcuccaaaccuuuaugcggauggcguggggaggcucuuauaucgcccuggacuccgggaagggaaauugggauugcauuaugacaagcuaccaguaccuuaucauucagaacaccacaugggaagaccacugucaguucucucgccccuccccuaucggcuaucuggggcuccugagccaaagaacccgggauauuuacaucucccgcagacuucugggaacguuuacauggacccucucugacagcgagggcaaugaagcucccggcggguauugccugacacgguggaugcugaucgaggccgagcucaaauguuucggaaacaccgcuguugccaagugcaaugaaaaacaugaugaggaauuuugcgacaugcugcgccuuuucgauuucuguaagcaggcgauuaaaagacugaagaccccugcccagauguccauccagcucauuaacaaggcugugaaugcccugaucaacgaccaacuuauuaugaaaaaucaucugcgggauaucaugggcauccccuacugcaacuauagccgcuacugguaucucaaucacacagucacggggaagaccucucugccuagauguuggcugguguccaacggaagcuaccucaaugagacacacuuuucugacgacauugaacagcaggcugauaacaugaucaccgagaugcugcaaaaagaguacauggaccggcagggcaagacaccgcuugggcugguggaucucuucgucuuuagcaccuccuucuaucugauuucuaucuuucugcaccuuguuaaaauucccacgcaucgccacaucgugggaaagccuugccccaaaccucauagacucaaucacaugggcauuuguagcugcggccuguacaagcaccccggggugccggucaaguggaaacggugaggacuagucccuguucccagagcccacuuuuuuuucuuuuuuugaaauaaaauagccugucuuucagaucucaaaggcucuuuucagagccaccaaaaaaaaaaaaaaaaaaaaaaaaaaaaaaaaaaaaaaaaaaaaaaaaaaaaaaaaaaaaaaaaagaauu

SEQ ID NO: 30376 - RNA, 1733 nt, Artificial Sequence
  mRNA product Design a-2 (hSL-A64-N5) comprising derived and/or modified sequence from LASV(GA391;Clade III)__CAA36645__GPCmut6 (opt5)
aggagaguccgcucagccagguugcagaagcggcuuagcguguguccuaaucuucucucugcguguagguaggccugugccgcaaacaagcuuaccaugggccagaucgugaccuucuuucaagaggucccccacguuauugaagaggugaugaacaucgugcugauugcccucagcauccuggcuauucuuaaggggcuguacaaugucgccacaugcggacucaucggccuggugacguuccuucugcucuccgggagaucuuguagccugaucuauaaaggaaccuacgaacugcagacacucgagcugaacauggaaacccuuaauaugugcaugccucuguccuguacaaagaacaauucucaucacuauauucggguuggcaacgagaccgggcucgagcugacacuuaccaauacgagcauccugaaccauaaauuuugcaaucucuccgacgcgcacaagcgcaaccuguacgaucauucucugaugagcauuaucuccaccuuccaccucagcauuccgaauuuuaaccaguaugaagcuaugucuugugacuucaauggaggcaaaaucacagugcaguacaaccugucccacagcuuugccgucgaugccgcuggccauugcgggacccuugccaauggagugcugcaaacauucaugagaauggcuuggggcgggucuuauauugcccucgacuccggacggggcaacugggauuguaucaugaccagcuaccaguaccugaucauucagaacacgacaugggacgaucacugccaguuuucucgccccuccccuaucggguaucuuggacugcucagccaaagaacccgggacauuuacaucucccgcagacugcugggcacauucaccuggacccucucugauagcgagggcaaugaaacacccgggggauauugucugacgcgguggaugcuuauugaggcggagcugaagugcuuuggcaacaccgccguugcuaaguguaaugaaaaacaugacgaggaguucugcgauaugcuccgccuguuugacuucugcaagcaggccaucagacggcuuaaaaccccugcucagauguccauccagcugauuaacaaggccgugaaugcgcucaucaacgaucaacugauuaugaaaaaucaucugcgcgacaucauggggauucccuacuguaacuauagcagauacugguaucucaaucacacaucuacaggaaagaccucccugccucggugcuggcuuaucagcaacggcucuuaccugaaugaaacgaaguucagcgacgauaucgaacagcaggccgacaacaugauuacagagaugcuccaaaaagaguacaucgaucgccaggggaagaccccgcugggacuggucgaccuuuuuguguucuccaccucuuuuuaucucauuagcaucuuccugcaccuggugaaaauucccacacacagacauaucgucggcaagccuugucccaaaccucaccggcucaaucauaugggcauuugcuccugugggcuguacaagcagcccggaguuccggugagauggaaacgcugaggacuagucccuguucccagagcccacuuuuuuuucuuuuuuugaaauaaaauagccugucuuucagaucucaaaggcucuuuucagagccaccaaaaaaaaaaaaaaaaaaaaaaaaaaaaaaaaaaaaaaaaaaaaaaaaaaaaaaaaaaaaaaaaagaauu

SEQ ID NO: 30377 - RNA, 1736 nt, Artificial Sequence
  mRNA product Design a-2 (hSL-A64-N5) comprising derived and/or modified sequence from LASV(AV;Clade V)__CCA30314__GPCmut6 (opt5)
aggagaguccgcucagccagguugcagaagcggcuuagcguguguccuaaucuucucucugcguguagguaggccugugccgcaaacaagcuuaccaugggccagaucgugaccuucuuucaagaggucccccacguuauugaagaggugaugaacaucgugcugauugcccucagcauccuggcuguccuuaaggggcuguacaauauugccacaugcggacucaucggccugaucacguuccuucugcucugugggagauccugcucuagcaaccuguauaaaggaguguacgaacugcagucccucgaccugaauauggagacccuuaacauguguaugccucugucuugcacaaagaauaacagccaucacuauauucggguuggcaaugauaccgggcucgaacugacacuuaccaacacauccauccugaaucauaaauuuuguaaccucucugacgcgcacaagaaagaucuguacgaccaugcucugaugagcauuaucuccaccuuccaccucagcauuccgaauuuuaaccaguaugaggccaugucuugcgauuucaauggaggcaagaucuccgugcaguacaaccugagccacucuuaugccauugacgcugccaaucauuguggcacggucgcuaacgggauccuucaaaccuuuaugcgcauggccuggggaggcuccuacaucgcgcuggauagcgggagaggaaacugggacugcauuaugacaucuuaccaguaucucaucauucagaauaccacaugggagaaccacugucaguucucccggcccagcccuaucggcuaccuggggcuucugucccaacgcaccagagauauuuauaucucucggcgccuccugggaacguuuacauggacccugagcgacuccgaaggcaaugccacacccggcggguacugccucaccagauggaugcugaucgaggcugaacuuaaguguuucggaaacaccgccguggcuaaaugcaaugagaagcaugaugaggaauuuugcgacaugcugcgccucuucgauuuuuguaaacaggccauuagccggcugaagucuccugcgcagauguccauccagcuuauuaacaaagccguuaaugcucugaucaacgaccaacucauuaugaagaaucaccugagagacaucaugggcauccccuauugcaacuacagcaaguauugguaccugaaucacacaauuacggggaaaaccucucucccuaaguguuggcuggugagcaacggauccuaccuuaaugagacacauuucucugaugacaucgaacagcaggccgauaacaugauuaccgagaugcugcaaaaagaauauauggagcggcagggcaagacaccgcucgggcuggucgaccuguucguguuuagcaccuccuucuaccuuaucagcauuuuucuccgccuggugaaaauccccacgcacagacauauugucggaaagccuugccccaaaccucaccggcugaaucauaugggcaucuguucuugcggccucuauaagcagcccgggguuccggugcgcuggaagagaugaggacuagucccuguucccagagcccacuuuuuuuucuuuuuuugaaauaaaauagccugucuuucagaucucaaaggcucuuuucagagccaccaaaaaaaaaaaaaaaaaaaaaaaaaaaaaaaaaaaaaaaaaaaaaaaaaaaaaaaaaaaaaaaaagaauu

SEQ ID NO: 30378 - RNA, 1733 nt, Artificial Sequence
  mRNA product Design a-2 (hSL-A64-N5) comprising derived and/or modified sequence from LASV(Togo/2016/7082;Clade VI)__AMR44577__GPCmut6 (opt5)
aggagaguccgcucagccagguugcagaagcggcuuagcguguguccuaaucuucucucugcguguagguaggccugugccgcaaacaagcuuaccaugggccagaucauuaccuucuuucaagaggugccccacgucaucgaagagguuaugaacauugugcugaucgcccucagccugcuugcuauucugaaggggguguacaaugucgccacaugcggaaucaucggccucgugacguuccuguuucuuugugggagauccugcucucugauuuauaaaggaagcuacgaacuccagacccuggagcugaacauggaaacacucaauauguguaugccucuguccugcaccaagaacucuagccaucacuauauccggguuggcaaugagacagggcuugagcugacccucacaaacaccuccauuaucaaucauaaauucuguaaccugucugacgcgcacaagcgcaaucuuuacgaucaugcucugaugagcauucucuccacguuucaccugagcaucccgaacuucaaucaguaugaagccaugucuugcgacuuuaacggaggcaaaauuuccgugcaguacaaucugagccacgccuaugcugucgaugccgcugagcauuguggcaccguggccaacgggguucuccaaacauucaugagaauggcguggggaggcucuuacaucgcccuggacuccgggcggggaaauugggauugcaucaugaccagcuaccaguaucuuauuauccagaacacaaccugggaagaccacugucaguuuucucgccccuccccuauuggcuaccuggggcuccugagccaaagaacgcgggauaucuauauuucccgcagacuucugggaacauucaccuggacacucucugacagcgagggcaacgagacccccggcggguacugccugacccgguggaugcugaucgaagcugagcucaaguguuuuggaaauacagccguggcuaagugcaacgaaaaacaugaugaggaguucugcgacaugcugcgccuuuuugauuucuguaagcaggccauccagagacugaaauccccugcgcagaugagcauucaacucaucaauaaggccgucaacgcucugauuaaugaccagcuuaucaugaaaaaccaucugcgggauaugaugggcauucccuauugcaauuacucuaaguauugguaccucaaccacacguccagcgggcgcaccucucugccuaaguguuggcuggugagcaauggauccuaccucaacgaaacacacuucucugacgacaucgagcagcaagccgauaauaugaucaccgaaaugcugcagaaagaguauauugacagacagggcaagacaccgcuugggcugguggaucucuuugucuucagcaccuccuuuuaccugaucagcauuuuccugcaccuuaucaaaauucccacgcaucggcacaucguuggaaagccuugccccaaaccucaucgccucaaccacaugggcauuuguucuugcggccuguauaagcagcccggggugccgacaagauggaaacggugaggacuagucccuguucccagagcccacuuuuuuuucuuuuuuugaaauaaaauagccugucuuucagaucucaaaggcucuuuucagagccaccaaaaaaaaaaaaaaaaaaaaaaaaaaaaaaaaaaaaaaaaaaaaaaaaaaaaaaaaaaaaaaaaagaauu

SEQ ID NO: 30379 - RNA, 1733 nt, Artificial Sequence
  mRNA product Design a-2 (hSL-A64-N5) comprising derived and/or modified sequence from LASV(KAK-428;Clade n.d. (VII))__ANH09740__GPCmut6 (opt5)
aggagaguccgcucagccagguugcagaagcggcuuagcguguguccuaaucuucucucugcguguagguaggccugugccgcaaacaagcuuaccaugggccagaucgugaccuucuuucaagaggucccccacguuauugaagaggugaugaacaucgugcugauugcccucagccugcuugcuauccugaaggggcucuacaauuucgccacaugcggagucauuggccugaucacguuucuucugcucugugggagauccugcucugcgaccuauaaaggacaguacgaacugcagacacuggagcucaacauggaaagccugaauauguguaugccucuuuccugcaccaagaacaauucucaucacuauauccgggcuggcaacaauacagggcuggagcucacccugacaaacaccagcauuaucucccauaaauucuguaaucuuucugacgcccacaagaaaaaccuguacgaucauacgcucaugagcauuaucaccacauuucaccuguccauuccgaauuucaaccaguaugaggccaugagcugcgacuuuaauggaggcaagaucucuauucaauacaaccugucccacagcuaugcuggcgaugccgcucagcauugugggaccguggccaauggaguucuccagacauucaugcgcauggcguggggcgggucuuaccuggcccuugacuccggaagacggggcugggauugcaucaucagcucuuaccaguaucugauuauccaaaacaccacgugggacgaucacugucaguuuucccgccccagcccuauuggguaccucggauucgugucccagaagacaagagacaucuauauuucucggcgccugcuuggcaccuuuacauggacccugagcgauuccgaaggccaugacaugcccgggggauacugccucaccagauggaugcugaucgaggcugaucugaaauguuucggcaacacagccgucgcuaagugcaaugaaaaacacgacgaggaguuuugcgauauguggcgccucuucgacuucuguaagcaggccauccaacggcugaaagcgccugcccagaugaacauucagcuuaucaauaaggcugugaacgcccugauuaaugaccaacucaugaugaagaaccaccugagagauaucauggggauucccuauugcaauuacagcaaauuuugguaucuuaacaauacgaccacaggacggaccucucugccucgcuguuggcucaucuccaacggcagcuaccugaaugaaacacauuucucugacgauaucgagcagcaggcugacaacaugauuaccgaaaugcugcagaaggaguacauggauagacaagggaaaacgccgcucggacugguugaccuuuuuguguucagcacauccuuuuaucugaucaccauuuuccuccaccuggucaagauccccacccaucggcacauugugggcaaaccuugccccaagccucaucgccugaaucacaugggcaucuguucuugcgggcuuuacaaacagcccggagugccggucagauggaagcggugaggacuagucccuguucccagagcccacuuuuuuuucuuuuuuugaaauaaaauagccugucuuucagaucucaaaggcucuuuucagagccaccaaaaaaaaaaaaaaaaaaaaaaaaaaaaaaaaaaaaaaaaaaaaaaaaaaaaaaaaaaaaaaaaagaauu

SEQ ID NO: 30380 - RNA, 1733 nt, Artificial Sequence; identical to SEQ ID NO: 30374
  mRNA product Design a-2 (hSL-A64-N5) comprising derived and/or modified sequence from LASV(Pinneo-NIG-1969;Clade I)__AIT17836__GPCmut6 (opt5)

SEQ ID NO: 30381 - RNA, 1733 nt, Artificial Sequence
  mRNA product Design a-2 (hSL-A64-N5) comprising derived and/or modified sequence from LASV(ISTH0009-NIG-2011;Clade II)__AIT17404__GPCmut6 (opt5)
aggagaguccgcucagccagguugcagaagcggcuuagcguguguccuaaucuucucucugcguguagguaggccugugccgcaaacaagcuuaccaugggccagaucauuaccuucuuucaagaggugccccacgucaucgaagagguuaugaacauugugcugaucgcccucagccugcuugcuauucugaaggggaucuacaauguggccacaugcggacucuucggccuggucuccuuucuucugcucugugggagaucuugcagcacgaccuauaaaggaguguacgaacugcagacacuggagcucgacauggcgucccugaacauguguaugccucuuucuugcaccaagaauaacagccaucacuauaucaugguuggcaaugaaacagggcuggagcucacccugacaaacaccuccauuaucaaucauaaauucuguaaccuuucugaugcucacaagaaaaaucuguacgaccaugcccucaugagcauuaucuccacguuucaccugagcauuccgaacuucaaucaguaugaggccaugucuugcgauuuuaacggaggcaagaucuccgugcaguacaaucugagccacgcuuaugccgucgacgcugccaaccauuguggcaccauugcgaauggggugcuccaaacauucaugcggauggccuggggaggcucuuacaucgcucuggauuccgggaagggaagcugggacugcaucaugaccucuuaccaguaucuuauuauccagaacacaaccugggaagaucacugucaguuuucccgccccagcccuauuggcuaccuggggcuccugucccaaagaacgcgggacaucuauauuucucgcagacuucugggaacauucaccuggacacucagcgauuccgagggcaacgaaacccccggcggguacugccugacccgguggaugcugaucgaggccgagcucaaauguuuuggaaauacagcuguugccaagugcaacgaaaaacaugacgaggaguucugcgauaugcugcgccuuuuugacuucuguaagcaggcgaucagacggcugaaaacgccugcccagaugagcauucagcucaucaauaaggcugugaacgcccugauuaaugaucaacuuaucaugaagaaccaucugcgcgacauuaugggcauccccuauugcaauuacucuaaauauugguaccucaaccacaccgucacagggaagaccucccugccuagauguuggcuggugagcaauggaucuuaccucaacgaaacacacuucagcgacgauaucgaacagcaggcugacaauaugauuaccgagcugcuucaaaaagaguauauggaucggcagggcaagacgccgcuggggcucguggaccuguuugucuucuccacaucuuuuuaccugaucagcauuuuccuucaccucaucaaaauucccacccaucgccacaucaccggaaagccuugccccaaaccucauagacugaaccacaugggcauuuguuccugcggccuguauaagcaccccgggguuccggugaaguggaaacggugaggacuagucccuguucccagagcccacuuuuuuuucuuuuuuugaaauaaaauagccugucuuucagaucucaaaggcucuuuucagagccaccaaaaaaaaaaaaaaaaaaaaaaaaaaaaaaaaaaaaaaaaaaaaaaaaaaaaaaaaaaaaaaaaagaauu

SEQ ID NO: 30382 - RNA, 1733 nt, Artificial Sequence
  mRNA product Design a-2 (hSL-A64-N5) comprising derived and/or modified sequence from LASV(ISTH2010-NIG-2012;Clade II)__AIT17482__GPCmut6 (opt5)
aggagaguccgcucagccagguugcagaagcggcuuagcguguguccuaaucuucucucugcguguagguaggccugugccgcaaacaagcuuaccaugggccagaucauuaccuucuuucaagaggugccccacgucaucgaagagguuaugaacauugugcugaucgcccucagccugcuugcuauucugaaggggaucuacaauguggccacaugcggacucuucggccuggucuccuuucuucugcucugugggagaucuugcagcacgaccuauaaaggaguguacgaacugcagacacuggagcucgacauggcgucccugaacauguguaugccucuuucuugcaccaagaauaacagccaucacuauaucaugguuggcaaugaaacagggcuggagcucacccugacaaacaccuccauuaucaaucauaaauucuguaaccuuucugaugcucacaagaaaaaucuguacgaccaugcccucaugagcauuaucuccacguuucaccugagcauuccgaacuucaaucaguaugaggccaugucuugcgauuuuaacggaggcaagaucuccgugcaguacaaucugagccacgcuuaugccgucgacgcugccaaccauuguggcaccauugcgaauggggugcuccaaacauucaugcggauggccuggggaggcucuuacaucgcucuggauuccgggaagggaagcugggacugcaucaugaccucuuaccaguaucuuauuauccagaacauuacaugggaagaucacugucaguuuucccgccccagcccuaucggcuaccuggggcuccugucccaaagaacccgggacauuuauaucucucgcagacuucugggaacguucacauggacccucagcgauuccgagggcaacgaaacacccggcggguacugccugacccgguggaugcugaucgaggccgagcucaaauguuuuggaaauaccgcuguugccaagugcaacgaaaaacaugacgaggaguucugcgauaugcugcgccuuuuugacuucuguaagcaggcgauuagacggcugaaaacgccugcccagaugagcauccagcucauuaauaaggcugugaacgcccugaucaaugaucaacuuauuaugaagaaccaucugcgcgacaucaugggcauccccuauugcaauuacucuaaauauugguaccucaaccacacagucaccgggaagacaucccugccuagauguuggcuggugagcaauggaucuuaccucaacgaaacccacuucagcgacgauauugaacagcaggcugacaauaugaucacagagcugcuucaaaaagaguauauugaucggcagggcaagaccccgcuggggcucguggaccuguuugucuucuccacgucuuuuuaccugaucagcauuuuccuucaccucguuaaaauccccacacaucgccacguggugggaaagccuugccccaaaccucauagacugaaccacaugggcauuuguuccugcggccuguauaagcaccccggggucccggugaaguggaaacggugaggacuagucccuguucccagagcccacuuuuuuuucuuuuuuugaaauaaaauagccugucuuucagaucucaaaggcucuuuucagagccaccaaaaaaaaaaaaaaaaaaaaaaaaaaaaaaaaaaaaaaaaaaaaaaaaaaaaaaaaaaaaaaaaagaauu

SEQ ID NO: 30383 - RNA, 1733 nt, Artificial Sequence
  mRNA product Design a-2 (hSL-A64-N5) comprising derived and/or modified sequence from LASV(Lassa virus/H.sapiens-wt/NGA/2015/ISTH_0543;Clade II)__AVO03639__GPCmut6 (opt5)
aggagaguccgcucagccagguugcagaagcggcuuagcguguguccuaaucuucucucugcguguagguaggccugugccgcaaacaagcuuaccaugggccagaucauuaccuucuuucaagaggugccccacgucaucgaagagguuaugaacauugugcugaucgcccucagccugcuugcuauucugaaggggaucuacaauguggccacaugcggacucuucggccuggucuccuuucuucugcucugugggagaucuugcagcacgaccuauaaaggaguguacgaacugcagacacuggagcucgacauggcgaaccugaauauguguaugccucuuuccugcaccaagaacaauucucaucacuauaucaugguuggcaacgaaacagggcuggagcucacccugacaaauaccagcauuaucaaccauaaauucuguaaucuuuccgaugcucacaagaaaaaccuguacgaccaugcccucaugucuauuaucagcacguuucaccuguccauuccgaauuucaaccaguaugaggccaugagcugcgauuuuaauggaggcaagaucucugugcaguacaaccugucccacaccuaugcugucgacgccgcuaaucauuguggcacaauugccaacggggugcuccaaaccuucaugcggauggcguggggaggcagcuacaucgcccuggauucugggaagggauccugggacugcaucaugacaagcuaccaguaucuuguuauucagaacaccacgugggaagaucacugucaguuuucucgccccuccccuaucggcuaccuggggcuccugagccaaagaacacgggacauuuauaucucccgcagacuucugggaaccuucacauggacccucucugauagcgagggcaaugaaacccccggcggguacugccugacacgguggaugcugauugaggcugagcucaaauguuuuggaaacacggccguggcuaagugcaaugaaaaacaugacgaggaguucugcgauaugcugcgccuuuuugacuucuguaagcaggccaucagacggcugaaaaccccugcgcagauguccauccagcucauuaacaaggccgucaaugcucugaucaacgaucaacuuauuaugaagaaucaucugcgcgacaucaugggcauucccuauugcaacuacagcaaauauugguaccucaaucacacagugaccgggaagacaucucugccuagauguuggcugguguccaacggaagcuaccucaaugaaacccacuucucugacgauaucgaacagcaggccgacaacaugaucacggagcugcuucaaaaagaguauauugaucggcagggcaagacaccgcuggggcucgucgaccuguuuguuuucagcaccuccuuuuaccugaucucuauuuuccuucaccucgugaaaauccccacccaucgccacauuacaggaaagccuugccccaaaccucauagacugaaucacaugggcaucuguagcugcggccuguauaagcaccccggggugccggucaaguggaaacggugaggacuagucccuguucccagagcccacuuuuuuuucuuuuuuugaaauaaaauagccugucuuucagaucucaaaggcucuuuucagagccaccaaaaaaaaaaaaaaaaaaaaaaaaaaaaaaaaaaaaaaaaaaaaaaaaaaaaaaaaaaaaaaaaagaauu

SEQ ID NO: 30384 - RNA, 1733 nt, Artificial Sequence
  mRNA product Design a-2 (hSL-A64-N5) comprising derived and/or modified sequence from LASV(Lassa virus/H.sapiens-wt/NGA/2016/ISTH_0009;Clade II)__AVO03571__GPCmut6 (opt5)
aggagaguccgcucagccagguugcagaagcggcuuagcguguguccuaaucuucucucugcguguagguaggccugugccgcaaacaagcuuaccaugggccagaucauuaccuucuuucaagaggugccccacgucaucgaagagguuaugaacauugugcugaucgcccucagccugcuugcuauucugaaggggaucuacaauguggccacaugcggacuccugggccuugucuccuuccugcuccugugugggagaucuugcagcacgaccuauaaaggaguguacgaacugcagacacucgagcuggacauggcgucccuuaacauguguaugccucugucuugcaccaagaauaacagccaucacuauaucaugguuggcaaugaaacagggcucgagcugacccuuacaaacaccuccauuaucaaucauaaauuuuguaaccugucugaugcucacaagaaaaaucucuacgaccaugcccugaugagcauuaucuccacguuccaccugagcauuccgaacuuuaaucaguaugaggccaugucuugcgauuucaacggaggccggaucuccgugcaguacaaucucagccacucuuaugcugucgacgccgcuaaccauuguggcaccauugccaauggggugcugcaaacauuuaugcgcauggcguggggaggcuccuacaucgcccuugauagcgggaagggaucuugggacugcaucaugaccuccuaccaguaucugauuauccagaacacaaccugggaagaucacugucaguucagcagacccuccccuauuggcuaccucgggcugcuuucucaacggacgcgcgacaucuauauuagcagacggcugcucggaacauuuaccuggacacuguccgauagcgagggcaacgaaacccccggcggguacugccugacccgcuggaugcucaucgaggcugagcugaaguguuucggaaauacagccguugcuaaaugcaacgaaaagcaugacgaggaauuuugcgauaugcuuagacuguucgacuuuuguaaacaggccauccggcgccucaagacgccugcgcagaugucuauucagcugaucaauaaagccgugaacgcucuuauuaaugaucaacugaucaugaagaaccaccucagagacauuaugggcauccccuauugcaauuacuccaaguauugguaccugaaccacaccgucacagggaaaaccagccugccucgguguuggcucgugucuaauggaagcuaccugaacgagacacauuucuccgacgauaucgaacagcaggccgacaauaugauuaccgagcuucugcaaaaggaguauaucgaucgccagggcaaaacgccgcucgggcugguggaccuguucgucuuuucuaccagcuucuaccuuauuuccaucuuucuccaccugguuaagauucccacacauagacacaucaccggaaaaccuugccccaagccucaucggcugaaccacaugggcauuuguagcugcggccucuauaaucaccccggggugccggugaaauggaagcgcugaggacuagucccuguucccagagcccacuuuuuuuucuuuuuuugaaauaaaauagccugucuuucagaucucaaaggcucuuuucagagccaccaaaaaaaaaaaaaaaaaaaaaaaaaaaaaaaaaaaaaaaaaaaaaaaaaaaaaaaaaaaaaaaaagaauu

SEQ ID NO: 30385 - RNA, 1733 nt, Artificial Sequence
  mRNA product Design a-2 (hSL-A64-N5) comprising derived and/or modified sequence from LASV(Lassa virus/H.sapiens-wt/NGA/2016/ISTH_0017;Clade II)__AVO03567__GPCmut6 (opt5)
aggagaguccgcucagccagguugcagaagcggcuuagcguguguccuaaucuucucucugcguguagguaggccugugccgcaaacaagcuuaccaugggccagaucauuaccuucuuucaagaggugccccacgucaucgaagagguuaugaacauugugcugaucgcccucagccugcuugcuauucugaaggggaucuacaauguggccacaugcggacucuucggccuggucuccuuucuucugcucugugggagaucuugcagcacgaccuauaaaggaguguacgaacugcagacacuggagcucgacauggcgucccugaacauguguaugccucuuucuugcaccaagaauaacagccaucacuauaucaugguuggcaaugaaacagggcuggagcucacccugacaaacaccuccauuaucaaucauaaauucuguaaccuuucugaugcucacaagaaaaaucuguacgaccaugcccucaugagcauuaucuccacguuucaccugagcauuccgaacuucaaucaguaugaggccaugucuugcgauuuuaacggaggcaagaucuccgugcaguacaaucugagccacaccuaugcuauugacgccgcuaaccauuguggcacaaucgccaaugggguccuccaaaccuucaugcggauggcguggggaggcucuuacaucgcccuggauuccgggaagggaagcugggacugcauuaugacaucuuaccaguaucuuaucauucagaacaccacgugggaagaucacugucaguuuucccgccccagcccuaucggcuaccuggggcuccugucccaaagaacacgggacauuuauaucucucgcagacuucugggaaccuucacauggacccucagcgauuccgagggcaacgaaacccccggcggguacugccugacacgguggaugcugaucgaggcugagcucaaauguuuuggaaauacggccguggcuaagugcaacgaaaaacaugacgaggaguucugcgauaugcugcgccuuuuugacuucuguaagcaggccauuagacggcugaaaaccccugcgcagaugagcauccagcucauuaauaaggccguuaacgcucugaucaaugaucaacuuauuaugaagaaccaucugcgcgacaucaugggcauccccuauugcaauuacucuaaauauugguaccucaaccacacagugaccgggaagacaucccugccuagauguuggcuggucagcaauggaucuuaccucaacgaaacccacuucagcgacgauauugaacagcaggccgacaauaugaucacggagcugcuucaaaaagaguauauggaucggcagggcaagacaccgcuggggcucguggaccuguuuguguucuccaccucuuuuuaccugauuagcaucuuccuucaccucguccgcauucccacccauagacacguuaucggaaaaccuugccccaagccucaucggcugaaccacaugggcauuuguuccugcggccuguauaaacaccccggggugccggugaaguggaagcgcugaggacuagucccuguucccagagcccacuuuuuuuucuuuuuuugaaauaaaauagccugucuuucagaucucaaaggcucuuuucagagccaccaaaaaaaaaaaaaaaaaaaaaaaaaaaaaaaaaaaaaaaaaaaaaaaaaaaaaaaaaaaaaaaaagaauu

SEQ ID NO: 30386 - RNA, 1733 nt, Artificial Sequence
  mRNA product Design a-2 (hSL-A64-N5) comprising derived and/or modified sequence from LASV(Lassa virus/H.sapiens-wt/NGA/2018/ISTH_0959;Clade II)__AVV65099__GPCmut6 (opt5)
aggagaguccgcucagccagguugcagaagcggcuuagcguguguccuaaucuucucucugcguguagguaggccugugccgcaaacaagcuuaccaugggccagaucauuaccuucuuucaagaggugccccacgucaucgaagagguuaugaacauugugcugaucgcccucagccugcuugcuauucugaaggggaucuacaauguggucacaugcggacucuucggccugguguccuuucuucugcucugugggagaucuugcagcacgaccuauaaaggaguuuacgaacugcagacacuggagcucgacauggccucccugaacauguguaugccucuuucuugcaccaagaauaacagccaucacuauaucauggugggcaaugaaacagggcuggagcucacccugacaaacaccuccauuaucaaucauaaauucuguaaccuuucugaugcgcacaagaaaaaucuguacgaccaugcucucaugagcauuaucuccacguuucaccugagcauuccgaacuucaaucaguaugaggccaugucuugcgauuuuaacggaggcaagaucuccguccaguacaaucugagccacgccuaugcuauugacgccgcuaaccauuguggcaccaucgccaauggggugcuccaaacauucaugcggauggcguggggaggcucuuacaucgcccuggauuccgggaagggaagcugggacugcauuaugaccucuuaccaguaucuuaucauucagaacacaaccugggaagaucacugucaguuuucccgccccagcccuaucggcuaccuggggcuccugucccaaagaacgcgggacauuuauaucucucgcagacuucugggaacauucaccuggacacucagcgauuccgagggcaacgaaacccccggcggguacugccugacccgguggaugcugaucgaggcugagcucaaauguuuuggaaauacagccguugcuaagugcaacgaaaaacaugacgaggaguucugcgauaugcugcgccuuuuugacuucuguaagcaggccauuagacggcugaaaacgccugcgcagaugagcauccagcucauuaauaaggccgugaacgcucugaucaaugaucaacuuauuaugaagaaccaucugcgcgacaucaugggcauccccuauugcaauuacucuaaauauugguaccucaaccacaccgucacagggaagaccucccugccuagauguuggcuggugagcaauggaucuuaccucaacgaaacacacuucagcgacgauauugaacagcaggccgacaauaugaucaccgagcugcuucaaaaagaguauauugaucggcagggcaagacgccgcuggggcucguggaccuguuugucuucuccacaucuuuuuaccugaucagcauuuuccuucaccucguuaaaauccccacccaucgccacgugauuggaaagccuugccccaaaccucauagacugaaccacaugggcaucuguuccugcggccuguauaagcaccccggggugccggucaaguggaaacggugaggacuagucccuguucccagagcccacuuuuuuuucuuuuuuugaaauaaaauagccugucuuucagaucucaaaggcucuuuucagagccaccaaaaaaaaaaaaaaaaaaaaaaaaaaaaaaaaaaaaaaaaaaaaaaaaaaaaaaaaaaaaaaaaagaauu

SEQ ID NO: 30387 - RNA, 1733 nt, Artificial Sequence
  mRNA product Design a-2 (hSL-A64-N5) comprising derived and/or modified sequence from LASV(LASV003-NIG-2008;Clade II)__AIT17580__GPCmut6 (opt5)
aggagaguccgcucagccagguugcagaagcggcuuagcguguguccuaaucuucucucugcguguagguaggccugugccgcaaacaagcuuaccaugggccagaucauuaccuucuuucaagaggugccccacgucaucgaagagguuaugaacauugugcugaucgcccucagccugcuugcuauucugaaggggaucuacaauguggccacaugcggacucuucggccuggucuccuuucuucugcucugugggagaucuugcagcacgaccuauaaaggaguguacgaacugcagacacuggagcucgacauggcgucccugaacauguguaugccucuuucuugcaccaagaauaacagccaucacuauaucaugguuggcaaugaaacagggcuggagcucacccugacaaacaccuccauuaucaaucauaaauucuguaaccuuucugaugcucacaagaaaaaucuguacgaccaugcccucaugagcauuaucuccacguuucaccugagcauuccgaacuucaaucaguaugaggccaugucuugcgauuuuaacggaggcaagaucuccgugcaguacaaucugagccacaccuaugcugucgacgccgcuaaccauuguggcacaauugccaauggggugcuccaaaccuucaugcggauggcguggggaggcucuuacaucgcccuggauuccgggaagggaagcugggacugcaucaugacaucuuaccaguaucuuauuauccagaacaccacgugggaagaucacugucaguuuucccgccccagcccuauuggcuaccuggggcuccugucccaaagaacacgggacaucuauauuucucgcagacuucugggaaccuucacauggacccucagcgauuccgagagcaacgaaacccccggcggcuacugccugacacgguggaugcugaucgaggcugagcucaaauguuuugggaauacggccguugcuaagugcaacgaaaaacaugacgaggaguucugcgauaugcugcgccuuuuugacuucuguaagcaggccaucagacggcugaaagcgccugcccagaugucuauucagcucaucaauaaggcugugaacgcccugauuaaugaucaacuuaucaugaagaaccaucugcgcgacauuaugggaauccccuauugcaauuacuccaaauauugguaccucaaccacaccgucacaggcagaaccagccugccucgguguuggcuggugucuaaugggagcuaccucaacgaaacacacuucuccgacgauaucgaacagcaggcugacaauaugauuaccgagcugcuucaaaaggaguauauggaucgccagggaaaaacgccgcugggccucguggaccuguuugucuucucuaccagcuuuuaccugaucuccauuuuccuucaccucguuaagauccccacacauagacacgugauugggaaaccuugccccaagccucaucggcugaaccacaugggaaucuguagcugcggccuguauaaacaccccggcgugccggucaaguggaagcgcugaggacuagucccuguucccagagcccacuuuuuuuucuuuuuuugaaauaaaauagccugucuuucagaucucaaaggcucuuuucagagccaccaaaaaaaaaaaaaaaaaaaaaaaaaaaaaaaaaaaaaaaaaaaaaaaaaaaaaaaaaaaaaaaaagaauu

SEQ ID NO: 30388 - RNA, 1733 nt, Artificial Sequence
  mRNA product Design a-2 (hSL-A64-N5) comprising derived and/or modified sequence from LASV(LASV035-NIG-2009;Clade II)__AIT17588__GPCmut6 (opt5)
aggagaguccgcucagccagguugcagaagcggcuuagcguguguccuaaucuucucucugcguguagguaggccugugccgcaaacaagcuuaccaugggccagaucauuaccuucuuucaagaggugccccacgucaucgaagagguuaugaacauugugcugaucgcccucagccugcuugcuauucugaaggggaucuacaauguggccacaugcggacucuucggccuggucuccuuucuucugcucugugggagaucuugcagcacgaccuauaaaggaguguacgaacugcagacacuggagcucgacauggcgucccugaacauguguaugccucuuucuugcaccaagaauaacagccaucacuauaucaugguuggcaaugaaacagggcuggagcucacccugacaaacaccuccauuaucaaucauaaauucuguaaccuuucugaugcucacaagaaaaaucuguacgaccaugcccucaugagcauuaucuccacguuucaccugagcauuccgaacuucaaucaguaugaggccaugucuugcgauuuuaacggaggcaagaucuccgugcaguacaaucugagccacgcuuaugccgucgacgcugccaaccauuguggcaccauugcgaauggggugcuccaaacauucaugcggauggccuggggaggcucuuacaucgcucuggauuccgggaagggaagcugggacugcaucaugaccucuuaccaguaucuuauuauccagaacacaaccugggaagaucacugucaguuuucccgccccagcccuauuggcuaccuggggcuccugucccaaagaacgcgggacaucuauauuucucgcagacuucugggaacauucaccuggacacucagcgauuccgagggcaacgaaacccccggcggguacugccugacccgguggaugcugaucgaggccgagcucaaauguuuuggaaauacagcuguugccaagugcaacgaaaaacaugacgaggaguucugcgauaugcugcgccuuuuugacuucuguaagcaggcgaucagacggcugaaagccccugcucagaugagcauucagcucaucaauaaggccgugaacgcucugauuaaugaucaacuuaucaugaagaaccaucugcgcgacauuaugggcauccccuauugcaauuacucuaaauauugguaccucaaccacacggucaccgggaagacaucccugccuagauguuggcuggugagcaauggaucuuaccucaacgaaacccacuucagcgacgauaucgaacagcaggccgacaauaugauuacagagcugcuucaaaaagaguauaucgaucggcagggcaagaccccgcuggggcucguggaccuguuugucuucuccacgucuuuuuaccugauuagcaucuuccuucaccucguuaaaauucccacacaucgccacgugaucggaaagccuugccccaaaccucauagacugaaccacaugggcauuuguuccugcggccuguauaagcaccccggggugccggucaaguggaaacggugaggacuagucccuguucccagagcccacuuuuuuuucuuuuuuugaaauaaaauagccugucuuucagaucucaaaggcucuuuucagagccaccaaaaaaaaaaaaaaaaaaaaaaaaaaaaaaaaaaaaaaaaaaaaaaaaaaaaaaaaaaaaaaaaagaauu

SEQ ID NO: 30389 - RNA, 1733 nt, Artificial Sequence
  mRNA product Design a-2 (hSL-A64-N5) comprising derived and/or modified sequence from LASV(LASV1000-NIG-2009;Clade II)__AIT17782__GPCmut6 (opt5)
aggagaguccgcucagccagguugcagaagcggcuuagcguguguccuaaucuucucucugcguguagguaggccugugccgcaaacaagcuuaccaugggccagaucauuaccuucuuucaagaggugccccacgucaucgaagagguuaugaacauugugcugaucgcccucagccugcuugcuauucugaaggggaucuacaauguggccacaugcggacucuucggccuggucuccuuucuucugcucugugggagaucuugcagcacgaccuauaaaggaguguacgaacugcagacacuggagcucgacauggcgucccugaacauguguaugccucuuucuugcaccaagaauaacagccaucacuauaucaugguuggcaaugaaacagggcuggagcucacccugacaaacaccuccauuaucaaucauaaauucuguaaccuuucugaugcucacaagaaaaaucuguacgaccaugcccucaugagcauuaucuccacguuucaccugagcauuccgaacuucaaucaguaugaggccaugucuugcgauuuuaacggaggcaagaucuccgugcaguacaaucugagccacaccuaugcugucgacgccgcuaaccauuguggcacaauugccaauggggugcuccaaaccuucaugcggauggcguggggaggcucuuacaucgcccuggauuccgggaagggaagcugggacugcaucaugacaucuuaccaguaucuuauuauccagaacaccacgugggaagaucacugucaguuuucccgccccagcccuauuggcuaccuggggcuccugucccaaagaacacgggacaucuauauuucucgcagacuucugggaaccuucacauggacccucagcgauuccgagggcaacgaaacccccggcggguacugccugacacgguggaugcugaucgaggcugagcucaaauguuuuggaaauacggccguugcuaagugcaacgaaaaacaugacgaggaguucugcgauaugcugcgccuuuuugacuucuguaagcaggccaucaaaagacugaagaccccugcgcagaugagcauucagcucaucaauaaggccgugaacgcucugauuaaugaucaacuuaucaugaaaaaccaucugcgggacauuaugggcauccccuauugcaauuacucuaaguauugguaccucaaccacacagucaccgggaaaacaucccugccucgcuguuggcuggugagcaauggaucuuaccucaacgaaacccacuucagcgacgauaucgaacagcaggccgacaauaugauuacggagcugcuucaaaaggaguauaucgauagacagggcaaaacaccgcuggggcucguggaccuguuugucuucuccaccucuuuuuaccugauuagcaucuuccuucaccucguuaagauucccacccaucggcacguggugggaaaaccuugccccaagccucaucgccugaaccacaugggcaucuguuccugcggccuguauaagcaccccggggucccggugaaauggaagagaugaggacuagucccuguucccagagcccacuuuuuuuucuuuuuuugaaauaaaauagccugucuuucagaucucaaaggcucuuuucagagccaccaaaaaaaaaaaaaaaaaaaaaaaaaaaaaaaaaaaaaaaaaaaaaaaaaaaaaaaaaaaaaaaaagaauu

SEQ ID NO: 30390 - RNA, 1733 nt, Artificial Sequence
  mRNA product Design a-2 (hSL-A64-N5) comprising derived and/or modified sequence from LASV(LASV221-NIG-2010;Clade II)__AIT17624__GPCmut6 (opt5)
aggagaguccgcucagccagguugcagaagcggcuuagcguguguccuaaucuucucucugcguguagguaggccugugccgcaaacaagcuuaccaugggccagaucauuaccuucuuucaagaggugccccacgucaucgaagagguuaugaacauugugcugaucgcccucagccugcuugcuauucugaaggggaucuacaauguggccacaugcggacucuucggccuggucuccuuucuucugcucugugggagaucuugcagcacgaccuauaaaggaguguacgaacugcagacacuggagcucgacauggcgucccugaacauguguaugccucuuucuugcaccaagaauaacagccaucacuauaucaugguuggcaaugaaacagggcuggagcucacccugacaaacaccuccauuaucaaucauaaauucuguaaccuuucugaugcucacaagaaaaaucuguacgaccaugcccucaugagcauuaucuccacguuucaccugagcauuccgaacuucaaucaguaugaggccaugucuugcgauuuuaacggaggcaagaucuccgugcaguacaaucugagccacaccuaugcuauugacgccgcuaaccauuguggcacaaucgccaaugggguccuccaaaccuucaugcggauggcguggggaggcucuuacaucgcccuggauuccgggaagggaagcugggacugcauuaugacaucuuaccaguaucuuaucauucagaacaccacgugggaagaucacugucaguuuucccgccccagcccuaucggcuaccuggggcuccugucccaaagaacacgggacauuuauaucucucgcagacuucugggaaccuucacauggacccucagcgauuccgagggcaacgaaacccccggcggguacugccugacacgguggaugcugaucgaggcugagcucaaauguuuuggaaauacggccguggcuaagugcaacgaaaaacaugacgaggaguucugcgauaugcugcgccuuuuugacuucuguaagcaggccauuagacggcugaaaaccccugcgcagaugagcauccagcucauuaauaaggccguuaacgcucugaucaaugaucaacuuauuaugaagaaccaucugcgcgacaucaugggcauccccuauugcaauuacucuaaauauugguaccucaaccacacagugaccgggaagacaucccugccuagauguuggcuggucagcaauggaucuuaccucaacgaaacccacuucagcgacgauauugaacagcaggccgacaauaugaucacggagaugcugcaaaaagaguauauggaucggcagggcaagacaccgcuugggcugguggaccucuuuguguucuccaccucuuuuuaccugauuagcaucuuccugcaccuugucaaaauucccacccaucgccacguuaucggaaagccuugccccaaaccucauagacucaaccacaugggcauuuguuccugcggccuguauaagcaccccggggugccggugaaguggaaacggugaggacuagucccuguucccagagcccacuuuuuuuucuuuuuuugaaauaaaauagccugucuuucagaucucaaaggcucuuuucagagccaccaaaaaaaaaaaaaaaaaaaaaaaaaaaaaaaaaaaaaaaaaaaaaaaaaaaaaaaaaaaaaaaaagaauu

SEQ ID NO: 30391 - RNA, 1733 nt, Artificial Sequence
  mRNA product Design a-2 (hSL-A64-N5) comprising derived and/or modified sequence from LASV(LASV237-NIG-2010;Clade II)__AIT17638__GPCmut6 (opt5)
aggagaguccgcucagccagguugcagaagcggcuuagcguguguccuaaucuucucucugcguguagguaggccugugccgcaaacaagcuuaccaugggccagaucauuaccuucuuucaagaggugccccacgucaucgaagagguuaugaacauugugcugaucgcccucagccugcuugcuauucugaaggggaucuacaauguggccacaugcggacucuucggccuggucuccuuucuucugcucugugggagaucuugcagcacgaccuauaaaggaguguacgaacugcagacacuggagcucgacauggcgucccugaacauguguaugccucuuucuugcaccaagaauaacagccaucacuauaucaugguuggcaaugaaacagggcuggagcucacccugacaaacaccuccauuaucaaucauaaauucuguaaccuuucugaugcucacaagaaagaccuguacgaucaugcccucaugagcauuaucuccacguuucaccugagcauuccgaauuucaaccaguaugaggccaugucuugcgacuuuaauggaggcaagaucuccgugcaguacaaccugagccacaccuaugcugucgaugccgcuaaucauuguggcacaauugccaacggggugcuccaaaccuucaugcggauggcguggggaggcucuuacaucgcccuggacuccgggaagggaagcugggauugcaucaugacaucuuaccaguaucuuauuauccagaauaccacgugggaagaccacugucaguuuucccgccccagcccuauuggcuaccuggggcuccugucccaaagaacacgggauaucuauauuucucgcagacuucugggaaccuucacauggacccucagcgacuccgagggcaacgaaacccccggcggguacugccugacacgguggaugcugaucgaggcugagcucaaauguuuuggaaacacggccguugcuaagugcaaugaaaaacaugaugaggaguucugcgacaugcugcgccuuuuugauuucuguaagcaggccaucagacggcugaaaaccccugcgcagaugagcauucagcucaucaacaaggccgugaaugcucugauuaacgaccaacuuaucaugaagaaucaucugcgcgacauuaugggcauccccuauugcaacuacucuaaauauugguaccucaaucacacagucaccgggaagacaucccugccuagauguuggcuggugagcaacggaucuuaccucaaugaaacccacuucagcgaugacaucgaacagcaggccgauaacaugauuacggagcugcuucaaaaagaguauauggaccggcagggcaagacaccgcuggggcucguggaucuguuugucuucuccaccucuuuuuaccugaucagcauuuuccuucaccucaucaaaauucccacccaucgccacaucacaggaaagccuugccccaaaccucauagacugaaucacaugggcauuuguuccugcggccuguauaagcaccccgggguuccggugaaguggaaacggugaggacuagucccuguucccagagcccacuuuuuuuucuuuuuuugaaauaaaauagccugucuuucagaucucaaaggcucuuuucagagccaccaaaaaaaaaaaaaaaaaaaaaaaaaaaaaaaaaaaaaaaaaaaaaaaaaaaaaaaaaaaaaaaaagaauu

SEQ ID NO: 30392 - RNA, 1733 nt, Artificial Sequence
  mRNA product Design a-2 (hSL-A64-N5) comprising derived and/or modified sequence from LASV(LASV253-NIG-2011;Clade II)__AIT17670__GPCmut6 (opt5)
aggagaguccgcucagccagguugcagaagcggcuuagcguguguccuaaucuucucucugcguguagguaggccugugccgcaaacaagcuuaccaugggccagaucauuaccuucuuucaagaggugccccacgucaucgaagagguuaugaacauugugcugaucgcccucagccugcuugcuauucugaaggggaucuacaauguggccacaugcggacucuucggccuggucuccuuucuucugcucugugggagaucuugcagcacgaccuauaaaggaguguacgaacugcagacacuggagcucgacauggcgucccugaacauguguaugccucuuucuugcaccaagaauaacagccaucacuauaucaugguuggcaaugaaacagggcuggagcucacccugacaaacaccuccauuaucaaucauaaauucuguaaccuuucugaugcucacaagaaaaaucuguacgaccaugcccucaugagcauuaucuccacguuucaccugagcauuccgaacuucaaucaguaugaggccaugucuugcgauuuuaacggaggcaagaucuccgugcaguacaaucugagccacaccuaugcugucgacgccgcuaaccauuguggcacaauugccaauggggugcuccaaaccuucaugcggauggcguggggaggcucuuacaucgcccuggauuccgggaagggaagcugggacugcaucaugacaucuuaccaguaucuuauuauccagaacaccacgugggaagaucacugucaguuuucccgccccagcccuauuggcuaccuggggcuccugucccaaagaacacgggacaucuauauuucucgcagacuucugggaaccuucacauggacccucagcgauuccgagggcaacgaaacccccggcggguacugccugacacgguggaugcugaucgaggcugagcucaaauguuuuggaaauacggccguugcuaagugcaacgaaaaacaugacgaggaguucugcgauaugcugcgccuuuuugacuucuguaagcaggccaucagacggcugaaagcgccugcccagaugagcauucagcucaucaauaaggcugugaacgcccugauuaaugaucaacuuaucaugaagaaccaucugcgcgacauuaugggcauccccuauugcaauuacucuaaauauugguaccucaaccacaccgucacagggagaaccucccugccucgguguuggcuggugagcaauggaucuuaccucaacgaaacacacuucagcgacgauaucgaacagcaggcugacaauaugauuaccgagcugcuucaaaaggaguauaucgaucgccagggcaaaacgccgcuggggcucguggaccuguuugucuucuccacaucuuuuuaccugauuagcaucuuccuucaccucguuaagauucccacccauagacacaucauuggaaaaccuugccccaagccucaucggcugaaccacaugggcaucuguuccugcggccuguauaaacaccccggggugccggugaaguggaagcgcugaggacuagucccuguucccagagcccacuuuuuuuucuuuuuuugaaauaaaauagccugucuuucagaucucaaaggcucuuuucagagccaccaaaaaaaaaaaaaaaaaaaaaaaaaaaaaaaaaaaaaaaaaaaaaaaaaaaaaaaaaaaaaaaaagaauu

SEQ ID NO: 30393 - RNA, 1733 nt, Artificial Sequence
  mRNA product Design a-2 (hSL-A64-N5) comprising derived and/or modified sequence from LASV(LASV254-NIG-2011;Clade II)__AIT17674__GPCmut6 (opt5)
aggagaguccgcucagccagguugcagaagcggcuuagcguguguccuaaucuucucucugcguguagguaggccugugccgcaaacaagcuuaccaugggccagaucauuaccuucuuucaagaggugccccacgucaucgaagagguuaugaacauugugcugaucgcccucagccugcuugcuauucugaaggggaucuacaauguggccacaugcggacucuucggccuggucuccuuucuucugcucugugggagaucuugcagcacgaccuauaaaggaguguacgaacugcagacacuggagcucgacaugaccaaccugaauauguguaugccucuuuccugcacaaagaacaauucucaucacuauaucaugguuggcaacgaaaccgggcuggagcucacacugaccaauacgagcauuaucaaccauaaauucuguaaucuuuccgaugcgcacaagaaaaaccuguacaaucaugcucucaugucuauuaucagcaccuuucaccuguccauuccgaacuucaaucaguaugaggccaugagcugcgacuuuaacggaggcaagaucucugugcaguacaaucugucccacagcuaugccgucgaugcugccaaccauuguggcacaauugcuaacggggugcuccaaaccuucaugcggauggccuggggaggcucuuacaucgcgcuggacuccgggaagggaaauugggauugcaucaugacaagcuaccaguaucuuauuauccagaacaccacgugggaagaccacugucaguuuucucgccccuccccuauuggcuaccuggggcuccugagccaaagaacacgggauaucuauauuucccgcagacuucugggaaccuucacauggacccucucugacagcgagggcaaugaaacccccggcggguacugccugacacgguggaugcugaucgaggccgagcucaaauguuuuggaaacacggcuguugccaagugcaaugaaaaacaugaugaggaguucugcgacaugcugcgccuuuuugauuucuguaagcaggcuaucagacggcugaaaaccccugcccaggcgaacauucagcucaucaauaaggccgugaacgcucugauuaaugaccaacuuaucaugaagaaccaucugcgcgauauuaugggcauccccuauugcaauuacuccaaauauugguaccucaaccacacagucaccgggaagacaagccugccuagauguuggcuggugucuaauggauccuaccucaacgaaacccacuucagcgacgacaucgaacagcaggccgauaauaugauuacggagcugcuucaaaaagaguauauggaccggcagggcaagacaccgcuggggcucguggaucuguuugucuucucuaccagcuuuuaccugaucuccauuuuccuucaccucguuaaaauccccacccaucgccacgugauuggaaagccuugccccaaaccucauagacugaaccacaugggcaucuguucuugcggccuguauaagcaccccggggugccggucaaguggaaacggugaggacuagucccuguucccagagcccacuuuuuuuucuuuuuuugaaauaaaauagccugucuuucagaucucaaaggcucuuuucagagccaccaaaaaaaaaaaaaaaaaaaaaaaaaaaaaaaaaaaaaaaaaaaaaaaaaaaaaaaaaaaaaaaaagaauu

SEQ ID NO: 30394 - RNA, 1733 nt, Artificial Sequence
  mRNA product Design a-2 (hSL-A64-N5) comprising derived and/or modified sequence from LASV(Nig08-A19;Clade III)__ADU56618__GPCmut6 (opt5)
aggagaguccgcucagccagguugcagaagcggcuuagcguguguccuaaucuucucucugcguguagguaggccugugccgcaaacaagcuuaccaugggccagaucgugaccuucuuucaagaggucccccacguuauugaagaggugaugaacaucgugcugauugcccucagcauccuggcuauucuuaaggggcuguacaauaucgccacaugcggacucaucggccuggucacguuccuucugcucuccgggagaucuuguagcaugaccuauaaaggaguguacgaacugcagacacuggagcucaacaugaauacccugaacaugugcaugccucuuuccuguacaaagaauaacucucaucacuauauuaugguuggcaaugaaaccgggcuggagcucacacugaccaacacgagccuucugcaucacaaauuuugcaaucucuccgacgcgcauaagaaaaaccuguacgaucacacccugaugucuaucauuagcacauuccaccucuccaucccgaauuuuaaccaguaugaggcuaugagcugugacuucaauggaggcaagauuaccgugcaguacaaccugucucauuccuaugccaucgaugccgcuaaucacugcggcacagucgccaacggggugcuucaaaccuuuaugcggauggcuuggggaggcagcuacauugcccuggacucugggcgcggaaagugggauuguaucaugacguccuaccaguaucucaucauucagaacacaaccugggaagaccauugccaguucagcagacccucuccuaucggcuaccuggggcuucugucccaacggacacgcgauauuuauaucagcagacggcuccugggaaccuuuaccuggacacuguccgacucugagggcaaugaaacgcccggcggguacugucucacccgcuggaugcugauugaggcggagcuuaaaugcuucggaaacacagccguugcuaaguguaaugaaaaacacgaugaggaauuuugcgacaugcugagacucuucgauuuuugcaagcaggccauccggcgccugaaagcuccugcccagaugagcauccagcuuauuaacaaggcggugaaugcccugaucaacgaccaacucauuaugaagaaucaccugagagauaucaugggcauucccuauuguaacuacuccaaauauugguaccugaaucauaccagcacagggcggaccucucucccucgcugcuggcuggucuccaacggaagcuaccuuaaugagacgcacuucucugacgacaucgaacagcaggcugauaacaugaucacagagaugcugcaaaaggaguaucucgacagacagggcaaaaccccgcuggggcugguggaucuuuucguguuuagcaccuccuucuaccucauuucuaucuuucugcaucuggucaagauucccacacaccggcauaucguuggaaaaccuugucccaagccucaccgccucaaucacaugggcauuugcagcuguggccuguauaaacagcccggggugccggugagauggaagcggugaggacuagucccuguucccagagcccacuuuuuuuucuuuuuuugaaauaaaauagccugucuuucagaucucaaaggcucuuuucagagccaccaaaaaaaaaaaaaaaaaaaaaaaaaaaaaaaaaaaaaaaaaaaaaaaaaaaaaaaaaaaaaaaaagaauu

SEQ ID NO: 30395 - RNA, 1736 nt, Artificial Sequence
  mRNA product Design a-2 (hSL-A64-N5) comprising derived and/or modified sequence from LASV(G1180-SLE-2010;Clade IV)__AIT17168__GPCmut6 (opt5)
aggagaguccgcucagccagguugcagaagcggcuuagcguguguccuaaucuucucucugcguguagguaggccugugccgcaaacaagcuuaccaugggccagaucgugaccuucuuucaagaggucccccacguuauugaagaggugaugaacaucgugcugauugcccucagcauccuggcuguccuuaaggggcuguacaauuucgccacaugcggacucgugggccugcuuacguuucugcuccugugugggagauccugcaccgcgucucgguauaaaggaguuuacgaacugcagacacucgagcugaacauggaaacccuuaauauguguaugccucugagcugcacaaagaacaauucccaucacuauauuauggugggcaacgagaccgggcucgagcugacacuuaccaauacgucuaucaucaaccauaaauucuguaaucugagcgacgcucacaagaaaaaccucuacgaucaugcccugauguccauuaucucuaccuuucaccugagcauuccgaauuucaaccaguaugaagccauguccugcgacuuuaauggaggcaagaucagcguccaguacaaccucucucacuccuaugcuggcgaugccgcuaaucauugugggacaguggccaacggaguucugcaaaccuucaugcgcauggcguggggcgggagcuacauugcccuugacucuggacacggcuccugggauugcaucaugacaagcuaccaguaucugauuauccagaacaccacgugggaggaccauugucaguuuucuagacccuccccuaucggguaccucggacugcuuagccaacggacacgcgauauuuauaucuccagacggcugcucggcaccuucacauggacccugucugacagcgaaggcaaggauacccccgggggauacugccugacacgcuggaugcucauugaggcugagcugaaauguuuuggcaauacggccguggcuaagugcaacgaaaaacacgacgaggaguucugcgauaugcuuagacuguuugacuucuguaagcaggccauccagcggcucaaagcgccugcccagauguccauucaacugaucaauaaggcugucaacgcccuuaucaaugaucagcugauuaugaagaaccaccuccgcgacaucauggggauucccuauugcaauuacagcaaauauugguaccugaaccauaccacaaccggaaagacaucucugccuaaauguuggcucguguccaauggcagcuaccugaacgaaacccacuucucugacgauaucgaacagcaagcugacaauaugauuacggagaugcuucagaaggaguauauggaaagacaggggaaaacaccgcugggacucguggaucuguuugucuucagcaccuccuuuuaccugaucucuaucuuccuucaucucguuaagauucccacccaccggcauaucgugggcaaaagcugcccuaagccccaccgccugaaccacaugggcauuuguuccugcgggcuguauaagcagccuggagugcccgucaaauggaagagaugaggacuagucccuguucccagagcccacuuuuuuuucuuuuuuugaaauaaaauagccugucuuucagaucucaaaggcucuuuucagagccaccaaaaaaaaaaaaaaaaaaaaaaaaaaaaaaaaaaaaaaaaaaaaaaaaaaaaaaaaaaaaaaaaagaauu

SEQ ID NO: 30396 - RNA, 1736 nt, Artificial Sequence
  mRNA product Design a-2 (hSL-A64-N5) comprising derived and/or modified sequence from LASV(G1442-SLE-2011;Clade IV)__AIT17180__GPCmut6 (opt5)
aggagaguccgcucagccagguugcagaagcggcuuagcguguguccuaaucuucucucugcguguagguaggccugugccgcaaacaagcuuaccaugggccagaucgugaccuucuuucaagaggucccccacguuauugaagaggugaugaacaucgugcugauugcccucagcauccuggcuguccuuaaggggcuguacaauguggccacaugcggacucauuggccugguuacguuccuucugcucugugggagauccugcaccacaacccuguauaaaggaguguacgaacugcagacacucgagcugaacauggaaacccuuaauauguguaugccucugucuugcacaaagaacaauagccaucacuauauccgggucggcaacgagaccgggcucgagcugacgcuuaccaauacauccaucauuaaccauaaauuuuguaaucugucugacgcgcacaagaaaaaccucuacgaucaugcucugaugagcaucauuuccaccuuccaccugucuaucccgaauuuuaaccaguaugaagccaugagcugcgacuucaauggaggcaagauuuccgugcaguacaaccucagccacucuuaugccggcgaugcugccaaucauugugggacaguugcuaacggagugcugcaaaccuuuaugcgcauggccuggggcggguccuacaucgcgcuugacagcggaagaggcaacugggauugcauuaugacgucuuaccaguaucugaucauccagaauacaaccugggacgaucacugucaguucucccggcccagcccuauuggguaccucggacugcuuucucaacgcacaagagacgucuauaucucccggcgccugcucggcaccuuuaccuggacacugagcgauuccgagggcaaggacacgcccgggggauacugccugaccagauggaugcucauugaagccgagcugaaauguuucggcaacacagcuguggccaagugcaaugagaaacaugaugaagaguuuugcgacaugcuucggcuguucgauuuuuguaagcaggcuauccagcgccucaaagccccugcgcagaugucuauucaacugaucaacaaggccgugaaugcucuuaucaacgaccagcugauuaugaagaaucaccucagagacaucauggggauucccuauugcaacuacagcaaauauugguaccugaauaacaccgccacaggaaagaccucccugccuaaauguuggcucaucagcaauggcucuuaccugaacgaaacgcacuucuccgaugacauugagcaggaagcugauaauaugaucacagagaugcuucaaaaggaguauauggaacggcaggggaaaaccccgcugggacucgucgaccuguucguuuuuagcaccucuuucuaccugaucagcauuuuucuucaucucgugaagauccccacacaccgccauauugugggcaaauccugcccuaagccccacagacugaaccauaugggcaucuguucuugcgggcuguauaagcagccuggaguccccgugcgguggaaacgcugaggacuagucccuguucccagagcccacuuuuuuuucuuuuuuugaaauaaaauagccugucuuucagaucucaaaggcucuuuucagagccaccaaaaaaaaaaaaaaaaaaaaaaaaaaaaaaaaaaaaaaaaaaaaaaaaaaaaaaaaaaaaaaaaagaauu

SEQ ID NO: 30397 - RNA, 1736 nt, Artificial Sequence
  mRNA product Design a-2 (hSL-A64-N5) comprising derived and/or modified sequence from LASV(G3010-SLE-2013;Clade IV)__AIT17344__GPCmut6 (opt5)
aggagaguccgcucagccagguugcagaagcggcuuagcguguguccuaaucuucucucugcguguagguaggccugugccgcaaacaagcuuaccaugggccagaucgugaccuucuuucaagaggucccccacguuauugaagaggugaugaacaucgugcugauugcccucagcauccuggcuguccuuaaggggcuguacaauuucgccacaugcggacucgugggccugguuacguuucuucugcucugugggagauccugcaccacaucucuguauaaaggaguguacgaacugcagacccucgagcugaacauggaaacacuuaauauguguaugccucugagcugcaccaagaacaauucccaucacuauauuauggucggcaacgagacagggcucgagcugacccuuacgaauaccucuaucaucaaccauaaauucuguaaucugagcgacgcgcacaagaaaaaccucuacaaucaugcucugauguccauuaucucuacauuucaccugagcauuccgaacuucaaucaguaugaagccauguccugcgauuuuaacggaggcaagaucagcgugcaguacaaucucucucacuccuaugccggcgacgcugccagccauugugggaccguugcuaacggagugcugcaaacauucaugcggauggccuggggcgggucuuacauugcgcuugauuccggauacggcaagugggacugcaucaugaccagcuaucaguaccugauuauccagaacacgacaugggaggaucacugucaguuuucucgccccuccccuaucggguaucucggacugcuuagccaaagaacccgggacauuuacaucucccgcagacugcucggcacauucaccuggacccugucugauagcgaaggcaaagacacacccgggggauauugccugacgcgguggaugcucauugaggccgagcugaaguguuuuggcaauaccgcugucgccaaaugcaacgaaaagcaugaugaggaguucugcgacaugcuucgccuguuugauuucuguaaacaggcuauccagagacucaagaccccugcccagauguccauucaacugaucaauaaggcggugaacgcccuuaucaaugaccagcugauuaugaaaaaccaccuccgggauaucauggggauucccuacugcaauuauagcaaguacugguaccugaaccacacaacaaccggaaaaacgucucugccuaaguguuggcucguguccaauggcagcuaucugaacgaaacacauuucucugacgacaucgaacagcaagcugauaauaugauuaccgagaugcuucagaaagaguacauggaacgccaggggaagaccccgcugggacucgucgaccuguuuguuuucagcacauccuuuuaucugaucucuaucuuccuucaccucgugaaaauucccacccauagacacaucgugggcaagagcugcccuaagccccaucggcugaaccacaugggcauuuguuccugcgggcuguacaaacagccuggaguccccgugcgcuggaagagaugaggacuagucccuguucccagagcccacuuuuuuuucuuuuuuugaaauaaaauagccugucuuucagaucucaaaggcucuuuucagagccaccaaaaaaaaaaaaaaaaaaaaaaaaaaaaaaaaaaaaaaaaaaaaaaaaaaaaaaaaaaaaaaaaagaauu

SEQ ID NO: 30398 - RNA, 1736 nt, Artificial Sequence
  mRNA product Design a-2 (hSL-A64-N5) comprising derived and/or modified sequence from LASV(G502-SLE-2009;Clade IV)__AIT17126__GPCmut6 (opt5)
aggagaguccgcucagccagguugcagaagcggcuuagcguguguccuaaucuucucucugcguguagguaggccugugccgcaaacaagcuuaccaugggccagaucgugaccuucuuucaagaggucccccacguuauugaagaggugaugaacaucgugcugauugcccucagcauccuggcuguccuuaaggggcuguacaauuucgccacaugcggacucgugggccugcuuacguuucugcuccugugugggagauccugcaccacaggacuguauaaaggcguuuacgaacuccagacccuggagcuuaacauggaaacacugaauauguguaugccucucucuugcaccaagaacaauagccaucacuauauuaugguggggaacgagacaggacuggagcuuacccugacgaauaccuccaucaucaaccauaaauucuguaaucucucugacgcgcacaagaaaaaccuguacgaucaugcucugaugagcauuaucuccacauuucaccucucuauuccgaauuucaaccaguaugaagccaugagcugcgacuuuaauggcggcaagaucuccguccaguacaaccugagccacucuuaugccggggaugcugccgaccauuguggaaccguggcuaauggcguucuucaaacauucaugcggauggccuggggaggguccuacauugcgcuggauagcggccgcgggagaugggacugcaucaugaccucuuaccaguaucucauuauccagaacacgacaugggaggaucacugucaguuuucccggcccagcccuaucggauaccugggccuucugucucaacgcaccagagacauuuauaucucccggcgccuccugggcacauucaccuggacccugagcgauuccgaagggaaggacacacccggaggcuacugccucacgagauggaugcugauugaggccgagcuuaaauguuuugggaacaccgcuguggccaagugcaaugaaaaacaugaugaggaguucugcgacaugcugcggcucuuugauuucuguaagcaggcuauccagcgccugaaagccccugcgcagaugucuauucaacuuaucaacaaggccgucaaugcucugaucaacgaccagcucgugaugaagaaucaccugagagacauuaugggaauccccuauugcaacuacagccgguauugguaccugaaucacacaaccacaggccgcaccucccucccuaaauguuggcuggugagcaacgggucuuaccuuaaugaaacgcauuucuccgaugacauugaacagcaagccgauaacaugaucacagagaugcugcagaaggaguauauggaaagacagggaaaaaccccgcucggccuggucgaccuguuuguuuucagcaccucuuuuuaccuuauuagcaucuuccuccaccuggugaagauccccacacaucggcacauugugggcaaauccugcccuaagccccaucgccugaaucacauggggaucuguucuugcggacucuauaaacagccuggcguccccgugaaguggaagagaugaggacuagucccuguucccagagcccacuuuuuuuucuuuuuuugaaauaaaauagccugucuuucagaucucaaaggcucuuuucagagccaccaaaaaaaaaaaaaaaaaaaaaaaaaaaaaaaaaaaaaaaaaaaaaaaaaaaaaaaaaaaaaaaaagaauu

SEQ ID NO: 30399 - RNA, 1736 nt, Artificial Sequence
  mRNA product Design a-2 (hSL-A64-N5) comprising derived and/or modified sequence from LASV(G733-SLE-2010;Clade IV)__AIT17154__GPCmut6 (opt5)
aggagaguccgcucagccagguugcagaagcggcuuagcguguguccuaaucuucucucugcguguagguaggccugugccgcaaacaagcuuaccaugggccagaucgugaccuucuuucaagaggucccccacguuauugaagaggugaugaacaucgugcugauugcccucagcauccuggcuguccuuaaggggcuguacaauuucgccacaugcggaauugugggccucguuuccuuucugcuucugugugggagaucuugcacgaccagccucuauaaaggaguguacgaacugcagacacuggagcucaacauggaaacccugaauauguguaugccucuuuccugcacaaagaacaauucucaucacuauaucauggucggcaacgagaccgggcuggagcucacacugaccaauacgagcaucauuaaccauaaauucuguaaucuuuccgacgcgcacaagaaaaaccuguacgaucaugcucucaugucuaucauuagcaccuuucaccuguccaucccgaauuucaaccaguaugaagccaugagcugcgacuuuaauggaggcaagauuucugugcaguacaaccugucccacagcuaugccggcgaugcugccaaucauugugggacaaucgcuaacggaguucuccaaaccuucaugcggauggccuggggcgggucuuacauugcgcuggacuccggacgcgauagaugggacugcaucaugacaagcuaccaguaucuuaucauucagaacaccacgugggaggaucacugucaguuuucucggcccuccccuaucggcuaccuggggcuccugagccaacgcacaagagacauuuauaucucccggcgccuucugggaaccuucacauggacccucucugauagcgaaggcaaggacacccccggcggguacugccugacaagauggaugcugauugaggccgagcucaaauguuuuggaaauacggcuguggccaagugcaacgaaaaacaugaugaggaguucugcgacaugcugcggcuuuuugauuucuguaagcaggcuauccagcgccugaaagccccugcgcagauguccauccaacucauuaauaaggccgucaacgcucugaucaaugaccagcuuauuaugaagaaccaccugagagacaucaugggcauucccuauugcaauuacagcaaauauugguaccucaaccacaccacaaccgggaagacaucucugccuaaauguuggcugguguccaauggaagcuaccucaacgaaacccauuucucugaugacaucgaacagcaagccgauaauaugaucacggagaugcugcagaaggaguauauggaacggcagggcaaaacaccgcuugggcugguggaccucuuugucuucagcaccuccuuuuaccugauuucuaucuuccugcaccuuguuaagauucccacccaucgccacguggugggaaaaagcugcccuaagccccauagacucaaccacaugggcaucuguuccugcggccuguaugggcagccuggaguccccgugaaguggaaacggugaggacuagucccuguucccagagcccacuuuuuuuucuuuuuuugaaauaaaauagccugucuuucagaucucaaaggcucuuuucagagccaccaaaaaaaaaaaaaaaaaaaaaaaaaaaaaaaaaaaaaaaaaaaaaaaaaaaaaaaaaaaaaaaaagaauu

SEQ ID NO: 30400 - RNA, 1736 nt, Artificial Sequence
  mRNA product Design a-2 (hSL-A64-N5) comprising derived and/or modified sequence from MOPV/LASV reassortant(IGS-1;Clade IV)__AFY05576__GPCmut6 (opt5)
aggagaguccgcucagccagguugcagaagcggcuuagcguguguccuaaucuucucucugcguguagguaggccugugccgcaaacaagcuuaccaugggccagaucgugaccuucuuucaagaggucccccacguuauugaagaggugaugaacaucgugcugauugcccucagcguccuggcugugcuuaaggggcuguacaauuucgccacaugcggacucguuggccuggugacguuucuucugcucugugggagauccugcaccacaucucuguauaaaggagucuacgaacugcagacccucgagcugaacauggaaacacuuaauauguguaugccucugagcugcaccaagaacaauucccaucacuauaucauggugggcaacgagacagggcucgagcugacccuuacgaauaccucuauuaucaaccauaaauucuguaaucugagcgacgcgcacaagaaaaaccucuacgaucaugcucugauguccaucauuucuacauuucaccugagcaucccgaauuucaaccaguaugaagccauguccugcgacuuuaauggaggcaagauuagcguucaguacaaccucucucacuccuaugccggcgaugcugccaaucauugugggaccguggcuaacggaguccugcaaacauucaugcggauggccuggggcgggagcuacaucgcgcuugacucuggacgcggcaacugggauugcauuaugaccuccuaccaguaucugaucauucagaauacgacaugggaggaccacugucaguuuagcagacccucuccuaucggguaccucggacugcuuucccaacggacccgcgauaucuauauuagcagacggcugcucggcacauucaccuggacccuguccgacucugaaggcgaggauacacccgggggauacugccugacgcgcuggaugcucaucgaggccgaacugaaguguuuuggcaacaccgcuguggccaaaugcaaugagaagcaugacgaagaguucugcgauaugcuuagacuguuugacuucuguaaacaggcuauucagcggcucaaggccccugcgcagaugagcauccaacugauuaacaaagccgugaaugcucuuaucaacgaucagcugaucaugaagaaucaccuccgcgacauuauggggauccccuauugcaacuacuccaaguauugguaccugaaucacacaaccacaggaagaaccagccugccuaaauguuggcucgucucuaacggcuccuaccugaaugaaacgcauuucagcgacgauauugagcagcaagccgacaacaugaucacagagaugcuucagaaggaauauauggagcggcaggggaaaaccccgcugggacucguugaucuguuuguguucucuaccagcuuuuaccugauuuccaucuuccuucaccucgugaagauccccacacaucgccacauugucggcaaaucuugcccuaagccccauagacugaaucacaugggcaucuguagcugcgggcuguauaaacagccuggagugcccguuaaguggaagcggugaggacuagucccuguucccagagcccacuuuuuuuucuuuuuuugaaauaaaauagccugucuuucagaucucaaaggcucuuuucagagccaccaaaaaaaaaaaaaaaaaaaaaaaaaaaaaaaaaaaaaaaaaaaaaaaaaaaaaaaaaaaaaaaaagaauu

SEQ ID NO: 30401 - RNA, 1736 nt, Artificial Sequence
  mRNA product Design a-2 (hSL-A64-N5) comprising derived and/or modified sequence from LASV(LM765-SLE-2012;Clade IV)__AIT17814__GPCmut6 (opt5)
aggagaguccgcucagccagguugcagaagcggcuuagcguguguccuaaucuucucucugcguguagguaggccugugccgcaaacaagcuuaccaugggccagaucgugaccuucuuucaagaggucccccacguuauugaagaggugaugaacaucgugcugauugcccucagcauccuggcuguccuuaaggggcuguacaauuucgccacaugcggacucgugggccugguuacguuucuucugcucugugggagauccugcaccacaucucuguauaaaggaguguacgaacugcagacccucgagcugaacauggaaacacuuaauauguguaugccucugagcugcaccaagaacaauucccaucacuauauuauggucggcaacgagacagggcucgagcugacccuuacgaauaccucuaucaucgaccauaaauucuguaaccugagcgaugcgcaccggaagaaucucuacgaccaugcucugauguccauuaucucuacauuucaccugagcauuccgaacuucaaucaguaugaagccauguccugcgauuuuaacggaggcaaaaucagcgugcaguacaaucucucucacuccuaugccaaggacgcugccgaucauuguggcaccguugcuaacggggugcugcaaacauucaugcgcauggccuggggaggcagcuacauugcgcuugacucugggagaggacggugggauugcaucaugaccuccuaccaguaucugauuauccagaauacgacaugggaggaccacugucaguuuagccgccccucuccuaucggcuaccucgggcugcuuucccaaagaacccgggauauuuauaucagccgcagacugcucggaacauucaccuggacccuguccgacucugaaggcaaggauacacccggcggguacugccugacgcgguggaugcucauugaggccgagcugaaauguuuuggaaacaccgcugucgccaagugcaacgaaaaacaugacgaggaguucugcgauaugcuucgccuguuugacuucuguaagcaggcuauccagagacucaaagccccugcgcagaugagcauucaacugaucaauaaggccgugaacgcucuuaucaaugaccagcugauuaugaagaaccaccuccgggauaucaugggcauucccuauugcaauuacuccaaauauugguaccugaaccacacaaccacagggaagaccagccugccuaaauguuggcucgugucuaauggauccuaccugaacgaaacgcauuucagcgacgauaucgaacagcaagccgacaauaugauuacagagaugcuucagaaggaguauauggaacgccagggcaaaaccccgcuggggcucgucgaucuguuuguuuucucuaccagcuuuuaccugaucuccaucuuccuucaccucgugaagauucccacacauagacacaucgugggaaaaccuugccccaagccucaucggcugaaccacaugggcauuuguucuugcggccuguauaagcagcccggggucccggugaaauggaagcgcugaggacuagucccuguucccagagcccacuuuuuuuucuuuuuuugaaauaaaauagccugucuuucagaucucaaaggcucuuuucagagccaccaaaaaaaaaaaaaaaaaaaaaaaaaaaaaaaaaaaaaaaaaaaaaaaaaaaaaaaaaaaaaaaaagaauu

SEQ ID NO: 30402 - RNA, 1736 nt, Artificial Sequence
  mRNA product Design a-2 (hSL-A64-N5) comprising derived and/or modified sequence from LASV(LM776-SLE-2012;Clade IV)__AIT17824__GPCmut6 (opt5)
aggagaguccgcucagccagguugcagaagcggcuuagcguguguccuaaucuucucucugcguguagguaggccugugccgcaaacaagcuuaccaugggccagaucgugaccuucuuucaagaggucccccacguuauugaagaggugaugaacaucgugcugauugcccucagcauccuggcuguccuuaaggggcuguacaauuucgccacaugcggacucgugggccugguuacguuucuucugcucugugggagauccugcaccacaucuguguauaaaggagucuacgaacugcagacccuggagcucaacauggaaacacugaauauguguaugccucuuagcugcaccaagaacaauucccaucacuauauuauggugggcaacgagacagggcuggagcucacccugacgaauaccucuaucaucaaccauaaauucuguaaucuuagcgacgcgcacaagaaaaaccuguacgaucaugcucucauguccauuaucucuacauuucaccugagcauuccgaauuucaaccaguaugaagccauguccugcgacuuuaauggaggcaagaucagcguucaguacaaccugucucacuccuaugccggcgaugcugccaaucauugugggaccguggcuaacggaguccuccaaacauucaugcggauggccuggggcgggagcuacauugcgcuggacucuggacacggcaagugggauugcaucaugaccuccuaccaguaucuuauuauccagaacacgacaugggaggaccauugucaguuuagccgccccucuccuaucggguaccugggacuccugucccaaagaacccgggauauuuauaucagccgcagacuucugggcacauucaccuggacccucuccgacucugaaggcaaagauacacccgggggauacugccugacgcgguggaugcugauugaggccgagcucaaguguuuuggcaauaccgcuguggccaaaugcaacgaaaagcacgacgaggaguucugcgauaugcugcgccuuuuugacuucuguaaacaggcuauccagagacugaaggccccugcgcagaugagcauucaacucaucaauaaggccgugaacgcucugaucaaugaucagcuuauuaugaaaaaccaucugcgggacaucauggggauucccuauugcaauuacuccaaguauugguaccucaaccacacaaccacaggaaaaaccagccugccuaaguguuggcuggucucuaauggcuccuaccucaacgaaacgcacuucagcgacgauaucgaacagcaagccgacaauaugauuacagagaugcugcagaaagaguauauggaacgccaggggaagaccccgcuuggacugguugaucucuuuguguucucuaccagcuuuuaccugaucuccaucuuccugcaucuugugaaaauucccacacacagacauaucgucggcaagucuugcccuaagccccaccggcucaaccacaugggcauuuguagcugcgggcuguauaaacagccuggagugcccguucgcuggaagagaugaggacuagucccuguucccagagcccacuuuuuuuucuuuuuuugaaauaaaauagccugucuuucagaucucaaaggcucuuuucagagccaccaaaaaaaaaaaaaaaaaaaaaaaaaaaaaaaaaaaaaaaaaaaaaaaaaaaaaaaaaaaaaaaaagaauu

SEQ ID NO: 30403 - RNA, 1736 nt, Artificial Sequence
  mRNA product Design a-2 (hSL-A64-N5) comprising derived and/or modified sequence from LASV(Mad39;Clade IV)__ANH09722__GPCmut6 (opt5)
aggagaguccgcucagccagguugcagaagcggcuuagcguguguccuaaucuucucucugcguguagguaggccugugccgcaaacaagcuuaccaugggccagaucgugaccuucuuucaagaggucccccacguuauugaagaggugaugaacaucgugcugauugcccucagcauccuggcuguccuuaaggggcuguacaauguggccacaugcggacucauuggccugguuacguuccuucugcucugugggagauccugcaccacaacccuguauaaaggaguguacgaacugcaggcgcucgagcugaacauggaaacacuuaauauguguaugccucugucuugcaccaagaacaauagccaucacuauauccgggucggcaacgagacagggcucgagcugacccuuacgaauaccucccugaucaaccauaaauuuuguaaucucucugacgcucacaagaaaaaccuguacgaucaugcccugaugagcauuaucuccacauuccaccucucuauuccgaauuuuaaccaguaugaagccaugagcugcgacuucaaugauggaaagaucuccgugcaguacaaccugagccacaccuaugcuggcgacacagccaaucauuguggcaccguugcuaacggggugcuucaaacguuuaugcgcauggccuggggaggcucuuacauugcgcuggauuccgggagaggaggcugggacugcaucaugacaagcuaccaguaucucauuauccagaacaccacaugggaggaucacugucaguucucucggcccuccccuaucggguaccugggacuucugagccaacgcaccagagacauuuauaucucucggcgccuccugggcaccuuuacauggacgcuguccgauagcgaaggcaaggacacccccgggggauacugccucacaagauggaugcugauugaggccgagcuuaaauguuucggcaauaccgcugucgccaagugcaacgaaaaacaugaugaggaauuuugcgacaugcugcgccucuucgauuuuuguaagcaggcuauccagcggcugaaagccccugcgcagauguccauucaacuuaucaauaaggccgugaacgcucugaucaaugaccagcucauuaugaagaaccaccugagagacaucauggggauucccuauugcaauuacucuaaauauugguaccugaaccacacagugaccggaaagacgagccucccuaaauguuggcuggucuccaauggcagcuaccuuaacgagacacauuucucugaugacaucgaacagcaagccgauaauaugauuaccgagaugcugcagaaggaguauauggaacggcaggggaaaaccccgcucggacugguugaccuguucguguuuuccaccagcuucuaccuuaucucuaucuuucuccaccuggugaagauucccacacaucgccacgucgugggcaaaccuugccccaagccucauagacugaaccacaugggcaucuguagcugcggguucuauaagcagcccggaguuccggugcgguggaaacgcugaggacuagucccuguucccagagcccacuuuuuuuucuuuuuuugaaauaaaauagccugucuuucagaucucaaaggcucuuuucagagccaccaaaaaaaaaaaaaaaaaaaaaaaaaaaaaaaaaaaaaaaaaaaaaaaaaaaaaaaaaaaaaaaaagaauu

SEQ ID NO: 30404 - RNA, 1736 nt, Artificial Sequence
  mRNA product Design a-2 (hSL-A64-N5) comprising derived and/or modified sequence from LASV(Z0947-SLE-2011;Clade IV)__AIT17840__GPCmut6 (opt5)
aggagaguccgcucagccagguugcagaagcggcuuagcguguguccuaaucuucucucugcguguagguaggccugugccgcaaacaagcuuaccaugggccagaucgugaccuucuuucaagaggucccccacguuauugaagaggugaugaacaucgugcugauugcccucagcauccuggcuguccuuaaggggcuguacaauuucgccacaugcggacucgugggccugguuacguuucuucugcucugugggagauccugcaccauuucucuguauaaaggaguguacgaacugcagacacucgagcugaacauggaaacccuuaauauguguaugccucugagcugcacaaagaacaauucccaucacuauaucauggucggcaacgagaccgggcucgagcugacacuuaccaauacgucuaucauuaaccauaaauucuguaaucugagcgacgcgcacaagaaaaaccucuacgaucaugcucugauguccaucauuucuaccuuucaccugagcaucccgaauuucaaccaguaugaagccauguccugcgacuuuaauggaggcaagauuagcgugcaguacaaccucucucacuccuaugccggcgaugcugccaaucauugugggacaguugcuaacggagugcugcaaaccuucaugcggauggccuggggcgggagcuacaucgcgcuugacucuggacgcgauagaugggacugcauuaugacauccuaccaguaucugaucauccagaacaccacgugggaggaucacugucaguuuagccggcccucuccuauuggcuaccucgggcugcuuucccaacgcacaagagacaucuauauuagccggcgccugcucggaaccuucacauggacccuguccgauucugaaggcaaggacacccccggcggguacugccugacaagauggaugcucaucgaggccgagcugaaauguuuuggaaauacggcugucgccaagugcaacgaaaaacaugaugaggaguucugcgacaugcuucggcuguuugauuucuguaagcaggcuauucagcgccucaaagccccugcgcagaugagcauccaacugaucaauaaggccgugaacgcucuuauuaaugaccagcugaucaugaagaaccaccucagagacauuaugggcauccccuauugcaauuacuccaaauauugguaccugaaccacaccacaaccgggaagacaagccugccuaaauguuggcucgugucuaauggauccuaccugaacgaaacccauuucagcgaugacauugaacagcaagccgauaauaugaucacggagaugcuucagaaggaguauauggaacggcagggcaaaacaccgcuggggcucgucgaccuguuuguuuucucuaccagcuuuuaccugaucuccauuuuccuucaccucgugaagauccccacccaucgccacauugugggaaaaccuugccccaagccucauagacugaaccacaugggcaucuguucuugcggccuguauaagcagcccggggucccggugaaauggaagcggugaggacuagucccuguucccagagcccacuuuuuuuucuuuuuuugaaauaaaauagccugucuuucagaucucaaaggcucuuuucagagccaccaaaaaaaaaaaaaaaaaaaaaaaaaaaaaaaaaaaaaaaaaaaaaaaaaaaaaaaaaaaaaaaaagaauu

SEQ ID NO: 30405 - RNA, 1767 nt, Artificial Sequence
  mRNA product Design a-2 (hSL-A100) comprising derived and/or modified sequence from LASV(Josiah;Clade IV)__NP_694870__GPCmut6 (opt1)
aggagaguccgcucagccagguugcagaagcggcuuagcguguguccuaaucuucucucugcguguagguaggccugugccgcaaacaagcuuaccaugggccagaucgugaccuucuuccaggaggucccccacgugaucgaggaggugaugaacaucguccugaucgcccucagcgugcuggccgugcugaaggggcucuacaacuucgcgaccugcggccuggucgggcuggugacguuccuccugcugugcggccgcuccugcaccaccagccucuacaaggggguguacgagcugcagacccuggagcucaacauggagacgcugaacaugugcaugccgcuguccugcaccaagaacaacagccaccacuacaucauggucggcaacgagaccggccucgagcugacgcugaccaacaccuccaucaucaaccacaaguucugcaaccucagcgacgcccacaagaagaaccuguacgaccacgcccugauguccaucaucagcaccuuccaccucuccauccccaacuucaaccaguacgaggccaugagcugcgacuucaacgggggcaagaucuccgugcaguacaaccugagccacuccuacgccggggacgcggccaaccacugcggcacgguggccaacgggguccugcagaccuucaugcggauggccuggggcggcagcuacaucgcgcucgacuccgggcgcggcaacugggacugcaucaugaccagcuaccaguaccugaucauccagaacaccacgugggaggaccacugccaguucucccggcccagccccaucggguaccugggccuccugucccagcgcacccgggacaucuacaucagccgccggcugcucggcaccuucaccuggacgcugagcgacuccgaggggaaggacaccccgggcggguacugccugacccgcuggaugcucaucgaggccgagcugaagugcuucggcaacaccgccguggccaagugcaacgagaagcacgacgaggaguucugcgacaugcugcggcuguucgacuucugcaagcaggccauccagcgccugaaggcgcccgcccagaugagcauccagcugaucaacaaggccgugaacgcccucaucaacgaccagcugaucaugaagaaccaccuccgggacaucauggggauccccuacugcaacuacuccaaguacugguaccucaaccacacgaccaccggccgcaccagccugcccaagugcuggcuggucuccaacggcagcuaccucaacgagacgcacuucuccgacgacaucgagcagcaggccgacaacaugaucaccgagaugcugcagaaggaguacauggagcggcaggggaagacgccccugggccucguggaccuguucguguucagcaccuccuucuaccugaucagcaucuuccugcaccucgucaagaucccgacccaccgccacaucguggggaaguccugccccaagccccaccggcugaaccacaugggcaucugcagcugcgggcuguacaagcagcccggcgugccggucaaguggaagcgcugaggacuagucccuguucccagagcccacuuuuuuuucuuuuuuugaaauaaaauagccugucuuucagaucucaaaggcucuuuucagagccaccaaaaaaaaaaaaaaaaaaaaaaaaaaaaaaaaaaaaaaaaaaaaaaaaaaaaaaaaaaaaaaaaaaaaaaaaaaaaaaaaaaaaaaaaaaaaaaaaaaaaa

SEQ ID NO: 30406 - RNA, 1764 nt, Artificial Sequence
  mRNA product Design a-2 (hSL-A100) comprising derived and/or modified sequence from LASV(LP;Clade I)__AAF86701__GPCmut6 (opt1)
aggagaguccgcucagccagguugcagaagcggcuuagcguguguccuaaucuucucucugcguguagguaggccugugccgcaaacaagcuuaccaugggccagaucaucaccuucuuccaggaggugccccacgucaucgaggaggugaugaacaucgugcugaucgcccucagccugcuggccauccucaaggggcuguacaacaucgcgaccugcggcaucaucgggcuggucgccuuccucuuccugugcggcaaguccugcagccugacgcucaagggcggguacgagcugcagacccuggagcucaacauggagacccugaacaugugcaugccgcuguccugcacgaagaacagcucccaccacuacauccgcgugggcaacgagaccgggcucgagcugacccugaccaacacgagcaucaucaaccacaaguucugcaaccucuccgacgcccacaagaagaaccuguacgaccacgcccugaugagcaucaucuccaccuuccaccucagcauccccaacuucaaccaguacgaggccauguccugcgacuucaacggcgggaagaucagcgugcaguacaaccugucccacagcuacgcgggcgacgccgccgagcacugcgggaccgucgccaacggcgugcugcagaccuucaugcggauggcguggggcgggcgcuacaucgcccucgacuccggcaaggggaacugggacugcaucaugacgagcuaccaguaccugaucauccagaacaccaccugggaggaccacugccaguucucccggcccagccccaucggcuaccugggccuccugucccagcgcacccgggacaucuacaucagccgccggcugcucgggacguucaccuggacccugagcgacuccgagggcaacgagacccccgggggcuacugccugacgcgcuggaugcucaucgaggccgagcugaagugcuucgggaacaccgccguggccaagugcaacgagaagcacgacgaggaguucugcgacaugcugcggcuguucgacuucugcaagcaggcgauccgccggcugaaggcccccgcccagaugagcauccagcugaucaacaaggccgucaacgcccucaucaacgaccagcugaucaugaagaaccaccuccgcgacaucaugggcauccccuacugcaacuacuccaaguacugguaccucaaccacaccagcuccggccggaccagccugcccaagugcuggcugaucuccaacgggagcuaccucaacgagacgcaguucuccgacgacaucgagcagcaggcggacaacaugaucaccgagaugcugcagaaggaguacaucgagcgccagggcaagaccccgcuggggcucguggacaucuucaucuucagcaccuccuucuaccugaucagcaucuuccugcaccugaucaagaucccgacgcaccggcacaucgugggcaagcccugccccaagccccaccgccucaaccacaugggggucugcuccugcggccuguacaagcacccgggcgugcccaccaaguggaagcggugaggacuagucccuguucccagagcccacuuuuuuuucuuuuuuugaaauaaaauagccugucuuucagaucucaaaggcucuuuucagagccaccaaaaaaaaaaaaaaaaaaaaaaaaaaaaaaaaaaaaaaaaaaaaaaaaaaaaaaaaaaaaaaaaaaaaaaaaaaaaaaaaaaaaaaaaaaaaaaaaaaaaa

SEQ ID NO: 30407 - RNA, 1764 nt, Artificial Sequence
  mRNA product Design a-2 (hSL-A100) comprising derived and/or modified sequence from LASV(803213;Clade II)__AAF86703__GPCmut6 (opt1)
aggagaguccgcucagccagguugcagaagcggcuuagcguguguccuaaucuucucucugcguguagguaggccugugccgcaaacaagcuuaccaugggccagaucaucaccuucuuccaggaggugccccacgucaucgaggaggugaugaacaucgugcugaucgcccucagccugcuggccauccucaaggggaucuacaacgucgcgaccugcggccuguucgggcugaucuccuuccuccugcugugcggccgcagcugcuccgugacguacaaggggguguacgagcuccagacccuggagcugaacauggccaaccucaacaugugcaugccgcugagcugcaccaagaacaacucccaccacuacaucauggucggcaacgagacgggccuggagcucacccugaccaacaccagcaucaucaaccacaaguucugcaaccuguccgacgcccacaagaagaaccucuacgaccacgcccugaugagcaucaucuccacguuccaccugagcauccccaacuucaaccaguacgaggccauguccugcgacuucaacgggggcaagaucagcgugcaguacaaccucucccacagcuucgcgguggacgccgccaaccacugcgggaccaucgccaacggcguccugcagaccuucaugcggauggcguggggcggguccuacaucgcccuggacagcggcaaggggaacugggacugcaucaugaccuccuaccaguaccucaucauccagaacacgaccugggaggaccacugccaguucagccgccccucccccaucggcuaccuggggcugcucagccagcggacccgcgacaucuacaucagccggcgccugcugggcaccuucacguggacccucuccgacagcgagggcaacgaggcccccgggggcuacugccugacccgguggaugcugaucgaggccgagcucaagugcuucgggaacaccgccguggcgaagugcaacgagaagcacgacgaggaguucugcgacaugcugcgccuguucgacuucugcaagcaggccaucaagcggcucaagacgcccgcccagauguccauccagcugaucaacaaggccgugaacgcccugaucaacgaccagcucaucaugaagaaccaccuccgcgacaucaugggcauccccuacugcaacuacagccgguacugguaccugaaccacaccgucaccgggaagaccucccugccccgcugcuggcuggugagcaacggcuccuaccugaacgagacgcacuucagcgacgacaucgagcagcaggcggacaacaugaucaccgagaugcuccagaaggaguacauggaccggcagggcaagaccccgcuggggcugguggaccucuucgucuucuccaccagcuucuaccugaucuccaucuuccugcaccuggugaagaucccgacgcaccgccacaucgugggcaagcccugccccaagccccaccggcucaaccacauggggaucugcagcugcggccuguacaagcacccggggguccccgugaaguggaagcgcugaggacuagucccuguucccagagcccacuuuuuuuucuuuuuuugaaauaaaauagccugucuuucagaucucaaaggcucuuuucagagccaccaaaaaaaaaaaaaaaaaaaaaaaaaaaaaaaaaaaaaaaaaaaaaaaaaaaaaaaaaaaaaaaaaaaaaaaaaaaaaaaaaaaaaaaaaaaaaaaaaaaaa

SEQ ID NO: 30408 - RNA, 1764 nt, Artificial Sequence
  mRNA product Design a-2 (hSL-A100) comprising derived and/or modified sequence from LASV(GA391;Clade III)__CAA36645__GPCmut6 (opt1)
aggagaguccgcucagccagguugcagaagcggcuuagcguguguccuaaucuucucucugcguguagguaggccugugccgcaaacaagcuuaccaugggccagaucgugaccuucuuccaggaggucccccacgugaucgaggaggugaugaacaucguccugaucgcccucagcauccuggccauccugaaggggcucuacaacguggcgaccugcggccugaucgggcuggugacguuccuccugcuguccggccgcagcugcucccucaucuacaaggggaccuacgagcugcagacccuggagcucaacauggagacccugaacaugugcaugccgcugagcugcaccaagaacaacucccaccacuacauccgggucggcaacgagaccggccucgagcugacccugacgaacaccagcauccucaaccacaaguucugcaaccuguccgacgcccacaagcgcaaccuguacgaccacagccucauguccaucaucagcaccuuccaccuguccauccccaacuucaaccaguacgaggccaugagcugcgacuucaacgggggcaagaucaccgugcaguacaaccugucccacagcuucgccguggacgccgcggggcacugcggcacgcucgccaacgggguccugcagaccuucaugcggauggccuggggcggcuccuacaucgcccuggacagcgggcgcggcaacugggacugcaucaugaccuccuaccaguaccucaucauccagaacaccacgugggacgaccacugccaguucagccggcccucccccaucggguaccugggccugcucagccagcgcacccgggacaucuacaucagccgccggcugcugggcaccuucaccuggacgcucuccgacagcgaggggaacgagaccccgggcggguacugccugacccgcuggaugcugaucgaggcggagcucaagugcuucggcaacaccgccguggccaagugcaacgagaagcacgacgaggaguucugcgacaugcugcggcuguucgacuucugcaagcaggccauccgccggcucaagacgcccgcccagauguccauccagcugaucaacaaggcggugaacgcccugaucaacgaccagcucaucaugaagaaccaccuccgcgacaucauggggauccccuacugcaacuacagccgguacugguaccugaaccacaccuccaccggcaagaccagccugccccgcugcuggcugaucuccaacggcagcuaccugaacgagacgaaguucuccgacgacaucgagcagcaggccgacaacaugaucaccgagaugcuccagaaggaguacaucgaccggcaggggaagacgccccugggccuggucgaccuguucguguucagcaccuccuucuaccucaucagcaucuuccugcaccuggugaagaucccgacccaccgccacaucgucgggaagcccugccccaagccccaccggcucaaccacaugggcaucugcuccugcgggcuguacaagcagccgggcgugcccgugcgcuggaagcggugaggacuagucccuguucccagagcccacuuuuuuuucuuuuuuugaaauaaaauagccugucuuucagaucucaaaggcucuuuucagagccaccaaaaaaaaaaaaaaaaaaaaaaaaaaaaaaaaaaaaaaaaaaaaaaaaaaaaaaaaaaaaaaaaaaaaaaaaaaaaaaaaaaaaaaaaaaaaaaaaaaaaa

SEQ ID NO: 30409 - RNA, 1767 nt, Artificial Sequence
  mRNA product Design a-2 (hSL-A100) comprising derived and/or modified sequence from LASV(AV;Clade V)__CCA30314__GPCmut6 (opt1)
aggagaguccgcucagccagguugcagaagcggcuuagcguguguccuaaucuucucucugcguguagguaggccugugccgcaaacaagcuuaccaugggccagaucgugaccuucuuccaggaggucccccacgugaucgaggaggugaugaacaucguccugaucgcccucagcauccuggccgugcugaaggggcucuacaacaucgcgaccugcggccugaucgggcugaucacguuccuccugcugugcggccgcuccugcagcuccaaccucuacaaggggguguacgagcugcagagccuggaccucaacauggagacccugaacaugugcaugccgcuguccugcaccaagaacaacagccaccacuacauccgggucggcaacgacacgggccucgagcugacccugaccaacaccuccauccucaaccacaaguucugcaaccugagcgacgcccacaagaaggaccuguacgaccacgcccucauguccaucaucagcacguuccaccuguccauccccaacuucaaccaguacgaggccaugagcugcgacuucaacgggggcaagaucuccgugcaguacaaccugagccacuccuacgccaucgacgcggccaaccacugcgggaccguggccaacggcauccuccagaccuucaugcgcauggccuggggcgggagcuacaucgcgcuggacuccggccgggggaacugggacugcaucaugaccagcuaccaguaccugaucauccagaacacgaccugggagaaccacugccaguucucccgccccagccccaucggcuaccucgggcugcugagccagcggacccgcgacaucuacaucucccggcgccuccugggcaccuucacguggacccugagcgacuccgagggcaacgccacccccgggggcuacugccucacccgguggaugcugaucgaggccgagcugaagugcuucgggaacacggccgucgccaagugcaacgagaagcacgacgaggaguucugcgacaugcuccgccuguucgacuucugcaagcaggcgaucagccggcugaagucccccgcccagaugagcauccagcucaucaacaaggccgugaacgcccugaucaacgaccagcugaucaugaagaaccaccuccgcgacaucaugggcauccccuacugcaacuacuccaaguacugguaccugaaccacaccaucaccgggaagaccagccugcccaagugcuggcucguguccaacggcagcuaccugaacgagacgcacuucuccgacgacaucgagcagcaggccgacaacaugaucaccgagaugcugcagaaggaguacauggagcggcagggcaagaccccgcucgggcuggucgaccuguucguguucagcaccuccuucuaccugaucagcaucuuccuccgccuggugaagaucccgacgcaccggcacaucgucggcaagcccugccccaagccccaccgccugaaccacauggggaucugcuccugcggccucuacaagcagccgggggugcccgugcgguggaagcgcugaggacuagucccuguucccagagcccacuuuuuuuucuuuuuuugaaauaaaauagccugucuuucagaucucaaaggcucuuuucagagccaccaaaaaaaaaaaaaaaaaaaaaaaaaaaaaaaaaaaaaaaaaaaaaaaaaaaaaaaaaaaaaaaaaaaaaaaaaaaaaaaaaaaaaaaaaaaaaaaaaaaaa

SEQ ID NO: 30410 - RNA, 1764 nt, Artificial Sequence
  mRNA product Design a-2 (hSL-A100) comprising derived and/or modified sequence from LASV(Togo/2016/7082;Clade VI)__AMR44577__GPCmut6 (opt1)
aggagaguccgcucagccagguugcagaagcggcuuagcguguguccuaaucuucucucugcguguagguaggccugugccgcaaacaagcuuaccaugggccagaucaucaccuucuuccaggaggugccccacgucaucgaggaggugaugaacaucgugcugaucgcccucagccugcuggccauccucaagggggucuacaacguggcgaccugcggcaucaucgggcuggugacguuccuguuccucugcggccgcuccugcagccugaucuacaagggguccuacgagcugcagacccucgagcugaacauggagacccugaacaugugcaugccgcucagcugcacgaagaacuccagccaccacuacauccgggucggcaacgagaccggccuggagcugacccucaccaacacguccaucaucaaccacaaguucugcaaccugagcgacgcccacaagcgcaaccuguacgaccacgcccucauguccauccugagcaccuuccaccuguccauccccaacuucaaccaguacgaggccaugagcugcgacuucaacgggggcaagaucuccgugcaguacaaccucagccacgccuacgcgguggacgccgccgagcacugcgggaccgucgccaacggcgugcugcagaccuucaugcggauggcguggggcggguccuacaucgcccuggacagcggccgcgggaacugggacugcaucaugacguccuaccaguaccucaucauccagaacaccaccugggaggaccacugccaguucagccggcccucccccaucggcuaccuggggcugcucagccagcgcacccgggacaucuacaucagccgccggcugcugggcacguucaccuggacccucuccgacagcgagggcaacgagacccccgggggcuacugccugacgcgcuggaugcugaucgaggccgagcucaagugcuucgggaacaccgccguggccaagugcaacgagaagcacgacgaggaguucugcgacaugcugcggcuguucgacuucugcaagcaggcgauccagcgccucaagucccccgcccagaugagcauccagcugaucaacaaggccgucaacgcccugaucaacgaccagcucaucaugaagaaccaccuccgggacaugaugggcauccccuacugcaacuacuccaaguacugguaccugaaccacaccagcuccgggcgcaccagccugcccaagugcuggcugguguccaacggcagcuaccugaacgagacgcacuucuccgacgacaucgagcagcaggccgacaacaugaucaccgagaugcuccagaaggaguacaucgaccggcagggcaagaccccgcuggggcugguggaccucuucgucuucagcaccuccuucuaccugaucagcaucuuccugcaccugaucaagaucccgacgcaccgccacaucgugggcaagcccugccccaagccccaccggcucaaccacauggggaucugcuccugcggccuguacaagcagccgggggugcccacccgcuggaagcggugaggacuagucccuguucccagagcccacuuuuuuuucuuuuuuugaaauaaaauagccugucuuucagaucucaaaggcucuuuucagagccaccaaaaaaaaaaaaaaaaaaaaaaaaaaaaaaaaaaaaaaaaaaaaaaaaaaaaaaaaaaaaaaaaaaaaaaaaaaaaaaaaaaaaaaaaaaaaaaaaaaaaa

SEQ ID NO: 30411 - RNA, 1764 nt, Artificial Sequence
  mRNA product Design a-2 (hSL-A100) comprising derived and/or modified sequence from LASV(KAK-428;Clade n.d. (VII))__ANH09740__GPCmut6 (opt1)
aggagaguccgcucagccagguugcagaagcggcuuagcguguguccuaaucuucucucugcguguagguaggccugugccgcaaacaagcuuaccaugggccagaucgugaccuucuuccaggaggucccccacgugaucgaggaggugaugaacaucguccugaucgcccucagccugcuggccauccucaaggggcuguacaacuucgcgaccugcggcgugaucgggcugaucacguuccuccugcugugcggccgcuccugcagcgccaccuacaaggggcaguacgagcuccagacccuggagcugaacauggagucccucaacaugugcaugccgcugagcugcacgaagaacaacucccaccacuacauccgggccggcaacaacaccggccuggagcucacccugaccaacacgagcaucaucucccacaaguucugcaaccugagcgacgcccacaagaagaaccucuacgaccacacccugauguccaucaucaccaccuuccaccugagcauccccaacuucaaccaguacgaggccauguccugcgacuucaacgggggcaagaucagcauccaguacaaccucucccacagcuacgcgggggacgccgcccagcacugcggcacgguggccaacgggguccugcagaccuucaugcgcauggcguggggcggcuccuaccuggcccucgacagcgggcggcgcggcugggacugcaucaucuccagcuaccaguaccugaucauccagaacaccaccugggacgaccacugccaguucucccggcccagccccaucggguaccugggcuucgugagccagaagacgcgcgacaucuacaucucccggcgccuccugggcaccuucaccuggacccugagcgacuccgaggggcacgacaugccgggcggguacugccucacgcgguggaugcugaucgaggccgaccugaagugcuucggcaacaccgccguggccaagugcaacgagaagcacgacgaggaguucugcgacauguggcgccucuucgacuucugcaagcaggcgauccagcggcugaaggcccccgcccagaugaacauccagcugaucaacaaggccgucaacgcccucaucaacgaccagcugaugaugaagaaccaccuccgcgacaucauggggauccccuacugcaacuacagcaaguucugguaccugaacaacaccaccacgggccggaccucccugccccgcugcuggcugaucagcaacggcuccuaccucaacgagacccacuucagcgacgacaucgagcagcaggcggacaacaugaucaccgagaugcugcagaaggaguacauggaccggcaggggaagacgccccugggccucguggaccuguucguguucuccaccagcuucuaccugaucaccaucuuccuccaccuggucaagaucccgacccaccgccacaucguggggaagcccugccccaagccccaccggcugaaccacaugggcaucugcuccugcgggcuguacaagcagccgggcgugcccguccgcuggaagcggugaggacuagucccuguucccagagcccacuuuuuuuucuuuuuuugaaauaaaauagccugucuuucagaucucaaaggcucuuuucagagccaccaaaaaaaaaaaaaaaaaaaaaaaaaaaaaaaaaaaaaaaaaaaaaaaaaaaaaaaaaaaaaaaaaaaaaaaaaaaaaaaaaaaaaaaaaaaaaaaaaaaaa

SEQ ID NO: 30412 - RNA, 1764 nt, Artificial Sequence; identical to SEQ ID NO: 30406
  mRNA product Design a-2 (hSL-A100) comprising derived and/or modified sequence from LASV(Pinneo-NIG-1969;Clade I)__AIT17836__GPCmut6 (opt1)

SEQ ID NO: 30413 - RNA, 1764 nt, Artificial Sequence
  mRNA product Design a-2 (hSL-A100) comprising derived and/or modified sequence from LASV(ISTH0009-NIG-2011;Clade II)__AIT17404__GPCmut6 (opt1)
aggagaguccgcucagccagguugcagaagcggcuuagcguguguccuaaucuucucucugcguguagguaggccugugccgcaaacaagcuuaccaugggccagaucaucaccuucuuccaggaggugccccacgucaucgaggaggugaugaacaucgugcugaucgcccucagccugcuggccauccucaaggggaucuacaacgucgcgaccugcggccuguucgggcugguguccuuccuccugcugugcggccgcagcugcuccacgaccuacaaggggguguacgagcuccagacccuggagcuggacauggccagccucaacaugugcaugccgcuguccugcacgaagaacaacagccaccacuacaucauggucggcaacgagaccggccuggagcucacccugaccaacacguccaucaucaaccacaaguucugcaaccugagcgacgcccacaagaagaaccucuacgaccacgcccugauguccaucaucagcaccuuccaccuguccauccccaacuucaaccaguacgaggccaugagcugcgacuucaacgggggcaagaucuccgugcaguacaaccucagccacgcguacgccguggacgccgccaaccacugcgggaccaucgcgaacggcguccugcagaccuucaugcggauggccuggggcggguccuacaucgcccuggacagcggcaagggguccugggacugcaucaugacgagcuaccaguaccucaucauccagaacaccaccugggaggaccacugccaguucucccgccccagccccaucggcuaccuggggcugcucagccagcggacccgcgacaucuacaucucccggcgccugcugggcacguucaccuggacccucagcgacuccgagggcaacgagacccccgggggcuacugccugacgcgguggaugcugaucgaggccgagcucaagugcuucgggaacaccgccguggcgaagugcaacgagaagcacgacgaggaguucugcgacaugcugcgccuguucgacuucugcaagcaggccauccggcgccucaagacccccgcccagaugagcauccagcugaucaacaaggccgugaacgcccugaucaacgaccagcucaucaugaagaaccaccuccgggacaucaugggcaucccguacugcaacuacuccaaguacugguaccugaaccacaccgucacggggaagaccagccugccccgcugcuggcugguguccaacggcagcuaccugaacgagacccacuucuccgacgacaucgagcagcaggcggacaacaugaucaccgagcuccugcagaaggaguacauggaccggcagggcaagacgccccuggggcucguggaccuguucgucuucagcaccuccuucuaccugaucagcaucuuccugcaccucaucaagaucccgacccaccgccacaucaccggcaagcccugccccaagccccaccggcugaaccacauggggaucugcuccugcggccuguacaagcacccgggggugcccgugaaguggaagcgcugaggacuagucccuguucccagagcccacuuuuuuuucuuuuuuugaaauaaaauagccugucuuucagaucucaaaggcucuuuucagagccaccaaaaaaaaaaaaaaaaaaaaaaaaaaaaaaaaaaaaaaaaaaaaaaaaaaaaaaaaaaaaaaaaaaaaaaaaaaaaaaaaaaaaaaaaaaaaaaaaaaaaa

SEQ ID NO: 30414 - RNA, 1764 nt, Artificial Sequence
  mRNA product Design a-2 (hSL-A100) comprising derived and/or modified sequence from LASV(ISTH2010-NIG-2012;Clade II)__AIT17482__GPCmut6 (opt1)
aggagaguccgcucagccagguugcagaagcggcuuagcguguguccuaaucuucucucugcguguagguaggccugugccgcaaacaagcuuaccaugggccagaucaucaccuucuuccaggaggugccccacgucaucgaggaggugaugaacaucgugcugaucgcccucagccugcuggccauccucaaggggaucuacaacgucgcgaccugcggccuguucgggcugguguccuuccuccugcugugcggccgcagcugcuccacgaccuacaaggggguguacgagcuccagacccuggagcuggacauggccagccucaacaugugcaugccgcuguccugcacgaagaacaacagccaccacuacaucauggucggcaacgagaccggccuggagcucacccugaccaacacguccaucaucaaccacaaguucugcaaccugagcgacgcccacaagaagaaccucuacgaccacgcccugauguccaucaucagcaccuuccaccuguccauccccaacuucaaccaguacgaggccaugagcugcgacuucaacgggggcaagaucuccgugcaguacaaccucagccacgcguacgccguggacgccgccaaccacugcgggaccaucgcgaacggcguccugcagaccuucaugcggauggccuggggcggguccuacaucgcccuggacagcggcaagggguccugggacugcaucaugacgagcuaccaguaccucaucauccagaacaucaccugggaggaccacugccaguucucccgccccagccccaucggcuaccuggggcugcucagccagcggacccgcgacaucuacaucucccggcgccugcugggcaccuucacguggacccucagcgacuccgagggcaacgagacccccgggggcuacugccugacccgguggaugcugaucgaggccgagcucaagugcuucgggaacacggccguggcgaagugcaacgagaagcacgacgaggaguucugcgacaugcugcgccuguucgacuucugcaagcaggccauccggcgccucaagacccccgcccagaugagcauccagcugaucaacaaggccgugaacgcccugaucaacgaccagcucaucaugaagaaccaccuccgggacaucaugggcauccccuacugcaacuacuccaaguacugguaccugaaccacaccgucaccgggaagacgagccugccccgcugcuggcugguguccaacggcagcuaccugaacgagacccacuucuccgacgacaucgagcagcaggcggacaacaugaucaccgagcuccugcagaaggaguacaucgaccggcagggcaagaccccgcuggggcucguggaccuguucgucuucagcacguccuucuaccugaucagcaucuuccugcaccucgugaagaucccgacccaccgccacguggucggcaagcccugccccaagccccaccggcugaaccacauggggaucugcuccugcggccuguacaagcacccgggggugcccgugaaguggaagcgcugaggacuagucccuguucccagagcccacuuuuuuuucuuuuuuugaaauaaaauagccugucuuucagaucucaaaggcucuuuucagagccaccaaaaaaaaaaaaaaaaaaaaaaaaaaaaaaaaaaaaaaaaaaaaaaaaaaaaaaaaaaaaaaaaaaaaaaaaaaaaaaaaaaaaaaaaaaaaaaaaaaaaa

SEQ ID NO: 30415 - RNA, 1764 nt, Artificial Sequence
  mRNA product Design a-2 (hSL-A100) comprising derived and/or modified sequence from LASV(Lassa virus/H.sapiens-wt/NGA/2015/ISTH_0543;Clade II)__AVO03639__GPCmut6 (opt1)
aggagaguccgcucagccagguugcagaagcggcuuagcguguguccuaaucuucucucugcguguagguaggccugugccgcaaacaagcuuaccaugggccagaucaucaccuucuuccaggaggugccccacgucaucgaggaggugaugaacaucgugcugaucgcccucagccugcuggccauccucaaggggaucuacaacgucgcgaccugcggccuguucgggcugguguccuuccuccugcugugcggccgcagcugcuccacgaccuacaaggggguguacgagcuccagacccuggagcuggacauggccaaccucaacaugugcaugccgcugagcugcacgaagaacaacucccaccacuacaucauggucggcaacgagaccggccuggagcucacccugaccaacacgagcaucaucaaccacaaguucugcaaccuguccgacgcccacaagaagaaccucuacgaccacgcccugaugagcaucaucuccaccuuccaccugagcauccccaacuucaaccaguacgaggccauguccugcgacuucaacgggggcaagaucagcgugcaguacaaccucucccacaccuacgcgguggacgccgccaaccacugcgggaccaucgccaacggcguccugcagacguucaugcggauggcguggggcgggagcuacaucgcccuggacuccggcaaggggagcugggacugcaucaugaccuccuaccaguaccucgugauccagaacaccaccugggaggaccacugccaguucagccgccccucccccaucggcuaccuggggcugcucagccagcggacgcgcgacaucuacaucagccggcgccugcugggcaccuucaccuggacccucuccgacagcgagggcaacgagacgcccgggggcuacugccugacccgguggaugcugaucgaggccgagcucaagugcuucgggaacaccgccguggccaagugcaacgagaagcacgacgaggaguucugcgacaugcugcgccuguucgacuucugcaagcaggcgauccggcgccucaagacccccgcccagauguccauccagcugaucaacaaggccgucaacgcccugaucaacgaccagcucaucaugaagaaccaccuccgggacaucaugggcauccccuacugcaacuacagcaaguacugguaccugaaccacacggugaccgggaagaccucccugccccgcugcuggcuggugagcaacggcuccuaccugaacgagacccacuucagcgacgacaucgagcagcaggccgacaacaugaucacggagcuccugcagaaggaguacaucgaccggcagggcaagaccccgcuggggcucgucgaccuguucguguucuccaccagcuucuaccugaucuccaucuuccugcaccucgugaagaucccgacccaccgccacaucacgggcaagcccugccccaagccccaccggcugaaccacauggggaucugcagcugcggccuguacaagcacccggggguccccgugaaguggaagcgcugaggacuagucccuguucccagagcccacuuuuuuuucuuuuuuugaaauaaaauagccugucuuucagaucucaaaggcucuuuucagagccaccaaaaaaaaaaaaaaaaaaaaaaaaaaaaaaaaaaaaaaaaaaaaaaaaaaaaaaaaaaaaaaaaaaaaaaaaaaaaaaaaaaaaaaaaaaaaaaaaaaaaa

SEQ ID NO: 30416 - RNA, 1764 nt, Artificial Sequence
  mRNA product Design a-2 (hSL-A100) comprising derived and/or modified sequence from LASV(Lassa virus/H.sapiens-wt/NGA/2016/ISTH_0009;Clade II)__AVO03571__GPCmut6 (opt1)
aggagaguccgcucagccagguugcagaagcggcuuagcguguguccuaaucuucucucugcguguagguaggccugugccgcaaacaagcuuaccaugggccagaucaucaccuucuuccaggaggugccccacgucaucgaggaggugaugaacaucgugcugaucgcccucagccugcuggccauccucaaggggaucuacaacgucgcgaccugcggccugcuggggcucguguccuuccugcugcucugcggccgcagcugcuccacgaccuacaaggggguguacgagcugcagacccuggagcucgacauggccagccugaacaugugcaugccgcuguccugcacgaagaacaacagccaccacuacaucauggucggcaacgagaccggccucgagcugacccugaccaacacguccaucaucaaccacaaguucugcaaccucagcgacgcccacaagaagaaccuguacgaccacgcccugauguccaucaucagcaccuuccaccucuccauccccaacuucaaccaguacgaggccaugagcugcgacuucaacgggggccggaucuccgugcaguacaaccugagccacuccuacgcgguggacgccgccaaccacugcgggaccaucgccaacggcguccugcagaccuucaugcgcauggcguggggcgggagcuacaucgcccucgacuccggcaaggggagcugggacugcaucaugacguccuaccaguaccugaucauccagaacaccaccugggaggaccacugccaguucagccggcccagccccaucggcuaccuggggcuccugucccagcgcacccgggacaucuacaucagccgccggcugcucggcacguucaccuggacccuguccgacagcgagggcaacgagacccccgggggcuacugccugacgcgcuggaugcucaucgaggccgagcugaagugcuucgggaacaccgccguggccaagugcaacgagaagcacgacgaggaguucugcgacaugcugcggcuguucgacuucugcaagcaggcgauccgccggcugaagacccccgcccagauguccauccagcugaucaacaaggccgugaacgcccucaucaacgaccagcugaucaugaagaaccaccuccgcgacaucaugggcaucccguacugcaacuacagcaaguacugguaccucaaccacaccgucacggggaagaccucccugccccggugcuggcuggugagcaacggcuccuaccucaacgagacccacuucagcgacgacaucgagcagcaggccgacaacaugaucaccgagcugcugcagaaggaguacaucgaccgccagggcaagacgccccucgggcugguggaccuguucgucuucuccaccagcuucuaccugaucuccaucuuccuccaccuggugaagaucccgacccaccggcacaucaccggcaagcccugccccaagccccaccgccugaaccacauggggaucugcagcugcggccucuacaaccacccgggggugcccgucaaguggaagcggugaggacuagucccuguucccagagcccacuuuuuuuucuuuuuuugaaauaaaauagccugucuuucagaucucaaaggcucuuuucagagccaccaaaaaaaaaaaaaaaaaaaaaaaaaaaaaaaaaaaaaaaaaaaaaaaaaaaaaaaaaaaaaaaaaaaaaaaaaaaaaaaaaaaaaaaaaaaaaaaaaaaaa

SEQ ID NO: 30417 - RNA, 1764 nt, Artificial Sequence
  mRNA product Design a-2 (hSL-A100) comprising derived and/or modified sequence from LASV(Lassa virus/H.sapiens-wt/NGA/2016/ISTH_0017;Clade II)__AVO03567__GPCmut6 (opt1)
aggagaguccgcucagccagguugcagaagcggcuuagcguguguccuaaucuucucucugcguguagguaggccugugccgcaaacaagcuuaccaugggccagaucaucaccuucuuccaggaggugccccacgucaucgaggaggugaugaacaucgugcugaucgcccucagccugcuggccauccucaaggggaucuacaacgucgcgaccugcggccuguucgggcugguguccuuccuccugcugugcggccgcagcugcuccacgaccuacaaggggguguacgagcuccagacccuggagcuggacauggccagccucaacaugugcaugccgcuguccugcacgaagaacaacagccaccacuacaucauggucggcaacgagaccggccuggagcucacccugaccaacacguccaucaucaaccacaaguucugcaaccugagcgacgcccacaagaagaaccucuacgaccacgcccugauguccaucaucagcaccuuccaccuguccauccccaacuucaaccaguacgaggccaugagcugcgacuucaacgggggcaagaucuccgugcaguacaaccucagccacaccuacgcgaucgacgccgccaaccacugcgggaccaucgccaacggcgugcugcagacguucaugcggauggcguggggcggguccuacaucgcccuggacagcggcaagggguccugggacugcaucaugaccagcuaccaguaccucaucauccagaacaccaccugggaggaccacugccaguucucccgccccagccccaucggcuaccuggggcugcucagccagcggacgcgcgacaucuacaucucccggcgccugcugggcaccuucaccuggacccucagcgacuccgagggcaacgagacgcccgggggcuacugccugacccgguggaugcugaucgaggccgagcucaagugcuucgggaacaccgccgucgccaagugcaacgagaagcacgacgaggaguucugcgacaugcugcgccuguucgacuucugcaagcaggcgauccggcgccucaagacccccgcccagaugagcauccagcugaucaacaaggccgugaacgcccugaucaacgaccagcucaucaugaagaaccaccuccgggacaucaugggcauccccuacugcaacuacuccaaguacugguaccugaaccacacggugaccgggaagaccagccugccccgcugcuggcuggucuccaacggcagcuaccugaacgagacccacuucuccgacgacaucgagcagcaggccgacaacaugaucacggagcuccugcagaaggaguacauggaccggcagggcaagaccccgcuggggcucguggaccuguucguguucagcaccuccuucuaccugaucagcaucuuccugcaccucguccgcaucccgacccaccggcacgugaucggcaagcccugccccaagccccaccgccugaaccacauggggaucugcuccugcggccuguacaagcacccgggggugcccgucaaguggaagcggugaggacuagucccuguucccagagcccacuuuuuuuucuuuuuuugaaauaaaauagccugucuuucagaucucaaaggcucuuuucagagccaccaaaaaaaaaaaaaaaaaaaaaaaaaaaaaaaaaaaaaaaaaaaaaaaaaaaaaaaaaaaaaaaaaaaaaaaaaaaaaaaaaaaaaaaaaaaaaaaaaaaaa

SEQ ID NO: 30418 - RNA, 1764 nt, Artificial Sequence
  mRNA product Design a-2 (hSL-A100) comprising derived and/or modified sequence from LASV(Lassa virus/H.sapiens-wt/NGA/2018/ISTH_0959;Clade II)__AVV65099__GPCmut6 (opt1)
aggagaguccgcucagccagguugcagaagcggcuuagcguguguccuaaucuucucucugcguguagguaggccugugccgcaaacaagcuuaccaugggccagaucaucaccuucuuccaggaggugccccacgucaucgaggaggugaugaacaucgugcugaucgcccucagccugcuggccauccucaaggggaucuacaacgucgugaccugcggccuguucgggcugguguccuuccuccugcugugcggccgcagcugcuccacgaccuacaagggggucuacgagcuccagacccuggagcuggacauggcgagccucaacaugugcaugccgcuguccugcacgaagaacaacagccaccacuacaucauggugggcaacgagaccggccuggagcucacccugaccaacacguccaucaucaaccacaaguucugcaaccugagcgacgcccacaagaagaaccucuacgaccacgcccugauguccaucaucagcaccuuccaccuguccauccccaacuucaaccaguacgaggccaugagcugcgacuucaacgggggcaagaucuccgugcaguacaaccucagccacgccuacgcgaucgacgccgccaaccacugcgggaccaucgccaacggcguccugcagaccuucaugcggauggcguggggcggguccuacaucgcccuggacagcggcaagggguccugggacugcaucaugacgagcuaccaguaccucaucauccagaacaccaccugggaggaccacugccaguucucccgccccagccccaucggcuaccuggggcugcucagccagcggacccgcgacaucuacaucucccggcgccugcugggcacguucaccuggacccucagcgacuccgagggcaacgagacccccgggggcuacugccugacgcgguggaugcugaucgaggccgagcucaagugcuucgggaacaccgccguggccaagugcaacgagaagcacgacgaggaguucugcgacaugcugcgccuguucgacuucugcaagcaggcgauccggcgccucaagacccccgcccagaugagcauccagcugaucaacaaggccgugaacgcccugaucaacgaccagcucaucaugaagaaccaccuccgggacaucaugggcaucccguacugcaacuacuccaaguacugguaccugaaccacaccgucacggggaagaccagccugccccgcugcuggcugguguccaacggcagcuaccugaacgagacccacuucuccgacgacaucgagcagcaggccgacaacaugaucaccgagcuccugcagaaggaguacaucgaccggcagggcaagacgccccuggggcucguggaccuguucgucuucagcaccuccuucuaccugaucagcaucuuccugcaccucgugaagaucccgacccaccgccacgugaucggcaagcccugccccaagccccaccggcugaaccacauggggaucugcuccugcggccuguacaagcacccggggguccccgugaaguggaagcgcugaggacuagucccuguucccagagcccacuuuuuuuucuuuuuuugaaauaaaauagccugucuuucagaucucaaaggcucuuuucagagccaccaaaaaaaaaaaaaaaaaaaaaaaaaaaaaaaaaaaaaaaaaaaaaaaaaaaaaaaaaaaaaaaaaaaaaaaaaaaaaaaaaaaaaaaaaaaaaaaaaaaaa

SEQ ID NO: 30419 - RNA, 1764 nt, Artificial Sequence
  mRNA product Design a-2 (hSL-A100) comprising derived and/or modified sequence from LASV(LASV003-NIG-2008;Clade II)__AIT17580__GPCmut6 (opt1)
aggagaguccgcucagccagguugcagaagcggcuuagcguguguccuaaucuucucucugcguguagguaggccugugccgcaaacaagcuuaccaugggccagaucaucaccuucuuccaggaggugccccacgucaucgaggaggugaugaacaucgugcugaucgcccucagccugcuggccauccucaaggggaucuacaacgucgcgaccugcggccuguucgggcugguguccuuccuccugcugugcggccgcagcugcuccacgaccuacaaggggguguacgagcuccagacccuggagcuggacauggccagccucaacaugugcaugccgcuguccugcacgaagaacaacagccaccacuacaucauggucggcaacgagaccggccuggagcucacccugaccaacacguccaucaucaaccacaaguucugcaaccugagcgacgcccacaagaagaaccucuacgaccacgcccugauguccaucaucagcaccuuccaccuguccauccccaacuucaaccaguacgaggccaugagcugcgacuucaacgggggcaagaucuccgugcaguacaaccucagccacaccuacgcgguggacgccgccaaccacugcgggaccaucgccaacggcguccugcagacguucaugcggauggcguggggcggguccuacaucgcccuggacagcggcaagggguccugggacugcaucaugaccagcuaccaguaccucaucauccagaacaccaccugggaggaccacugccaguucucccgccccagccccaucggcuaccuggggcugcucagccagcggacgcgcgacaucuacaucucccggcgccugcugggcaccuucaccuggacccucagcgacuccgagagcaacgagacgccgggcggguacugccugacccgguggaugcugaucgaggccgagcucaagugcuucggcaacaccgccguggccaagugcaacgagaagcacgacgaggaguucugcgacaugcugcgccuguucgacuucugcaagcaggcgauccggcgccucaaggcccccgcccagauguccauccagcugaucaacaaggccgugaacgcccugaucaacgaccagcucaucaugaagaaccaccuccgggacaucauggggauccccuacugcaacuacagcaaguacugguaccugaaccacaccgucacgggccgcaccucccugccccggugcuggcuggugagcaacggguccuaccugaacgagacccacuucagcgacgacaucgagcagcaggcggacaacaugaucaccgagcuccugcagaaggaguacauggaccgccagggcaagacgccccugggccucguggaccuguucgucuucuccaccagcuucuaccugaucuccaucuuccugcaccucgugaagaucccgacccaccggcacgugaucgggaagcccugccccaagccccaccgccugaaccacaugggcaucugcagcugcgggcuguacaagcacccgggcguccccgugaaguggaagcggugaggacuagucccuguucccagagcccacuuuuuuuucuuuuuuugaaauaaaauagccugucuuucagaucucaaaggcucuuuucagagccaccaaaaaaaaaaaaaaaaaaaaaaaaaaaaaaaaaaaaaaaaaaaaaaaaaaaaaaaaaaaaaaaaaaaaaaaaaaaaaaaaaaaaaaaaaaaaaaaaaaaaa

SEQ ID NO: 30420 - RNA, 1764 nt, Artificial Sequence
  mRNA product Design a-2 (hSL-A100) comprising derived and/or modified sequence from LASV(LASV035-NIG-2009;Clade II)__AIT17588__GPCmut6 (opt1)
aggagaguccgcucagccagguugcagaagcggcuuagcguguguccuaaucuucucucugcguguagguaggccugugccgcaaacaagcuuaccaugggccagaucaucaccuucuuccaggaggugccccacgucaucgaggaggugaugaacaucgugcugaucgcccucagccugcuggccauccucaaggggaucuacaacgucgcgaccugcggccuguucgggcugguguccuuccuccugcugugcggccgcagcugcuccacgaccuacaaggggguguacgagcuccagacccuggagcuggacauggccagccucaacaugugcaugccgcuguccugcacgaagaacaacagccaccacuacaucauggucggcaacgagaccggccuggagcucacccugaccaacacguccaucaucaaccacaaguucugcaaccugagcgacgcccacaagaagaaccucuacgaccacgcccugauguccaucaucagcaccuuccaccuguccauccccaacuucaaccaguacgaggccaugagcugcgacuucaacgggggcaagaucuccgugcaguacaaccucagccacgcguacgccguggacgccgccaaccacugcgggaccaucgcgaacggcguccugcagaccuucaugcggauggccuggggcggguccuacaucgcccuggacagcggcaagggguccugggacugcaucaugacgagcuaccaguaccucaucauccagaacaccaccugggaggaccacugccaguucucccgccccagccccaucggcuaccuggggcugcucagccagcggacccgcgacaucuacaucucccggcgccugcugggcacguucaccuggacccucagcgacuccgagggcaacgagacccccgggggcuacugccugacgcgguggaugcugaucgaggccgagcucaagugcuucgggaacaccgccguggcgaagugcaacgagaagcacgacgaggaguucugcgacaugcugcgccuguucgacuucugcaagcaggccauccggcgccucaaggcccccgcccagaugagcauccagcugaucaacaaggccgugaacgcgcugaucaacgaccagcucaucaugaagaaccaccuccgggacaucaugggcauccccuacugcaacuacuccaaguacugguaccugaaccacaccgucaccgggaagacgagccugccccgcugcuggcugguguccaacggcagcuaccugaacgagacccacuucuccgacgacaucgagcagcaggccgacaacaugaucaccgagcuccugcagaaggaguacaucgaccggcagggcaagaccccgcuggggcucguggaccuguucgucuucagcacguccuucuaccugaucagcaucuuccugcaccucgugaagaucccgacccaccgccacgugaucggcaagcccugccccaagccccaccggcugaaccacauggggaucugcuccugcggccuguacaagcacccggggguccccgugaaguggaagcgcugaggacuagucccuguucccagagcccacuuuuuuuucuuuuuuugaaauaaaauagccugucuuucagaucucaaaggcucuuuucagagccaccaaaaaaaaaaaaaaaaaaaaaaaaaaaaaaaaaaaaaaaaaaaaaaaaaaaaaaaaaaaaaaaaaaaaaaaaaaaaaaaaaaaaaaaaaaaaaaaaaaaaa

SEQ ID NO: 30421 - RNA, 1764 nt, Artificial Sequence
  mRNA product Design a-2 (hSL-A100) comprising derived and/or modified sequence from LASV(LASV1000-NIG-2009;Clade II)__AIT17782__GPCmut6 (opt1)
aggagaguccgcucagccagguugcagaagcggcuuagcguguguccuaaucuucucucugcguguagguaggccugugccgcaaacaagcuuaccaugggccagaucaucaccuucuuccaggaggugccccacgucaucgaggaggugaugaacaucgugcugaucgcccucagccugcuggccauccucaaggggaucuacaacgucgcgaccugcggccuguucgggcugguguccuuccuccugcugugcggccgcagcugcuccacgaccuacaaggggguguacgagcuccagacccuggagcuggacauggccagccucaacaugugcaugccgcuguccugcacgaagaacaacagccaccacuacaucauggucggcaacgagaccggccuggagcucacccugaccaacacguccaucaucaaccacaaguucugcaaccugagcgacgcccacaagaagaaccucuacgaccacgcccugauguccaucaucagcaccuuccaccuguccauccccaacuucaaccaguacgaggccaugagcugcgacuucaacgggggcaagaucuccgugcaguacaaccucagccacaccuacgcgguggacgccgccaaccacugcgggaccaucgccaacggcguccugcagacguucaugcggauggcguggggcggguccuacaucgcccuggacagcggcaagggguccugggacugcaucaugaccagcuaccaguaccucaucauccagaacaccaccugggaggaccacugccaguucucccgccccagccccaucggcuaccuggggcugcucagccagcggacgcgcgacaucuacaucucccggcgccugcugggcaccuucaccuggacccucagcgacuccgagggcaacgagacgcccgggggcuacugccugacccgguggaugcugaucgaggccgagcucaagugcuucgggaacaccgccguggccaagugcaacgagaagcacgacgaggaguucugcgacaugcugcgccuguucgacuucugcaagcaggcgaucaagcggcucaagacccccgcccagaugagcauccagcugaucaacaaggccgugaacgcccugaucaacgaccagcucaucaugaagaaccaccuccgcgacaucaugggcauccccuacugcaacuacuccaaguacugguaccugaaccacacggucaccgggaagaccagccugccccggugcuggcugguguccaacggcagcuaccugaacgagacccacuucuccgacgacaucgagcagcaggccgacaacaugaucacggagcuccugcagaaggaguacaucgaccgccagggcaagaccccgcuggggcucguggaccuguucgucuucagcaccuccuucuaccugaucagcaucuuccugcaccucgugaagaucccgacccaccggcacguggucggcaagcccugccccaagccccaccgccugaaccacauggggaucugcuccugcggccuguacaagcacccgggggugcccgugaaguggaagcggugaggacuagucccuguucccagagcccacuuuuuuuucuuuuuuugaaauaaaauagccugucuuucagaucucaaaggcucuuuucagagccaccaaaaaaaaaaaaaaaaaaaaaaaaaaaaaaaaaaaaaaaaaaaaaaaaaaaaaaaaaaaaaaaaaaaaaaaaaaaaaaaaaaaaaaaaaaaaaaaaaaaaa

SEQ ID NO: 30422 - RNA, 1764 nt, Artificial Sequence
  mRNA product Design a-2 (hSL-A100) comprising derived and/or modified sequence from LASV(LASV221-NIG-2010;Clade II)__AIT17624__GPCmut6 (opt1)
aggagaguccgcucagccagguugcagaagcggcuuagcguguguccuaaucuucucucugcguguagguaggccugugccgcaaacaagcuuaccaugggccagaucaucaccuucuuccaggaggugccccacgucaucgaggaggugaugaacaucgugcugaucgcccucagccugcuggccauccucaaggggaucuacaacgucgcgaccugcggccuguucgggcugguguccuuccuccugcugugcggccgcagcugcuccacgaccuacaaggggguguacgagcuccagacccuggagcuggacauggccagccucaacaugugcaugccgcuguccugcacgaagaacaacagccaccacuacaucauggucggcaacgagaccggccuggagcucacccugaccaacacguccaucaucaaccacaaguucugcaaccugagcgacgcccacaagaagaaccucuacgaccacgcccugauguccaucaucagcaccuuccaccuguccauccccaacuucaaccaguacgaggccaugagcugcgacuucaacgggggcaagaucuccgugcaguacaaccucagccacaccuacgcgaucgacgccgccaaccacugcgggaccaucgccaacggcgugcugcagacguucaugcggauggcguggggcggguccuacaucgcccuggacagcggcaagggguccugggacugcaucaugaccagcuaccaguaccucaucauccagaacaccaccugggaggaccacugccaguucucccgccccagccccaucggcuaccuggggcugcucagccagcggacgcgcgacaucuacaucucccggcgccugcugggcaccuucaccuggacccucagcgacuccgagggcaacgagacgcccgggggcuacugccugacccgguggaugcugaucgaggccgagcucaagugcuucgggaacaccgccgucgccaagugcaacgagaagcacgacgaggaguucugcgacaugcugcgccuguucgacuucugcaagcaggcgauccggcgccucaagacccccgcccagaugagcauccagcugaucaacaaggccgugaacgcccugaucaacgaccagcucaucaugaagaaccaccuccgggacaucaugggcauccccuacugcaacuacuccaaguacugguaccugaaccacacggugaccgggaagaccagccugccccgcugcuggcuggucuccaacggcagcuaccugaacgagacccacuucuccgacgacaucgagcagcaggccgacaacaugaucacggagaugcuccagaaggaguacauggaccggcagggcaagaccccgcuggggcugguggaccucuucguguucagcaccuccuucuaccugaucagcaucuuccugcaccuggucaagaucccgacccaccgccacgugaucggcaagcccugccccaagccccaccggcucaaccacauggggaucugcuccugcggccuguacaagcacccgggggugcccgucaaguggaagcgcugaggacuagucccuguucccagagcccacuuuuuuuucuuuuuuugaaauaaaauagccugucuuucagaucucaaaggcucuuuucagagccaccaaaaaaaaaaaaaaaaaaaaaaaaaaaaaaaaaaaaaaaaaaaaaaaaaaaaaaaaaaaaaaaaaaaaaaaaaaaaaaaaaaaaaaaaaaaaaaaaaaaaa

SEQ ID NO: 30423 - RNA, 1764 nt, Artificial Sequence
  mRNA product Design a-2 (hSL-A100) comprising derived and/or modified sequence from LASV(LASV237-NIG-2010;Clade II)__AIT17638__GPCmut6 (opt1)
aggagaguccgcucagccagguugcagaagcggcuuagcguguguccuaaucuucucucugcguguagguaggccugugccgcaaacaagcuuaccaugggccagaucaucaccuucuuccaggaggugccccacgucaucgaggaggugaugaacaucgugcugaucgcccucagccugcuggccauccucaaggggaucuacaacgucgcgaccugcggccuguucgggcugguguccuuccuccugcugugcggccgcagcugcuccacgaccuacaaggggguguacgagcuccagacccuggagcuggacauggccagccucaacaugugcaugccgcuguccugcacgaagaacaacagccaccacuacaucauggucggcaacgagaccggccuggagcucacccugaccaacacguccaucaucaaccacaaguucugcaaccugagcgacgcccacaagaaggaccucuacgaccacgcccugauguccaucaucagcaccuuccaccuguccauccccaacuucaaccaguacgaggccaugagcugcgacuucaacgggggcaagaucuccgugcaguacaaccucagccacaccuacgcgguggacgccgccaaccacugcgggaccaucgccaacggcguccugcagacguucaugcggauggcguggggcggguccuacaucgcccuggacagcggcaagggguccugggacugcaucaugaccagcuaccaguaccucaucauccagaacaccaccugggaggaccacugccaguucucccgccccagccccaucggcuaccuggggcugcucagccagcggacgcgcgacaucuacaucucccggcgccugcugggcaccuucaccuggacccucagcgacuccgagggcaacgagacgcccgggggcuacugccugacccgguggaugcugaucgaggccgagcucaagugcuucgggaacaccgccguggccaagugcaacgagaagcacgacgaggaguucugcgacaugcugcgccuguucgacuucugcaagcaggcgauccggcgccucaagacccccgcccagaugagcauccagcugaucaacaaggccgugaacgcccugaucaacgaccagcucaucaugaagaaccaccuccgggacaucaugggcauccccuacugcaacuacuccaaguacugguaccugaaccacacggucaccgggaagaccagccugccccgcugcuggcugguguccaacggcagcuaccugaacgagacccacuucuccgacgacaucgagcagcaggccgacaacaugaucacggagcuccugcagaaggaguacauggaccggcagggcaagaccccgcuggggcucguggaccuguucgucuucagcaccuccuucuaccugaucagcaucuuccugcaccucaucaagaucccgacccaccgccacaucacgggcaagcccugccccaagccccaccggcugaaccacauggggaucugcuccugcggccuguacaagcacccgggggugcccgugaaguggaagcgcugaggacuagucccuguucccagagcccacuuuuuuuucuuuuuuugaaauaaaauagccugucuuucagaucucaaaggcucuuuucagagccaccaaaaaaaaaaaaaaaaaaaaaaaaaaaaaaaaaaaaaaaaaaaaaaaaaaaaaaaaaaaaaaaaaaaaaaaaaaaaaaaaaaaaaaaaaaaaaaaaaaaaa

SEQ ID NO: 30424 - RNA, 1764 nt, Artificial Sequence
  mRNA product Design a-2 (hSL-A100) comprising derived and/or modified sequence from LASV(LASV253-NIG-2011;Clade II)__AIT17670__GPCmut6 (opt1)
aggagaguccgcucagccagguugcagaagcggcuuagcguguguccuaaucuucucucugcguguagguaggccugugccgcaaacaagcuuaccaugggccagaucaucaccuucuuccaggaggugccccacgucaucgaggaggugaugaacaucgugcugaucgcccucagccugcuggccauccucaaggggaucuacaacgucgcgaccugcggccuguucgggcugguguccuuccuccugcugugcggccgcagcugcuccacgaccuacaaggggguguacgagcuccagacccuggagcuggacauggccagccucaacaugugcaugccgcuguccugcacgaagaacaacagccaccacuacaucauggucggcaacgagaccggccuggagcucacccugaccaacacguccaucaucaaccacaaguucugcaaccugagcgacgcccacaagaagaaccucuacgaccacgcccugauguccaucaucagcaccuuccaccuguccauccccaacuucaaccaguacgaggccaugagcugcgacuucaacgggggcaagaucuccgugcaguacaaccucagccacaccuacgcgguggacgccgccaaccacugcgggaccaucgccaacggcguccugcagacguucaugcggauggcguggggcggguccuacaucgcccuggacagcggcaagggguccugggacugcaucaugaccagcuaccaguaccucaucauccagaacaccaccugggaggaccacugccaguucucccgccccagccccaucggcuaccuggggcugcucagccagcggacgcgcgacaucuacaucucccggcgccugcugggcaccuucaccuggacccucagcgacuccgagggcaacgagacgcccgggggcuacugccugacccgguggaugcugaucgaggccgagcucaagugcuucgggaacaccgccguggccaagugcaacgagaagcacgacgaggaguucugcgacaugcugcgccuguucgacuucugcaagcaggcgauccggcgccucaaggcccccgcccagaugagcauccagcugaucaacaaggccgugaacgcccugaucaacgaccagcucaucaugaagaaccaccuccgggacaucaugggcaucccguacugcaacuacuccaaguacugguaccugaaccacaccgucacggggcgcaccagccugccccggugcuggcugguguccaacggcagcuaccugaacgagacccacuucuccgacgacaucgagcagcaggcggacaacaugaucaccgagcuccugcagaaggaguacaucgaccgccagggcaagacgccccuggggcucguggaccuguucgucuucagcaccuccuucuaccugaucagcaucuuccugcaccucgugaagaucccgacccaccggcacaucaucggcaagcccugccccaagccccaccgccugaaccacauggggaucugcuccugcggccuguacaagcacccgggggugcccgucaaguggaagcggugaggacuagucccuguucccagagcccacuuuuuuuucuuuuuuugaaauaaaauagccugucuuucagaucucaaaggcucuuuucagagccaccaaaaaaaaaaaaaaaaaaaaaaaaaaaaaaaaaaaaaaaaaaaaaaaaaaaaaaaaaaaaaaaaaaaaaaaaaaaaaaaaaaaaaaaaaaaaaaaaaaaaa

SEQ ID NO: 30425 - RNA, 1764 nt, Artificial Sequence
  mRNA product Design a-2 (hSL-A100) comprising derived and/or modified sequence from LASV(LASV254-NIG-2011;Clade II)__AIT17674__GPCmut6 (opt1)
aggagaguccgcucagccagguugcagaagcggcuuagcguguguccuaaucuucucucugcguguagguaggccugugccgcaaacaagcuuaccaugggccagaucaucaccuucuuccaggaggugccccacgucaucgaggaggugaugaacaucgugcugaucgcccucagccugcuggccauccucaaggggaucuacaacgucgcgaccugcggccuguucgggcugguguccuuccuccugcugugcggccgcagcugcuccacgaccuacaaggggguguacgagcuccagacccuggagcuggacaugaccaaccucaacaugugcaugccgcugagcugcaccaagaacaacucccaccacuacaucauggucggcaacgagaccggccuggagcucacccugacgaacaccagcaucaucaaccacaaguucugcaaccuguccgacgcccacaagaagaaccucuacaaccacgcccugaugagcaucaucuccaccuuccaccugagcauccccaacuucaaccaguacgaggccauguccugcgacuucaacgggggcaagaucagcgugcaguacaaccucucccacagcuacgccguggacgcggccaaccacugcgggaccaucgccaacggcguccugcagacguucaugcggauggccuggggcggguccuacaucgcgcuggacagcggcaaggggaacugggacugcaucaugaccuccuaccaguaccucaucauccagaacaccaccugggaggaccacugccaguucagccgccccucccccaucggcuaccuggggcugcucagccagcggacgcgcgacaucuacaucagccggcgccugcugggcaccuucaccuggacccucuccgacagcgagggcaacgagacgcccgggggcuacugccugacccgguggaugcugaucgaggccgagcucaagugcuucgggaacaccgccguggccaagugcaacgagaagcacgacgaggaguucugcgacaugcugcgccuguucgacuucugcaagcaggccauccggcgccucaagacccccgcgcaggccaacauccagcugaucaacaaggccgugaacgcccugaucaacgaccagcucaucaugaagaaccaccuccgggacaucaugggcauccccuacugcaacuacuccaaguacugguaccugaaccacacggucaccgggaagaccagccugccccgcugcuggcugguguccaacggcagcuaccugaacgagacccacuucuccgacgacaucgagcagcaggccgacaacaugaucacggagcuccugcagaaggaguacauggaccggcagggcaagaccccgcuggggcucguggaccuguucgucuucagcaccuccuucuaccugaucagcaucuuccugcaccucgugaagaucccgacccaccgccacgugaucggcaagcccugccccaagccccaccggcugaaccacauggggaucugcuccugcggccuguacaagcacccggggguccccgugaaguggaagcgcugaggacuagucccuguucccagagcccacuuuuuuuucuuuuuuugaaauaaaauagccugucuuucagaucucaaaggcucuuuucagagccaccaaaaaaaaaaaaaaaaaaaaaaaaaaaaaaaaaaaaaaaaaaaaaaaaaaaaaaaaaaaaaaaaaaaaaaaaaaaaaaaaaaaaaaaaaaaaaaaaaaaaa

SEQ ID NO: 30426 - RNA, 1764 nt, Artificial Sequence
  mRNA product Design a-2 (hSL-A100) comprising derived and/or modified sequence from LASV(Nig08-A19;Clade III)__ADU56618__GPCmut6 (opt1)
aggagaguccgcucagccagguugcagaagcggcuuagcguguguccuaaucuucucucugcguguagguaggccugugccgcaaacaagcuuaccaugggccagaucgugaccuucuuccaggaggucccccacgugaucgaggaggugaugaacaucguccugaucgcccucagcauccuggccauccugaaggggcucuacaacaucgcgaccugcggccugaucgggcuggugacguuccuccugcuguccggccgcagcugcuccaugaccuacaaggggguguacgagcuccagacccuggagcugaacaugaacacccucaacaugugcaugccgcugagcugcaccaagaacaacucccaccacuacaucauggucggcaacgagaccggccuggagcucacccugacgaacaccagccugcuccaccacaaguucugcaaccuguccgacgcccacaagaagaaccuguacgaccacacccucaugagcaucaucuccaccuuccaccugagcauccccaacuucaaccaguacgaggccauguccugcgacuucaacgggggcaagaucacggugcaguacaaccugagccacuccuacgccaucgacgccgcgaaccacugcgggaccguggccaacggcguccuccagaccuucaugcggauggccuggggcgggagcuacaucgcccuggacuccggccgcgggaagugggacugcaucaugaccagcuaccaguaccugaucauccagaacacgaccugggaggaccacugccaguucucccggcccagccccaucggcuaccucgggcugcugucccagcgcacccgggacaucuacaucagccgccggcuccugggcaccuucacguggacccugagcgacuccgagggcaacgagacccccgggggcuacugccucacccgcuggaugcugaucgaggcggagcugaagugcuucgggaacacggccguggccaagugcaacgagaagcacgacgaggaguucugcgacaugcuccggcuguucgacuucugcaagcaggccauccgccggcugaaggcccccgcgcagaugagcauccagcucaucaacaaggccgugaacgcccugaucaacgaccagcugaucaugaagaaccaccuccgcgacaucaugggcauccccuacugcaacuacuccaaguacugguaccugaaccacaccagcaccgggcggaccucccugccccgcugcuggcucgucagcaacggcuccuaccugaacgagacgcacuucagcgacgacaucgagcagcaggccgacaacaugaucaccgagaugcugcagaaggaguaccucgaccggcagggcaagaccccgcuggggcugguggaccuguucguguucuccaccagcuucuaccucaucuccaucuuccugcaccuggucaagaucccgacgcaccgccacaucgugggcaagcccugccccaagccccaccggcucaaccacauggggaucugcagcugcggccuguacaagcagccgggggugcccguccgcuggaagcggugaggacuagucccuguucccagagcccacuuuuuuuucuuuuuuugaaauaaaauagccugucuuucagaucucaaaggcucuuuucagagccaccaaaaaaaaaaaaaaaaaaaaaaaaaaaaaaaaaaaaaaaaaaaaaaaaaaaaaaaaaaaaaaaaaaaaaaaaaaaaaaaaaaaaaaaaaaaaaaaaaaaaa

SEQ ID NO: 30427 - RNA, 1767 nt, Artificial Sequence
  mRNA product Design a-2 (hSL-A100) comprising derived and/or modified sequence from LASV(G1180-SLE-2010;Clade IV)__AIT17168__GPCmut6 (opt1)
aggagaguccgcucagccagguugcagaagcggcuuagcguguguccuaaucuucucucugcguguagguaggccugugccgcaaacaagcuuaccaugggccagaucgugaccuucuuccaggaggucccccacgugaucgaggaggugaugaacaucguccugaucgcccucagcauccuggccgugcugaaggggcucuacaacuucgcgaccugcggccugguggggcugcucaccuuccugcugcucugcggccgcuccugcaccgccagccgguacaagggggucuacgagcugcagacccuggagcucaacauggagacccugaacaugugcaugccgcuguccugcaccaagaacaacagccaccacuacaucauggugggcaacgagaccggccucgagcugacccugacgaacaccuccaucaucaaccacaaguucugcaaccucagcgacgcccacaagaagaaccuguacgaccacgcccugauguccaucaucagcaccuuccaccucuccauccccaacuucaaccaguacgaggccaugagcugcgacuucaacgggggcaagaucuccgugcaguacaaccugagccacuccuacgcgggggacgccgccaaccacugcggcaccgucgccaacggggugcugcagacguucaugcgcauggcguggggcggcagcuacaucgcccucgacuccgggcacggcagcugggacugcaucaugaccuccuaccaguaccugaucauccagaacaccaccugggaggaccacugccaguucagccggcccucccccaucggguaccugggccuccugagccagcgcacgcgggacaucuacaucagccgccggcugcucggcaccuucaccuggacccuguccgacagcgaggggaaggacacgccgggcggguacugccugacccgcuggaugcucaucgaggccgagcugaagugcuucggcaacaccgccguggccaagugcaacgagaagcacgacgaggaguucugcgacaugcugcggcuguucgacuucugcaagcaggcgauccagcgccugaaggcccccgcccagauguccauccagcugaucaacaaggccgucaacgcccucaucaacgaccagcugaucaugaagaaccaccuccgggacaucauggggauccccuacugcaacuacagcaaguacugguaccucaaccacaccacgaccggcaagaccucccugcccaagugcuggcuggugagcaacggcuccuaccucaacgagacccacuucagcgacgacaucgagcagcaggcggacaacaugaucacggagaugcugcagaaggaguacauggagcgccaggggaagacgccccugggccucguggaccuguucgucuucuccaccagcuucuaccugaucuccaucuuccugcaccucgugaagaucccgacccaccggcacaucgugggcaagagcugccccaagccccaccgccugaaccacauggggaucugcuccugcgggcuguacaagcagcccggcgucccggugaaguggaagcggugaggacuagucccuguucccagagcccacuuuuuuuucuuuuuuugaaauaaaauagccugucuuucagaucucaaaggcucuuuucagagccaccaaaaaaaaaaaaaaaaaaaaaaaaaaaaaaaaaaaaaaaaaaaaaaaaaaaaaaaaaaaaaaaaaaaaaaaaaaaaaaaaaaaaaaaaaaaaaaaaaaaaa

SEQ ID NO: 30428 - RNA, 1767 nt, Artificial Sequence
  mRNA product Design a-2 (hSL-A100) comprising derived and/or modified sequence from LASV(G1442-SLE-2011;Clade IV)__AIT17180__GPCmut6 (opt1)
aggagaguccgcucagccagguugcagaagcggcuuagcguguguccuaaucuucucucugcguguagguaggccugugccgcaaacaagcuuaccaugggccagaucgugaccuucuuccaggaggucccccacgugaucgaggaggugaugaacaucguccugaucgcccucagcauccuggccgugcugaaggggcucuacaacguggcgaccugcggccugaucgggcuggucacguuccuccugcugugcggccgcuccugcaccaccacccucuacaaggggguguacgagcugcagacgcuggagcucaacauggagacccugaacaugugcaugccgcugagcugcaccaagaacaacucccaccacuacauccgggugggcaacgagacgggccucgagcugacccugaccaacaccagcaucaucaaccacaaguucugcaaccucuccgacgcccacaagaagaaccuguacgaccacgcccugaugagcaucaucuccacguuccaccucagcauccccaacuucaaccaguacgaggccauguccugcgacuucaacgggggcaagaucagcguccaguacaaccugucccacagcuacgccggggacgcggccaaccacugcggcaccguggccaacggggugcugcagaccuucaugcgcauggccuggggcggcuccuacaucgcgcucgacagcgggcggggcaacugggacugcaucaugaccuccuaccaguaccugaucauccagaacacgaccugggacgaccacugccaguucagccgccccucccccaucggguaccugggccuccugagccagcggacccgcgacgucuacaucucccggcgccugcucggcaccuucacguggacccugagcgacagcgaggggaaggacaccccgggcggguacugccugacccgguggaugcucaucgaggccgagcugaagugcuucggcaacacggccguggccaagugcaacgagaagcacgacgaggaguucugcgacaugcugcgccucuucgacuucugcaagcaggccauccagcggcugaaggcgcccgcccagauguccauccagcugaucaacaaggccgugaacgcccucaucaacgaccagcugaucaugaagaaccaccuccgcgacaucauggggauccccuacugcaacuacagcaaguacugguaccugaacaacaccgccaccggcaagaccucccugcccaagugcuggcugaucagcaacggcuccuaccucaacgagacgcacuucagcgacgacaucgagcaggaggcggacaacaugaucaccgagaugcugcagaaggaguacauggagcggcaggggaagacgccccugggccucgucgaccuguucguguucuccaccagcuucuaccugaucuccaucuuccugcaccucgugaagaucccgacccaccgccacaucgucggcaagagcugccccaagccccaccggcugaaccacauggggaucugcuccugcgggcuguacaagcagcccggcgugccggugcgcuggaagcggugaggacuagucccuguucccagagcccacuuuuuuuucuuuuuuugaaauaaaauagccugucuuucagaucucaaaggcucuuuucagagccaccaaaaaaaaaaaaaaaaaaaaaaaaaaaaaaaaaaaaaaaaaaaaaaaaaaaaaaaaaaaaaaaaaaaaaaaaaaaaaaaaaaaaaaaaaaaaaaaaaaaaa

SEQ ID NO: 30429 - RNA, 1767 nt, Artificial Sequence
  mRNA product Design a-2 (hSL-A100) comprising derived and/or modified sequence from LASV(G3010-SLE-2013;Clade IV)__AIT17344__GPCmut6 (opt1)
aggagaguccgcucagccagguugcagaagcggcuuagcguguguccuaaucuucucucugcguguagguaggccugugccgcaaacaagcuuaccaugggccagaucgugaccuucuuccaggaggucccccacgugaucgaggaggugaugaacaucguccugaucgcccucagcauccuggccgugcugaaggggcucuacaacuucgcgaccugcggccugguggggcuggucacguuccuccugcugugcggccgcuccugcaccaccagccucuacaaggggguguacgagcugcagacccuggagcucaacauggagacgcugaacaugugcaugccgcuguccugcaccaagaacaacagccaccacuacaucauggugggcaacgagaccggccucgagcugacgcugaccaacaccuccaucaucaaccacaaguucugcaaccucagcgacgcccacaagaagaaccuguacaaccacgcccugauguccaucaucagcaccuuccaccucuccauccccaacuucaaccaguacgaggccaugagcugcgacuucaacgggggcaagaucuccguccaguacaaccugagccacuccuacgccggggacgcggccagccacugcggcacgguggccaacggggugcugcagaccuucaugcggauggccuggggcggcuccuacaucgcgcucgacagcggguacggcaagugggacugcaucaugaccuccuaccaguaccugaucauccagaacaccacgugggaggaccacugccaguucagccgccccucccccaucggguaccugggccuccugagccagcggacccgcgacaucuacaucagccggcgccugcucggcaccuucaccuggacgcuguccgacagcgaggggaaggacaccccgggcggguacugccugacccgguggaugcucaucgaggccgagcugaagugcuucggcaacaccgccgucgccaagugcaacgagaagcacgacgaggaguucugcgacaugcugcgccucuucgacuucugcaagcaggccauccagcggcugaagacgcccgcgcagauguccauccagcugaucaacaaggccgugaacgcccucaucaacgaccagcugaucaugaagaaccaccuccgcgacaucauggggauccccuacugcaacuacagcaaguacugguaccugaaccacaccaccaccggcaagacgucccugcccaagugcuggcuggugagcaacggcuccuaccucaacgagacccacuucagcgacgacaucgagcagcaggccgacaacaugaucaccgagaugcugcagaaggaguacauggagcggcaggggaagacgccccugggccucgucgaccuguucguguucuccaccagcuucuaccugaucuccaucuuccugcaccucgugaagaucccgacccaccgccacaucgucggcaagagcugccccaagccccaccggcugaaccacauggggaucugcuccugcgggcuguacaagcagcccggcgugccggugcgcuggaagcggugaggacuagucccuguucccagagcccacuuuuuuuucuuuuuuugaaauaaaauagccugucuuucagaucucaaaggcucuuuucagagccaccaaaaaaaaaaaaaaaaaaaaaaaaaaaaaaaaaaaaaaaaaaaaaaaaaaaaaaaaaaaaaaaaaaaaaaaaaaaaaaaaaaaaaaaaaaaaaaaaaaaaa

SEQ ID NO: 30430 - RNA, 1767 nt, Artificial Sequence
  mRNA product Design a-2 (hSL-A100) comprising derived and/or modified sequence from LASV(G502-SLE-2009;Clade IV)__AIT17126__GPCmut6 (opt1)
aggagaguccgcucagccagguugcagaagcggcuuagcguguguccuaaucuucucucugcguguagguaggccugugccgcaaacaagcuuaccaugggccagaucgugaccuucuuccaggaggucccccacgugaucgaggaggugaugaacaucguccugaucgcccucagcauccuggccgugcugaaggggcucuacaacuucgcgaccugcggccugguggggcugcucacguuccugcugcucugcggccgcuccugcaccaccgggcuguacaagggcgucuacgagcugcagacccucgagcugaacauggagacgcugaacaugugcaugccgcucagcugcaccaagaacaacucccaccacuacaucauggugggcaacgagaccgggcuggagcugacgcucaccaacaccagcaucaucaaccacaaguucugcaaccuguccgacgcccacaagaagaaccuguacgaccacgcccucaugagcaucaucuccaccuuccaccugagcauccccaacuucaaccaguacgaggccauguccugcgacuucaacggcgggaagaucagcgugcaguacaaccugucccacagcuacgccggcgacgcggccgaccacugcgggacggucgccaacggcgugcuccagaccuucaugcggauggccuggggcggguccuacaucgcgcuggacagcggccgcgggcggugggacugcaucaugaccuccuaccaguaccugaucauccagaacaccacgugggaggaccacugccaguucagccgccccucccccaucggcuaccucggccugcugagccagcggacccgcgacaucuacaucucccggcgccuccuggggaccuucaccuggacgcugagcgacagcgagggcaaggacacccccgggggcuacugccucacccgguggaugcugaucgaggccgagcugaagugcuucgggaacaccgccguggccaagugcaacgagaagcacgacgaggaguucugcgacaugcuccgccuguucgacuucugcaagcaggccauccagcggcugaaggcgcccgcccagauguccauccagcucaucaacaaggccgucaacgcccugaucaacgaccagcuggugaugaagaaccaccuccgcgacaucaugggcauccccuacugcaacuacagccgguacugguaccugaaccacacgaccaccggccgcaccucccugcccaagugcuggcucgugagcaacggguccuaccugaacgagacgcacuucagcgacgacaucgagcagcaggccgacaacaugaucaccgagaugcugcagaaggaguacauggagcggcagggcaagaccccgcucgggcuggucgaccuguucguguucuccaccagcuucuaccugaucuccaucuuccuccaccuggugaagaucccgacgcaccgccacaucgucggcaagagcugccccaagccccaccggcugaaccacauggggaucugcuccugcggccucuacaagcagcccggcgugccggugaaguggaagcgcugaggacuagucccuguucccagagcccacuuuuuuuucuuuuuuugaaauaaaauagccugucuuucagaucucaaaggcucuuuucagagccaccaaaaaaaaaaaaaaaaaaaaaaaaaaaaaaaaaaaaaaaaaaaaaaaaaaaaaaaaaaaaaaaaaaaaaaaaaaaaaaaaaaaaaaaaaaaaaaaaaaaaa

SEQ ID NO: 30431 - RNA, 1767 nt, Artificial Sequence
  mRNA product Design a-2 (hSL-A100) comprising derived and/or modified sequence from LASV(G733-SLE-2010;Clade IV)__AIT17154__GPCmut6 (opt1)
aggagaguccgcucagccagguugcagaagcggcuuagcguguguccuaaucuucucucugcguguagguaggccugugccgcaaacaagcuuaccaugggccagaucgugaccuucuuccaggaggucccccacgugaucgaggaggugaugaacaucguccugaucgcccucagcauccuggccgugcugaaggggcucuacaacuucgcgaccugcggcaucguggggcuggucuccuuccugcuccugugcggccgcagcugcacgaccucccuguacaaggggguguacgagcuccagacccuggagcugaacauggagacccucaacaugugcaugccgcugagcugcaccaagaacaacucccaccacuacaucauggugggcaacgagaccggccuggagcucacccugacgaacaccagcaucaucaaccacaaguucugcaaccuguccgacgcccacaagaagaaccucuacgaccacgcccugaugagcaucaucuccaccuuccaccugagcauccccaacuucaaccaguacgaggccauguccugcgacuucaacgggggcaagaucagcguccaguacaaccucucccacagcuacgccggggacgcggccaaccacugcggcaccaucgccaacggggugcugcagacguucaugcggauggccuggggcggcuccuacaucgcgcuggacagcgggcgcgaccggugggacugcaucaugaccuccuaccaguaccucaucauccagaacaccaccugggaggaccacugccaguucagccgccccucccccaucggcuaccuggggcugcucagccagcggacgcgcgacaucuacaucagccggcgccugcugggcaccuucaccuggacccucuccgacagcgagggcaaggacacgcccgggggcuacugccugacccgguggaugcugaucgaggccgagcucaagugcuucgggaacaccgccguggccaagugcaacgagaagcacgacgaggaguucugcgacaugcugcgccuguucgacuucugcaagcaggccauccagcggcucaaggcgcccgcccagauguccauccagcugaucaacaaggccgucaacgcccugaucaacgaccagcucaucaugaagaaccaccuccgcgacaucaugggcauccccuacugcaacuacagcaaguacugguaccugaaccacaccacgaccgggaagaccucccugcccaagugcuggcuggugagcaacggcuccuaccugaacgagacccacuucagcgacgacaucgagcagcaggccgacaacaugaucacggagaugcuccagaaggaguacauggagcggcagggcaagaccccgcuggggcugguggaccucuucgucuucuccaccagcuucuaccugaucuccaucuuccugcaccuggugaagaucccgacccaccgccacguggucggcaagagcugccccaagccccaccggcucaaccacauggggaucugcuccugcggccuguacgggcagcccggcgugccggugaaguggaagcgcugaggacuagucccuguucccagagcccacuuuuuuuucuuuuuuugaaauaaaauagccugucuuucagaucucaaaggcucuuuucagagccaccaaaaaaaaaaaaaaaaaaaaaaaaaaaaaaaaaaaaaaaaaaaaaaaaaaaaaaaaaaaaaaaaaaaaaaaaaaaaaaaaaaaaaaaaaaaaaaaaaaaaa

SEQ ID NO: 30432 - RNA, 1767 nt, Artificial Sequence
  mRNA product Design a-2 (hSL-A100) comprising derived and/or modified sequence from MOPV/LASV reassortant(IGS-1;Clade IV)__AFY05576__GPCmut6 (opt1)
aggagaguccgcucagccagguugcagaagcggcuuagcguguguccuaaucuucucucugcguguagguaggccugugccgcaaacaagcuuaccaugggccagaucgugaccuucuuccaggaggucccccacgugaucgaggaggugaugaacaucguccugaucgcccucagcgugcuggccgugcugaaggggcucuacaacuucgcgaccugcggccuggucgggcuggugacguuccuccugcugugcggccgcuccugcaccaccagccucuacaaggggguguacgagcugcagacccuggagcucaacauggagacgcugaacaugugcaugccgcuguccugcaccaagaacaacagccaccacuacaucauggucggcaacgagaccggccucgagcugacgcugaccaacaccuccaucaucaaccacaaguucugcaaccucagcgacgcccacaagaagaaccuguacgaccacgcccugauguccaucaucagcaccuuccaccucuccauccccaacuucaaccaguacgaggccaugagcugcgacuucaacgggggcaagaucuccgugcaguacaaccugagccacuccuacgccggggacgcggccaaccacugcggcacgguggccaacgggguccugcagaccuucaugcggauggccuggggcggcagcuacaucgcgcucgacuccgggcgcggcaacugggacugcaucaugaccagcuaccaguaccugaucauccagaacaccacgugggaggaccacugccaguucucccggcccagccccaucggguaccugggccuccugucccagcgcacccgggacaucuacaucagccgccggcugcucggcaccuucaccuggacgcugagcgacuccgagggggaggacaccccgggcggguacugccugacccgcuggaugcucaucgaggccgagcugaagugcuucggcaacaccgccguggccaagugcaacgagaagcacgacgaggaguucugcgacaugcugcggcuguucgacuucugcaagcaggccauccagcgccugaaggcgcccgcccagaugagcauccagcugaucaacaaggccgugaacgcccucaucaacgaccagcugaucaugaagaaccaccuccgggacaucauggggauccccuacugcaacuacuccaaguacugguaccucaaccacacgaccaccggccgcaccagccugcccaagugcuggcuggucuccaacggcagcuaccucaacgagacgcacuucuccgacgacaucgagcagcaggccgacaacaugaucaccgagaugcugcagaaggaguacauggagcggcaggggaagacgccccugggccucguggaccuguucguguucagcaccuccuucuaccugaucagcaucuuccugcaccucgucaagaucccgacccaccgccacaucguggggaaguccugccccaagccccaccggcugaaccacaugggcaucugcagcugcgggcuguacaagcagcccggcgugccggucaaguggaagcgcugaggacuagucccuguucccagagcccacuuuuuuuucuuuuuuugaaauaaaauagccugucuuucagaucucaaaggcucuuuucagagccaccaaaaaaaaaaaaaaaaaaaaaaaaaaaaaaaaaaaaaaaaaaaaaaaaaaaaaaaaaaaaaaaaaaaaaaaaaaaaaaaaaaaaaaaaaaaaaaaaaaaaa

SEQ ID NO: 30433 - RNA, 1767 nt, Artificial Sequence
  mRNA product Design a-2 (hSL-A100) comprising derived and/or modified sequence from LASV(LM765-SLE-2012;Clade IV)__AIT17814__GPCmut6 (opt1)
aggagaguccgcucagccagguugcagaagcggcuuagcguguguccuaaucuucucucugcguguagguaggccugugccgcaaacaagcuuaccaugggccagaucgugaccuucuuccaggaggucccccacgugaucgaggaggugaugaacaucguccugaucgcccucagcauccuggccgugcugaaggggcucuacaacuucgcgaccugcggccugguggggcuggucacguuccuccugcugugcggccgcuccugcaccaccagccucuacaaggggguguacgagcugcagacccuggagcucaacauggagacgcugaacaugugcaugccgcuguccugcaccaagaacaacagccaccacuacaucauggugggcaacgagaccggccucgagcugacgcugaccaacaccuccaucaucgaccacaaguucugcaaccucagcgacgcccaccggaagaaccuguacgaccacgcccugauguccaucaucagcaccuuccaccucuccauccccaacuucaaccaguacgaggccaugagcugcgacuucaacgggggcaagaucuccguccaguacaaccugagccacuccuacgccaaggacgcggccgaccacugcgggacgguggccaacggcgugcugcagaccuucaugcgcauggccuggggcgggagcuacaucgcgcucgacuccggccgggggcgcugggacugcaucaugaccagcuaccaguaccugaucauccagaacaccacgugggaggaccacugccaguucucccggcccagccccaucggcuaccuggggcuccugucccagcgcacccgggacaucuacaucagccgccggcugcucggcaccuucaccuggacgcugagcgacuccgagggcaaggacacccccgggggcuacugccugacccgcuggaugcucaucgaggccgagcugaagugcuucgggaacaccgccgucgccaagugcaacgagaagcacgacgaggaguucugcgacaugcugcggcuguucgacuucugcaagcaggccauccagcgccugaaggcgcccgcccagaugagcauccagcugaucaacaaggccgugaacgcccucaucaacgaccagcugaucaugaagaaccaccuccgggacaucaugggcauccccuacugcaacuacuccaaguacugguaccucaaccacacgaccaccgggaagaccagccugcccaagugcuggcugguguccaacggcagcuaccucaacgagacgcacuucuccgacgacaucgagcagcaggccgacaacaugaucaccgagaugcugcagaaggaguacauggagcgccagggcaagaccccgcuggggcucgucgaccuguucguguucagcaccuccuucuaccugaucagcaucuuccugcaccucgugaagaucccgacgcaccggcacaucgucggcaagcccugccccaagccccaccgccugaaccacauggggaucugcuccugcggccuguacaagcagccgggggugcccgugaaguggaagcggugaggacuagucccuguucccagagcccacuuuuuuuucuuuuuuugaaauaaaauagccugucuuucagaucucaaaggcucuuuucagagccaccaaaaaaaaaaaaaaaaaaaaaaaaaaaaaaaaaaaaaaaaaaaaaaaaaaaaaaaaaaaaaaaaaaaaaaaaaaaaaaaaaaaaaaaaaaaaaaaaaaaaa

SEQ ID NO: 30434 - RNA, 1767 nt, Artificial Sequence
  mRNA product Design a-2 (hSL-A100) comprising derived and/or modified sequence from LASV(LM776-SLE-2012;Clade IV)__AIT17824__GPCmut6 (opt1)
aggagaguccgcucagccagguugcagaagcggcuuagcguguguccuaaucuucucucugcguguagguaggccugugccgcaaacaagcuuaccaugggccagaucgugaccuucuuccaggaggucccccacgugaucgaggaggugaugaacaucguccugaucgcccucagcauccuggccgugcugaaggggcucuacaacuucgcgaccugcggccugguggggcuggucacguuccuccugcugugcggccgcuccugcaccaccagcguguacaaggggguguacgagcuccagacccuggagcugaacauggagacgcucaacaugugcaugccgcuguccugcaccaagaacaacagccaccacuacaucauggucggcaacgagaccggccuggagcucacgcugaccaacaccuccaucaucaaccacaaguucugcaaccugagcgacgcccacaagaagaaccucuacgaccacgcccugauguccaucaucagcaccuuccaccuguccauccccaacuucaaccaguacgaggccaugagcugcgacuucaacgggggcaagaucuccgugcaguacaaccucagccacuccuacgccggggacgcggccaaccacugcggcacgguggccaacgggguccugcagaccuucaugcggauggccuggggcggcagcuacaucgcgcuggacuccgggcacggcaagugggacugcaucaugaccagcuaccaguaccucaucauccagaacaccacgugggaggaccacugccaguucucccgccccagccccaucggguaccugggccugcucucccagcggacccgcgacaucuacaucagccggcgccugcugggcaccuucaccuggacgcucagcgacuccgaggggaaggacaccccgggcggguacugccugacccgguggaugcugaucgaggccgagcucaagugcuucggcaacaccgccguggccaagugcaacgagaagcacgacgaggaguucugcgacaugcugcgccuguucgacuucugcaagcaggccauccagcggcucaaggcgcccgcccagaugagcauccagcugaucaacaaggccgugaacgcccugaucaacgaccagcucaucaugaagaaccaccuccgcgacaucauggggauccccuacugcaacuacuccaaguacugguaccugaaccacacgaccaccggcaagaccagccugcccaagugcuggcuggucuccaacggcagcuaccugaacgagacgcacuucuccgacgacaucgagcagcaggccgacaacaugaucaccgagaugcuccagaaggaguacauggagcggcaggggaagacgccccugggccugguggaccucuucguguucagcaccuccuucuaccugaucagcaucuuccugcaccuggucaagaucccgacccaccgccacaucguggggaaguccugccccaagccccaccggcucaaccacaugggcaucugcagcugcgggcuguacaagcagcccggcgugccgguccgcuggaagcggugaggacuagucccuguucccagagcccacuuuuuuuucuuuuuuugaaauaaaauagccugucuuucagaucucaaaggcucuuuucagagccaccaaaaaaaaaaaaaaaaaaaaaaaaaaaaaaaaaaaaaaaaaaaaaaaaaaaaaaaaaaaaaaaaaaaaaaaaaaaaaaaaaaaaaaaaaaaaaaaaaaaaa

SEQ ID NO: 30435 - RNA, 1767 nt, Artificial Sequence
  mRNA product Design a-2 (hSL-A100) comprising derived and/or modified sequence from LASV(Mad39;Clade IV)__ANH09722__GPCmut6 (opt1)
aggagaguccgcucagccagguugcagaagcggcuuagcguguguccuaaucuucucucugcguguagguaggccugugccgcaaacaagcuuaccaugggccagaucgugaccuucuuccaggaggucccccacgugaucgaggaggugaugaacaucguccugaucgcccucagcauccuggccgugcugaaggggcucuacaacguggcgaccugcggccugaucgggcuggucacguuccuccugcugugcggccgcuccugcaccaccacccucuacaaggggguguacgagcugcaggcccuggagcucaacauggagacgcugaacaugugcaugccgcugagcugcaccaagaacaacucccaccacuacauccgggugggcaacgagaccggccucgagcugacgcugaccaacaccagccucaucaaccacaaguucugcaaccuguccgacgcccacaagaagaaccuguacgaccacgcccucaugagcaucaucuccaccuuccaccugagcauccccaacuucaaccaguacgaggccauguccugcgacuucaacgacgggaagaucagcguccaguacaaccugucccacacguacgcgggcgacaccgccaaccacugcgggaccguggccaacggcgugcuccagaccuucaugcgcauggccuggggcgggagcuacaucgcgcuggacuccggccgcgggggcugggacugcaucaugacgagcuaccaguaccugaucauccagaacaccaccugggaggaccacugccaguucucccggcccagccccaucggguaccucggccugcugucccagcggacccgcgacaucuacaucagccggcgccuccugggcacguucaccuggacccuguccgacagcgaggggaaggacaccccgggcggguacugccucacgcgguggaugcugaucgaggccgagcugaagugcuucggcaacaccgccgucgccaagugcaacgagaagcacgacgaggaguucugcgacaugcuccgccuguucgacuucugcaagcaggccauccagcggcugaaggcgcccgcccagaugagcauccagcucaucaacaaggccgugaacgcccugaucaacgaccagcugaucaugaagaaccaccuccgcgacaucauggggauccccuacugcaacuacuccaaguacugguaccugaaccacaccgugaccggcaagacgagccugcccaagugcuggcucgucuccaacggcagcuaccugaacgagacccacuucuccgacgacaucgagcagcaggccgacaacaugaucaccgagaugcugcagaaggaguacauggagcggcaggggaagacgccccucggccugguggaccuguucguguucagcaccuccuucuaccugaucagcaucuuccuccaccuggucaagaucccgacccaccgccacgugguggggaagcccugccccaagccccaccggcugaaccacaugggcaucugcuccugcggguucuacaagcagccgggcguccccgugcgcuggaagcggugaggacuagucccuguucccagagcccacuuuuuuuucuuuuuuugaaauaaaauagccugucuuucagaucucaaaggcucuuuucagagccaccaaaaaaaaaaaaaaaaaaaaaaaaaaaaaaaaaaaaaaaaaaaaaaaaaaaaaaaaaaaaaaaaaaaaaaaaaaaaaaaaaaaaaaaaaaaaaaaaaaaaa

SEQ ID NO: 30436 - RNA, 1767 nt, Artificial Sequence
  mRNA product Design a-2 (hSL-A100) comprising derived and/or modified sequence from LASV(Z0947-SLE-2011;Clade IV)__AIT17840__GPCmut6 (opt1)
aggagaguccgcucagccagguugcagaagcggcuuagcguguguccuaaucuucucucugcguguagguaggccugugccgcaaacaagcuuaccaugggccagaucgugaccuucuuccaggaggucccccacgugaucgaggaggugaugaacaucguccugaucgcccucagcauccuggccgugcugaaggggcucuacaacuucgcgaccugcggccugguggggcuggucacguuccuccugcugugcggccgcuccugcaccaucagccucuacaaggggguguacgagcugcagacccuggagcucaacauggagacccugaacaugugcaugccgcuguccugcaccaagaacaacagccaccacuacaucauggugggcaacgagaccggccucgagcugacccugacgaacaccuccaucaucaaccacaaguucugcaaccucagcgacgcccacaagaagaaccuguacgaccacgcccugauguccaucaucagcaccuuccaccucuccauccccaacuucaaccaguacgaggccaugagcugcgacuucaacgggggcaagaucuccguccaguacaaccugagccacuccuacgccggggacgcggccaaccacugcggcaccguggccaacggggugcugcagacguucaugcggauggccuggggcggcagcuacaucgcgcucgacuccgggcgcgaccggugggacugcaucaugaccagcuaccaguaccugaucauccagaacaccaccugggaggaccacugccaguucucccgccccagccccaucggcuaccuggggcuccugucccagcggacgcgcgacaucuacaucagccggcgccugcucggcaccuucaccuggacccugagcgacuccgagggcaaggacacgcccgggggcuacugccugacccgguggaugcucaucgaggccgagcugaagugcuucgggaacaccgccgucgccaagugcaacgagaagcacgacgaggaguucugcgacaugcugcgccucuucgacuucugcaagcaggccauccagcggcugaaggcgcccgcccagaugagcauccagcugaucaacaaggccgugaacgcccucaucaacgaccagcugaucaugaagaaccaccuccgcgacaucaugggcauccccuacugcaacuacuccaaguacugguaccugaaccacaccacgaccgggaagaccagccugcccaagugcuggcugguguccaacggcagcuaccucaacgagacccacuucuccgacgacaucgagcagcaggccgacaacaugaucacggagaugcugcagaaggaguacauggagcggcagggcaagaccccgcuggggcucgucgaccuguucguguucagcaccuccuucuaccugaucagcaucuuccugcaccucgugaagaucccgacccaccgccacaucgucggcaagcccugccccaagccccaccggcugaaccacauggggaucugcuccugcggccuguacaagcagccgggggugcccgugaaguggaagcgcugaggacuagucccuguucccagagcccacuuuuuuuucuuuuuuugaaauaaaauagccugucuuucagaucucaaaggcucuuuucagagccaccaaaaaaaaaaaaaaaaaaaaaaaaaaaaaaaaaaaaaaaaaaaaaaaaaaaaaaaaaaaaaaaaaaaaaaaaaaaaaaaaaaaaaaaaaaaaaaaaaaaaa

SEQ ID NO: 30437 - RNA, 1767 nt, Artificial Sequence
  mRNA product Design a-2 (hSL-A100) comprising derived and/or modified sequence from LASV(Josiah;Clade IV)__NP_694870__GPCmut6 (opt1)
aggagaguccgcucagccagguugcagaagcggcuuagcguguguccuaaucuucucucugcguguagguaggccugugccgcaaacaagcuuaccaugggccagaucgugaccuucuuccaggaggucccccacgugaucgaggaggugaugaacaucguccugaucgcccucagcgugcuggccgugcugaaggggcucuacaacuucgcgaccugcggccuggucgggcuggugacguuccuccugcugugcggccgcuccugcaccaccagccucuacaaggggguguacgagcugcagacccuggagcucaacauggagacgcugaacaugugcaugccgcuguccugcaccaagaacaacagccaccacuacaucauggucggcaacgagaccggccucgagcugacccugacgaacaccuccaucaucaaccacaaguucugcaaccucagcgacgcccacaagaagaaccuguacgaccacgcccugauguccaucaucagcaccuuccaccucuccauccccaacuucaaccaguacgaggccaugagcugcgacuucaacgggggcaagaucuccgugcaguacaaccugagccacuccuacgccggggacgcggccaaccacugcggcaccguggccaacgggguccugcagacguucaugcggauggccuggggcggcagcuacaucgcgcucgacuccgggcgcggcaacugggacugcaucaugaccagcuaccaguaccugaucauccagaacaccaccugggaggaccacugccaguucucccggcccagccccaucggguaccugggccuccugucccagcgcacgcgggacaucuacaucagccgccggcugcucggcaccuucaccuggacccugagcgacuccgaggggaaggacacgccgggcggguacugccugacccgcuggaugcucaucgaggccgagcugaagugcuucggcaacaccgccguggccaagugcaacgagaagcacgacgaggaguucugcgacaugcugcggcuguucgacuucugcaagcaggccauccagcgccugaaggcgcccgcccagaugagcauccagcugaucaacaaggccgugaacgcccucaucaacgaccagcugaucaugaagaaccaccuccgggacaucauggggauccccuacugcaacuacuccaaguacugguaccucaaccacaccacgaccggccgcaccagccugcccaagugcuggcuggucuccaacggcagcuaccucaacgagacccacuucuccgacgacaucgagcagcaggccgacaacaugaucacggagaugcugcagaaggaguacauggagcggcaggggaagaccccgcugggccugguggaccucuucguguucagcaccuccuucuaccugaucagcaucuuccugcaccucgucaagauccccacccaccgccacaucguggggaaguccugccccaagccccaccggcugaaccacaugggcaucugcagcugcgggcuguacaagcagccgggcgugcccgucaaguggaagcgcugaggacuagucccuguucccagagcccacuuuuuuuucuuuuuuugaaauaaaauagccugucuuucagaucucaaaggcucuuuucagagccaccaaaaaaaaaaaaaaaaaaaaaaaaaaaaaaaaaaaaaaaaaaaaaaaaaaaaaaaaaaaaaaaaaaaaaaaaaaaaaaaaaaaaaaaaaaaaaaaaaaaaa

SEQ ID NO: 30438 - RNA, 1764 nt, Artificial Sequence
  mRNA product Design a-2 (hSL-A100) comprising derived and/or modified sequence from LASV(LP;Clade I)__AAF86701__GPCmut6 (opt1)
aggagaguccgcucagccagguugcagaagcggcuuagcguguguccuaaucuucucucugcguguagguaggccugugccgcaaacaagcuuaccaugggccagaucaucaccuucuuccaggaggugccccacgucaucgaggaggugaugaacaucgugcugaucgcccucagccugcuggccauccucaaggggcuguacaacaucgcgaccugcggcaucaucgggcuggucgccuuccucuuccugugcggcaaguccugcagccugacgcucaagggcggguacgagcugcagacccuggagcucaacauggagacccugaacaugugcaugccgcuguccugcaccaagaacagcucccaccacuacauccgcgugggcaacgagacggggcucgagcugacccugaccaacaccagcaucaucaaccacaaguucugcaaccucuccgacgcccacaagaagaaccuguacgaccacgcccugaugagcaucaucuccacguuccaccucagcauccccaacuucaaccaguacgaggccauguccugcgacuucaacggcgggaagaucagcgugcaguacaaccugucccacagcuacgcgggcgacgccgccgagcacugcgggaccgucgccaacggcgugcugcagaccuucaugcggauggcguggggcgggcgcuacaucgcccucgacuccggcaaggggaacugggacugcaucaugaccagcuaccaguaccugaucauccagaacacgaccugggaggaccacugccaguucucccggcccagccccaucggcuaccugggccuccugucccagcgcacccgggacaucuacaucagccgccggcugcucgggaccuucacguggacccugagcgacuccgagggcaacgagacccccgggggcuacugccugacccgcuggaugcucaucgaggccgagcugaagugcuucgggaacacggccguggccaagugcaacgagaagcacgacgaggaguucugcgacaugcugcggcuguucgacuucugcaagcaggcgauccgccggcugaaggccccggcccagaugagcauccagcugaucaacaaggccgucaacgcccucaucaacgaccagcugaucaugaagaaccaccuccgcgacaucaugggcauccccuacugcaacuacuccaaguacugguaccucaaccacaccagcuccggccggaccagccugcccaagugcuggcugaucuccaacgggagcuaccucaacgagacccaguucuccgacgacaucgagcagcaggcggacaacaugaucacggagaugcugcagaaggaguacaucgagcgccagggcaagaccccgcuggggcugguggacaucuucaucuucagcaccuccuucuaccucaucagcaucuuccugcaccugaucaagauccccacccaccggcacaucgugggcaagcccugccccaagccgcaccgccucaaccacaugggggucugcuccugcggccuguacaagcaccccggcgugcccacgaaguggaagcggugaggacuagucccuguucccagagcccacuuuuuuuucuuuuuuugaaauaaaauagccugucuuucagaucucaaaggcucuuuucagagccaccaaaaaaaaaaaaaaaaaaaaaaaaaaaaaaaaaaaaaaaaaaaaaaaaaaaaaaaaaaaaaaaaaaaaaaaaaaaaaaaaaaaaaaaaaaaaaaaaaaaaa

SEQ ID NO: 30439 - RNA, 1764 nt, Artificial Sequence
  mRNA product Design a-2 (hSL-A100) comprising derived and/or modified sequence from LASV(803213;Clade II)__AAF86703__GPCmut6 (opt1)
aggagaguccgcucagccagguugcagaagcggcuuagcguguguccuaaucuucucucugcguguagguaggccugugccgcaaacaagcuuaccaugggccagaucaucaccuucuuccaggaggugccccacgucaucgaggaggugaugaacaucgugcugaucgcccucagccugcuggccauccucaaggggaucuacaacgucgcgaccugcggccuguucgggcugaucuccuuccuccugcugugcggccgcagcugcuccgugacguacaaggggguguacgagcuccagacccuggagcugaacauggccaaccucaacaugugcaugccgcugagcugcaccaagaacaacucccaccacuacaucauggucggcaacgagaccggccuggagcucacgcugaccaacaccagcaucaucaaccacaaguucugcaaccuguccgacgcccacaagaagaaccucuacgaccacgcccugaugagcaucaucuccaccuuccaccugagcauccccaacuucaaccaguacgaggccauguccugcgacuucaacgggggcaagaucagcgugcaguacaaccucucccacagcuucgcgguggacgccgccaaccacugcgggacgaucgccaacggcguccugcagaccuucaugcggauggcguggggcggguccuacaucgcccuggacagcggcaaggggaacugggacugcaucaugaccuccuaccaguaccucaucauccagaacaccacgugggaggaccacugccaguucagccgccccucccccaucggcuaccuggggcugcucagccagcggacccgcgacaucuacaucagccggcgccugcugggcaccuucaccuggacgcucuccgacagcgagggcaacgaggcccccgggggcuacugccugacccgguggaugcugaucgaggccgagcucaagugcuucgggaacaccgccguggcgaagugcaacgagaagcacgacgaggaguucugcgacaugcugcgccuguucgacuucugcaagcaggccaucaagcggcucaagaccccggcccagauguccauccagcugaucaacaaggccgugaacgcccugaucaacgaccagcucaucaugaagaaccaccuccgcgacaucaugggcauccccuacugcaacuacagccgguacugguaccugaaccacacggucaccgggaagaccucccugccccgcugcuggcuggugagcaacggcuccuaccugaacgagacccacuucagcgacgacaucgagcagcaggcggacaacaugaucacggagaugcuccagaaggaguacauggaccggcagggcaagaccccgcuggggcugguggaccuguucgucuucuccaccagcuucuaccucaucuccaucuuccugcaccuggugaagauccccacccaccgccacaucgugggcaagcccugccccaagccgcaccggcucaaccacauggggaucugcagcugcggccuguacaagcaccccgggguccccgugaaguggaagcgcugaggacuagucccuguucccagagcccacuuuuuuuucuuuuuuugaaauaaaauagccugucuuucagaucucaaaggcucuuuucagagccaccaaaaaaaaaaaaaaaaaaaaaaaaaaaaaaaaaaaaaaaaaaaaaaaaaaaaaaaaaaaaaaaaaaaaaaaaaaaaaaaaaaaaaaaaaaaaaaaaaaaaa

SEQ ID NO: 30440 - RNA, 1764 nt, Artificial Sequence
  mRNA product Design a-2 (hSL-A100) comprising derived and/or modified sequence from LASV(GA391;Clade III)__CAA36645__GPCmut6 (opt1)
aggagaguccgcucagccagguugcagaagcggcuuagcguguguccuaaucuucucucugcguguagguaggccugugccgcaaacaagcuuaccaugggccagaucgugaccuucuuccaggaggucccccacgugaucgaggaggugaugaacaucguccugaucgcccucagcauccuggccauccugaaggggcucuacaacguggcgaccugcggccugaucgggcuggugacguuccuccugcuguccggccgcagcugcucccucaucuacaaggggaccuacgagcugcagacccuggagcucaacauggagacccugaacaugugcaugccgcugagcugcacgaagaacaacucccaccacuacauccgggucggcaacgagaccggccucgagcugacccugaccaacacgagcauccucaaccacaaguucugcaaccuguccgacgcccacaagcgcaaccuguacgaccacagccucauguccaucaucagcaccuuccaccuguccauccccaacuucaaccaguacgaggccaugagcugcgacuucaacgggggcaagaucaccgugcaguacaaccugucccacagcuucgccguggacgccgcggggcacugcggcacccucgccaacgggguccugcagacguucaugcggauggccuggggcggcuccuacaucgcccuggacagcgggcgcggcaacugggacugcaucaugaccuccuaccaguaccucaucauccagaacaccaccugggacgaccacugccaguucagccggcccucccccaucggguaccugggccugcucagccagcgcacgcgggacaucuacaucagccgccggcugcugggcaccuucaccuggacccucuccgacagcgaggggaacgagacgccgggcggguacugccugacccgcuggaugcugaucgaggcggagcucaagugcuucggcaacaccgccguggccaagugcaacgagaagcacgacgaggaguucugcgacaugcugcggcuguucgacuucugcaagcaggccauccgccggcucaagacccccgcccagauguccauccagcugaucaacaaggcggugaacgcccugaucaacgaccagcucaucaugaagaaccaccuccgcgacaucauggggauccccuacugcaacuacagccgguacugguaccugaaccacacguccaccggcaagaccagccugccccgcugcuggcugaucuccaacggcagcuaccugaacgagaccaaguucuccgacgacaucgagcagcaggccgacaacaugaucacggagaugcugcagaaggaguacaucgaccggcaggggaagaccccgcucggccuggucgaccuguucguguucagcaccuccuucuaccucaucagcaucuuccugcaccuggugaagauccccacccaccgccacaucgucgggaagcccugccccaagccgcaccggcucaaccacaugggcaucugcuccugcgggcuguacaagcagcccggcgugcccgugcgcuggaagcggugaggacuagucccuguucccagagcccacuuuuuuuucuuuuuuugaaauaaaauagccugucuuucagaucucaaaggcucuuuucagagccaccaaaaaaaaaaaaaaaaaaaaaaaaaaaaaaaaaaaaaaaaaaaaaaaaaaaaaaaaaaaaaaaaaaaaaaaaaaaaaaaaaaaaaaaaaaaaaaaaaaaaa

SEQ ID NO: 30441 - RNA, 1767 nt, Artificial Sequence
  mRNA product Design a-2 (hSL-A100) comprising derived and/or modified sequence from LASV(AV;Clade V)__CCA30314__GPCmut6 (opt1)
aggagaguccgcucagccagguugcagaagcggcuuagcguguguccuaaucuucucucugcguguagguaggccugugccgcaaacaagcuuaccaugggccagaucgugaccuucuuccaggaggucccccacgugaucgaggaggugaugaacaucguccugaucgcccucagcauccuggccgugcugaaggggcucuacaacaucgcgaccugcggccugaucgggcugaucacguuccuccugcugugcggccgcuccugcagcuccaaccucuacaaggggguguacgagcugcagagccuggaccucaacauggagacccugaacaugugcaugccgcuguccugcaccaagaacaacagccaccacuacauccgggucggcaacgacaccggccucgagcugacgcugaccaacaccuccauccucaaccacaaguucugcaaccugagcgacgcccacaagaaggaccuguacgaccacgcccucauguccaucaucagcaccuuccaccuguccauccccaacuucaaccaguacgaggccaugagcugcgacuucaacgggggcaagaucuccgugcaguacaaccugagccacuccuacgccaucgacgcggccaaccacugcgggacgguggccaacggcauccuccagaccuucaugcgcauggccuggggcgggagcuacaucgcgcuggacuccggccgggggaacugggacugcaucaugaccagcuaccaguaccugaucauccagaacaccacgugggagaaccacugccaguucucccgccccagccccaucggcuaccucgggcugcugagccagcggacccgcgacaucuacaucucccggcgccuccugggcaccuucaccuggacgcugagcgacuccgagggcaacgccacccccgggggcuacugccucacccgguggaugcugaucgaggccgagcugaagugcuucgggaacaccgccgucgccaagugcaacgagaagcacgacgaggaguucugcgacaugcuccgccuguucgacuucugcaagcaggcgaucagccggcugaaguccccggcccagaugagcauccagcucaucaacaaggccgugaacgcccugaucaacgaccagcugaucaugaagaaccaccuccgcgacaucaugggcauccccuacugcaacuacuccaaguacugguaccugaaccacacgaucaccgggaagaccagccugcccaagugcuggcucguguccaacggcagcuaccugaacgagacccacuucuccgacgacaucgagcagcaggccgacaacaugaucacggagaugcugcagaaggaguacauggagcggcagggcaagaccccgcuggggcucgucgaccuguucguguucagcaccuccuucuaccugaucagcaucuuccuccgccuggugaagauccccacccaccggcacaucgucggcaagcccugccccaagccgcaccgccugaaccacauggggaucugcuccugcggccucuacaagcagcccggggugcccgugcgguggaagcgcugaggacuagucccuguucccagagcccacuuuuuuuucuuuuuuugaaauaaaauagccugucuuucagaucucaaaggcucuuuucagagccaccaaaaaaaaaaaaaaaaaaaaaaaaaaaaaaaaaaaaaaaaaaaaaaaaaaaaaaaaaaaaaaaaaaaaaaaaaaaaaaaaaaaaaaaaaaaaaaaaaaaaa

SEQ ID NO: 30442 - RNA, 1764 nt, Artificial Sequence
  mRNA product Design a-2 (hSL-A100) comprising derived and/or modified sequence from LASV(Togo/2016/7082;Clade VI)__AMR44577__GPCmut6 (opt1)
aggagaguccgcucagccagguugcagaagcggcuuagcguguguccuaaucuucucucugcguguagguaggccugugccgcaaacaagcuuaccaugggccagaucaucaccuucuuccaggaggugccccacgucaucgaggaggugaugaacaucgugcugaucgcccucagccugcuggccauccucaagggggucuacaacguggcgaccugcggcaucaucgggcuggugacguuccuguuccucugcggccgcuccugcagccugaucuacaagggguccuacgagcugcagacccucgagcugaacauggagacccugaacaugugcaugccgcucagcugcaccaagaacuccagccaccacuacauccgggucggcaacgagacgggccuggagcugacccucaccaacaccuccaucaucaaccacaaguucugcaaccugagcgacgcccacaagcgcaaccuguacgaccacgcccucauguccauccugagcacguuccaccuguccauccccaacuucaaccaguacgaggccaugagcugcgacuucaacgggggcaagaucuccgugcaguacaaccucagccacgccuacgcgguggacgccgccgagcacugcgggaccgucgccaacggcgugcugcagaccuucaugcggauggcguggggcggguccuacaucgcccuggacagcggccgcgggaacugggacugcaucaugaccuccuaccaguaccucaucauccagaacacgaccugggaggaccacugccaguucagccggcccucccccaucggcuaccuggggcugcucagccagcgcacccgggacaucuacaucagccgccggcugcugggcaccuucacguggacccucuccgacagcgagggcaacgagacccccgggggcuacugccugacccgcuggaugcugaucgaggccgagcucaagugcuucgggaacacggccguggccaagugcaacgagaagcacgacgaggaguucugcgacaugcugcggcuguucgacuucugcaagcaggcgauccagcgccucaaguccccggcccagaugagcauccagcugaucaacaaggccgucaacgcccugaucaacgaccagcucaucaugaagaaccaccuccgggacaugaugggcauccccuacugcaacuacuccaaguacugguaccugaaccacaccagcuccgggcgcaccagccugcccaagugcuggcugguguccaacggcagcuaccugaacgagacccacuucuccgacgacaucgagcagcaggccgacaacaugaucacggagaugcuccagaaggaguacaucgaccggcagggcaagaccccgcuggggcugguggaccuguucgucuucagcaccuccuucuaccucaucagcaucuuccugcaccugaucaagauccccacccaccgccacaucgugggcaagcccugccccaagccgcaccggcucaaccacauggggaucugcuccugcggccuguacaagcagcccggggugcccacgcgcuggaagcggugaggacuagucccuguucccagagcccacuuuuuuuucuuuuuuugaaauaaaauagccugucuuucagaucucaaaggcucuuuucagagccaccaaaaaaaaaaaaaaaaaaaaaaaaaaaaaaaaaaaaaaaaaaaaaaaaaaaaaaaaaaaaaaaaaaaaaaaaaaaaaaaaaaaaaaaaaaaaaaaaaaaaa

SEQ ID NO: 30443 - RNA, 1764 nt, Artificial Sequence
  mRNA product Design a-2 (hSL-A100) comprising derived and/or modified sequence from LASV(KAK-428;Clade n.d. (VII))__ANH09740__GPCmut6 (opt1)
aggagaguccgcucagccagguugcagaagcggcuuagcguguguccuaaucuucucucugcguguagguaggccugugccgcaaacaagcuuaccaugggccagaucgugaccuucuuccaggaggucccccacgugaucgaggaggugaugaacaucguccugaucgcccucagccugcuggccauccucaaggggcuguacaacuucgcgaccugcggcgugaucgggcugaucacguuccuccugcugugcggccgcuccugcagcgccaccuacaaggggcaguacgagcuccagacccuggagcugaacauggagucccucaacaugugcaugccgcugagcugcaccaagaacaacucccaccacuacauccgggccggcaacaacacgggccuggagcucacccugaccaacaccagcaucaucucccacaaguucugcaaccugagcgacgcccacaagaagaaccucuacgaccacacgcugauguccaucaucaccaccuuccaccugagcauccccaacuucaaccaguacgaggccauguccugcgacuucaacgggggcaagaucagcauccaguacaaccucucccacagcuacgcgggggacgccgcccagcacugcggcaccguggccaacgggguccugcagacguucaugcgcauggcguggggcggcuccuaccuggcccucgacagcgggcggcgcggcugggacugcaucaucuccagcuaccaguaccugaucauccagaacaccaccugggacgaccacugccaguucucccggcccagccccaucggguaccugggcuucgugagccagaagacccgcgacaucuacaucucccggcgccuccugggcacguucaccuggacccugagcgacuccgaggggcacgacaugccgggcggguacugccucacccgguggaugcugaucgaggccgaccugaagugcuucggcaacacggccguggccaagugcaacgagaagcacgacgaggaguucugcgacauguggcgccucuucgacuucugcaagcaggcgauccagcggcugaaggcccccgcccagaugaacauccagcugaucaacaaggccgucaacgcccucaucaacgaccagcugaugaugaagaaccaccuccgcgacaucauggggauccccuacugcaacuacagcaaguucugguaccugaacaacaccaccaccggccggacgucccugccccgcugcuggcugaucagcaacggcuccuaccucaacgagacccacuucagcgacgacaucgagcagcaggcggacaacaugaucaccgagaugcugcagaaggaguacauggaccggcaggggaagaccccgcugggccucguggaccuguucguguucuccacgagcuucuaccugaucaccaucuuccugcaccucgucaagauccccacccaccgccacaucguggggaagcccugccccaagccgcaccggcugaaccacaugggcaucugcuccugcgggcuguacaagcagcccggcgugcccguccgcuggaagcggugaggacuagucccuguucccagagcccacuuuuuuuucuuuuuuugaaauaaaauagccugucuuucagaucucaaaggcucuuuucagagccaccaaaaaaaaaaaaaaaaaaaaaaaaaaaaaaaaaaaaaaaaaaaaaaaaaaaaaaaaaaaaaaaaaaaaaaaaaaaaaaaaaaaaaaaaaaaaaaaaaaaaa

SEQ ID NO: 30444 - RNA, 1764 nt, Artificial Sequence; identical to SEQ ID NO: 30438
  mRNA product Design a-2 (hSL-A100) comprising derived and/or modified sequence from LASV(Pinneo-NIG-1969;Clade I)__AIT17836__GPCmut6 (opt1)

SEQ ID NO: 30445 - RNA, 1764 nt, Artificial Sequence
  mRNA product Design a-2 (hSL-A100) comprising derived and/or modified sequence from LASV(ISTH0009-NIG-2011;Clade II)__AIT17404__GPCmut6 (opt1)
aggagaguccgcucagccagguugcagaagcggcuuagcguguguccuaaucuucucucugcguguagguaggccugugccgcaaacaagcuuaccaugggccagaucaucaccuucuuccaggaggugccccacgucaucgaggaggugaugaacaucgugcugaucgcccucagccugcuggccauccucaaggggaucuacaacgucgcgaccugcggccuguucgggcugguguccuuccuccugcugugcggccgcagcugcuccacgaccuacaaggggguguacgagcuccagacccuggagcuggacauggccagccucaacaugugcaugccgcuguccugcaccaagaacaacagccaccacuacaucauggucggcaacgagacgggccuggagcucacccugaccaacaccuccaucaucaaccacaaguucugcaaccugagcgacgcccacaagaagaaccucuacgaccacgcccugauguccaucaucagcacguuccaccuguccauccccaacuucaaccaguacgaggccaugagcugcgacuucaacgggggcaagaucuccgugcaguacaaccucagccacgcguacgccguggacgccgccaaccacugcgggaccaucgcgaacggcguccugcagaccuucaugcggauggccuggggcggguccuacaucgcccuggacagcggcaagggguccugggacugcaucaugaccagcuaccaguaccucaucauccagaacacgaccugggaggaccacugccaguucucccgccccagccccaucggcuaccuggggcugcucagccagcggacccgcgacaucuacaucucccggcgccugcugggcaccuucacguggacccucagcgacuccgagggcaacgagacccccgggggcuacugccugacccgguggaugcugaucgaggccgagcucaagugcuucgggaacacggccguggcgaagugcaacgagaagcacgacgaggaguucugcgacaugcugcgccuguucgacuucugcaagcaggccauccggcgccucaagaccccggcccagaugagcauccagcugaucaacaaggccgugaacgcccugaucaacgaccagcucaucaugaagaaccaccuccgggacaucaugggcauccccuacugcaacuacuccaaguacugguaccugaaccacaccgucaccgggaagacgagccugccccgcugcuggcugguguccaacggcagcuaccugaacgagacccacuucuccgacgacaucgagcagcaggcggacaacaugaucaccgagcuccugcagaaggaguacauggaccggcagggcaagaccccgcuggggcugguggaccucuucgucuucagcacguccuucuaccugaucagcaucuuccugcaccucaucaagauccccacccaccgccacaucaccggcaagcccugccccaagccgcaccggcugaaccacauggggaucugcuccugcggccuguacaagcaccccggggugcccgugaaguggaagcgcugaggacuagucccuguucccagagcccacuuuuuuuucuuuuuuugaaauaaaauagccugucuuucagaucucaaaggcucuuuucagagccaccaaaaaaaaaaaaaaaaaaaaaaaaaaaaaaaaaaaaaaaaaaaaaaaaaaaaaaaaaaaaaaaaaaaaaaaaaaaaaaaaaaaaaaaaaaaaaaaaaaaaa

SEQ ID NO: 30446 - RNA, 1764 nt, Artificial Sequence
  mRNA product Design a-2 (hSL-A100) comprising derived and/or modified sequence from LASV(ISTH2010-NIG-2012;Clade II)__AIT17482__GPCmut6 (opt1)
aggagaguccgcucagccagguugcagaagcggcuuagcguguguccuaaucuucucucugcguguagguaggccugugccgcaaacaagcuuaccaugggccagaucaucaccuucuuccaggaggugccccacgucaucgaggaggugaugaacaucgugcugaucgcccucagccugcuggccauccucaaggggaucuacaacgucgcgaccugcggccuguucgggcugguguccuuccuccugcugugcggccgcagcugcuccacgaccuacaaggggguguacgagcuccagacccuggagcuggacauggccagccucaacaugugcaugccgcuguccugcaccaagaacaacagccaccacuacaucauggucggcaacgagacgggccuggagcucacccugaccaacaccuccaucaucaaccacaaguucugcaaccugagcgacgcccacaagaagaaccucuacgaccacgcccugauguccaucaucagcacguuccaccuguccauccccaacuucaaccaguacgaggccaugagcugcgacuucaacgggggcaagaucuccgugcaguacaaccucagccacgcguacgccguggacgccgccaaccacugcgggaccaucgcgaacggcguccugcagaccuucaugcggauggccuggggcggguccuacaucgcccuggacagcggcaagggguccugggacugcaucaugaccagcuaccaguaccucaucauccagaacaucacgugggaggaccacugccaguucucccgccccagccccaucggcuaccuggggcugcucagccagcggacccgcgacaucuacaucucccggcgccugcugggcaccuucaccuggacgcucagcgacuccgagggcaacgagacccccgggggcuacugccugacccgguggaugcugaucgaggccgagcucaagugcuucgggaacaccgccguggcgaagugcaacgagaagcacgacgaggaguucugcgacaugcugcgccuguucgacuucugcaagcaggccauccggcgccucaagacgccggcccagaugagcauccagcugaucaacaaggccgugaacgcccugaucaacgaccagcucaucaugaagaaccaccuccgggacaucaugggcauccccuacugcaacuacuccaaguacugguaccugaaccacaccgucaccgggaagaccagccugccccgcugcuggcugguguccaacggcagcuaccugaacgagacgcacuucuccgacgacaucgagcagcaggcggacaacaugaucaccgagcuccugcagaaggaguacaucgaccggcagggcaagaccccgcuggggcugguggaccucuucgucuucagcaccuccuucuaccugaucagcaucuuccugcaccucgugaagauccccacgcaccgccacguggucggcaagcccugccccaagccgcaccggcugaaccacauggggaucugcuccugcggccuguacaagcaccccggggugcccgugaaguggaagcgcugaggacuagucccuguucccagagcccacuuuuuuuucuuuuuuugaaauaaaauagccugucuuucagaucucaaaggcucuuuucagagccaccaaaaaaaaaaaaaaaaaaaaaaaaaaaaaaaaaaaaaaaaaaaaaaaaaaaaaaaaaaaaaaaaaaaaaaaaaaaaaaaaaaaaaaaaaaaaaaaaaaaaa

SEQ ID NO: 30447 - RNA, 1764 nt, Artificial Sequence
  mRNA product Design a-2 (hSL-A100) comprising derived and/or modified sequence from LASV(Lassa virus/H.sapiens-wt/NGA/2015/ISTH_0543;Clade II)__AVO03639__GPCmut6 (opt1)
aggagaguccgcucagccagguugcagaagcggcuuagcguguguccuaaucuucucucugcguguagguaggccugugccgcaaacaagcuuaccaugggccagaucaucaccuucuuccaggaggugccccacgucaucgaggaggugaugaacaucgugcugaucgcccucagccugcuggccauccucaaggggaucuacaacgucgcgaccugcggccuguucgggcugguguccuuccuccugcugugcggccgcagcugcuccacgaccuacaaggggguguacgagcuccagacccuggagcuggacauggccaaccucaacaugugcaugccgcugagcugcaccaagaacaacucccaccacuacaucauggucggcaacgagacgggccuggagcucacccugaccaacaccagcaucaucaaccacaaguucugcaaccuguccgacgcccacaagaagaaccucuacgaccacgcccugaugagcaucaucuccacguuccaccugagcauccccaacuucaaccaguacgaggccauguccugcgacuucaacgggggcaagaucagcgugcaguacaaccucucccacaccuacgcgguggacgccgccaaccacugcgggaccaucgccaacggcguccugcagaccuucaugcggauggcguggggcgggagcuacaucgcccuggacuccggcaaggggagcugggacugcaucaugacguccuaccaguaccucgugauccagaacaccaccugggaggaccacugccaguucagccgccccucccccaucggcuaccuggggcugcucagccagcggacccgcgacaucuacaucagccggcgccugcugggcacguucaccuggacccucuccgacagcgagggcaacgagacccccgggggcuacugccugacgcgguggaugcugaucgaggccgagcucaagugcuucgggaacaccgccguggccaagugcaacgagaagcacgacgaggaguucugcgacaugcugcgccuguucgacuucugcaagcaggcgauccggcgccucaagaccccggcccagauguccauccagcugaucaacaaggccgucaacgcccugaucaacgaccagcucaucaugaagaaccaccuccgggacaucaugggcauccccuacugcaacuacagcaaguacugguaccugaaccacaccgugacggggaagaccucccugccccgcugcuggcuggugagcaacggcuccuaccugaacgagacccacuucagcgacgacaucgagcagcaggccgacaacaugaucaccgagcuccugcagaaggaguacaucgaccggcagggcaagacgccgcuggggcuggucgaccucuucguguucuccaccagcuucuaccugaucuccaucuuccugcaccucgugaagauccccacccaccgccacaucaccggcaagcccugccccaagccgcaccggcugaaccacauggggaucugcagcugcggccuguacaagcaccccgggguccccgugaaguggaagcgcugaggacuagucccuguucccagagcccacuuuuuuuucuuuuuuugaaauaaaauagccugucuuucagaucucaaaggcucuuuucagagccaccaaaaaaaaaaaaaaaaaaaaaaaaaaaaaaaaaaaaaaaaaaaaaaaaaaaaaaaaaaaaaaaaaaaaaaaaaaaaaaaaaaaaaaaaaaaaaaaaaaaaa

SEQ ID NO: 30448 - RNA, 1764 nt, Artificial Sequence
  mRNA product Design a-2 (hSL-A100) comprising derived and/or modified sequence from LASV(Lassa virus/H.sapiens-wt/NGA/2016/ISTH_0009;Clade II)__AVO03571__GPCmut6 (opt1)
aggagaguccgcucagccagguugcagaagcggcuuagcguguguccuaaucuucucucugcguguagguaggccugugccgcaaacaagcuuaccaugggccagaucaucaccuucuuccaggaggugccccacgucaucgaggaggugaugaacaucgugcugaucgcccucagccugcuggccauccucaaggggaucuacaacgucgcgaccugcggccugcuggggcucguguccuuccugcugcucugcggccgcagcugcuccacgaccuacaaggggguguacgagcugcagacccuggagcucgacauggccagccugaacaugugcaugccgcuguccugcaccaagaacaacagccaccacuacaucauggucggcaacgagacgggccucgagcugacccugaccaacaccuccaucaucaaccacaaguucugcaaccucagcgacgcccacaagaagaaccuguacgaccacgcccugauguccaucaucagcacguuccaccucuccauccccaacuucaaccaguacgaggccaugagcugcgacuucaacgggggccggaucuccgugcaguacaaccugagccacuccuacgcgguggacgccgccaaccacugcgggaccaucgccaacggcguccugcagaccuucaugcgcauggcguggggcgggagcuacaucgcccucgacuccggcaaggggagcugggacugcaucaugaccuccuaccaguaccugaucauccagaacacgaccugggaggaccacugccaguucagccggcccagccccaucggcuaccuggggcuccugucccagcgcacccgggacaucuacaucagccgccggcugcucggcaccuucacguggacccuguccgacagcgagggcaacgagacccccgggggcuacugccugacccgcuggaugcucaucgaggccgagcugaagugcuucgggaacacggccguggccaagugcaacgagaagcacgacgaggaguucugcgacaugcugcggcuguucgacuucugcaagcaggcgauccgccggcugaagaccccggcccagauguccauccagcugaucaacaaggccgugaacgcccucaucaacgaccagcugaucaugaagaaccaccuccgcgacaucaugggcauccccuacugcaacuacagcaaguacugguaccucaaccacaccgucaccgggaagacgucccugccccggugcuggcuggugagcaacggcuccuaccucaacgagacccacuucagcgacgacaucgagcagcaggccgacaacaugaucaccgagcugcugcagaaggaguacaucgaccgccagggcaagaccccgcuggggcucguggaccuguucgucuucuccacgagcuucuaccugaucuccaucuuccuccaccuggugaagauccccacccaccggcacaucaccggcaagcccugccccaagccgcaccgccugaaccacauggggaucugcagcugcggccucuacaaccaccccggggugcccgucaaguggaagcggugaggacuagucccuguucccagagcccacuuuuuuuucuuuuuuugaaauaaaauagccugucuuucagaucucaaaggcucuuuucagagccaccaaaaaaaaaaaaaaaaaaaaaaaaaaaaaaaaaaaaaaaaaaaaaaaaaaaaaaaaaaaaaaaaaaaaaaaaaaaaaaaaaaaaaaaaaaaaaaaaaaaaa

SEQ ID NO: 30449 - RNA, 1764 nt, Artificial Sequence
  mRNA product Design a-2 (hSL-A100) comprising derived and/or modified sequence from LASV(Lassa virus/H.sapiens-wt/NGA/2016/ISTH_0017;Clade II)__AVO03567__GPCmut6 (opt1)
aggagaguccgcucagccagguugcagaagcggcuuagcguguguccuaaucuucucucugcguguagguaggccugugccgcaaacaagcuuaccaugggccagaucaucaccuucuuccaggaggugccccacgucaucgaggaggugaugaacaucgugcugaucgcccucagccugcuggccauccucaaggggaucuacaacgucgcgaccugcggccuguucgggcugguguccuuccuccugcugugcggccgcagcugcuccacgaccuacaaggggguguacgagcuccagacccuggagcuggacauggccagccucaacaugugcaugccgcuguccugcaccaagaacaacagccaccacuacaucauggucggcaacgagacgggccuggagcucacccugaccaacaccuccaucaucaaccacaaguucugcaaccugagcgacgcccacaagaagaaccucuacgaccacgcccugauguccaucaucagcacguuccaccuguccauccccaacuucaaccaguacgaggccaugagcugcgacuucaacgggggcaagaucuccgugcaguacaaccucagccacaccuacgcgaucgacgccgccaaccacugcgggaccaucgccaacggcgugcugcagaccuucaugcggauggcguggggcggguccuacaucgcccuggacagcggcaagggguccugggacugcaucaugacgagcuaccaguaccucaucauccagaacaccaccugggaggaccacugccaguucucccgccccagccccaucggcuaccuggggcugcucagccagcggacccgcgacaucuacaucucccggcgccugcugggcacguucaccuggacccucagcgacuccgagggcaacgagacccccgggggcuacugccugacgcgguggaugcugaucgaggccgagcucaagugcuucgggaacaccgccgucgccaagugcaacgagaagcacgacgaggaguucugcgacaugcugcgccuguucgacuucugcaagcaggcgauccggcgccucaagaccccggcccagaugagcauccagcugaucaacaaggccgugaacgcccugaucaacgaccagcucaucaugaagaaccaccuccgggacaucaugggcauccccuacugcaacuacuccaaguacugguaccugaaccacaccgugacggggaagaccagccugccccgcugcuggcuggucuccaacggcagcuaccugaacgagacccacuucuccgacgacaucgagcagcaggccgacaacaugaucaccgagcuccugcagaaggaguacauggaccggcagggcaagacgccgcuggggcugguggaccucuucguguucagcaccuccuucuaccugaucagcaucuuccugcaccucguccgcauccccacccaccggcacgugaucggcaagcccugccccaagccgcaccgccugaaccacauggggaucugcuccugcggccuguacaagcaccccggggugcccgucaaguggaagcggugaggacuagucccuguucccagagcccacuuuuuuuucuuuuuuugaaauaaaauagccugucuuucagaucucaaaggcucuuuucagagccaccaaaaaaaaaaaaaaaaaaaaaaaaaaaaaaaaaaaaaaaaaaaaaaaaaaaaaaaaaaaaaaaaaaaaaaaaaaaaaaaaaaaaaaaaaaaaaaaaaaaaa

SEQ ID NO: 30450 - RNA, 1764 nt, Artificial Sequence
  mRNA product Design a-2 (hSL-A100) comprising derived and/or modified sequence from LASV(Lassa virus/H.sapiens-wt/NGA/2018/ISTH_0959;Clade II)__AVV65099__GPCmut6 (opt1)
aggagaguccgcucagccagguugcagaagcggcuuagcguguguccuaaucuucucucugcguguagguaggccugugccgcaaacaagcuuaccaugggccagaucaucaccuucuuccaggaggugccccacgucaucgaggaggugaugaacaucgugcugaucgcccucagccugcuggccauccucaaggggaucuacaacgucgugaccugcggccuguucgggcugguguccuuccuccugcugugcggccgcagcugcuccacgaccuacaagggggucuacgagcuccagacccuggagcuggacauggcgagccucaacaugugcaugccgcuguccugcaccaagaacaacagccaccacuacaucauggugggcaacgagacgggccuggagcucacccugaccaacaccuccaucaucaaccacaaguucugcaaccugagcgacgcccacaagaagaaccucuacgaccacgcccugauguccaucaucagcacguuccaccuguccauccccaacuucaaccaguacgaggccaugagcugcgacuucaacgggggcaagaucuccgugcaguacaaccucagccacgccuacgcgaucgacgccgccaaccacugcgggaccaucgccaacggcguccugcagaccuucaugcggauggcguggggcggguccuacaucgcccuggacagcggcaagggguccugggacugcaucaugaccagcuaccaguaccucaucauccagaacacgaccugggaggaccacugccaguucucccgccccagccccaucggcuaccuggggcugcucagccagcggacccgcgacaucuacaucucccggcgccugcugggcaccuucacguggacccucagcgacuccgagggcaacgagacccccgggggcuacugccugacccgguggaugcugaucgaggccgagcucaagugcuucgggaacacggccguggccaagugcaacgagaagcacgacgaggaguucugcgacaugcugcgccuguucgacuucugcaagcaggcgauccggcgccucaagaccccggcccagaugagcauccagcugaucaacaaggccgugaacgcccugaucaacgaccagcucaucaugaagaaccaccuccgggacaucaugggcauccccuacugcaacuacuccaaguacugguaccugaaccacaccgucaccgggaagacgagccugccccgcugcuggcugguguccaacggcagcuaccugaacgagacccacuucuccgacgacaucgagcagcaggccgacaacaugaucaccgagcuccugcagaaggaguacaucgaccggcagggcaagaccccgcuggggcugguggaccucuucgucuucagcacguccuucuaccugaucagcaucuuccugcaccucgugaagauccccacccaccgccacgugaucggcaagcccugccccaagccgcaccggcugaaccacauggggaucugcuccugcggccuguacaagcaccccgggguccccgugaaguggaagcgcugaggacuagucccuguucccagagcccacuuuuuuuucuuuuuuugaaauaaaauagccugucuuucagaucucaaaggcucuuuucagagccaccaaaaaaaaaaaaaaaaaaaaaaaaaaaaaaaaaaaaaaaaaaaaaaaaaaaaaaaaaaaaaaaaaaaaaaaaaaaaaaaaaaaaaaaaaaaaaaaaaaaaa

SEQ ID NO: 30451 - RNA, 1764 nt, Artificial Sequence
  mRNA product Design a-2 (hSL-A100) comprising derived and/or modified sequence from LASV(LASV003-NIG-2008;Clade II)__AIT17580__GPCmut6 (opt1)
aggagaguccgcucagccagguugcagaagcggcuuagcguguguccuaaucuucucucugcguguagguaggccugugccgcaaacaagcuuaccaugggccagaucaucaccuucuuccaggaggugccccacgucaucgaggaggugaugaacaucgugcugaucgcccucagccugcuggccauccucaaggggaucuacaacgucgcgaccugcggccuguucgggcugguguccuuccuccugcugugcggccgcagcugcuccacgaccuacaaggggguguacgagcuccagacccuggagcuggacauggccagccucaacaugugcaugccgcuguccugcaccaagaacaacagccaccacuacaucauggucggcaacgagacgggccuggagcucacccugaccaacaccuccaucaucaaccacaaguucugcaaccugagcgacgcccacaagaagaaccucuacgaccacgcccugauguccaucaucagcacguuccaccuguccauccccaacuucaaccaguacgaggccaugagcugcgacuucaacgggggcaagaucuccgugcaguacaaccucagccacaccuacgcgguggacgccgccaaccacugcgggaccaucgccaacggcguccugcagaccuucaugcggauggcguggggcggguccuacaucgcccuggacagcggcaagggguccugggacugcaucaugacgagcuaccaguaccucaucauccagaacaccaccugggaggaccacugccaguucucccgccccagccccaucggcuaccuggggcugcucagccagcggacccgcgacaucuacaucucccggcgccugcugggcacguucaccuggacccucagcgacuccgagagcaacgagaccccgggcggguacugccugacgcgguggaugcugaucgaggccgagcucaagugcuucggcaacaccgccguggccaagugcaacgagaagcacgacgaggaguucugcgacaugcugcgccuguucgacuucugcaagcaggcgauccggcgccucaaggcccccgcccagauguccauccagcugaucaacaaggccgugaacgcccugaucaacgaccagcucaucaugaagaaccaccuccgggacaucauggggauccccuacugcaacuacagcaaguacugguaccugaaccacaccgucaccggccgcacgucccugccccggugcuggcuggugagcaacggguccuaccugaacgagacccacuucagcgacgacaucgagcagcaggcggacaacaugaucaccgagcuccugcagaaggaguacauggaccgccagggcaagaccccgcugggccugguggaccucuucgucuucuccacgagcuucuaccugaucuccaucuuccugcaccucgugaagauccccacccaccggcacgugaucgggaagcccugccccaagccgcaccgccugaaccacaugggcaucugcagcugcgggcuguacaagcaccccggcguccccgugaaguggaagcggugaggacuagucccuguucccagagcccacuuuuuuuucuuuuuuugaaauaaaauagccugucuuucagaucucaaaggcucuuuucagagccaccaaaaaaaaaaaaaaaaaaaaaaaaaaaaaaaaaaaaaaaaaaaaaaaaaaaaaaaaaaaaaaaaaaaaaaaaaaaaaaaaaaaaaaaaaaaaaaaaaaaaa

SEQ ID NO: 30452 - RNA, 1764 nt, Artificial Sequence
  mRNA product Design a-2 (hSL-A100) comprising derived and/or modified sequence from LASV(LASV035-NIG-2009;Clade II)__AIT17588__GPCmut6 (opt1)
aggagaguccgcucagccagguugcagaagcggcuuagcguguguccuaaucuucucucugcguguagguaggccugugccgcaaacaagcuuaccaugggccagaucaucaccuucuuccaggaggugccccacgucaucgaggaggugaugaacaucgugcugaucgcccucagccugcuggccauccucaaggggaucuacaacgucgcgaccugcggccuguucgggcugguguccuuccuccugcugugcggccgcagcugcuccacgaccuacaaggggguguacgagcuccagacccuggagcuggacauggccagccucaacaugugcaugccgcuguccugcaccaagaacaacagccaccacuacaucauggucggcaacgagacgggccuggagcucacccugaccaacaccuccaucaucaaccacaaguucugcaaccugagcgacgcccacaagaagaaccucuacgaccacgcccugauguccaucaucagcacguuccaccuguccauccccaacuucaaccaguacgaggccaugagcugcgacuucaacgggggcaagaucuccgugcaguacaaccucagccacgcguacgccguggacgccgccaaccacugcgggaccaucgcgaacggcguccugcagaccuucaugcggauggccuggggcggguccuacaucgcccuggacagcggcaagggguccugggacugcaucaugaccagcuaccaguaccucaucauccagaacacgaccugggaggaccacugccaguucucccgccccagccccaucggcuaccuggggcugcucagccagcggacccgcgacaucuacaucucccggcgccugcugggcaccuucacguggacccucagcgacuccgagggcaacgagacccccgggggcuacugccugacccgguggaugcugaucgaggccgagcucaagugcuucgggaacacggccguggcgaagugcaacgagaagcacgacgaggaguucugcgacaugcugcgccuguucgacuucugcaagcaggccauccggcgccucaaggccccggcccagaugagcauccagcugaucaacaaggccgugaacgcgcugaucaacgaccagcucaucaugaagaaccaccuccgggacaucaugggcauccccuacugcaacuacuccaaguacugguaccugaaccacaccgucaccgggaagaccagccugccccgcugcuggcugguguccaacggcagcuaccugaacgagacgcacuucuccgacgacaucgagcagcaggccgacaacaugaucaccgagcuccugcagaaggaguacaucgaccggcagggcaagaccccgcuggggcugguggaccucuucgucuucagcaccuccuucuaccugaucagcaucuuccugcaccucgugaagauccccacgcaccgccacgugaucggcaagcccugccccaagccgcaccggcugaaccacauggggaucugcuccugcggccuguacaagcaccccgggguccccgugaaguggaagcgcugaggacuagucccuguucccagagcccacuuuuuuuucuuuuuuugaaauaaaauagccugucuuucagaucucaaaggcucuuuucagagccaccaaaaaaaaaaaaaaaaaaaaaaaaaaaaaaaaaaaaaaaaaaaaaaaaaaaaaaaaaaaaaaaaaaaaaaaaaaaaaaaaaaaaaaaaaaaaaaaaaaaaa

SEQ ID NO: 30453 - RNA, 1764 nt, Artificial Sequence
  mRNA product Design a-2 (hSL-A100) comprising derived and/or modified sequence from LASV(LASV1000-NIG-2009;Clade II)__AIT17782__GPCmut6 (opt1)
aggagaguccgcucagccagguugcagaagcggcuuagcguguguccuaaucuucucucugcguguagguaggccugugccgcaaacaagcuuaccaugggccagaucaucaccuucuuccaggaggugccccacgucaucgaggaggugaugaacaucgugcugaucgcccucagccugcuggccauccucaaggggaucuacaacgucgcgaccugcggccuguucgggcugguguccuuccuccugcugugcggccgcagcugcuccacgaccuacaaggggguguacgagcuccagacccuggagcuggacauggccagccucaacaugugcaugccgcuguccugcaccaagaacaacagccaccacuacaucauggucggcaacgagacgggccuggagcucacccugaccaacaccuccaucaucaaccacaaguucugcaaccugagcgacgcccacaagaagaaccucuacgaccacgcccugauguccaucaucagcacguuccaccuguccauccccaacuucaaccaguacgaggccaugagcugcgacuucaacgggggcaagaucuccgugcaguacaaccucagccacaccuacgcgguggacgccgccaaccacugcgggaccaucgccaacggcguccugcagaccuucaugcggauggcguggggcggguccuacaucgcccuggacagcggcaagggguccugggacugcaucaugacgagcuaccaguaccucaucauccagaacaccaccugggaggaccacugccaguucucccgccccagccccaucggcuaccuggggcugcucagccagcggacccgcgacaucuacaucucccggcgccugcugggcacguucaccuggacccucagcgacuccgagggcaacgagacccccgggggcuacugccugacgcgguggaugcugaucgaggccgagcucaagugcuucgggaacaccgccguggccaagugcaacgagaagcacgacgaggaguucugcgacaugcugcgccuguucgacuucugcaagcaggcgaucaagcggcucaagaccccggcccagaugagcauccagcugaucaacaaggccgugaacgcccugaucaacgaccagcucaucaugaagaaccaccuccgcgacaucaugggcauccccuacugcaacuacuccaaguacugguaccugaaccacaccgucacggggaagaccagccugccccggugcuggcugguguccaacggcagcuaccugaacgagacccacuucuccgacgacaucgagcagcaggccgacaacaugaucaccgagcuccugcagaaggaguacaucgaccgccagggcaagacgccgcuggggcugguggaccucuucgucuucagcaccuccuucuaccugaucagcaucuuccugcaccucgugaagauccccacccaccggcacguggucggcaagcccugccccaagccgcaccgccugaaccacauggggaucugcuccugcggccuguacaagcaccccggggugcccgugaaguggaagcggugaggacuagucccuguucccagagcccacuuuuuuuucuuuuuuugaaauaaaauagccugucuuucagaucucaaaggcucuuuucagagccaccaaaaaaaaaaaaaaaaaaaaaaaaaaaaaaaaaaaaaaaaaaaaaaaaaaaaaaaaaaaaaaaaaaaaaaaaaaaaaaaaaaaaaaaaaaaaaaaaaaaaa

SEQ ID NO: 30454 - RNA, 1764 nt, Artificial Sequence
  mRNA product Design a-2 (hSL-A100) comprising derived and/or modified sequence from LASV(LASV221-NIG-2010;Clade II)__AIT17624__GPCmut6 (opt1)
aggagaguccgcucagccagguugcagaagcggcuuagcguguguccuaaucuucucucugcguguagguaggccugugccgcaaacaagcuuaccaugggccagaucaucaccuucuuccaggaggugccccacgucaucgaggaggugaugaacaucgugcugaucgcccucagccugcuggccauccucaaggggaucuacaacgucgcgaccugcggccuguucgggcugguguccuuccuccugcugugcggccgcagcugcuccacgaccuacaaggggguguacgagcuccagacccuggagcuggacauggccagccucaacaugugcaugccgcuguccugcaccaagaacaacagccaccacuacaucauggucggcaacgagacgggccuggagcucacccugaccaacaccuccaucaucaaccacaaguucugcaaccugagcgacgcccacaagaagaaccucuacgaccacgcccugauguccaucaucagcacguuccaccuguccauccccaacuucaaccaguacgaggccaugagcugcgacuucaacgggggcaagaucuccgugcaguacaaccucagccacaccuacgcgaucgacgccgccaaccacugcgggaccaucgccaacggcgugcugcagaccuucaugcggauggcguggggcggguccuacaucgcccuggacagcggcaagggguccugggacugcaucaugacgagcuaccaguaccucaucauccagaacaccaccugggaggaccacugccaguucucccgccccagccccaucggcuaccuggggcugcucagccagcggacccgcgacaucuacaucucccggcgccugcugggcacguucaccuggacccucagcgacuccgagggcaacgagacccccgggggcuacugccugacgcgguggaugcugaucgaggccgagcucaagugcuucgggaacaccgccgucgccaagugcaacgagaagcacgacgaggaguucugcgacaugcugcgccuguucgacuucugcaagcaggcgauccggcgccucaagaccccggcccagaugagcauccagcugaucaacaaggccgugaacgcccugaucaacgaccagcucaucaugaagaaccaccuccgggacaucaugggcauccccuacugcaacuacuccaaguacugguaccugaaccacaccgugacggggaagaccagccugccccgcugcuggcuggucuccaacggcagcuaccugaacgagacccacuucuccgacgacaucgagcagcaggccgacaacaugaucaccgagaugcuccagaaggaguacauggaccggcagggcaagacgccgcuggggcugguggaccuguucguguucagcaccuccuucuaccucaucagcaucuuccugcaccuggucaagauccccacccaccgccacgugaucggcaagcccugccccaagccgcaccggcucaaccacauggggaucugcuccugcggccuguacaagcaccccggggugcccgucaaguggaagcgcugaggacuagucccuguucccagagcccacuuuuuuuucuuuuuuugaaauaaaauagccugucuuucagaucucaaaggcucuuuucagagccaccaaaaaaaaaaaaaaaaaaaaaaaaaaaaaaaaaaaaaaaaaaaaaaaaaaaaaaaaaaaaaaaaaaaaaaaaaaaaaaaaaaaaaaaaaaaaaaaaaaaaa

SEQ ID NO: 30455 - RNA, 1764 nt, Artificial Sequence
  mRNA product Design a-2 (hSL-A100) comprising derived and/or modified sequence from LASV(LASV237-NIG-2010;Clade II)__AIT17638__GPCmut6 (opt1)
aggagaguccgcucagccagguugcagaagcggcuuagcguguguccuaaucuucucucugcguguagguaggccugugccgcaaacaagcuuaccaugggccagaucaucaccuucuuccaggaggugccccacgucaucgaggaggugaugaacaucgugcugaucgcccucagccugcuggccauccucaaggggaucuacaacgucgcgaccugcggccuguucgggcugguguccuuccuccugcugugcggccgcagcugcuccacgaccuacaaggggguguacgagcuccagacccuggagcuggacauggccagccucaacaugugcaugccgcuguccugcaccaagaacaacagccaccacuacaucauggucggcaacgagacgggccuggagcucacccugaccaacaccuccaucaucaaccacaaguucugcaaccugagcgacgcccacaagaaggaccucuacgaccacgcccugauguccaucaucagcacguuccaccuguccauccccaacuucaaccaguacgaggccaugagcugcgacuucaacgggggcaagaucuccgugcaguacaaccucagccacaccuacgcgguggacgccgccaaccacugcgggaccaucgccaacggcguccugcagaccuucaugcggauggcguggggcggguccuacaucgcccuggacagcggcaagggguccugggacugcaucaugacgagcuaccaguaccucaucauccagaacaccaccugggaggaccacugccaguucucccgccccagccccaucggcuaccuggggcugcucagccagcggacccgcgacaucuacaucucccggcgccugcugggcacguucaccuggacccucagcgacuccgagggcaacgagacccccgggggcuacugccugacgcgguggaugcugaucgaggccgagcucaagugcuucgggaacaccgccguggccaagugcaacgagaagcacgacgaggaguucugcgacaugcugcgccuguucgacuucugcaagcaggcgauccggcgccucaagaccccggcccagaugagcauccagcugaucaacaaggccgugaacgcccugaucaacgaccagcucaucaugaagaaccaccuccgggacaucaugggcauccccuacugcaacuacuccaaguacugguaccugaaccacaccgucacggggaagaccagccugccccgcugcuggcugguguccaacggcagcuaccugaacgagacccacuucuccgacgacaucgagcagcaggccgacaacaugaucaccgagcuccugcagaaggaguacauggaccggcagggcaagacgccgcuggggcugguggaccucuucgucuucagcaccuccuucuaccugaucagcaucuuccugcaccucaucaagauccccacccaccgccacaucaccggcaagcccugccccaagccgcaccggcugaaccacauggggaucugcuccugcggccuguacaagcaccccggggugcccgugaaguggaagcgcugaggacuagucccuguucccagagcccacuuuuuuuucuuuuuuugaaauaaaauagccugucuuucagaucucaaaggcucuuuucagagccaccaaaaaaaaaaaaaaaaaaaaaaaaaaaaaaaaaaaaaaaaaaaaaaaaaaaaaaaaaaaaaaaaaaaaaaaaaaaaaaaaaaaaaaaaaaaaaaaaaaaaa

SEQ ID NO: 30456 - RNA, 1764 nt, Artificial Sequence
  mRNA product Design a-2 (hSL-A100) comprising derived and/or modified sequence from LASV(LASV253-NIG-2011;Clade II)__AIT17670__GPCmut6 (opt1)
aggagaguccgcucagccagguugcagaagcggcuuagcguguguccuaaucuucucucugcguguagguaggccugugccgcaaacaagcuuaccaugggccagaucaucaccuucuuccaggaggugccccacgucaucgaggaggugaugaacaucgugcugaucgcccucagccugcuggccauccucaaggggaucuacaacgucgcgaccugcggccuguucgggcugguguccuuccuccugcugugcggccgcagcugcuccacgaccuacaaggggguguacgagcuccagacccuggagcuggacauggccagccucaacaugugcaugccgcuguccugcaccaagaacaacagccaccacuacaucauggucggcaacgagacgggccuggagcucacccugaccaacaccuccaucaucaaccacaaguucugcaaccugagcgacgcccacaagaagaaccucuacgaccacgcccugauguccaucaucagcacguuccaccuguccauccccaacuucaaccaguacgaggccaugagcugcgacuucaacgggggcaagaucuccgugcaguacaaccucagccacaccuacgcgguggacgccgccaaccacugcgggaccaucgccaacggcguccugcagaccuucaugcggauggcguggggcggguccuacaucgcccuggacagcggcaagggguccugggacugcaucaugacgagcuaccaguaccucaucauccagaacaccaccugggaggaccacugccaguucucccgccccagccccaucggcuaccuggggcugcucagccagcggacccgcgacaucuacaucucccggcgccugcugggcacguucaccuggacccucagcgacuccgagggcaacgagacccccgggggcuacugccugacgcgguggaugcugaucgaggccgagcucaagugcuucgggaacaccgccguggccaagugcaacgagaagcacgacgaggaguucugcgacaugcugcgccuguucgacuucugcaagcaggcgauccggcgccucaaggccccggcccagaugagcauccagcugaucaacaaggccgugaacgcccugaucaacgaccagcucaucaugaagaaccaccuccgggacaucaugggcauccccuacugcaacuacuccaaguacugguaccugaaccacaccgucaccgggcgcacgagccugccccggugcuggcugguguccaacggcagcuaccugaacgagacccacuucuccgacgacaucgagcagcaggcggacaacaugaucaccgagcuccugcagaaggaguacaucgaccgccagggcaagaccccgcuggggcugguggaccucuucgucuucagcacguccuucuaccugaucagcaucuuccugcaccucgugaagauccccacccaccggcacaucaucggcaagcccugccccaagccgcaccgccugaaccacauggggaucugcuccugcggccuguacaagcaccccggggugcccgucaaguggaagcggugaggacuagucccuguucccagagcccacuuuuuuuucuuuuuuugaaauaaaauagccugucuuucagaucucaaaggcucuuuucagagccaccaaaaaaaaaaaaaaaaaaaaaaaaaaaaaaaaaaaaaaaaaaaaaaaaaaaaaaaaaaaaaaaaaaaaaaaaaaaaaaaaaaaaaaaaaaaaaaaaaaaaa

SEQ ID NO: 30457 - RNA, 1764 nt, Artificial Sequence
  mRNA product Design a-2 (hSL-A100) comprising derived and/or modified sequence from LASV(LASV254-NIG-2011;Clade II)__AIT17674__GPCmut6 (opt1)
aggagaguccgcucagccagguugcagaagcggcuuagcguguguccuaaucuucucucugcguguagguaggccugugccgcaaacaagcuuaccaugggccagaucaucaccuucuuccaggaggugccccacgucaucgaggaggugaugaacaucgugcugaucgcccucagccugcuggccauccucaaggggaucuacaacgucgcgaccugcggccuguucgggcugguguccuuccuccugcugugcggccgcagcugcuccacgaccuacaaggggguguacgagcuccagacccuggagcuggacaugaccaaccucaacaugugcaugccgcugagcugcacgaagaacaacucccaccacuacaucauggucggcaacgagaccggccuggagcucacccugaccaacacgagcaucaucaaccacaaguucugcaaccuguccgacgcccacaagaagaaccucuacaaccacgcccugaugagcaucaucuccaccuuccaccugagcauccccaacuucaaccaguacgaggccauguccugcgacuucaacgggggcaagaucagcgugcaguacaaccucucccacagcuacgccguggacgcggccaaccacugcgggaccaucgccaacggcguccugcagaccuucaugcggauggccuggggcggguccuacaucgcgcuggacagcggcaaggggaacugggacugcaucaugacguccuaccaguaccucaucauccagaacaccaccugggaggaccacugccaguucagccgccccucccccaucggcuaccuggggcugcucagccagcggacccgcgacaucuacaucagccggcgccugcugggcacguucaccuggacccucuccgacagcgagggcaacgagacccccgggggcuacugccugacgcgguggaugcugaucgaggccgagcucaagugcuucgggaacaccgccguggccaagugcaacgagaagcacgacgaggaguucugcgacaugcugcgccuguucgacuucugcaagcaggccauccggcgccucaagaccccggcgcaggccaacauccagcugaucaacaaggccgugaacgcccugaucaacgaccagcucaucaugaagaaccaccuccgggacaucaugggcauccccuacugcaacuacuccaaguacugguaccugaaccacaccgucacggggaagaccagccugccccgcugcuggcugguguccaacggcagcuaccugaacgagacccacuucuccgacgacaucgagcagcaggccgacaacaugaucaccgagcuccugcagaaggaguacauggaccggcagggcaagacgccgcuggggcugguggaccucuucgucuucagcaccuccuucuaccugaucagcaucuuccugcaccucgugaagauccccacccaccgccacgugaucggcaagcccugccccaagccgcaccggcugaaccacauggggaucugcuccugcggccuguacaagcaccccgggguccccgugaaguggaagcgcugaggacuagucccuguucccagagcccacuuuuuuuucuuuuuuugaaauaaaauagccugucuuucagaucucaaaggcucuuuucagagccaccaaaaaaaaaaaaaaaaaaaaaaaaaaaaaaaaaaaaaaaaaaaaaaaaaaaaaaaaaaaaaaaaaaaaaaaaaaaaaaaaaaaaaaaaaaaaaaaaaaaaa

SEQ ID NO: 30458 - RNA, 1764 nt, Artificial Sequence
  mRNA product Design a-2 (hSL-A100) comprising derived and/or modified sequence from LASV(Nig08-A19;Clade III)__ADU56618__GPCmut6 (opt1)
aggagaguccgcucagccagguugcagaagcggcuuagcguguguccuaaucuucucucugcguguagguaggccugugccgcaaacaagcuuaccaugggccagaucgugaccuucuuccaggaggucccccacgugaucgaggaggugaugaacaucguccugaucgcccucagcauccuggccauccugaaggggcucuacaacaucgcgaccugcggccugaucgggcuggugacguuccuccugcuguccggccgcagcugcuccaugaccuacaaggggguguacgagcuccagacccuggagcugaacaugaacacccucaacaugugcaugccgcugagcugcacgaagaacaacucccaccacuacaucauggucggcaacgagaccggccuggagcucacccugaccaacacgagccugcuccaccacaaguucugcaaccuguccgacgcccacaagaagaaccuguacgaccacacccucaugagcaucaucuccaccuuccaccugagcauccccaacuucaaccaguacgaggccauguccugcgacuucaacgggggcaagaucaccgugcaguacaaccugagccacuccuacgccaucgacgccgcgaaccacugcgggacgguggccaacggcguccuccagaccuucaugcggauggccuggggcgggagcuacaucgcccuggacuccggccgcgggaagugggacugcaucaugaccagcuaccaguaccugaucauccagaacaccacgugggaggaccacugccaguucucccggcccagccccaucggcuaccucgggcugcugucccagcgcacccgggacaucuacaucagccgccggcuccugggcaccuucaccuggacgcugagcgacuccgagggcaacgagacccccgggggcuacugccucacccgcuggaugcugaucgaggcggagcugaagugcuucgggaacaccgccguggccaagugcaacgagaagcacgacgaggaguucugcgacaugcuccggcuguucgacuucugcaagcaggccauccgccggcugaaggccccggcgcagaugagcauccagcucaucaacaaggccgugaacgcccugaucaacgaccagcugaucaugaagaaccaccuccgcgacaucaugggcauccccuacugcaacuacuccaaguacugguaccugaaccacacgagcaccgggcggaccucccugccccgcugcuggcucgucagcaacggcuccuaccugaacgagacccacuucagcgacgacaucgagcagcaggccgacaacaugaucacggagaugcugcagaaggaguaccuggaccggcagggcaagaccccgcucgggcugguggaccuguucguguucuccaccagcuucuaccucaucuccaucuuccugcaccuggucaagauccccacccaccgccacaucgugggcaagcccugccccaagccgcaccggcucaaccacauggggaucugcagcugcggccuguacaagcagcccggggugcccguccgcuggaagcggugaggacuagucccuguucccagagcccacuuuuuuuucuuuuuuugaaauaaaauagccugucuuucagaucucaaaggcucuuuucagagccaccaaaaaaaaaaaaaaaaaaaaaaaaaaaaaaaaaaaaaaaaaaaaaaaaaaaaaaaaaaaaaaaaaaaaaaaaaaaaaaaaaaaaaaaaaaaaaaaaaaaaa

SEQ ID NO: 30459 - RNA, 1767 nt, Artificial Sequence
  mRNA product Design a-2 (hSL-A100) comprising derived and/or modified sequence from LASV(G1180-SLE-2010;Clade IV)__AIT17168__GPCmut6 (opt1)
aggagaguccgcucagccagguugcagaagcggcuuagcguguguccuaaucuucucucugcguguagguaggccugugccgcaaacaagcuuaccaugggccagaucgugaccuucuuccaggaggucccccacgugaucgaggaggugaugaacaucguccugaucgcccucagcauccuggccgugcugaaggggcucuacaacuucgcgaccugcggccugguggggcugcucacguuccugcugcucugcggccgcuccugcaccgccagccgguacaagggggucuacgagcugcagacccuggagcucaacauggagacccugaacaugugcaugccgcuguccugcacgaagaacaacagccaccacuacaucauggugggcaacgagaccggccucgagcugacccugaccaacacguccaucaucaaccacaaguucugcaaccucagcgacgcccacaagaagaaccuguacgaccacgcccugauguccaucaucagcaccuuccaccucuccauccccaacuucaaccaguacgaggccaugagcugcgacuucaacgggggcaagaucuccgugcaguacaaccugagccacuccuacgcgggggacgccgccaaccacugcggcaccgucgccaacggggugcugcagaccuucaugcgcauggcguggggcggcagcuacaucgcccucgacuccgggcacggcagcugggacugcaucaugacguccuaccaguaccugaucauccagaacaccaccugggaggaccacugccaguucagccggcccucccccaucggguaccugggccuccugagccagcgcacccgggacaucuacaucagccgccggcugcucggcacguucaccuggacccuguccgacagcgaggggaaggacaccccgggcggguacugccugacgcgcuggaugcucaucgaggccgagcugaagugcuucggcaacaccgccguggccaagugcaacgagaagcacgacgaggaguucugcgacaugcugcggcuguucgacuucugcaagcaggcgauccagcgccugaaggcccccgcccagauguccauccagcugaucaacaaggccgucaacgcccucaucaacgaccagcugaucaugaagaaccaccuccgggacaucauggggauccccuacugcaacuacagcaaguacugguaccucaaccacaccaccacgggcaagaccucccugcccaagugcuggcuggugagcaacggcuccuaccucaacgagacccacuucagcgacgacaucgagcagcaggcggacaacaugaucaccgagaugcugcagaaggaguacauggagcgccaggggaagacgccgcugggccugguggaccucuucgucuucuccaccagcuucuaccugaucuccaucuuccugcaccucgugaagauccccacccaccggcacaucgugggcaagagcugccccaagccccaccgccugaaccacauggggaucugcuccugcgggcuguacaagcagccgggcguccccgugaaguggaagcggugaggacuagucccuguucccagagcccacuuuuuuuucuuuuuuugaaauaaaauagccugucuuucagaucucaaaggcucuuuucagagccaccaaaaaaaaaaaaaaaaaaaaaaaaaaaaaaaaaaaaaaaaaaaaaaaaaaaaaaaaaaaaaaaaaaaaaaaaaaaaaaaaaaaaaaaaaaaaaaaaaaaaa

SEQ ID NO: 30460 - RNA, 1767 nt, Artificial Sequence
  mRNA product Design a-2 (hSL-A100) comprising derived and/or modified sequence from LASV(G1442-SLE-2011;Clade IV)__AIT17180__GPCmut6 (opt1)
aggagaguccgcucagccagguugcagaagcggcuuagcguguguccuaaucuucucucugcguguagguaggccugugccgcaaacaagcuuaccaugggccagaucgugaccuucuuccaggaggucccccacgugaucgaggaggugaugaacaucguccugaucgcccucagcauccuggccgugcugaaggggcucuacaacguggcgaccugcggccugaucgggcuggucacguuccuccugcugugcggccgcuccugcaccaccacccucuacaaggggguguacgagcugcagacgcuggagcucaacauggagacccugaacaugugcaugccgcugagcugcaccaagaacaacucccaccacuacauccgggugggcaacgagaccggccucgagcugacgcugaccaacaccagcaucaucaaccacaaguucugcaaccucuccgacgcccacaagaagaaccuguacgaccacgcccugaugagcaucaucuccaccuuccaccucagcauccccaacuucaaccaguacgaggccauguccugcgacuucaacgggggcaagaucagcguccaguacaaccugucccacagcuacgccggggacgcggccaaccacugcggcacgguggccaacggggugcugcagaccuucaugcgcauggccuggggcggcuccuacaucgcgcucgacagcgggcggggcaacugggacugcaucaugaccuccuaccaguaccugaucauccagaacaccacgugggacgaccacugccaguucagccgccccucccccaucggguaccugggccuccugagccagcggacccgcgacgucuacaucucccggcgccugcucggcaccuucaccuggacgcugagcgacagcgaggggaaggacaccccgggcggguacugccugacccgguggaugcucaucgaggccgagcugaagugcuucggcaacaccgccguggccaagugcaacgagaagcacgacgaggaguucugcgacaugcugcgccucuucgacuucugcaagcaggccauccagcggcugaaggcgcccgcccagauguccauccagcugaucaacaaggccgugaacgcccucaucaacgaccagcugaucaugaagaaccaccuccgcgacaucauggggauccccuacugcaacuacagcaaguacugguaccugaacaacacggccaccggcaagaccucccugcccaagugcuggcugaucagcaacggcuccuaccucaacgagacccacuucagcgacgacaucgagcaggaggcggacaacaugaucacggagaugcugcagaaggaguacauggagcggcaggggaagaccccgcugggccuggucgaccucuucguguucuccaccagcuucuaccugaucuccaucuuccugcaccucgugaagauccccacccaccgccacaucgucggcaagagcugccccaagccccaccggcugaaccacauggggaucugcuccugcgggcuguacaagcagccgggcgugcccgugcgcuggaagcggugaggacuagucccuguucccagagcccacuuuuuuuucuuuuuuugaaauaaaauagccugucuuucagaucucaaaggcucuuuucagagccaccaaaaaaaaaaaaaaaaaaaaaaaaaaaaaaaaaaaaaaaaaaaaaaaaaaaaaaaaaaaaaaaaaaaaaaaaaaaaaaaaaaaaaaaaaaaaaaaaaaaaa

SEQ ID NO: 30461 - RNA, 1767 nt, Artificial Sequence
  mRNA product Design a-2 (hSL-A100) comprising derived and/or modified sequence from LASV(G3010-SLE-2013;Clade IV)__AIT17344__GPCmut6 (opt1)
aggagaguccgcucagccagguugcagaagcggcuuagcguguguccuaaucuucucucugcguguagguaggccugugccgcaaacaagcuuaccaugggccagaucgugaccuucuuccaggaggucccccacgugaucgaggaggugaugaacaucguccugaucgcccucagcauccuggccgugcugaaggggcucuacaacuucgcgaccugcggccugguggggcuggucacguuccuccugcugugcggccgcuccugcaccaccagccucuacaaggggguguacgagcugcagacccuggagcucaacauggagacgcugaacaugugcaugccgcuguccugcaccaagaacaacagccaccacuacaucauggugggcaacgagaccggccucgagcugacccugacgaacaccuccaucaucaaccacaaguucugcaaccucagcgacgcccacaagaagaaccuguacaaccacgcccugauguccaucaucagcaccuuccaccucuccauccccaacuucaaccaguacgaggccaugagcugcgacuucaacgggggcaagaucuccguccaguacaaccugagccacuccuacgccggggacgcggccagccacugcggcaccguggccaacggggugcugcagacguucaugcggauggccuggggcggcuccuacaucgcgcucgacagcggguacggcaagugggacugcaucaugaccuccuaccaguaccugaucauccagaacaccaccugggaggaccacugccaguucagccgccccucccccaucggguaccugggccuccugagccagcggacgcgcgacaucuacaucagccggcgccugcucggcaccuucaccuggacccuguccgacagcgaggggaaggacacgccgggcggguacugccugacccgguggaugcucaucgaggccgagcugaagugcuucggcaacaccgccgucgccaagugcaacgagaagcacgacgaggaguucugcgacaugcugcgccucuucgacuucugcaagcaggccauccagcggcugaagacccccgcgcagauguccauccagcugaucaacaaggccgugaacgcccucaucaacgaccagcugaucaugaagaaccaccuccgcgacaucauggggauccccuacugcaacuacagcaaguacugguaccugaaccacacgaccaccggcaagaccucccugcccaagugcuggcuggugagcaacggcuccuaccucaacgagacgcacuucagcgacgacaucgagcagcaggccgacaacaugaucaccgagaugcugcagaaggaguacauggagcggcaggggaagaccccgcugggccuggucgaccucuucguguucuccaccagcuucuaccugaucuccaucuuccugcaccucgugaagauccccacgcaccgccacaucgucggcaagagcugccccaagccccaccggcugaaccacauggggaucugcuccugcgggcuguacaagcagccgggcgugcccgugcgcuggaagcggugaggacuagucccuguucccagagcccacuuuuuuuucuuuuuuugaaauaaaauagccugucuuucagaucucaaaggcucuuuucagagccaccaaaaaaaaaaaaaaaaaaaaaaaaaaaaaaaaaaaaaaaaaaaaaaaaaaaaaaaaaaaaaaaaaaaaaaaaaaaaaaaaaaaaaaaaaaaaaaaaaaaaa

SEQ ID NO: 30462 - RNA, 1767 nt, Artificial Sequence
  mRNA product Design a-2 (hSL-A100) comprising derived and/or modified sequence from LASV(G502-SLE-2009;Clade IV)__AIT17126__GPCmut6 (opt1)
aggagaguccgcucagccagguugcagaagcggcuuagcguguguccuaaucuucucucugcguguagguaggccugugccgcaaacaagcuuaccaugggccagaucgugaccuucuuccaggaggucccccacgugaucgaggaggugaugaacaucguccugaucgcccucagcauccuggccgugcugaaggggcucuacaacuucgcgaccugcggccugguggggcugcucacguuccugcugcucugcggccgcuccugcaccaccgggcuguacaagggcgucuacgagcugcagacccucgagcugaacauggagacgcugaacaugugcaugccgcucagcugcaccaagaacaacucccaccacuacaucauggugggcaacgagaccgggcuggagcugacccucacgaacaccagcaucaucaaccacaaguucugcaaccuguccgacgcccacaagaagaaccuguacgaccacgcccucaugagcaucaucuccaccuuccaccugagcauccccaacuucaaccaguacgaggccauguccugcgacuucaacggcgggaagaucagcgugcaguacaaccugucccacagcuacgccggcgacgcggccgaccacugcgggaccgucgccaacggcgugcuccagacguucaugcggauggccuggggcggguccuacaucgcgcuggacagcggccgcgggcggugggacugcaucaugaccuccuaccaguaccugaucauccagaacaccaccugggaggaccacugccaguucagccgccccucccccaucggcuaccucggccugcugagccagcggacgcgcgacaucuacaucucccggcgccuccuggggaccuucaccuggacccugagcgacagcgagggcaaggacacgcccgggggcuacugccucacccgguggaugcugaucgaggccgagcugaagugcuucgggaacaccgccguggccaagugcaacgagaagcacgacgaggaguucugcgacaugcuccgccuguucgacuucugcaagcaggccauccagcggcugaaggcgccggcccagauguccauccagcucaucaacaaggccgucaacgcccugaucaacgaccagcuggugaugaagaaccaccuccgcgacaucaugggcauccccuacugcaacuacagccgguacugguaccugaaccacaccacgaccggccgcaccucccugcccaagugcuggcucgugagcaacggguccuaccugaacgagacccacuucagcgacgacaucgagcagcaggccgacaacaugaucacggagaugcugcagaaggaguacauggagcggcagggcaagaccccgcuggggcucgucgaccuguucguguucuccaccagcuucuaccugaucuccaucuuccuccaccuggugaagauccccacccaccgccacaucgucggcaagagcugccccaagccccaccggcugaaccacauggggaucugcuccugcggccucuacaagcagccgggcgugcccgugaaguggaagcgcugaggacuagucccuguucccagagcccacuuuuuuuucuuuuuuugaaauaaaauagccugucuuucagaucucaaaggcucuuuucagagccaccaaaaaaaaaaaaaaaaaaaaaaaaaaaaaaaaaaaaaaaaaaaaaaaaaaaaaaaaaaaaaaaaaaaaaaaaaaaaaaaaaaaaaaaaaaaaaaaaaaaaa

SEQ ID NO: 30463 - RNA, 1767 nt, Artificial Sequence
  mRNA product Design a-2 (hSL-A100) comprising derived and/or modified sequence from LASV(G733-SLE-2010;Clade IV)__AIT17154__GPCmut6 (opt1)
aggagaguccgcucagccagguugcagaagcggcuuagcguguguccuaaucuucucucugcguguagguaggccugugccgcaaacaagcuuaccaugggccagaucgugaccuucuuccaggaggucccccacgugaucgaggaggugaugaacaucguccugaucgcccucagcauccuggccgugcugaaggggcucuacaacuucgcgaccugcggcaucguggggcuggucuccuuccugcuccugugcggccgcagcugcacgaccucccuguacaaggggguguacgagcuccagacccuggagcugaacauggagacccucaacaugugcaugccgcugagcugcacgaagaacaacucccaccacuacaucauggugggcaacgagaccggccuggagcucacccugaccaacacgagcaucaucaaccacaaguucugcaaccuguccgacgcccacaagaagaaccucuacgaccacgcccugaugagcaucaucuccaccuuccaccugagcauccccaacuucaaccaguacgaggccauguccugcgacuucaacgggggcaagaucagcguccaguacaaccucucccacagcuacgccggggacgcggccaaccacugcggcaccaucgccaacggggugcugcagaccuucaugcggauggccuggggcggcuccuacaucgcgcuggacagcgggcgcgaccggugggacugcaucaugacguccuaccaguaccucaucauccagaacaccaccugggaggaccacugccaguucagccgccccucccccaucggcuaccuggggcugcucagccagcggacccgcgacaucuacaucagccggcgccugcugggcacguucaccuggacccucuccgacagcgagggcaaggacacccccgggggcuacugccugacgcgguggaugcugaucgaggccgagcucaagugcuucgggaacaccgccguggccaagugcaacgagaagcacgacgaggaguucugcgacaugcugcgccuguucgacuucugcaagcaggccauccagcggcucaaggcgccggcccagauguccauccagcugaucaacaaggccgucaacgcccugaucaacgaccagcucaucaugaagaaccaccuccgcgacaucaugggcauccccuacugcaacuacagcaaguacugguaccugaaccacaccaccacggggaagaccucccugcccaagugcuggcuggugagcaacggcuccuaccugaacgagacccacuucagcgacgacaucgagcagcaggccgacaacaugaucaccgagaugcuccagaaggaguacauggagcggcagggcaagacgccgcuggggcugguggaccuguucgucuucuccaccagcuucuaccucaucuccaucuuccugcaccuggugaagauccccacccaccgccacguggucggcaagagcugccccaagccccaccggcucaaccacauggggaucugcuccugcggccuguacgggcagccgggcgugcccgugaaguggaagcgcugaggacuagucccuguucccagagcccacuuuuuuuucuuuuuuugaaauaaaauagccugucuuucagaucucaaaggcucuuuucagagccaccaaaaaaaaaaaaaaaaaaaaaaaaaaaaaaaaaaaaaaaaaaaaaaaaaaaaaaaaaaaaaaaaaaaaaaaaaaaaaaaaaaaaaaaaaaaaaaaaaaaaa

SEQ ID NO: 30464 - RNA, 1767 nt, Artificial Sequence
  mRNA product Design a-2 (hSL-A100) comprising derived and/or modified sequence from MOPV/LASV reassortant(IGS-1;Clade IV)__AFY05576__GPCmut6 (opt1)
aggagaguccgcucagccagguugcagaagcggcuuagcguguguccuaaucuucucucugcguguagguaggccugugccgcaaacaagcuuaccaugggccagaucgugaccuucuuccaggaggucccccacgugaucgaggaggugaugaacaucguccugaucgcccucagcgugcuggccgugcugaaggggcucuacaacuucgcgaccugcggccuggucgggcuggugacguuccuccugcugugcggccgcuccugcaccaccagccucuacaaggggguguacgagcugcagacccuggagcucaacauggagacgcugaacaugugcaugccgcuguccugcaccaagaacaacagccaccacuacaucauggucggcaacgagaccggccucgagcugacccugacgaacaccuccaucaucaaccacaaguucugcaaccucagcgacgcccacaagaagaaccuguacgaccacgcccugauguccaucaucagcaccuuccaccucuccauccccaacuucaaccaguacgaggccaugagcugcgacuucaacgggggcaagaucuccgugcaguacaaccugagccacuccuacgccggggacgcggccaaccacugcggcaccguggccaacgggguccugcagacguucaugcggauggccuggggcggcagcuacaucgcgcucgacuccgggcgcggcaacugggacugcaucaugaccagcuaccaguaccugaucauccagaacaccaccugggaggaccacugccaguucucccggcccagccccaucggguaccugggccuccugucccagcgcacgcgggacaucuacaucagccgccggcugcucggcaccuucaccuggacccugagcgacuccgagggggaggacacgccgggcggguacugccugacccgcuggaugcucaucgaggccgagcugaagugcuucggcaacaccgccguggccaagugcaacgagaagcacgacgaggaguucugcgacaugcugcggcuguucgacuucugcaagcaggccauccagcgccugaaggcgcccgcccagaugagcauccagcugaucaacaaggccgugaacgcccucaucaacgaccagcugaucaugaagaaccaccuccgggacaucauggggauccccuacugcaacuacuccaaguacugguaccucaaccacaccacgaccggccgcaccagccugcccaagugcuggcuggucuccaacggcagcuaccucaacgagacccacuucuccgacgacaucgagcagcaggccgacaacaugaucacggagaugcugcagaaggaguacauggagcggcaggggaagaccccgcugggccugguggaccucuucguguucagcaccuccuucuaccugaucagcaucuuccugcaccucgucaagauccccacccaccgccacaucguggggaaguccugccccaagccccaccggcugaaccacaugggcaucugcagcugcgggcuguacaagcagccgggcgugcccgucaaguggaagcgcugaggacuagucccuguucccagagcccacuuuuuuuucuuuuuuugaaauaaaauagccugucuuucagaucucaaaggcucuuuucagagccaccaaaaaaaaaaaaaaaaaaaaaaaaaaaaaaaaaaaaaaaaaaaaaaaaaaaaaaaaaaaaaaaaaaaaaaaaaaaaaaaaaaaaaaaaaaaaaaaaaaaaa

SEQ ID NO: 30465 - RNA, 1767 nt, Artificial Sequence
  mRNA product Design a-2 (hSL-A100) comprising derived and/or modified sequence from LASV(LM765-SLE-2012;Clade IV)__AIT17814__GPCmut6 (opt1)
aggagaguccgcucagccagguugcagaagcggcuuagcguguguccuaaucuucucucugcguguagguaggccugugccgcaaacaagcuuaccaugggccagaucgugaccuucuuccaggaggucccccacgugaucgaggaggugaugaacaucguccugaucgcccucagcauccuggccgugcugaaggggcucuacaacuucgcgaccugcggccugguggggcuggucacguuccuccugcugugcggccgcuccugcaccaccagccucuacaaggggguguacgagcugcagacccuggagcucaacauggagacgcugaacaugugcaugccgcuguccugcaccaagaacaacagccaccacuacaucauggugggcaacgagaccggccucgagcugacccugacgaacaccuccaucaucgaccacaaguucugcaaccucagcgacgcccaccggaagaaccuguacgaccacgcccugauguccaucaucagcaccuuccaccucuccauccccaacuucaaccaguacgaggccaugagcugcgacuucaacgggggcaagaucuccguccaguacaaccugagccacuccuacgccaaggacgcggccgaccacugcgggaccguggccaacggcgugcugcagacguucaugcgcauggccuggggcgggagcuacaucgcgcucgacuccggccgggggcgcugggacugcaucaugaccagcuaccaguaccugaucauccagaacaccaccugggaggaccacugccaguucucccggcccagccccaucggcuaccuggggcuccugucccagcgcacgcgggacaucuacaucagccgccggcugcucggcaccuucaccuggacccugagcgacuccgagggcaaggacacgcccgggggcuacugccugacccgcuggaugcucaucgaggccgagcugaagugcuucgggaacaccgccgucgccaagugcaacgagaagcacgacgaggaguucugcgacaugcugcggcuguucgacuucugcaagcaggccauccagcgccugaaggcgccggcccagaugagcauccagcugaucaacaaggccgugaacgcccucaucaacgaccagcugaucaugaagaaccaccuccgggacaucaugggcauccccuacugcaacuacuccaaguacugguaccucaaccacaccacgaccgggaagaccagccugcccaagugcuggcugguguccaacggcagcuaccucaacgagacccacuucuccgacgacaucgagcagcaggccgacaacaugaucacggagaugcugcagaaggaguacauggagcgccagggcaagaccccgcuggggcuggucgaccucuucguguucagcaccuccuucuaccugaucagcaucuuccugcaccucgugaagauccccacccaccggcacaucgucggcaagcccugccccaagccgcaccgccugaaccacauggggaucugcuccugcggccuguacaagcagcccggggugcccgugaaguggaagcggugaggacuagucccuguucccagagcccacuuuuuuuucuuuuuuugaaauaaaauagccugucuuucagaucucaaaggcucuuuucagagccaccaaaaaaaaaaaaaaaaaaaaaaaaaaaaaaaaaaaaaaaaaaaaaaaaaaaaaaaaaaaaaaaaaaaaaaaaaaaaaaaaaaaaaaaaaaaaaaaaaaaaa

SEQ ID NO: 30466 - RNA, 1767 nt, Artificial Sequence
  mRNA product Design a-2 (hSL-A100) comprising derived and/or modified sequence from LASV(LM776-SLE-2012;Clade IV)__AIT17824__GPCmut6 (opt1)
aggagaguccgcucagccagguugcagaagcggcuuagcguguguccuaaucuucucucugcguguagguaggccugugccgcaaacaagcuuaccaugggccagaucgugaccuucuuccaggaggucccccacgugaucgaggaggugaugaacaucguccugaucgcccucagcauccuggccgugcugaaggggcucuacaacuucgcgaccugcggccugguggggcuggucacguuccuccugcugugcggccgcuccugcaccaccagcguguacaaggggguguacgagcuccagacccuggagcugaacauggagacgcucaacaugugcaugccgcuguccugcaccaagaacaacagccaccacuacaucauggucggcaacgagaccggccuggagcucacccugacgaacaccuccaucaucaaccacaaguucugcaaccugagcgacgcccacaagaagaaccucuacgaccacgcccugauguccaucaucagcaccuuccaccuguccauccccaacuucaaccaguacgaggccaugagcugcgacuucaacgggggcaagaucuccgugcaguacaaccucagccacuccuacgccggggacgcggccaaccacugcggcaccguggccaacgggguccugcagacguucaugcggauggccuggggcggcagcuacaucgcgcuggacuccgggcacggcaagugggacugcaucaugaccagcuaccaguaccucaucauccagaacaccaccugggaggaccacugccaguucucccgccccagccccaucggguaccugggccugcucucccagcggacgcgcgacaucuacaucagccggcgccugcugggcaccuucaccuggacccucagcgacuccgaggggaaggacacgccgggcggguacugccugacccgguggaugcugaucgaggccgagcucaagugcuucggcaacaccgccguggccaagugcaacgagaagcacgacgaggaguucugcgacaugcugcgccuguucgacuucugcaagcaggccauccagcggcucaaggcgcccgcccagaugagcauccagcugaucaacaaggccgugaacgcccugaucaacgaccagcucaucaugaagaaccaccuccgcgacaucauggggauccccuacugcaacuacuccaaguacugguaccugaaccacaccacgaccggcaagaccagccugcccaagugcuggcuggucuccaacggcagcuaccugaacgagacccacuucuccgacgacaucgagcagcaggccgacaacaugaucacggagaugcuccagaaggaguacauggagcggcaggggaagaccccgcugggccugguggaccuguucguguucagcaccuccuucuaccucaucagcaucuuccugcaccuggucaagauccccacccaccgccacaucguggggaaguccugccccaagccccaccggcucaaccacaugggcaucugcagcugcgggcuguacaagcagccgggcgugcccguccgcuggaagcggugaggacuagucccuguucccagagcccacuuuuuuuucuuuuuuugaaauaaaauagccugucuuucagaucucaaaggcucuuuucagagccaccaaaaaaaaaaaaaaaaaaaaaaaaaaaaaaaaaaaaaaaaaaaaaaaaaaaaaaaaaaaaaaaaaaaaaaaaaaaaaaaaaaaaaaaaaaaaaaaaaaaaa

SEQ ID NO: 30467 - RNA, 1767 nt, Artificial Sequence
  mRNA product Design a-2 (hSL-A100) comprising derived and/or modified sequence from LASV(Mad39;Clade IV)__ANH09722__GPCmut6 (opt1)
aggagaguccgcucagccagguugcagaagcggcuuagcguguguccuaaucuucucucugcguguagguaggccugugccgcaaacaagcuuaccaugggccagaucgugaccuucuuccaggaggucccccacgugaucgaggaggugaugaacaucguccugaucgcccucagcauccuggccgugcugaaggggcucuacaacguggcgaccugcggccugaucgggcuggucacguuccuccugcugugcggccgcuccugcaccaccacccucuacaaggggguguacgagcugcaggcccuggagcucaacauggagacgcugaacaugugcaugccgcugagcugcaccaagaacaacucccaccacuacauccgggugggcaacgagaccggccucgagcugacccugacgaacaccagccucaucaaccacaaguucugcaaccuguccgacgcccacaagaagaaccuguacgaccacgcccucaugagcaucaucuccaccuuccaccugagcauccccaacuucaaccaguacgaggccauguccugcgacuucaacgacgggaagaucagcguccaguacaaccugucccacaccuacgcgggcgacacggccaaccacugcgggaccguggccaacggcgugcuccagaccuucaugcgcauggccuggggcgggagcuacaucgcgcuggacuccggccgcgggggcugggacugcaucaugaccagcuaccaguaccugaucauccagaacacgaccugggaggaccacugccaguucucccggcccagccccaucggguaccucggccugcugucccagcggacccgcgacaucuacaucagccggcgccuccugggcaccuucacguggacccuguccgacagcgaggggaaggacaccccgggcggguacugccucacccgguggaugcugaucgaggccgagcugaagugcuucggcaacacggccgucgccaagugcaacgagaagcacgacgaggaguucugcgacaugcuccgccuguucgacuucugcaagcaggccauccagcggcugaaggcgcccgcccagaugagcauccagcucaucaacaaggccgugaacgcccugaucaacgaccagcugaucaugaagaaccaccuccgcgacaucauggggauccccuacugcaacuacuccaaguacugguaccugaaccacaccgugaccggcaagaccagccugcccaagugcuggcucgucuccaacggcagcuaccugaacgagacgcacuucuccgacgacaucgagcagcaggccgacaacaugaucaccgagaugcugcagaaggaguacauggagcggcaggggaagaccccgcugggccucguggaccuguucguguucagcaccuccuucuaccugaucagcaucuuccuccaccuggucaagauccccacgcaccgccacgugguggggaagcccugccccaagccgcaccggcugaaccacaugggcaucugcuccugcggguucuacaagcagcccggcguccccgugcgcuggaagcggugaggacuagucccuguucccagagcccacuuuuuuuucuuuuuuugaaauaaaauagccugucuuucagaucucaaaggcucuuuucagagccaccaaaaaaaaaaaaaaaaaaaaaaaaaaaaaaaaaaaaaaaaaaaaaaaaaaaaaaaaaaaaaaaaaaaaaaaaaaaaaaaaaaaaaaaaaaaaaaaaaaaaa

SEQ ID NO: 30468 - RNA, 1767 nt, Artificial Sequence
  mRNA product Design a-2 (hSL-A100) comprising derived and/or modified sequence from LASV(Z0947-SLE-2011;Clade IV)__AIT17840__GPCmut6 (opt1)
aggagaguccgcucagccagguugcagaagcggcuuagcguguguccuaaucuucucucugcguguagguaggccugugccgcaaacaagcuuaccaugggccagaucgugaccuucuuccaggaggucccccacgugaucgaggaggugaugaacaucguccugaucgcccucagcauccuggccgugcugaaggggcucuacaacuucgcgaccugcggccugguggggcuggucacguuccuccugcugugcggccgcuccugcaccaucagccucuacaaggggguguacgagcugcagacccuggagcucaacauggagacccugaacaugugcaugccgcuguccugcacgaagaacaacagccaccacuacaucauggugggcaacgagaccggccucgagcugacccugaccaacacguccaucaucaaccacaaguucugcaaccucagcgacgcccacaagaagaaccuguacgaccacgcccugauguccaucaucagcaccuuccaccucuccauccccaacuucaaccaguacgaggccaugagcugcgacuucaacgggggcaagaucuccguccaguacaaccugagccacuccuacgccggggacgcggccaaccacugcggcaccguggccaacggggugcugcagaccuucaugcggauggccuggggcggcagcuacaucgcgcucgacuccgggcgcgaccggugggacugcaucaugacgagcuaccaguaccugaucauccagaacaccaccugggaggaccacugccaguucucccgccccagccccaucggcuaccuggggcuccugucccagcggacccgcgacaucuacaucagccggcgccugcucggcacguucaccuggacccugagcgacuccgagggcaaggacacccccgggggcuacugccugacgcgguggaugcucaucgaggccgagcugaagugcuucgggaacaccgccgucgccaagugcaacgagaagcacgacgaggaguucugcgacaugcugcgccucuucgacuucugcaagcaggccauccagcggcugaaggcgccggcccagaugagcauccagcugaucaacaaggccgugaacgcccucaucaacgaccagcugaucaugaagaaccaccuccgcgacaucaugggcauccccuacugcaacuacuccaaguacugguaccugaaccacaccaccacggggaagaccagccugcccaagugcuggcugguguccaacggcagcuaccucaacgagacccacuucuccgacgacaucgagcagcaggccgacaacaugaucaccgagaugcugcagaaggaguacauggagcggcagggcaagacgccgcuggggcuggucgaccucuucguguucagcaccuccuucuaccugaucagcaucuuccugcaccucgugaagauccccacccaccgccacaucgucggcaagcccugccccaagccgcaccggcugaaccacauggggaucugcuccugcggccuguacaagcagcccggggugcccgugaaguggaagcgcugaggacuagucccuguucccagagcccacuuuuuuuucuuuuuuugaaauaaaauagccugucuuucagaucucaaaggcucuuuucagagccaccaaaaaaaaaaaaaaaaaaaaaaaaaaaaaaaaaaaaaaaaaaaaaaaaaaaaaaaaaaaaaaaaaaaaaaaaaaaaaaaaaaaaaaaaaaaaaaaaaaaaa

SEQ ID NO: 30469 - RNA, 1767 nt, Artificial Sequence
  mRNA product Design a-2 (hSL-A100) comprising derived and/or modified sequence from LASV(Josiah;Clade IV)__NP_694870__GPCmut6 (opt4)
aggagaguccgcucagccagguugcagaagcggcuuagcguguguccuaaucuucucucugcguguagguaggccugugccgcaaacaagcuuaccaugggccagaucgugaccuucuuccaggaggugccccacgugaucgaggaggugaugaacaucgugcugaucgcccugagcgugcuggccgugcugaagggccuguacaacuucgccaccugcggccuggugggccuggugaccuuccugcugcugugcggcagaagcugcaccaccagccuguacaagggcguguacgagcugcagacccuggagcugaacauggagacccugaacaugugcaugccccugagcugcaccaagaacaacagccaccacuacaucauggugggcaacgagaccggccuggagcugacccugaccaacaccagcaucaucaaccacaaguucugcaaccugagcgacgcccacaagaagaaccuguacgaccacgcccugaugagcaucaucagcaccuuccaccugagcauccccaacuucaaccaguacgaggccaugagcugcgacuucaacggcggcaagaucagcgugcaguacaaccugagccacagcuacgccggcgacgccgccaaccacugcggcaccguggccaacggcgugcugcagaccuucaugagaauggccuggggcggcagcuacaucgcccuggacagcggcagaggcaacugggacugcaucaugaccagcuaccaguaccugaucauccagaacaccaccugggaggaccacugccaguucagcagacccagccccaucggcuaccugggccugcugagccagagaaccagagacaucuacaucagcagaagacugcugggcaccuucaccuggacccugagcgacagcgagggcaaggacacccccggcggcuacugccugaccagauggaugcugaucgaggccgagcugaagugcuucggcaacaccgccguggccaagugcaacgagaagcacgacgaggaguucugcgacaugcugagacuguucgacuucugcaagcaggccauccagagacugaaggcccccgcccagaugagcauccagcugaucaacaaggccgugaacgcccugaucaacgaccagcugaucaugaagaaccaccugagagacaucaugggcauccccuacugcaacuacagcaaguacugguaccugaaccacaccaccaccggcagaaccagccugcccaagugcuggcuggugagcaacggcagcuaccugaacgagacccacuucagcgacgacaucgagcagcaggccgacaacaugaucaccgagaugcugcagaaggaguacauggagagacagggcaagaccccccugggccugguggaccuguucguguucagcaccagcuucuaccugaucagcaucuuccugcaccuggugaagauccccacccacagacacaucgugggcaagagcugccccaagccccacagacugaaccacaugggcaucugcagcugcggccuguacaagcagcccggcgugcccgugaaguggaagagaugaggacuagucccuguucccagagcccacuuuuuuuucuuuuuuugaaauaaaauagccugucuuucagaucucaaaggcucuuuucagagccaccaaaaaaaaaaaaaaaaaaaaaaaaaaaaaaaaaaaaaaaaaaaaaaaaaaaaaaaaaaaaaaaaaaaaaaaaaaaaaaaaaaaaaaaaaaaaaaaaaaaaa

SEQ ID NO: 30470 - RNA, 1764 nt, Artificial Sequence
  mRNA product Design a-2 (hSL-A100) comprising derived and/or modified sequence from LASV(LP;Clade I)__AAF86701__GPCmut6 (opt4)
aggagaguccgcucagccagguugcagaagcggcuuagcguguguccuaaucuucucucugcguguagguaggccugugccgcaaacaagcuuaccaugggccagaucaucaccuucuuccaggaggugccccacgugaucgaggaggugaugaacaucgugcugaucgcccugagccugcuggccauccugaagggccuguacaacaucgccaccugcggcaucaucggccugguggccuuccuguuccugugcggcaagagcugcagccugacccugaagggcggcuacgagcugcagacccuggagcugaacauggagacccugaacaugugcaugccccugagcugcaccaagaacagcagccaccacuacaucagagugggcaacgagaccggccuggagcugacccugaccaacaccagcaucaucaaccacaaguucugcaaccugagcgacgcccacaagaagaaccuguacgaccacgcccugaugagcaucaucagcaccuuccaccugagcauccccaacuucaaccaguacgaggccaugagcugcgacuucaacggcggcaagaucagcgugcaguacaaccugagccacagcuacgccggcgacgccgccgagcacugcggcaccguggccaacggcgugcugcagaccuucaugagaauggccuggggcggcagauacaucgcccuggacagcggcaagggcaacugggacugcaucaugaccagcuaccaguaccugaucauccagaacaccaccugggaggaccacugccaguucagcagacccagccccaucggcuaccugggccugcugagccagagaaccagagacaucuacaucagcagaagacugcugggcaccuucaccuggacccugagcgacagcgagggcaacgagacccccggcggcuacugccugaccagauggaugcugaucgaggccgagcugaagugcuucggcaacaccgccguggccaagugcaacgagaagcacgacgaggaguucugcgacaugcugagacuguucgacuucugcaagcaggccaucagaagacugaaggcccccgcccagaugagcauccagcugaucaacaaggccgugaacgcccugaucaacgaccagcugaucaugaagaaccaccugagagacaucaugggcauccccuacugcaacuacagcaaguacugguaccugaaccacaccagcagcggcagaaccagccugcccaagugcuggcugaucagcaacggcagcuaccugaacgagacccaguucagcgacgacaucgagcagcaggccgacaacaugaucaccgagaugcugcagaaggaguacaucgagagacagggcaagaccccccugggccugguggacaucuucaucuucagcaccagcuucuaccugaucagcaucuuccugcaccugaucaagauccccacccacagacacaucgugggcaagcccugccccaagccccacagacugaaccacaugggcgugugcagcugcggccuguacaagcaccccggcgugcccaccaaguggaagagaugaggacuagucccuguucccagagcccacuuuuuuuucuuuuuuugaaauaaaauagccugucuuucagaucucaaaggcucuuuucagagccaccaaaaaaaaaaaaaaaaaaaaaaaaaaaaaaaaaaaaaaaaaaaaaaaaaaaaaaaaaaaaaaaaaaaaaaaaaaaaaaaaaaaaaaaaaaaaaaaaaaaaa

SEQ ID NO: 30471 - RNA, 1764 nt, Artificial Sequence
  mRNA product Design a-2 (hSL-A100) comprising derived and/or modified sequence from LASV(803213;Clade II)__AAF86703__GPCmut6 (opt4)
aggagaguccgcucagccagguugcagaagcggcuuagcguguguccuaaucuucucucugcguguagguaggccugugccgcaaacaagcuuaccaugggccagaucaucaccuucuuccaggaggugccccacgugaucgaggaggugaugaacaucgugcugaucgcccugagccugcuggccauccugaagggcaucuacaacguggccaccugcggccuguucggccugaucagcuuccugcugcugugcggcagaagcugcagcgugaccuacaagggcguguacgagcugcagacccuggagcugaacauggccaaccugaacaugugcaugccccugagcugcaccaagaacaacagccaccacuacaucauggugggcaacgagaccggccuggagcugacccugaccaacaccagcaucaucaaccacaaguucugcaaccugagcgacgcccacaagaagaaccuguacgaccacgcccugaugagcaucaucagcaccuuccaccugagcauccccaacuucaaccaguacgaggccaugagcugcgacuucaacggcggcaagaucagcgugcaguacaaccugagccacagcuucgccguggacgccgccaaccacugcggcaccaucgccaacggcgugcugcagaccuucaugagaauggccuggggcggcagcuacaucgcccuggacagcggcaagggcaacugggacugcaucaugaccagcuaccaguaccugaucauccagaacaccaccugggaggaccacugccaguucagcagacccagccccaucggcuaccugggccugcugagccagagaaccagagacaucuacaucagcagaagacugcugggcaccuucaccuggacccugagcgacagcgagggcaacgaggcccccggcggcuacugccugaccagauggaugcugaucgaggccgagcugaagugcuucggcaacaccgccguggccaagugcaacgagaagcacgacgaggaguucugcgacaugcugagacuguucgacuucugcaagcaggccaucaagagacugaagacccccgcccagaugagcauccagcugaucaacaaggccgugaacgcccugaucaacgaccagcugaucaugaagaaccaccugagagacaucaugggcauccccuacugcaacuacagcagauacugguaccugaaccacaccgugaccggcaagaccagccugcccagaugcuggcuggugagcaacggcagcuaccugaacgagacccacuucagcgacgacaucgagcagcaggccgacaacaugaucaccgagaugcugcagaaggaguacauggacagacagggcaagaccccccugggccugguggaccuguucguguucagcaccagcuucuaccugaucagcaucuuccugcaccuggugaagauccccacccacagacacaucgugggcaagcccugccccaagccccacagacugaaccacaugggcaucugcagcugcggccuguacaagcaccccggcgugcccgugaaguggaagagaugaggacuagucccuguucccagagcccacuuuuuuuucuuuuuuugaaauaaaauagccugucuuucagaucucaaaggcucuuuucagagccaccaaaaaaaaaaaaaaaaaaaaaaaaaaaaaaaaaaaaaaaaaaaaaaaaaaaaaaaaaaaaaaaaaaaaaaaaaaaaaaaaaaaaaaaaaaaaaaaaaaaaa

SEQ ID NO: 30472 - RNA, 1764 nt, Artificial Sequence
  mRNA product Design a-2 (hSL-A100) comprising derived and/or modified sequence from LASV(GA391;Clade III)__CAA36645__GPCmut6 (opt4)
aggagaguccgcucagccagguugcagaagcggcuuagcguguguccuaaucuucucucugcguguagguaggccugugccgcaaacaagcuuaccaugggccagaucgugaccuucuuccaggaggugccccacgugaucgaggaggugaugaacaucgugcugaucgcccugagcauccuggccauccugaagggccuguacaacguggccaccugcggccugaucggccuggugaccuuccugcugcugagcggcagaagcugcagccugaucuacaagggcaccuacgagcugcagacccuggagcugaacauggagacccugaacaugugcaugccccugagcugcaccaagaacaacagccaccacuacaucagagugggcaacgagaccggccuggagcugacccugaccaacaccagcauccugaaccacaaguucugcaaccugagcgacgcccacaagagaaaccuguacgaccacagccugaugagcaucaucagcaccuuccaccugagcauccccaacuucaaccaguacgaggccaugagcugcgacuucaacggcggcaagaucaccgugcaguacaaccugagccacagcuucgccguggacgccgccggccacugcggcacccuggccaacggcgugcugcagaccuucaugagaauggccuggggcggcagcuacaucgcccuggacagcggcagaggcaacugggacugcaucaugaccagcuaccaguaccugaucauccagaacaccaccugggacgaccacugccaguucagcagacccagccccaucggcuaccugggccugcugagccagagaaccagagacaucuacaucagcagaagacugcugggcaccuucaccuggacccugagcgacagcgagggcaacgagacccccggcggcuacugccugaccagauggaugcugaucgaggccgagcugaagugcuucggcaacaccgccguggccaagugcaacgagaagcacgacgaggaguucugcgacaugcugagacuguucgacuucugcaagcaggccaucagaagacugaagacccccgcccagaugagcauccagcugaucaacaaggccgugaacgcccugaucaacgaccagcugaucaugaagaaccaccugagagacaucaugggcauccccuacugcaacuacagcagauacugguaccugaaccacaccagcaccggcaagaccagccugcccagaugcuggcugaucagcaacggcagcuaccugaacgagaccaaguucagcgacgacaucgagcagcaggccgacaacaugaucaccgagaugcugcagaaggaguacaucgacagacagggcaagaccccccugggccugguggaccuguucguguucagcaccagcuucuaccugaucagcaucuuccugcaccuggugaagauccccacccacagacacaucgugggcaagcccugccccaagccccacagacugaaccacaugggcaucugcagcugcggccuguacaagcagcccggcgugcccgugagauggaagagaugaggacuagucccuguucccagagcccacuuuuuuuucuuuuuuugaaauaaaauagccugucuuucagaucucaaaggcucuuuucagagccaccaaaaaaaaaaaaaaaaaaaaaaaaaaaaaaaaaaaaaaaaaaaaaaaaaaaaaaaaaaaaaaaaaaaaaaaaaaaaaaaaaaaaaaaaaaaaaaaaaaaaa

SEQ ID NO: 30473 - RNA, 1767 nt, Artificial Sequence
  mRNA product Design a-2 (hSL-A100) comprising derived and/or modified sequence from LASV(AV;Clade V)__CCA30314__GPCmut6 (opt4)
aggagaguccgcucagccagguugcagaagcggcuuagcguguguccuaaucuucucucugcguguagguaggccugugccgcaaacaagcuuaccaugggccagaucgugaccuucuuccaggaggugccccacgugaucgaggaggugaugaacaucgugcugaucgcccugagcauccuggccgugcugaagggccuguacaacaucgccaccugcggccugaucggccugaucaccuuccugcugcugugcggcagaagcugcagcagcaaccuguacaagggcguguacgagcugcagagccuggaccugaacauggagacccugaacaugugcaugccccugagcugcaccaagaacaacagccaccacuacaucagagugggcaacgacaccggccuggagcugacccugaccaacaccagcauccugaaccacaaguucugcaaccugagcgacgcccacaagaaggaccuguacgaccacgcccugaugagcaucaucagcaccuuccaccugagcauccccaacuucaaccaguacgaggccaugagcugcgacuucaacggcggcaagaucagcgugcaguacaaccugagccacagcuacgccaucgacgccgccaaccacugcggcaccguggccaacggcauccugcagaccuucaugagaauggccuggggcggcagcuacaucgcccuggacagcggcagaggcaacugggacugcaucaugaccagcuaccaguaccugaucauccagaacaccaccugggagaaccacugccaguucagcagacccagccccaucggcuaccugggccugcugagccagagaaccagagacaucuacaucagcagaagacugcugggcaccuucaccuggacccugagcgacagcgagggcaacgccacccccggcggcuacugccugaccagauggaugcugaucgaggccgagcugaagugcuucggcaacaccgccguggccaagugcaacgagaagcacgacgaggaguucugcgacaugcugagacuguucgacuucugcaagcaggccaucagcagacugaagagccccgcccagaugagcauccagcugaucaacaaggccgugaacgcccugaucaacgaccagcugaucaugaagaaccaccugagagacaucaugggcauccccuacugcaacuacagcaaguacugguaccugaaccacaccaucaccggcaagaccagccugcccaagugcuggcuggugagcaacggcagcuaccugaacgagacccacuucagcgacgacaucgagcagcaggccgacaacaugaucaccgagaugcugcagaaggaguacauggagagacagggcaagaccccccugggccugguggaccuguucguguucagcaccagcuucuaccugaucagcaucuuccugagacuggugaagauccccacccacagacacaucgugggcaagcccugccccaagccccacagacugaaccacaugggcaucugcagcugcggccuguacaagcagcccggcgugcccgugagauggaagagaugaggacuagucccuguucccagagcccacuuuuuuuucuuuuuuugaaauaaaauagccugucuuucagaucucaaaggcucuuuucagagccaccaaaaaaaaaaaaaaaaaaaaaaaaaaaaaaaaaaaaaaaaaaaaaaaaaaaaaaaaaaaaaaaaaaaaaaaaaaaaaaaaaaaaaaaaaaaaaaaaaaaaa

SEQ ID NO: 30474 - RNA, 1764 nt, Artificial Sequence
  mRNA product Design a-2 (hSL-A100) comprising derived and/or modified sequence from LASV(Togo/2016/7082;Clade VI)__AMR44577__GPCmut6 (opt4)
aggagaguccgcucagccagguugcagaagcggcuuagcguguguccuaaucuucucucugcguguagguaggccugugccgcaaacaagcuuaccaugggccagaucaucaccuucuuccaggaggugccccacgugaucgaggaggugaugaacaucgugcugaucgcccugagccugcuggccauccugaagggcguguacaacguggccaccugcggcaucaucggccuggugaccuuccuguuccugugcggcagaagcugcagccugaucuacaagggcagcuacgagcugcagacccuggagcugaacauggagacccugaacaugugcaugccccugagcugcaccaagaacagcagccaccacuacaucagagugggcaacgagaccggccuggagcugacccugaccaacaccagcaucaucaaccacaaguucugcaaccugagcgacgcccacaagagaaaccuguacgaccacgcccugaugagcauccugagcaccuuccaccugagcauccccaacuucaaccaguacgaggccaugagcugcgacuucaacggcggcaagaucagcgugcaguacaaccugagccacgccuacgccguggacgccgccgagcacugcggcaccguggccaacggcgugcugcagaccuucaugagaauggccuggggcggcagcuacaucgcccuggacagcggcagaggcaacugggacugcaucaugaccagcuaccaguaccugaucauccagaacaccaccugggaggaccacugccaguucagcagacccagccccaucggcuaccugggccugcugagccagagaaccagagacaucuacaucagcagaagacugcugggcaccuucaccuggacccugagcgacagcgagggcaacgagacccccggcggcuacugccugaccagauggaugcugaucgaggccgagcugaagugcuucggcaacaccgccguggccaagugcaacgagaagcacgacgaggaguucugcgacaugcugagacuguucgacuucugcaagcaggccauccagagacugaagagccccgcccagaugagcauccagcugaucaacaaggccgugaacgcccugaucaacgaccagcugaucaugaagaaccaccugagagacaugaugggcauccccuacugcaacuacagcaaguacugguaccugaaccacaccagcagcggcagaaccagccugcccaagugcuggcuggugagcaacggcagcuaccugaacgagacccacuucagcgacgacaucgagcagcaggccgacaacaugaucaccgagaugcugcagaaggaguacaucgacagacagggcaagaccccccugggccugguggaccuguucguguucagcaccagcuucuaccugaucagcaucuuccugcaccugaucaagauccccacccacagacacaucgugggcaagcccugccccaagccccacagacugaaccacaugggcaucugcagcugcggccuguacaagcagcccggcgugcccaccagauggaagagaugaggacuagucccuguucccagagcccacuuuuuuuucuuuuuuugaaauaaaauagccugucuuucagaucucaaaggcucuuuucagagccaccaaaaaaaaaaaaaaaaaaaaaaaaaaaaaaaaaaaaaaaaaaaaaaaaaaaaaaaaaaaaaaaaaaaaaaaaaaaaaaaaaaaaaaaaaaaaaaaaaaaaa

SEQ ID NO: 30475 - RNA, 1764 nt, Artificial Sequence
  mRNA product Design a-2 (hSL-A100) comprising derived and/or modified sequence from LASV(KAK-428;Clade n.d. (VII))__ANH09740__GPCmut6 (opt4)
aggagaguccgcucagccagguugcagaagcggcuuagcguguguccuaaucuucucucugcguguagguaggccugugccgcaaacaagcuuaccaugggccagaucgugaccuucuuccaggaggugccccacgugaucgaggaggugaugaacaucgugcugaucgcccugagccugcuggccauccugaagggccuguacaacuucgccaccugcggcgugaucggccugaucaccuuccugcugcugugcggcagaagcugcagcgccaccuacaagggccaguacgagcugcagacccuggagcugaacauggagagccugaacaugugcaugccccugagcugcaccaagaacaacagccaccacuacaucagagccggcaacaacaccggccuggagcugacccugaccaacaccagcaucaucagccacaaguucugcaaccugagcgacgcccacaagaagaaccuguacgaccacacccugaugagcaucaucaccaccuuccaccugagcauccccaacuucaaccaguacgaggccaugagcugcgacuucaacggcggcaagaucagcauccaguacaaccugagccacagcuacgccggcgacgccgcccagcacugcggcaccguggccaacggcgugcugcagaccuucaugagaauggccuggggcggcagcuaccuggcccuggacagcggcagaagaggcugggacugcaucaucagcagcuaccaguaccugaucauccagaacaccaccugggacgaccacugccaguucagcagacccagccccaucggcuaccugggcuucgugagccagaagaccagagacaucuacaucagcagaagacugcugggcaccuucaccuggacccugagcgacagcgagggccacgacaugcccggcggcuacugccugaccagauggaugcugaucgaggccgaccugaagugcuucggcaacaccgccguggccaagugcaacgagaagcacgacgaggaguucugcgacauguggagacuguucgacuucugcaagcaggccauccagagacugaaggcccccgcccagaugaacauccagcugaucaacaaggccgugaacgcccugaucaacgaccagcugaugaugaagaaccaccugagagacaucaugggcauccccuacugcaacuacagcaaguucugguaccugaacaacaccaccaccggcagaaccagccugcccagaugcuggcugaucagcaacggcagcuaccugaacgagacccacuucagcgacgacaucgagcagcaggccgacaacaugaucaccgagaugcugcagaaggaguacauggacagacagggcaagaccccccugggccugguggaccuguucguguucagcaccagcuucuaccugaucaccaucuuccugcaccuggugaagauccccacccacagacacaucgugggcaagcccugccccaagccccacagacugaaccacaugggcaucugcagcugcggccuguacaagcagcccggcgugcccgugagauggaagagaugaggacuagucccuguucccagagcccacuuuuuuuucuuuuuuugaaauaaaauagccugucuuucagaucucaaaggcucuuuucagagccaccaaaaaaaaaaaaaaaaaaaaaaaaaaaaaaaaaaaaaaaaaaaaaaaaaaaaaaaaaaaaaaaaaaaaaaaaaaaaaaaaaaaaaaaaaaaaaaaaaaaaa

SEQ ID NO: 30476 - RNA, 1764 nt, Artificial Sequence; identical to SEQ ID NO: 30470
  mRNA product Design a-2 (hSL-A100) comprising derived and/or modified sequence from LASV(Pinneo-NIG-1969;Clade I)__AIT17836__GPCmut6 (opt4)

SEQ ID NO: 30477 - RNA, 1764 nt, Artificial Sequence
  mRNA product Design a-2 (hSL-A100) comprising derived and/or modified sequence from LASV(ISTH0009-NIG-2011;Clade II)__AIT17404__GPCmut6 (opt4)
aggagaguccgcucagccagguugcagaagcggcuuagcguguguccuaaucuucucucugcguguagguaggccugugccgcaaacaagcuuaccaugggccagaucaucaccuucuuccaggaggugccccacgugaucgaggaggugaugaacaucgugcugaucgcccugagccugcuggccauccugaagggcaucuacaacguggccaccugcggccuguucggccuggugagcuuccugcugcugugcggcagaagcugcagcaccaccuacaagggcguguacgagcugcagacccuggagcuggacauggccagccugaacaugugcaugccccugagcugcaccaagaacaacagccaccacuacaucauggugggcaacgagaccggccuggagcugacccugaccaacaccagcaucaucaaccacaaguucugcaaccugagcgacgcccacaagaagaaccuguacgaccacgcccugaugagcaucaucagcaccuuccaccugagcauccccaacuucaaccaguacgaggccaugagcugcgacuucaacggcggcaagaucagcgugcaguacaaccugagccacgccuacgccguggacgccgccaaccacugcggcaccaucgccaacggcgugcugcagaccuucaugagaauggccuggggcggcagcuacaucgcccuggacagcggcaagggcagcugggacugcaucaugaccagcuaccaguaccugaucauccagaacaccaccugggaggaccacugccaguucagcagacccagccccaucggcuaccugggccugcugagccagagaaccagagacaucuacaucagcagaagacugcugggcaccuucaccuggacccugagcgacagcgagggcaacgagacccccggcggcuacugccugaccagauggaugcugaucgaggccgagcugaagugcuucggcaacaccgccguggccaagugcaacgagaagcacgacgaggaguucugcgacaugcugagacuguucgacuucugcaagcaggccaucagaagacugaagacccccgcccagaugagcauccagcugaucaacaaggccgugaacgcccugaucaacgaccagcugaucaugaagaaccaccugagagacaucaugggcauccccuacugcaacuacagcaaguacugguaccugaaccacaccgugaccggcaagaccagccugcccagaugcuggcuggugagcaacggcagcuaccugaacgagacccacuucagcgacgacaucgagcagcaggccgacaacaugaucaccgagcugcugcagaaggaguacauggacagacagggcaagaccccccugggccugguggaccuguucguguucagcaccagcuucuaccugaucagcaucuuccugcaccugaucaagauccccacccacagacacaucaccggcaagcccugccccaagccccacagacugaaccacaugggcaucugcagcugcggccuguacaagcaccccggcgugcccgugaaguggaagagaugaggacuagucccuguucccagagcccacuuuuuuuucuuuuuuugaaauaaaauagccugucuuucagaucucaaaggcucuuuucagagccaccaaaaaaaaaaaaaaaaaaaaaaaaaaaaaaaaaaaaaaaaaaaaaaaaaaaaaaaaaaaaaaaaaaaaaaaaaaaaaaaaaaaaaaaaaaaaaaaaaaaaa

SEQ ID NO: 30478 - RNA, 1764 nt, Artificial Sequence
  mRNA product Design a-2 (hSL-A100) comprising derived and/or modified sequence from LASV(ISTH2010-NIG-2012;Clade II)__AIT17482__GPCmut6 (opt4)
aggagaguccgcucagccagguugcagaagcggcuuagcguguguccuaaucuucucucugcguguagguaggccugugccgcaaacaagcuuaccaugggccagaucaucaccuucuuccaggaggugccccacgugaucgaggaggugaugaacaucgugcugaucgcccugagccugcuggccauccugaagggcaucuacaacguggccaccugcggccuguucggccuggugagcuuccugcugcugugcggcagaagcugcagcaccaccuacaagggcguguacgagcugcagacccuggagcuggacauggccagccugaacaugugcaugccccugagcugcaccaagaacaacagccaccacuacaucauggugggcaacgagaccggccuggagcugacccugaccaacaccagcaucaucaaccacaaguucugcaaccugagcgacgcccacaagaagaaccuguacgaccacgcccugaugagcaucaucagcaccuuccaccugagcauccccaacuucaaccaguacgaggccaugagcugcgacuucaacggcggcaagaucagcgugcaguacaaccugagccacgccuacgccguggacgccgccaaccacugcggcaccaucgccaacggcgugcugcagaccuucaugagaauggccuggggcggcagcuacaucgcccuggacagcggcaagggcagcugggacugcaucaugaccagcuaccaguaccugaucauccagaacaucaccugggaggaccacugccaguucagcagacccagccccaucggcuaccugggccugcugagccagagaaccagagacaucuacaucagcagaagacugcugggcaccuucaccuggacccugagcgacagcgagggcaacgagacccccggcggcuacugccugaccagauggaugcugaucgaggccgagcugaagugcuucggcaacaccgccguggccaagugcaacgagaagcacgacgaggaguucugcgacaugcugagacuguucgacuucugcaagcaggccaucagaagacugaagacccccgcccagaugagcauccagcugaucaacaaggccgugaacgcccugaucaacgaccagcugaucaugaagaaccaccugagagacaucaugggcauccccuacugcaacuacagcaaguacugguaccugaaccacaccgugaccggcaagaccagccugcccagaugcuggcuggugagcaacggcagcuaccugaacgagacccacuucagcgacgacaucgagcagcaggccgacaacaugaucaccgagcugcugcagaaggaguacaucgacagacagggcaagaccccccugggccugguggaccuguucguguucagcaccagcuucuaccugaucagcaucuuccugcaccuggugaagauccccacccacagacacguggugggcaagcccugccccaagccccacagacugaaccacaugggcaucugcagcugcggccuguacaagcaccccggcgugcccgugaaguggaagagaugaggacuagucccuguucccagagcccacuuuuuuuucuuuuuuugaaauaaaauagccugucuuucagaucucaaaggcucuuuucagagccaccaaaaaaaaaaaaaaaaaaaaaaaaaaaaaaaaaaaaaaaaaaaaaaaaaaaaaaaaaaaaaaaaaaaaaaaaaaaaaaaaaaaaaaaaaaaaaaaaaaaaa

SEQ ID NO: 30479 - RNA, 1764 nt, Artificial Sequence
  mRNA product Design a-2 (hSL-A100) comprising derived and/or modified sequence from LASV(Lassa virus/H.sapiens-wt/NGA/2015/ISTH_0543;Clade II)__AVO03639__GPCmut6 (opt4)
aggagaguccgcucagccagguugcagaagcggcuuagcguguguccuaaucuucucucugcguguagguaggccugugccgcaaacaagcuuaccaugggccagaucaucaccuucuuccaggaggugccccacgugaucgaggaggugaugaacaucgugcugaucgcccugagccugcuggccauccugaagggcaucuacaacguggccaccugcggccuguucggccuggugagcuuccugcugcugugcggcagaagcugcagcaccaccuacaagggcguguacgagcugcagacccuggagcuggacauggccaaccugaacaugugcaugccccugagcugcaccaagaacaacagccaccacuacaucauggugggcaacgagaccggccuggagcugacccugaccaacaccagcaucaucaaccacaaguucugcaaccugagcgacgcccacaagaagaaccuguacgaccacgcccugaugagcaucaucagcaccuuccaccugagcauccccaacuucaaccaguacgaggccaugagcugcgacuucaacggcggcaagaucagcgugcaguacaaccugagccacaccuacgccguggacgccgccaaccacugcggcaccaucgccaacggcgugcugcagaccuucaugagaauggccuggggcggcagcuacaucgcccuggacagcggcaagggcagcugggacugcaucaugaccagcuaccaguaccuggugauccagaacaccaccugggaggaccacugccaguucagcagacccagccccaucggcuaccugggccugcugagccagagaaccagagacaucuacaucagcagaagacugcugggcaccuucaccuggacccugagcgacagcgagggcaacgagacccccggcggcuacugccugaccagauggaugcugaucgaggccgagcugaagugcuucggcaacaccgccguggccaagugcaacgagaagcacgacgaggaguucugcgacaugcugagacuguucgacuucugcaagcaggccaucagaagacugaagacccccgcccagaugagcauccagcugaucaacaaggccgugaacgcccugaucaacgaccagcugaucaugaagaaccaccugagagacaucaugggcauccccuacugcaacuacagcaaguacugguaccugaaccacaccgugaccggcaagaccagccugcccagaugcuggcuggugagcaacggcagcuaccugaacgagacccacuucagcgacgacaucgagcagcaggccgacaacaugaucaccgagcugcugcagaaggaguacaucgacagacagggcaagaccccccugggccugguggaccuguucguguucagcaccagcuucuaccugaucagcaucuuccugcaccuggugaagauccccacccacagacacaucaccggcaagcccugccccaagccccacagacugaaccacaugggcaucugcagcugcggccuguacaagcaccccggcgugcccgugaaguggaagagaugaggacuagucccuguucccagagcccacuuuuuuuucuuuuuuugaaauaaaauagccugucuuucagaucucaaaggcucuuuucagagccaccaaaaaaaaaaaaaaaaaaaaaaaaaaaaaaaaaaaaaaaaaaaaaaaaaaaaaaaaaaaaaaaaaaaaaaaaaaaaaaaaaaaaaaaaaaaaaaaaaaaaa

SEQ ID NO: 30480 - RNA, 1764 nt, Artificial Sequence
  mRNA product Design a-2 (hSL-A100) comprising derived and/or modified sequence from LASV(Lassa virus/H.sapiens-wt/NGA/2016/ISTH_0009;Clade II)__AVO03571__GPCmut6 (opt4)
aggagaguccgcucagccagguugcagaagcggcuuagcguguguccuaaucuucucucugcguguagguaggccugugccgcaaacaagcuuaccaugggccagaucaucaccuucuuccaggaggugccccacgugaucgaggaggugaugaacaucgugcugaucgcccugagccugcuggccauccugaagggcaucuacaacguggccaccugcggccugcugggccuggugagcuuccugcugcugugcggcagaagcugcagcaccaccuacaagggcguguacgagcugcagacccuggagcuggacauggccagccugaacaugugcaugccccugagcugcaccaagaacaacagccaccacuacaucauggugggcaacgagaccggccuggagcugacccugaccaacaccagcaucaucaaccacaaguucugcaaccugagcgacgcccacaagaagaaccuguacgaccacgcccugaugagcaucaucagcaccuuccaccugagcauccccaacuucaaccaguacgaggccaugagcugcgacuucaacggcggcagaaucagcgugcaguacaaccugagccacagcuacgccguggacgccgccaaccacugcggcaccaucgccaacggcgugcugcagaccuucaugagaauggccuggggcggcagcuacaucgcccuggacagcggcaagggcagcugggacugcaucaugaccagcuaccaguaccugaucauccagaacaccaccugggaggaccacugccaguucagcagacccagccccaucggcuaccugggccugcugagccagagaaccagagacaucuacaucagcagaagacugcugggcaccuucaccuggacccugagcgacagcgagggcaacgagacccccggcggcuacugccugaccagauggaugcugaucgaggccgagcugaagugcuucggcaacaccgccguggccaagugcaacgagaagcacgacgaggaguucugcgacaugcugagacuguucgacuucugcaagcaggccaucagaagacugaagacccccgcccagaugagcauccagcugaucaacaaggccgugaacgcccugaucaacgaccagcugaucaugaagaaccaccugagagacaucaugggcauccccuacugcaacuacagcaaguacugguaccugaaccacaccgugaccggcaagaccagccugcccagaugcuggcuggugagcaacggcagcuaccugaacgagacccacuucagcgacgacaucgagcagcaggccgacaacaugaucaccgagcugcugcagaaggaguacaucgacagacagggcaagaccccccugggccugguggaccuguucguguucagcaccagcuucuaccugaucagcaucuuccugcaccuggugaagauccccacccacagacacaucaccggcaagcccugccccaagccccacagacugaaccacaugggcaucugcagcugcggccuguacaaccaccccggcgugcccgugaaguggaagagaugaggacuagucccuguucccagagcccacuuuuuuuucuuuuuuugaaauaaaauagccugucuuucagaucucaaaggcucuuuucagagccaccaaaaaaaaaaaaaaaaaaaaaaaaaaaaaaaaaaaaaaaaaaaaaaaaaaaaaaaaaaaaaaaaaaaaaaaaaaaaaaaaaaaaaaaaaaaaaaaaaaaaa

SEQ ID NO: 30481 - RNA, 1764 nt, Artificial Sequence
  mRNA product Design a-2 (hSL-A100) comprising derived and/or modified sequence from LASV(Lassa virus/H.sapiens-wt/NGA/2016/ISTH_0017;Clade II)__AVO03567__GPCmut6 (opt4)
aggagaguccgcucagccagguugcagaagcggcuuagcguguguccuaaucuucucucugcguguagguaggccugugccgcaaacaagcuuaccaugggccagaucaucaccuucuuccaggaggugccccacgugaucgaggaggugaugaacaucgugcugaucgcccugagccugcuggccauccugaagggcaucuacaacguggccaccugcggccuguucggccuggugagcuuccugcugcugugcggcagaagcugcagcaccaccuacaagggcguguacgagcugcagacccuggagcuggacauggccagccugaacaugugcaugccccugagcugcaccaagaacaacagccaccacuacaucauggugggcaacgagaccggccuggagcugacccugaccaacaccagcaucaucaaccacaaguucugcaaccugagcgacgcccacaagaagaaccuguacgaccacgcccugaugagcaucaucagcaccuuccaccugagcauccccaacuucaaccaguacgaggccaugagcugcgacuucaacggcggcaagaucagcgugcaguacaaccugagccacaccuacgccaucgacgccgccaaccacugcggcaccaucgccaacggcgugcugcagaccuucaugagaauggccuggggcggcagcuacaucgcccuggacagcggcaagggcagcugggacugcaucaugaccagcuaccaguaccugaucauccagaacaccaccugggaggaccacugccaguucagcagacccagccccaucggcuaccugggccugcugagccagagaaccagagacaucuacaucagcagaagacugcugggcaccuucaccuggacccugagcgacagcgagggcaacgagacccccggcggcuacugccugaccagauggaugcugaucgaggccgagcugaagugcuucggcaacaccgccguggccaagugcaacgagaagcacgacgaggaguucugcgacaugcugagacuguucgacuucugcaagcaggccaucagaagacugaagacccccgcccagaugagcauccagcugaucaacaaggccgugaacgcccugaucaacgaccagcugaucaugaagaaccaccugagagacaucaugggcauccccuacugcaacuacagcaaguacugguaccugaaccacaccgugaccggcaagaccagccugcccagaugcuggcuggugagcaacggcagcuaccugaacgagacccacuucagcgacgacaucgagcagcaggccgacaacaugaucaccgagcugcugcagaaggaguacauggacagacagggcaagaccccccugggccugguggaccuguucguguucagcaccagcuucuaccugaucagcaucuuccugcaccuggugagaauccccacccacagacacgugaucggcaagcccugccccaagccccacagacugaaccacaugggcaucugcagcugcggccuguacaagcaccccggcgugcccgugaaguggaagagaugaggacuagucccuguucccagagcccacuuuuuuuucuuuuuuugaaauaaaauagccugucuuucagaucucaaaggcucuuuucagagccaccaaaaaaaaaaaaaaaaaaaaaaaaaaaaaaaaaaaaaaaaaaaaaaaaaaaaaaaaaaaaaaaaaaaaaaaaaaaaaaaaaaaaaaaaaaaaaaaaaaaaa

SEQ ID NO: 30482 - RNA, 1764 nt, Artificial Sequence
  mRNA product Design a-2 (hSL-A100) comprising derived and/or modified sequence from LASV(Lassa virus/H.sapiens-wt/NGA/2018/ISTH_0959;Clade II)__AVV65099__GPCmut6 (opt4)
aggagaguccgcucagccagguugcagaagcggcuuagcguguguccuaaucuucucucugcguguagguaggccugugccgcaaacaagcuuaccaugggccagaucaucaccuucuuccaggaggugccccacgugaucgaggaggugaugaacaucgugcugaucgcccugagccugcuggccauccugaagggcaucuacaacguggugaccugcggccuguucggccuggugagcuuccugcugcugugcggcagaagcugcagcaccaccuacaagggcguguacgagcugcagacccuggagcuggacauggccagccugaacaugugcaugccccugagcugcaccaagaacaacagccaccacuacaucauggugggcaacgagaccggccuggagcugacccugaccaacaccagcaucaucaaccacaaguucugcaaccugagcgacgcccacaagaagaaccuguacgaccacgcccugaugagcaucaucagcaccuuccaccugagcauccccaacuucaaccaguacgaggccaugagcugcgacuucaacggcggcaagaucagcgugcaguacaaccugagccacgccuacgccaucgacgccgccaaccacugcggcaccaucgccaacggcgugcugcagaccuucaugagaauggccuggggcggcagcuacaucgcccuggacagcggcaagggcagcugggacugcaucaugaccagcuaccaguaccugaucauccagaacaccaccugggaggaccacugccaguucagcagacccagccccaucggcuaccugggccugcugagccagagaaccagagacaucuacaucagcagaagacugcugggcaccuucaccuggacccugagcgacagcgagggcaacgagacccccggcggcuacugccugaccagauggaugcugaucgaggccgagcugaagugcuucggcaacaccgccguggccaagugcaacgagaagcacgacgaggaguucugcgacaugcugagacuguucgacuucugcaagcaggccaucagaagacugaagacccccgcccagaugagcauccagcugaucaacaaggccgugaacgcccugaucaacgaccagcugaucaugaagaaccaccugagagacaucaugggcauccccuacugcaacuacagcaaguacugguaccugaaccacaccgugaccggcaagaccagccugcccagaugcuggcuggugagcaacggcagcuaccugaacgagacccacuucagcgacgacaucgagcagcaggccgacaacaugaucaccgagcugcugcagaaggaguacaucgacagacagggcaagaccccccugggccugguggaccuguucguguucagcaccagcuucuaccugaucagcaucuuccugcaccuggugaagauccccacccacagacacgugaucggcaagcccugccccaagccccacagacugaaccacaugggcaucugcagcugcggccuguacaagcaccccggcgugcccgugaaguggaagagaugaggacuagucccuguucccagagcccacuuuuuuuucuuuuuuugaaauaaaauagccugucuuucagaucucaaaggcucuuuucagagccaccaaaaaaaaaaaaaaaaaaaaaaaaaaaaaaaaaaaaaaaaaaaaaaaaaaaaaaaaaaaaaaaaaaaaaaaaaaaaaaaaaaaaaaaaaaaaaaaaaaaaa

SEQ ID NO: 30483 - RNA, 1764 nt, Artificial Sequence
  mRNA product Design a-2 (hSL-A100) comprising derived and/or modified sequence from LASV(LASV003-NIG-2008;Clade II)__AIT17580__GPCmut6 (opt4)
aggagaguccgcucagccagguugcagaagcggcuuagcguguguccuaaucuucucucugcguguagguaggccugugccgcaaacaagcuuaccaugggccagaucaucaccuucuuccaggaggugccccacgugaucgaggaggugaugaacaucgugcugaucgcccugagccugcuggccauccugaagggcaucuacaacguggccaccugcggccuguucggccuggugagcuuccugcugcugugcggcagaagcugcagcaccaccuacaagggcguguacgagcugcagacccuggagcuggacauggccagccugaacaugugcaugccccugagcugcaccaagaacaacagccaccacuacaucauggugggcaacgagaccggccuggagcugacccugaccaacaccagcaucaucaaccacaaguucugcaaccugagcgacgcccacaagaagaaccuguacgaccacgcccugaugagcaucaucagcaccuuccaccugagcauccccaacuucaaccaguacgaggccaugagcugcgacuucaacggcggcaagaucagcgugcaguacaaccugagccacaccuacgccguggacgccgccaaccacugcggcaccaucgccaacggcgugcugcagaccuucaugagaauggccuggggcggcagcuacaucgcccuggacagcggcaagggcagcugggacugcaucaugaccagcuaccaguaccugaucauccagaacaccaccugggaggaccacugccaguucagcagacccagccccaucggcuaccugggccugcugagccagagaaccagagacaucuacaucagcagaagacugcugggcaccuucaccuggacccugagcgacagcgagagcaacgagacccccggcggcuacugccugaccagauggaugcugaucgaggccgagcugaagugcuucggcaacaccgccguggccaagugcaacgagaagcacgacgaggaguucugcgacaugcugagacuguucgacuucugcaagcaggccaucagaagacugaaggcccccgcccagaugagcauccagcugaucaacaaggccgugaacgcccugaucaacgaccagcugaucaugaagaaccaccugagagacaucaugggcauccccuacugcaacuacagcaaguacugguaccugaaccacaccgugaccggcagaaccagccugcccagaugcuggcuggugagcaacggcagcuaccugaacgagacccacuucagcgacgacaucgagcagcaggccgacaacaugaucaccgagcugcugcagaaggaguacauggacagacagggcaagaccccccugggccugguggaccuguucguguucagcaccagcuucuaccugaucagcaucuuccugcaccuggugaagauccccacccacagacacgugaucggcaagcccugccccaagccccacagacugaaccacaugggcaucugcagcugcggccuguacaagcaccccggcgugcccgugaaguggaagagaugaggacuagucccuguucccagagcccacuuuuuuuucuuuuuuugaaauaaaauagccugucuuucagaucucaaaggcucuuuucagagccaccaaaaaaaaaaaaaaaaaaaaaaaaaaaaaaaaaaaaaaaaaaaaaaaaaaaaaaaaaaaaaaaaaaaaaaaaaaaaaaaaaaaaaaaaaaaaaaaaaaaaa

SEQ ID NO: 30484 - RNA, 1764 nt, Artificial Sequence
  mRNA product Design a-2 (hSL-A100) comprising derived and/or modified sequence from LASV(LASV035-NIG-2009;Clade II)__AIT17588__GPCmut6 (opt4)
aggagaguccgcucagccagguugcagaagcggcuuagcguguguccuaaucuucucucugcguguagguaggccugugccgcaaacaagcuuaccaugggccagaucaucaccuucuuccaggaggugccccacgugaucgaggaggugaugaacaucgugcugaucgcccugagccugcuggccauccugaagggcaucuacaacguggccaccugcggccuguucggccuggugagcuuccugcugcugugcggcagaagcugcagcaccaccuacaagggcguguacgagcugcagacccuggagcuggacauggccagccugaacaugugcaugccccugagcugcaccaagaacaacagccaccacuacaucauggugggcaacgagaccggccuggagcugacccugaccaacaccagcaucaucaaccacaaguucugcaaccugagcgacgcccacaagaagaaccuguacgaccacgcccugaugagcaucaucagcaccuuccaccugagcauccccaacuucaaccaguacgaggccaugagcugcgacuucaacggcggcaagaucagcgugcaguacaaccugagccacgccuacgccguggacgccgccaaccacugcggcaccaucgccaacggcgugcugcagaccuucaugagaauggccuggggcggcagcuacaucgcccuggacagcggcaagggcagcugggacugcaucaugaccagcuaccaguaccugaucauccagaacaccaccugggaggaccacugccaguucagcagacccagccccaucggcuaccugggccugcugagccagagaaccagagacaucuacaucagcagaagacugcugggcaccuucaccuggacccugagcgacagcgagggcaacgagacccccggcggcuacugccugaccagauggaugcugaucgaggccgagcugaagugcuucggcaacaccgccguggccaagugcaacgagaagcacgacgaggaguucugcgacaugcugagacuguucgacuucugcaagcaggccaucagaagacugaaggcccccgcccagaugagcauccagcugaucaacaaggccgugaacgcccugaucaacgaccagcugaucaugaagaaccaccugagagacaucaugggcauccccuacugcaacuacagcaaguacugguaccugaaccacaccgugaccggcaagaccagccugcccagaugcuggcuggugagcaacggcagcuaccugaacgagacccacuucagcgacgacaucgagcagcaggccgacaacaugaucaccgagcugcugcagaaggaguacaucgacagacagggcaagaccccccugggccugguggaccuguucguguucagcaccagcuucuaccugaucagcaucuuccugcaccuggugaagauccccacccacagacacgugaucggcaagcccugccccaagccccacagacugaaccacaugggcaucugcagcugcggccuguacaagcaccccggcgugcccgugaaguggaagagaugaggacuagucccuguucccagagcccacuuuuuuuucuuuuuuugaaauaaaauagccugucuuucagaucucaaaggcucuuuucagagccaccaaaaaaaaaaaaaaaaaaaaaaaaaaaaaaaaaaaaaaaaaaaaaaaaaaaaaaaaaaaaaaaaaaaaaaaaaaaaaaaaaaaaaaaaaaaaaaaaaaaaa

SEQ ID NO: 30485 - RNA, 1764 nt, Artificial Sequence
  mRNA product Design a-2 (hSL-A100) comprising derived and/or modified sequence from LASV(LASV1000-NIG-2009;Clade II)__AIT17782__GPCmut6 (opt4)
aggagaguccgcucagccagguugcagaagcggcuuagcguguguccuaaucuucucucugcguguagguaggccugugccgcaaacaagcuuaccaugggccagaucaucaccuucuuccaggaggugccccacgugaucgaggaggugaugaacaucgugcugaucgcccugagccugcuggccauccugaagggcaucuacaacguggccaccugcggccuguucggccuggugagcuuccugcugcugugcggcagaagcugcagcaccaccuacaagggcguguacgagcugcagacccuggagcuggacauggccagccugaacaugugcaugccccugagcugcaccaagaacaacagccaccacuacaucauggugggcaacgagaccggccuggagcugacccugaccaacaccagcaucaucaaccacaaguucugcaaccugagcgacgcccacaagaagaaccuguacgaccacgcccugaugagcaucaucagcaccuuccaccugagcauccccaacuucaaccaguacgaggccaugagcugcgacuucaacggcggcaagaucagcgugcaguacaaccugagccacaccuacgccguggacgccgccaaccacugcggcaccaucgccaacggcgugcugcagaccuucaugagaauggccuggggcggcagcuacaucgcccuggacagcggcaagggcagcugggacugcaucaugaccagcuaccaguaccugaucauccagaacaccaccugggaggaccacugccaguucagcagacccagccccaucggcuaccugggccugcugagccagagaaccagagacaucuacaucagcagaagacugcugggcaccuucaccuggacccugagcgacagcgagggcaacgagacccccggcggcuacugccugaccagauggaugcugaucgaggccgagcugaagugcuucggcaacaccgccguggccaagugcaacgagaagcacgacgaggaguucugcgacaugcugagacuguucgacuucugcaagcaggccaucaagagacugaagacccccgcccagaugagcauccagcugaucaacaaggccgugaacgcccugaucaacgaccagcugaucaugaagaaccaccugagagacaucaugggcauccccuacugcaacuacagcaaguacugguaccugaaccacaccgugaccggcaagaccagccugcccagaugcuggcuggugagcaacggcagcuaccugaacgagacccacuucagcgacgacaucgagcagcaggccgacaacaugaucaccgagcugcugcagaaggaguacaucgacagacagggcaagaccccccugggccugguggaccuguucguguucagcaccagcuucuaccugaucagcaucuuccugcaccuggugaagauccccacccacagacacguggugggcaagcccugccccaagccccacagacugaaccacaugggcaucugcagcugcggccuguacaagcaccccggcgugcccgugaaguggaagagaugaggacuagucccuguucccagagcccacuuuuuuuucuuuuuuugaaauaaaauagccugucuuucagaucucaaaggcucuuuucagagccaccaaaaaaaaaaaaaaaaaaaaaaaaaaaaaaaaaaaaaaaaaaaaaaaaaaaaaaaaaaaaaaaaaaaaaaaaaaaaaaaaaaaaaaaaaaaaaaaaaaaaa

SEQ ID NO: 30486 - RNA, 1764 nt, Artificial Sequence
  mRNA product Design a-2 (hSL-A100) comprising derived and/or modified sequence from LASV(LASV221-NIG-2010;Clade II)__AIT17624__GPCmut6 (opt4)
aggagaguccgcucagccagguugcagaagcggcuuagcguguguccuaaucuucucucugcguguagguaggccugugccgcaaacaagcuuaccaugggccagaucaucaccuucuuccaggaggugccccacgugaucgaggaggugaugaacaucgugcugaucgcccugagccugcuggccauccugaagggcaucuacaacguggccaccugcggccuguucggccuggugagcuuccugcugcugugcggcagaagcugcagcaccaccuacaagggcguguacgagcugcagacccuggagcuggacauggccagccugaacaugugcaugccccugagcugcaccaagaacaacagccaccacuacaucauggugggcaacgagaccggccuggagcugacccugaccaacaccagcaucaucaaccacaaguucugcaaccugagcgacgcccacaagaagaaccuguacgaccacgcccugaugagcaucaucagcaccuuccaccugagcauccccaacuucaaccaguacgaggccaugagcugcgacuucaacggcggcaagaucagcgugcaguacaaccugagccacaccuacgccaucgacgccgccaaccacugcggcaccaucgccaacggcgugcugcagaccuucaugagaauggccuggggcggcagcuacaucgcccuggacagcggcaagggcagcugggacugcaucaugaccagcuaccaguaccugaucauccagaacaccaccugggaggaccacugccaguucagcagacccagccccaucggcuaccugggccugcugagccagagaaccagagacaucuacaucagcagaagacugcugggcaccuucaccuggacccugagcgacagcgagggcaacgagacccccggcggcuacugccugaccagauggaugcugaucgaggccgagcugaagugcuucggcaacaccgccguggccaagugcaacgagaagcacgacgaggaguucugcgacaugcugagacuguucgacuucugcaagcaggccaucagaagacugaagacccccgcccagaugagcauccagcugaucaacaaggccgugaacgcccugaucaacgaccagcugaucaugaagaaccaccugagagacaucaugggcauccccuacugcaacuacagcaaguacugguaccugaaccacaccgugaccggcaagaccagccugcccagaugcuggcuggugagcaacggcagcuaccugaacgagacccacuucagcgacgacaucgagcagcaggccgacaacaugaucaccgagaugcugcagaaggaguacauggacagacagggcaagaccccccugggccugguggaccuguucguguucagcaccagcuucuaccugaucagcaucuuccugcaccuggugaagauccccacccacagacacgugaucggcaagcccugccccaagccccacagacugaaccacaugggcaucugcagcugcggccuguacaagcaccccggcgugcccgugaaguggaagagaugaggacuagucccuguucccagagcccacuuuuuuuucuuuuuuugaaauaaaauagccugucuuucagaucucaaaggcucuuuucagagccaccaaaaaaaaaaaaaaaaaaaaaaaaaaaaaaaaaaaaaaaaaaaaaaaaaaaaaaaaaaaaaaaaaaaaaaaaaaaaaaaaaaaaaaaaaaaaaaaaaaaaa

SEQ ID NO: 30487 - RNA, 1764 nt, Artificial Sequence
  mRNA product Design a-2 (hSL-A100) comprising derived and/or modified sequence from LASV(LASV237-NIG-2010;Clade II)__AIT17638__GPCmut6 (opt4)
aggagaguccgcucagccagguugcagaagcggcuuagcguguguccuaaucuucucucugcguguagguaggccugugccgcaaacaagcuuaccaugggccagaucaucaccuucuuccaggaggugccccacgugaucgaggaggugaugaacaucgugcugaucgcccugagccugcuggccauccugaagggcaucuacaacguggccaccugcggccuguucggccuggugagcuuccugcugcugugcggcagaagcugcagcaccaccuacaagggcguguacgagcugcagacccuggagcuggacauggccagccugaacaugugcaugccccugagcugcaccaagaacaacagccaccacuacaucauggugggcaacgagaccggccuggagcugacccugaccaacaccagcaucaucaaccacaaguucugcaaccugagcgacgcccacaagaaggaccuguacgaccacgcccugaugagcaucaucagcaccuuccaccugagcauccccaacuucaaccaguacgaggccaugagcugcgacuucaacggcggcaagaucagcgugcaguacaaccugagccacaccuacgccguggacgccgccaaccacugcggcaccaucgccaacggcgugcugcagaccuucaugagaauggccuggggcggcagcuacaucgcccuggacagcggcaagggcagcugggacugcaucaugaccagcuaccaguaccugaucauccagaacaccaccugggaggaccacugccaguucagcagacccagccccaucggcuaccugggccugcugagccagagaaccagagacaucuacaucagcagaagacugcugggcaccuucaccuggacccugagcgacagcgagggcaacgagacccccggcggcuacugccugaccagauggaugcugaucgaggccgagcugaagugcuucggcaacaccgccguggccaagugcaacgagaagcacgacgaggaguucugcgacaugcugagacuguucgacuucugcaagcaggccaucagaagacugaagacccccgcccagaugagcauccagcugaucaacaaggccgugaacgcccugaucaacgaccagcugaucaugaagaaccaccugagagacaucaugggcauccccuacugcaacuacagcaaguacugguaccugaaccacaccgugaccggcaagaccagccugcccagaugcuggcuggugagcaacggcagcuaccugaacgagacccacuucagcgacgacaucgagcagcaggccgacaacaugaucaccgagcugcugcagaaggaguacauggacagacagggcaagaccccccugggccugguggaccuguucguguucagcaccagcuucuaccugaucagcaucuuccugcaccugaucaagauccccacccacagacacaucaccggcaagcccugccccaagccccacagacugaaccacaugggcaucugcagcugcggccuguacaagcaccccggcgugcccgugaaguggaagagaugaggacuagucccuguucccagagcccacuuuuuuuucuuuuuuugaaauaaaauagccugucuuucagaucucaaaggcucuuuucagagccaccaaaaaaaaaaaaaaaaaaaaaaaaaaaaaaaaaaaaaaaaaaaaaaaaaaaaaaaaaaaaaaaaaaaaaaaaaaaaaaaaaaaaaaaaaaaaaaaaaaaaa

SEQ ID NO: 30488 - RNA, 1764 nt, Artificial Sequence
  mRNA product Design a-2 (hSL-A100) comprising derived and/or modified sequence from LASV(LASV253-NIG-2011;Clade II)__AIT17670__GPCmut6 (opt4)
aggagaguccgcucagccagguugcagaagcggcuuagcguguguccuaaucuucucucugcguguagguaggccugugccgcaaacaagcuuaccaugggccagaucaucaccuucuuccaggaggugccccacgugaucgaggaggugaugaacaucgugcugaucgcccugagccugcuggccauccugaagggcaucuacaacguggccaccugcggccuguucggccuggugagcuuccugcugcugugcggcagaagcugcagcaccaccuacaagggcguguacgagcugcagacccuggagcuggacauggccagccugaacaugugcaugccccugagcugcaccaagaacaacagccaccacuacaucauggugggcaacgagaccggccuggagcugacccugaccaacaccagcaucaucaaccacaaguucugcaaccugagcgacgcccacaagaagaaccuguacgaccacgcccugaugagcaucaucagcaccuuccaccugagcauccccaacuucaaccaguacgaggccaugagcugcgacuucaacggcggcaagaucagcgugcaguacaaccugagccacaccuacgccguggacgccgccaaccacugcggcaccaucgccaacggcgugcugcagaccuucaugagaauggccuggggcggcagcuacaucgcccuggacagcggcaagggcagcugggacugcaucaugaccagcuaccaguaccugaucauccagaacaccaccugggaggaccacugccaguucagcagacccagccccaucggcuaccugggccugcugagccagagaaccagagacaucuacaucagcagaagacugcugggcaccuucaccuggacccugagcgacagcgagggcaacgagacccccggcggcuacugccugaccagauggaugcugaucgaggccgagcugaagugcuucggcaacaccgccguggccaagugcaacgagaagcacgacgaggaguucugcgacaugcugagacuguucgacuucugcaagcaggccaucagaagacugaaggcccccgcccagaugagcauccagcugaucaacaaggccgugaacgcccugaucaacgaccagcugaucaugaagaaccaccugagagacaucaugggcauccccuacugcaacuacagcaaguacugguaccugaaccacaccgugaccggcagaaccagccugcccagaugcuggcuggugagcaacggcagcuaccugaacgagacccacuucagcgacgacaucgagcagcaggccgacaacaugaucaccgagcugcugcagaaggaguacaucgacagacagggcaagaccccccugggccugguggaccuguucguguucagcaccagcuucuaccugaucagcaucuuccugcaccuggugaagauccccacccacagacacaucaucggcaagcccugccccaagccccacagacugaaccacaugggcaucugcagcugcggccuguacaagcaccccggcgugcccgugaaguggaagagaugaggacuagucccuguucccagagcccacuuuuuuuucuuuuuuugaaauaaaauagccugucuuucagaucucaaaggcucuuuucagagccaccaaaaaaaaaaaaaaaaaaaaaaaaaaaaaaaaaaaaaaaaaaaaaaaaaaaaaaaaaaaaaaaaaaaaaaaaaaaaaaaaaaaaaaaaaaaaaaaaaaaaa

SEQ ID NO: 30489 - RNA, 1764 nt, Artificial Sequence
  mRNA product Design a-2 (hSL-A100) comprising derived and/or modified sequence from LASV(LASV254-NIG-2011;Clade II)__AIT17674__GPCmut6 (opt4)
aggagaguccgcucagccagguugcagaagcggcuuagcguguguccuaaucuucucucugcguguagguaggccugugccgcaaacaagcuuaccaugggccagaucaucaccuucuuccaggaggugccccacgugaucgaggaggugaugaacaucgugcugaucgcccugagccugcuggccauccugaagggcaucuacaacguggccaccugcggccuguucggccuggugagcuuccugcugcugugcggcagaagcugcagcaccaccuacaagggcguguacgagcugcagacccuggagcuggacaugaccaaccugaacaugugcaugccccugagcugcaccaagaacaacagccaccacuacaucauggugggcaacgagaccggccuggagcugacccugaccaacaccagcaucaucaaccacaaguucugcaaccugagcgacgcccacaagaagaaccuguacaaccacgcccugaugagcaucaucagcaccuuccaccugagcauccccaacuucaaccaguacgaggccaugagcugcgacuucaacggcggcaagaucagcgugcaguacaaccugagccacagcuacgccguggacgccgccaaccacugcggcaccaucgccaacggcgugcugcagaccuucaugagaauggccuggggcggcagcuacaucgcccuggacagcggcaagggcaacugggacugcaucaugaccagcuaccaguaccugaucauccagaacaccaccugggaggaccacugccaguucagcagacccagccccaucggcuaccugggccugcugagccagagaaccagagacaucuacaucagcagaagacugcugggcaccuucaccuggacccugagcgacagcgagggcaacgagacccccggcggcuacugccugaccagauggaugcugaucgaggccgagcugaagugcuucggcaacaccgccguggccaagugcaacgagaagcacgacgaggaguucugcgacaugcugagacuguucgacuucugcaagcaggccaucagaagacugaagacccccgcccaggccaacauccagcugaucaacaaggccgugaacgcccugaucaacgaccagcugaucaugaagaaccaccugagagacaucaugggcauccccuacugcaacuacagcaaguacugguaccugaaccacaccgugaccggcaagaccagccugcccagaugcuggcuggugagcaacggcagcuaccugaacgagacccacuucagcgacgacaucgagcagcaggccgacaacaugaucaccgagcugcugcagaaggaguacauggacagacagggcaagaccccccugggccugguggaccuguucguguucagcaccagcuucuaccugaucagcaucuuccugcaccuggugaagauccccacccacagacacgugaucggcaagcccugccccaagccccacagacugaaccacaugggcaucugcagcugcggccuguacaagcaccccggcgugcccgugaaguggaagagaugaggacuagucccuguucccagagcccacuuuuuuuucuuuuuuugaaauaaaauagccugucuuucagaucucaaaggcucuuuucagagccaccaaaaaaaaaaaaaaaaaaaaaaaaaaaaaaaaaaaaaaaaaaaaaaaaaaaaaaaaaaaaaaaaaaaaaaaaaaaaaaaaaaaaaaaaaaaaaaaaaaaaa

SEQ ID NO: 30490 - RNA, 1764 nt, Artificial Sequence
  mRNA product Design a-2 (hSL-A100) comprising derived and/or modified sequence from LASV(Nig08-A19;Clade III)__ADU56618__GPCmut6 (opt4)
aggagaguccgcucagccagguugcagaagcggcuuagcguguguccuaaucuucucucugcguguagguaggccugugccgcaaacaagcuuaccaugggccagaucgugaccuucuuccaggaggugccccacgugaucgaggaggugaugaacaucgugcugaucgcccugagcauccuggccauccugaagggccuguacaacaucgccaccugcggccugaucggccuggugaccuuccugcugcugagcggcagaagcugcagcaugaccuacaagggcguguacgagcugcagacccuggagcugaacaugaacacccugaacaugugcaugccccugagcugcaccaagaacaacagccaccacuacaucauggugggcaacgagaccggccuggagcugacccugaccaacaccagccugcugcaccacaaguucugcaaccugagcgacgcccacaagaagaaccuguacgaccacacccugaugagcaucaucagcaccuuccaccugagcauccccaacuucaaccaguacgaggccaugagcugcgacuucaacggcggcaagaucaccgugcaguacaaccugagccacagcuacgccaucgacgccgccaaccacugcggcaccguggccaacggcgugcugcagaccuucaugagaauggccuggggcggcagcuacaucgcccuggacagcggcagaggcaagugggacugcaucaugaccagcuaccaguaccugaucauccagaacaccaccugggaggaccacugccaguucagcagacccagccccaucggcuaccugggccugcugagccagagaaccagagacaucuacaucagcagaagacugcugggcaccuucaccuggacccugagcgacagcgagggcaacgagacccccggcggcuacugccugaccagauggaugcugaucgaggccgagcugaagugcuucggcaacaccgccguggccaagugcaacgagaagcacgacgaggaguucugcgacaugcugagacuguucgacuucugcaagcaggccaucagaagacugaaggcccccgcccagaugagcauccagcugaucaacaaggccgugaacgcccugaucaacgaccagcugaucaugaagaaccaccugagagacaucaugggcauccccuacugcaacuacagcaaguacugguaccugaaccacaccagcaccggcagaaccagccugcccagaugcuggcuggugagcaacggcagcuaccugaacgagacccacuucagcgacgacaucgagcagcaggccgacaacaugaucaccgagaugcugcagaaggaguaccuggacagacagggcaagaccccccugggccugguggaccuguucguguucagcaccagcuucuaccugaucagcaucuuccugcaccuggugaagauccccacccacagacacaucgugggcaagcccugccccaagccccacagacugaaccacaugggcaucugcagcugcggccuguacaagcagcccggcgugcccgugagauggaagagaugaggacuagucccuguucccagagcccacuuuuuuuucuuuuuuugaaauaaaauagccugucuuucagaucucaaaggcucuuuucagagccaccaaaaaaaaaaaaaaaaaaaaaaaaaaaaaaaaaaaaaaaaaaaaaaaaaaaaaaaaaaaaaaaaaaaaaaaaaaaaaaaaaaaaaaaaaaaaaaaaaaaaa

SEQ ID NO: 30491 - RNA, 1767 nt, Artificial Sequence
  mRNA product Design a-2 (hSL-A100) comprising derived and/or modified sequence from LASV(G1180-SLE-2010;Clade IV)__AIT17168__GPCmut6 (opt4)
aggagaguccgcucagccagguugcagaagcggcuuagcguguguccuaaucuucucucugcguguagguaggccugugccgcaaacaagcuuaccaugggccagaucgugaccuucuuccaggaggugccccacgugaucgaggaggugaugaacaucgugcugaucgcccugagcauccuggccgugcugaagggccuguacaacuucgccaccugcggccuggugggccugcugaccuuccugcugcugugcggcagaagcugcaccgccagcagauacaagggcguguacgagcugcagacccuggagcugaacauggagacccugaacaugugcaugccccugagcugcaccaagaacaacagccaccacuacaucauggugggcaacgagaccggccuggagcugacccugaccaacaccagcaucaucaaccacaaguucugcaaccugagcgacgcccacaagaagaaccuguacgaccacgcccugaugagcaucaucagcaccuuccaccugagcauccccaacuucaaccaguacgaggccaugagcugcgacuucaacggcggcaagaucagcgugcaguacaaccugagccacagcuacgccggcgacgccgccaaccacugcggcaccguggccaacggcgugcugcagaccuucaugagaauggccuggggcggcagcuacaucgcccuggacagcggccacggcagcugggacugcaucaugaccagcuaccaguaccugaucauccagaacaccaccugggaggaccacugccaguucagcagacccagccccaucggcuaccugggccugcugagccagagaaccagagacaucuacaucagcagaagacugcugggcaccuucaccuggacccugagcgacagcgagggcaaggacacccccggcggcuacugccugaccagauggaugcugaucgaggccgagcugaagugcuucggcaacaccgccguggccaagugcaacgagaagcacgacgaggaguucugcgacaugcugagacuguucgacuucugcaagcaggccauccagagacugaaggcccccgcccagaugagcauccagcugaucaacaaggccgugaacgcccugaucaacgaccagcugaucaugaagaaccaccugagagacaucaugggcauccccuacugcaacuacagcaaguacugguaccugaaccacaccaccaccggcaagaccagccugcccaagugcuggcuggugagcaacggcagcuaccugaacgagacccacuucagcgacgacaucgagcagcaggccgacaacaugaucaccgagaugcugcagaaggaguacauggagagacagggcaagaccccccugggccugguggaccuguucguguucagcaccagcuucuaccugaucagcaucuuccugcaccuggugaagauccccacccacagacacaucgugggcaagagcugccccaagccccacagacugaaccacaugggcaucugcagcugcggccuguacaagcagcccggcgugcccgugaaguggaagagaugaggacuagucccuguucccagagcccacuuuuuuuucuuuuuuugaaauaaaauagccugucuuucagaucucaaaggcucuuuucagagccaccaaaaaaaaaaaaaaaaaaaaaaaaaaaaaaaaaaaaaaaaaaaaaaaaaaaaaaaaaaaaaaaaaaaaaaaaaaaaaaaaaaaaaaaaaaaaaaaaaaaaa

SEQ ID NO: 30492 - RNA, 1767 nt, Artificial Sequence
  mRNA product Design a-2 (hSL-A100) comprising derived and/or modified sequence from LASV(G1442-SLE-2011;Clade IV)__AIT17180__GPCmut6 (opt4)
aggagaguccgcucagccagguugcagaagcggcuuagcguguguccuaaucuucucucugcguguagguaggccugugccgcaaacaagcuuaccaugggccagaucgugaccuucuuccaggaggugccccacgugaucgaggaggugaugaacaucgugcugaucgcccugagcauccuggccgugcugaagggccuguacaacguggccaccugcggccugaucggccuggugaccuuccugcugcugugcggcagaagcugcaccaccacccuguacaagggcguguacgagcugcagacccuggagcugaacauggagacccugaacaugugcaugccccugagcugcaccaagaacaacagccaccacuacaucagagugggcaacgagaccggccuggagcugacccugaccaacaccagcaucaucaaccacaaguucugcaaccugagcgacgcccacaagaagaaccuguacgaccacgcccugaugagcaucaucagcaccuuccaccugagcauccccaacuucaaccaguacgaggccaugagcugcgacuucaacggcggcaagaucagcgugcaguacaaccugagccacagcuacgccggcgacgccgccaaccacugcggcaccguggccaacggcgugcugcagaccuucaugagaauggccuggggcggcagcuacaucgcccuggacagcggcagaggcaacugggacugcaucaugaccagcuaccaguaccugaucauccagaacaccaccugggacgaccacugccaguucagcagacccagccccaucggcuaccugggccugcugagccagagaaccagagacguguacaucagcagaagacugcugggcaccuucaccuggacccugagcgacagcgagggcaaggacacccccggcggcuacugccugaccagauggaugcugaucgaggccgagcugaagugcuucggcaacaccgccguggccaagugcaacgagaagcacgacgaggaguucugcgacaugcugagacuguucgacuucugcaagcaggccauccagagacugaaggcccccgcccagaugagcauccagcugaucaacaaggccgugaacgcccugaucaacgaccagcugaucaugaagaaccaccugagagacaucaugggcauccccuacugcaacuacagcaaguacugguaccugaacaacaccgccaccggcaagaccagccugcccaagugcuggcugaucagcaacggcagcuaccugaacgagacccacuucagcgacgacaucgagcaggaggccgacaacaugaucaccgagaugcugcagaaggaguacauggagagacagggcaagaccccccugggccugguggaccuguucguguucagcaccagcuucuaccugaucagcaucuuccugcaccuggugaagauccccacccacagacacaucgugggcaagagcugccccaagccccacagacugaaccacaugggcaucugcagcugcggccuguacaagcagcccggcgugcccgugagauggaagagaugaggacuagucccuguucccagagcccacuuuuuuuucuuuuuuugaaauaaaauagccugucuuucagaucucaaaggcucuuuucagagccaccaaaaaaaaaaaaaaaaaaaaaaaaaaaaaaaaaaaaaaaaaaaaaaaaaaaaaaaaaaaaaaaaaaaaaaaaaaaaaaaaaaaaaaaaaaaaaaaaaaaaa

SEQ ID NO: 30493 - RNA, 1767 nt, Artificial Sequence
  mRNA product Design a-2 (hSL-A100) comprising derived and/or modified sequence from LASV(G3010-SLE-2013;Clade IV)__AIT17344__GPCmut6 (opt4)
aggagaguccgcucagccagguugcagaagcggcuuagcguguguccuaaucuucucucugcguguagguaggccugugccgcaaacaagcuuaccaugggccagaucgugaccuucuuccaggaggugccccacgugaucgaggaggugaugaacaucgugcugaucgcccugagcauccuggccgugcugaagggccuguacaacuucgccaccugcggccuggugggccuggugaccuuccugcugcugugcggcagaagcugcaccaccagccuguacaagggcguguacgagcugcagacccuggagcugaacauggagacccugaacaugugcaugccccugagcugcaccaagaacaacagccaccacuacaucauggugggcaacgagaccggccuggagcugacccugaccaacaccagcaucaucaaccacaaguucugcaaccugagcgacgcccacaagaagaaccuguacaaccacgcccugaugagcaucaucagcaccuuccaccugagcauccccaacuucaaccaguacgaggccaugagcugcgacuucaacggcggcaagaucagcgugcaguacaaccugagccacagcuacgccggcgacgccgccagccacugcggcaccguggccaacggcgugcugcagaccuucaugagaauggccuggggcggcagcuacaucgcccuggacagcggcuacggcaagugggacugcaucaugaccagcuaccaguaccugaucauccagaacaccaccugggaggaccacugccaguucagcagacccagccccaucggcuaccugggccugcugagccagagaaccagagacaucuacaucagcagaagacugcugggcaccuucaccuggacccugagcgacagcgagggcaaggacacccccggcggcuacugccugaccagauggaugcugaucgaggccgagcugaagugcuucggcaacaccgccguggccaagugcaacgagaagcacgacgaggaguucugcgacaugcugagacuguucgacuucugcaagcaggccauccagagacugaagacccccgcccagaugagcauccagcugaucaacaaggccgugaacgcccugaucaacgaccagcugaucaugaagaaccaccugagagacaucaugggcauccccuacugcaacuacagcaaguacugguaccugaaccacaccaccaccggcaagaccagccugcccaagugcuggcuggugagcaacggcagcuaccugaacgagacccacuucagcgacgacaucgagcagcaggccgacaacaugaucaccgagaugcugcagaaggaguacauggagagacagggcaagaccccccugggccugguggaccuguucguguucagcaccagcuucuaccugaucagcaucuuccugcaccuggugaagauccccacccacagacacaucgugggcaagagcugccccaagccccacagacugaaccacaugggcaucugcagcugcggccuguacaagcagcccggcgugcccgugagauggaagagaugaggacuagucccuguucccagagcccacuuuuuuuucuuuuuuugaaauaaaauagccugucuuucagaucucaaaggcucuuuucagagccaccaaaaaaaaaaaaaaaaaaaaaaaaaaaaaaaaaaaaaaaaaaaaaaaaaaaaaaaaaaaaaaaaaaaaaaaaaaaaaaaaaaaaaaaaaaaaaaaaaaaaa

SEQ ID NO: 30494 - RNA, 1767 nt, Artificial Sequence
  mRNA product Design a-2 (hSL-A100) comprising derived and/or modified sequence from LASV(G502-SLE-2009;Clade IV)__AIT17126__GPCmut6 (opt4)
aggagaguccgcucagccagguugcagaagcggcuuagcguguguccuaaucuucucucugcguguagguaggccugugccgcaaacaagcuuaccaugggccagaucgugaccuucuuccaggaggugccccacgugaucgaggaggugaugaacaucgugcugaucgcccugagcauccuggccgugcugaagggccuguacaacuucgccaccugcggccuggugggccugcugaccuuccugcugcugugcggcagaagcugcaccaccggccuguacaagggcguguacgagcugcagacccuggagcugaacauggagacccugaacaugugcaugccccugagcugcaccaagaacaacagccaccacuacaucauggugggcaacgagaccggccuggagcugacccugaccaacaccagcaucaucaaccacaaguucugcaaccugagcgacgcccacaagaagaaccuguacgaccacgcccugaugagcaucaucagcaccuuccaccugagcauccccaacuucaaccaguacgaggccaugagcugcgacuucaacggcggcaagaucagcgugcaguacaaccugagccacagcuacgccggcgacgccgccgaccacugcggcaccguggccaacggcgugcugcagaccuucaugagaauggccuggggcggcagcuacaucgcccuggacagcggcagaggcagaugggacugcaucaugaccagcuaccaguaccugaucauccagaacaccaccugggaggaccacugccaguucagcagacccagccccaucggcuaccugggccugcugagccagagaaccagagacaucuacaucagcagaagacugcugggcaccuucaccuggacccugagcgacagcgagggcaaggacacccccggcggcuacugccugaccagauggaugcugaucgaggccgagcugaagugcuucggcaacaccgccguggccaagugcaacgagaagcacgacgaggaguucugcgacaugcugagacuguucgacuucugcaagcaggccauccagagacugaaggcccccgcccagaugagcauccagcugaucaacaaggccgugaacgcccugaucaacgaccagcuggugaugaagaaccaccugagagacaucaugggcauccccuacugcaacuacagcagauacugguaccugaaccacaccaccaccggcagaaccagccugcccaagugcuggcuggugagcaacggcagcuaccugaacgagacccacuucagcgacgacaucgagcagcaggccgacaacaugaucaccgagaugcugcagaaggaguacauggagagacagggcaagaccccccugggccugguggaccuguucguguucagcaccagcuucuaccugaucagcaucuuccugcaccuggugaagauccccacccacagacacaucgugggcaagagcugccccaagccccacagacugaaccacaugggcaucugcagcugcggccuguacaagcagcccggcgugcccgugaaguggaagagaugaggacuagucccuguucccagagcccacuuuuuuuucuuuuuuugaaauaaaauagccugucuuucagaucucaaaggcucuuuucagagccaccaaaaaaaaaaaaaaaaaaaaaaaaaaaaaaaaaaaaaaaaaaaaaaaaaaaaaaaaaaaaaaaaaaaaaaaaaaaaaaaaaaaaaaaaaaaaaaaaaaaaa

SEQ ID NO: 30495 - RNA, 1767 nt, Artificial Sequence
  mRNA product Design a-2 (hSL-A100) comprising derived and/or modified sequence from LASV(G733-SLE-2010;Clade IV)__AIT17154__GPCmut6 (opt4)
aggagaguccgcucagccagguugcagaagcggcuuagcguguguccuaaucuucucucugcguguagguaggccugugccgcaaacaagcuuaccaugggccagaucgugaccuucuuccaggaggugccccacgugaucgaggaggugaugaacaucgugcugaucgcccugagcauccuggccgugcugaagggccuguacaacuucgccaccugcggcaucgugggccuggugagcuuccugcugcugugcggcagaagcugcaccaccagccuguacaagggcguguacgagcugcagacccuggagcugaacauggagacccugaacaugugcaugccccugagcugcaccaagaacaacagccaccacuacaucauggugggcaacgagaccggccuggagcugacccugaccaacaccagcaucaucaaccacaaguucugcaaccugagcgacgcccacaagaagaaccuguacgaccacgcccugaugagcaucaucagcaccuuccaccugagcauccccaacuucaaccaguacgaggccaugagcugcgacuucaacggcggcaagaucagcgugcaguacaaccugagccacagcuacgccggcgacgccgccaaccacugcggcaccaucgccaacggcgugcugcagaccuucaugagaauggccuggggcggcagcuacaucgcccuggacagcggcagagacagaugggacugcaucaugaccagcuaccaguaccugaucauccagaacaccaccugggaggaccacugccaguucagcagacccagccccaucggcuaccugggccugcugagccagagaaccagagacaucuacaucagcagaagacugcugggcaccuucaccuggacccugagcgacagcgagggcaaggacacccccggcggcuacugccugaccagauggaugcugaucgaggccgagcugaagugcuucggcaacaccgccguggccaagugcaacgagaagcacgacgaggaguucugcgacaugcugagacuguucgacuucugcaagcaggccauccagagacugaaggcccccgcccagaugagcauccagcugaucaacaaggccgugaacgcccugaucaacgaccagcugaucaugaagaaccaccugagagacaucaugggcauccccuacugcaacuacagcaaguacugguaccugaaccacaccaccaccggcaagaccagccugcccaagugcuggcuggugagcaacggcagcuaccugaacgagacccacuucagcgacgacaucgagcagcaggccgacaacaugaucaccgagaugcugcagaaggaguacauggagagacagggcaagaccccccugggccugguggaccuguucguguucagcaccagcuucuaccugaucagcaucuuccugcaccuggugaagauccccacccacagacacguggugggcaagagcugccccaagccccacagacugaaccacaugggcaucugcagcugcggccuguacggccagcccggcgugcccgugaaguggaagagaugaggacuagucccuguucccagagcccacuuuuuuuucuuuuuuugaaauaaaauagccugucuuucagaucucaaaggcucuuuucagagccaccaaaaaaaaaaaaaaaaaaaaaaaaaaaaaaaaaaaaaaaaaaaaaaaaaaaaaaaaaaaaaaaaaaaaaaaaaaaaaaaaaaaaaaaaaaaaaaaaaaaaa

SEQ ID NO: 30496 - RNA, 1767 nt, Artificial Sequence
  mRNA product Design a-2 (hSL-A100) comprising derived and/or modified sequence from MOPV/LASV reassortant(IGS-1;Clade IV)__AFY05576__GPCmut6 (opt4)
aggagaguccgcucagccagguugcagaagcggcuuagcguguguccuaaucuucucucugcguguagguaggccugugccgcaaacaagcuuaccaugggccagaucgugaccuucuuccaggaggugccccacgugaucgaggaggugaugaacaucgugcugaucgcccugagcgugcuggccgugcugaagggccuguacaacuucgccaccugcggccuggugggccuggugaccuuccugcugcugugcggcagaagcugcaccaccagccuguacaagggcguguacgagcugcagacccuggagcugaacauggagacccugaacaugugcaugccccugagcugcaccaagaacaacagccaccacuacaucauggugggcaacgagaccggccuggagcugacccugaccaacaccagcaucaucaaccacaaguucugcaaccugagcgacgcccacaagaagaaccuguacgaccacgcccugaugagcaucaucagcaccuuccaccugagcauccccaacuucaaccaguacgaggccaugagcugcgacuucaacggcggcaagaucagcgugcaguacaaccugagccacagcuacgccggcgacgccgccaaccacugcggcaccguggccaacggcgugcugcagaccuucaugagaauggccuggggcggcagcuacaucgcccuggacagcggcagaggcaacugggacugcaucaugaccagcuaccaguaccugaucauccagaacaccaccugggaggaccacugccaguucagcagacccagccccaucggcuaccugggccugcugagccagagaaccagagacaucuacaucagcagaagacugcugggcaccuucaccuggacccugagcgacagcgagggcgaggacacccccggcggcuacugccugaccagauggaugcugaucgaggccgagcugaagugcuucggcaacaccgccguggccaagugcaacgagaagcacgacgaggaguucugcgacaugcugagacuguucgacuucugcaagcaggccauccagagacugaaggcccccgcccagaugagcauccagcugaucaacaaggccgugaacgcccugaucaacgaccagcugaucaugaagaaccaccugagagacaucaugggcauccccuacugcaacuacagcaaguacugguaccugaaccacaccaccaccggcagaaccagccugcccaagugcuggcuggugagcaacggcagcuaccugaacgagacccacuucagcgacgacaucgagcagcaggccgacaacaugaucaccgagaugcugcagaaggaguacauggagagacagggcaagaccccccugggccugguggaccuguucguguucagcaccagcuucuaccugaucagcaucuuccugcaccuggugaagauccccacccacagacacaucgugggcaagagcugccccaagccccacagacugaaccacaugggcaucugcagcugcggccuguacaagcagcccggcgugcccgugaaguggaagagaugaggacuagucccuguucccagagcccacuuuuuuuucuuuuuuugaaauaaaauagccugucuuucagaucucaaaggcucuuuucagagccaccaaaaaaaaaaaaaaaaaaaaaaaaaaaaaaaaaaaaaaaaaaaaaaaaaaaaaaaaaaaaaaaaaaaaaaaaaaaaaaaaaaaaaaaaaaaaaaaaaaaaa

SEQ ID NO: 30497 - RNA, 1767 nt, Artificial Sequence
  mRNA product Design a-2 (hSL-A100) comprising derived and/or modified sequence from LASV(LM765-SLE-2012;Clade IV)__AIT17814__GPCmut6 (opt4)
aggagaguccgcucagccagguugcagaagcggcuuagcguguguccuaaucuucucucugcguguagguaggccugugccgcaaacaagcuuaccaugggccagaucgugaccuucuuccaggaggugccccacgugaucgaggaggugaugaacaucgugcugaucgcccugagcauccuggccgugcugaagggccuguacaacuucgccaccugcggccuggugggccuggugaccuuccugcugcugugcggcagaagcugcaccaccagccuguacaagggcguguacgagcugcagacccuggagcugaacauggagacccugaacaugugcaugccccugagcugcaccaagaacaacagccaccacuacaucauggugggcaacgagaccggccuggagcugacccugaccaacaccagcaucaucgaccacaaguucugcaaccugagcgacgcccacagaaagaaccuguacgaccacgcccugaugagcaucaucagcaccuuccaccugagcauccccaacuucaaccaguacgaggccaugagcugcgacuucaacggcggcaagaucagcgugcaguacaaccugagccacagcuacgccaaggacgccgccgaccacugcggcaccguggccaacggcgugcugcagaccuucaugagaauggccuggggcggcagcuacaucgcccuggacagcggcagaggcagaugggacugcaucaugaccagcuaccaguaccugaucauccagaacaccaccugggaggaccacugccaguucagcagacccagccccaucggcuaccugggccugcugagccagagaaccagagacaucuacaucagcagaagacugcugggcaccuucaccuggacccugagcgacagcgagggcaaggacacccccggcggcuacugccugaccagauggaugcugaucgaggccgagcugaagugcuucggcaacaccgccguggccaagugcaacgagaagcacgacgaggaguucugcgacaugcugagacuguucgacuucugcaagcaggccauccagagacugaaggcccccgcccagaugagcauccagcugaucaacaaggccgugaacgcccugaucaacgaccagcugaucaugaagaaccaccugagagacaucaugggcauccccuacugcaacuacagcaaguacugguaccugaaccacaccaccaccggcaagaccagccugcccaagugcuggcuggugagcaacggcagcuaccugaacgagacccacuucagcgacgacaucgagcagcaggccgacaacaugaucaccgagaugcugcagaaggaguacauggagagacagggcaagaccccccugggccugguggaccuguucguguucagcaccagcuucuaccugaucagcaucuuccugcaccuggugaagauccccacccacagacacaucgugggcaagcccugccccaagccccacagacugaaccacaugggcaucugcagcugcggccuguacaagcagcccggcgugcccgugaaguggaagagaugaggacuagucccuguucccagagcccacuuuuuuuucuuuuuuugaaauaaaauagccugucuuucagaucucaaaggcucuuuucagagccaccaaaaaaaaaaaaaaaaaaaaaaaaaaaaaaaaaaaaaaaaaaaaaaaaaaaaaaaaaaaaaaaaaaaaaaaaaaaaaaaaaaaaaaaaaaaaaaaaaaaaa

SEQ ID NO: 30498 - RNA, 1767 nt, Artificial Sequence
  mRNA product Design a-2 (hSL-A100) comprising derived and/or modified sequence from LASV(LM776-SLE-2012;Clade IV)__AIT17824__GPCmut6 (opt4)
aggagaguccgcucagccagguugcagaagcggcuuagcguguguccuaaucuucucucugcguguagguaggccugugccgcaaacaagcuuaccaugggccagaucgugaccuucuuccaggaggugccccacgugaucgaggaggugaugaacaucgugcugaucgcccugagcauccuggccgugcugaagggccuguacaacuucgccaccugcggccuggugggccuggugaccuuccugcugcugugcggcagaagcugcaccaccagcguguacaagggcguguacgagcugcagacccuggagcugaacauggagacccugaacaugugcaugccccugagcugcaccaagaacaacagccaccacuacaucauggugggcaacgagaccggccuggagcugacccugaccaacaccagcaucaucaaccacaaguucugcaaccugagcgacgcccacaagaagaaccuguacgaccacgcccugaugagcaucaucagcaccuuccaccugagcauccccaacuucaaccaguacgaggccaugagcugcgacuucaacggcggcaagaucagcgugcaguacaaccugagccacagcuacgccggcgacgccgccaaccacugcggcaccguggccaacggcgugcugcagaccuucaugagaauggccuggggcggcagcuacaucgcccuggacagcggccacggcaagugggacugcaucaugaccagcuaccaguaccugaucauccagaacaccaccugggaggaccacugccaguucagcagacccagccccaucggcuaccugggccugcugagccagagaaccagagacaucuacaucagcagaagacugcugggcaccuucaccuggacccugagcgacagcgagggcaaggacacccccggcggcuacugccugaccagauggaugcugaucgaggccgagcugaagugcuucggcaacaccgccguggccaagugcaacgagaagcacgacgaggaguucugcgacaugcugagacuguucgacuucugcaagcaggccauccagagacugaaggcccccgcccagaugagcauccagcugaucaacaaggccgugaacgcccugaucaacgaccagcugaucaugaagaaccaccugagagacaucaugggcauccccuacugcaacuacagcaaguacugguaccugaaccacaccaccaccggcaagaccagccugcccaagugcuggcuggugagcaacggcagcuaccugaacgagacccacuucagcgacgacaucgagcagcaggccgacaacaugaucaccgagaugcugcagaaggaguacauggagagacagggcaagaccccccugggccugguggaccuguucguguucagcaccagcuucuaccugaucagcaucuuccugcaccuggugaagauccccacccacagacacaucgugggcaagagcugccccaagccccacagacugaaccacaugggcaucugcagcugcggccuguacaagcagcccggcgugcccgugagauggaagagaugaggacuagucccuguucccagagcccacuuuuuuuucuuuuuuugaaauaaaauagccugucuuucagaucucaaaggcucuuuucagagccaccaaaaaaaaaaaaaaaaaaaaaaaaaaaaaaaaaaaaaaaaaaaaaaaaaaaaaaaaaaaaaaaaaaaaaaaaaaaaaaaaaaaaaaaaaaaaaaaaaaaaa

SEQ ID NO: 30499 - RNA, 1767 nt, Artificial Sequence
  mRNA product Design a-2 (hSL-A100) comprising derived and/or modified sequence from LASV(Mad39;Clade IV)__ANH09722__GPCmut6 (opt4)
aggagaguccgcucagccagguugcagaagcggcuuagcguguguccuaaucuucucucugcguguagguaggccugugccgcaaacaagcuuaccaugggccagaucgugaccuucuuccaggaggugccccacgugaucgaggaggugaugaacaucgugcugaucgcccugagcauccuggccgugcugaagggccuguacaacguggccaccugcggccugaucggccuggugaccuuccugcugcugugcggcagaagcugcaccaccacccuguacaagggcguguacgagcugcaggcccuggagcugaacauggagacccugaacaugugcaugccccugagcugcaccaagaacaacagccaccacuacaucagagugggcaacgagaccggccuggagcugacccugaccaacaccagccugaucaaccacaaguucugcaaccugagcgacgcccacaagaagaaccuguacgaccacgcccugaugagcaucaucagcaccuuccaccugagcauccccaacuucaaccaguacgaggccaugagcugcgacuucaacgacggcaagaucagcgugcaguacaaccugagccacaccuacgccggcgacaccgccaaccacugcggcaccguggccaacggcgugcugcagaccuucaugagaauggccuggggcggcagcuacaucgcccuggacagcggcagaggcggcugggacugcaucaugaccagcuaccaguaccugaucauccagaacaccaccugggaggaccacugccaguucagcagacccagccccaucggcuaccugggccugcugagccagagaaccagagacaucuacaucagcagaagacugcugggcaccuucaccuggacccugagcgacagcgagggcaaggacacccccggcggcuacugccugaccagauggaugcugaucgaggccgagcugaagugcuucggcaacaccgccguggccaagugcaacgagaagcacgacgaggaguucugcgacaugcugagacuguucgacuucugcaagcaggccauccagagacugaaggcccccgcccagaugagcauccagcugaucaacaaggccgugaacgcccugaucaacgaccagcugaucaugaagaaccaccugagagacaucaugggcauccccuacugcaacuacagcaaguacugguaccugaaccacaccgugaccggcaagaccagccugcccaagugcuggcuggugagcaacggcagcuaccugaacgagacccacuucagcgacgacaucgagcagcaggccgacaacaugaucaccgagaugcugcagaaggaguacauggagagacagggcaagaccccccugggccugguggaccuguucguguucagcaccagcuucuaccugaucagcaucuuccugcaccuggugaagauccccacccacagacacguggugggcaagcccugccccaagccccacagacugaaccacaugggcaucugcagcugcggcuucuacaagcagcccggcgugcccgugagauggaagagaugaggacuagucccuguucccagagcccacuuuuuuuucuuuuuuugaaauaaaauagccugucuuucagaucucaaaggcucuuuucagagccaccaaaaaaaaaaaaaaaaaaaaaaaaaaaaaaaaaaaaaaaaaaaaaaaaaaaaaaaaaaaaaaaaaaaaaaaaaaaaaaaaaaaaaaaaaaaaaaaaaaaaa

SEQ ID NO: 30500 - RNA, 1767 nt, Artificial Sequence
  mRNA product Design a-2 (hSL-A100) comprising derived and/or modified sequence from LASV(Z0947-SLE-2011;Clade IV)__AIT17840__GPCmut6 (opt4)
aggagaguccgcucagccagguugcagaagcggcuuagcguguguccuaaucuucucucugcguguagguaggccugugccgcaaacaagcuuaccaugggccagaucgugaccuucuuccaggaggugccccacgugaucgaggaggugaugaacaucgugcugaucgcccugagcauccuggccgugcugaagggccuguacaacuucgccaccugcggccuggugggccuggugaccuuccugcugcugugcggcagaagcugcaccaucagccuguacaagggcguguacgagcugcagacccuggagcugaacauggagacccugaacaugugcaugccccugagcugcaccaagaacaacagccaccacuacaucauggugggcaacgagaccggccuggagcugacccugaccaacaccagcaucaucaaccacaaguucugcaaccugagcgacgcccacaagaagaaccuguacgaccacgcccugaugagcaucaucagcaccuuccaccugagcauccccaacuucaaccaguacgaggccaugagcugcgacuucaacggcggcaagaucagcgugcaguacaaccugagccacagcuacgccggcgacgccgccaaccacugcggcaccguggccaacggcgugcugcagaccuucaugagaauggccuggggcggcagcuacaucgcccuggacagcggcagagacagaugggacugcaucaugaccagcuaccaguaccugaucauccagaacaccaccugggaggaccacugccaguucagcagacccagccccaucggcuaccugggccugcugagccagagaaccagagacaucuacaucagcagaagacugcugggcaccuucaccuggacccugagcgacagcgagggcaaggacacccccggcggcuacugccugaccagauggaugcugaucgaggccgagcugaagugcuucggcaacaccgccguggccaagugcaacgagaagcacgacgaggaguucugcgacaugcugagacuguucgacuucugcaagcaggccauccagagacugaaggcccccgcccagaugagcauccagcugaucaacaaggccgugaacgcccugaucaacgaccagcugaucaugaagaaccaccugagagacaucaugggcauccccuacugcaacuacagcaaguacugguaccugaaccacaccaccaccggcaagaccagccugcccaagugcuggcuggugagcaacggcagcuaccugaacgagacccacuucagcgacgacaucgagcagcaggccgacaacaugaucaccgagaugcugcagaaggaguacauggagagacagggcaagaccccccugggccugguggaccuguucguguucagcaccagcuucuaccugaucagcaucuuccugcaccuggugaagauccccacccacagacacaucgugggcaagcccugccccaagccccacagacugaaccacaugggcaucugcagcugcggccuguacaagcagcccggcgugcccgugaaguggaagagaugaggacuagucccuguucccagagcccacuuuuuuuucuuuuuuugaaauaaaauagccugucuuucagaucucaaaggcucuuuucagagccaccaaaaaaaaaaaaaaaaaaaaaaaaaaaaaaaaaaaaaaaaaaaaaaaaaaaaaaaaaaaaaaaaaaaaaaaaaaaaaaaaaaaaaaaaaaaaaaaaaaaaa

SEQ ID NO: 30501 - RNA, 1767 nt, Artificial Sequence
  mRNA product Design a-2 (hSL-A100) comprising derived and/or modified sequence from LASV(Josiah;Clade IV)__NP_694870__GPCmut6 (opt5)
aggagaguccgcucagccagguugcagaagcggcuuagcguguguccuaaucuucucucugcguguagguaggccugugccgcaaacaagcuuaccaugggccagaucgugaccuucuuucaagaggucccccacguuauugaagaggugaugaacaucgugcugauugcccucagcguccuggcugugcuuaaggggcuguacaauuucgccacaugcggacucguuggccuggugacguuucuucugcucugugggagauccugcaccacaucucuguauaaaggagucuacgaacugcagacccucgagcugaacauggaaacacuuaauauguguaugccucugagcugcaccaagaacaauucccaucacuauaucauggugggcaacgagacagggcucgagcugacccuuacgaauaccucuauuaucaaccauaaauucuguaaucugagcgacgcgcacaagaaaaaccucuacgaucaugcucugauguccaucauuucuacauuucaccugagcaucccgaauuucaaccaguaugaagccauguccugcgacuuuaauggaggcaagauuagcguucaguacaaccucucucacuccuaugccggcgaugcugccaaucauugugggaccguggcuaacggaguccugcaaacauucaugcggauggccuggggcgggagcuacaucgcgcuugacucuggacgcggcaacugggauugcauuaugaccuccuaccaguaucugaucauucagaauacgacaugggaggaccacugucaguuuagcagacccucuccuaucggguaccucggacugcuuucccaacggacccgcgauaucuauauuagcagacggcugcucggcacauucaccuggacccuguccgacucugaaggcaaggauacacccgggggauacugccugacgcgcuggaugcucaucgaggccgagcugaaauguuuuggcaacaccgcuguggccaagugcaaugaaaaacaugacgaggaguucugcgauaugcuuagacuguuugacuucuguaagcaggcuauucagcggcucaaagccccugcgcagaugagcauccaacugauuaacaaggccgugaaugcucuuaucaacgaucagcugaucaugaagaaucaccuccgcgacauuauggggauccccuauugcaacuacuccaaauauugguaccugaaucacacaaccacaggaagaaccagccugccuaaguguuggcucgucucuaacggcuccuaccugaaugaaacgcauuucagcgacgauauugaacagcaagccgacaacaugaucacagagaugcuucagaaagaguauauggaacggcaggggaagaccccgcugggacucguugaucuguuuguguucucuaccagcuuuuaccugauuuccaucuuccuucaccucgugaaaauccccacacaucgccacauugucggcaagucuugcccuaaaccccauagacugaaucacaugggcaucuguagcugcgggcuguauaagcagccuggagugcccguuaaguggaaacggugaggacuagucccuguucccagagcccacuuuuuuuucuuuuuuugaaauaaaauagccugucuuucagaucucaaaggcucuuuucagagccaccaaaaaaaaaaaaaaaaaaaaaaaaaaaaaaaaaaaaaaaaaaaaaaaaaaaaaaaaaaaaaaaaaaaaaaaaaaaaaaaaaaaaaaaaaaaaaaaaaaaaa

SEQ ID NO: 30502 - RNA, 1764 nt, Artificial Sequence
  mRNA product Design a-2 (hSL-A100) comprising derived and/or modified sequence from LASV(LP;Clade I)__AAF86701__GPCmut6 (opt5)
aggagaguccgcucagccagguugcagaagcggcuuagcguguguccuaaucuucucucugcguguagguaggccugugccgcaaacaagcuuaccaugggccagaucauuaccuucuuucaagaggugccccacgucaucgaagagguuaugaacauugugcugaucgcccucagccugcuugcuauucugaaggggcucuacaauaucgccacaugcggaaucauuggccugguggcguuccuuuuucugugugggaaauccugcucucucacgcugaagggaggcuaugaacugcagacccucgagcugaacauggaaacacuuaauauguguaugccucugagcugcaccaaaaacuccucucaucacuacaucagagucgggaaugagacaggacucgagcugacccuuacaaacaccagcauuaucaaucauaaguucuguaaccuguccgacgcucacaaaaagaaucucuaugaucaugcccugaugucuauuaucagcacguuucaccuguccauuccgaacuucaaucaguacgaagccaugagcugcgacuuuaacggcggcaagaucucugugcaguauaaucucucccacagcuacgcuggggaugccgcugagcauuguggaaccguugccaacggcgugcugcaaacauucaugcggauggcguggggagggcgcuauaucgcccuugacucuggcaaagggaauugggauugcauuaugaccuccuaccaguaccugaucauucagaacacaaccugggaagaccacugucaguuuagcagacccucuccuaucggauaucucggccugcuuucccaacggacgcgcgauauuuacaucagcagacggcugcucggcacauucaccuggacacuguccgacucugaggggaacgagacccccggaggcuauugccugacccgcuggaugcucaucgaagcugagcugaaguguuuugggaauacagccgucgcuaaaugcaacgaaaagcaugaugaggaguucugcgacaugcuuagacuguuugauuucuguaaacaggccauucggcgccucaaggcgccugcccagaugagcauccagcugauuaauaaggcugugaacgcccuuaucaaugaccaacugauuaugaaaaaccaccucagagauaucaugggaauccccuacugcaauuauuccaaguacugguaucugaaccacacgagcucuggccggaccucccugccuaaauguuggcucauuagcaaugggucuuaccugaacgaaacacaguucagcgacgacaucgagcagcaagcugauaauaugauuaccgaaaugcuucagaaggaguacaucgaacgccagggaaaaacaccgcugggccucguugacauuuuuaucuucuccaccucuuuuuaucugauuagcaucuuccugcaucuuaucaagauucccacgcacagacauaucgugggcaaaccuugccccaagccucaccggcucaaccauaugggggucuguuccugcggacuguacaagcaccccggcgugccgacaaaauggaagcgcugaggacuagucccuguucccagagcccacuuuuuuuucuuuuuuugaaauaaaauagccugucuuucagaucucaaaggcucuuuucagagccaccaaaaaaaaaaaaaaaaaaaaaaaaaaaaaaaaaaaaaaaaaaaaaaaaaaaaaaaaaaaaaaaaaaaaaaaaaaaaaaaaaaaaaaaaaaaaaaaaaaaaa

SEQ ID NO: 30503 - RNA, 1764 nt, Artificial Sequence
  mRNA product Design a-2 (hSL-A100) comprising derived and/or modified sequence from LASV(803213;Clade II)__AAF86703__GPCmut6 (opt5)
aggagaguccgcucagccagguugcagaagcggcuuagcguguguccuaaucuucucucugcguguagguaggccugugccgcaaacaagcuuaccaugggccagaucauuaccuucuuucaagaggugccccacgucaucgaagagguuaugaacauugugcugaucgcccucagccugcuugcuauucugaaggggaucuacaauguggccacaugcggacucuucggccugaucuccuuucuucugcucugugggagaucuugcagcgucacguauaaaggaguguacgaacugcagacccuggagcucaacauggcgaaucugaacauguguaugccucuuuccugcacaaagaauaacucucaucacuauauuaugguuggcaaugaaaccgggcuggagcucacacugaccaacacaagcaucauuaaucauaaauucuguaaccuuuccgacgcucacaagaaaaaucuguacgaucaugcccucaugucuaucauuagcaccuuucaccuguccaucccgaacuucaaucaguaugaggccaugagcugcgacuuuaacggaggcaagauuucugugcaguacaaucugucccacagcuucgcugucgaugccgcuaaccauuguggcacgaucgccaacggggugcuccaaaccuuuaugcggauggcguggggaggcucuuauaucgcccuggacuccgggaagggaaauugggauugcauuaugacaagcuaccaguaccuuaucauucagaacaccacaugggaagaccacugucaguucucucgccccuccccuaucggcuaucuggggcuccugagccaaagaacccgggauauuuacaucucccgcagacuucugggaacguuuacauggacccucucugacagcgagggcaaugaagcucccggcggguauugccugacacgguggaugcugaucgaggccgagcucaaauguuucggaaacaccgcuguugccaagugcaaugaaaaacaugaugaggaauuuugcgacaugcugcgccuuuucgauuucuguaagcaggcgauuaaaagacugaagaccccugcccagauguccauccagcucauuaacaaggcugugaaugcccugaucaacgaccaacuuauuaugaaaaaucaucugcgggauaucaugggcauccccuacugcaacuauagccgcuacugguaucucaaucacacagucacggggaagaccucucugccuagauguuggcugguguccaacggaagcuaccucaaugagacacacuuuucugacgacauugaacagcaggcugauaacaugaucaccgagaugcugcaaaaagaguacauggaccggcagggcaagacaccgcuugggcugguggaucucuucgucuuuagcaccuccuucuaucugauuucuaucuuucugcaccuuguuaaaauucccacgcaucgccacaucgugggaaagccuugccccaaaccucauagacucaaucacaugggcauuuguagcugcggccuguacaagcaccccggggugccggucaaguggaaacggugaggacuagucccuguucccagagcccacuuuuuuuucuuuuuuugaaauaaaauagccugucuuucagaucucaaaggcucuuuucagagccaccaaaaaaaaaaaaaaaaaaaaaaaaaaaaaaaaaaaaaaaaaaaaaaaaaaaaaaaaaaaaaaaaaaaaaaaaaaaaaaaaaaaaaaaaaaaaaaaaaaaaa

SEQ ID NO: 30504 - RNA, 1764 nt, Artificial Sequence
  mRNA product Design a-2 (hSL-A100) comprising derived and/or modified sequence from LASV(GA391;Clade III)__CAA36645__GPCmut6 (opt5)
aggagaguccgcucagccagguugcagaagcggcuuagcguguguccuaaucuucucucugcguguagguaggccugugccgcaaacaagcuuaccaugggccagaucgugaccuucuuucaagaggucccccacguuauugaagaggugaugaacaucgugcugauugcccucagcauccuggcuauucuuaaggggcuguacaaugucgccacaugcggacucaucggccuggugacguuccuucugcucuccgggagaucuuguagccugaucuauaaaggaaccuacgaacugcagacacucgagcugaacauggaaacccuuaauaugugcaugccucuguccuguacaaagaacaauucucaucacuauauucggguuggcaacgagaccgggcucgagcugacacuuaccaauacgagcauccugaaccauaaauuuugcaaucucuccgacgcgcacaagcgcaaccuguacgaucauucucugaugagcauuaucuccaccuuccaccucagcauuccgaauuuuaaccaguaugaagcuaugucuugugacuucaauggaggcaaaaucacagugcaguacaaccugucccacagcuuugccgucgaugccgcuggccauugcgggacccuugccaauggagugcugcaaacauucaugagaauggcuuggggcgggucuuauauugcccucgacuccggacggggcaacugggauuguaucaugaccagcuaccaguaccugaucauucagaacacgacaugggacgaucacugccaguuuucucgccccuccccuaucggguaucuuggacugcucagccaaagaacccgggacauuuacaucucccgcagacugcugggcacauucaccuggacccucucugauagcgagggcaaugaaacacccgggggauauugucugacgcgguggaugcuuauugaggcggagcugaagugcuuuggcaacaccgccguugcuaaguguaaugaaaaacaugacgaggaguucugcgauaugcuccgccuguuugacuucugcaagcaggccaucagacggcuuaaaaccccugcucagauguccauccagcugauuaacaaggccgugaaugcgcucaucaacgaucaacugauuaugaaaaaucaucugcgcgacaucauggggauucccuacuguaacuauagcagauacugguaucucaaucacacaucuacaggaaagaccucccugccucggugcuggcuuaucagcaacggcucuuaccugaaugaaacgaaguucagcgacgauaucgaacagcaggccgacaacaugauuacagagaugcuccaaaaagaguacaucgaucgccaggggaagaccccgcugggacuggucgaccuuuuuguguucuccaccucuuuuuaucucauuagcaucuuccugcaccuggugaaaauucccacacacagacauaucgucggcaagccuugucccaaaccucaccggcucaaucauaugggcauuugcuccugugggcuguacaagcagcccggaguuccggugagauggaaacgcugaggacuagucccuguucccagagcccacuuuuuuuucuuuuuuugaaauaaaauagccugucuuucagaucucaaaggcucuuuucagagccaccaaaaaaaaaaaaaaaaaaaaaaaaaaaaaaaaaaaaaaaaaaaaaaaaaaaaaaaaaaaaaaaaaaaaaaaaaaaaaaaaaaaaaaaaaaaaaaaaaaaaa

SEQ ID NO: 30505 - RNA, 1767 nt, Artificial Sequence
  mRNA product Design a-2 (hSL-A100) comprising derived and/or modified sequence from LASV(AV;Clade V)__CCA30314__GPCmut6 (opt5)
aggagaguccgcucagccagguugcagaagcggcuuagcguguguccuaaucuucucucugcguguagguaggccugugccgcaaacaagcuuaccaugggccagaucgugaccuucuuucaagaggucccccacguuauugaagaggugaugaacaucgugcugauugcccucagcauccuggcuguccuuaaggggcuguacaauauugccacaugcggacucaucggccugaucacguuccuucugcucugugggagauccugcucuagcaaccuguauaaaggaguguacgaacugcagucccucgaccugaauauggagacccuuaacauguguaugccucugucuugcacaaagaauaacagccaucacuauauucggguuggcaaugauaccgggcucgaacugacacuuaccaacacauccauccugaaucauaaauuuuguaaccucucugacgcgcacaagaaagaucuguacgaccaugcucugaugagcauuaucuccaccuuccaccucagcauuccgaauuuuaaccaguaugaggccaugucuugcgauuucaauggaggcaagaucuccgugcaguacaaccugagccacucuuaugccauugacgcugccaaucauuguggcacggucgcuaacgggauccuucaaaccuuuaugcgcauggccuggggaggcuccuacaucgcgcuggauagcgggagaggaaacugggacugcauuaugacaucuuaccaguaucucaucauucagaauaccacaugggagaaccacugucaguucucccggcccagcccuaucggcuaccuggggcuucugucccaacgcaccagagauauuuauaucucucggcgccuccugggaacguuuacauggacccugagcgacuccgaaggcaaugccacacccggcggguacugccucaccagauggaugcugaucgaggcugaacuuaaguguuucggaaacaccgccguggcuaaaugcaaugagaagcaugaugaggaauuuugcgacaugcugcgccucuucgauuuuuguaaacaggccauuagccggcugaagucuccugcgcagauguccauccagcuuauuaacaaagccguuaaugcucugaucaacgaccaacucauuaugaagaaucaccugagagacaucaugggcauccccuauugcaacuacagcaaguauugguaccugaaucacacaauuacggggaaaaccucucucccuaaguguuggcuggugagcaacggauccuaccuuaaugagacacauuucucugaugacaucgaacagcaggccgauaacaugauuaccgagaugcugcaaaaagaauauauggagcggcagggcaagacaccgcucgggcuggucgaccuguucguguuuagcaccuccuucuaccuuaucagcauuuuucuccgccuggugaaaauccccacgcacagacauauugucggaaagccuugccccaaaccucaccggcugaaucauaugggcaucuguucuugcggccucuauaagcagcccgggguuccggugcgcuggaagagaugaggacuagucccuguucccagagcccacuuuuuuuucuuuuuuugaaauaaaauagccugucuuucagaucucaaaggcucuuuucagagccaccaaaaaaaaaaaaaaaaaaaaaaaaaaaaaaaaaaaaaaaaaaaaaaaaaaaaaaaaaaaaaaaaaaaaaaaaaaaaaaaaaaaaaaaaaaaaaaaaaaaaa

SEQ ID NO: 30506 - RNA, 1764 nt, Artificial Sequence
  mRNA product Design a-2 (hSL-A100) comprising derived and/or modified sequence from LASV(Togo/2016/7082;Clade VI)__AMR44577__GPCmut6 (opt5)
aggagaguccgcucagccagguugcagaagcggcuuagcguguguccuaaucuucucucugcguguagguaggccugugccgcaaacaagcuuaccaugggccagaucauuaccuucuuucaagaggugccccacgucaucgaagagguuaugaacauugugcugaucgcccucagccugcuugcuauucugaaggggguguacaaugucgccacaugcggaaucaucggccucgugacguuccuguuucuuugugggagauccugcucucugauuuauaaaggaagcuacgaacuccagacccuggagcugaacauggaaacacucaauauguguaugccucuguccugcaccaagaacucuagccaucacuauauccggguuggcaaugagacagggcuugagcugacccucacaaacaccuccauuaucaaucauaaauucuguaaccugucugacgcgcacaagcgcaaucuuuacgaucaugcucugaugagcauucucuccacguuucaccugagcaucccgaacuucaaucaguaugaagccaugucuugcgacuuuaacggaggcaaaauuuccgugcaguacaaucugagccacgccuaugcugucgaugccgcugagcauuguggcaccguggccaacgggguucuccaaacauucaugagaauggcguggggaggcucuuacaucgcccuggacuccgggcggggaaauugggauugcaucaugaccagcuaccaguaucuuauuauccagaacacaaccugggaagaccacugucaguuuucucgccccuccccuauuggcuaccuggggcuccugagccaaagaacgcgggauaucuauauuucccgcagacuucugggaacauucaccuggacacucucugacagcgagggcaacgagacccccggcggguacugccugacccgguggaugcugaucgaagcugagcucaaguguuuuggaaauacagccguggcuaagugcaacgaaaaacaugaugaggaguucugcgacaugcugcgccuuuuugauuucuguaagcaggccauccagagacugaaauccccugcgcagaugagcauucaacucaucaauaaggccgucaacgcucugauuaaugaccagcuuaucaugaaaaaccaucugcgggauaugaugggcauucccuauugcaauuacucuaaguauugguaccucaaccacacguccagcgggcgcaccucucugccuaaguguuggcuggugagcaauggauccuaccucaacgaaacacacuucucugacgacaucgagcagcaagccgauaauaugaucaccgaaaugcugcagaaagaguauauugacagacagggcaagacaccgcuugggcugguggaucucuuugucuucagcaccuccuuuuaccugaucagcauuuuccugcaccuuaucaaaauucccacgcaucggcacaucguuggaaagccuugccccaaaccucaucgccucaaccacaugggcauuuguucuugcggccuguauaagcagcccggggugccgacaagauggaaacggugaggacuagucccuguucccagagcccacuuuuuuuucuuuuuuugaaauaaaauagccugucuuucagaucucaaaggcucuuuucagagccaccaaaaaaaaaaaaaaaaaaaaaaaaaaaaaaaaaaaaaaaaaaaaaaaaaaaaaaaaaaaaaaaaaaaaaaaaaaaaaaaaaaaaaaaaaaaaaaaaaaaaa

SEQ ID NO: 30507 - RNA, 1764 nt, Artificial Sequence
  mRNA product Design a-2 (hSL-A100) comprising derived and/or modified sequence from LASV(KAK-428;Clade n.d. (VII))__ANH09740__GPCmut6 (opt5)
aggagaguccgcucagccagguugcagaagcggcuuagcguguguccuaaucuucucucugcguguagguaggccugugccgcaaacaagcuuaccaugggccagaucgugaccuucuuucaagaggucccccacguuauugaagaggugaugaacaucgugcugauugcccucagccugcuugcuauccugaaggggcucuacaauuucgccacaugcggagucauuggccugaucacguuucuucugcucugugggagauccugcucugcgaccuauaaaggacaguacgaacugcagacacuggagcucaacauggaaagccugaauauguguaugccucuuuccugcaccaagaacaauucucaucacuauauccgggcuggcaacaauacagggcuggagcucacccugacaaacaccagcauuaucucccauaaauucuguaaucuuucugacgcccacaagaaaaaccuguacgaucauacgcucaugagcauuaucaccacauuucaccuguccauuccgaauuucaaccaguaugaggccaugagcugcgacuuuaauggaggcaagaucucuauucaauacaaccugucccacagcuaugcuggcgaugccgcucagcauugugggaccguggccaauggaguucuccagacauucaugcgcauggcguggggcgggucuuaccuggcccuugacuccggaagacggggcugggauugcaucaucagcucuuaccaguaucugauuauccaaaacaccacgugggacgaucacugucaguuuucccgccccagcccuauuggguaccucggauucgugucccagaagacaagagacaucuauauuucucggcgccugcuuggcaccuuuacauggacccugagcgauuccgaaggccaugacaugcccgggggauacugccucaccagauggaugcugaucgaggcugaucugaaauguuucggcaacacagccgucgcuaagugcaaugaaaaacacgacgaggaguuuugcgauauguggcgccucuucgacuucuguaagcaggccauccaacggcugaaagcgccugcccagaugaacauucagcuuaucaauaaggcugugaacgcccugauuaaugaccaacucaugaugaagaaccaccugagagauaucauggggauucccuauugcaauuacagcaaauuuugguaucuuaacaauacgaccacaggacggaccucucugccucgcuguuggcucaucuccaacggcagcuaccugaaugaaacacauuucucugacgauaucgagcagcaggcugacaacaugauuaccgaaaugcugcagaaggaguacauggauagacaagggaaaacgccgcucggacugguugaccuuuuuguguucagcacauccuuuuaucugaucaccauuuuccuccaccuggucaagauccccacccaucggcacauugugggcaaaccuugccccaagccucaucgccugaaucacaugggcaucuguucuugcgggcuuuacaaacagcccggagugccggucagauggaagcggugaggacuagucccuguucccagagcccacuuuuuuuucuuuuuuugaaauaaaauagccugucuuucagaucucaaaggcucuuuucagagccaccaaaaaaaaaaaaaaaaaaaaaaaaaaaaaaaaaaaaaaaaaaaaaaaaaaaaaaaaaaaaaaaaaaaaaaaaaaaaaaaaaaaaaaaaaaaaaaaaaaaaa

SEQ ID NO: 30508 - RNA, 1764 nt, Artificial Sequence; identical to SEQ ID NO: 30502
  mRNA product Design a-2 (hSL-A100) comprising derived and/or modified sequence from LASV(Pinneo-NIG-1969;Clade I)__AIT17836__GPCmut6 (opt5)

SEQ ID NO: 30509 - RNA, 1764 nt, Artificial Sequence
  mRNA product Design a-2 (hSL-A100) comprising derived and/or modified sequence from LASV(ISTH0009-NIG-2011;Clade II)__AIT17404__GPCmut6 (opt5)
aggagaguccgcucagccagguugcagaagcggcuuagcguguguccuaaucuucucucugcguguagguaggccugugccgcaaacaagcuuaccaugggccagaucauuaccuucuuucaagaggugccccacgucaucgaagagguuaugaacauugugcugaucgcccucagccugcuugcuauucugaaggggaucuacaauguggccacaugcggacucuucggccuggucuccuuucuucugcucugugggagaucuugcagcacgaccuauaaaggaguguacgaacugcagacacuggagcucgacauggcgucccugaacauguguaugccucuuucuugcaccaagaauaacagccaucacuauaucaugguuggcaaugaaacagggcuggagcucacccugacaaacaccuccauuaucaaucauaaauucuguaaccuuucugaugcucacaagaaaaaucuguacgaccaugcccucaugagcauuaucuccacguuucaccugagcauuccgaacuucaaucaguaugaggccaugucuugcgauuuuaacggaggcaagaucuccgugcaguacaaucugagccacgcuuaugccgucgacgcugccaaccauuguggcaccauugcgaauggggugcuccaaacauucaugcggauggccuggggaggcucuuacaucgcucuggauuccgggaagggaagcugggacugcaucaugaccucuuaccaguaucuuauuauccagaacacaaccugggaagaucacugucaguuuucccgccccagcccuauuggcuaccuggggcuccugucccaaagaacgcgggacaucuauauuucucgcagacuucugggaacauucaccuggacacucagcgauuccgagggcaacgaaacccccggcggguacugccugacccgguggaugcugaucgaggccgagcucaaauguuuuggaaauacagcuguugccaagugcaacgaaaaacaugacgaggaguucugcgauaugcugcgccuuuuugacuucuguaagcaggcgaucagacggcugaaaacgccugcccagaugagcauucagcucaucaauaaggcugugaacgcccugauuaaugaucaacuuaucaugaagaaccaucugcgcgacauuaugggcauccccuauugcaauuacucuaaauauugguaccucaaccacaccgucacagggaagaccucccugccuagauguuggcuggugagcaauggaucuuaccucaacgaaacacacuucagcgacgauaucgaacagcaggcugacaauaugauuaccgagcugcuucaaaaagaguauauggaucggcagggcaagacgccgcuggggcucguggaccuguuugucuucuccacaucuuuuuaccugaucagcauuuuccuucaccucaucaaaauucccacccaucgccacaucaccggaaagccuugccccaaaccucauagacugaaccacaugggcauuuguuccugcggccuguauaagcaccccgggguuccggugaaguggaaacggugaggacuagucccuguucccagagcccacuuuuuuuucuuuuuuugaaauaaaauagccugucuuucagaucucaaaggcucuuuucagagccaccaaaaaaaaaaaaaaaaaaaaaaaaaaaaaaaaaaaaaaaaaaaaaaaaaaaaaaaaaaaaaaaaaaaaaaaaaaaaaaaaaaaaaaaaaaaaaaaaaaaaa

SEQ ID NO: 30510 - RNA, 1764 nt, Artificial Sequence
  mRNA product Design a-2 (hSL-A100) comprising derived and/or modified sequence from LASV(ISTH2010-NIG-2012;Clade II)__AIT17482__GPCmut6 (opt5)
aggagaguccgcucagccagguugcagaagcggcuuagcguguguccuaaucuucucucugcguguagguaggccugugccgcaaacaagcuuaccaugggccagaucauuaccuucuuucaagaggugccccacgucaucgaagagguuaugaacauugugcugaucgcccucagccugcuugcuauucugaaggggaucuacaauguggccacaugcggacucuucggccuggucuccuuucuucugcucugugggagaucuugcagcacgaccuauaaaggaguguacgaacugcagacacuggagcucgacauggcgucccugaacauguguaugccucuuucuugcaccaagaauaacagccaucacuauaucaugguuggcaaugaaacagggcuggagcucacccugacaaacaccuccauuaucaaucauaaauucuguaaccuuucugaugcucacaagaaaaaucuguacgaccaugcccucaugagcauuaucuccacguuucaccugagcauuccgaacuucaaucaguaugaggccaugucuugcgauuuuaacggaggcaagaucuccgugcaguacaaucugagccacgcuuaugccgucgacgcugccaaccauuguggcaccauugcgaauggggugcuccaaacauucaugcggauggccuggggaggcucuuacaucgcucuggauuccgggaagggaagcugggacugcaucaugaccucuuaccaguaucuuauuauccagaacauuacaugggaagaucacugucaguuuucccgccccagcccuaucggcuaccuggggcuccugucccaaagaacccgggacauuuauaucucucgcagacuucugggaacguucacauggacccucagcgauuccgagggcaacgaaacacccggcggguacugccugacccgguggaugcugaucgaggccgagcucaaauguuuuggaaauaccgcuguugccaagugcaacgaaaaacaugacgaggaguucugcgauaugcugcgccuuuuugacuucuguaagcaggcgauuagacggcugaaaacgccugcccagaugagcauccagcucauuaauaaggcugugaacgcccugaucaaugaucaacuuauuaugaagaaccaucugcgcgacaucaugggcauccccuauugcaauuacucuaaauauugguaccucaaccacacagucaccgggaagacaucccugccuagauguuggcuggugagcaauggaucuuaccucaacgaaacccacuucagcgacgauauugaacagcaggcugacaauaugaucacagagcugcuucaaaaagaguauauugaucggcagggcaagaccccgcuggggcucguggaccuguuugucuucuccacgucuuuuuaccugaucagcauuuuccuucaccucguuaaaauccccacacaucgccacguggugggaaagccuugccccaaaccucauagacugaaccacaugggcauuuguuccugcggccuguauaagcaccccggggucccggugaaguggaaacggugaggacuagucccuguucccagagcccacuuuuuuuucuuuuuuugaaauaaaauagccugucuuucagaucucaaaggcucuuuucagagccaccaaaaaaaaaaaaaaaaaaaaaaaaaaaaaaaaaaaaaaaaaaaaaaaaaaaaaaaaaaaaaaaaaaaaaaaaaaaaaaaaaaaaaaaaaaaaaaaaaaaaa

SEQ ID NO: 30511 - RNA, 1764 nt, Artificial Sequence
  mRNA product Design a-2 (hSL-A100) comprising derived and/or modified sequence from LASV(Lassa virus/H.sapiens-wt/NGA/2015/ISTH_0543;Clade II)__AVO03639__GPCmut6 (opt5)
aggagaguccgcucagccagguugcagaagcggcuuagcguguguccuaaucuucucucugcguguagguaggccugugccgcaaacaagcuuaccaugggccagaucauuaccuucuuucaagaggugccccacgucaucgaagagguuaugaacauugugcugaucgcccucagccugcuugcuauucugaaggggaucuacaauguggccacaugcggacucuucggccuggucuccuuucuucugcucugugggagaucuugcagcacgaccuauaaaggaguguacgaacugcagacacuggagcucgacauggcgaaccugaauauguguaugccucuuuccugcaccaagaacaauucucaucacuauaucaugguuggcaacgaaacagggcuggagcucacccugacaaauaccagcauuaucaaccauaaauucuguaaucuuuccgaugcucacaagaaaaaccuguacgaccaugcccucaugucuauuaucagcacguuucaccuguccauuccgaauuucaaccaguaugaggccaugagcugcgauuuuaauggaggcaagaucucugugcaguacaaccugucccacaccuaugcugucgacgccgcuaaucauuguggcacaauugccaacggggugcuccaaaccuucaugcggauggcguggggaggcagcuacaucgcccuggauucugggaagggauccugggacugcaucaugacaagcuaccaguaucuuguuauucagaacaccacgugggaagaucacugucaguuuucucgccccuccccuaucggcuaccuggggcuccugagccaaagaacacgggacauuuauaucucccgcagacuucugggaaccuucacauggacccucucugauagcgagggcaaugaaacccccggcggguacugccugacacgguggaugcugauugaggcugagcucaaauguuuuggaaacacggccguggcuaagugcaaugaaaaacaugacgaggaguucugcgauaugcugcgccuuuuugacuucuguaagcaggccaucagacggcugaaaaccccugcgcagauguccauccagcucauuaacaaggccgucaaugcucugaucaacgaucaacuuauuaugaagaaucaucugcgcgacaucaugggcauucccuauugcaacuacagcaaauauugguaccucaaucacacagugaccgggaagacaucucugccuagauguuggcugguguccaacggaagcuaccucaaugaaacccacuucucugacgauaucgaacagcaggccgacaacaugaucacggagcugcuucaaaaagaguauauugaucggcagggcaagacaccgcuggggcucgucgaccuguuuguuuucagcaccuccuuuuaccugaucucuauuuuccuucaccucgugaaaauccccacccaucgccacauuacaggaaagccuugccccaaaccucauagacugaaucacaugggcaucuguagcugcggccuguauaagcaccccggggugccggucaaguggaaacggugaggacuagucccuguucccagagcccacuuuuuuuucuuuuuuugaaauaaaauagccugucuuucagaucucaaaggcucuuuucagagccaccaaaaaaaaaaaaaaaaaaaaaaaaaaaaaaaaaaaaaaaaaaaaaaaaaaaaaaaaaaaaaaaaaaaaaaaaaaaaaaaaaaaaaaaaaaaaaaaaaaaaa

SEQ ID NO: 30512 - RNA, 1764 nt, Artificial Sequence
  mRNA product Design a-2 (hSL-A100) comprising derived and/or modified sequence from LASV(Lassa virus/H.sapiens-wt/NGA/2016/ISTH_0009;Clade II)__AVO03571__GPCmut6 (opt5)
aggagaguccgcucagccagguugcagaagcggcuuagcguguguccuaaucuucucucugcguguagguaggccugugccgcaaacaagcuuaccaugggccagaucauuaccuucuuucaagaggugccccacgucaucgaagagguuaugaacauugugcugaucgcccucagccugcuugcuauucugaaggggaucuacaauguggccacaugcggacuccugggccuugucuccuuccugcuccugugugggagaucuugcagcacgaccuauaaaggaguguacgaacugcagacacucgagcuggacauggcgucccuuaacauguguaugccucugucuugcaccaagaauaacagccaucacuauaucaugguuggcaaugaaacagggcucgagcugacccuuacaaacaccuccauuaucaaucauaaauuuuguaaccugucugaugcucacaagaaaaaucucuacgaccaugcccugaugagcauuaucuccacguuccaccugagcauuccgaacuuuaaucaguaugaggccaugucuugcgauuucaacggaggccggaucuccgugcaguacaaucucagccacucuuaugcugucgacgccgcuaaccauuguggcaccauugccaauggggugcugcaaacauuuaugcgcauggcguggggaggcuccuacaucgcccuugauagcgggaagggaucuugggacugcaucaugaccuccuaccaguaucugauuauccagaacacaaccugggaagaucacugucaguucagcagacccuccccuauuggcuaccucgggcugcuuucucaacggacgcgcgacaucuauauuagcagacggcugcucggaacauuuaccuggacacuguccgauagcgagggcaacgaaacccccggcggguacugccugacccgcuggaugcucaucgaggcugagcugaaguguuucggaaauacagccguugcuaaaugcaacgaaaagcaugacgaggaauuuugcgauaugcuuagacuguucgacuuuuguaaacaggccauccggcgccucaagacgccugcgcagaugucuauucagcugaucaauaaagccgugaacgcucuuauuaaugaucaacugaucaugaagaaccaccucagagacauuaugggcauccccuauugcaauuacuccaaguauugguaccugaaccacaccgucacagggaaaaccagccugccucgguguuggcucgugucuaauggaagcuaccugaacgagacacauuucuccgacgauaucgaacagcaggccgacaauaugauuaccgagcuucugcaaaaggaguauaucgaucgccagggcaaaacgccgcucgggcugguggaccuguucgucuuuucuaccagcuucuaccuuauuuccaucuuucuccaccugguuaagauucccacacauagacacaucaccggaaaaccuugccccaagccucaucggcugaaccacaugggcauuuguagcugcggccucuauaaucaccccggggugccggugaaauggaagcgcugaggacuagucccuguucccagagcccacuuuuuuuucuuuuuuugaaauaaaauagccugucuuucagaucucaaaggcucuuuucagagccaccaaaaaaaaaaaaaaaaaaaaaaaaaaaaaaaaaaaaaaaaaaaaaaaaaaaaaaaaaaaaaaaaaaaaaaaaaaaaaaaaaaaaaaaaaaaaaaaaaaaaa

SEQ ID NO: 30513 - RNA, 1764 nt, Artificial Sequence
  mRNA product Design a-2 (hSL-A100) comprising derived and/or modified sequence from LASV(Lassa virus/H.sapiens-wt/NGA/2016/ISTH_0017;Clade II)__AVO03567__GPCmut6 (opt5)
aggagaguccgcucagccagguugcagaagcggcuuagcguguguccuaaucuucucucugcguguagguaggccugugccgcaaacaagcuuaccaugggccagaucauuaccuucuuucaagaggugccccacgucaucgaagagguuaugaacauugugcugaucgcccucagccugcuugcuauucugaaggggaucuacaauguggccacaugcggacucuucggccuggucuccuuucuucugcucugugggagaucuugcagcacgaccuauaaaggaguguacgaacugcagacacuggagcucgacauggcgucccugaacauguguaugccucuuucuugcaccaagaauaacagccaucacuauaucaugguuggcaaugaaacagggcuggagcucacccugacaaacaccuccauuaucaaucauaaauucuguaaccuuucugaugcucacaagaaaaaucuguacgaccaugcccucaugagcauuaucuccacguuucaccugagcauuccgaacuucaaucaguaugaggccaugucuugcgauuuuaacggaggcaagaucuccgugcaguacaaucugagccacaccuaugcuauugacgccgcuaaccauuguggcacaaucgccaaugggguccuccaaaccuucaugcggauggcguggggaggcucuuacaucgcccuggauuccgggaagggaagcugggacugcauuaugacaucuuaccaguaucuuaucauucagaacaccacgugggaagaucacugucaguuuucccgccccagcccuaucggcuaccuggggcuccugucccaaagaacacgggacauuuauaucucucgcagacuucugggaaccuucacauggacccucagcgauuccgagggcaacgaaacccccggcggguacugccugacacgguggaugcugaucgaggcugagcucaaauguuuuggaaauacggccguggcuaagugcaacgaaaaacaugacgaggaguucugcgauaugcugcgccuuuuugacuucuguaagcaggccauuagacggcugaaaaccccugcgcagaugagcauccagcucauuaauaaggccguuaacgcucugaucaaugaucaacuuauuaugaagaaccaucugcgcgacaucaugggcauccccuauugcaauuacucuaaauauugguaccucaaccacacagugaccgggaagacaucccugccuagauguuggcuggucagcaauggaucuuaccucaacgaaacccacuucagcgacgauauugaacagcaggccgacaauaugaucacggagcugcuucaaaaagaguauauggaucggcagggcaagacaccgcuggggcucguggaccuguuuguguucuccaccucuuuuuaccugauuagcaucuuccuucaccucguccgcauucccacccauagacacguuaucggaaaaccuugccccaagccucaucggcugaaccacaugggcauuuguuccugcggccuguauaaacaccccggggugccggugaaguggaagcgcugaggacuagucccuguucccagagcccacuuuuuuuucuuuuuuugaaauaaaauagccugucuuucagaucucaaaggcucuuuucagagccaccaaaaaaaaaaaaaaaaaaaaaaaaaaaaaaaaaaaaaaaaaaaaaaaaaaaaaaaaaaaaaaaaaaaaaaaaaaaaaaaaaaaaaaaaaaaaaaaaaaaaa

SEQ ID NO: 30514 - RNA, 1764 nt, Artificial Sequence
  mRNA product Design a-2 (hSL-A100) comprising derived and/or modified sequence from LASV(Lassa virus/H.sapiens-wt/NGA/2018/ISTH_0959;Clade II)__AVV65099__GPCmut6 (opt5)
aggagaguccgcucagccagguugcagaagcggcuuagcguguguccuaaucuucucucugcguguagguaggccugugccgcaaacaagcuuaccaugggccagaucauuaccuucuuucaagaggugccccacgucaucgaagagguuaugaacauugugcugaucgcccucagccugcuugcuauucugaaggggaucuacaauguggucacaugcggacucuucggccugguguccuuucuucugcucugugggagaucuugcagcacgaccuauaaaggaguuuacgaacugcagacacuggagcucgacauggccucccugaacauguguaugccucuuucuugcaccaagaauaacagccaucacuauaucauggugggcaaugaaacagggcuggagcucacccugacaaacaccuccauuaucaaucauaaauucuguaaccuuucugaugcgcacaagaaaaaucuguacgaccaugcucucaugagcauuaucuccacguuucaccugagcauuccgaacuucaaucaguaugaggccaugucuugcgauuuuaacggaggcaagaucuccguccaguacaaucugagccacgccuaugcuauugacgccgcuaaccauuguggcaccaucgccaauggggugcuccaaacauucaugcggauggcguggggaggcucuuacaucgcccuggauuccgggaagggaagcugggacugcauuaugaccucuuaccaguaucuuaucauucagaacacaaccugggaagaucacugucaguuuucccgccccagcccuaucggcuaccuggggcuccugucccaaagaacgcgggacauuuauaucucucgcagacuucugggaacauucaccuggacacucagcgauuccgagggcaacgaaacccccggcggguacugccugacccgguggaugcugaucgaggcugagcucaaauguuuuggaaauacagccguugcuaagugcaacgaaaaacaugacgaggaguucugcgauaugcugcgccuuuuugacuucuguaagcaggccauuagacggcugaaaacgccugcgcagaugagcauccagcucauuaauaaggccgugaacgcucugaucaaugaucaacuuauuaugaagaaccaucugcgcgacaucaugggcauccccuauugcaauuacucuaaauauugguaccucaaccacaccgucacagggaagaccucccugccuagauguuggcuggugagcaauggaucuuaccucaacgaaacacacuucagcgacgauauugaacagcaggccgacaauaugaucaccgagcugcuucaaaaagaguauauugaucggcagggcaagacgccgcuggggcucguggaccuguuugucuucuccacaucuuuuuaccugaucagcauuuuccuucaccucguuaaaauccccacccaucgccacgugauuggaaagccuugccccaaaccucauagacugaaccacaugggcaucuguuccugcggccuguauaagcaccccggggugccggucaaguggaaacggugaggacuagucccuguucccagagcccacuuuuuuuucuuuuuuugaaauaaaauagccugucuuucagaucucaaaggcucuuuucagagccaccaaaaaaaaaaaaaaaaaaaaaaaaaaaaaaaaaaaaaaaaaaaaaaaaaaaaaaaaaaaaaaaaaaaaaaaaaaaaaaaaaaaaaaaaaaaaaaaaaaaaa

SEQ ID NO: 30515 - RNA, 1764 nt, Artificial Sequence
  mRNA product Design a-2 (hSL-A100) comprising derived and/or modified sequence from LASV(LASV003-NIG-2008;Clade II)__AIT17580__GPCmut6 (opt5)
aggagaguccgcucagccagguugcagaagcggcuuagcguguguccuaaucuucucucugcguguagguaggccugugccgcaaacaagcuuaccaugggccagaucauuaccuucuuucaagaggugccccacgucaucgaagagguuaugaacauugugcugaucgcccucagccugcuugcuauucugaaggggaucuacaauguggccacaugcggacucuucggccuggucuccuuucuucugcucugugggagaucuugcagcacgaccuauaaaggaguguacgaacugcagacacuggagcucgacauggcgucccugaacauguguaugccucuuucuugcaccaagaauaacagccaucacuauaucaugguuggcaaugaaacagggcuggagcucacccugacaaacaccuccauuaucaaucauaaauucuguaaccuuucugaugcucacaagaaaaaucuguacgaccaugcccucaugagcauuaucuccacguuucaccugagcauuccgaacuucaaucaguaugaggccaugucuugcgauuuuaacggaggcaagaucuccgugcaguacaaucugagccacaccuaugcugucgacgccgcuaaccauuguggcacaauugccaauggggugcuccaaaccuucaugcggauggcguggggaggcucuuacaucgcccuggauuccgggaagggaagcugggacugcaucaugacaucuuaccaguaucuuauuauccagaacaccacgugggaagaucacugucaguuuucccgccccagcccuauuggcuaccuggggcuccugucccaaagaacacgggacaucuauauuucucgcagacuucugggaaccuucacauggacccucagcgauuccgagagcaacgaaacccccggcggcuacugccugacacgguggaugcugaucgaggcugagcucaaauguuuugggaauacggccguugcuaagugcaacgaaaaacaugacgaggaguucugcgauaugcugcgccuuuuugacuucuguaagcaggccaucagacggcugaaagcgccugcccagaugucuauucagcucaucaauaaggcugugaacgcccugauuaaugaucaacuuaucaugaagaaccaucugcgcgacauuaugggaauccccuauugcaauuacuccaaauauugguaccucaaccacaccgucacaggcagaaccagccugccucgguguuggcuggugucuaaugggagcuaccucaacgaaacacacuucuccgacgauaucgaacagcaggcugacaauaugauuaccgagcugcuucaaaaggaguauauggaucgccagggaaaaacgccgcugggccucguggaccuguuugucuucucuaccagcuuuuaccugaucuccauuuuccuucaccucguuaagauccccacacauagacacgugauugggaaaccuugccccaagccucaucggcugaaccacaugggaaucuguagcugcggccuguauaaacaccccggcgugccggucaaguggaagcgcugaggacuagucccuguucccagagcccacuuuuuuuucuuuuuuugaaauaaaauagccugucuuucagaucucaaaggcucuuuucagagccaccaaaaaaaaaaaaaaaaaaaaaaaaaaaaaaaaaaaaaaaaaaaaaaaaaaaaaaaaaaaaaaaaaaaaaaaaaaaaaaaaaaaaaaaaaaaaaaaaaaaaa

SEQ ID NO: 30516 - RNA, 1764 nt, Artificial Sequence
  mRNA product Design a-2 (hSL-A100) comprising derived and/or modified sequence from LASV(LASV035-NIG-2009;Clade II)__AIT17588__GPCmut6 (opt5)
aggagaguccgcucagccagguugcagaagcggcuuagcguguguccuaaucuucucucugcguguagguaggccugugccgcaaacaagcuuaccaugggccagaucauuaccuucuuucaagaggugccccacgucaucgaagagguuaugaacauugugcugaucgcccucagccugcuugcuauucugaaggggaucuacaauguggccacaugcggacucuucggccuggucuccuuucuucugcucugugggagaucuugcagcacgaccuauaaaggaguguacgaacugcagacacuggagcucgacauggcgucccugaacauguguaugccucuuucuugcaccaagaauaacagccaucacuauaucaugguuggcaaugaaacagggcuggagcucacccugacaaacaccuccauuaucaaucauaaauucuguaaccuuucugaugcucacaagaaaaaucuguacgaccaugcccucaugagcauuaucuccacguuucaccugagcauuccgaacuucaaucaguaugaggccaugucuugcgauuuuaacggaggcaagaucuccgugcaguacaaucugagccacgcuuaugccgucgacgcugccaaccauuguggcaccauugcgaauggggugcuccaaacauucaugcggauggccuggggaggcucuuacaucgcucuggauuccgggaagggaagcugggacugcaucaugaccucuuaccaguaucuuauuauccagaacacaaccugggaagaucacugucaguuuucccgccccagcccuauuggcuaccuggggcuccugucccaaagaacgcgggacaucuauauuucucgcagacuucugggaacauucaccuggacacucagcgauuccgagggcaacgaaacccccggcggguacugccugacccgguggaugcugaucgaggccgagcucaaauguuuuggaaauacagcuguugccaagugcaacgaaaaacaugacgaggaguucugcgauaugcugcgccuuuuugacuucuguaagcaggcgaucagacggcugaaagccccugcucagaugagcauucagcucaucaauaaggccgugaacgcucugauuaaugaucaacuuaucaugaagaaccaucugcgcgacauuaugggcauccccuauugcaauuacucuaaauauugguaccucaaccacacggucaccgggaagacaucccugccuagauguuggcuggugagcaauggaucuuaccucaacgaaacccacuucagcgacgauaucgaacagcaggccgacaauaugauuacagagcugcuucaaaaagaguauaucgaucggcagggcaagaccccgcuggggcucguggaccuguuugucuucuccacgucuuuuuaccugauuagcaucuuccuucaccucguuaaaauucccacacaucgccacgugaucggaaagccuugccccaaaccucauagacugaaccacaugggcauuuguuccugcggccuguauaagcaccccggggugccggucaaguggaaacggugaggacuagucccuguucccagagcccacuuuuuuuucuuuuuuugaaauaaaauagccugucuuucagaucucaaaggcucuuuucagagccaccaaaaaaaaaaaaaaaaaaaaaaaaaaaaaaaaaaaaaaaaaaaaaaaaaaaaaaaaaaaaaaaaaaaaaaaaaaaaaaaaaaaaaaaaaaaaaaaaaaaaa

SEQ ID NO: 30517 - RNA, 1764 nt, Artificial Sequence
  mRNA product Design a-2 (hSL-A100) comprising derived and/or modified sequence from LASV(LASV1000-NIG-2009;Clade II)__AIT17782__GPCmut6 (opt5)
aggagaguccgcucagccagguugcagaagcggcuuagcguguguccuaaucuucucucugcguguagguaggccugugccgcaaacaagcuuaccaugggccagaucauuaccuucuuucaagaggugccccacgucaucgaagagguuaugaacauugugcugaucgcccucagccugcuugcuauucugaaggggaucuacaauguggccacaugcggacucuucggccuggucuccuuucuucugcucugugggagaucuugcagcacgaccuauaaaggaguguacgaacugcagacacuggagcucgacauggcgucccugaacauguguaugccucuuucuugcaccaagaauaacagccaucacuauaucaugguuggcaaugaaacagggcuggagcucacccugacaaacaccuccauuaucaaucauaaauucuguaaccuuucugaugcucacaagaaaaaucuguacgaccaugcccucaugagcauuaucuccacguuucaccugagcauuccgaacuucaaucaguaugaggccaugucuugcgauuuuaacggaggcaagaucuccgugcaguacaaucugagccacaccuaugcugucgacgccgcuaaccauuguggcacaauugccaauggggugcuccaaaccuucaugcggauggcguggggaggcucuuacaucgcccuggauuccgggaagggaagcugggacugcaucaugacaucuuaccaguaucuuauuauccagaacaccacgugggaagaucacugucaguuuucccgccccagcccuauuggcuaccuggggcuccugucccaaagaacacgggacaucuauauuucucgcagacuucugggaaccuucacauggacccucagcgauuccgagggcaacgaaacccccggcggguacugccugacacgguggaugcugaucgaggcugagcucaaauguuuuggaaauacggccguugcuaagugcaacgaaaaacaugacgaggaguucugcgauaugcugcgccuuuuugacuucuguaagcaggccaucaaaagacugaagaccccugcgcagaugagcauucagcucaucaauaaggccgugaacgcucugauuaaugaucaacuuaucaugaaaaaccaucugcgggacauuaugggcauccccuauugcaauuacucuaaguauugguaccucaaccacacagucaccgggaaaacaucccugccucgcuguuggcuggugagcaauggaucuuaccucaacgaaacccacuucagcgacgauaucgaacagcaggccgacaauaugauuacggagcugcuucaaaaggaguauaucgauagacagggcaaaacaccgcuggggcucguggaccuguuugucuucuccaccucuuuuuaccugauuagcaucuuccuucaccucguuaagauucccacccaucggcacguggugggaaaaccuugccccaagccucaucgccugaaccacaugggcaucuguuccugcggccuguauaagcaccccggggucccggugaaauggaagagaugaggacuagucccuguucccagagcccacuuuuuuuucuuuuuuugaaauaaaauagccugucuuucagaucucaaaggcucuuuucagagccaccaaaaaaaaaaaaaaaaaaaaaaaaaaaaaaaaaaaaaaaaaaaaaaaaaaaaaaaaaaaaaaaaaaaaaaaaaaaaaaaaaaaaaaaaaaaaaaaaaaaaa

SEQ ID NO: 30518 - RNA, 1764 nt, Artificial Sequence
  mRNA product Design a-2 (hSL-A100) comprising derived and/or modified sequence from LASV(LASV221-NIG-2010;Clade II)__AIT17624__GPCmut6 (opt5)
aggagaguccgcucagccagguugcagaagcggcuuagcguguguccuaaucuucucucugcguguagguaggccugugccgcaaacaagcuuaccaugggccagaucauuaccuucuuucaagaggugccccacgucaucgaagagguuaugaacauugugcugaucgcccucagccugcuugcuauucugaaggggaucuacaauguggccacaugcggacucuucggccuggucuccuuucuucugcucugugggagaucuugcagcacgaccuauaaaggaguguacgaacugcagacacuggagcucgacauggcgucccugaacauguguaugccucuuucuugcaccaagaauaacagccaucacuauaucaugguuggcaaugaaacagggcuggagcucacccugacaaacaccuccauuaucaaucauaaauucuguaaccuuucugaugcucacaagaaaaaucuguacgaccaugcccucaugagcauuaucuccacguuucaccugagcauuccgaacuucaaucaguaugaggccaugucuugcgauuuuaacggaggcaagaucuccgugcaguacaaucugagccacaccuaugcuauugacgccgcuaaccauuguggcacaaucgccaaugggguccuccaaaccuucaugcggauggcguggggaggcucuuacaucgcccuggauuccgggaagggaagcugggacugcauuaugacaucuuaccaguaucuuaucauucagaacaccacgugggaagaucacugucaguuuucccgccccagcccuaucggcuaccuggggcuccugucccaaagaacacgggacauuuauaucucucgcagacuucugggaaccuucacauggacccucagcgauuccgagggcaacgaaacccccggcggguacugccugacacgguggaugcugaucgaggcugagcucaaauguuuuggaaauacggccguggcuaagugcaacgaaaaacaugacgaggaguucugcgauaugcugcgccuuuuugacuucuguaagcaggccauuagacggcugaaaaccccugcgcagaugagcauccagcucauuaauaaggccguuaacgcucugaucaaugaucaacuuauuaugaagaaccaucugcgcgacaucaugggcauccccuauugcaauuacucuaaauauugguaccucaaccacacagugaccgggaagacaucccugccuagauguuggcuggucagcaauggaucuuaccucaacgaaacccacuucagcgacgauauugaacagcaggccgacaauaugaucacggagaugcugcaaaaagaguauauggaucggcagggcaagacaccgcuugggcugguggaccucuuuguguucuccaccucuuuuuaccugauuagcaucuuccugcaccuugucaaaauucccacccaucgccacguuaucggaaagccuugccccaaaccucauagacucaaccacaugggcauuuguuccugcggccuguauaagcaccccggggugccggugaaguggaaacggugaggacuagucccuguucccagagcccacuuuuuuuucuuuuuuugaaauaaaauagccugucuuucagaucucaaaggcucuuuucagagccaccaaaaaaaaaaaaaaaaaaaaaaaaaaaaaaaaaaaaaaaaaaaaaaaaaaaaaaaaaaaaaaaaaaaaaaaaaaaaaaaaaaaaaaaaaaaaaaaaaaaaa

SEQ ID NO: 30519 - RNA, 1764 nt, Artificial Sequence
  mRNA product Design a-2 (hSL-A100) comprising derived and/or modified sequence from LASV(LASV237-NIG-2010;Clade II)__AIT17638__GPCmut6 (opt5)
aggagaguccgcucagccagguugcagaagcggcuuagcguguguccuaaucuucucucugcguguagguaggccugugccgcaaacaagcuuaccaugggccagaucauuaccuucuuucaagaggugccccacgucaucgaagagguuaugaacauugugcugaucgcccucagccugcuugcuauucugaaggggaucuacaauguggccacaugcggacucuucggccuggucuccuuucuucugcucugugggagaucuugcagcacgaccuauaaaggaguguacgaacugcagacacuggagcucgacauggcgucccugaacauguguaugccucuuucuugcaccaagaauaacagccaucacuauaucaugguuggcaaugaaacagggcuggagcucacccugacaaacaccuccauuaucaaucauaaauucuguaaccuuucugaugcucacaagaaagaccuguacgaucaugcccucaugagcauuaucuccacguuucaccugagcauuccgaauuucaaccaguaugaggccaugucuugcgacuuuaauggaggcaagaucuccgugcaguacaaccugagccacaccuaugcugucgaugccgcuaaucauuguggcacaauugccaacggggugcuccaaaccuucaugcggauggcguggggaggcucuuacaucgcccuggacuccgggaagggaagcugggauugcaucaugacaucuuaccaguaucuuauuauccagaauaccacgugggaagaccacugucaguuuucccgccccagcccuauuggcuaccuggggcuccugucccaaagaacacgggauaucuauauuucucgcagacuucugggaaccuucacauggacccucagcgacuccgagggcaacgaaacccccggcggguacugccugacacgguggaugcugaucgaggcugagcucaaauguuuuggaaacacggccguugcuaagugcaaugaaaaacaugaugaggaguucugcgacaugcugcgccuuuuugauuucuguaagcaggccaucagacggcugaaaaccccugcgcagaugagcauucagcucaucaacaaggccgugaaugcucugauuaacgaccaacuuaucaugaagaaucaucugcgcgacauuaugggcauccccuauugcaacuacucuaaauauugguaccucaaucacacagucaccgggaagacaucccugccuagauguuggcuggugagcaacggaucuuaccucaaugaaacccacuucagcgaugacaucgaacagcaggccgauaacaugauuacggagcugcuucaaaaagaguauauggaccggcagggcaagacaccgcuggggcucguggaucuguuugucuucuccaccucuuuuuaccugaucagcauuuuccuucaccucaucaaaauucccacccaucgccacaucacaggaaagccuugccccaaaccucauagacugaaucacaugggcauuuguuccugcggccuguauaagcaccccgggguuccggugaaguggaaacggugaggacuagucccuguucccagagcccacuuuuuuuucuuuuuuugaaauaaaauagccugucuuucagaucucaaaggcucuuuucagagccaccaaaaaaaaaaaaaaaaaaaaaaaaaaaaaaaaaaaaaaaaaaaaaaaaaaaaaaaaaaaaaaaaaaaaaaaaaaaaaaaaaaaaaaaaaaaaaaaaaaaaa

SEQ ID NO: 30520 - RNA, 1764 nt, Artificial Sequence
  mRNA product Design a-2 (hSL-A100) comprising derived and/or modified sequence from LASV(LASV253-NIG-2011;Clade II)__AIT17670__GPCmut6 (opt5)
aggagaguccgcucagccagguugcagaagcggcuuagcguguguccuaaucuucucucugcguguagguaggccugugccgcaaacaagcuuaccaugggccagaucauuaccuucuuucaagaggugccccacgucaucgaagagguuaugaacauugugcugaucgcccucagccugcuugcuauucugaaggggaucuacaauguggccacaugcggacucuucggccuggucuccuuucuucugcucugugggagaucuugcagcacgaccuauaaaggaguguacgaacugcagacacuggagcucgacauggcgucccugaacauguguaugccucuuucuugcaccaagaauaacagccaucacuauaucaugguuggcaaugaaacagggcuggagcucacccugacaaacaccuccauuaucaaucauaaauucuguaaccuuucugaugcucacaagaaaaaucuguacgaccaugcccucaugagcauuaucuccacguuucaccugagcauuccgaacuucaaucaguaugaggccaugucuugcgauuuuaacggaggcaagaucuccgugcaguacaaucugagccacaccuaugcugucgacgccgcuaaccauuguggcacaauugccaauggggugcuccaaaccuucaugcggauggcguggggaggcucuuacaucgcccuggauuccgggaagggaagcugggacugcaucaugacaucuuaccaguaucuuauuauccagaacaccacgugggaagaucacugucaguuuucccgccccagcccuauuggcuaccuggggcuccugucccaaagaacacgggacaucuauauuucucgcagacuucugggaaccuucacauggacccucagcgauuccgagggcaacgaaacccccggcggguacugccugacacgguggaugcugaucgaggcugagcucaaauguuuuggaaauacggccguugcuaagugcaacgaaaaacaugacgaggaguucugcgauaugcugcgccuuuuugacuucuguaagcaggccaucagacggcugaaagcgccugcccagaugagcauucagcucaucaauaaggcugugaacgcccugauuaaugaucaacuuaucaugaagaaccaucugcgcgacauuaugggcauccccuauugcaauuacucuaaauauugguaccucaaccacaccgucacagggagaaccucccugccucgguguuggcuggugagcaauggaucuuaccucaacgaaacacacuucagcgacgauaucgaacagcaggcugacaauaugauuaccgagcugcuucaaaaggaguauaucgaucgccagggcaaaacgccgcuggggcucguggaccuguuugucuucuccacaucuuuuuaccugauuagcaucuuccuucaccucguuaagauucccacccauagacacaucauuggaaaaccuugccccaagccucaucggcugaaccacaugggcaucuguuccugcggccuguauaaacaccccggggugccggugaaguggaagcgcugaggacuagucccuguucccagagcccacuuuuuuuucuuuuuuugaaauaaaauagccugucuuucagaucucaaaggcucuuuucagagccaccaaaaaaaaaaaaaaaaaaaaaaaaaaaaaaaaaaaaaaaaaaaaaaaaaaaaaaaaaaaaaaaaaaaaaaaaaaaaaaaaaaaaaaaaaaaaaaaaaaaaa

SEQ ID NO: 30521 - RNA, 1764 nt, Artificial Sequence
  mRNA product Design a-2 (hSL-A100) comprising derived and/or modified sequence from LASV(LASV254-NIG-2011;Clade II)__AIT17674__GPCmut6 (opt5)
aggagaguccgcucagccagguugcagaagcggcuuagcguguguccuaaucuucucucugcguguagguaggccugugccgcaaacaagcuuaccaugggccagaucauuaccuucuuucaagaggugccccacgucaucgaagagguuaugaacauugugcugaucgcccucagccugcuugcuauucugaaggggaucuacaauguggccacaugcggacucuucggccuggucuccuuucuucugcucugugggagaucuugcagcacgaccuauaaaggaguguacgaacugcagacacuggagcucgacaugaccaaccugaauauguguaugccucuuuccugcacaaagaacaauucucaucacuauaucaugguuggcaacgaaaccgggcuggagcucacacugaccaauacgagcauuaucaaccauaaauucuguaaucuuuccgaugcgcacaagaaaaaccuguacaaucaugcucucaugucuauuaucagcaccuuucaccuguccauuccgaacuucaaucaguaugaggccaugagcugcgacuuuaacggaggcaagaucucugugcaguacaaucugucccacagcuaugccgucgaugcugccaaccauuguggcacaauugcuaacggggugcuccaaaccuucaugcggauggccuggggaggcucuuacaucgcgcuggacuccgggaagggaaauugggauugcaucaugacaagcuaccaguaucuuauuauccagaacaccacgugggaagaccacugucaguuuucucgccccuccccuauuggcuaccuggggcuccugagccaaagaacacgggauaucuauauuucccgcagacuucugggaaccuucacauggacccucucugacagcgagggcaaugaaacccccggcggguacugccugacacgguggaugcugaucgaggccgagcucaaauguuuuggaaacacggcuguugccaagugcaaugaaaaacaugaugaggaguucugcgacaugcugcgccuuuuugauuucuguaagcaggcuaucagacggcugaaaaccccugcccaggcgaacauucagcucaucaauaaggccgugaacgcucugauuaaugaccaacuuaucaugaagaaccaucugcgcgauauuaugggcauccccuauugcaauuacuccaaauauugguaccucaaccacacagucaccgggaagacaagccugccuagauguuggcuggugucuaauggauccuaccucaacgaaacccacuucagcgacgacaucgaacagcaggccgauaauaugauuacggagcugcuucaaaaagaguauauggaccggcagggcaagacaccgcuggggcucguggaucuguuugucuucucuaccagcuuuuaccugaucuccauuuuccuucaccucguuaaaauccccacccaucgccacgugauuggaaagccuugccccaaaccucauagacugaaccacaugggcaucuguucuugcggccuguauaagcaccccggggugccggucaaguggaaacggugaggacuagucccuguucccagagcccacuuuuuuuucuuuuuuugaaauaaaauagccugucuuucagaucucaaaggcucuuuucagagccaccaaaaaaaaaaaaaaaaaaaaaaaaaaaaaaaaaaaaaaaaaaaaaaaaaaaaaaaaaaaaaaaaaaaaaaaaaaaaaaaaaaaaaaaaaaaaaaaaaaaaa

SEQ ID NO: 30522 - RNA, 1764 nt, Artificial Sequence
  mRNA product Design a-2 (hSL-A100) comprising derived and/or modified sequence from LASV(Nig08-A19;Clade III)__ADU56618__GPCmut6 (opt5)
aggagaguccgcucagccagguugcagaagcggcuuagcguguguccuaaucuucucucugcguguagguaggccugugccgcaaacaagcuuaccaugggccagaucgugaccuucuuucaagaggucccccacguuauugaagaggugaugaacaucgugcugauugcccucagcauccuggcuauucuuaaggggcuguacaauaucgccacaugcggacucaucggccuggucacguuccuucugcucuccgggagaucuuguagcaugaccuauaaaggaguguacgaacugcagacacuggagcucaacaugaauacccugaacaugugcaugccucuuuccuguacaaagaauaacucucaucacuauauuaugguuggcaaugaaaccgggcuggagcucacacugaccaacacgagccuucugcaucacaaauuuugcaaucucuccgacgcgcauaagaaaaaccuguacgaucacacccugaugucuaucauuagcacauuccaccucuccaucccgaauuuuaaccaguaugaggcuaugagcugugacuucaauggaggcaagauuaccgugcaguacaaccugucucauuccuaugccaucgaugccgcuaaucacugcggcacagucgccaacggggugcuucaaaccuuuaugcggauggcuuggggaggcagcuacauugcccuggacucugggcgcggaaagugggauuguaucaugacguccuaccaguaucucaucauucagaacacaaccugggaagaccauugccaguucagcagacccucuccuaucggcuaccuggggcuucugucccaacggacacgcgauauuuauaucagcagacggcuccugggaaccuuuaccuggacacuguccgacucugagggcaaugaaacgcccggcggguacugucucacccgcuggaugcugauugaggcggagcuuaaaugcuucggaaacacagccguugcuaaguguaaugaaaaacacgaugaggaauuuugcgacaugcugagacucuucgauuuuugcaagcaggccauccggcgccugaaagcuccugcccagaugagcauccagcuuauuaacaaggcggugaaugcccugaucaacgaccaacucauuaugaagaaucaccugagagauaucaugggcauucccuauuguaacuacuccaaauauugguaccugaaucauaccagcacagggcggaccucucucccucgcugcuggcuggucuccaacggaagcuaccuuaaugagacgcacuucucugacgacaucgaacagcaggcugauaacaugaucacagagaugcugcaaaaggaguaucucgacagacagggcaaaaccccgcuggggcugguggaucuuuucguguuuagcaccuccuucuaccucauuucuaucuuucugcaucuggucaagauucccacacaccggcauaucguuggaaaaccuugucccaagccucaccgccucaaucacaugggcauuugcagcuguggccuguauaaacagcccggggugccggugagauggaagcggugaggacuagucccuguucccagagcccacuuuuuuuucuuuuuuugaaauaaaauagccugucuuucagaucucaaaggcucuuuucagagccaccaaaaaaaaaaaaaaaaaaaaaaaaaaaaaaaaaaaaaaaaaaaaaaaaaaaaaaaaaaaaaaaaaaaaaaaaaaaaaaaaaaaaaaaaaaaaaaaaaaaaa

SEQ ID NO: 30523 - RNA, 1767 nt, Artificial Sequence
  mRNA product Design a-2 (hSL-A100) comprising derived and/or modified sequence from LASV(G1180-SLE-2010;Clade IV)__AIT17168__GPCmut6 (opt5)
aggagaguccgcucagccagguugcagaagcggcuuagcguguguccuaaucuucucucugcguguagguaggccugugccgcaaacaagcuuaccaugggccagaucgugaccuucuuucaagaggucccccacguuauugaagaggugaugaacaucgugcugauugcccucagcauccuggcuguccuuaaggggcuguacaauuucgccacaugcggacucgugggccugcuuacguuucugcuccugugugggagauccugcaccgcgucucgguauaaaggaguuuacgaacugcagacacucgagcugaacauggaaacccuuaauauguguaugccucugagcugcacaaagaacaauucccaucacuauauuauggugggcaacgagaccgggcucgagcugacacuuaccaauacgucuaucaucaaccauaaauucuguaaucugagcgacgcucacaagaaaaaccucuacgaucaugcccugauguccauuaucucuaccuuucaccugagcauuccgaauuucaaccaguaugaagccauguccugcgacuuuaauggaggcaagaucagcguccaguacaaccucucucacuccuaugcuggcgaugccgcuaaucauugugggacaguggccaacggaguucugcaaaccuucaugcgcauggcguggggcgggagcuacauugcccuugacucuggacacggcuccugggauugcaucaugacaagcuaccaguaucugauuauccagaacaccacgugggaggaccauugucaguuuucuagacccuccccuaucggguaccucggacugcuuagccaacggacacgcgauauuuauaucuccagacggcugcucggcaccuucacauggacccugucugacagcgaaggcaaggauacccccgggggauacugccugacacgcuggaugcucauugaggcugagcugaaauguuuuggcaauacggccguggcuaagugcaacgaaaaacacgacgaggaguucugcgauaugcuuagacuguuugacuucuguaagcaggccauccagcggcucaaagcgccugcccagauguccauucaacugaucaauaaggcugucaacgcccuuaucaaugaucagcugauuaugaagaaccaccuccgcgacaucauggggauucccuauugcaauuacagcaaauauugguaccugaaccauaccacaaccggaaagacaucucugccuaaauguuggcucguguccaauggcagcuaccugaacgaaacccacuucucugacgauaucgaacagcaagcugacaauaugauuacggagaugcuucagaaggaguauauggaaagacaggggaaaacaccgcugggacucguggaucuguuugucuucagcaccuccuuuuaccugaucucuaucuuccuucaucucguuaagauucccacccaccggcauaucgugggcaaaagcugcccuaagccccaccgccugaaccacaugggcauuuguuccugcgggcuguauaagcagccuggagugcccgucaaauggaagagaugaggacuagucccuguucccagagcccacuuuuuuuucuuuuuuugaaauaaaauagccugucuuucagaucucaaaggcucuuuucagagccaccaaaaaaaaaaaaaaaaaaaaaaaaaaaaaaaaaaaaaaaaaaaaaaaaaaaaaaaaaaaaaaaaaaaaaaaaaaaaaaaaaaaaaaaaaaaaaaaaaaaaa

SEQ ID NO: 30524 - RNA, 1767 nt, Artificial Sequence
  mRNA product Design a-2 (hSL-A100) comprising derived and/or modified sequence from LASV(G1442-SLE-2011;Clade IV)__AIT17180__GPCmut6 (opt5)
aggagaguccgcucagccagguugcagaagcggcuuagcguguguccuaaucuucucucugcguguagguaggccugugccgcaaacaagcuuaccaugggccagaucgugaccuucuuucaagaggucccccacguuauugaagaggugaugaacaucgugcugauugcccucagcauccuggcuguccuuaaggggcuguacaauguggccacaugcggacucauuggccugguuacguuccuucugcucugugggagauccugcaccacaacccuguauaaaggaguguacgaacugcagacacucgagcugaacauggaaacccuuaauauguguaugccucugucuugcacaaagaacaauagccaucacuauauccgggucggcaacgagaccgggcucgagcugacgcuuaccaauacauccaucauuaaccauaaauuuuguaaucugucugacgcgcacaagaaaaaccucuacgaucaugcucugaugagcaucauuuccaccuuccaccugucuaucccgaauuuuaaccaguaugaagccaugagcugcgacuucaauggaggcaagauuuccgugcaguacaaccucagccacucuuaugccggcgaugcugccaaucauugugggacaguugcuaacggagugcugcaaaccuuuaugcgcauggccuggggcggguccuacaucgcgcuugacagcggaagaggcaacugggauugcauuaugacgucuuaccaguaucugaucauccagaauacaaccugggacgaucacugucaguucucccggcccagcccuauuggguaccucggacugcuuucucaacgcacaagagacgucuauaucucccggcgccugcucggcaccuuuaccuggacacugagcgauuccgagggcaaggacacgcccgggggauacugccugaccagauggaugcucauugaagccgagcugaaauguuucggcaacacagcuguggccaagugcaaugagaaacaugaugaagaguuuugcgacaugcuucggcuguucgauuuuuguaagcaggcuauccagcgccucaaagccccugcgcagaugucuauucaacugaucaacaaggccgugaaugcucuuaucaacgaccagcugauuaugaagaaucaccucagagacaucauggggauucccuauugcaacuacagcaaauauugguaccugaauaacaccgccacaggaaagaccucccugccuaaauguuggcucaucagcaauggcucuuaccugaacgaaacgcacuucuccgaugacauugagcaggaagcugauaauaugaucacagagaugcuucaaaaggaguauauggaacggcaggggaaaaccccgcugggacucgucgaccuguucguuuuuagcaccucuuucuaccugaucagcauuuuucuucaucucgugaagauccccacacaccgccauauugugggcaaauccugcccuaagccccacagacugaaccauaugggcaucuguucuugcgggcuguauaagcagccuggaguccccgugcgguggaaacgcugaggacuagucccuguucccagagcccacuuuuuuuucuuuuuuugaaauaaaauagccugucuuucagaucucaaaggcucuuuucagagccaccaaaaaaaaaaaaaaaaaaaaaaaaaaaaaaaaaaaaaaaaaaaaaaaaaaaaaaaaaaaaaaaaaaaaaaaaaaaaaaaaaaaaaaaaaaaaaaaaaaaaa

SEQ ID NO: 30525 - RNA, 1767 nt, Artificial Sequence
  mRNA product Design a-2 (hSL-A100) comprising derived and/or modified sequence from LASV(G3010-SLE-2013;Clade IV)__AIT17344__GPCmut6 (opt5)
aggagaguccgcucagccagguugcagaagcggcuuagcguguguccuaaucuucucucugcguguagguaggccugugccgcaaacaagcuuaccaugggccagaucgugaccuucuuucaagaggucccccacguuauugaagaggugaugaacaucgugcugauugcccucagcauccuggcuguccuuaaggggcuguacaauuucgccacaugcggacucgugggccugguuacguuucuucugcucugugggagauccugcaccacaucucuguauaaaggaguguacgaacugcagacccucgagcugaacauggaaacacuuaauauguguaugccucugagcugcaccaagaacaauucccaucacuauauuauggucggcaacgagacagggcucgagcugacccuuacgaauaccucuaucaucaaccauaaauucuguaaucugagcgacgcgcacaagaaaaaccucuacaaucaugcucugauguccauuaucucuacauuucaccugagcauuccgaacuucaaucaguaugaagccauguccugcgauuuuaacggaggcaagaucagcgugcaguacaaucucucucacuccuaugccggcgacgcugccagccauugugggaccguugcuaacggagugcugcaaacauucaugcggauggccuggggcgggucuuacauugcgcuugauuccggauacggcaagugggacugcaucaugaccagcuaucaguaccugauuauccagaacacgacaugggaggaucacugucaguuuucucgccccuccccuaucggguaucucggacugcuuagccaaagaacccgggacauuuacaucucccgcagacugcucggcacauucaccuggacccugucugauagcgaaggcaaagacacacccgggggauauugccugacgcgguggaugcucauugaggccgagcugaaguguuuuggcaauaccgcugucgccaaaugcaacgaaaagcaugaugaggaguucugcgacaugcuucgccuguuugauuucuguaaacaggcuauccagagacucaagaccccugcccagauguccauucaacugaucaauaaggcggugaacgcccuuaucaaugaccagcugauuaugaaaaaccaccuccgggauaucauggggauucccuacugcaauuauagcaaguacugguaccugaaccacacaacaaccggaaaaacgucucugccuaaguguuggcucguguccaauggcagcuaucugaacgaaacacauuucucugacgacaucgaacagcaagcugauaauaugauuaccgagaugcuucagaaagaguacauggaacgccaggggaagaccccgcugggacucgucgaccuguuuguuuucagcacauccuuuuaucugaucucuaucuuccuucaccucgugaaaauucccacccauagacacaucgugggcaagagcugcccuaagccccaucggcugaaccacaugggcauuuguuccugcgggcuguacaaacagccuggaguccccgugcgcuggaagagaugaggacuagucccuguucccagagcccacuuuuuuuucuuuuuuugaaauaaaauagccugucuuucagaucucaaaggcucuuuucagagccaccaaaaaaaaaaaaaaaaaaaaaaaaaaaaaaaaaaaaaaaaaaaaaaaaaaaaaaaaaaaaaaaaaaaaaaaaaaaaaaaaaaaaaaaaaaaaaaaaaaaaa

SEQ ID NO: 30526 - RNA, 1767 nt, Artificial Sequence
  mRNA product Design a-2 (hSL-A100) comprising derived and/or modified sequence from LASV(G502-SLE-2009;Clade IV)__AIT17126__GPCmut6 (opt5)
aggagaguccgcucagccagguugcagaagcggcuuagcguguguccuaaucuucucucugcguguagguaggccugugccgcaaacaagcuuaccaugggccagaucgugaccuucuuucaagaggucccccacguuauugaagaggugaugaacaucgugcugauugcccucagcauccuggcuguccuuaaggggcuguacaauuucgccacaugcggacucgugggccugcuuacguuucugcuccugugugggagauccugcaccacaggacuguauaaaggcguuuacgaacuccagacccuggagcuuaacauggaaacacugaauauguguaugccucucucuugcaccaagaacaauagccaucacuauauuaugguggggaacgagacaggacuggagcuuacccugacgaauaccuccaucaucaaccauaaauucuguaaucucucugacgcgcacaagaaaaaccuguacgaucaugcucugaugagcauuaucuccacauuucaccucucuauuccgaauuucaaccaguaugaagccaugagcugcgacuuuaauggcggcaagaucuccguccaguacaaccugagccacucuuaugccggggaugcugccgaccauuguggaaccguggcuaauggcguucuucaaacauucaugcggauggccuggggaggguccuacauugcgcuggauagcggccgcgggagaugggacugcaucaugaccucuuaccaguaucucauuauccagaacacgacaugggaggaucacugucaguuuucccggcccagcccuaucggauaccugggccuucugucucaacgcaccagagacauuuauaucucccggcgccuccugggcacauucaccuggacccugagcgauuccgaagggaaggacacacccggaggcuacugccucacgagauggaugcugauugaggccgagcuuaaauguuuugggaacaccgcuguggccaagugcaaugaaaaacaugaugaggaguucugcgacaugcugcggcucuuugauuucuguaagcaggcuauccagcgccugaaagccccugcgcagaugucuauucaacuuaucaacaaggccgucaaugcucugaucaacgaccagcucgugaugaagaaucaccugagagacauuaugggaauccccuauugcaacuacagccgguauugguaccugaaucacacaaccacaggccgcaccucccucccuaaauguuggcuggugagcaacgggucuuaccuuaaugaaacgcauuucuccgaugacauugaacagcaagccgauaacaugaucacagagaugcugcagaaggaguauauggaaagacagggaaaaaccccgcucggccuggucgaccuguuuguuuucagcaccucuuuuuaccuuauuagcaucuuccuccaccuggugaagauccccacacaucggcacauugugggcaaauccugcccuaagccccaucgccugaaucacauggggaucuguucuugcggacucuauaaacagccuggcguccccgugaaguggaagagaugaggacuagucccuguucccagagcccacuuuuuuuucuuuuuuugaaauaaaauagccugucuuucagaucucaaaggcucuuuucagagccaccaaaaaaaaaaaaaaaaaaaaaaaaaaaaaaaaaaaaaaaaaaaaaaaaaaaaaaaaaaaaaaaaaaaaaaaaaaaaaaaaaaaaaaaaaaaaaaaaaaaaa

SEQ ID NO: 30527 - RNA, 1767 nt, Artificial Sequence
  mRNA product Design a-2 (hSL-A100) comprising derived and/or modified sequence from LASV(G733-SLE-2010;Clade IV)__AIT17154__GPCmut6 (opt5)
aggagaguccgcucagccagguugcagaagcggcuuagcguguguccuaaucuucucucugcguguagguaggccugugccgcaaacaagcuuaccaugggccagaucgugaccuucuuucaagaggucccccacguuauugaagaggugaugaacaucgugcugauugcccucagcauccuggcuguccuuaaggggcuguacaauuucgccacaugcggaauugugggccucguuuccuuucugcuucugugugggagaucuugcacgaccagccucuauaaaggaguguacgaacugcagacacuggagcucaacauggaaacccugaauauguguaugccucuuuccugcacaaagaacaauucucaucacuauaucauggucggcaacgagaccgggcuggagcucacacugaccaauacgagcaucauuaaccauaaauucuguaaucuuuccgacgcgcacaagaaaaaccuguacgaucaugcucucaugucuaucauuagcaccuuucaccuguccaucccgaauuucaaccaguaugaagccaugagcugcgacuuuaauggaggcaagauuucugugcaguacaaccugucccacagcuaugccggcgaugcugccaaucauugugggacaaucgcuaacggaguucuccaaaccuucaugcggauggccuggggcgggucuuacauugcgcuggacuccggacgcgauagaugggacugcaucaugacaagcuaccaguaucuuaucauucagaacaccacgugggaggaucacugucaguuuucucggcccuccccuaucggcuaccuggggcuccugagccaacgcacaagagacauuuauaucucccggcgccuucugggaaccuucacauggacccucucugauagcgaaggcaaggacacccccggcggguacugccugacaagauggaugcugauugaggccgagcucaaauguuuuggaaauacggcuguggccaagugcaacgaaaaacaugaugaggaguucugcgacaugcugcggcuuuuugauuucuguaagcaggcuauccagcgccugaaagccccugcgcagauguccauccaacucauuaauaaggccgucaacgcucugaucaaugaccagcuuauuaugaagaaccaccugagagacaucaugggcauucccuauugcaauuacagcaaauauugguaccucaaccacaccacaaccgggaagacaucucugccuaaauguuggcugguguccaauggaagcuaccucaacgaaacccauuucucugaugacaucgaacagcaagccgauaauaugaucacggagaugcugcagaaggaguauauggaacggcagggcaaaacaccgcuugggcugguggaccucuuugucuucagcaccuccuuuuaccugauuucuaucuuccugcaccuuguuaagauucccacccaucgccacguggugggaaaaagcugcccuaagccccauagacucaaccacaugggcaucuguuccugcggccuguaugggcagccuggaguccccgugaaguggaaacggugaggacuagucccuguucccagagcccacuuuuuuuucuuuuuuugaaauaaaauagccugucuuucagaucucaaaggcucuuuucagagccaccaaaaaaaaaaaaaaaaaaaaaaaaaaaaaaaaaaaaaaaaaaaaaaaaaaaaaaaaaaaaaaaaaaaaaaaaaaaaaaaaaaaaaaaaaaaaaaaaaaaaa

SEQ ID NO: 30528 - RNA, 1767 nt, Artificial Sequence
  mRNA product Design a-2 (hSL-A100) comprising derived and/or modified sequence from MOPV/LASV reassortant(IGS-1;Clade IV)__AFY05576__GPCmut6 (opt5)
aggagaguccgcucagccagguugcagaagcggcuuagcguguguccuaaucuucucucugcguguagguaggccugugccgcaaacaagcuuaccaugggccagaucgugaccuucuuucaagaggucccccacguuauugaagaggugaugaacaucgugcugauugcccucagcguccuggcugugcuuaaggggcuguacaauuucgccacaugcggacucguuggccuggugacguuucuucugcucugugggagauccugcaccacaucucuguauaaaggagucuacgaacugcagacccucgagcugaacauggaaacacuuaauauguguaugccucugagcugcaccaagaacaauucccaucacuauaucauggugggcaacgagacagggcucgagcugacccuuacgaauaccucuauuaucaaccauaaauucuguaaucugagcgacgcgcacaagaaaaaccucuacgaucaugcucugauguccaucauuucuacauuucaccugagcaucccgaauuucaaccaguaugaagccauguccugcgacuuuaauggaggcaagauuagcguucaguacaaccucucucacuccuaugccggcgaugcugccaaucauugugggaccguggcuaacggaguccugcaaacauucaugcggauggccuggggcgggagcuacaucgcgcuugacucuggacgcggcaacugggauugcauuaugaccuccuaccaguaucugaucauucagaauacgacaugggaggaccacugucaguuuagcagacccucuccuaucggguaccucggacugcuuucccaacggacccgcgauaucuauauuagcagacggcugcucggcacauucaccuggacccuguccgacucugaaggcgaggauacacccgggggauacugccugacgcgcuggaugcucaucgaggccgaacugaaguguuuuggcaacaccgcuguggccaaaugcaaugagaagcaugacgaagaguucugcgauaugcuuagacuguuugacuucuguaaacaggcuauucagcggcucaaggccccugcgcagaugagcauccaacugauuaacaaagccgugaaugcucuuaucaacgaucagcugaucaugaagaaucaccuccgcgacauuauggggauccccuauugcaacuacuccaaguauugguaccugaaucacacaaccacaggaagaaccagccugccuaaauguuggcucgucucuaacggcuccuaccugaaugaaacgcauuucagcgacgauauugagcagcaagccgacaacaugaucacagagaugcuucagaaggaauauauggagcggcaggggaaaaccccgcugggacucguugaucuguuuguguucucuaccagcuuuuaccugauuuccaucuuccuucaccucgugaagauccccacacaucgccacauugucggcaaaucuugcccuaagccccauagacugaaucacaugggcaucuguagcugcgggcuguauaaacagccuggagugcccguuaaguggaagcggugaggacuagucccuguucccagagcccacuuuuuuuucuuuuuuugaaauaaaauagccugucuuucagaucucaaaggcucuuuucagagccaccaaaaaaaaaaaaaaaaaaaaaaaaaaaaaaaaaaaaaaaaaaaaaaaaaaaaaaaaaaaaaaaaaaaaaaaaaaaaaaaaaaaaaaaaaaaaaaaaaaaaa

SEQ ID NO: 30529 - RNA, 1767 nt, Artificial Sequence
  mRNA product Design a-2 (hSL-A100) comprising derived and/or modified sequence from LASV(LM765-SLE-2012;Clade IV)__AIT17814__GPCmut6 (opt5)
aggagaguccgcucagccagguugcagaagcggcuuagcguguguccuaaucuucucucugcguguagguaggccugugccgcaaacaagcuuaccaugggccagaucgugaccuucuuucaagaggucccccacguuauugaagaggugaugaacaucgugcugauugcccucagcauccuggcuguccuuaaggggcuguacaauuucgccacaugcggacucgugggccugguuacguuucuucugcucugugggagauccugcaccacaucucuguauaaaggaguguacgaacugcagacccucgagcugaacauggaaacacuuaauauguguaugccucugagcugcaccaagaacaauucccaucacuauauuauggucggcaacgagacagggcucgagcugacccuuacgaauaccucuaucaucgaccauaaauucuguaaccugagcgaugcgcaccggaagaaucucuacgaccaugcucugauguccauuaucucuacauuucaccugagcauuccgaacuucaaucaguaugaagccauguccugcgauuuuaacggaggcaaaaucagcgugcaguacaaucucucucacuccuaugccaaggacgcugccgaucauuguggcaccguugcuaacggggugcugcaaacauucaugcgcauggccuggggaggcagcuacauugcgcuugacucugggagaggacggugggauugcaucaugaccuccuaccaguaucugauuauccagaauacgacaugggaggaccacugucaguuuagccgccccucuccuaucggcuaccucgggcugcuuucccaaagaacccgggauauuuauaucagccgcagacugcucggaacauucaccuggacccuguccgacucugaaggcaaggauacacccggcggguacugccugacgcgguggaugcucauugaggccgagcugaaauguuuuggaaacaccgcugucgccaagugcaacgaaaaacaugacgaggaguucugcgauaugcuucgccuguuugacuucuguaagcaggcuauccagagacucaaagccccugcgcagaugagcauucaacugaucaauaaggccgugaacgcucuuaucaaugaccagcugauuaugaagaaccaccuccgggauaucaugggcauucccuauugcaauuacuccaaauauugguaccugaaccacacaaccacagggaagaccagccugccuaaauguuggcucgugucuaauggauccuaccugaacgaaacgcauuucagcgacgauaucgaacagcaagccgacaauaugauuacagagaugcuucagaaggaguauauggaacgccagggcaaaaccccgcuggggcucgucgaucuguuuguuuucucuaccagcuuuuaccugaucuccaucuuccuucaccucgugaagauucccacacauagacacaucgugggaaaaccuugccccaagccucaucggcugaaccacaugggcauuuguucuugcggccuguauaagcagcccggggucccggugaaauggaagcgcugaggacuagucccuguucccagagcccacuuuuuuuucuuuuuuugaaauaaaauagccugucuuucagaucucaaaggcucuuuucagagccaccaaaaaaaaaaaaaaaaaaaaaaaaaaaaaaaaaaaaaaaaaaaaaaaaaaaaaaaaaaaaaaaaaaaaaaaaaaaaaaaaaaaaaaaaaaaaaaaaaaaaa

SEQ ID NO: 30530 - RNA, 1767 nt, Artificial Sequence
  mRNA product Design a-2 (hSL-A100) comprising derived and/or modified sequence from LASV(LM776-SLE-2012;Clade IV)__AIT17824__GPCmut6 (opt5)
aggagaguccgcucagccagguugcagaagcggcuuagcguguguccuaaucuucucucugcguguagguaggccugugccgcaaacaagcuuaccaugggccagaucgugaccuucuuucaagaggucccccacguuauugaagaggugaugaacaucgugcugauugcccucagcauccuggcuguccuuaaggggcuguacaauuucgccacaugcggacucgugggccugguuacguuucuucugcucugugggagauccugcaccacaucuguguauaaaggagucuacgaacugcagacccuggagcucaacauggaaacacugaauauguguaugccucuuagcugcaccaagaacaauucccaucacuauauuauggugggcaacgagacagggcuggagcucacccugacgaauaccucuaucaucaaccauaaauucuguaaucuuagcgacgcgcacaagaaaaaccuguacgaucaugcucucauguccauuaucucuacauuucaccugagcauuccgaauuucaaccaguaugaagccauguccugcgacuuuaauggaggcaagaucagcguucaguacaaccugucucacuccuaugccggcgaugcugccaaucauugugggaccguggcuaacggaguccuccaaacauucaugcggauggccuggggcgggagcuacauugcgcuggacucuggacacggcaagugggauugcaucaugaccuccuaccaguaucuuauuauccagaacacgacaugggaggaccauugucaguuuagccgccccucuccuaucggguaccugggacuccugucccaaagaacccgggauauuuauaucagccgcagacuucugggcacauucaccuggacccucuccgacucugaaggcaaagauacacccgggggauacugccugacgcgguggaugcugauugaggccgagcucaaguguuuuggcaauaccgcuguggccaaaugcaacgaaaagcacgacgaggaguucugcgauaugcugcgccuuuuugacuucuguaaacaggcuauccagagacugaaggccccugcgcagaugagcauucaacucaucaauaaggccgugaacgcucugaucaaugaucagcuuauuaugaaaaaccaucugcgggacaucauggggauucccuauugcaauuacuccaaguauugguaccucaaccacacaaccacaggaaaaaccagccugccuaaguguuggcuggucucuaauggcuccuaccucaacgaaacgcacuucagcgacgauaucgaacagcaagccgacaauaugauuacagagaugcugcagaaagaguauauggaacgccaggggaagaccccgcuuggacugguugaucucuuuguguucucuaccagcuuuuaccugaucuccaucuuccugcaucuugugaaaauucccacacacagacauaucgucggcaagucuugcccuaagccccaccggcucaaccacaugggcauuuguagcugcgggcuguauaaacagccuggagugcccguucgcuggaagagaugaggacuagucccuguucccagagcccacuuuuuuuucuuuuuuugaaauaaaauagccugucuuucagaucucaaaggcucuuuucagagccaccaaaaaaaaaaaaaaaaaaaaaaaaaaaaaaaaaaaaaaaaaaaaaaaaaaaaaaaaaaaaaaaaaaaaaaaaaaaaaaaaaaaaaaaaaaaaaaaaaaaaa

SEQ ID NO: 30531 - RNA, 1767 nt, Artificial Sequence
  mRNA product Design a-2 (hSL-A100) comprising derived and/or modified sequence from LASV(Mad39;Clade IV)__ANH09722__GPCmut6 (opt5)
aggagaguccgcucagccagguugcagaagcggcuuagcguguguccuaaucuucucucugcguguagguaggccugugccgcaaacaagcuuaccaugggccagaucgugaccuucuuucaagaggucccccacguuauugaagaggugaugaacaucgugcugauugcccucagcauccuggcuguccuuaaggggcuguacaauguggccacaugcggacucauuggccugguuacguuccuucugcucugugggagauccugcaccacaacccuguauaaaggaguguacgaacugcaggcgcucgagcugaacauggaaacacuuaauauguguaugccucugucuugcaccaagaacaauagccaucacuauauccgggucggcaacgagacagggcucgagcugacccuuacgaauaccucccugaucaaccauaaauuuuguaaucucucugacgcucacaagaaaaaccuguacgaucaugcccugaugagcauuaucuccacauuccaccucucuauuccgaauuuuaaccaguaugaagccaugagcugcgacuucaaugauggaaagaucuccgugcaguacaaccugagccacaccuaugcuggcgacacagccaaucauuguggcaccguugcuaacggggugcuucaaacguuuaugcgcauggccuggggaggcucuuacauugcgcuggauuccgggagaggaggcugggacugcaucaugacaagcuaccaguaucucauuauccagaacaccacaugggaggaucacugucaguucucucggcccuccccuaucggguaccugggacuucugagccaacgcaccagagacauuuauaucucucggcgccuccugggcaccuuuacauggacgcuguccgauagcgaaggcaaggacacccccgggggauacugccucacaagauggaugcugauugaggccgagcuuaaauguuucggcaauaccgcugucgccaagugcaacgaaaaacaugaugaggaauuuugcgacaugcugcgccucuucgauuuuuguaagcaggcuauccagcggcugaaagccccugcgcagauguccauucaacuuaucaauaaggccgugaacgcucugaucaaugaccagcucauuaugaagaaccaccugagagacaucauggggauucccuauugcaauuacucuaaauauugguaccugaaccacacagugaccggaaagacgagccucccuaaauguuggcuggucuccaauggcagcuaccuuaacgagacacauuucucugaugacaucgaacagcaagccgauaauaugauuaccgagaugcugcagaaggaguauauggaacggcaggggaaaaccccgcucggacugguugaccuguucguguuuuccaccagcuucuaccuuaucucuaucuuucuccaccuggugaagauucccacacaucgccacgucgugggcaaaccuugccccaagccucauagacugaaccacaugggcaucuguagcugcggguucuauaagcagcccggaguuccggugcgguggaaacgcugaggacuagucccuguucccagagcccacuuuuuuuucuuuuuuugaaauaaaauagccugucuuucagaucucaaaggcucuuuucagagccaccaaaaaaaaaaaaaaaaaaaaaaaaaaaaaaaaaaaaaaaaaaaaaaaaaaaaaaaaaaaaaaaaaaaaaaaaaaaaaaaaaaaaaaaaaaaaaaaaaaaaa

SEQ ID NO: 30532 - RNA, 1767 nt, Artificial Sequence
  mRNA product Design a-2 (hSL-A100) comprising derived and/or modified sequence from LASV(Z0947-SLE-2011;Clade IV)__AIT17840__GPCmut6 (opt5)
aggagaguccgcucagccagguugcagaagcggcuuagcguguguccuaaucuucucucugcguguagguaggccugugccgcaaacaagcuuaccaugggccagaucgugaccuucuuucaagaggucccccacguuauugaagaggugaugaacaucgugcugauugcccucagcauccuggcuguccuuaaggggcuguacaauuucgccacaugcggacucgugggccugguuacguuucuucugcucugugggagauccugcaccauuucucuguauaaaggaguguacgaacugcagacacucgagcugaacauggaaacccuuaauauguguaugccucugagcugcacaaagaacaauucccaucacuauaucauggucggcaacgagaccgggcucgagcugacacuuaccaauacgucuaucauuaaccauaaauucuguaaucugagcgacgcgcacaagaaaaaccucuacgaucaugcucugauguccaucauuucuaccuuucaccugagcaucccgaauuucaaccaguaugaagccauguccugcgacuuuaauggaggcaagauuagcgugcaguacaaccucucucacuccuaugccggcgaugcugccaaucauugugggacaguugcuaacggagugcugcaaaccuucaugcggauggccuggggcgggagcuacaucgcgcuugacucuggacgcgauagaugggacugcauuaugacauccuaccaguaucugaucauccagaacaccacgugggaggaucacugucaguuuagccggcccucuccuauuggcuaccucgggcugcuuucccaacgcacaagagacaucuauauuagccggcgccugcucggaaccuucacauggacccuguccgauucugaaggcaaggacacccccggcggguacugccugacaagauggaugcucaucgaggccgagcugaaauguuuuggaaauacggcugucgccaagugcaacgaaaaacaugaugaggaguucugcgacaugcuucggcuguuugauuucuguaagcaggcuauucagcgccucaaagccccugcgcagaugagcauccaacugaucaauaaggccgugaacgcucuuauuaaugaccagcugaucaugaagaaccaccucagagacauuaugggcauccccuauugcaauuacuccaaauauugguaccugaaccacaccacaaccgggaagacaagccugccuaaauguuggcucgugucuaauggauccuaccugaacgaaacccauuucagcgaugacauugaacagcaagccgauaauaugaucacggagaugcuucagaaggaguauauggaacggcagggcaaaacaccgcuggggcucgucgaccuguuuguuuucucuaccagcuuuuaccugaucuccauuuuccuucaccucgugaagauccccacccaucgccacauugugggaaaaccuugccccaagccucauagacugaaccacaugggcaucuguucuugcggccuguauaagcagcccggggucccggugaaauggaagcggugaggacuagucccuguucccagagcccacuuuuuuuucuuuuuuugaaauaaaauagccugucuuucagaucucaaaggcucuuuucagagccaccaaaaaaaaaaaaaaaaaaaaaaaaaaaaaaaaaaaaaaaaaaaaaaaaaaaaaaaaaaaaaaaaaaaaaaaaaaaaaaaaaaaaaaaaaaaaaaaaaaaaa

SEQ ID NO: 30533 - RNA, 1743 nt, Artificial Sequence
  mRNA product Design a-2 (A100) comprising derived and/or modified sequence from LASV(Josiah;Clade IV)__NP_694870__GPCmut6 (opt1)
aggagaguccgcucagccagguugcagaagcggcuuagcguguguccuaaucuucucucugcguguagguaggccugugccgcaaacaagcuuaccaugggccagaucgugaccuucuuccaggaggucccccacgugaucgaggaggugaugaacaucguccugaucgcccucagcgugcuggccgugcugaaggggcucuacaacuucgcgaccugcggccuggucgggcuggugacguuccuccugcugugcggccgcuccugcaccaccagccucuacaaggggguguacgagcugcagacccuggagcucaacauggagacgcugaacaugugcaugccgcuguccugcaccaagaacaacagccaccacuacaucauggucggcaacgagaccggccucgagcugacgcugaccaacaccuccaucaucaaccacaaguucugcaaccucagcgacgcccacaagaagaaccuguacgaccacgcccugauguccaucaucagcaccuuccaccucuccauccccaacuucaaccaguacgaggccaugagcugcgacuucaacgggggcaagaucuccgugcaguacaaccugagccacuccuacgccggggacgcggccaaccacugcggcacgguggccaacgggguccugcagaccuucaugcggauggccuggggcggcagcuacaucgcgcucgacuccgggcgcggcaacugggacugcaucaugaccagcuaccaguaccugaucauccagaacaccacgugggaggaccacugccaguucucccggcccagccccaucggguaccugggccuccugucccagcgcacccgggacaucuacaucagccgccggcugcucggcaccuucaccuggacgcugagcgacuccgaggggaaggacaccccgggcggguacugccugacccgcuggaugcucaucgaggccgagcugaagugcuucggcaacaccgccguggccaagugcaacgagaagcacgacgaggaguucugcgacaugcugcggcuguucgacuucugcaagcaggccauccagcgccugaaggcgcccgcccagaugagcauccagcugaucaacaaggccgugaacgcccucaucaacgaccagcugaucaugaagaaccaccuccgggacaucauggggauccccuacugcaacuacuccaaguacugguaccucaaccacacgaccaccggccgcaccagccugcccaagugcuggcuggucuccaacggcagcuaccucaacgagacgcacuucuccgacgacaucgagcagcaggccgacaacaugaucaccgagaugcugcagaaggaguacauggagcggcaggggaagacgccccugggccucguggaccuguucguguucagcaccuccuucuaccugaucagcaucuuccugcaccucgucaagaucccgacccaccgccacaucguggggaaguccugccccaagccccaccggcugaaccacaugggcaucugcagcugcgggcuguacaagcagcccggcgugccggucaaguggaagcgcugaggacuagucccuguucccagagcccacuuuuuuuucuuuuuuugaaauaaaauagccugucuuucagaucuaaaaaaaaaaaaaaaaaaaaaaaaaaaaaaaaaaaaaaaaaaaaaaaaaaaaaaaaaaaaaaaaaaaaaaaaaaaaaaaaaaaaaaaaaaaaaaaaaaaa

SEQ ID NO: 30534 - RNA, 1740 nt, Artificial Sequence
  mRNA product Design a-2 (A100) comprising derived and/or modified sequence from LASV(LP;Clade I)__AAF86701__GPCmut6 (opt1)
aggagaguccgcucagccagguugcagaagcggcuuagcguguguccuaaucuucucucugcguguagguaggccugugccgcaaacaagcuuaccaugggccagaucaucaccuucuuccaggaggugccccacgucaucgaggaggugaugaacaucgugcugaucgcccucagccugcuggccauccucaaggggcuguacaacaucgcgaccugcggcaucaucgggcuggucgccuuccucuuccugugcggcaaguccugcagccugacgcucaagggcggguacgagcugcagacccuggagcucaacauggagacccugaacaugugcaugccgcuguccugcacgaagaacagcucccaccacuacauccgcgugggcaacgagaccgggcucgagcugacccugaccaacacgagcaucaucaaccacaaguucugcaaccucuccgacgcccacaagaagaaccuguacgaccacgcccugaugagcaucaucuccaccuuccaccucagcauccccaacuucaaccaguacgaggccauguccugcgacuucaacggcgggaagaucagcgugcaguacaaccugucccacagcuacgcgggcgacgccgccgagcacugcgggaccgucgccaacggcgugcugcagaccuucaugcggauggcguggggcgggcgcuacaucgcccucgacuccggcaaggggaacugggacugcaucaugacgagcuaccaguaccugaucauccagaacaccaccugggaggaccacugccaguucucccggcccagccccaucggcuaccugggccuccugucccagcgcacccgggacaucuacaucagccgccggcugcucgggacguucaccuggacccugagcgacuccgagggcaacgagacccccgggggcuacugccugacgcgcuggaugcucaucgaggccgagcugaagugcuucgggaacaccgccguggccaagugcaacgagaagcacgacgaggaguucugcgacaugcugcggcuguucgacuucugcaagcaggcgauccgccggcugaaggcccccgcccagaugagcauccagcugaucaacaaggccgucaacgcccucaucaacgaccagcugaucaugaagaaccaccuccgcgacaucaugggcauccccuacugcaacuacuccaaguacugguaccucaaccacaccagcuccggccggaccagccugcccaagugcuggcugaucuccaacgggagcuaccucaacgagacgcaguucuccgacgacaucgagcagcaggcggacaacaugaucaccgagaugcugcagaaggaguacaucgagcgccagggcaagaccccgcuggggcucguggacaucuucaucuucagcaccuccuucuaccugaucagcaucuuccugcaccugaucaagaucccgacgcaccggcacaucgugggcaagcccugccccaagccccaccgccucaaccacaugggggucugcuccugcggccuguacaagcacccgggcgugcccaccaaguggaagcggugaggacuagucccuguucccagagcccacuuuuuuuucuuuuuuugaaauaaaauagccugucuuucagaucuaaaaaaaaaaaaaaaaaaaaaaaaaaaaaaaaaaaaaaaaaaaaaaaaaaaaaaaaaaaaaaaaaaaaaaaaaaaaaaaaaaaaaaaaaaaaaaaaaaaa

SEQ ID NO: 30535 - RNA, 1740 nt, Artificial Sequence
  mRNA product Design a-2 (A100) comprising derived and/or modified sequence from LASV(803213;Clade II)__AAF86703__GPCmut6 (opt1)
aggagaguccgcucagccagguugcagaagcggcuuagcguguguccuaaucuucucucugcguguagguaggccugugccgcaaacaagcuuaccaugggccagaucaucaccuucuuccaggaggugccccacgucaucgaggaggugaugaacaucgugcugaucgcccucagccugcuggccauccucaaggggaucuacaacgucgcgaccugcggccuguucgggcugaucuccuuccuccugcugugcggccgcagcugcuccgugacguacaaggggguguacgagcuccagacccuggagcugaacauggccaaccucaacaugugcaugccgcugagcugcaccaagaacaacucccaccacuacaucauggucggcaacgagacgggccuggagcucacccugaccaacaccagcaucaucaaccacaaguucugcaaccuguccgacgcccacaagaagaaccucuacgaccacgcccugaugagcaucaucuccacguuccaccugagcauccccaacuucaaccaguacgaggccauguccugcgacuucaacgggggcaagaucagcgugcaguacaaccucucccacagcuucgcgguggacgccgccaaccacugcgggaccaucgccaacggcguccugcagaccuucaugcggauggcguggggcggguccuacaucgcccuggacagcggcaaggggaacugggacugcaucaugaccuccuaccaguaccucaucauccagaacacgaccugggaggaccacugccaguucagccgccccucccccaucggcuaccuggggcugcucagccagcggacccgcgacaucuacaucagccggcgccugcugggcaccuucacguggacccucuccgacagcgagggcaacgaggcccccgggggcuacugccugacccgguggaugcugaucgaggccgagcucaagugcuucgggaacaccgccguggcgaagugcaacgagaagcacgacgaggaguucugcgacaugcugcgccuguucgacuucugcaagcaggccaucaagcggcucaagacgcccgcccagauguccauccagcugaucaacaaggccgugaacgcccugaucaacgaccagcucaucaugaagaaccaccuccgcgacaucaugggcauccccuacugcaacuacagccgguacugguaccugaaccacaccgucaccgggaagaccucccugccccgcugcuggcuggugagcaacggcuccuaccugaacgagacgcacuucagcgacgacaucgagcagcaggcggacaacaugaucaccgagaugcuccagaaggaguacauggaccggcagggcaagaccccgcuggggcugguggaccucuucgucuucuccaccagcuucuaccugaucuccaucuuccugcaccuggugaagaucccgacgcaccgccacaucgugggcaagcccugccccaagccccaccggcucaaccacauggggaucugcagcugcggccuguacaagcacccggggguccccgugaaguggaagcgcugaggacuagucccuguucccagagcccacuuuuuuuucuuuuuuugaaauaaaauagccugucuuucagaucuaaaaaaaaaaaaaaaaaaaaaaaaaaaaaaaaaaaaaaaaaaaaaaaaaaaaaaaaaaaaaaaaaaaaaaaaaaaaaaaaaaaaaaaaaaaaaaaaaaaa

SEQ ID NO: 30536 - RNA, 1740 nt, Artificial Sequence
  mRNA product Design a-2 (A100) comprising derived and/or modified sequence from LASV(GA391;Clade III)__CAA36645__GPCmut6 (opt1)
aggagaguccgcucagccagguugcagaagcggcuuagcguguguccuaaucuucucucugcguguagguaggccugugccgcaaacaagcuuaccaugggccagaucgugaccuucuuccaggaggucccccacgugaucgaggaggugaugaacaucguccugaucgcccucagcauccuggccauccugaaggggcucuacaacguggcgaccugcggccugaucgggcuggugacguuccuccugcuguccggccgcagcugcucccucaucuacaaggggaccuacgagcugcagacccuggagcucaacauggagacccugaacaugugcaugccgcugagcugcaccaagaacaacucccaccacuacauccgggucggcaacgagaccggccucgagcugacccugacgaacaccagcauccucaaccacaaguucugcaaccuguccgacgcccacaagcgcaaccuguacgaccacagccucauguccaucaucagcaccuuccaccuguccauccccaacuucaaccaguacgaggccaugagcugcgacuucaacgggggcaagaucaccgugcaguacaaccugucccacagcuucgccguggacgccgcggggcacugcggcacgcucgccaacgggguccugcagaccuucaugcggauggccuggggcggcuccuacaucgcccuggacagcgggcgcggcaacugggacugcaucaugaccuccuaccaguaccucaucauccagaacaccacgugggacgaccacugccaguucagccggcccucccccaucggguaccugggccugcucagccagcgcacccgggacaucuacaucagccgccggcugcugggcaccuucaccuggacgcucuccgacagcgaggggaacgagaccccgggcggguacugccugacccgcuggaugcugaucgaggcggagcucaagugcuucggcaacaccgccguggccaagugcaacgagaagcacgacgaggaguucugcgacaugcugcggcuguucgacuucugcaagcaggccauccgccggcucaagacgcccgcccagauguccauccagcugaucaacaaggcggugaacgcccugaucaacgaccagcucaucaugaagaaccaccuccgcgacaucauggggauccccuacugcaacuacagccgguacugguaccugaaccacaccuccaccggcaagaccagccugccccgcugcuggcugaucuccaacggcagcuaccugaacgagacgaaguucuccgacgacaucgagcagcaggccgacaacaugaucaccgagaugcuccagaaggaguacaucgaccggcaggggaagacgccccugggccuggucgaccuguucguguucagcaccuccuucuaccucaucagcaucuuccugcaccuggugaagaucccgacccaccgccacaucgucgggaagcccugccccaagccccaccggcucaaccacaugggcaucugcuccugcgggcuguacaagcagccgggcgugcccgugcgcuggaagcggugaggacuagucccuguucccagagcccacuuuuuuuucuuuuuuugaaauaaaauagccugucuuucagaucuaaaaaaaaaaaaaaaaaaaaaaaaaaaaaaaaaaaaaaaaaaaaaaaaaaaaaaaaaaaaaaaaaaaaaaaaaaaaaaaaaaaaaaaaaaaaaaaaaaaa

SEQ ID NO: 30537 - RNA, 1743 nt, Artificial Sequence
  mRNA product Design a-2 (A100) comprising derived and/or modified sequence from LASV(AV;Clade V)__CCA30314__GPCmut6 (opt1)
aggagaguccgcucagccagguugcagaagcggcuuagcguguguccuaaucuucucucugcguguagguaggccugugccgcaaacaagcuuaccaugggccagaucgugaccuucuuccaggaggucccccacgugaucgaggaggugaugaacaucguccugaucgcccucagcauccuggccgugcugaaggggcucuacaacaucgcgaccugcggccugaucgggcugaucacguuccuccugcugugcggccgcuccugcagcuccaaccucuacaaggggguguacgagcugcagagccuggaccucaacauggagacccugaacaugugcaugccgcuguccugcaccaagaacaacagccaccacuacauccgggucggcaacgacacgggccucgagcugacccugaccaacaccuccauccucaaccacaaguucugcaaccugagcgacgcccacaagaaggaccuguacgaccacgcccucauguccaucaucagcacguuccaccuguccauccccaacuucaaccaguacgaggccaugagcugcgacuucaacgggggcaagaucuccgugcaguacaaccugagccacuccuacgccaucgacgcggccaaccacugcgggaccguggccaacggcauccuccagaccuucaugcgcauggccuggggcgggagcuacaucgcgcuggacuccggccgggggaacugggacugcaucaugaccagcuaccaguaccugaucauccagaacacgaccugggagaaccacugccaguucucccgccccagccccaucggcuaccucgggcugcugagccagcggacccgcgacaucuacaucucccggcgccuccugggcaccuucacguggacccugagcgacuccgagggcaacgccacccccgggggcuacugccucacccgguggaugcugaucgaggccgagcugaagugcuucgggaacacggccgucgccaagugcaacgagaagcacgacgaggaguucugcgacaugcuccgccuguucgacuucugcaagcaggcgaucagccggcugaagucccccgcccagaugagcauccagcucaucaacaaggccgugaacgcccugaucaacgaccagcugaucaugaagaaccaccuccgcgacaucaugggcauccccuacugcaacuacuccaaguacugguaccugaaccacaccaucaccgggaagaccagccugcccaagugcuggcucguguccaacggcagcuaccugaacgagacgcacuucuccgacgacaucgagcagcaggccgacaacaugaucaccgagaugcugcagaaggaguacauggagcggcagggcaagaccccgcucgggcuggucgaccuguucguguucagcaccuccuucuaccugaucagcaucuuccuccgccuggugaagaucccgacgcaccggcacaucgucggcaagcccugccccaagccccaccgccugaaccacauggggaucugcuccugcggccucuacaagcagccgggggugcccgugcgguggaagcgcugaggacuagucccuguucccagagcccacuuuuuuuucuuuuuuugaaauaaaauagccugucuuucagaucuaaaaaaaaaaaaaaaaaaaaaaaaaaaaaaaaaaaaaaaaaaaaaaaaaaaaaaaaaaaaaaaaaaaaaaaaaaaaaaaaaaaaaaaaaaaaaaaaaaaa

SEQ ID NO: 30538 - RNA, 1740 nt, Artificial Sequence
  mRNA product Design a-2 (A100) comprising derived and/or modified sequence from LASV(Togo/2016/7082;Clade VI)__AMR44577__GPCmut6 (opt1)
aggagaguccgcucagccagguugcagaagcggcuuagcguguguccuaaucuucucucugcguguagguaggccugugccgcaaacaagcuuaccaugggccagaucaucaccuucuuccaggaggugccccacgucaucgaggaggugaugaacaucgugcugaucgcccucagccugcuggccauccucaagggggucuacaacguggcgaccugcggcaucaucgggcuggugacguuccuguuccucugcggccgcuccugcagccugaucuacaagggguccuacgagcugcagacccucgagcugaacauggagacccugaacaugugcaugccgcucagcugcacgaagaacuccagccaccacuacauccgggucggcaacgagaccggccuggagcugacccucaccaacacguccaucaucaaccacaaguucugcaaccugagcgacgcccacaagcgcaaccuguacgaccacgcccucauguccauccugagcaccuuccaccuguccauccccaacuucaaccaguacgaggccaugagcugcgacuucaacgggggcaagaucuccgugcaguacaaccucagccacgccuacgcgguggacgccgccgagcacugcgggaccgucgccaacggcgugcugcagaccuucaugcggauggcguggggcggguccuacaucgcccuggacagcggccgcgggaacugggacugcaucaugacguccuaccaguaccucaucauccagaacaccaccugggaggaccacugccaguucagccggcccucccccaucggcuaccuggggcugcucagccagcgcacccgggacaucuacaucagccgccggcugcugggcacguucaccuggacccucuccgacagcgagggcaacgagacccccgggggcuacugccugacgcgcuggaugcugaucgaggccgagcucaagugcuucgggaacaccgccguggccaagugcaacgagaagcacgacgaggaguucugcgacaugcugcggcuguucgacuucugcaagcaggcgauccagcgccucaagucccccgcccagaugagcauccagcugaucaacaaggccgucaacgcccugaucaacgaccagcucaucaugaagaaccaccuccgggacaugaugggcauccccuacugcaacuacuccaaguacugguaccugaaccacaccagcuccgggcgcaccagccugcccaagugcuggcugguguccaacggcagcuaccugaacgagacgcacuucuccgacgacaucgagcagcaggccgacaacaugaucaccgagaugcuccagaaggaguacaucgaccggcagggcaagaccccgcuggggcugguggaccucuucgucuucagcaccuccuucuaccugaucagcaucuuccugcaccugaucaagaucccgacgcaccgccacaucgugggcaagcccugccccaagccccaccggcucaaccacauggggaucugcuccugcggccuguacaagcagccgggggugcccacccgcuggaagcggugaggacuagucccuguucccagagcccacuuuuuuuucuuuuuuugaaauaaaauagccugucuuucagaucuaaaaaaaaaaaaaaaaaaaaaaaaaaaaaaaaaaaaaaaaaaaaaaaaaaaaaaaaaaaaaaaaaaaaaaaaaaaaaaaaaaaaaaaaaaaaaaaaaaaa

SEQ ID NO: 30539 - RNA, 1740 nt, Artificial Sequence
  mRNA product Design a-2 (A100) comprising derived and/or modified sequence from LASV(KAK-428;Clade n.d. (VII))__ANH09740__GPCmut6 (opt1)
aggagaguccgcucagccagguugcagaagcggcuuagcguguguccuaaucuucucucugcguguagguaggccugugccgcaaacaagcuuaccaugggccagaucgugaccuucuuccaggaggucccccacgugaucgaggaggugaugaacaucguccugaucgcccucagccugcuggccauccucaaggggcuguacaacuucgcgaccugcggcgugaucgggcugaucacguuccuccugcugugcggccgcuccugcagcgccaccuacaaggggcaguacgagcuccagacccuggagcugaacauggagucccucaacaugugcaugccgcugagcugcacgaagaacaacucccaccacuacauccgggccggcaacaacaccggccuggagcucacccugaccaacacgagcaucaucucccacaaguucugcaaccugagcgacgcccacaagaagaaccucuacgaccacacccugauguccaucaucaccaccuuccaccugagcauccccaacuucaaccaguacgaggccauguccugcgacuucaacgggggcaagaucagcauccaguacaaccucucccacagcuacgcgggggacgccgcccagcacugcggcacgguggccaacgggguccugcagaccuucaugcgcauggcguggggcggcuccuaccuggcccucgacagcgggcggcgcggcugggacugcaucaucuccagcuaccaguaccugaucauccagaacaccaccugggacgaccacugccaguucucccggcccagccccaucggguaccugggcuucgugagccagaagacgcgcgacaucuacaucucccggcgccuccugggcaccuucaccuggacccugagcgacuccgaggggcacgacaugccgggcggguacugccucacgcgguggaugcugaucgaggccgaccugaagugcuucggcaacaccgccguggccaagugcaacgagaagcacgacgaggaguucugcgacauguggcgccucuucgacuucugcaagcaggcgauccagcggcugaaggcccccgcccagaugaacauccagcugaucaacaaggccgucaacgcccucaucaacgaccagcugaugaugaagaaccaccuccgcgacaucauggggauccccuacugcaacuacagcaaguucugguaccugaacaacaccaccacgggccggaccucccugccccgcugcuggcugaucagcaacggcuccuaccucaacgagacccacuucagcgacgacaucgagcagcaggcggacaacaugaucaccgagaugcugcagaaggaguacauggaccggcaggggaagacgccccugggccucguggaccuguucguguucuccaccagcuucuaccugaucaccaucuuccuccaccuggucaagaucccgacccaccgccacaucguggggaagcccugccccaagccccaccggcugaaccacaugggcaucugcuccugcgggcuguacaagcagccgggcgugcccguccgcuggaagcggugaggacuagucccuguucccagagcccacuuuuuuuucuuuuuuugaaauaaaauagccugucuuucagaucuaaaaaaaaaaaaaaaaaaaaaaaaaaaaaaaaaaaaaaaaaaaaaaaaaaaaaaaaaaaaaaaaaaaaaaaaaaaaaaaaaaaaaaaaaaaaaaaaaaaa

SEQ ID NO: 30540 - RNA, 1740 nt, Artificial Sequence; identical to SEQ ID NO: 30534
  mRNA product Design a-2 (A100) comprising derived and/or modified sequence from LASV(Pinneo-NIG-1969;Clade I)__AIT17836__GPCmut6 (opt1)

SEQ ID NO: 30541 - RNA, 1740 nt, Artificial Sequence
  mRNA product Design a-2 (A100) comprising derived and/or modified sequence from LASV(ISTH0009-NIG-2011;Clade II)__AIT17404__GPCmut6 (opt1)
aggagaguccgcucagccagguugcagaagcggcuuagcguguguccuaaucuucucucugcguguagguaggccugugccgcaaacaagcuuaccaugggccagaucaucaccuucuuccaggaggugccccacgucaucgaggaggugaugaacaucgugcugaucgcccucagccugcuggccauccucaaggggaucuacaacgucgcgaccugcggccuguucgggcugguguccuuccuccugcugugcggccgcagcugcuccacgaccuacaaggggguguacgagcuccagacccuggagcuggacauggccagccucaacaugugcaugccgcuguccugcacgaagaacaacagccaccacuacaucauggucggcaacgagaccggccuggagcucacccugaccaacacguccaucaucaaccacaaguucugcaaccugagcgacgcccacaagaagaaccucuacgaccacgcccugauguccaucaucagcaccuuccaccuguccauccccaacuucaaccaguacgaggccaugagcugcgacuucaacgggggcaagaucuccgugcaguacaaccucagccacgcguacgccguggacgccgccaaccacugcgggaccaucgcgaacggcguccugcagaccuucaugcggauggccuggggcggguccuacaucgcccuggacagcggcaagggguccugggacugcaucaugacgagcuaccaguaccucaucauccagaacaccaccugggaggaccacugccaguucucccgccccagccccaucggcuaccuggggcugcucagccagcggacccgcgacaucuacaucucccggcgccugcugggcacguucaccuggacccucagcgacuccgagggcaacgagacccccgggggcuacugccugacgcgguggaugcugaucgaggccgagcucaagugcuucgggaacaccgccguggcgaagugcaacgagaagcacgacgaggaguucugcgacaugcugcgccuguucgacuucugcaagcaggccauccggcgccucaagacccccgcccagaugagcauccagcugaucaacaaggccgugaacgcccugaucaacgaccagcucaucaugaagaaccaccuccgggacaucaugggcaucccguacugcaacuacuccaaguacugguaccugaaccacaccgucacggggaagaccagccugccccgcugcuggcugguguccaacggcagcuaccugaacgagacccacuucuccgacgacaucgagcagcaggcggacaacaugaucaccgagcuccugcagaaggaguacauggaccggcagggcaagacgccccuggggcucguggaccuguucgucuucagcaccuccuucuaccugaucagcaucuuccugcaccucaucaagaucccgacccaccgccacaucaccggcaagcccugccccaagccccaccggcugaaccacauggggaucugcuccugcggccuguacaagcacccgggggugcccgugaaguggaagcgcugaggacuagucccuguucccagagcccacuuuuuuuucuuuuuuugaaauaaaauagccugucuuucagaucuaaaaaaaaaaaaaaaaaaaaaaaaaaaaaaaaaaaaaaaaaaaaaaaaaaaaaaaaaaaaaaaaaaaaaaaaaaaaaaaaaaaaaaaaaaaaaaaaaaaa

SEQ ID NO: 30542 - RNA, 1740 nt, Artificial Sequence
  mRNA product Design a-2 (A100) comprising derived and/or modified sequence from LASV(ISTH2010-NIG-2012;Clade II)__AIT17482__GPCmut6 (opt1)
aggagaguccgcucagccagguugcagaagcggcuuagcguguguccuaaucuucucucugcguguagguaggccugugccgcaaacaagcuuaccaugggccagaucaucaccuucuuccaggaggugccccacgucaucgaggaggugaugaacaucgugcugaucgcccucagccugcuggccauccucaaggggaucuacaacgucgcgaccugcggccuguucgggcugguguccuuccuccugcugugcggccgcagcugcuccacgaccuacaaggggguguacgagcuccagacccuggagcuggacauggccagccucaacaugugcaugccgcuguccugcacgaagaacaacagccaccacuacaucauggucggcaacgagaccggccuggagcucacccugaccaacacguccaucaucaaccacaaguucugcaaccugagcgacgcccacaagaagaaccucuacgaccacgcccugauguccaucaucagcaccuuccaccuguccauccccaacuucaaccaguacgaggccaugagcugcgacuucaacgggggcaagaucuccgugcaguacaaccucagccacgcguacgccguggacgccgccaaccacugcgggaccaucgcgaacggcguccugcagaccuucaugcggauggccuggggcggguccuacaucgcccuggacagcggcaagggguccugggacugcaucaugacgagcuaccaguaccucaucauccagaacaucaccugggaggaccacugccaguucucccgccccagccccaucggcuaccuggggcugcucagccagcggacccgcgacaucuacaucucccggcgccugcugggcaccuucacguggacccucagcgacuccgagggcaacgagacccccgggggcuacugccugacccgguggaugcugaucgaggccgagcucaagugcuucgggaacacggccguggcgaagugcaacgagaagcacgacgaggaguucugcgacaugcugcgccuguucgacuucugcaagcaggccauccggcgccucaagacccccgcccagaugagcauccagcugaucaacaaggccgugaacgcccugaucaacgaccagcucaucaugaagaaccaccuccgggacaucaugggcauccccuacugcaacuacuccaaguacugguaccugaaccacaccgucaccgggaagacgagccugccccgcugcuggcugguguccaacggcagcuaccugaacgagacccacuucuccgacgacaucgagcagcaggcggacaacaugaucaccgagcuccugcagaaggaguacaucgaccggcagggcaagaccccgcuggggcucguggaccuguucgucuucagcacguccuucuaccugaucagcaucuuccugcaccucgugaagaucccgacccaccgccacguggucggcaagcccugccccaagccccaccggcugaaccacauggggaucugcuccugcggccuguacaagcacccgggggugcccgugaaguggaagcgcugaggacuagucccuguucccagagcccacuuuuuuuucuuuuuuugaaauaaaauagccugucuuucagaucuaaaaaaaaaaaaaaaaaaaaaaaaaaaaaaaaaaaaaaaaaaaaaaaaaaaaaaaaaaaaaaaaaaaaaaaaaaaaaaaaaaaaaaaaaaaaaaaaaaaa

SEQ ID NO: 30543 - RNA, 1740 nt, Artificial Sequence
  mRNA product Design a-2 (A100) comprising derived and/or modified sequence from LASV(Lassa virus/H.sapiens-wt/NGA/2015/ISTH_0543;Clade II)__AVO03639__GPCmut6 (opt1)
aggagaguccgcucagccagguugcagaagcggcuuagcguguguccuaaucuucucucugcguguagguaggccugugccgcaaacaagcuuaccaugggccagaucaucaccuucuuccaggaggugccccacgucaucgaggaggugaugaacaucgugcugaucgcccucagccugcuggccauccucaaggggaucuacaacgucgcgaccugcggccuguucgggcugguguccuuccuccugcugugcggccgcagcugcuccacgaccuacaaggggguguacgagcuccagacccuggagcuggacauggccaaccucaacaugugcaugccgcugagcugcacgaagaacaacucccaccacuacaucauggucggcaacgagaccggccuggagcucacccugaccaacacgagcaucaucaaccacaaguucugcaaccuguccgacgcccacaagaagaaccucuacgaccacgcccugaugagcaucaucuccaccuuccaccugagcauccccaacuucaaccaguacgaggccauguccugcgacuucaacgggggcaagaucagcgugcaguacaaccucucccacaccuacgcgguggacgccgccaaccacugcgggaccaucgccaacggcguccugcagacguucaugcggauggcguggggcgggagcuacaucgcccuggacuccggcaaggggagcugggacugcaucaugaccuccuaccaguaccucgugauccagaacaccaccugggaggaccacugccaguucagccgccccucccccaucggcuaccuggggcugcucagccagcggacgcgcgacaucuacaucagccggcgccugcugggcaccuucaccuggacccucuccgacagcgagggcaacgagacgcccgggggcuacugccugacccgguggaugcugaucgaggccgagcucaagugcuucgggaacaccgccguggccaagugcaacgagaagcacgacgaggaguucugcgacaugcugcgccuguucgacuucugcaagcaggcgauccggcgccucaagacccccgcccagauguccauccagcugaucaacaaggccgucaacgcccugaucaacgaccagcucaucaugaagaaccaccuccgggacaucaugggcauccccuacugcaacuacagcaaguacugguaccugaaccacacggugaccgggaagaccucccugccccgcugcuggcuggugagcaacggcuccuaccugaacgagacccacuucagcgacgacaucgagcagcaggccgacaacaugaucacggagcuccugcagaaggaguacaucgaccggcagggcaagaccccgcuggggcucgucgaccuguucguguucuccaccagcuucuaccugaucuccaucuuccugcaccucgugaagaucccgacccaccgccacaucacgggcaagcccugccccaagccccaccggcugaaccacauggggaucugcagcugcggccuguacaagcacccggggguccccgugaaguggaagcgcugaggacuagucccuguucccagagcccacuuuuuuuucuuuuuuugaaauaaaauagccugucuuucagaucuaaaaaaaaaaaaaaaaaaaaaaaaaaaaaaaaaaaaaaaaaaaaaaaaaaaaaaaaaaaaaaaaaaaaaaaaaaaaaaaaaaaaaaaaaaaaaaaaaaaa

SEQ ID NO: 30544 - RNA, 1740 nt, Artificial Sequence
  mRNA product Design a-2 (A100) comprising derived and/or modified sequence from LASV(Lassa virus/H.sapiens-wt/NGA/2016/ISTH_0009;Clade II)__AVO03571__GPCmut6 (opt1)
aggagaguccgcucagccagguugcagaagcggcuuagcguguguccuaaucuucucucugcguguagguaggccugugccgcaaacaagcuuaccaugggccagaucaucaccuucuuccaggaggugccccacgucaucgaggaggugaugaacaucgugcugaucgcccucagccugcuggccauccucaaggggaucuacaacgucgcgaccugcggccugcuggggcucguguccuuccugcugcucugcggccgcagcugcuccacgaccuacaaggggguguacgagcugcagacccuggagcucgacauggccagccugaacaugugcaugccgcuguccugcacgaagaacaacagccaccacuacaucauggucggcaacgagaccggccucgagcugacccugaccaacacguccaucaucaaccacaaguucugcaaccucagcgacgcccacaagaagaaccuguacgaccacgcccugauguccaucaucagcaccuuccaccucuccauccccaacuucaaccaguacgaggccaugagcugcgacuucaacgggggccggaucuccgugcaguacaaccugagccacuccuacgcgguggacgccgccaaccacugcgggaccaucgccaacggcguccugcagaccuucaugcgcauggcguggggcgggagcuacaucgcccucgacuccggcaaggggagcugggacugcaucaugacguccuaccaguaccugaucauccagaacaccaccugggaggaccacugccaguucagccggcccagccccaucggcuaccuggggcuccugucccagcgcacccgggacaucuacaucagccgccggcugcucggcacguucaccuggacccuguccgacagcgagggcaacgagacccccgggggcuacugccugacgcgcuggaugcucaucgaggccgagcugaagugcuucgggaacaccgccguggccaagugcaacgagaagcacgacgaggaguucugcgacaugcugcggcuguucgacuucugcaagcaggcgauccgccggcugaagacccccgcccagauguccauccagcugaucaacaaggccgugaacgcccucaucaacgaccagcugaucaugaagaaccaccuccgcgacaucaugggcaucccguacugcaacuacagcaaguacugguaccucaaccacaccgucacggggaagaccucccugccccggugcuggcuggugagcaacggcuccuaccucaacgagacccacuucagcgacgacaucgagcagcaggccgacaacaugaucaccgagcugcugcagaaggaguacaucgaccgccagggcaagacgccccucgggcugguggaccuguucgucuucuccaccagcuucuaccugaucuccaucuuccuccaccuggugaagaucccgacccaccggcacaucaccggcaagcccugccccaagccccaccgccugaaccacauggggaucugcagcugcggccucuacaaccacccgggggugcccgucaaguggaagcggugaggacuagucccuguucccagagcccacuuuuuuuucuuuuuuugaaauaaaauagccugucuuucagaucuaaaaaaaaaaaaaaaaaaaaaaaaaaaaaaaaaaaaaaaaaaaaaaaaaaaaaaaaaaaaaaaaaaaaaaaaaaaaaaaaaaaaaaaaaaaaaaaaaaaa

SEQ ID NO: 30545 - RNA, 1740 nt, Artificial Sequence
  mRNA product Design a-2 (A100) comprising derived and/or modified sequence from LASV(Lassa virus/H.sapiens-wt/NGA/2016/ISTH_0017;Clade II)__AVO03567__GPCmut6 (opt1)
aggagaguccgcucagccagguugcagaagcggcuuagcguguguccuaaucuucucucugcguguagguaggccugugccgcaaacaagcuuaccaugggccagaucaucaccuucuuccaggaggugccccacgucaucgaggaggugaugaacaucgugcugaucgcccucagccugcuggccauccucaaggggaucuacaacgucgcgaccugcggccuguucgggcugguguccuuccuccugcugugcggccgcagcugcuccacgaccuacaaggggguguacgagcuccagacccuggagcuggacauggccagccucaacaugugcaugccgcuguccugcacgaagaacaacagccaccacuacaucauggucggcaacgagaccggccuggagcucacccugaccaacacguccaucaucaaccacaaguucugcaaccugagcgacgcccacaagaagaaccucuacgaccacgcccugauguccaucaucagcaccuuccaccuguccauccccaacuucaaccaguacgaggccaugagcugcgacuucaacgggggcaagaucuccgugcaguacaaccucagccacaccuacgcgaucgacgccgccaaccacugcgggaccaucgccaacggcgugcugcagacguucaugcggauggcguggggcggguccuacaucgcccuggacagcggcaagggguccugggacugcaucaugaccagcuaccaguaccucaucauccagaacaccaccugggaggaccacugccaguucucccgccccagccccaucggcuaccuggggcugcucagccagcggacgcgcgacaucuacaucucccggcgccugcugggcaccuucaccuggacccucagcgacuccgagggcaacgagacgcccgggggcuacugccugacccgguggaugcugaucgaggccgagcucaagugcuucgggaacaccgccgucgccaagugcaacgagaagcacgacgaggaguucugcgacaugcugcgccuguucgacuucugcaagcaggcgauccggcgccucaagacccccgcccagaugagcauccagcugaucaacaaggccgugaacgcccugaucaacgaccagcucaucaugaagaaccaccuccgggacaucaugggcauccccuacugcaacuacuccaaguacugguaccugaaccacacggugaccgggaagaccagccugccccgcugcuggcuggucuccaacggcagcuaccugaacgagacccacuucuccgacgacaucgagcagcaggccgacaacaugaucacggagcuccugcagaaggaguacauggaccggcagggcaagaccccgcuggggcucguggaccuguucguguucagcaccuccuucuaccugaucagcaucuuccugcaccucguccgcaucccgacccaccggcacgugaucggcaagcccugccccaagccccaccgccugaaccacauggggaucugcuccugcggccuguacaagcacccgggggugcccgucaaguggaagcggugaggacuagucccuguucccagagcccacuuuuuuuucuuuuuuugaaauaaaauagccugucuuucagaucuaaaaaaaaaaaaaaaaaaaaaaaaaaaaaaaaaaaaaaaaaaaaaaaaaaaaaaaaaaaaaaaaaaaaaaaaaaaaaaaaaaaaaaaaaaaaaaaaaaaa

SEQ ID NO: 30546 - RNA, 1740 nt, Artificial Sequence
  mRNA product Design a-2 (A100) comprising derived and/or modified sequence from LASV(Lassa virus/H.sapiens-wt/NGA/2018/ISTH_0959;Clade II)__AVV65099__GPCmut6 (opt1)
aggagaguccgcucagccagguugcagaagcggcuuagcguguguccuaaucuucucucugcguguagguaggccugugccgcaaacaagcuuaccaugggccagaucaucaccuucuuccaggaggugccccacgucaucgaggaggugaugaacaucgugcugaucgcccucagccugcuggccauccucaaggggaucuacaacgucgugaccugcggccuguucgggcugguguccuuccuccugcugugcggccgcagcugcuccacgaccuacaagggggucuacgagcuccagacccuggagcuggacauggcgagccucaacaugugcaugccgcuguccugcacgaagaacaacagccaccacuacaucauggugggcaacgagaccggccuggagcucacccugaccaacacguccaucaucaaccacaaguucugcaaccugagcgacgcccacaagaagaaccucuacgaccacgcccugauguccaucaucagcaccuuccaccuguccauccccaacuucaaccaguacgaggccaugagcugcgacuucaacgggggcaagaucuccgugcaguacaaccucagccacgccuacgcgaucgacgccgccaaccacugcgggaccaucgccaacggcguccugcagaccuucaugcggauggcguggggcggguccuacaucgcccuggacagcggcaagggguccugggacugcaucaugacgagcuaccaguaccucaucauccagaacaccaccugggaggaccacugccaguucucccgccccagccccaucggcuaccuggggcugcucagccagcggacccgcgacaucuacaucucccggcgccugcugggcacguucaccuggacccucagcgacuccgagggcaacgagacccccgggggcuacugccugacgcgguggaugcugaucgaggccgagcucaagugcuucgggaacaccgccguggccaagugcaacgagaagcacgacgaggaguucugcgacaugcugcgccuguucgacuucugcaagcaggcgauccggcgccucaagacccccgcccagaugagcauccagcugaucaacaaggccgugaacgcccugaucaacgaccagcucaucaugaagaaccaccuccgggacaucaugggcaucccguacugcaacuacuccaaguacugguaccugaaccacaccgucacggggaagaccagccugccccgcugcuggcugguguccaacggcagcuaccugaacgagacccacuucuccgacgacaucgagcagcaggccgacaacaugaucaccgagcuccugcagaaggaguacaucgaccggcagggcaagacgccccuggggcucguggaccuguucgucuucagcaccuccuucuaccugaucagcaucuuccugcaccucgugaagaucccgacccaccgccacgugaucggcaagcccugccccaagccccaccggcugaaccacauggggaucugcuccugcggccuguacaagcacccggggguccccgugaaguggaagcgcugaggacuagucccuguucccagagcccacuuuuuuuucuuuuuuugaaauaaaauagccugucuuucagaucuaaaaaaaaaaaaaaaaaaaaaaaaaaaaaaaaaaaaaaaaaaaaaaaaaaaaaaaaaaaaaaaaaaaaaaaaaaaaaaaaaaaaaaaaaaaaaaaaaaaa

SEQ ID NO: 30547 - RNA, 1740 nt, Artificial Sequence
  mRNA product Design a-2 (A100) comprising derived and/or modified sequence from LASV(LASV003-NIG-2008;Clade II)__AIT17580__GPCmut6 (opt1)
aggagaguccgcucagccagguugcagaagcggcuuagcguguguccuaaucuucucucugcguguagguaggccugugccgcaaacaagcuuaccaugggccagaucaucaccuucuuccaggaggugccccacgucaucgaggaggugaugaacaucgugcugaucgcccucagccugcuggccauccucaaggggaucuacaacgucgcgaccugcggccuguucgggcugguguccuuccuccugcugugcggccgcagcugcuccacgaccuacaaggggguguacgagcuccagacccuggagcuggacauggccagccucaacaugugcaugccgcuguccugcacgaagaacaacagccaccacuacaucauggucggcaacgagaccggccuggagcucacccugaccaacacguccaucaucaaccacaaguucugcaaccugagcgacgcccacaagaagaaccucuacgaccacgcccugauguccaucaucagcaccuuccaccuguccauccccaacuucaaccaguacgaggccaugagcugcgacuucaacgggggcaagaucuccgugcaguacaaccucagccacaccuacgcgguggacgccgccaaccacugcgggaccaucgccaacggcguccugcagacguucaugcggauggcguggggcggguccuacaucgcccuggacagcggcaagggguccugggacugcaucaugaccagcuaccaguaccucaucauccagaacaccaccugggaggaccacugccaguucucccgccccagccccaucggcuaccuggggcugcucagccagcggacgcgcgacaucuacaucucccggcgccugcugggcaccuucaccuggacccucagcgacuccgagagcaacgagacgccgggcggguacugccugacccgguggaugcugaucgaggccgagcucaagugcuucggcaacaccgccguggccaagugcaacgagaagcacgacgaggaguucugcgacaugcugcgccuguucgacuucugcaagcaggcgauccggcgccucaaggcccccgcccagauguccauccagcugaucaacaaggccgugaacgcccugaucaacgaccagcucaucaugaagaaccaccuccgggacaucauggggauccccuacugcaacuacagcaaguacugguaccugaaccacaccgucacgggccgcaccucccugccccggugcuggcuggugagcaacggguccuaccugaacgagacccacuucagcgacgacaucgagcagcaggcggacaacaugaucaccgagcuccugcagaaggaguacauggaccgccagggcaagacgccccugggccucguggaccuguucgucuucuccaccagcuucuaccugaucuccaucuuccugcaccucgugaagaucccgacccaccggcacgugaucgggaagcccugccccaagccccaccgccugaaccacaugggcaucugcagcugcgggcuguacaagcacccgggcguccccgugaaguggaagcggugaggacuagucccuguucccagagcccacuuuuuuuucuuuuuuugaaauaaaauagccugucuuucagaucuaaaaaaaaaaaaaaaaaaaaaaaaaaaaaaaaaaaaaaaaaaaaaaaaaaaaaaaaaaaaaaaaaaaaaaaaaaaaaaaaaaaaaaaaaaaaaaaaaaaa

SEQ ID NO: 30548 - RNA, 1740 nt, Artificial Sequence
  mRNA product Design a-2 (A100) comprising derived and/or modified sequence from LASV(LASV035-NIG-2009;Clade II)__AIT17588__GPCmut6 (opt1)
aggagaguccgcucagccagguugcagaagcggcuuagcguguguccuaaucuucucucugcguguagguaggccugugccgcaaacaagcuuaccaugggccagaucaucaccuucuuccaggaggugccccacgucaucgaggaggugaugaacaucgugcugaucgcccucagccugcuggccauccucaaggggaucuacaacgucgcgaccugcggccuguucgggcugguguccuuccuccugcugugcggccgcagcugcuccacgaccuacaaggggguguacgagcuccagacccuggagcuggacauggccagccucaacaugugcaugccgcuguccugcacgaagaacaacagccaccacuacaucauggucggcaacgagaccggccuggagcucacccugaccaacacguccaucaucaaccacaaguucugcaaccugagcgacgcccacaagaagaaccucuacgaccacgcccugauguccaucaucagcaccuuccaccuguccauccccaacuucaaccaguacgaggccaugagcugcgacuucaacgggggcaagaucuccgugcaguacaaccucagccacgcguacgccguggacgccgccaaccacugcgggaccaucgcgaacggcguccugcagaccuucaugcggauggccuggggcggguccuacaucgcccuggacagcggcaagggguccugggacugcaucaugacgagcuaccaguaccucaucauccagaacaccaccugggaggaccacugccaguucucccgccccagccccaucggcuaccuggggcugcucagccagcggacccgcgacaucuacaucucccggcgccugcugggcacguucaccuggacccucagcgacuccgagggcaacgagacccccgggggcuacugccugacgcgguggaugcugaucgaggccgagcucaagugcuucgggaacaccgccguggcgaagugcaacgagaagcacgacgaggaguucugcgacaugcugcgccuguucgacuucugcaagcaggccauccggcgccucaaggcccccgcccagaugagcauccagcugaucaacaaggccgugaacgcgcugaucaacgaccagcucaucaugaagaaccaccuccgggacaucaugggcauccccuacugcaacuacuccaaguacugguaccugaaccacaccgucaccgggaagacgagccugccccgcugcuggcugguguccaacggcagcuaccugaacgagacccacuucuccgacgacaucgagcagcaggccgacaacaugaucaccgagcuccugcagaaggaguacaucgaccggcagggcaagaccccgcuggggcucguggaccuguucgucuucagcacguccuucuaccugaucagcaucuuccugcaccucgugaagaucccgacccaccgccacgugaucggcaagcccugccccaagccccaccggcugaaccacauggggaucugcuccugcggccuguacaagcacccggggguccccgugaaguggaagcgcugaggacuagucccuguucccagagcccacuuuuuuuucuuuuuuugaaauaaaauagccugucuuucagaucuaaaaaaaaaaaaaaaaaaaaaaaaaaaaaaaaaaaaaaaaaaaaaaaaaaaaaaaaaaaaaaaaaaaaaaaaaaaaaaaaaaaaaaaaaaaaaaaaaaaa

SEQ ID NO: 30549 - RNA, 1740 nt, Artificial Sequence
  mRNA product Design a-2 (A100) comprising derived and/or modified sequence from LASV(LASV1000-NIG-2009;Clade II)__AIT17782__GPCmut6 (opt1)
aggagaguccgcucagccagguugcagaagcggcuuagcguguguccuaaucuucucucugcguguagguaggccugugccgcaaacaagcuuaccaugggccagaucaucaccuucuuccaggaggugccccacgucaucgaggaggugaugaacaucgugcugaucgcccucagccugcuggccauccucaaggggaucuacaacgucgcgaccugcggccuguucgggcugguguccuuccuccugcugugcggccgcagcugcuccacgaccuacaaggggguguacgagcuccagacccuggagcuggacauggccagccucaacaugugcaugccgcuguccugcacgaagaacaacagccaccacuacaucauggucggcaacgagaccggccuggagcucacccugaccaacacguccaucaucaaccacaaguucugcaaccugagcgacgcccacaagaagaaccucuacgaccacgcccugauguccaucaucagcaccuuccaccuguccauccccaacuucaaccaguacgaggccaugagcugcgacuucaacgggggcaagaucuccgugcaguacaaccucagccacaccuacgcgguggacgccgccaaccacugcgggaccaucgccaacggcguccugcagacguucaugcggauggcguggggcggguccuacaucgcccuggacagcggcaagggguccugggacugcaucaugaccagcuaccaguaccucaucauccagaacaccaccugggaggaccacugccaguucucccgccccagccccaucggcuaccuggggcugcucagccagcggacgcgcgacaucuacaucucccggcgccugcugggcaccuucaccuggacccucagcgacuccgagggcaacgagacgcccgggggcuacugccugacccgguggaugcugaucgaggccgagcucaagugcuucgggaacaccgccguggccaagugcaacgagaagcacgacgaggaguucugcgacaugcugcgccuguucgacuucugcaagcaggcgaucaagcggcucaagacccccgcccagaugagcauccagcugaucaacaaggccgugaacgcccugaucaacgaccagcucaucaugaagaaccaccuccgcgacaucaugggcauccccuacugcaacuacuccaaguacugguaccugaaccacacggucaccgggaagaccagccugccccggugcuggcugguguccaacggcagcuaccugaacgagacccacuucuccgacgacaucgagcagcaggccgacaacaugaucacggagcuccugcagaaggaguacaucgaccgccagggcaagaccccgcuggggcucguggaccuguucgucuucagcaccuccuucuaccugaucagcaucuuccugcaccucgugaagaucccgacccaccggcacguggucggcaagcccugccccaagccccaccgccugaaccacauggggaucugcuccugcggccuguacaagcacccgggggugcccgugaaguggaagcggugaggacuagucccuguucccagagcccacuuuuuuuucuuuuuuugaaauaaaauagccugucuuucagaucuaaaaaaaaaaaaaaaaaaaaaaaaaaaaaaaaaaaaaaaaaaaaaaaaaaaaaaaaaaaaaaaaaaaaaaaaaaaaaaaaaaaaaaaaaaaaaaaaaaaa

SEQ ID NO: 30550 - RNA, 1740 nt, Artificial Sequence
  mRNA product Design a-2 (A100) comprising derived and/or modified sequence from LASV(LASV221-NIG-2010;Clade II)__AIT17624__GPCmut6 (opt1)
aggagaguccgcucagccagguugcagaagcggcuuagcguguguccuaaucuucucucugcguguagguaggccugugccgcaaacaagcuuaccaugggccagaucaucaccuucuuccaggaggugccccacgucaucgaggaggugaugaacaucgugcugaucgcccucagccugcuggccauccucaaggggaucuacaacgucgcgaccugcggccuguucgggcugguguccuuccuccugcugugcggccgcagcugcuccacgaccuacaaggggguguacgagcuccagacccuggagcuggacauggccagccucaacaugugcaugccgcuguccugcacgaagaacaacagccaccacuacaucauggucggcaacgagaccggccuggagcucacccugaccaacacguccaucaucaaccacaaguucugcaaccugagcgacgcccacaagaagaaccucuacgaccacgcccugauguccaucaucagcaccuuccaccuguccauccccaacuucaaccaguacgaggccaugagcugcgacuucaacgggggcaagaucuccgugcaguacaaccucagccacaccuacgcgaucgacgccgccaaccacugcgggaccaucgccaacggcgugcugcagacguucaugcggauggcguggggcggguccuacaucgcccuggacagcggcaagggguccugggacugcaucaugaccagcuaccaguaccucaucauccagaacaccaccugggaggaccacugccaguucucccgccccagccccaucggcuaccuggggcugcucagccagcggacgcgcgacaucuacaucucccggcgccugcugggcaccuucaccuggacccucagcgacuccgagggcaacgagacgcccgggggcuacugccugacccgguggaugcugaucgaggccgagcucaagugcuucgggaacaccgccgucgccaagugcaacgagaagcacgacgaggaguucugcgacaugcugcgccuguucgacuucugcaagcaggcgauccggcgccucaagacccccgcccagaugagcauccagcugaucaacaaggccgugaacgcccugaucaacgaccagcucaucaugaagaaccaccuccgggacaucaugggcauccccuacugcaacuacuccaaguacugguaccugaaccacacggugaccgggaagaccagccugccccgcugcuggcuggucuccaacggcagcuaccugaacgagacccacuucuccgacgacaucgagcagcaggccgacaacaugaucacggagaugcuccagaaggaguacauggaccggcagggcaagaccccgcuggggcugguggaccucuucguguucagcaccuccuucuaccugaucagcaucuuccugcaccuggucaagaucccgacccaccgccacgugaucggcaagcccugccccaagccccaccggcucaaccacauggggaucugcuccugcggccuguacaagcacccgggggugcccgucaaguggaagcgcugaggacuagucccuguucccagagcccacuuuuuuuucuuuuuuugaaauaaaauagccugucuuucagaucuaaaaaaaaaaaaaaaaaaaaaaaaaaaaaaaaaaaaaaaaaaaaaaaaaaaaaaaaaaaaaaaaaaaaaaaaaaaaaaaaaaaaaaaaaaaaaaaaaaaa

SEQ ID NO: 30551 - RNA, 1740 nt, Artificial Sequence
  mRNA product Design a-2 (A100) comprising derived and/or modified sequence from LASV(LASV237-NIG-2010;Clade II)__AIT17638__GPCmut6 (opt1)
aggagaguccgcucagccagguugcagaagcggcuuagcguguguccuaaucuucucucugcguguagguaggccugugccgcaaacaagcuuaccaugggccagaucaucaccuucuuccaggaggugccccacgucaucgaggaggugaugaacaucgugcugaucgcccucagccugcuggccauccucaaggggaucuacaacgucgcgaccugcggccuguucgggcugguguccuuccuccugcugugcggccgcagcugcuccacgaccuacaaggggguguacgagcuccagacccuggagcuggacauggccagccucaacaugugcaugccgcuguccugcacgaagaacaacagccaccacuacaucauggucggcaacgagaccggccuggagcucacccugaccaacacguccaucaucaaccacaaguucugcaaccugagcgacgcccacaagaaggaccucuacgaccacgcccugauguccaucaucagcaccuuccaccuguccauccccaacuucaaccaguacgaggccaugagcugcgacuucaacgggggcaagaucuccgugcaguacaaccucagccacaccuacgcgguggacgccgccaaccacugcgggaccaucgccaacggcguccugcagacguucaugcggauggcguggggcggguccuacaucgcccuggacagcggcaagggguccugggacugcaucaugaccagcuaccaguaccucaucauccagaacaccaccugggaggaccacugccaguucucccgccccagccccaucggcuaccuggggcugcucagccagcggacgcgcgacaucuacaucucccggcgccugcugggcaccuucaccuggacccucagcgacuccgagggcaacgagacgcccgggggcuacugccugacccgguggaugcugaucgaggccgagcucaagugcuucgggaacaccgccguggccaagugcaacgagaagcacgacgaggaguucugcgacaugcugcgccuguucgacuucugcaagcaggcgauccggcgccucaagacccccgcccagaugagcauccagcugaucaacaaggccgugaacgcccugaucaacgaccagcucaucaugaagaaccaccuccgggacaucaugggcauccccuacugcaacuacuccaaguacugguaccugaaccacacggucaccgggaagaccagccugccccgcugcuggcugguguccaacggcagcuaccugaacgagacccacuucuccgacgacaucgagcagcaggccgacaacaugaucacggagcuccugcagaaggaguacauggaccggcagggcaagaccccgcuggggcucguggaccuguucgucuucagcaccuccuucuaccugaucagcaucuuccugcaccucaucaagaucccgacccaccgccacaucacgggcaagcccugccccaagccccaccggcugaaccacauggggaucugcuccugcggccuguacaagcacccgggggugcccgugaaguggaagcgcugaggacuagucccuguucccagagcccacuuuuuuuucuuuuuuugaaauaaaauagccugucuuucagaucuaaaaaaaaaaaaaaaaaaaaaaaaaaaaaaaaaaaaaaaaaaaaaaaaaaaaaaaaaaaaaaaaaaaaaaaaaaaaaaaaaaaaaaaaaaaaaaaaaaaa

SEQ ID NO: 30552 - RNA, 1740 nt, Artificial Sequence
  mRNA product Design a-2 (A100) comprising derived and/or modified sequence from LASV(LASV253-NIG-2011;Clade II)__AIT17670__GPCmut6 (opt1)
aggagaguccgcucagccagguugcagaagcggcuuagcguguguccuaaucuucucucugcguguagguaggccugugccgcaaacaagcuuaccaugggccagaucaucaccuucuuccaggaggugccccacgucaucgaggaggugaugaacaucgugcugaucgcccucagccugcuggccauccucaaggggaucuacaacgucgcgaccugcggccuguucgggcugguguccuuccuccugcugugcggccgcagcugcuccacgaccuacaaggggguguacgagcuccagacccuggagcuggacauggccagccucaacaugugcaugccgcuguccugcacgaagaacaacagccaccacuacaucauggucggcaacgagaccggccuggagcucacccugaccaacacguccaucaucaaccacaaguucugcaaccugagcgacgcccacaagaagaaccucuacgaccacgcccugauguccaucaucagcaccuuccaccuguccauccccaacuucaaccaguacgaggccaugagcugcgacuucaacgggggcaagaucuccgugcaguacaaccucagccacaccuacgcgguggacgccgccaaccacugcgggaccaucgccaacggcguccugcagacguucaugcggauggcguggggcggguccuacaucgcccuggacagcggcaagggguccugggacugcaucaugaccagcuaccaguaccucaucauccagaacaccaccugggaggaccacugccaguucucccgccccagccccaucggcuaccuggggcugcucagccagcggacgcgcgacaucuacaucucccggcgccugcugggcaccuucaccuggacccucagcgacuccgagggcaacgagacgcccgggggcuacugccugacccgguggaugcugaucgaggccgagcucaagugcuucgggaacaccgccguggccaagugcaacgagaagcacgacgaggaguucugcgacaugcugcgccuguucgacuucugcaagcaggcgauccggcgccucaaggcccccgcccagaugagcauccagcugaucaacaaggccgugaacgcccugaucaacgaccagcucaucaugaagaaccaccuccgggacaucaugggcaucccguacugcaacuacuccaaguacugguaccugaaccacaccgucacggggcgcaccagccugccccggugcuggcugguguccaacggcagcuaccugaacgagacccacuucuccgacgacaucgagcagcaggcggacaacaugaucaccgagcuccugcagaaggaguacaucgaccgccagggcaagacgccccuggggcucguggaccuguucgucuucagcaccuccuucuaccugaucagcaucuuccugcaccucgugaagaucccgacccaccggcacaucaucggcaagcccugccccaagccccaccgccugaaccacauggggaucugcuccugcggccuguacaagcacccgggggugcccgucaaguggaagcggugaggacuagucccuguucccagagcccacuuuuuuuucuuuuuuugaaauaaaauagccugucuuucagaucuaaaaaaaaaaaaaaaaaaaaaaaaaaaaaaaaaaaaaaaaaaaaaaaaaaaaaaaaaaaaaaaaaaaaaaaaaaaaaaaaaaaaaaaaaaaaaaaaaaaa

SEQ ID NO: 30553 - RNA, 1740 nt, Artificial Sequence
  mRNA product Design a-2 (A100) comprising derived and/or modified sequence from LASV(LASV254-NIG-2011;Clade II)__AIT17674__GPCmut6 (opt1)
aggagaguccgcucagccagguugcagaagcggcuuagcguguguccuaaucuucucucugcguguagguaggccugugccgcaaacaagcuuaccaugggccagaucaucaccuucuuccaggaggugccccacgucaucgaggaggugaugaacaucgugcugaucgcccucagccugcuggccauccucaaggggaucuacaacgucgcgaccugcggccuguucgggcugguguccuuccuccugcugugcggccgcagcugcuccacgaccuacaaggggguguacgagcuccagacccuggagcuggacaugaccaaccucaacaugugcaugccgcugagcugcaccaagaacaacucccaccacuacaucauggucggcaacgagaccggccuggagcucacccugacgaacaccagcaucaucaaccacaaguucugcaaccuguccgacgcccacaagaagaaccucuacaaccacgcccugaugagcaucaucuccaccuuccaccugagcauccccaacuucaaccaguacgaggccauguccugcgacuucaacgggggcaagaucagcgugcaguacaaccucucccacagcuacgccguggacgcggccaaccacugcgggaccaucgccaacggcguccugcagacguucaugcggauggccuggggcggguccuacaucgcgcuggacagcggcaaggggaacugggacugcaucaugaccuccuaccaguaccucaucauccagaacaccaccugggaggaccacugccaguucagccgccccucccccaucggcuaccuggggcugcucagccagcggacgcgcgacaucuacaucagccggcgccugcugggcaccuucaccuggacccucuccgacagcgagggcaacgagacgcccgggggcuacugccugacccgguggaugcugaucgaggccgagcucaagugcuucgggaacaccgccguggccaagugcaacgagaagcacgacgaggaguucugcgacaugcugcgccuguucgacuucugcaagcaggccauccggcgccucaagacccccgcgcaggccaacauccagcugaucaacaaggccgugaacgcccugaucaacgaccagcucaucaugaagaaccaccuccgggacaucaugggcauccccuacugcaacuacuccaaguacugguaccugaaccacacggucaccgggaagaccagccugccccgcugcuggcugguguccaacggcagcuaccugaacgagacccacuucuccgacgacaucgagcagcaggccgacaacaugaucacggagcuccugcagaaggaguacauggaccggcagggcaagaccccgcuggggcucguggaccuguucgucuucagcaccuccuucuaccugaucagcaucuuccugcaccucgugaagaucccgacccaccgccacgugaucggcaagcccugccccaagccccaccggcugaaccacauggggaucugcuccugcggccuguacaagcacccggggguccccgugaaguggaagcgcugaggacuagucccuguucccagagcccacuuuuuuuucuuuuuuugaaauaaaauagccugucuuucagaucuaaaaaaaaaaaaaaaaaaaaaaaaaaaaaaaaaaaaaaaaaaaaaaaaaaaaaaaaaaaaaaaaaaaaaaaaaaaaaaaaaaaaaaaaaaaaaaaaaaaa

SEQ ID NO: 30554 - RNA, 1740 nt, Artificial Sequence
  mRNA product Design a-2 (A100) comprising derived and/or modified sequence from LASV(Nig08-A19;Clade III)__ADU56618__GPCmut6 (opt1)
aggagaguccgcucagccagguugcagaagcggcuuagcguguguccuaaucuucucucugcguguagguaggccugugccgcaaacaagcuuaccaugggccagaucgugaccuucuuccaggaggucccccacgugaucgaggaggugaugaacaucguccugaucgcccucagcauccuggccauccugaaggggcucuacaacaucgcgaccugcggccugaucgggcuggugacguuccuccugcuguccggccgcagcugcuccaugaccuacaaggggguguacgagcuccagacccuggagcugaacaugaacacccucaacaugugcaugccgcugagcugcaccaagaacaacucccaccacuacaucauggucggcaacgagaccggccuggagcucacccugacgaacaccagccugcuccaccacaaguucugcaaccuguccgacgcccacaagaagaaccuguacgaccacacccucaugagcaucaucuccaccuuccaccugagcauccccaacuucaaccaguacgaggccauguccugcgacuucaacgggggcaagaucacggugcaguacaaccugagccacuccuacgccaucgacgccgcgaaccacugcgggaccguggccaacggcguccuccagaccuucaugcggauggccuggggcgggagcuacaucgcccuggacuccggccgcgggaagugggacugcaucaugaccagcuaccaguaccugaucauccagaacacgaccugggaggaccacugccaguucucccggcccagccccaucggcuaccucgggcugcugucccagcgcacccgggacaucuacaucagccgccggcuccugggcaccuucacguggacccugagcgacuccgagggcaacgagacccccgggggcuacugccucacccgcuggaugcugaucgaggcggagcugaagugcuucgggaacacggccguggccaagugcaacgagaagcacgacgaggaguucugcgacaugcuccggcuguucgacuucugcaagcaggccauccgccggcugaaggcccccgcgcagaugagcauccagcucaucaacaaggccgugaacgcccugaucaacgaccagcugaucaugaagaaccaccuccgcgacaucaugggcauccccuacugcaacuacuccaaguacugguaccugaaccacaccagcaccgggcggaccucccugccccgcugcuggcucgucagcaacggcuccuaccugaacgagacgcacuucagcgacgacaucgagcagcaggccgacaacaugaucaccgagaugcugcagaaggaguaccucgaccggcagggcaagaccccgcuggggcugguggaccuguucguguucuccaccagcuucuaccucaucuccaucuuccugcaccuggucaagaucccgacgcaccgccacaucgugggcaagcccugccccaagccccaccggcucaaccacauggggaucugcagcugcggccuguacaagcagccgggggugcccguccgcuggaagcggugaggacuagucccuguucccagagcccacuuuuuuuucuuuuuuugaaauaaaauagccugucuuucagaucuaaaaaaaaaaaaaaaaaaaaaaaaaaaaaaaaaaaaaaaaaaaaaaaaaaaaaaaaaaaaaaaaaaaaaaaaaaaaaaaaaaaaaaaaaaaaaaaaaaaa

SEQ ID NO: 30555 - RNA, 1743 nt, Artificial Sequence
  mRNA product Design a-2 (A100) comprising derived and/or modified sequence from LASV(G1180-SLE-2010;Clade IV)__AIT17168__GPCmut6 (opt1)
aggagaguccgcucagccagguugcagaagcggcuuagcguguguccuaaucuucucucugcguguagguaggccugugccgcaaacaagcuuaccaugggccagaucgugaccuucuuccaggaggucccccacgugaucgaggaggugaugaacaucguccugaucgcccucagcauccuggccgugcugaaggggcucuacaacuucgcgaccugcggccugguggggcugcucaccuuccugcugcucugcggccgcuccugcaccgccagccgguacaagggggucuacgagcugcagacccuggagcucaacauggagacccugaacaugugcaugccgcuguccugcaccaagaacaacagccaccacuacaucauggugggcaacgagaccggccucgagcugacccugacgaacaccuccaucaucaaccacaaguucugcaaccucagcgacgcccacaagaagaaccuguacgaccacgcccugauguccaucaucagcaccuuccaccucuccauccccaacuucaaccaguacgaggccaugagcugcgacuucaacgggggcaagaucuccgugcaguacaaccugagccacuccuacgcgggggacgccgccaaccacugcggcaccgucgccaacggggugcugcagacguucaugcgcauggcguggggcggcagcuacaucgcccucgacuccgggcacggcagcugggacugcaucaugaccuccuaccaguaccugaucauccagaacaccaccugggaggaccacugccaguucagccggcccucccccaucggguaccugggccuccugagccagcgcacgcgggacaucuacaucagccgccggcugcucggcaccuucaccuggacccuguccgacagcgaggggaaggacacgccgggcggguacugccugacccgcuggaugcucaucgaggccgagcugaagugcuucggcaacaccgccguggccaagugcaacgagaagcacgacgaggaguucugcgacaugcugcggcuguucgacuucugcaagcaggcgauccagcgccugaaggcccccgcccagauguccauccagcugaucaacaaggccgucaacgcccucaucaacgaccagcugaucaugaagaaccaccuccgggacaucauggggauccccuacugcaacuacagcaaguacugguaccucaaccacaccacgaccggcaagaccucccugcccaagugcuggcuggugagcaacggcuccuaccucaacgagacccacuucagcgacgacaucgagcagcaggcggacaacaugaucacggagaugcugcagaaggaguacauggagcgccaggggaagacgccccugggccucguggaccuguucgucuucuccaccagcuucuaccugaucuccaucuuccugcaccucgugaagaucccgacccaccggcacaucgugggcaagagcugccccaagccccaccgccugaaccacauggggaucugcuccugcgggcuguacaagcagcccggcgucccggugaaguggaagcggugaggacuagucccuguucccagagcccacuuuuuuuucuuuuuuugaaauaaaauagccugucuuucagaucuaaaaaaaaaaaaaaaaaaaaaaaaaaaaaaaaaaaaaaaaaaaaaaaaaaaaaaaaaaaaaaaaaaaaaaaaaaaaaaaaaaaaaaaaaaaaaaaaaaaa

SEQ ID NO: 30556 - RNA, 1743 nt, Artificial Sequence
  mRNA product Design a-2 (A100) comprising derived and/or modified sequence from LASV(G1442-SLE-2011;Clade IV)__AIT17180__GPCmut6 (opt1)
aggagaguccgcucagccagguugcagaagcggcuuagcguguguccuaaucuucucucugcguguagguaggccugugccgcaaacaagcuuaccaugggccagaucgugaccuucuuccaggaggucccccacgugaucgaggaggugaugaacaucguccugaucgcccucagcauccuggccgugcugaaggggcucuacaacguggcgaccugcggccugaucgggcuggucacguuccuccugcugugcggccgcuccugcaccaccacccucuacaaggggguguacgagcugcagacgcuggagcucaacauggagacccugaacaugugcaugccgcugagcugcaccaagaacaacucccaccacuacauccgggugggcaacgagacgggccucgagcugacccugaccaacaccagcaucaucaaccacaaguucugcaaccucuccgacgcccacaagaagaaccuguacgaccacgcccugaugagcaucaucuccacguuccaccucagcauccccaacuucaaccaguacgaggccauguccugcgacuucaacgggggcaagaucagcguccaguacaaccugucccacagcuacgccggggacgcggccaaccacugcggcaccguggccaacggggugcugcagaccuucaugcgcauggccuggggcggcuccuacaucgcgcucgacagcgggcggggcaacugggacugcaucaugaccuccuaccaguaccugaucauccagaacacgaccugggacgaccacugccaguucagccgccccucccccaucggguaccugggccuccugagccagcggacccgcgacgucuacaucucccggcgccugcucggcaccuucacguggacccugagcgacagcgaggggaaggacaccccgggcggguacugccugacccgguggaugcucaucgaggccgagcugaagugcuucggcaacacggccguggccaagugcaacgagaagcacgacgaggaguucugcgacaugcugcgccucuucgacuucugcaagcaggccauccagcggcugaaggcgcccgcccagauguccauccagcugaucaacaaggccgugaacgcccucaucaacgaccagcugaucaugaagaaccaccuccgcgacaucauggggauccccuacugcaacuacagcaaguacugguaccugaacaacaccgccaccggcaagaccucccugcccaagugcuggcugaucagcaacggcuccuaccucaacgagacgcacuucagcgacgacaucgagcaggaggcggacaacaugaucaccgagaugcugcagaaggaguacauggagcggcaggggaagacgccccugggccucgucgaccuguucguguucuccaccagcuucuaccugaucuccaucuuccugcaccucgugaagaucccgacccaccgccacaucgucggcaagagcugccccaagccccaccggcugaaccacauggggaucugcuccugcgggcuguacaagcagcccggcgugccggugcgcuggaagcggugaggacuagucccuguucccagagcccacuuuuuuuucuuuuuuugaaauaaaauagccugucuuucagaucuaaaaaaaaaaaaaaaaaaaaaaaaaaaaaaaaaaaaaaaaaaaaaaaaaaaaaaaaaaaaaaaaaaaaaaaaaaaaaaaaaaaaaaaaaaaaaaaaaaaa

SEQ ID NO: 30557 - RNA, 1743 nt, Artificial Sequence
  mRNA product Design a-2 (A100) comprising derived and/or modified sequence from LASV(G3010-SLE-2013;Clade IV)__AIT17344__GPCmut6 (opt1)
aggagaguccgcucagccagguugcagaagcggcuuagcguguguccuaaucuucucucugcguguagguaggccugugccgcaaacaagcuuaccaugggccagaucgugaccuucuuccaggaggucccccacgugaucgaggaggugaugaacaucguccugaucgcccucagcauccuggccgugcugaaggggcucuacaacuucgcgaccugcggccugguggggcuggucacguuccuccugcugugcggccgcuccugcaccaccagccucuacaaggggguguacgagcugcagacccuggagcucaacauggagacgcugaacaugugcaugccgcuguccugcaccaagaacaacagccaccacuacaucauggugggcaacgagaccggccucgagcugacgcugaccaacaccuccaucaucaaccacaaguucugcaaccucagcgacgcccacaagaagaaccuguacaaccacgcccugauguccaucaucagcaccuuccaccucuccauccccaacuucaaccaguacgaggccaugagcugcgacuucaacgggggcaagaucuccguccaguacaaccugagccacuccuacgccggggacgcggccagccacugcggcacgguggccaacggggugcugcagaccuucaugcggauggccuggggcggcuccuacaucgcgcucgacagcggguacggcaagugggacugcaucaugaccuccuaccaguaccugaucauccagaacaccacgugggaggaccacugccaguucagccgccccucccccaucggguaccugggccuccugagccagcggacccgcgacaucuacaucagccggcgccugcucggcaccuucaccuggacgcuguccgacagcgaggggaaggacaccccgggcggguacugccugacccgguggaugcucaucgaggccgagcugaagugcuucggcaacaccgccgucgccaagugcaacgagaagcacgacgaggaguucugcgacaugcugcgccucuucgacuucugcaagcaggccauccagcggcugaagacgcccgcgcagauguccauccagcugaucaacaaggccgugaacgcccucaucaacgaccagcugaucaugaagaaccaccuccgcgacaucauggggauccccuacugcaacuacagcaaguacugguaccugaaccacaccaccaccggcaagacgucccugcccaagugcuggcuggugagcaacggcuccuaccucaacgagacccacuucagcgacgacaucgagcagcaggccgacaacaugaucaccgagaugcugcagaaggaguacauggagcggcaggggaagacgccccugggccucgucgaccuguucguguucuccaccagcuucuaccugaucuccaucuuccugcaccucgugaagaucccgacccaccgccacaucgucggcaagagcugccccaagccccaccggcugaaccacauggggaucugcuccugcgggcuguacaagcagcccggcgugccggugcgcuggaagcggugaggacuagucccuguucccagagcccacuuuuuuuucuuuuuuugaaauaaaauagccugucuuucagaucuaaaaaaaaaaaaaaaaaaaaaaaaaaaaaaaaaaaaaaaaaaaaaaaaaaaaaaaaaaaaaaaaaaaaaaaaaaaaaaaaaaaaaaaaaaaaaaaaaaaa

SEQ ID NO: 30558 - RNA, 1743 nt, Artificial Sequence
  mRNA product Design a-2 (A100) comprising derived and/or modified sequence from LASV(G502-SLE-2009;Clade IV)__AIT17126__GPCmut6 (opt1)
aggagaguccgcucagccagguugcagaagcggcuuagcguguguccuaaucuucucucugcguguagguaggccugugccgcaaacaagcuuaccaugggccagaucgugaccuucuuccaggaggucccccacgugaucgaggaggugaugaacaucguccugaucgcccucagcauccuggccgugcugaaggggcucuacaacuucgcgaccugcggccugguggggcugcucacguuccugcugcucugcggccgcuccugcaccaccgggcuguacaagggcgucuacgagcugcagacccucgagcugaacauggagacgcugaacaugugcaugccgcucagcugcaccaagaacaacucccaccacuacaucauggugggcaacgagaccgggcuggagcugacgcucaccaacaccagcaucaucaaccacaaguucugcaaccuguccgacgcccacaagaagaaccuguacgaccacgcccucaugagcaucaucuccaccuuccaccugagcauccccaacuucaaccaguacgaggccauguccugcgacuucaacggcgggaagaucagcgugcaguacaaccugucccacagcuacgccggcgacgcggccgaccacugcgggacggucgccaacggcgugcuccagaccuucaugcggauggccuggggcggguccuacaucgcgcuggacagcggccgcgggcggugggacugcaucaugaccuccuaccaguaccugaucauccagaacaccacgugggaggaccacugccaguucagccgccccucccccaucggcuaccucggccugcugagccagcggacccgcgacaucuacaucucccggcgccuccuggggaccuucaccuggacgcugagcgacagcgagggcaaggacacccccgggggcuacugccucacccgguggaugcugaucgaggccgagcugaagugcuucgggaacaccgccguggccaagugcaacgagaagcacgacgaggaguucugcgacaugcuccgccuguucgacuucugcaagcaggccauccagcggcugaaggcgcccgcccagauguccauccagcucaucaacaaggccgucaacgcccugaucaacgaccagcuggugaugaagaaccaccuccgcgacaucaugggcauccccuacugcaacuacagccgguacugguaccugaaccacacgaccaccggccgcaccucccugcccaagugcuggcucgugagcaacggguccuaccugaacgagacgcacuucagcgacgacaucgagcagcaggccgacaacaugaucaccgagaugcugcagaaggaguacauggagcggcagggcaagaccccgcucgggcuggucgaccuguucguguucuccaccagcuucuaccugaucuccaucuuccuccaccuggugaagaucccgacgcaccgccacaucgucggcaagagcugccccaagccccaccggcugaaccacauggggaucugcuccugcggccucuacaagcagcccggcgugccggugaaguggaagcgcugaggacuagucccuguucccagagcccacuuuuuuuucuuuuuuugaaauaaaauagccugucuuucagaucuaaaaaaaaaaaaaaaaaaaaaaaaaaaaaaaaaaaaaaaaaaaaaaaaaaaaaaaaaaaaaaaaaaaaaaaaaaaaaaaaaaaaaaaaaaaaaaaaaaaa

SEQ ID NO: 30559 - RNA, 1743 nt, Artificial Sequence
  mRNA product Design a-2 (A100) comprising derived and/or modified sequence from LASV(G733-SLE-2010;Clade IV)__AIT17154__GPCmut6 (opt1)
aggagaguccgcucagccagguugcagaagcggcuuagcguguguccuaaucuucucucugcguguagguaggccugugccgcaaacaagcuuaccaugggccagaucgugaccuucuuccaggaggucccccacgugaucgaggaggugaugaacaucguccugaucgcccucagcauccuggccgugcugaaggggcucuacaacuucgcgaccugcggcaucguggggcuggucuccuuccugcuccugugcggccgcagcugcacgaccucccuguacaaggggguguacgagcuccagacccuggagcugaacauggagacccucaacaugugcaugccgcugagcugcaccaagaacaacucccaccacuacaucauggugggcaacgagaccggccuggagcucacccugacgaacaccagcaucaucaaccacaaguucugcaaccuguccgacgcccacaagaagaaccucuacgaccacgcccugaugagcaucaucuccaccuuccaccugagcauccccaacuucaaccaguacgaggccauguccugcgacuucaacgggggcaagaucagcguccaguacaaccucucccacagcuacgccggggacgcggccaaccacugcggcaccaucgccaacggggugcugcagacguucaugcggauggccuggggcggcuccuacaucgcgcuggacagcgggcgcgaccggugggacugcaucaugaccuccuaccaguaccucaucauccagaacaccaccugggaggaccacugccaguucagccgccccucccccaucggcuaccuggggcugcucagccagcggacgcgcgacaucuacaucagccggcgccugcugggcaccuucaccuggacccucuccgacagcgagggcaaggacacgcccgggggcuacugccugacccgguggaugcugaucgaggccgagcucaagugcuucgggaacaccgccguggccaagugcaacgagaagcacgacgaggaguucugcgacaugcugcgccuguucgacuucugcaagcaggccauccagcggcucaaggcgcccgcccagauguccauccagcugaucaacaaggccgucaacgcccugaucaacgaccagcucaucaugaagaaccaccuccgcgacaucaugggcauccccuacugcaacuacagcaaguacugguaccugaaccacaccacgaccgggaagaccucccugcccaagugcuggcuggugagcaacggcuccuaccugaacgagacccacuucagcgacgacaucgagcagcaggccgacaacaugaucacggagaugcuccagaaggaguacauggagcggcagggcaagaccccgcuggggcugguggaccucuucgucuucuccaccagcuucuaccugaucuccaucuuccugcaccuggugaagaucccgacccaccgccacguggucggcaagagcugccccaagccccaccggcucaaccacauggggaucugcuccugcggccuguacgggcagcccggcgugccggugaaguggaagcgcugaggacuagucccuguucccagagcccacuuuuuuuucuuuuuuugaaauaaaauagccugucuuucagaucuaaaaaaaaaaaaaaaaaaaaaaaaaaaaaaaaaaaaaaaaaaaaaaaaaaaaaaaaaaaaaaaaaaaaaaaaaaaaaaaaaaaaaaaaaaaaaaaaaaaa

SEQ ID NO: 30560 - RNA, 1743 nt, Artificial Sequence
  mRNA product Design a-2 (A100) comprising derived and/or modified sequence from MOPV/LASV reassortant(IGS-1;Clade IV)__AFY05576__GPCmut6 (opt1)
aggagaguccgcucagccagguugcagaagcggcuuagcguguguccuaaucuucucucugcguguagguaggccugugccgcaaacaagcuuaccaugggccagaucgugaccuucuuccaggaggucccccacgugaucgaggaggugaugaacaucguccugaucgcccucagcgugcuggccgugcugaaggggcucuacaacuucgcgaccugcggccuggucgggcuggugacguuccuccugcugugcggccgcuccugcaccaccagccucuacaaggggguguacgagcugcagacccuggagcucaacauggagacgcugaacaugugcaugccgcuguccugcaccaagaacaacagccaccacuacaucauggucggcaacgagaccggccucgagcugacgcugaccaacaccuccaucaucaaccacaaguucugcaaccucagcgacgcccacaagaagaaccuguacgaccacgcccugauguccaucaucagcaccuuccaccucuccauccccaacuucaaccaguacgaggccaugagcugcgacuucaacgggggcaagaucuccgugcaguacaaccugagccacuccuacgccggggacgcggccaaccacugcggcacgguggccaacgggguccugcagaccuucaugcggauggccuggggcggcagcuacaucgcgcucgacuccgggcgcggcaacugggacugcaucaugaccagcuaccaguaccugaucauccagaacaccacgugggaggaccacugccaguucucccggcccagccccaucggguaccugggccuccugucccagcgcacccgggacaucuacaucagccgccggcugcucggcaccuucaccuggacgcugagcgacuccgagggggaggacaccccgggcggguacugccugacccgcuggaugcucaucgaggccgagcugaagugcuucggcaacaccgccguggccaagugcaacgagaagcacgacgaggaguucugcgacaugcugcggcuguucgacuucugcaagcaggccauccagcgccugaaggcgcccgcccagaugagcauccagcugaucaacaaggccgugaacgcccucaucaacgaccagcugaucaugaagaaccaccuccgggacaucauggggauccccuacugcaacuacuccaaguacugguaccucaaccacacgaccaccggccgcaccagccugcccaagugcuggcuggucuccaacggcagcuaccucaacgagacgcacuucuccgacgacaucgagcagcaggccgacaacaugaucaccgagaugcugcagaaggaguacauggagcggcaggggaagacgccccugggccucguggaccuguucguguucagcaccuccuucuaccugaucagcaucuuccugcaccucgucaagaucccgacccaccgccacaucguggggaaguccugccccaagccccaccggcugaaccacaugggcaucugcagcugcgggcuguacaagcagcccggcgugccggucaaguggaagcgcugaggacuagucccuguucccagagcccacuuuuuuuucuuuuuuugaaauaaaauagccugucuuucagaucuaaaaaaaaaaaaaaaaaaaaaaaaaaaaaaaaaaaaaaaaaaaaaaaaaaaaaaaaaaaaaaaaaaaaaaaaaaaaaaaaaaaaaaaaaaaaaaaaaaaa

SEQ ID NO: 30561 - RNA, 1743 nt, Artificial Sequence
  mRNA product Design a-2 (A100) comprising derived and/or modified sequence from LASV(LM765-SLE-2012;Clade IV)__AIT17814__GPCmut6 (opt1)
aggagaguccgcucagccagguugcagaagcggcuuagcguguguccuaaucuucucucugcguguagguaggccugugccgcaaacaagcuuaccaugggccagaucgugaccuucuuccaggaggucccccacgugaucgaggaggugaugaacaucguccugaucgcccucagcauccuggccgugcugaaggggcucuacaacuucgcgaccugcggccugguggggcuggucacguuccuccugcugugcggccgcuccugcaccaccagccucuacaaggggguguacgagcugcagacccuggagcucaacauggagacgcugaacaugugcaugccgcuguccugcaccaagaacaacagccaccacuacaucauggugggcaacgagaccggccucgagcugacgcugaccaacaccuccaucaucgaccacaaguucugcaaccucagcgacgcccaccggaagaaccuguacgaccacgcccugauguccaucaucagcaccuuccaccucuccauccccaacuucaaccaguacgaggccaugagcugcgacuucaacgggggcaagaucuccguccaguacaaccugagccacuccuacgccaaggacgcggccgaccacugcgggacgguggccaacggcgugcugcagaccuucaugcgcauggccuggggcgggagcuacaucgcgcucgacuccggccgggggcgcugggacugcaucaugaccagcuaccaguaccugaucauccagaacaccacgugggaggaccacugccaguucucccggcccagccccaucggcuaccuggggcuccugucccagcgcacccgggacaucuacaucagccgccggcugcucggcaccuucaccuggacgcugagcgacuccgagggcaaggacacccccgggggcuacugccugacccgcuggaugcucaucgaggccgagcugaagugcuucgggaacaccgccgucgccaagugcaacgagaagcacgacgaggaguucugcgacaugcugcggcuguucgacuucugcaagcaggccauccagcgccugaaggcgcccgcccagaugagcauccagcugaucaacaaggccgugaacgcccucaucaacgaccagcugaucaugaagaaccaccuccgggacaucaugggcauccccuacugcaacuacuccaaguacugguaccucaaccacacgaccaccgggaagaccagccugcccaagugcuggcugguguccaacggcagcuaccucaacgagacgcacuucuccgacgacaucgagcagcaggccgacaacaugaucaccgagaugcugcagaaggaguacauggagcgccagggcaagaccccgcuggggcucgucgaccuguucguguucagcaccuccuucuaccugaucagcaucuuccugcaccucgugaagaucccgacgcaccggcacaucgucggcaagcccugccccaagccccaccgccugaaccacauggggaucugcuccugcggccuguacaagcagccgggggugcccgugaaguggaagcggugaggacuagucccuguucccagagcccacuuuuuuuucuuuuuuugaaauaaaauagccugucuuucagaucuaaaaaaaaaaaaaaaaaaaaaaaaaaaaaaaaaaaaaaaaaaaaaaaaaaaaaaaaaaaaaaaaaaaaaaaaaaaaaaaaaaaaaaaaaaaaaaaaaaaa

SEQ ID NO: 30562 - RNA, 1743 nt, Artificial Sequence
  mRNA product Design a-2 (A100) comprising derived and/or modified sequence from LASV(LM776-SLE-2012;Clade IV)__AIT17824__GPCmut6 (opt1)
aggagaguccgcucagccagguugcagaagcggcuuagcguguguccuaaucuucucucugcguguagguaggccugugccgcaaacaagcuuaccaugggccagaucgugaccuucuuccaggaggucccccacgugaucgaggaggugaugaacaucguccugaucgcccucagcauccuggccgugcugaaggggcucuacaacuucgcgaccugcggccugguggggcuggucacguuccuccugcugugcggccgcuccugcaccaccagcguguacaaggggguguacgagcuccagacccuggagcugaacauggagacgcucaacaugugcaugccgcuguccugcaccaagaacaacagccaccacuacaucauggucggcaacgagaccggccuggagcucacgcugaccaacaccuccaucaucaaccacaaguucugcaaccugagcgacgcccacaagaagaaccucuacgaccacgcccugauguccaucaucagcaccuuccaccuguccauccccaacuucaaccaguacgaggccaugagcugcgacuucaacgggggcaagaucuccgugcaguacaaccucagccacuccuacgccggggacgcggccaaccacugcggcacgguggccaacgggguccugcagaccuucaugcggauggccuggggcggcagcuacaucgcgcuggacuccgggcacggcaagugggacugcaucaugaccagcuaccaguaccucaucauccagaacaccacgugggaggaccacugccaguucucccgccccagccccaucggguaccugggccugcucucccagcggacccgcgacaucuacaucagccggcgccugcugggcaccuucaccuggacgcucagcgacuccgaggggaaggacaccccgggcggguacugccugacccgguggaugcugaucgaggccgagcucaagugcuucggcaacaccgccguggccaagugcaacgagaagcacgacgaggaguucugcgacaugcugcgccuguucgacuucugcaagcaggccauccagcggcucaaggcgcccgcccagaugagcauccagcugaucaacaaggccgugaacgcccugaucaacgaccagcucaucaugaagaaccaccuccgcgacaucauggggauccccuacugcaacuacuccaaguacugguaccugaaccacacgaccaccggcaagaccagccugcccaagugcuggcuggucuccaacggcagcuaccugaacgagacgcacuucuccgacgacaucgagcagcaggccgacaacaugaucaccgagaugcuccagaaggaguacauggagcggcaggggaagacgccccugggccugguggaccucuucguguucagcaccuccuucuaccugaucagcaucuuccugcaccuggucaagaucccgacccaccgccacaucguggggaaguccugccccaagccccaccggcucaaccacaugggcaucugcagcugcgggcuguacaagcagcccggcgugccgguccgcuggaagcggugaggacuagucccuguucccagagcccacuuuuuuuucuuuuuuugaaauaaaauagccugucuuucagaucuaaaaaaaaaaaaaaaaaaaaaaaaaaaaaaaaaaaaaaaaaaaaaaaaaaaaaaaaaaaaaaaaaaaaaaaaaaaaaaaaaaaaaaaaaaaaaaaaaaaa

SEQ ID NO: 30563 - RNA, 1743 nt, Artificial Sequence
  mRNA product Design a-2 (A100) comprising derived and/or modified sequence from LASV(Mad39;Clade IV)__ANH09722__GPCmut6 (opt1)
aggagaguccgcucagccagguugcagaagcggcuuagcguguguccuaaucuucucucugcguguagguaggccugugccgcaaacaagcuuaccaugggccagaucgugaccuucuuccaggaggucccccacgugaucgaggaggugaugaacaucguccugaucgcccucagcauccuggccgugcugaaggggcucuacaacguggcgaccugcggccugaucgggcuggucacguuccuccugcugugcggccgcuccugcaccaccacccucuacaaggggguguacgagcugcaggcccuggagcucaacauggagacgcugaacaugugcaugccgcugagcugcaccaagaacaacucccaccacuacauccgggugggcaacgagaccggccucgagcugacgcugaccaacaccagccucaucaaccacaaguucugcaaccuguccgacgcccacaagaagaaccuguacgaccacgcccucaugagcaucaucuccaccuuccaccugagcauccccaacuucaaccaguacgaggccauguccugcgacuucaacgacgggaagaucagcguccaguacaaccugucccacacguacgcgggcgacaccgccaaccacugcgggaccguggccaacggcgugcuccagaccuucaugcgcauggccuggggcgggagcuacaucgcgcuggacuccggccgcgggggcugggacugcaucaugacgagcuaccaguaccugaucauccagaacaccaccugggaggaccacugccaguucucccggcccagccccaucggguaccucggccugcugucccagcggacccgcgacaucuacaucagccggcgccuccugggcacguucaccuggacccuguccgacagcgaggggaaggacaccccgggcggguacugccucacgcgguggaugcugaucgaggccgagcugaagugcuucggcaacaccgccgucgccaagugcaacgagaagcacgacgaggaguucugcgacaugcuccgccuguucgacuucugcaagcaggccauccagcggcugaaggcgcccgcccagaugagcauccagcucaucaacaaggccgugaacgcccugaucaacgaccagcugaucaugaagaaccaccuccgcgacaucauggggauccccuacugcaacuacuccaaguacugguaccugaaccacaccgugaccggcaagacgagccugcccaagugcuggcucgucuccaacggcagcuaccugaacgagacccacuucuccgacgacaucgagcagcaggccgacaacaugaucaccgagaugcugcagaaggaguacauggagcggcaggggaagacgccccucggccugguggaccuguucguguucagcaccuccuucuaccugaucagcaucuuccuccaccuggucaagaucccgacccaccgccacgugguggggaagcccugccccaagccccaccggcugaaccacaugggcaucugcuccugcggguucuacaagcagccgggcguccccgugcgcuggaagcggugaggacuagucccuguucccagagcccacuuuuuuuucuuuuuuugaaauaaaauagccugucuuucagaucuaaaaaaaaaaaaaaaaaaaaaaaaaaaaaaaaaaaaaaaaaaaaaaaaaaaaaaaaaaaaaaaaaaaaaaaaaaaaaaaaaaaaaaaaaaaaaaaaaaaa

SEQ ID NO: 30564 - RNA, 1743 nt, Artificial Sequence
  mRNA product Design a-2 (A100) comprising derived and/or modified sequence from LASV(Z0947-SLE-2011;Clade IV)__AIT17840__GPCmut6 (opt1)
aggagaguccgcucagccagguugcagaagcggcuuagcguguguccuaaucuucucucugcguguagguaggccugugccgcaaacaagcuuaccaugggccagaucgugaccuucuuccaggaggucccccacgugaucgaggaggugaugaacaucguccugaucgcccucagcauccuggccgugcugaaggggcucuacaacuucgcgaccugcggccugguggggcuggucacguuccuccugcugugcggccgcuccugcaccaucagccucuacaaggggguguacgagcugcagacccuggagcucaacauggagacccugaacaugugcaugccgcuguccugcaccaagaacaacagccaccacuacaucauggugggcaacgagaccggccucgagcugacccugacgaacaccuccaucaucaaccacaaguucugcaaccucagcgacgcccacaagaagaaccuguacgaccacgcccugauguccaucaucagcaccuuccaccucuccauccccaacuucaaccaguacgaggccaugagcugcgacuucaacgggggcaagaucuccguccaguacaaccugagccacuccuacgccggggacgcggccaaccacugcggcaccguggccaacggggugcugcagacguucaugcggauggccuggggcggcagcuacaucgcgcucgacuccgggcgcgaccggugggacugcaucaugaccagcuaccaguaccugaucauccagaacaccaccugggaggaccacugccaguucucccgccccagccccaucggcuaccuggggcuccugucccagcggacgcgcgacaucuacaucagccggcgccugcucggcaccuucaccuggacccugagcgacuccgagggcaaggacacgcccgggggcuacugccugacccgguggaugcucaucgaggccgagcugaagugcuucgggaacaccgccgucgccaagugcaacgagaagcacgacgaggaguucugcgacaugcugcgccucuucgacuucugcaagcaggccauccagcggcugaaggcgcccgcccagaugagcauccagcugaucaacaaggccgugaacgcccucaucaacgaccagcugaucaugaagaaccaccuccgcgacaucaugggcauccccuacugcaacuacuccaaguacugguaccugaaccacaccacgaccgggaagaccagccugcccaagugcuggcugguguccaacggcagcuaccucaacgagacccacuucuccgacgacaucgagcagcaggccgacaacaugaucacggagaugcugcagaaggaguacauggagcggcagggcaagaccccgcuggggcucgucgaccuguucguguucagcaccuccuucuaccugaucagcaucuuccugcaccucgugaagaucccgacccaccgccacaucgucggcaagcccugccccaagccccaccggcugaaccacauggggaucugcuccugcggccuguacaagcagccgggggugcccgugaaguggaagcgcugaggacuagucccuguucccagagcccacuuuuuuuucuuuuuuugaaauaaaauagccugucuuucagaucuaaaaaaaaaaaaaaaaaaaaaaaaaaaaaaaaaaaaaaaaaaaaaaaaaaaaaaaaaaaaaaaaaaaaaaaaaaaaaaaaaaaaaaaaaaaaaaaaaaaa

SEQ ID NO: 30565 - RNA, 1743 nt, Artificial Sequence
  mRNA product Design a-2 (A100) comprising derived and/or modified sequence from LASV(Josiah;Clade IV)__NP_694870__GPCmut6 (opt1)
aggagaguccgcucagccagguugcagaagcggcuuagcguguguccuaaucuucucucugcguguagguaggccugugccgcaaacaagcuuaccaugggccagaucgugaccuucuuccaggaggucccccacgugaucgaggaggugaugaacaucguccugaucgcccucagcgugcuggccgugcugaaggggcucuacaacuucgcgaccugcggccuggucgggcuggugacguuccuccugcugugcggccgcuccugcaccaccagccucuacaaggggguguacgagcugcagacccuggagcucaacauggagacgcugaacaugugcaugccgcuguccugcaccaagaacaacagccaccacuacaucauggucggcaacgagaccggccucgagcugacccugacgaacaccuccaucaucaaccacaaguucugcaaccucagcgacgcccacaagaagaaccuguacgaccacgcccugauguccaucaucagcaccuuccaccucuccauccccaacuucaaccaguacgaggccaugagcugcgacuucaacgggggcaagaucuccgugcaguacaaccugagccacuccuacgccggggacgcggccaaccacugcggcaccguggccaacgggguccugcagacguucaugcggauggccuggggcggcagcuacaucgcgcucgacuccgggcgcggcaacugggacugcaucaugaccagcuaccaguaccugaucauccagaacaccaccugggaggaccacugccaguucucccggcccagccccaucggguaccugggccuccugucccagcgcacgcgggacaucuacaucagccgccggcugcucggcaccuucaccuggacccugagcgacuccgaggggaaggacacgccgggcggguacugccugacccgcuggaugcucaucgaggccgagcugaagugcuucggcaacaccgccguggccaagugcaacgagaagcacgacgaggaguucugcgacaugcugcggcuguucgacuucugcaagcaggccauccagcgccugaaggcgcccgcccagaugagcauccagcugaucaacaaggccgugaacgcccucaucaacgaccagcugaucaugaagaaccaccuccgggacaucauggggauccccuacugcaacuacuccaaguacugguaccucaaccacaccacgaccggccgcaccagccugcccaagugcuggcuggucuccaacggcagcuaccucaacgagacccacuucuccgacgacaucgagcagcaggccgacaacaugaucacggagaugcugcagaaggaguacauggagcggcaggggaagaccccgcugggccugguggaccucuucguguucagcaccuccuucuaccugaucagcaucuuccugcaccucgucaagauccccacccaccgccacaucguggggaaguccugccccaagccccaccggcugaaccacaugggcaucugcagcugcgggcuguacaagcagccgggcgugcccgucaaguggaagcgcugaggacuagucccuguucccagagcccacuuuuuuuucuuuuuuugaaauaaaauagccugucuuucagaucuaaaaaaaaaaaaaaaaaaaaaaaaaaaaaaaaaaaaaaaaaaaaaaaaaaaaaaaaaaaaaaaaaaaaaaaaaaaaaaaaaaaaaaaaaaaaaaaaaaaa

SEQ ID NO: 30566 - RNA, 1740 nt, Artificial Sequence
  mRNA product Design a-2 (A100) comprising derived and/or modified sequence from LASV(LP;Clade I)__AAF86701__GPCmut6 (opt1)
aggagaguccgcucagccagguugcagaagcggcuuagcguguguccuaaucuucucucugcguguagguaggccugugccgcaaacaagcuuaccaugggccagaucaucaccuucuuccaggaggugccccacgucaucgaggaggugaugaacaucgugcugaucgcccucagccugcuggccauccucaaggggcuguacaacaucgcgaccugcggcaucaucgggcuggucgccuuccucuuccugugcggcaaguccugcagccugacgcucaagggcggguacgagcugcagacccuggagcucaacauggagacccugaacaugugcaugccgcuguccugcaccaagaacagcucccaccacuacauccgcgugggcaacgagacggggcucgagcugacccugaccaacaccagcaucaucaaccacaaguucugcaaccucuccgacgcccacaagaagaaccuguacgaccacgcccugaugagcaucaucuccacguuccaccucagcauccccaacuucaaccaguacgaggccauguccugcgacuucaacggcgggaagaucagcgugcaguacaaccugucccacagcuacgcgggcgacgccgccgagcacugcgggaccgucgccaacggcgugcugcagaccuucaugcggauggcguggggcgggcgcuacaucgcccucgacuccggcaaggggaacugggacugcaucaugaccagcuaccaguaccugaucauccagaacacgaccugggaggaccacugccaguucucccggcccagccccaucggcuaccugggccuccugucccagcgcacccgggacaucuacaucagccgccggcugcucgggaccuucacguggacccugagcgacuccgagggcaacgagacccccgggggcuacugccugacccgcuggaugcucaucgaggccgagcugaagugcuucgggaacacggccguggccaagugcaacgagaagcacgacgaggaguucugcgacaugcugcggcuguucgacuucugcaagcaggcgauccgccggcugaaggccccggcccagaugagcauccagcugaucaacaaggccgucaacgcccucaucaacgaccagcugaucaugaagaaccaccuccgcgacaucaugggcauccccuacugcaacuacuccaaguacugguaccucaaccacaccagcuccggccggaccagccugcccaagugcuggcugaucuccaacgggagcuaccucaacgagacccaguucuccgacgacaucgagcagcaggcggacaacaugaucacggagaugcugcagaaggaguacaucgagcgccagggcaagaccccgcuggggcugguggacaucuucaucuucagcaccuccuucuaccucaucagcaucuuccugcaccugaucaagauccccacccaccggcacaucgugggcaagcccugccccaagccgcaccgccucaaccacaugggggucugcuccugcggccuguacaagcaccccggcgugcccacgaaguggaagcggugaggacuagucccuguucccagagcccacuuuuuuuucuuuuuuugaaauaaaauagccugucuuucagaucuaaaaaaaaaaaaaaaaaaaaaaaaaaaaaaaaaaaaaaaaaaaaaaaaaaaaaaaaaaaaaaaaaaaaaaaaaaaaaaaaaaaaaaaaaaaaaaaaaaaa

SEQ ID NO: 30567 - RNA, 1740 nt, Artificial Sequence
  mRNA product Design a-2 (A100) comprising derived and/or modified sequence from LASV(803213;Clade II)__AAF86703__GPCmut6 (opt1)
aggagaguccgcucagccagguugcagaagcggcuuagcguguguccuaaucuucucucugcguguagguaggccugugccgcaaacaagcuuaccaugggccagaucaucaccuucuuccaggaggugccccacgucaucgaggaggugaugaacaucgugcugaucgcccucagccugcuggccauccucaaggggaucuacaacgucgcgaccugcggccuguucgggcugaucuccuuccuccugcugugcggccgcagcugcuccgugacguacaaggggguguacgagcuccagacccuggagcugaacauggccaaccucaacaugugcaugccgcugagcugcaccaagaacaacucccaccacuacaucauggucggcaacgagaccggccuggagcucacgcugaccaacaccagcaucaucaaccacaaguucugcaaccuguccgacgcccacaagaagaaccucuacgaccacgcccugaugagcaucaucuccaccuuccaccugagcauccccaacuucaaccaguacgaggccauguccugcgacuucaacgggggcaagaucagcgugcaguacaaccucucccacagcuucgcgguggacgccgccaaccacugcgggacgaucgccaacggcguccugcagaccuucaugcggauggcguggggcggguccuacaucgcccuggacagcggcaaggggaacugggacugcaucaugaccuccuaccaguaccucaucauccagaacaccacgugggaggaccacugccaguucagccgccccucccccaucggcuaccuggggcugcucagccagcggacccgcgacaucuacaucagccggcgccugcugggcaccuucaccuggacgcucuccgacagcgagggcaacgaggcccccgggggcuacugccugacccgguggaugcugaucgaggccgagcucaagugcuucgggaacaccgccguggcgaagugcaacgagaagcacgacgaggaguucugcgacaugcugcgccuguucgacuucugcaagcaggccaucaagcggcucaagaccccggcccagauguccauccagcugaucaacaaggccgugaacgcccugaucaacgaccagcucaucaugaagaaccaccuccgcgacaucaugggcauccccuacugcaacuacagccgguacugguaccugaaccacacggucaccgggaagaccucccugccccgcugcuggcuggugagcaacggcuccuaccugaacgagacccacuucagcgacgacaucgagcagcaggcggacaacaugaucacggagaugcuccagaaggaguacauggaccggcagggcaagaccccgcuggggcugguggaccuguucgucuucuccaccagcuucuaccucaucuccaucuuccugcaccuggugaagauccccacccaccgccacaucgugggcaagcccugccccaagccgcaccggcucaaccacauggggaucugcagcugcggccuguacaagcaccccgggguccccgugaaguggaagcgcugaggacuagucccuguucccagagcccacuuuuuuuucuuuuuuugaaauaaaauagccugucuuucagaucuaaaaaaaaaaaaaaaaaaaaaaaaaaaaaaaaaaaaaaaaaaaaaaaaaaaaaaaaaaaaaaaaaaaaaaaaaaaaaaaaaaaaaaaaaaaaaaaaaaaa

SEQ ID NO: 30568 - RNA, 1740 nt, Artificial Sequence
  mRNA product Design a-2 (A100) comprising derived and/or modified sequence from LASV(GA391;Clade III)__CAA36645__GPCmut6 (opt1)
aggagaguccgcucagccagguugcagaagcggcuuagcguguguccuaaucuucucucugcguguagguaggccugugccgcaaacaagcuuaccaugggccagaucgugaccuucuuccaggaggucccccacgugaucgaggaggugaugaacaucguccugaucgcccucagcauccuggccauccugaaggggcucuacaacguggcgaccugcggccugaucgggcuggugacguuccuccugcuguccggccgcagcugcucccucaucuacaaggggaccuacgagcugcagacccuggagcucaacauggagacccugaacaugugcaugccgcugagcugcacgaagaacaacucccaccacuacauccgggucggcaacgagaccggccucgagcugacccugaccaacacgagcauccucaaccacaaguucugcaaccuguccgacgcccacaagcgcaaccuguacgaccacagccucauguccaucaucagcaccuuccaccuguccauccccaacuucaaccaguacgaggccaugagcugcgacuucaacgggggcaagaucaccgugcaguacaaccugucccacagcuucgccguggacgccgcggggcacugcggcacccucgccaacgggguccugcagacguucaugcggauggccuggggcggcuccuacaucgcccuggacagcgggcgcggcaacugggacugcaucaugaccuccuaccaguaccucaucauccagaacaccaccugggacgaccacugccaguucagccggcccucccccaucggguaccugggccugcucagccagcgcacgcgggacaucuacaucagccgccggcugcugggcaccuucaccuggacccucuccgacagcgaggggaacgagacgccgggcggguacugccugacccgcuggaugcugaucgaggcggagcucaagugcuucggcaacaccgccguggccaagugcaacgagaagcacgacgaggaguucugcgacaugcugcggcuguucgacuucugcaagcaggccauccgccggcucaagacccccgcccagauguccauccagcugaucaacaaggcggugaacgcccugaucaacgaccagcucaucaugaagaaccaccuccgcgacaucauggggauccccuacugcaacuacagccgguacugguaccugaaccacacguccaccggcaagaccagccugccccgcugcuggcugaucuccaacggcagcuaccugaacgagaccaaguucuccgacgacaucgagcagcaggccgacaacaugaucacggagaugcugcagaaggaguacaucgaccggcaggggaagaccccgcucggccuggucgaccuguucguguucagcaccuccuucuaccucaucagcaucuuccugcaccuggugaagauccccacccaccgccacaucgucgggaagcccugccccaagccgcaccggcucaaccacaugggcaucugcuccugcgggcuguacaagcagcccggcgugcccgugcgcuggaagcggugaggacuagucccuguucccagagcccacuuuuuuuucuuuuuuugaaauaaaauagccugucuuucagaucuaaaaaaaaaaaaaaaaaaaaaaaaaaaaaaaaaaaaaaaaaaaaaaaaaaaaaaaaaaaaaaaaaaaaaaaaaaaaaaaaaaaaaaaaaaaaaaaaaaaa

SEQ ID NO: 30569 - RNA, 1743 nt, Artificial Sequence
  mRNA product Design a-2 (A100) comprising derived and/or modified sequence from LASV(AV;Clade V)__CCA30314__GPCmut6 (opt1)
aggagaguccgcucagccagguugcagaagcggcuuagcguguguccuaaucuucucucugcguguagguaggccugugccgcaaacaagcuuaccaugggccagaucgugaccuucuuccaggaggucccccacgugaucgaggaggugaugaacaucguccugaucgcccucagcauccuggccgugcugaaggggcucuacaacaucgcgaccugcggccugaucgggcugaucacguuccuccugcugugcggccgcuccugcagcuccaaccucuacaaggggguguacgagcugcagagccuggaccucaacauggagacccugaacaugugcaugccgcuguccugcaccaagaacaacagccaccacuacauccgggucggcaacgacaccggccucgagcugacgcugaccaacaccuccauccucaaccacaaguucugcaaccugagcgacgcccacaagaaggaccuguacgaccacgcccucauguccaucaucagcaccuuccaccuguccauccccaacuucaaccaguacgaggccaugagcugcgacuucaacgggggcaagaucuccgugcaguacaaccugagccacuccuacgccaucgacgcggccaaccacugcgggacgguggccaacggcauccuccagaccuucaugcgcauggccuggggcgggagcuacaucgcgcuggacuccggccgggggaacugggacugcaucaugaccagcuaccaguaccugaucauccagaacaccacgugggagaaccacugccaguucucccgccccagccccaucggcuaccucgggcugcugagccagcggacccgcgacaucuacaucucccggcgccuccugggcaccuucaccuggacgcugagcgacuccgagggcaacgccacccccgggggcuacugccucacccgguggaugcugaucgaggccgagcugaagugcuucgggaacaccgccgucgccaagugcaacgagaagcacgacgaggaguucugcgacaugcuccgccuguucgacuucugcaagcaggcgaucagccggcugaaguccccggcccagaugagcauccagcucaucaacaaggccgugaacgcccugaucaacgaccagcugaucaugaagaaccaccuccgcgacaucaugggcauccccuacugcaacuacuccaaguacugguaccugaaccacacgaucaccgggaagaccagccugcccaagugcuggcucguguccaacggcagcuaccugaacgagacccacuucuccgacgacaucgagcagcaggccgacaacaugaucacggagaugcugcagaaggaguacauggagcggcagggcaagaccccgcuggggcucgucgaccuguucguguucagcaccuccuucuaccugaucagcaucuuccuccgccuggugaagauccccacccaccggcacaucgucggcaagcccugccccaagccgcaccgccugaaccacauggggaucugcuccugcggccucuacaagcagcccggggugcccgugcgguggaagcgcugaggacuagucccuguucccagagcccacuuuuuuuucuuuuuuugaaauaaaauagccugucuuucagaucuaaaaaaaaaaaaaaaaaaaaaaaaaaaaaaaaaaaaaaaaaaaaaaaaaaaaaaaaaaaaaaaaaaaaaaaaaaaaaaaaaaaaaaaaaaaaaaaaaaaa

SEQ ID NO: 30570 - RNA, 1740 nt, Artificial Sequence
  mRNA product Design a-2 (A100) comprising derived and/or modified sequence from LASV(Togo/2016/7082;Clade VI)__AMR44577__GPCmut6 (opt1)
aggagaguccgcucagccagguugcagaagcggcuuagcguguguccuaaucuucucucugcguguagguaggccugugccgcaaacaagcuuaccaugggccagaucaucaccuucuuccaggaggugccccacgucaucgaggaggugaugaacaucgugcugaucgcccucagccugcuggccauccucaagggggucuacaacguggcgaccugcggcaucaucgggcuggugacguuccuguuccucugcggccgcuccugcagccugaucuacaagggguccuacgagcugcagacccucgagcugaacauggagacccugaacaugugcaugccgcucagcugcaccaagaacuccagccaccacuacauccgggucggcaacgagacgggccuggagcugacccucaccaacaccuccaucaucaaccacaaguucugcaaccugagcgacgcccacaagcgcaaccuguacgaccacgcccucauguccauccugagcacguuccaccuguccauccccaacuucaaccaguacgaggccaugagcugcgacuucaacgggggcaagaucuccgugcaguacaaccucagccacgccuacgcgguggacgccgccgagcacugcgggaccgucgccaacggcgugcugcagaccuucaugcggauggcguggggcggguccuacaucgcccuggacagcggccgcgggaacugggacugcaucaugaccuccuaccaguaccucaucauccagaacacgaccugggaggaccacugccaguucagccggcccucccccaucggcuaccuggggcugcucagccagcgcacccgggacaucuacaucagccgccggcugcugggcaccuucacguggacccucuccgacagcgagggcaacgagacccccgggggcuacugccugacccgcuggaugcugaucgaggccgagcucaagugcuucgggaacacggccguggccaagugcaacgagaagcacgacgaggaguucugcgacaugcugcggcuguucgacuucugcaagcaggcgauccagcgccucaaguccccggcccagaugagcauccagcugaucaacaaggccgucaacgcccugaucaacgaccagcucaucaugaagaaccaccuccgggacaugaugggcauccccuacugcaacuacuccaaguacugguaccugaaccacaccagcuccgggcgcaccagccugcccaagugcuggcugguguccaacggcagcuaccugaacgagacccacuucuccgacgacaucgagcagcaggccgacaacaugaucacggagaugcuccagaaggaguacaucgaccggcagggcaagaccccgcuggggcugguggaccuguucgucuucagcaccuccuucuaccucaucagcaucuuccugcaccugaucaagauccccacccaccgccacaucgugggcaagcccugccccaagccgcaccggcucaaccacauggggaucugcuccugcggccuguacaagcagcccggggugcccacgcgcuggaagcggugaggacuagucccuguucccagagcccacuuuuuuuucuuuuuuugaaauaaaauagccugucuuucagaucuaaaaaaaaaaaaaaaaaaaaaaaaaaaaaaaaaaaaaaaaaaaaaaaaaaaaaaaaaaaaaaaaaaaaaaaaaaaaaaaaaaaaaaaaaaaaaaaaaaaa

SEQ ID NO: 30571 - RNA, 1740 nt, Artificial Sequence
  mRNA product Design a-2 (A100) comprising derived and/or modified sequence from LASV(KAK-428;Clade n.d. (VII))__ANH09740__GPCmut6 (opt1)
aggagaguccgcucagccagguugcagaagcggcuuagcguguguccuaaucuucucucugcguguagguaggccugugccgcaaacaagcuuaccaugggccagaucgugaccuucuuccaggaggucccccacgugaucgaggaggugaugaacaucguccugaucgcccucagccugcuggccauccucaaggggcuguacaacuucgcgaccugcggcgugaucgggcugaucacguuccuccugcugugcggccgcuccugcagcgccaccuacaaggggcaguacgagcuccagacccuggagcugaacauggagucccucaacaugugcaugccgcugagcugcaccaagaacaacucccaccacuacauccgggccggcaacaacacgggccuggagcucacccugaccaacaccagcaucaucucccacaaguucugcaaccugagcgacgcccacaagaagaaccucuacgaccacacgcugauguccaucaucaccaccuuccaccugagcauccccaacuucaaccaguacgaggccauguccugcgacuucaacgggggcaagaucagcauccaguacaaccucucccacagcuacgcgggggacgccgcccagcacugcggcaccguggccaacgggguccugcagacguucaugcgcauggcguggggcggcuccuaccuggcccucgacagcgggcggcgcggcugggacugcaucaucuccagcuaccaguaccugaucauccagaacaccaccugggacgaccacugccaguucucccggcccagccccaucggguaccugggcuucgugagccagaagacccgcgacaucuacaucucccggcgccuccugggcacguucaccuggacccugagcgacuccgaggggcacgacaugccgggcggguacugccucacccgguggaugcugaucgaggccgaccugaagugcuucggcaacacggccguggccaagugcaacgagaagcacgacgaggaguucugcgacauguggcgccucuucgacuucugcaagcaggcgauccagcggcugaaggcccccgcccagaugaacauccagcugaucaacaaggccgucaacgcccucaucaacgaccagcugaugaugaagaaccaccuccgcgacaucauggggauccccuacugcaacuacagcaaguucugguaccugaacaacaccaccaccggccggacgucccugccccgcugcuggcugaucagcaacggcuccuaccucaacgagacccacuucagcgacgacaucgagcagcaggcggacaacaugaucaccgagaugcugcagaaggaguacauggaccggcaggggaagaccccgcugggccucguggaccuguucguguucuccacgagcuucuaccugaucaccaucuuccugcaccucgucaagauccccacccaccgccacaucguggggaagcccugccccaagccgcaccggcugaaccacaugggcaucugcuccugcgggcuguacaagcagcccggcgugcccguccgcuggaagcggugaggacuagucccuguucccagagcccacuuuuuuuucuuuuuuugaaauaaaauagccugucuuucagaucuaaaaaaaaaaaaaaaaaaaaaaaaaaaaaaaaaaaaaaaaaaaaaaaaaaaaaaaaaaaaaaaaaaaaaaaaaaaaaaaaaaaaaaaaaaaaaaaaaaaa

SEQ ID NO: 30572 - RNA, 1740 nt, Artificial Sequence; identical to SEQ ID NO: 30566
  mRNA product Design a-2 (A100) comprising derived and/or modified sequence from LASV(Pinneo-NIG-1969;Clade I)__AIT17836__GPCmut6 (opt1)

SEQ ID NO: 30573 - RNA, 1740 nt, Artificial Sequence
  mRNA product Design a-2 (A100) comprising derived and/or modified sequence from LASV(ISTH0009-NIG-2011;Clade II)__AIT17404__GPCmut6 (opt1)
aggagaguccgcucagccagguugcagaagcggcuuagcguguguccuaaucuucucucugcguguagguaggccugugccgcaaacaagcuuaccaugggccagaucaucaccuucuuccaggaggugccccacgucaucgaggaggugaugaacaucgugcugaucgcccucagccugcuggccauccucaaggggaucuacaacgucgcgaccugcggccuguucgggcugguguccuuccuccugcugugcggccgcagcugcuccacgaccuacaaggggguguacgagcuccagacccuggagcuggacauggccagccucaacaugugcaugccgcuguccugcaccaagaacaacagccaccacuacaucauggucggcaacgagacgggccuggagcucacccugaccaacaccuccaucaucaaccacaaguucugcaaccugagcgacgcccacaagaagaaccucuacgaccacgcccugauguccaucaucagcacguuccaccuguccauccccaacuucaaccaguacgaggccaugagcugcgacuucaacgggggcaagaucuccgugcaguacaaccucagccacgcguacgccguggacgccgccaaccacugcgggaccaucgcgaacggcguccugcagaccuucaugcggauggccuggggcggguccuacaucgcccuggacagcggcaagggguccugggacugcaucaugaccagcuaccaguaccucaucauccagaacacgaccugggaggaccacugccaguucucccgccccagccccaucggcuaccuggggcugcucagccagcggacccgcgacaucuacaucucccggcgccugcugggcaccuucacguggacccucagcgacuccgagggcaacgagacccccgggggcuacugccugacccgguggaugcugaucgaggccgagcucaagugcuucgggaacacggccguggcgaagugcaacgagaagcacgacgaggaguucugcgacaugcugcgccuguucgacuucugcaagcaggccauccggcgccucaagaccccggcccagaugagcauccagcugaucaacaaggccgugaacgcccugaucaacgaccagcucaucaugaagaaccaccuccgggacaucaugggcauccccuacugcaacuacuccaaguacugguaccugaaccacaccgucaccgggaagacgagccugccccgcugcuggcugguguccaacggcagcuaccugaacgagacccacuucuccgacgacaucgagcagcaggcggacaacaugaucaccgagcuccugcagaaggaguacauggaccggcagggcaagaccccgcuggggcugguggaccucuucgucuucagcacguccuucuaccugaucagcaucuuccugcaccucaucaagauccccacccaccgccacaucaccggcaagcccugccccaagccgcaccggcugaaccacauggggaucugcuccugcggccuguacaagcaccccggggugcccgugaaguggaagcgcugaggacuagucccuguucccagagcccacuuuuuuuucuuuuuuugaaauaaaauagccugucuuucagaucuaaaaaaaaaaaaaaaaaaaaaaaaaaaaaaaaaaaaaaaaaaaaaaaaaaaaaaaaaaaaaaaaaaaaaaaaaaaaaaaaaaaaaaaaaaaaaaaaaaaa

SEQ ID NO: 30574 - RNA, 1740 nt, Artificial Sequence
  mRNA product Design a-2 (A100) comprising derived and/or modified sequence from LASV(ISTH2010-NIG-2012;Clade II)__AIT17482__GPCmut6 (opt1)
aggagaguccgcucagccagguugcagaagcggcuuagcguguguccuaaucuucucucugcguguagguaggccugugccgcaaacaagcuuaccaugggccagaucaucaccuucuuccaggaggugccccacgucaucgaggaggugaugaacaucgugcugaucgcccucagccugcuggccauccucaaggggaucuacaacgucgcgaccugcggccuguucgggcugguguccuuccuccugcugugcggccgcagcugcuccacgaccuacaaggggguguacgagcuccagacccuggagcuggacauggccagccucaacaugugcaugccgcuguccugcaccaagaacaacagccaccacuacaucauggucggcaacgagacgggccuggagcucacccugaccaacaccuccaucaucaaccacaaguucugcaaccugagcgacgcccacaagaagaaccucuacgaccacgcccugauguccaucaucagcacguuccaccuguccauccccaacuucaaccaguacgaggccaugagcugcgacuucaacgggggcaagaucuccgugcaguacaaccucagccacgcguacgccguggacgccgccaaccacugcgggaccaucgcgaacggcguccugcagaccuucaugcggauggccuggggcggguccuacaucgcccuggacagcggcaagggguccugggacugcaucaugaccagcuaccaguaccucaucauccagaacaucacgugggaggaccacugccaguucucccgccccagccccaucggcuaccuggggcugcucagccagcggacccgcgacaucuacaucucccggcgccugcugggcaccuucaccuggacgcucagcgacuccgagggcaacgagacccccgggggcuacugccugacccgguggaugcugaucgaggccgagcucaagugcuucgggaacaccgccguggcgaagugcaacgagaagcacgacgaggaguucugcgacaugcugcgccuguucgacuucugcaagcaggccauccggcgccucaagacgccggcccagaugagcauccagcugaucaacaaggccgugaacgcccugaucaacgaccagcucaucaugaagaaccaccuccgggacaucaugggcauccccuacugcaacuacuccaaguacugguaccugaaccacaccgucaccgggaagaccagccugccccgcugcuggcugguguccaacggcagcuaccugaacgagacgcacuucuccgacgacaucgagcagcaggcggacaacaugaucaccgagcuccugcagaaggaguacaucgaccggcagggcaagaccccgcuggggcugguggaccucuucgucuucagcaccuccuucuaccugaucagcaucuuccugcaccucgugaagauccccacgcaccgccacguggucggcaagcccugccccaagccgcaccggcugaaccacauggggaucugcuccugcggccuguacaagcaccccggggugcccgugaaguggaagcgcugaggacuagucccuguucccagagcccacuuuuuuuucuuuuuuugaaauaaaauagccugucuuucagaucuaaaaaaaaaaaaaaaaaaaaaaaaaaaaaaaaaaaaaaaaaaaaaaaaaaaaaaaaaaaaaaaaaaaaaaaaaaaaaaaaaaaaaaaaaaaaaaaaaaaa

SEQ ID NO: 30575 - RNA, 1740 nt, Artificial Sequence
  mRNA product Design a-2 (A100) comprising derived and/or modified sequence from LASV(Lassa virus/H.sapiens-wt/NGA/2015/ISTH_0543;Clade II)__AVO03639__GPCmut6 (opt1)
aggagaguccgcucagccagguugcagaagcggcuuagcguguguccuaaucuucucucugcguguagguaggccugugccgcaaacaagcuuaccaugggccagaucaucaccuucuuccaggaggugccccacgucaucgaggaggugaugaacaucgugcugaucgcccucagccugcuggccauccucaaggggaucuacaacgucgcgaccugcggccuguucgggcugguguccuuccuccugcugugcggccgcagcugcuccacgaccuacaaggggguguacgagcuccagacccuggagcuggacauggccaaccucaacaugugcaugccgcugagcugcaccaagaacaacucccaccacuacaucauggucggcaacgagacgggccuggagcucacccugaccaacaccagcaucaucaaccacaaguucugcaaccuguccgacgcccacaagaagaaccucuacgaccacgcccugaugagcaucaucuccacguuccaccugagcauccccaacuucaaccaguacgaggccauguccugcgacuucaacgggggcaagaucagcgugcaguacaaccucucccacaccuacgcgguggacgccgccaaccacugcgggaccaucgccaacggcguccugcagaccuucaugcggauggcguggggcgggagcuacaucgcccuggacuccggcaaggggagcugggacugcaucaugacguccuaccaguaccucgugauccagaacaccaccugggaggaccacugccaguucagccgccccucccccaucggcuaccuggggcugcucagccagcggacccgcgacaucuacaucagccggcgccugcugggcacguucaccuggacccucuccgacagcgagggcaacgagacccccgggggcuacugccugacgcgguggaugcugaucgaggccgagcucaagugcuucgggaacaccgccguggccaagugcaacgagaagcacgacgaggaguucugcgacaugcugcgccuguucgacuucugcaagcaggcgauccggcgccucaagaccccggcccagauguccauccagcugaucaacaaggccgucaacgcccugaucaacgaccagcucaucaugaagaaccaccuccgggacaucaugggcauccccuacugcaacuacagcaaguacugguaccugaaccacaccgugacggggaagaccucccugccccgcugcuggcuggugagcaacggcuccuaccugaacgagacccacuucagcgacgacaucgagcagcaggccgacaacaugaucaccgagcuccugcagaaggaguacaucgaccggcagggcaagacgccgcuggggcuggucgaccucuucguguucuccaccagcuucuaccugaucuccaucuuccugcaccucgugaagauccccacccaccgccacaucaccggcaagcccugccccaagccgcaccggcugaaccacauggggaucugcagcugcggccuguacaagcaccccgggguccccgugaaguggaagcgcugaggacuagucccuguucccagagcccacuuuuuuuucuuuuuuugaaauaaaauagccugucuuucagaucuaaaaaaaaaaaaaaaaaaaaaaaaaaaaaaaaaaaaaaaaaaaaaaaaaaaaaaaaaaaaaaaaaaaaaaaaaaaaaaaaaaaaaaaaaaaaaaaaaaaa

SEQ ID NO: 30576 - RNA, 1740 nt, Artificial Sequence
  mRNA product Design a-2 (A100) comprising derived and/or modified sequence from LASV(Lassa virus/H.sapiens-wt/NGA/2016/ISTH_0009;Clade II)__AVO03571__GPCmut6 (opt1)
aggagaguccgcucagccagguugcagaagcggcuuagcguguguccuaaucuucucucugcguguagguaggccugugccgcaaacaagcuuaccaugggccagaucaucaccuucuuccaggaggugccccacgucaucgaggaggugaugaacaucgugcugaucgcccucagccugcuggccauccucaaggggaucuacaacgucgcgaccugcggccugcuggggcucguguccuuccugcugcucugcggccgcagcugcuccacgaccuacaaggggguguacgagcugcagacccuggagcucgacauggccagccugaacaugugcaugccgcuguccugcaccaagaacaacagccaccacuacaucauggucggcaacgagacgggccucgagcugacccugaccaacaccuccaucaucaaccacaaguucugcaaccucagcgacgcccacaagaagaaccuguacgaccacgcccugauguccaucaucagcacguuccaccucuccauccccaacuucaaccaguacgaggccaugagcugcgacuucaacgggggccggaucuccgugcaguacaaccugagccacuccuacgcgguggacgccgccaaccacugcgggaccaucgccaacggcguccugcagaccuucaugcgcauggcguggggcgggagcuacaucgcccucgacuccggcaaggggagcugggacugcaucaugaccuccuaccaguaccugaucauccagaacacgaccugggaggaccacugccaguucagccggcccagccccaucggcuaccuggggcuccugucccagcgcacccgggacaucuacaucagccgccggcugcucggcaccuucacguggacccuguccgacagcgagggcaacgagacccccgggggcuacugccugacccgcuggaugcucaucgaggccgagcugaagugcuucgggaacacggccguggccaagugcaacgagaagcacgacgaggaguucugcgacaugcugcggcuguucgacuucugcaagcaggcgauccgccggcugaagaccccggcccagauguccauccagcugaucaacaaggccgugaacgcccucaucaacgaccagcugaucaugaagaaccaccuccgcgacaucaugggcauccccuacugcaacuacagcaaguacugguaccucaaccacaccgucaccgggaagacgucccugccccggugcuggcuggugagcaacggcuccuaccucaacgagacccacuucagcgacgacaucgagcagcaggccgacaacaugaucaccgagcugcugcagaaggaguacaucgaccgccagggcaagaccccgcuggggcucguggaccuguucgucuucuccacgagcuucuaccugaucuccaucuuccuccaccuggugaagauccccacccaccggcacaucaccggcaagcccugccccaagccgcaccgccugaaccacauggggaucugcagcugcggccucuacaaccaccccggggugcccgucaaguggaagcggugaggacuagucccuguucccagagcccacuuuuuuuucuuuuuuugaaauaaaauagccugucuuucagaucuaaaaaaaaaaaaaaaaaaaaaaaaaaaaaaaaaaaaaaaaaaaaaaaaaaaaaaaaaaaaaaaaaaaaaaaaaaaaaaaaaaaaaaaaaaaaaaaaaaaa

SEQ ID NO: 30577 - RNA, 1740 nt, Artificial Sequence
  mRNA product Design a-2 (A100) comprising derived and/or modified sequence from LASV(Lassa virus/H.sapiens-wt/NGA/2016/ISTH_0017;Clade II)__AVO03567__GPCmut6 (opt1)
aggagaguccgcucagccagguugcagaagcggcuuagcguguguccuaaucuucucucugcguguagguaggccugugccgcaaacaagcuuaccaugggccagaucaucaccuucuuccaggaggugccccacgucaucgaggaggugaugaacaucgugcugaucgcccucagccugcuggccauccucaaggggaucuacaacgucgcgaccugcggccuguucgggcugguguccuuccuccugcugugcggccgcagcugcuccacgaccuacaaggggguguacgagcuccagacccuggagcuggacauggccagccucaacaugugcaugccgcuguccugcaccaagaacaacagccaccacuacaucauggucggcaacgagacgggccuggagcucacccugaccaacaccuccaucaucaaccacaaguucugcaaccugagcgacgcccacaagaagaaccucuacgaccacgcccugauguccaucaucagcacguuccaccuguccauccccaacuucaaccaguacgaggccaugagcugcgacuucaacgggggcaagaucuccgugcaguacaaccucagccacaccuacgcgaucgacgccgccaaccacugcgggaccaucgccaacggcgugcugcagaccuucaugcggauggcguggggcggguccuacaucgcccuggacagcggcaagggguccugggacugcaucaugacgagcuaccaguaccucaucauccagaacaccaccugggaggaccacugccaguucucccgccccagccccaucggcuaccuggggcugcucagccagcggacccgcgacaucuacaucucccggcgccugcugggcacguucaccuggacccucagcgacuccgagggcaacgagacccccgggggcuacugccugacgcgguggaugcugaucgaggccgagcucaagugcuucgggaacaccgccgucgccaagugcaacgagaagcacgacgaggaguucugcgacaugcugcgccuguucgacuucugcaagcaggcgauccggcgccucaagaccccggcccagaugagcauccagcugaucaacaaggccgugaacgcccugaucaacgaccagcucaucaugaagaaccaccuccgggacaucaugggcauccccuacugcaacuacuccaaguacugguaccugaaccacaccgugacggggaagaccagccugccccgcugcuggcuggucuccaacggcagcuaccugaacgagacccacuucuccgacgacaucgagcagcaggccgacaacaugaucaccgagcuccugcagaaggaguacauggaccggcagggcaagacgccgcuggggcugguggaccucuucguguucagcaccuccuucuaccugaucagcaucuuccugcaccucguccgcauccccacccaccggcacgugaucggcaagcccugccccaagccgcaccgccugaaccacauggggaucugcuccugcggccuguacaagcaccccggggugcccgucaaguggaagcggugaggacuagucccuguucccagagcccacuuuuuuuucuuuuuuugaaauaaaauagccugucuuucagaucuaaaaaaaaaaaaaaaaaaaaaaaaaaaaaaaaaaaaaaaaaaaaaaaaaaaaaaaaaaaaaaaaaaaaaaaaaaaaaaaaaaaaaaaaaaaaaaaaaaaa

SEQ ID NO: 30578 - RNA, 1740 nt, Artificial Sequence
  mRNA product Design a-2 (A100) comprising derived and/or modified sequence from LASV(Lassa virus/H.sapiens-wt/NGA/2018/ISTH_0959;Clade II)__AVV65099__GPCmut6 (opt1)
aggagaguccgcucagccagguugcagaagcggcuuagcguguguccuaaucuucucucugcguguagguaggccugugccgcaaacaagcuuaccaugggccagaucaucaccuucuuccaggaggugccccacgucaucgaggaggugaugaacaucgugcugaucgcccucagccugcuggccauccucaaggggaucuacaacgucgugaccugcggccuguucgggcugguguccuuccuccugcugugcggccgcagcugcuccacgaccuacaagggggucuacgagcuccagacccuggagcuggacauggcgagccucaacaugugcaugccgcuguccugcaccaagaacaacagccaccacuacaucauggugggcaacgagacgggccuggagcucacccugaccaacaccuccaucaucaaccacaaguucugcaaccugagcgacgcccacaagaagaaccucuacgaccacgcccugauguccaucaucagcacguuccaccuguccauccccaacuucaaccaguacgaggccaugagcugcgacuucaacgggggcaagaucuccgugcaguacaaccucagccacgccuacgcgaucgacgccgccaaccacugcgggaccaucgccaacggcguccugcagaccuucaugcggauggcguggggcggguccuacaucgcccuggacagcggcaagggguccugggacugcaucaugaccagcuaccaguaccucaucauccagaacacgaccugggaggaccacugccaguucucccgccccagccccaucggcuaccuggggcugcucagccagcggacccgcgacaucuacaucucccggcgccugcugggcaccuucacguggacccucagcgacuccgagggcaacgagacccccgggggcuacugccugacccgguggaugcugaucgaggccgagcucaagugcuucgggaacacggccguggccaagugcaacgagaagcacgacgaggaguucugcgacaugcugcgccuguucgacuucugcaagcaggcgauccggcgccucaagaccccggcccagaugagcauccagcugaucaacaaggccgugaacgcccugaucaacgaccagcucaucaugaagaaccaccuccgggacaucaugggcauccccuacugcaacuacuccaaguacugguaccugaaccacaccgucaccgggaagacgagccugccccgcugcuggcugguguccaacggcagcuaccugaacgagacccacuucuccgacgacaucgagcagcaggccgacaacaugaucaccgagcuccugcagaaggaguacaucgaccggcagggcaagaccccgcuggggcugguggaccucuucgucuucagcacguccuucuaccugaucagcaucuuccugcaccucgugaagauccccacccaccgccacgugaucggcaagcccugccccaagccgcaccggcugaaccacauggggaucugcuccugcggccuguacaagcaccccgggguccccgugaaguggaagcgcugaggacuagucccuguucccagagcccacuuuuuuuucuuuuuuugaaauaaaauagccugucuuucagaucuaaaaaaaaaaaaaaaaaaaaaaaaaaaaaaaaaaaaaaaaaaaaaaaaaaaaaaaaaaaaaaaaaaaaaaaaaaaaaaaaaaaaaaaaaaaaaaaaaaaa

SEQ ID NO: 30579 - RNA, 1740 nt, Artificial Sequence
  mRNA product Design a-2 (A100) comprising derived and/or modified sequence from LASV(LASV003-NIG-2008;Clade II)__AIT17580__GPCmut6 (opt1)
aggagaguccgcucagccagguugcagaagcggcuuagcguguguccuaaucuucucucugcguguagguaggccugugccgcaaacaagcuuaccaugggccagaucaucaccuucuuccaggaggugccccacgucaucgaggaggugaugaacaucgugcugaucgcccucagccugcuggccauccucaaggggaucuacaacgucgcgaccugcggccuguucgggcugguguccuuccuccugcugugcggccgcagcugcuccacgaccuacaaggggguguacgagcuccagacccuggagcuggacauggccagccucaacaugugcaugccgcuguccugcaccaagaacaacagccaccacuacaucauggucggcaacgagacgggccuggagcucacccugaccaacaccuccaucaucaaccacaaguucugcaaccugagcgacgcccacaagaagaaccucuacgaccacgcccugauguccaucaucagcacguuccaccuguccauccccaacuucaaccaguacgaggccaugagcugcgacuucaacgggggcaagaucuccgugcaguacaaccucagccacaccuacgcgguggacgccgccaaccacugcgggaccaucgccaacggcguccugcagaccuucaugcggauggcguggggcggguccuacaucgcccuggacagcggcaagggguccugggacugcaucaugacgagcuaccaguaccucaucauccagaacaccaccugggaggaccacugccaguucucccgccccagccccaucggcuaccuggggcugcucagccagcggacccgcgacaucuacaucucccggcgccugcugggcacguucaccuggacccucagcgacuccgagagcaacgagaccccgggcggguacugccugacgcgguggaugcugaucgaggccgagcucaagugcuucggcaacaccgccguggccaagugcaacgagaagcacgacgaggaguucugcgacaugcugcgccuguucgacuucugcaagcaggcgauccggcgccucaaggcccccgcccagauguccauccagcugaucaacaaggccgugaacgcccugaucaacgaccagcucaucaugaagaaccaccuccgggacaucauggggauccccuacugcaacuacagcaaguacugguaccugaaccacaccgucaccggccgcacgucccugccccggugcuggcuggugagcaacggguccuaccugaacgagacccacuucagcgacgacaucgagcagcaggcggacaacaugaucaccgagcuccugcagaaggaguacauggaccgccagggcaagaccccgcugggccugguggaccucuucgucuucuccacgagcuucuaccugaucuccaucuuccugcaccucgugaagauccccacccaccggcacgugaucgggaagcccugccccaagccgcaccgccugaaccacaugggcaucugcagcugcgggcuguacaagcaccccggcguccccgugaaguggaagcggugaggacuagucccuguucccagagcccacuuuuuuuucuuuuuuugaaauaaaauagccugucuuucagaucuaaaaaaaaaaaaaaaaaaaaaaaaaaaaaaaaaaaaaaaaaaaaaaaaaaaaaaaaaaaaaaaaaaaaaaaaaaaaaaaaaaaaaaaaaaaaaaaaaaaa

SEQ ID NO: 30580 - RNA, 1740 nt, Artificial Sequence
  mRNA product Design a-2 (A100) comprising derived and/or modified sequence from LASV(LASV035-NIG-2009;Clade II)__AIT17588__GPCmut6 (opt1)
aggagaguccgcucagccagguugcagaagcggcuuagcguguguccuaaucuucucucugcguguagguaggccugugccgcaaacaagcuuaccaugggccagaucaucaccuucuuccaggaggugccccacgucaucgaggaggugaugaacaucgugcugaucgcccucagccugcuggccauccucaaggggaucuacaacgucgcgaccugcggccuguucgggcugguguccuuccuccugcugugcggccgcagcugcuccacgaccuacaaggggguguacgagcuccagacccuggagcuggacauggccagccucaacaugugcaugccgcuguccugcaccaagaacaacagccaccacuacaucauggucggcaacgagacgggccuggagcucacccugaccaacaccuccaucaucaaccacaaguucugcaaccugagcgacgcccacaagaagaaccucuacgaccacgcccugauguccaucaucagcacguuccaccuguccauccccaacuucaaccaguacgaggccaugagcugcgacuucaacgggggcaagaucuccgugcaguacaaccucagccacgcguacgccguggacgccgccaaccacugcgggaccaucgcgaacggcguccugcagaccuucaugcggauggccuggggcggguccuacaucgcccuggacagcggcaagggguccugggacugcaucaugaccagcuaccaguaccucaucauccagaacacgaccugggaggaccacugccaguucucccgccccagccccaucggcuaccuggggcugcucagccagcggacccgcgacaucuacaucucccggcgccugcugggcaccuucacguggacccucagcgacuccgagggcaacgagacccccgggggcuacugccugacccgguggaugcugaucgaggccgagcucaagugcuucgggaacacggccguggcgaagugcaacgagaagcacgacgaggaguucugcgacaugcugcgccuguucgacuucugcaagcaggccauccggcgccucaaggccccggcccagaugagcauccagcugaucaacaaggccgugaacgcgcugaucaacgaccagcucaucaugaagaaccaccuccgggacaucaugggcauccccuacugcaacuacuccaaguacugguaccugaaccacaccgucaccgggaagaccagccugccccgcugcuggcugguguccaacggcagcuaccugaacgagacgcacuucuccgacgacaucgagcagcaggccgacaacaugaucaccgagcuccugcagaaggaguacaucgaccggcagggcaagaccccgcuggggcugguggaccucuucgucuucagcaccuccuucuaccugaucagcaucuuccugcaccucgugaagauccccacgcaccgccacgugaucggcaagcccugccccaagccgcaccggcugaaccacauggggaucugcuccugcggccuguacaagcaccccgggguccccgugaaguggaagcgcugaggacuagucccuguucccagagcccacuuuuuuuucuuuuuuugaaauaaaauagccugucuuucagaucuaaaaaaaaaaaaaaaaaaaaaaaaaaaaaaaaaaaaaaaaaaaaaaaaaaaaaaaaaaaaaaaaaaaaaaaaaaaaaaaaaaaaaaaaaaaaaaaaaaaa

SEQ ID NO: 30581 - RNA, 1740 nt, Artificial Sequence
  mRNA product Design a-2 (A100) comprising derived and/or modified sequence from LASV(LASV1000-NIG-2009;Clade II)__AIT17782__GPCmut6 (opt1)
aggagaguccgcucagccagguugcagaagcggcuuagcguguguccuaaucuucucucugcguguagguaggccugugccgcaaacaagcuuaccaugggccagaucaucaccuucuuccaggaggugccccacgucaucgaggaggugaugaacaucgugcugaucgcccucagccugcuggccauccucaaggggaucuacaacgucgcgaccugcggccuguucgggcugguguccuuccuccugcugugcggccgcagcugcuccacgaccuacaaggggguguacgagcuccagacccuggagcuggacauggccagccucaacaugugcaugccgcuguccugcaccaagaacaacagccaccacuacaucauggucggcaacgagacgggccuggagcucacccugaccaacaccuccaucaucaaccacaaguucugcaaccugagcgacgcccacaagaagaaccucuacgaccacgcccugauguccaucaucagcacguuccaccuguccauccccaacuucaaccaguacgaggccaugagcugcgacuucaacgggggcaagaucuccgugcaguacaaccucagccacaccuacgcgguggacgccgccaaccacugcgggaccaucgccaacggcguccugcagaccuucaugcggauggcguggggcggguccuacaucgcccuggacagcggcaagggguccugggacugcaucaugacgagcuaccaguaccucaucauccagaacaccaccugggaggaccacugccaguucucccgccccagccccaucggcuaccuggggcugcucagccagcggacccgcgacaucuacaucucccggcgccugcugggcacguucaccuggacccucagcgacuccgagggcaacgagacccccgggggcuacugccugacgcgguggaugcugaucgaggccgagcucaagugcuucgggaacaccgccguggccaagugcaacgagaagcacgacgaggaguucugcgacaugcugcgccuguucgacuucugcaagcaggcgaucaagcggcucaagaccccggcccagaugagcauccagcugaucaacaaggccgugaacgcccugaucaacgaccagcucaucaugaagaaccaccuccgcgacaucaugggcauccccuacugcaacuacuccaaguacugguaccugaaccacaccgucacggggaagaccagccugccccggugcuggcugguguccaacggcagcuaccugaacgagacccacuucuccgacgacaucgagcagcaggccgacaacaugaucaccgagcuccugcagaaggaguacaucgaccgccagggcaagacgccgcuggggcugguggaccucuucgucuucagcaccuccuucuaccugaucagcaucuuccugcaccucgugaagauccccacccaccggcacguggucggcaagcccugccccaagccgcaccgccugaaccacauggggaucugcuccugcggccuguacaagcaccccggggugcccgugaaguggaagcggugaggacuagucccuguucccagagcccacuuuuuuuucuuuuuuugaaauaaaauagccugucuuucagaucuaaaaaaaaaaaaaaaaaaaaaaaaaaaaaaaaaaaaaaaaaaaaaaaaaaaaaaaaaaaaaaaaaaaaaaaaaaaaaaaaaaaaaaaaaaaaaaaaaaaa

SEQ ID NO: 30582 - RNA, 1740 nt, Artificial Sequence
  mRNA product Design a-2 (A100) comprising derived and/or modified sequence from LASV(LASV221-NIG-2010;Clade II)__AIT17624__GPCmut6 (opt1)
aggagaguccgcucagccagguugcagaagcggcuuagcguguguccuaaucuucucucugcguguagguaggccugugccgcaaacaagcuuaccaugggccagaucaucaccuucuuccaggaggugccccacgucaucgaggaggugaugaacaucgugcugaucgcccucagccugcuggccauccucaaggggaucuacaacgucgcgaccugcggccuguucgggcugguguccuuccuccugcugugcggccgcagcugcuccacgaccuacaaggggguguacgagcuccagacccuggagcuggacauggccagccucaacaugugcaugccgcuguccugcaccaagaacaacagccaccacuacaucauggucggcaacgagacgggccuggagcucacccugaccaacaccuccaucaucaaccacaaguucugcaaccugagcgacgcccacaagaagaaccucuacgaccacgcccugauguccaucaucagcacguuccaccuguccauccccaacuucaaccaguacgaggccaugagcugcgacuucaacgggggcaagaucuccgugcaguacaaccucagccacaccuacgcgaucgacgccgccaaccacugcgggaccaucgccaacggcgugcugcagaccuucaugcggauggcguggggcggguccuacaucgcccuggacagcggcaagggguccugggacugcaucaugacgagcuaccaguaccucaucauccagaacaccaccugggaggaccacugccaguucucccgccccagccccaucggcuaccuggggcugcucagccagcggacccgcgacaucuacaucucccggcgccugcugggcacguucaccuggacccucagcgacuccgagggcaacgagacccccgggggcuacugccugacgcgguggaugcugaucgaggccgagcucaagugcuucgggaacaccgccgucgccaagugcaacgagaagcacgacgaggaguucugcgacaugcugcgccuguucgacuucugcaagcaggcgauccggcgccucaagaccccggcccagaugagcauccagcugaucaacaaggccgugaacgcccugaucaacgaccagcucaucaugaagaaccaccuccgggacaucaugggcauccccuacugcaacuacuccaaguacugguaccugaaccacaccgugacggggaagaccagccugccccgcugcuggcuggucuccaacggcagcuaccugaacgagacccacuucuccgacgacaucgagcagcaggccgacaacaugaucaccgagaugcuccagaaggaguacauggaccggcagggcaagacgccgcuggggcugguggaccuguucguguucagcaccuccuucuaccucaucagcaucuuccugcaccuggucaagauccccacccaccgccacgugaucggcaagcccugccccaagccgcaccggcucaaccacauggggaucugcuccugcggccuguacaagcaccccggggugcccgucaaguggaagcgcugaggacuagucccuguucccagagcccacuuuuuuuucuuuuuuugaaauaaaauagccugucuuucagaucuaaaaaaaaaaaaaaaaaaaaaaaaaaaaaaaaaaaaaaaaaaaaaaaaaaaaaaaaaaaaaaaaaaaaaaaaaaaaaaaaaaaaaaaaaaaaaaaaaaaa

SEQ ID NO: 30583 - RNA, 1740 nt, Artificial Sequence
  mRNA product Design a-2 (A100) comprising derived and/or modified sequence from LASV(LASV237-NIG-2010;Clade II)__AIT17638__GPCmut6 (opt1)
aggagaguccgcucagccagguugcagaagcggcuuagcguguguccuaaucuucucucugcguguagguaggccugugccgcaaacaagcuuaccaugggccagaucaucaccuucuuccaggaggugccccacgucaucgaggaggugaugaacaucgugcugaucgcccucagccugcuggccauccucaaggggaucuacaacgucgcgaccugcggccuguucgggcugguguccuuccuccugcugugcggccgcagcugcuccacgaccuacaaggggguguacgagcuccagacccuggagcuggacauggccagccucaacaugugcaugccgcuguccugcaccaagaacaacagccaccacuacaucauggucggcaacgagacgggccuggagcucacccugaccaacaccuccaucaucaaccacaaguucugcaaccugagcgacgcccacaagaaggaccucuacgaccacgcccugauguccaucaucagcacguuccaccuguccauccccaacuucaaccaguacgaggccaugagcugcgacuucaacgggggcaagaucuccgugcaguacaaccucagccacaccuacgcgguggacgccgccaaccacugcgggaccaucgccaacggcguccugcagaccuucaugcggauggcguggggcggguccuacaucgcccuggacagcggcaagggguccugggacugcaucaugacgagcuaccaguaccucaucauccagaacaccaccugggaggaccacugccaguucucccgccccagccccaucggcuaccuggggcugcucagccagcggacccgcgacaucuacaucucccggcgccugcugggcacguucaccuggacccucagcgacuccgagggcaacgagacccccgggggcuacugccugacgcgguggaugcugaucgaggccgagcucaagugcuucgggaacaccgccguggccaagugcaacgagaagcacgacgaggaguucugcgacaugcugcgccuguucgacuucugcaagcaggcgauccggcgccucaagaccccggcccagaugagcauccagcugaucaacaaggccgugaacgcccugaucaacgaccagcucaucaugaagaaccaccuccgggacaucaugggcauccccuacugcaacuacuccaaguacugguaccugaaccacaccgucacggggaagaccagccugccccgcugcuggcugguguccaacggcagcuaccugaacgagacccacuucuccgacgacaucgagcagcaggccgacaacaugaucaccgagcuccugcagaaggaguacauggaccggcagggcaagacgccgcuggggcugguggaccucuucgucuucagcaccuccuucuaccugaucagcaucuuccugcaccucaucaagauccccacccaccgccacaucaccggcaagcccugccccaagccgcaccggcugaaccacauggggaucugcuccugcggccuguacaagcaccccggggugcccgugaaguggaagcgcugaggacuagucccuguucccagagcccacuuuuuuuucuuuuuuugaaauaaaauagccugucuuucagaucuaaaaaaaaaaaaaaaaaaaaaaaaaaaaaaaaaaaaaaaaaaaaaaaaaaaaaaaaaaaaaaaaaaaaaaaaaaaaaaaaaaaaaaaaaaaaaaaaaaaa

SEQ ID NO: 30584 - RNA, 1740 nt, Artificial Sequence
  mRNA product Design a-2 (A100) comprising derived and/or modified sequence from LASV(LASV253-NIG-2011;Clade II)__AIT17670__GPCmut6 (opt1)
aggagaguccgcucagccagguugcagaagcggcuuagcguguguccuaaucuucucucugcguguagguaggccugugccgcaaacaagcuuaccaugggccagaucaucaccuucuuccaggaggugccccacgucaucgaggaggugaugaacaucgugcugaucgcccucagccugcuggccauccucaaggggaucuacaacgucgcgaccugcggccuguucgggcugguguccuuccuccugcugugcggccgcagcugcuccacgaccuacaaggggguguacgagcuccagacccuggagcuggacauggccagccucaacaugugcaugccgcuguccugcaccaagaacaacagccaccacuacaucauggucggcaacgagacgggccuggagcucacccugaccaacaccuccaucaucaaccacaaguucugcaaccugagcgacgcccacaagaagaaccucuacgaccacgcccugauguccaucaucagcacguuccaccuguccauccccaacuucaaccaguacgaggccaugagcugcgacuucaacgggggcaagaucuccgugcaguacaaccucagccacaccuacgcgguggacgccgccaaccacugcgggaccaucgccaacggcguccugcagaccuucaugcggauggcguggggcggguccuacaucgcccuggacagcggcaagggguccugggacugcaucaugacgagcuaccaguaccucaucauccagaacaccaccugggaggaccacugccaguucucccgccccagccccaucggcuaccuggggcugcucagccagcggacccgcgacaucuacaucucccggcgccugcugggcacguucaccuggacccucagcgacuccgagggcaacgagacccccgggggcuacugccugacgcgguggaugcugaucgaggccgagcucaagugcuucgggaacaccgccguggccaagugcaacgagaagcacgacgaggaguucugcgacaugcugcgccuguucgacuucugcaagcaggcgauccggcgccucaaggccccggcccagaugagcauccagcugaucaacaaggccgugaacgcccugaucaacgaccagcucaucaugaagaaccaccuccgggacaucaugggcauccccuacugcaacuacuccaaguacugguaccugaaccacaccgucaccgggcgcacgagccugccccggugcuggcugguguccaacggcagcuaccugaacgagacccacuucuccgacgacaucgagcagcaggcggacaacaugaucaccgagcuccugcagaaggaguacaucgaccgccagggcaagaccccgcuggggcugguggaccucuucgucuucagcacguccuucuaccugaucagcaucuuccugcaccucgugaagauccccacccaccggcacaucaucggcaagcccugccccaagccgcaccgccugaaccacauggggaucugcuccugcggccuguacaagcaccccggggugcccgucaaguggaagcggugaggacuagucccuguucccagagcccacuuuuuuuucuuuuuuugaaauaaaauagccugucuuucagaucuaaaaaaaaaaaaaaaaaaaaaaaaaaaaaaaaaaaaaaaaaaaaaaaaaaaaaaaaaaaaaaaaaaaaaaaaaaaaaaaaaaaaaaaaaaaaaaaaaaaa

SEQ ID NO: 30585 - RNA, 1740 nt, Artificial Sequence
  mRNA product Design a-2 (A100) comprising derived and/or modified sequence from LASV(LASV254-NIG-2011;Clade II)__AIT17674__GPCmut6 (opt1)
aggagaguccgcucagccagguugcagaagcggcuuagcguguguccuaaucuucucucugcguguagguaggccugugccgcaaacaagcuuaccaugggccagaucaucaccuucuuccaggaggugccccacgucaucgaggaggugaugaacaucgugcugaucgcccucagccugcuggccauccucaaggggaucuacaacgucgcgaccugcggccuguucgggcugguguccuuccuccugcugugcggccgcagcugcuccacgaccuacaaggggguguacgagcuccagacccuggagcuggacaugaccaaccucaacaugugcaugccgcugagcugcacgaagaacaacucccaccacuacaucauggucggcaacgagaccggccuggagcucacccugaccaacacgagcaucaucaaccacaaguucugcaaccuguccgacgcccacaagaagaaccucuacaaccacgcccugaugagcaucaucuccaccuuccaccugagcauccccaacuucaaccaguacgaggccauguccugcgacuucaacgggggcaagaucagcgugcaguacaaccucucccacagcuacgccguggacgcggccaaccacugcgggaccaucgccaacggcguccugcagaccuucaugcggauggccuggggcggguccuacaucgcgcuggacagcggcaaggggaacugggacugcaucaugacguccuaccaguaccucaucauccagaacaccaccugggaggaccacugccaguucagccgccccucccccaucggcuaccuggggcugcucagccagcggacccgcgacaucuacaucagccggcgccugcugggcacguucaccuggacccucuccgacagcgagggcaacgagacccccgggggcuacugccugacgcgguggaugcugaucgaggccgagcucaagugcuucgggaacaccgccguggccaagugcaacgagaagcacgacgaggaguucugcgacaugcugcgccuguucgacuucugcaagcaggccauccggcgccucaagaccccggcgcaggccaacauccagcugaucaacaaggccgugaacgcccugaucaacgaccagcucaucaugaagaaccaccuccgggacaucaugggcauccccuacugcaacuacuccaaguacugguaccugaaccacaccgucacggggaagaccagccugccccgcugcuggcugguguccaacggcagcuaccugaacgagacccacuucuccgacgacaucgagcagcaggccgacaacaugaucaccgagcuccugcagaaggaguacauggaccggcagggcaagacgccgcuggggcugguggaccucuucgucuucagcaccuccuucuaccugaucagcaucuuccugcaccucgugaagauccccacccaccgccacgugaucggcaagcccugccccaagccgcaccggcugaaccacauggggaucugcuccugcggccuguacaagcaccccgggguccccgugaaguggaagcgcugaggacuagucccuguucccagagcccacuuuuuuuucuuuuuuugaaauaaaauagccugucuuucagaucuaaaaaaaaaaaaaaaaaaaaaaaaaaaaaaaaaaaaaaaaaaaaaaaaaaaaaaaaaaaaaaaaaaaaaaaaaaaaaaaaaaaaaaaaaaaaaaaaaaaa

SEQ ID NO: 30586 - RNA, 1740 nt, Artificial Sequence
  mRNA product Design a-2 (A100) comprising derived and/or modified sequence from LASV(Nig08-A19;Clade III)__ADU56618__GPCmut6 (opt1)
aggagaguccgcucagccagguugcagaagcggcuuagcguguguccuaaucuucucucugcguguagguaggccugugccgcaaacaagcuuaccaugggccagaucgugaccuucuuccaggaggucccccacgugaucgaggaggugaugaacaucguccugaucgcccucagcauccuggccauccugaaggggcucuacaacaucgcgaccugcggccugaucgggcuggugacguuccuccugcuguccggccgcagcugcuccaugaccuacaaggggguguacgagcuccagacccuggagcugaacaugaacacccucaacaugugcaugccgcugagcugcacgaagaacaacucccaccacuacaucauggucggcaacgagaccggccuggagcucacccugaccaacacgagccugcuccaccacaaguucugcaaccuguccgacgcccacaagaagaaccuguacgaccacacccucaugagcaucaucuccaccuuccaccugagcauccccaacuucaaccaguacgaggccauguccugcgacuucaacgggggcaagaucaccgugcaguacaaccugagccacuccuacgccaucgacgccgcgaaccacugcgggacgguggccaacggcguccuccagaccuucaugcggauggccuggggcgggagcuacaucgcccuggacuccggccgcgggaagugggacugcaucaugaccagcuaccaguaccugaucauccagaacaccacgugggaggaccacugccaguucucccggcccagccccaucggcuaccucgggcugcugucccagcgcacccgggacaucuacaucagccgccggcuccugggcaccuucaccuggacgcugagcgacuccgagggcaacgagacccccgggggcuacugccucacccgcuggaugcugaucgaggcggagcugaagugcuucgggaacaccgccguggccaagugcaacgagaagcacgacgaggaguucugcgacaugcuccggcuguucgacuucugcaagcaggccauccgccggcugaaggccccggcgcagaugagcauccagcucaucaacaaggccgugaacgcccugaucaacgaccagcugaucaugaagaaccaccuccgcgacaucaugggcauccccuacugcaacuacuccaaguacugguaccugaaccacacgagcaccgggcggaccucccugccccgcugcuggcucgucagcaacggcuccuaccugaacgagacccacuucagcgacgacaucgagcagcaggccgacaacaugaucacggagaugcugcagaaggaguaccuggaccggcagggcaagaccccgcucgggcugguggaccuguucguguucuccaccagcuucuaccucaucuccaucuuccugcaccuggucaagauccccacccaccgccacaucgugggcaagcccugccccaagccgcaccggcucaaccacauggggaucugcagcugcggccuguacaagcagcccggggugcccguccgcuggaagcggugaggacuagucccuguucccagagcccacuuuuuuuucuuuuuuugaaauaaaauagccugucuuucagaucuaaaaaaaaaaaaaaaaaaaaaaaaaaaaaaaaaaaaaaaaaaaaaaaaaaaaaaaaaaaaaaaaaaaaaaaaaaaaaaaaaaaaaaaaaaaaaaaaaaaa

SEQ ID NO: 30587 - RNA, 1743 nt, Artificial Sequence
  mRNA product Design a-2 (A100) comprising derived and/or modified sequence from LASV(G1180-SLE-2010;Clade IV)__AIT17168__GPCmut6 (opt1)
aggagaguccgcucagccagguugcagaagcggcuuagcguguguccuaaucuucucucugcguguagguaggccugugccgcaaacaagcuuaccaugggccagaucgugaccuucuuccaggaggucccccacgugaucgaggaggugaugaacaucguccugaucgcccucagcauccuggccgugcugaaggggcucuacaacuucgcgaccugcggccugguggggcugcucacguuccugcugcucugcggccgcuccugcaccgccagccgguacaagggggucuacgagcugcagacccuggagcucaacauggagacccugaacaugugcaugccgcuguccugcacgaagaacaacagccaccacuacaucauggugggcaacgagaccggccucgagcugacccugaccaacacguccaucaucaaccacaaguucugcaaccucagcgacgcccacaagaagaaccuguacgaccacgcccugauguccaucaucagcaccuuccaccucuccauccccaacuucaaccaguacgaggccaugagcugcgacuucaacgggggcaagaucuccgugcaguacaaccugagccacuccuacgcgggggacgccgccaaccacugcggcaccgucgccaacggggugcugcagaccuucaugcgcauggcguggggcggcagcuacaucgcccucgacuccgggcacggcagcugggacugcaucaugacguccuaccaguaccugaucauccagaacaccaccugggaggaccacugccaguucagccggcccucccccaucggguaccugggccuccugagccagcgcacccgggacaucuacaucagccgccggcugcucggcacguucaccuggacccuguccgacagcgaggggaaggacaccccgggcggguacugccugacgcgcuggaugcucaucgaggccgagcugaagugcuucggcaacaccgccguggccaagugcaacgagaagcacgacgaggaguucugcgacaugcugcggcuguucgacuucugcaagcaggcgauccagcgccugaaggcccccgcccagauguccauccagcugaucaacaaggccgucaacgcccucaucaacgaccagcugaucaugaagaaccaccuccgggacaucauggggauccccuacugcaacuacagcaaguacugguaccucaaccacaccaccacgggcaagaccucccugcccaagugcuggcuggugagcaacggcuccuaccucaacgagacccacuucagcgacgacaucgagcagcaggcggacaacaugaucaccgagaugcugcagaaggaguacauggagcgccaggggaagacgccgcugggccugguggaccucuucgucuucuccaccagcuucuaccugaucuccaucuuccugcaccucgugaagauccccacccaccggcacaucgugggcaagagcugccccaagccccaccgccugaaccacauggggaucugcuccugcgggcuguacaagcagccgggcguccccgugaaguggaagcggugaggacuagucccuguucccagagcccacuuuuuuuucuuuuuuugaaauaaaauagccugucuuucagaucuaaaaaaaaaaaaaaaaaaaaaaaaaaaaaaaaaaaaaaaaaaaaaaaaaaaaaaaaaaaaaaaaaaaaaaaaaaaaaaaaaaaaaaaaaaaaaaaaaaaa

SEQ ID NO: 30588 - RNA, 1743 nt, Artificial Sequence
  mRNA product Design a-2 (A100) comprising derived and/or modified sequence from LASV(G1442-SLE-2011;Clade IV)__AIT17180__GPCmut6 (opt1)
aggagaguccgcucagccagguugcagaagcggcuuagcguguguccuaaucuucucucugcguguagguaggccugugccgcaaacaagcuuaccaugggccagaucgugaccuucuuccaggaggucccccacgugaucgaggaggugaugaacaucguccugaucgcccucagcauccuggccgugcugaaggggcucuacaacguggcgaccugcggccugaucgggcuggucacguuccuccugcugugcggccgcuccugcaccaccacccucuacaaggggguguacgagcugcagacgcuggagcucaacauggagacccugaacaugugcaugccgcugagcugcaccaagaacaacucccaccacuacauccgggugggcaacgagaccggccucgagcugacgcugaccaacaccagcaucaucaaccacaaguucugcaaccucuccgacgcccacaagaagaaccuguacgaccacgcccugaugagcaucaucuccaccuuccaccucagcauccccaacuucaaccaguacgaggccauguccugcgacuucaacgggggcaagaucagcguccaguacaaccugucccacagcuacgccggggacgcggccaaccacugcggcacgguggccaacggggugcugcagaccuucaugcgcauggccuggggcggcuccuacaucgcgcucgacagcgggcggggcaacugggacugcaucaugaccuccuaccaguaccugaucauccagaacaccacgugggacgaccacugccaguucagccgccccucccccaucggguaccugggccuccugagccagcggacccgcgacgucuacaucucccggcgccugcucggcaccuucaccuggacgcugagcgacagcgaggggaaggacaccccgggcggguacugccugacccgguggaugcucaucgaggccgagcugaagugcuucggcaacaccgccguggccaagugcaacgagaagcacgacgaggaguucugcgacaugcugcgccucuucgacuucugcaagcaggccauccagcggcugaaggcgcccgcccagauguccauccagcugaucaacaaggccgugaacgcccucaucaacgaccagcugaucaugaagaaccaccuccgcgacaucauggggauccccuacugcaacuacagcaaguacugguaccugaacaacacggccaccggcaagaccucccugcccaagugcuggcugaucagcaacggcuccuaccucaacgagacccacuucagcgacgacaucgagcaggaggcggacaacaugaucacggagaugcugcagaaggaguacauggagcggcaggggaagaccccgcugggccuggucgaccucuucguguucuccaccagcuucuaccugaucuccaucuuccugcaccucgugaagauccccacccaccgccacaucgucggcaagagcugccccaagccccaccggcugaaccacauggggaucugcuccugcgggcuguacaagcagccgggcgugcccgugcgcuggaagcggugaggacuagucccuguucccagagcccacuuuuuuuucuuuuuuugaaauaaaauagccugucuuucagaucuaaaaaaaaaaaaaaaaaaaaaaaaaaaaaaaaaaaaaaaaaaaaaaaaaaaaaaaaaaaaaaaaaaaaaaaaaaaaaaaaaaaaaaaaaaaaaaaaaaaa

SEQ ID NO: 30589 - RNA, 1743 nt, Artificial Sequence
  mRNA product Design a-2 (A100) comprising derived and/or modified sequence from LASV(G3010-SLE-2013;Clade IV)__AIT17344__GPCmut6 (opt1)
aggagaguccgcucagccagguugcagaagcggcuuagcguguguccuaaucuucucucugcguguagguaggccugugccgcaaacaagcuuaccaugggccagaucgugaccuucuuccaggaggucccccacgugaucgaggaggugaugaacaucguccugaucgcccucagcauccuggccgugcugaaggggcucuacaacuucgcgaccugcggccugguggggcuggucacguuccuccugcugugcggccgcuccugcaccaccagccucuacaaggggguguacgagcugcagacccuggagcucaacauggagacgcugaacaugugcaugccgcuguccugcaccaagaacaacagccaccacuacaucauggugggcaacgagaccggccucgagcugacccugacgaacaccuccaucaucaaccacaaguucugcaaccucagcgacgcccacaagaagaaccuguacaaccacgcccugauguccaucaucagcaccuuccaccucuccauccccaacuucaaccaguacgaggccaugagcugcgacuucaacgggggcaagaucuccguccaguacaaccugagccacuccuacgccggggacgcggccagccacugcggcaccguggccaacggggugcugcagacguucaugcggauggccuggggcggcuccuacaucgcgcucgacagcggguacggcaagugggacugcaucaugaccuccuaccaguaccugaucauccagaacaccaccugggaggaccacugccaguucagccgccccucccccaucggguaccugggccuccugagccagcggacgcgcgacaucuacaucagccggcgccugcucggcaccuucaccuggacccuguccgacagcgaggggaaggacacgccgggcggguacugccugacccgguggaugcucaucgaggccgagcugaagugcuucggcaacaccgccgucgccaagugcaacgagaagcacgacgaggaguucugcgacaugcugcgccucuucgacuucugcaagcaggccauccagcggcugaagacccccgcgcagauguccauccagcugaucaacaaggccgugaacgcccucaucaacgaccagcugaucaugaagaaccaccuccgcgacaucauggggauccccuacugcaacuacagcaaguacugguaccugaaccacacgaccaccggcaagaccucccugcccaagugcuggcuggugagcaacggcuccuaccucaacgagacgcacuucagcgacgacaucgagcagcaggccgacaacaugaucaccgagaugcugcagaaggaguacauggagcggcaggggaagaccccgcugggccuggucgaccucuucguguucuccaccagcuucuaccugaucuccaucuuccugcaccucgugaagauccccacgcaccgccacaucgucggcaagagcugccccaagccccaccggcugaaccacauggggaucugcuccugcgggcuguacaagcagccgggcgugcccgugcgcuggaagcggugaggacuagucccuguucccagagcccacuuuuuuuucuuuuuuugaaauaaaauagccugucuuucagaucuaaaaaaaaaaaaaaaaaaaaaaaaaaaaaaaaaaaaaaaaaaaaaaaaaaaaaaaaaaaaaaaaaaaaaaaaaaaaaaaaaaaaaaaaaaaaaaaaaaaa

SEQ ID NO: 30590 - RNA, 1743 nt, Artificial Sequence
  mRNA product Design a-2 (A100) comprising derived and/or modified sequence from LASV(G502-SLE-2009;Clade IV)__AIT17126__GPCmut6 (opt1)
aggagaguccgcucagccagguugcagaagcggcuuagcguguguccuaaucuucucucugcguguagguaggccugugccgcaaacaagcuuaccaugggccagaucgugaccuucuuccaggaggucccccacgugaucgaggaggugaugaacaucguccugaucgcccucagcauccuggccgugcugaaggggcucuacaacuucgcgaccugcggccugguggggcugcucacguuccugcugcucugcggccgcuccugcaccaccgggcuguacaagggcgucuacgagcugcagacccucgagcugaacauggagacgcugaacaugugcaugccgcucagcugcaccaagaacaacucccaccacuacaucauggugggcaacgagaccgggcuggagcugacccucacgaacaccagcaucaucaaccacaaguucugcaaccuguccgacgcccacaagaagaaccuguacgaccacgcccucaugagcaucaucuccaccuuccaccugagcauccccaacuucaaccaguacgaggccauguccugcgacuucaacggcgggaagaucagcgugcaguacaaccugucccacagcuacgccggcgacgcggccgaccacugcgggaccgucgccaacggcgugcuccagacguucaugcggauggccuggggcggguccuacaucgcgcuggacagcggccgcgggcggugggacugcaucaugaccuccuaccaguaccugaucauccagaacaccaccugggaggaccacugccaguucagccgccccucccccaucggcuaccucggccugcugagccagcggacgcgcgacaucuacaucucccggcgccuccuggggaccuucaccuggacccugagcgacagcgagggcaaggacacgcccgggggcuacugccucacccgguggaugcugaucgaggccgagcugaagugcuucgggaacaccgccguggccaagugcaacgagaagcacgacgaggaguucugcgacaugcuccgccuguucgacuucugcaagcaggccauccagcggcugaaggcgccggcccagauguccauccagcucaucaacaaggccgucaacgcccugaucaacgaccagcuggugaugaagaaccaccuccgcgacaucaugggcauccccuacugcaacuacagccgguacugguaccugaaccacaccacgaccggccgcaccucccugcccaagugcuggcucgugagcaacggguccuaccugaacgagacccacuucagcgacgacaucgagcagcaggccgacaacaugaucacggagaugcugcagaaggaguacauggagcggcagggcaagaccccgcuggggcucgucgaccuguucguguucuccaccagcuucuaccugaucuccaucuuccuccaccuggugaagauccccacccaccgccacaucgucggcaagagcugccccaagccccaccggcugaaccacauggggaucugcuccugcggccucuacaagcagccgggcgugcccgugaaguggaagcgcugaggacuagucccuguucccagagcccacuuuuuuuucuuuuuuugaaauaaaauagccugucuuucagaucuaaaaaaaaaaaaaaaaaaaaaaaaaaaaaaaaaaaaaaaaaaaaaaaaaaaaaaaaaaaaaaaaaaaaaaaaaaaaaaaaaaaaaaaaaaaaaaaaaaaa

SEQ ID NO: 30591 - RNA, 1743 nt, Artificial Sequence
  mRNA product Design a-2 (A100) comprising derived and/or modified sequence from LASV(G733-SLE-2010;Clade IV)__AIT17154__GPCmut6 (opt1)
aggagaguccgcucagccagguugcagaagcggcuuagcguguguccuaaucuucucucugcguguagguaggccugugccgcaaacaagcuuaccaugggccagaucgugaccuucuuccaggaggucccccacgugaucgaggaggugaugaacaucguccugaucgcccucagcauccuggccgugcugaaggggcucuacaacuucgcgaccugcggcaucguggggcuggucuccuuccugcuccugugcggccgcagcugcacgaccucccuguacaaggggguguacgagcuccagacccuggagcugaacauggagacccucaacaugugcaugccgcugagcugcacgaagaacaacucccaccacuacaucauggugggcaacgagaccggccuggagcucacccugaccaacacgagcaucaucaaccacaaguucugcaaccuguccgacgcccacaagaagaaccucuacgaccacgcccugaugagcaucaucuccaccuuccaccugagcauccccaacuucaaccaguacgaggccauguccugcgacuucaacgggggcaagaucagcguccaguacaaccucucccacagcuacgccggggacgcggccaaccacugcggcaccaucgccaacggggugcugcagaccuucaugcggauggccuggggcggcuccuacaucgcgcuggacagcgggcgcgaccggugggacugcaucaugacguccuaccaguaccucaucauccagaacaccaccugggaggaccacugccaguucagccgccccucccccaucggcuaccuggggcugcucagccagcggacccgcgacaucuacaucagccggcgccugcugggcacguucaccuggacccucuccgacagcgagggcaaggacacccccgggggcuacugccugacgcgguggaugcugaucgaggccgagcucaagugcuucgggaacaccgccguggccaagugcaacgagaagcacgacgaggaguucugcgacaugcugcgccuguucgacuucugcaagcaggccauccagcggcucaaggcgccggcccagauguccauccagcugaucaacaaggccgucaacgcccugaucaacgaccagcucaucaugaagaaccaccuccgcgacaucaugggcauccccuacugcaacuacagcaaguacugguaccugaaccacaccaccacggggaagaccucccugcccaagugcuggcuggugagcaacggcuccuaccugaacgagacccacuucagcgacgacaucgagcagcaggccgacaacaugaucaccgagaugcuccagaaggaguacauggagcggcagggcaagacgccgcuggggcugguggaccuguucgucuucuccaccagcuucuaccucaucuccaucuuccugcaccuggugaagauccccacccaccgccacguggucggcaagagcugccccaagccccaccggcucaaccacauggggaucugcuccugcggccuguacgggcagccgggcgugcccgugaaguggaagcgcugaggacuagucccuguucccagagcccacuuuuuuuucuuuuuuugaaauaaaauagccugucuuucagaucuaaaaaaaaaaaaaaaaaaaaaaaaaaaaaaaaaaaaaaaaaaaaaaaaaaaaaaaaaaaaaaaaaaaaaaaaaaaaaaaaaaaaaaaaaaaaaaaaaaaa

SEQ ID NO: 30592 - RNA, 1743 nt, Artificial Sequence
  mRNA product Design a-2 (A100) comprising derived and/or modified sequence from MOPV/LASV reassortant(IGS-1;Clade IV)__AFY05576__GPCmut6 (opt1)
aggagaguccgcucagccagguugcagaagcggcuuagcguguguccuaaucuucucucugcguguagguaggccugugccgcaaacaagcuuaccaugggccagaucgugaccuucuuccaggaggucccccacgugaucgaggaggugaugaacaucguccugaucgcccucagcgugcuggccgugcugaaggggcucuacaacuucgcgaccugcggccuggucgggcuggugacguuccuccugcugugcggccgcuccugcaccaccagccucuacaaggggguguacgagcugcagacccuggagcucaacauggagacgcugaacaugugcaugccgcuguccugcaccaagaacaacagccaccacuacaucauggucggcaacgagaccggccucgagcugacccugacgaacaccuccaucaucaaccacaaguucugcaaccucagcgacgcccacaagaagaaccuguacgaccacgcccugauguccaucaucagcaccuuccaccucuccauccccaacuucaaccaguacgaggccaugagcugcgacuucaacgggggcaagaucuccgugcaguacaaccugagccacuccuacgccggggacgcggccaaccacugcggcaccguggccaacgggguccugcagacguucaugcggauggccuggggcggcagcuacaucgcgcucgacuccgggcgcggcaacugggacugcaucaugaccagcuaccaguaccugaucauccagaacaccaccugggaggaccacugccaguucucccggcccagccccaucggguaccugggccuccugucccagcgcacgcgggacaucuacaucagccgccggcugcucggcaccuucaccuggacccugagcgacuccgagggggaggacacgccgggcggguacugccugacccgcuggaugcucaucgaggccgagcugaagugcuucggcaacaccgccguggccaagugcaacgagaagcacgacgaggaguucugcgacaugcugcggcuguucgacuucugcaagcaggccauccagcgccugaaggcgcccgcccagaugagcauccagcugaucaacaaggccgugaacgcccucaucaacgaccagcugaucaugaagaaccaccuccgggacaucauggggauccccuacugcaacuacuccaaguacugguaccucaaccacaccacgaccggccgcaccagccugcccaagugcuggcuggucuccaacggcagcuaccucaacgagacccacuucuccgacgacaucgagcagcaggccgacaacaugaucacggagaugcugcagaaggaguacauggagcggcaggggaagaccccgcugggccugguggaccucuucguguucagcaccuccuucuaccugaucagcaucuuccugcaccucgucaagauccccacccaccgccacaucguggggaaguccugccccaagccccaccggcugaaccacaugggcaucugcagcugcgggcuguacaagcagccgggcgugcccgucaaguggaagcgcugaggacuagucccuguucccagagcccacuuuuuuuucuuuuuuugaaauaaaauagccugucuuucagaucuaaaaaaaaaaaaaaaaaaaaaaaaaaaaaaaaaaaaaaaaaaaaaaaaaaaaaaaaaaaaaaaaaaaaaaaaaaaaaaaaaaaaaaaaaaaaaaaaaaaa

SEQ ID NO: 30593 - RNA, 1743 nt, Artificial Sequence
  mRNA product Design a-2 (A100) comprising derived and/or modified sequence from LASV(LM765-SLE-2012;Clade IV)__AIT17814__GPCmut6 (opt1)
aggagaguccgcucagccagguugcagaagcggcuuagcguguguccuaaucuucucucugcguguagguaggccugugccgcaaacaagcuuaccaugggccagaucgugaccuucuuccaggaggucccccacgugaucgaggaggugaugaacaucguccugaucgcccucagcauccuggccgugcugaaggggcucuacaacuucgcgaccugcggccugguggggcuggucacguuccuccugcugugcggccgcuccugcaccaccagccucuacaaggggguguacgagcugcagacccuggagcucaacauggagacgcugaacaugugcaugccgcuguccugcaccaagaacaacagccaccacuacaucauggugggcaacgagaccggccucgagcugacccugacgaacaccuccaucaucgaccacaaguucugcaaccucagcgacgcccaccggaagaaccuguacgaccacgcccugauguccaucaucagcaccuuccaccucuccauccccaacuucaaccaguacgaggccaugagcugcgacuucaacgggggcaagaucuccguccaguacaaccugagccacuccuacgccaaggacgcggccgaccacugcgggaccguggccaacggcgugcugcagacguucaugcgcauggccuggggcgggagcuacaucgcgcucgacuccggccgggggcgcugggacugcaucaugaccagcuaccaguaccugaucauccagaacaccaccugggaggaccacugccaguucucccggcccagccccaucggcuaccuggggcuccugucccagcgcacgcgggacaucuacaucagccgccggcugcucggcaccuucaccuggacccugagcgacuccgagggcaaggacacgcccgggggcuacugccugacccgcuggaugcucaucgaggccgagcugaagugcuucgggaacaccgccgucgccaagugcaacgagaagcacgacgaggaguucugcgacaugcugcggcuguucgacuucugcaagcaggccauccagcgccugaaggcgccggcccagaugagcauccagcugaucaacaaggccgugaacgcccucaucaacgaccagcugaucaugaagaaccaccuccgggacaucaugggcauccccuacugcaacuacuccaaguacugguaccucaaccacaccacgaccgggaagaccagccugcccaagugcuggcugguguccaacggcagcuaccucaacgagacccacuucuccgacgacaucgagcagcaggccgacaacaugaucacggagaugcugcagaaggaguacauggagcgccagggcaagaccccgcuggggcuggucgaccucuucguguucagcaccuccuucuaccugaucagcaucuuccugcaccucgugaagauccccacccaccggcacaucgucggcaagcccugccccaagccgcaccgccugaaccacauggggaucugcuccugcggccuguacaagcagcccggggugcccgugaaguggaagcggugaggacuagucccuguucccagagcccacuuuuuuuucuuuuuuugaaauaaaauagccugucuuucagaucuaaaaaaaaaaaaaaaaaaaaaaaaaaaaaaaaaaaaaaaaaaaaaaaaaaaaaaaaaaaaaaaaaaaaaaaaaaaaaaaaaaaaaaaaaaaaaaaaaaaa

SEQ ID NO: 30594 - RNA, 1743 nt, Artificial Sequence
  mRNA product Design a-2 (A100) comprising derived and/or modified sequence from LASV(LM776-SLE-2012;Clade IV)__AIT17824__GPCmut6 (opt1)
aggagaguccgcucagccagguugcagaagcggcuuagcguguguccuaaucuucucucugcguguagguaggccugugccgcaaacaagcuuaccaugggccagaucgugaccuucuuccaggaggucccccacgugaucgaggaggugaugaacaucguccugaucgcccucagcauccuggccgugcugaaggggcucuacaacuucgcgaccugcggccugguggggcuggucacguuccuccugcugugcggccgcuccugcaccaccagcguguacaaggggguguacgagcuccagacccuggagcugaacauggagacgcucaacaugugcaugccgcuguccugcaccaagaacaacagccaccacuacaucauggucggcaacgagaccggccuggagcucacccugacgaacaccuccaucaucaaccacaaguucugcaaccugagcgacgcccacaagaagaaccucuacgaccacgcccugauguccaucaucagcaccuuccaccuguccauccccaacuucaaccaguacgaggccaugagcugcgacuucaacgggggcaagaucuccgugcaguacaaccucagccacuccuacgccggggacgcggccaaccacugcggcaccguggccaacgggguccugcagacguucaugcggauggccuggggcggcagcuacaucgcgcuggacuccgggcacggcaagugggacugcaucaugaccagcuaccaguaccucaucauccagaacaccaccugggaggaccacugccaguucucccgccccagccccaucggguaccugggccugcucucccagcggacgcgcgacaucuacaucagccggcgccugcugggcaccuucaccuggacccucagcgacuccgaggggaaggacacgccgggcggguacugccugacccgguggaugcugaucgaggccgagcucaagugcuucggcaacaccgccguggccaagugcaacgagaagcacgacgaggaguucugcgacaugcugcgccuguucgacuucugcaagcaggccauccagcggcucaaggcgcccgcccagaugagcauccagcugaucaacaaggccgugaacgcccugaucaacgaccagcucaucaugaagaaccaccuccgcgacaucauggggauccccuacugcaacuacuccaaguacugguaccugaaccacaccacgaccggcaagaccagccugcccaagugcuggcuggucuccaacggcagcuaccugaacgagacccacuucuccgacgacaucgagcagcaggccgacaacaugaucacggagaugcuccagaaggaguacauggagcggcaggggaagaccccgcugggccugguggaccuguucguguucagcaccuccuucuaccucaucagcaucuuccugcaccuggucaagauccccacccaccgccacaucguggggaaguccugccccaagccccaccggcucaaccacaugggcaucugcagcugcgggcuguacaagcagccgggcgugcccguccgcuggaagcggugaggacuagucccuguucccagagcccacuuuuuuuucuuuuuuugaaauaaaauagccugucuuucagaucuaaaaaaaaaaaaaaaaaaaaaaaaaaaaaaaaaaaaaaaaaaaaaaaaaaaaaaaaaaaaaaaaaaaaaaaaaaaaaaaaaaaaaaaaaaaaaaaaaaaa

SEQ ID NO: 30595 - RNA, 1743 nt, Artificial Sequence
  mRNA product Design a-2 (A100) comprising derived and/or modified sequence from LASV(Mad39;Clade IV)__ANH09722__GPCmut6 (opt1)
aggagaguccgcucagccagguugcagaagcggcuuagcguguguccuaaucuucucucugcguguagguaggccugugccgcaaacaagcuuaccaugggccagaucgugaccuucuuccaggaggucccccacgugaucgaggaggugaugaacaucguccugaucgcccucagcauccuggccgugcugaaggggcucuacaacguggcgaccugcggccugaucgggcuggucacguuccuccugcugugcggccgcuccugcaccaccacccucuacaaggggguguacgagcugcaggcccuggagcucaacauggagacgcugaacaugugcaugccgcugagcugcaccaagaacaacucccaccacuacauccgggugggcaacgagaccggccucgagcugacccugacgaacaccagccucaucaaccacaaguucugcaaccuguccgacgcccacaagaagaaccuguacgaccacgcccucaugagcaucaucuccaccuuccaccugagcauccccaacuucaaccaguacgaggccauguccugcgacuucaacgacgggaagaucagcguccaguacaaccugucccacaccuacgcgggcgacacggccaaccacugcgggaccguggccaacggcgugcuccagaccuucaugcgcauggccuggggcgggagcuacaucgcgcuggacuccggccgcgggggcugggacugcaucaugaccagcuaccaguaccugaucauccagaacacgaccugggaggaccacugccaguucucccggcccagccccaucggguaccucggccugcugucccagcggacccgcgacaucuacaucagccggcgccuccugggcaccuucacguggacccuguccgacagcgaggggaaggacaccccgggcggguacugccucacccgguggaugcugaucgaggccgagcugaagugcuucggcaacacggccgucgccaagugcaacgagaagcacgacgaggaguucugcgacaugcuccgccuguucgacuucugcaagcaggccauccagcggcugaaggcgcccgcccagaugagcauccagcucaucaacaaggccgugaacgcccugaucaacgaccagcugaucaugaagaaccaccuccgcgacaucauggggauccccuacugcaacuacuccaaguacugguaccugaaccacaccgugaccggcaagaccagccugcccaagugcuggcucgucuccaacggcagcuaccugaacgagacgcacuucuccgacgacaucgagcagcaggccgacaacaugaucaccgagaugcugcagaaggaguacauggagcggcaggggaagaccccgcugggccucguggaccuguucguguucagcaccuccuucuaccugaucagcaucuuccuccaccuggucaagauccccacgcaccgccacgugguggggaagcccugccccaagccgcaccggcugaaccacaugggcaucugcuccugcggguucuacaagcagcccggcguccccgugcgcuggaagcggugaggacuagucccuguucccagagcccacuuuuuuuucuuuuuuugaaauaaaauagccugucuuucagaucuaaaaaaaaaaaaaaaaaaaaaaaaaaaaaaaaaaaaaaaaaaaaaaaaaaaaaaaaaaaaaaaaaaaaaaaaaaaaaaaaaaaaaaaaaaaaaaaaaaaa

SEQ ID NO: 30596 - RNA, 1743 nt, Artificial Sequence
  mRNA product Design a-2 (A100) comprising derived and/or modified sequence from LASV(Z0947-SLE-2011;Clade IV)__AIT17840__GPCmut6 (opt1)
aggagaguccgcucagccagguugcagaagcggcuuagcguguguccuaaucuucucucugcguguagguaggccugugccgcaaacaagcuuaccaugggccagaucgugaccuucuuccaggaggucccccacgugaucgaggaggugaugaacaucguccugaucgcccucagcauccuggccgugcugaaggggcucuacaacuucgcgaccugcggccugguggggcuggucacguuccuccugcugugcggccgcuccugcaccaucagccucuacaaggggguguacgagcugcagacccuggagcucaacauggagacccugaacaugugcaugccgcuguccugcacgaagaacaacagccaccacuacaucauggugggcaacgagaccggccucgagcugacccugaccaacacguccaucaucaaccacaaguucugcaaccucagcgacgcccacaagaagaaccuguacgaccacgcccugauguccaucaucagcaccuuccaccucuccauccccaacuucaaccaguacgaggccaugagcugcgacuucaacgggggcaagaucuccguccaguacaaccugagccacuccuacgccggggacgcggccaaccacugcggcaccguggccaacggggugcugcagaccuucaugcggauggccuggggcggcagcuacaucgcgcucgacuccgggcgcgaccggugggacugcaucaugacgagcuaccaguaccugaucauccagaacaccaccugggaggaccacugccaguucucccgccccagccccaucggcuaccuggggcuccugucccagcggacccgcgacaucuacaucagccggcgccugcucggcacguucaccuggacccugagcgacuccgagggcaaggacacccccgggggcuacugccugacgcgguggaugcucaucgaggccgagcugaagugcuucgggaacaccgccgucgccaagugcaacgagaagcacgacgaggaguucugcgacaugcugcgccucuucgacuucugcaagcaggccauccagcggcugaaggcgccggcccagaugagcauccagcugaucaacaaggccgugaacgcccucaucaacgaccagcugaucaugaagaaccaccuccgcgacaucaugggcauccccuacugcaacuacuccaaguacugguaccugaaccacaccaccacggggaagaccagccugcccaagugcuggcugguguccaacggcagcuaccucaacgagacccacuucuccgacgacaucgagcagcaggccgacaacaugaucaccgagaugcugcagaaggaguacauggagcggcagggcaagacgccgcuggggcuggucgaccucuucguguucagcaccuccuucuaccugaucagcaucuuccugcaccucgugaagauccccacccaccgccacaucgucggcaagcccugccccaagccgcaccggcugaaccacauggggaucugcuccugcggccuguacaagcagcccggggugcccgugaaguggaagcgcugaggacuagucccuguucccagagcccacuuuuuuuucuuuuuuugaaauaaaauagccugucuuucagaucuaaaaaaaaaaaaaaaaaaaaaaaaaaaaaaaaaaaaaaaaaaaaaaaaaaaaaaaaaaaaaaaaaaaaaaaaaaaaaaaaaaaaaaaaaaaaaaaaaaaa

SEQ ID NO: 30597 - RNA, 1743 nt, Artificial Sequence
  mRNA product Design a-2 (A100) comprising derived and/or modified sequence from LASV(Josiah;Clade IV)__NP_694870__GPCmut6 (opt4)
aggagaguccgcucagccagguugcagaagcggcuuagcguguguccuaaucuucucucugcguguagguaggccugugccgcaaacaagcuuaccaugggccagaucgugaccuucuuccaggaggugccccacgugaucgaggaggugaugaacaucgugcugaucgcccugagcgugcuggccgugcugaagggccuguacaacuucgccaccugcggccuggugggccuggugaccuuccugcugcugugcggcagaagcugcaccaccagccuguacaagggcguguacgagcugcagacccuggagcugaacauggagacccugaacaugugcaugccccugagcugcaccaagaacaacagccaccacuacaucauggugggcaacgagaccggccuggagcugacccugaccaacaccagcaucaucaaccacaaguucugcaaccugagcgacgcccacaagaagaaccuguacgaccacgcccugaugagcaucaucagcaccuuccaccugagcauccccaacuucaaccaguacgaggccaugagcugcgacuucaacggcggcaagaucagcgugcaguacaaccugagccacagcuacgccggcgacgccgccaaccacugcggcaccguggccaacggcgugcugcagaccuucaugagaauggccuggggcggcagcuacaucgcccuggacagcggcagaggcaacugggacugcaucaugaccagcuaccaguaccugaucauccagaacaccaccugggaggaccacugccaguucagcagacccagccccaucggcuaccugggccugcugagccagagaaccagagacaucuacaucagcagaagacugcugggcaccuucaccuggacccugagcgacagcgagggcaaggacacccccggcggcuacugccugaccagauggaugcugaucgaggccgagcugaagugcuucggcaacaccgccguggccaagugcaacgagaagcacgacgaggaguucugcgacaugcugagacuguucgacuucugcaagcaggccauccagagacugaaggcccccgcccagaugagcauccagcugaucaacaaggccgugaacgcccugaucaacgaccagcugaucaugaagaaccaccugagagacaucaugggcauccccuacugcaacuacagcaaguacugguaccugaaccacaccaccaccggcagaaccagccugcccaagugcuggcuggugagcaacggcagcuaccugaacgagacccacuucagcgacgacaucgagcagcaggccgacaacaugaucaccgagaugcugcagaaggaguacauggagagacagggcaagaccccccugggccugguggaccuguucguguucagcaccagcuucuaccugaucagcaucuuccugcaccuggugaagauccccacccacagacacaucgugggcaagagcugccccaagccccacagacugaaccacaugggcaucugcagcugcggccuguacaagcagcccggcgugcccgugaaguggaagagaugaggacuagucccuguucccagagcccacuuuuuuuucuuuuuuugaaauaaaauagccugucuuucagaucuaaaaaaaaaaaaaaaaaaaaaaaaaaaaaaaaaaaaaaaaaaaaaaaaaaaaaaaaaaaaaaaaaaaaaaaaaaaaaaaaaaaaaaaaaaaaaaaaaaaa

SEQ ID NO: 30598 - RNA, 1740 nt, Artificial Sequence
  mRNA product Design a-2 (A100) comprising derived and/or modified sequence from LASV(LP;Clade I)__AAF86701__GPCmut6 (opt4)
aggagaguccgcucagccagguugcagaagcggcuuagcguguguccuaaucuucucucugcguguagguaggccugugccgcaaacaagcuuaccaugggccagaucaucaccuucuuccaggaggugccccacgugaucgaggaggugaugaacaucgugcugaucgcccugagccugcuggccauccugaagggccuguacaacaucgccaccugcggcaucaucggccugguggccuuccuguuccugugcggcaagagcugcagccugacccugaagggcggcuacgagcugcagacccuggagcugaacauggagacccugaacaugugcaugccccugagcugcaccaagaacagcagccaccacuacaucagagugggcaacgagaccggccuggagcugacccugaccaacaccagcaucaucaaccacaaguucugcaaccugagcgacgcccacaagaagaaccuguacgaccacgcccugaugagcaucaucagcaccuuccaccugagcauccccaacuucaaccaguacgaggccaugagcugcgacuucaacggcggcaagaucagcgugcaguacaaccugagccacagcuacgccggcgacgccgccgagcacugcggcaccguggccaacggcgugcugcagaccuucaugagaauggccuggggcggcagauacaucgcccuggacagcggcaagggcaacugggacugcaucaugaccagcuaccaguaccugaucauccagaacaccaccugggaggaccacugccaguucagcagacccagccccaucggcuaccugggccugcugagccagagaaccagagacaucuacaucagcagaagacugcugggcaccuucaccuggacccugagcgacagcgagggcaacgagacccccggcggcuacugccugaccagauggaugcugaucgaggccgagcugaagugcuucggcaacaccgccguggccaagugcaacgagaagcacgacgaggaguucugcgacaugcugagacuguucgacuucugcaagcaggccaucagaagacugaaggcccccgcccagaugagcauccagcugaucaacaaggccgugaacgcccugaucaacgaccagcugaucaugaagaaccaccugagagacaucaugggcauccccuacugcaacuacagcaaguacugguaccugaaccacaccagcagcggcagaaccagccugcccaagugcuggcugaucagcaacggcagcuaccugaacgagacccaguucagcgacgacaucgagcagcaggccgacaacaugaucaccgagaugcugcagaaggaguacaucgagagacagggcaagaccccccugggccugguggacaucuucaucuucagcaccagcuucuaccugaucagcaucuuccugcaccugaucaagauccccacccacagacacaucgugggcaagcccugccccaagccccacagacugaaccacaugggcgugugcagcugcggccuguacaagcaccccggcgugcccaccaaguggaagagaugaggacuagucccuguucccagagcccacuuuuuuuucuuuuuuugaaauaaaauagccugucuuucagaucuaaaaaaaaaaaaaaaaaaaaaaaaaaaaaaaaaaaaaaaaaaaaaaaaaaaaaaaaaaaaaaaaaaaaaaaaaaaaaaaaaaaaaaaaaaaaaaaaaaaa

SEQ ID NO: 30599 - RNA, 1740 nt, Artificial Sequence
  mRNA product Design a-2 (A100) comprising derived and/or modified sequence from LASV(803213;Clade II)__AAF86703__GPCmut6 (opt4)
aggagaguccgcucagccagguugcagaagcggcuuagcguguguccuaaucuucucucugcguguagguaggccugugccgcaaacaagcuuaccaugggccagaucaucaccuucuuccaggaggugccccacgugaucgaggaggugaugaacaucgugcugaucgcccugagccugcuggccauccugaagggcaucuacaacguggccaccugcggccuguucggccugaucagcuuccugcugcugugcggcagaagcugcagcgugaccuacaagggcguguacgagcugcagacccuggagcugaacauggccaaccugaacaugugcaugccccugagcugcaccaagaacaacagccaccacuacaucauggugggcaacgagaccggccuggagcugacccugaccaacaccagcaucaucaaccacaaguucugcaaccugagcgacgcccacaagaagaaccuguacgaccacgcccugaugagcaucaucagcaccuuccaccugagcauccccaacuucaaccaguacgaggccaugagcugcgacuucaacggcggcaagaucagcgugcaguacaaccugagccacagcuucgccguggacgccgccaaccacugcggcaccaucgccaacggcgugcugcagaccuucaugagaauggccuggggcggcagcuacaucgcccuggacagcggcaagggcaacugggacugcaucaugaccagcuaccaguaccugaucauccagaacaccaccugggaggaccacugccaguucagcagacccagccccaucggcuaccugggccugcugagccagagaaccagagacaucuacaucagcagaagacugcugggcaccuucaccuggacccugagcgacagcgagggcaacgaggcccccggcggcuacugccugaccagauggaugcugaucgaggccgagcugaagugcuucggcaacaccgccguggccaagugcaacgagaagcacgacgaggaguucugcgacaugcugagacuguucgacuucugcaagcaggccaucaagagacugaagacccccgcccagaugagcauccagcugaucaacaaggccgugaacgcccugaucaacgaccagcugaucaugaagaaccaccugagagacaucaugggcauccccuacugcaacuacagcagauacugguaccugaaccacaccgugaccggcaagaccagccugcccagaugcuggcuggugagcaacggcagcuaccugaacgagacccacuucagcgacgacaucgagcagcaggccgacaacaugaucaccgagaugcugcagaaggaguacauggacagacagggcaagaccccccugggccugguggaccuguucguguucagcaccagcuucuaccugaucagcaucuuccugcaccuggugaagauccccacccacagacacaucgugggcaagcccugccccaagccccacagacugaaccacaugggcaucugcagcugcggccuguacaagcaccccggcgugcccgugaaguggaagagaugaggacuagucccuguucccagagcccacuuuuuuuucuuuuuuugaaauaaaauagccugucuuucagaucuaaaaaaaaaaaaaaaaaaaaaaaaaaaaaaaaaaaaaaaaaaaaaaaaaaaaaaaaaaaaaaaaaaaaaaaaaaaaaaaaaaaaaaaaaaaaaaaaaaaa

SEQ ID NO: 30600 - RNA, 1740 nt, Artificial Sequence
  mRNA product Design a-2 (A100) comprising derived and/or modified sequence from LASV(GA391;Clade III)__CAA36645__GPCmut6 (opt4)
aggagaguccgcucagccagguugcagaagcggcuuagcguguguccuaaucuucucucugcguguagguaggccugugccgcaaacaagcuuaccaugggccagaucgugaccuucuuccaggaggugccccacgugaucgaggaggugaugaacaucgugcugaucgcccugagcauccuggccauccugaagggccuguacaacguggccaccugcggccugaucggccuggugaccuuccugcugcugagcggcagaagcugcagccugaucuacaagggcaccuacgagcugcagacccuggagcugaacauggagacccugaacaugugcaugccccugagcugcaccaagaacaacagccaccacuacaucagagugggcaacgagaccggccuggagcugacccugaccaacaccagcauccugaaccacaaguucugcaaccugagcgacgcccacaagagaaaccuguacgaccacagccugaugagcaucaucagcaccuuccaccugagcauccccaacuucaaccaguacgaggccaugagcugcgacuucaacggcggcaagaucaccgugcaguacaaccugagccacagcuucgccguggacgccgccggccacugcggcacccuggccaacggcgugcugcagaccuucaugagaauggccuggggcggcagcuacaucgcccuggacagcggcagaggcaacugggacugcaucaugaccagcuaccaguaccugaucauccagaacaccaccugggacgaccacugccaguucagcagacccagccccaucggcuaccugggccugcugagccagagaaccagagacaucuacaucagcagaagacugcugggcaccuucaccuggacccugagcgacagcgagggcaacgagacccccggcggcuacugccugaccagauggaugcugaucgaggccgagcugaagugcuucggcaacaccgccguggccaagugcaacgagaagcacgacgaggaguucugcgacaugcugagacuguucgacuucugcaagcaggccaucagaagacugaagacccccgcccagaugagcauccagcugaucaacaaggccgugaacgcccugaucaacgaccagcugaucaugaagaaccaccugagagacaucaugggcauccccuacugcaacuacagcagauacugguaccugaaccacaccagcaccggcaagaccagccugcccagaugcuggcugaucagcaacggcagcuaccugaacgagaccaaguucagcgacgacaucgagcagcaggccgacaacaugaucaccgagaugcugcagaaggaguacaucgacagacagggcaagaccccccugggccugguggaccuguucguguucagcaccagcuucuaccugaucagcaucuuccugcaccuggugaagauccccacccacagacacaucgugggcaagcccugccccaagccccacagacugaaccacaugggcaucugcagcugcggccuguacaagcagcccggcgugcccgugagauggaagagaugaggacuagucccuguucccagagcccacuuuuuuuucuuuuuuugaaauaaaauagccugucuuucagaucuaaaaaaaaaaaaaaaaaaaaaaaaaaaaaaaaaaaaaaaaaaaaaaaaaaaaaaaaaaaaaaaaaaaaaaaaaaaaaaaaaaaaaaaaaaaaaaaaaaaa

SEQ ID NO: 30601 - RNA, 1743 nt, Artificial Sequence
  mRNA product Design a-2 (A100) comprising derived and/or modified sequence from LASV(AV;Clade V)__CCA30314__GPCmut6 (opt4)
aggagaguccgcucagccagguugcagaagcggcuuagcguguguccuaaucuucucucugcguguagguaggccugugccgcaaacaagcuuaccaugggccagaucgugaccuucuuccaggaggugccccacgugaucgaggaggugaugaacaucgugcugaucgcccugagcauccuggccgugcugaagggccuguacaacaucgccaccugcggccugaucggccugaucaccuuccugcugcugugcggcagaagcugcagcagcaaccuguacaagggcguguacgagcugcagagccuggaccugaacauggagacccugaacaugugcaugccccugagcugcaccaagaacaacagccaccacuacaucagagugggcaacgacaccggccuggagcugacccugaccaacaccagcauccugaaccacaaguucugcaaccugagcgacgcccacaagaaggaccuguacgaccacgcccugaugagcaucaucagcaccuuccaccugagcauccccaacuucaaccaguacgaggccaugagcugcgacuucaacggcggcaagaucagcgugcaguacaaccugagccacagcuacgccaucgacgccgccaaccacugcggcaccguggccaacggcauccugcagaccuucaugagaauggccuggggcggcagcuacaucgcccuggacagcggcagaggcaacugggacugcaucaugaccagcuaccaguaccugaucauccagaacaccaccugggagaaccacugccaguucagcagacccagccccaucggcuaccugggccugcugagccagagaaccagagacaucuacaucagcagaagacugcugggcaccuucaccuggacccugagcgacagcgagggcaacgccacccccggcggcuacugccugaccagauggaugcugaucgaggccgagcugaagugcuucggcaacaccgccguggccaagugcaacgagaagcacgacgaggaguucugcgacaugcugagacuguucgacuucugcaagcaggccaucagcagacugaagagccccgcccagaugagcauccagcugaucaacaaggccgugaacgcccugaucaacgaccagcugaucaugaagaaccaccugagagacaucaugggcauccccuacugcaacuacagcaaguacugguaccugaaccacaccaucaccggcaagaccagccugcccaagugcuggcuggugagcaacggcagcuaccugaacgagacccacuucagcgacgacaucgagcagcaggccgacaacaugaucaccgagaugcugcagaaggaguacauggagagacagggcaagaccccccugggccugguggaccuguucguguucagcaccagcuucuaccugaucagcaucuuccugagacuggugaagauccccacccacagacacaucgugggcaagcccugccccaagccccacagacugaaccacaugggcaucugcagcugcggccuguacaagcagcccggcgugcccgugagauggaagagaugaggacuagucccuguucccagagcccacuuuuuuuucuuuuuuugaaauaaaauagccugucuuucagaucuaaaaaaaaaaaaaaaaaaaaaaaaaaaaaaaaaaaaaaaaaaaaaaaaaaaaaaaaaaaaaaaaaaaaaaaaaaaaaaaaaaaaaaaaaaaaaaaaaaaa

SEQ ID NO: 30602 - RNA, 1740 nt, Artificial Sequence
  mRNA product Design a-2 (A100) comprising derived and/or modified sequence from LASV(Togo/2016/7082;Clade VI)__AMR44577__GPCmut6 (opt4)
aggagaguccgcucagccagguugcagaagcggcuuagcguguguccuaaucuucucucugcguguagguaggccugugccgcaaacaagcuuaccaugggccagaucaucaccuucuuccaggaggugccccacgugaucgaggaggugaugaacaucgugcugaucgcccugagccugcuggccauccugaagggcguguacaacguggccaccugcggcaucaucggccuggugaccuuccuguuccugugcggcagaagcugcagccugaucuacaagggcagcuacgagcugcagacccuggagcugaacauggagacccugaacaugugcaugccccugagcugcaccaagaacagcagccaccacuacaucagagugggcaacgagaccggccuggagcugacccugaccaacaccagcaucaucaaccacaaguucugcaaccugagcgacgcccacaagagaaaccuguacgaccacgcccugaugagcauccugagcaccuuccaccugagcauccccaacuucaaccaguacgaggccaugagcugcgacuucaacggcggcaagaucagcgugcaguacaaccugagccacgccuacgccguggacgccgccgagcacugcggcaccguggccaacggcgugcugcagaccuucaugagaauggccuggggcggcagcuacaucgcccuggacagcggcagaggcaacugggacugcaucaugaccagcuaccaguaccugaucauccagaacaccaccugggaggaccacugccaguucagcagacccagccccaucggcuaccugggccugcugagccagagaaccagagacaucuacaucagcagaagacugcugggcaccuucaccuggacccugagcgacagcgagggcaacgagacccccggcggcuacugccugaccagauggaugcugaucgaggccgagcugaagugcuucggcaacaccgccguggccaagugcaacgagaagcacgacgaggaguucugcgacaugcugagacuguucgacuucugcaagcaggccauccagagacugaagagccccgcccagaugagcauccagcugaucaacaaggccgugaacgcccugaucaacgaccagcugaucaugaagaaccaccugagagacaugaugggcauccccuacugcaacuacagcaaguacugguaccugaaccacaccagcagcggcagaaccagccugcccaagugcuggcuggugagcaacggcagcuaccugaacgagacccacuucagcgacgacaucgagcagcaggccgacaacaugaucaccgagaugcugcagaaggaguacaucgacagacagggcaagaccccccugggccugguggaccuguucguguucagcaccagcuucuaccugaucagcaucuuccugcaccugaucaagauccccacccacagacacaucgugggcaagcccugccccaagccccacagacugaaccacaugggcaucugcagcugcggccuguacaagcagcccggcgugcccaccagauggaagagaugaggacuagucccuguucccagagcccacuuuuuuuucuuuuuuugaaauaaaauagccugucuuucagaucuaaaaaaaaaaaaaaaaaaaaaaaaaaaaaaaaaaaaaaaaaaaaaaaaaaaaaaaaaaaaaaaaaaaaaaaaaaaaaaaaaaaaaaaaaaaaaaaaaaaa

SEQ ID NO: 30603 - RNA, 1740 nt, Artificial Sequence
  mRNA product Design a-2 (A100) comprising derived and/or modified sequence from LASV(KAK-428;Clade n.d. (VII))__ANH09740__GPCmut6 (opt4)
aggagaguccgcucagccagguugcagaagcggcuuagcguguguccuaaucuucucucugcguguagguaggccugugccgcaaacaagcuuaccaugggccagaucgugaccuucuuccaggaggugccccacgugaucgaggaggugaugaacaucgugcugaucgcccugagccugcuggccauccugaagggccuguacaacuucgccaccugcggcgugaucggccugaucaccuuccugcugcugugcggcagaagcugcagcgccaccuacaagggccaguacgagcugcagacccuggagcugaacauggagagccugaacaugugcaugccccugagcugcaccaagaacaacagccaccacuacaucagagccggcaacaacaccggccuggagcugacccugaccaacaccagcaucaucagccacaaguucugcaaccugagcgacgcccacaagaagaaccuguacgaccacacccugaugagcaucaucaccaccuuccaccugagcauccccaacuucaaccaguacgaggccaugagcugcgacuucaacggcggcaagaucagcauccaguacaaccugagccacagcuacgccggcgacgccgcccagcacugcggcaccguggccaacggcgugcugcagaccuucaugagaauggccuggggcggcagcuaccuggcccuggacagcggcagaagaggcugggacugcaucaucagcagcuaccaguaccugaucauccagaacaccaccugggacgaccacugccaguucagcagacccagccccaucggcuaccugggcuucgugagccagaagaccagagacaucuacaucagcagaagacugcugggcaccuucaccuggacccugagcgacagcgagggccacgacaugcccggcggcuacugccugaccagauggaugcugaucgaggccgaccugaagugcuucggcaacaccgccguggccaagugcaacgagaagcacgacgaggaguucugcgacauguggagacuguucgacuucugcaagcaggccauccagagacugaaggcccccgcccagaugaacauccagcugaucaacaaggccgugaacgcccugaucaacgaccagcugaugaugaagaaccaccugagagacaucaugggcauccccuacugcaacuacagcaaguucugguaccugaacaacaccaccaccggcagaaccagccugcccagaugcuggcugaucagcaacggcagcuaccugaacgagacccacuucagcgacgacaucgagcagcaggccgacaacaugaucaccgagaugcugcagaaggaguacauggacagacagggcaagaccccccugggccugguggaccuguucguguucagcaccagcuucuaccugaucaccaucuuccugcaccuggugaagauccccacccacagacacaucgugggcaagcccugccccaagccccacagacugaaccacaugggcaucugcagcugcggccuguacaagcagcccggcgugcccgugagauggaagagaugaggacuagucccuguucccagagcccacuuuuuuuucuuuuuuugaaauaaaauagccugucuuucagaucuaaaaaaaaaaaaaaaaaaaaaaaaaaaaaaaaaaaaaaaaaaaaaaaaaaaaaaaaaaaaaaaaaaaaaaaaaaaaaaaaaaaaaaaaaaaaaaaaaaaa

SEQ ID NO: 30604 - RNA, 1740 nt, Artificial Sequence; identical to SEQ ID NO: 30598
  mRNA product Design a-2 (A100) comprising derived and/or modified sequence from LASV(Pinneo-NIG-1969;Clade I)__AIT17836__GPCmut6 (opt4)

SEQ ID NO: 30605 - RNA, 1740 nt, Artificial Sequence
  mRNA product Design a-2 (A100) comprising derived and/or modified sequence from LASV(ISTH0009-NIG-2011;Clade II)__AIT17404__GPCmut6 (opt4)
aggagaguccgcucagccagguugcagaagcggcuuagcguguguccuaaucuucucucugcguguagguaggccugugccgcaaacaagcuuaccaugggccagaucaucaccuucuuccaggaggugccccacgugaucgaggaggugaugaacaucgugcugaucgcccugagccugcuggccauccugaagggcaucuacaacguggccaccugcggccuguucggccuggugagcuuccugcugcugugcggcagaagcugcagcaccaccuacaagggcguguacgagcugcagacccuggagcuggacauggccagccugaacaugugcaugccccugagcugcaccaagaacaacagccaccacuacaucauggugggcaacgagaccggccuggagcugacccugaccaacaccagcaucaucaaccacaaguucugcaaccugagcgacgcccacaagaagaaccuguacgaccacgcccugaugagcaucaucagcaccuuccaccugagcauccccaacuucaaccaguacgaggccaugagcugcgacuucaacggcggcaagaucagcgugcaguacaaccugagccacgccuacgccguggacgccgccaaccacugcggcaccaucgccaacggcgugcugcagaccuucaugagaauggccuggggcggcagcuacaucgcccuggacagcggcaagggcagcugggacugcaucaugaccagcuaccaguaccugaucauccagaacaccaccugggaggaccacugccaguucagcagacccagccccaucggcuaccugggccugcugagccagagaaccagagacaucuacaucagcagaagacugcugggcaccuucaccuggacccugagcgacagcgagggcaacgagacccccggcggcuacugccugaccagauggaugcugaucgaggccgagcugaagugcuucggcaacaccgccguggccaagugcaacgagaagcacgacgaggaguucugcgacaugcugagacuguucgacuucugcaagcaggccaucagaagacugaagacccccgcccagaugagcauccagcugaucaacaaggccgugaacgcccugaucaacgaccagcugaucaugaagaaccaccugagagacaucaugggcauccccuacugcaacuacagcaaguacugguaccugaaccacaccgugaccggcaagaccagccugcccagaugcuggcuggugagcaacggcagcuaccugaacgagacccacuucagcgacgacaucgagcagcaggccgacaacaugaucaccgagcugcugcagaaggaguacauggacagacagggcaagaccccccugggccugguggaccuguucguguucagcaccagcuucuaccugaucagcaucuuccugcaccugaucaagauccccacccacagacacaucaccggcaagcccugccccaagccccacagacugaaccacaugggcaucugcagcugcggccuguacaagcaccccggcgugcccgugaaguggaagagaugaggacuagucccuguucccagagcccacuuuuuuuucuuuuuuugaaauaaaauagccugucuuucagaucuaaaaaaaaaaaaaaaaaaaaaaaaaaaaaaaaaaaaaaaaaaaaaaaaaaaaaaaaaaaaaaaaaaaaaaaaaaaaaaaaaaaaaaaaaaaaaaaaaaaa

SEQ ID NO: 30606 - RNA, 1740 nt, Artificial Sequence
  mRNA product Design a-2 (A100) comprising derived and/or modified sequence from LASV(ISTH2010-NIG-2012;Clade II)__AIT17482__GPCmut6 (opt4)
aggagaguccgcucagccagguugcagaagcggcuuagcguguguccuaaucuucucucugcguguagguaggccugugccgcaaacaagcuuaccaugggccagaucaucaccuucuuccaggaggugccccacgugaucgaggaggugaugaacaucgugcugaucgcccugagccugcuggccauccugaagggcaucuacaacguggccaccugcggccuguucggccuggugagcuuccugcugcugugcggcagaagcugcagcaccaccuacaagggcguguacgagcugcagacccuggagcuggacauggccagccugaacaugugcaugccccugagcugcaccaagaacaacagccaccacuacaucauggugggcaacgagaccggccuggagcugacccugaccaacaccagcaucaucaaccacaaguucugcaaccugagcgacgcccacaagaagaaccuguacgaccacgcccugaugagcaucaucagcaccuuccaccugagcauccccaacuucaaccaguacgaggccaugagcugcgacuucaacggcggcaagaucagcgugcaguacaaccugagccacgccuacgccguggacgccgccaaccacugcggcaccaucgccaacggcgugcugcagaccuucaugagaauggccuggggcggcagcuacaucgcccuggacagcggcaagggcagcugggacugcaucaugaccagcuaccaguaccugaucauccagaacaucaccugggaggaccacugccaguucagcagacccagccccaucggcuaccugggccugcugagccagagaaccagagacaucuacaucagcagaagacugcugggcaccuucaccuggacccugagcgacagcgagggcaacgagacccccggcggcuacugccugaccagauggaugcugaucgaggccgagcugaagugcuucggcaacaccgccguggccaagugcaacgagaagcacgacgaggaguucugcgacaugcugagacuguucgacuucugcaagcaggccaucagaagacugaagacccccgcccagaugagcauccagcugaucaacaaggccgugaacgcccugaucaacgaccagcugaucaugaagaaccaccugagagacaucaugggcauccccuacugcaacuacagcaaguacugguaccugaaccacaccgugaccggcaagaccagccugcccagaugcuggcuggugagcaacggcagcuaccugaacgagacccacuucagcgacgacaucgagcagcaggccgacaacaugaucaccgagcugcugcagaaggaguacaucgacagacagggcaagaccccccugggccugguggaccuguucguguucagcaccagcuucuaccugaucagcaucuuccugcaccuggugaagauccccacccacagacacguggugggcaagcccugccccaagccccacagacugaaccacaugggcaucugcagcugcggccuguacaagcaccccggcgugcccgugaaguggaagagaugaggacuagucccuguucccagagcccacuuuuuuuucuuuuuuugaaauaaaauagccugucuuucagaucuaaaaaaaaaaaaaaaaaaaaaaaaaaaaaaaaaaaaaaaaaaaaaaaaaaaaaaaaaaaaaaaaaaaaaaaaaaaaaaaaaaaaaaaaaaaaaaaaaaaa

SEQ ID NO: 30607 - RNA, 1740 nt, Artificial Sequence
  mRNA product Design a-2 (A100) comprising derived and/or modified sequence from LASV(Lassa virus/H.sapiens-wt/NGA/2015/ISTH_0543;Clade II)__AVO03639__GPCmut6 (opt4)
aggagaguccgcucagccagguugcagaagcggcuuagcguguguccuaaucuucucucugcguguagguaggccugugccgcaaacaagcuuaccaugggccagaucaucaccuucuuccaggaggugccccacgugaucgaggaggugaugaacaucgugcugaucgcccugagccugcuggccauccugaagggcaucuacaacguggccaccugcggccuguucggccuggugagcuuccugcugcugugcggcagaagcugcagcaccaccuacaagggcguguacgagcugcagacccuggagcuggacauggccaaccugaacaugugcaugccccugagcugcaccaagaacaacagccaccacuacaucauggugggcaacgagaccggccuggagcugacccugaccaacaccagcaucaucaaccacaaguucugcaaccugagcgacgcccacaagaagaaccuguacgaccacgcccugaugagcaucaucagcaccuuccaccugagcauccccaacuucaaccaguacgaggccaugagcugcgacuucaacggcggcaagaucagcgugcaguacaaccugagccacaccuacgccguggacgccgccaaccacugcggcaccaucgccaacggcgugcugcagaccuucaugagaauggccuggggcggcagcuacaucgcccuggacagcggcaagggcagcugggacugcaucaugaccagcuaccaguaccuggugauccagaacaccaccugggaggaccacugccaguucagcagacccagccccaucggcuaccugggccugcugagccagagaaccagagacaucuacaucagcagaagacugcugggcaccuucaccuggacccugagcgacagcgagggcaacgagacccccggcggcuacugccugaccagauggaugcugaucgaggccgagcugaagugcuucggcaacaccgccguggccaagugcaacgagaagcacgacgaggaguucugcgacaugcugagacuguucgacuucugcaagcaggccaucagaagacugaagacccccgcccagaugagcauccagcugaucaacaaggccgugaacgcccugaucaacgaccagcugaucaugaagaaccaccugagagacaucaugggcauccccuacugcaacuacagcaaguacugguaccugaaccacaccgugaccggcaagaccagccugcccagaugcuggcuggugagcaacggcagcuaccugaacgagacccacuucagcgacgacaucgagcagcaggccgacaacaugaucaccgagcugcugcagaaggaguacaucgacagacagggcaagaccccccugggccugguggaccuguucguguucagcaccagcuucuaccugaucagcaucuuccugcaccuggugaagauccccacccacagacacaucaccggcaagcccugccccaagccccacagacugaaccacaugggcaucugcagcugcggccuguacaagcaccccggcgugcccgugaaguggaagagaugaggacuagucccuguucccagagcccacuuuuuuuucuuuuuuugaaauaaaauagccugucuuucagaucuaaaaaaaaaaaaaaaaaaaaaaaaaaaaaaaaaaaaaaaaaaaaaaaaaaaaaaaaaaaaaaaaaaaaaaaaaaaaaaaaaaaaaaaaaaaaaaaaaaaa

SEQ ID NO: 30608 - RNA, 1740 nt, Artificial Sequence
  mRNA product Design a-2 (A100) comprising derived and/or modified sequence from LASV(Lassa virus/H.sapiens-wt/NGA/2016/ISTH_0009;Clade II)__AVO03571__GPCmut6 (opt4)
aggagaguccgcucagccagguugcagaagcggcuuagcguguguccuaaucuucucucugcguguagguaggccugugccgcaaacaagcuuaccaugggccagaucaucaccuucuuccaggaggugccccacgugaucgaggaggugaugaacaucgugcugaucgcccugagccugcuggccauccugaagggcaucuacaacguggccaccugcggccugcugggccuggugagcuuccugcugcugugcggcagaagcugcagcaccaccuacaagggcguguacgagcugcagacccuggagcuggacauggccagccugaacaugugcaugccccugagcugcaccaagaacaacagccaccacuacaucauggugggcaacgagaccggccuggagcugacccugaccaacaccagcaucaucaaccacaaguucugcaaccugagcgacgcccacaagaagaaccuguacgaccacgcccugaugagcaucaucagcaccuuccaccugagcauccccaacuucaaccaguacgaggccaugagcugcgacuucaacggcggcagaaucagcgugcaguacaaccugagccacagcuacgccguggacgccgccaaccacugcggcaccaucgccaacggcgugcugcagaccuucaugagaauggccuggggcggcagcuacaucgcccuggacagcggcaagggcagcugggacugcaucaugaccagcuaccaguaccugaucauccagaacaccaccugggaggaccacugccaguucagcagacccagccccaucggcuaccugggccugcugagccagagaaccagagacaucuacaucagcagaagacugcugggcaccuucaccuggacccugagcgacagcgagggcaacgagacccccggcggcuacugccugaccagauggaugcugaucgaggccgagcugaagugcuucggcaacaccgccguggccaagugcaacgagaagcacgacgaggaguucugcgacaugcugagacuguucgacuucugcaagcaggccaucagaagacugaagacccccgcccagaugagcauccagcugaucaacaaggccgugaacgcccugaucaacgaccagcugaucaugaagaaccaccugagagacaucaugggcauccccuacugcaacuacagcaaguacugguaccugaaccacaccgugaccggcaagaccagccugcccagaugcuggcuggugagcaacggcagcuaccugaacgagacccacuucagcgacgacaucgagcagcaggccgacaacaugaucaccgagcugcugcagaaggaguacaucgacagacagggcaagaccccccugggccugguggaccuguucguguucagcaccagcuucuaccugaucagcaucuuccugcaccuggugaagauccccacccacagacacaucaccggcaagcccugccccaagccccacagacugaaccacaugggcaucugcagcugcggccuguacaaccaccccggcgugcccgugaaguggaagagaugaggacuagucccuguucccagagcccacuuuuuuuucuuuuuuugaaauaaaauagccugucuuucagaucuaaaaaaaaaaaaaaaaaaaaaaaaaaaaaaaaaaaaaaaaaaaaaaaaaaaaaaaaaaaaaaaaaaaaaaaaaaaaaaaaaaaaaaaaaaaaaaaaaaaa

SEQ ID NO: 30609 - RNA, 1740 nt, Artificial Sequence
  mRNA product Design a-2 (A100) comprising derived and/or modified sequence from LASV(Lassa virus/H.sapiens-wt/NGA/2016/ISTH_0017;Clade II)__AVO03567__GPCmut6 (opt4)
aggagaguccgcucagccagguugcagaagcggcuuagcguguguccuaaucuucucucugcguguagguaggccugugccgcaaacaagcuuaccaugggccagaucaucaccuucuuccaggaggugccccacgugaucgaggaggugaugaacaucgugcugaucgcccugagccugcuggccauccugaagggcaucuacaacguggccaccugcggccuguucggccuggugagcuuccugcugcugugcggcagaagcugcagcaccaccuacaagggcguguacgagcugcagacccuggagcuggacauggccagccugaacaugugcaugccccugagcugcaccaagaacaacagccaccacuacaucauggugggcaacgagaccggccuggagcugacccugaccaacaccagcaucaucaaccacaaguucugcaaccugagcgacgcccacaagaagaaccuguacgaccacgcccugaugagcaucaucagcaccuuccaccugagcauccccaacuucaaccaguacgaggccaugagcugcgacuucaacggcggcaagaucagcgugcaguacaaccugagccacaccuacgccaucgacgccgccaaccacugcggcaccaucgccaacggcgugcugcagaccuucaugagaauggccuggggcggcagcuacaucgcccuggacagcggcaagggcagcugggacugcaucaugaccagcuaccaguaccugaucauccagaacaccaccugggaggaccacugccaguucagcagacccagccccaucggcuaccugggccugcugagccagagaaccagagacaucuacaucagcagaagacugcugggcaccuucaccuggacccugagcgacagcgagggcaacgagacccccggcggcuacugccugaccagauggaugcugaucgaggccgagcugaagugcuucggcaacaccgccguggccaagugcaacgagaagcacgacgaggaguucugcgacaugcugagacuguucgacuucugcaagcaggccaucagaagacugaagacccccgcccagaugagcauccagcugaucaacaaggccgugaacgcccugaucaacgaccagcugaucaugaagaaccaccugagagacaucaugggcauccccuacugcaacuacagcaaguacugguaccugaaccacaccgugaccggcaagaccagccugcccagaugcuggcuggugagcaacggcagcuaccugaacgagacccacuucagcgacgacaucgagcagcaggccgacaacaugaucaccgagcugcugcagaaggaguacauggacagacagggcaagaccccccugggccugguggaccuguucguguucagcaccagcuucuaccugaucagcaucuuccugcaccuggugagaauccccacccacagacacgugaucggcaagcccugccccaagccccacagacugaaccacaugggcaucugcagcugcggccuguacaagcaccccggcgugcccgugaaguggaagagaugaggacuagucccuguucccagagcccacuuuuuuuucuuuuuuugaaauaaaauagccugucuuucagaucuaaaaaaaaaaaaaaaaaaaaaaaaaaaaaaaaaaaaaaaaaaaaaaaaaaaaaaaaaaaaaaaaaaaaaaaaaaaaaaaaaaaaaaaaaaaaaaaaaaaa

SEQ ID NO: 30610 - RNA, 1740 nt, Artificial Sequence
  mRNA product Design a-2 (A100) comprising derived and/or modified sequence from LASV(Lassa virus/H.sapiens-wt/NGA/2018/ISTH_0959;Clade II)__AVV65099__GPCmut6 (opt4)
aggagaguccgcucagccagguugcagaagcggcuuagcguguguccuaaucuucucucugcguguagguaggccugugccgcaaacaagcuuaccaugggccagaucaucaccuucuuccaggaggugccccacgugaucgaggaggugaugaacaucgugcugaucgcccugagccugcuggccauccugaagggcaucuacaacguggugaccugcggccuguucggccuggugagcuuccugcugcugugcggcagaagcugcagcaccaccuacaagggcguguacgagcugcagacccuggagcuggacauggccagccugaacaugugcaugccccugagcugcaccaagaacaacagccaccacuacaucauggugggcaacgagaccggccuggagcugacccugaccaacaccagcaucaucaaccacaaguucugcaaccugagcgacgcccacaagaagaaccuguacgaccacgcccugaugagcaucaucagcaccuuccaccugagcauccccaacuucaaccaguacgaggccaugagcugcgacuucaacggcggcaagaucagcgugcaguacaaccugagccacgccuacgccaucgacgccgccaaccacugcggcaccaucgccaacggcgugcugcagaccuucaugagaauggccuggggcggcagcuacaucgcccuggacagcggcaagggcagcugggacugcaucaugaccagcuaccaguaccugaucauccagaacaccaccugggaggaccacugccaguucagcagacccagccccaucggcuaccugggccugcugagccagagaaccagagacaucuacaucagcagaagacugcugggcaccuucaccuggacccugagcgacagcgagggcaacgagacccccggcggcuacugccugaccagauggaugcugaucgaggccgagcugaagugcuucggcaacaccgccguggccaagugcaacgagaagcacgacgaggaguucugcgacaugcugagacuguucgacuucugcaagcaggccaucagaagacugaagacccccgcccagaugagcauccagcugaucaacaaggccgugaacgcccugaucaacgaccagcugaucaugaagaaccaccugagagacaucaugggcauccccuacugcaacuacagcaaguacugguaccugaaccacaccgugaccggcaagaccagccugcccagaugcuggcuggugagcaacggcagcuaccugaacgagacccacuucagcgacgacaucgagcagcaggccgacaacaugaucaccgagcugcugcagaaggaguacaucgacagacagggcaagaccccccugggccugguggaccuguucguguucagcaccagcuucuaccugaucagcaucuuccugcaccuggugaagauccccacccacagacacgugaucggcaagcccugccccaagccccacagacugaaccacaugggcaucugcagcugcggccuguacaagcaccccggcgugcccgugaaguggaagagaugaggacuagucccuguucccagagcccacuuuuuuuucuuuuuuugaaauaaaauagccugucuuucagaucuaaaaaaaaaaaaaaaaaaaaaaaaaaaaaaaaaaaaaaaaaaaaaaaaaaaaaaaaaaaaaaaaaaaaaaaaaaaaaaaaaaaaaaaaaaaaaaaaaaaa

SEQ ID NO: 30611 - RNA, 1740 nt, Artificial Sequence
  mRNA product Design a-2 (A100) comprising derived and/or modified sequence from LASV(LASV003-NIG-2008;Clade II)__AIT17580__GPCmut6 (opt4)
aggagaguccgcucagccagguugcagaagcggcuuagcguguguccuaaucuucucucugcguguagguaggccugugccgcaaacaagcuuaccaugggccagaucaucaccuucuuccaggaggugccccacgugaucgaggaggugaugaacaucgugcugaucgcccugagccugcuggccauccugaagggcaucuacaacguggccaccugcggccuguucggccuggugagcuuccugcugcugugcggcagaagcugcagcaccaccuacaagggcguguacgagcugcagacccuggagcuggacauggccagccugaacaugugcaugccccugagcugcaccaagaacaacagccaccacuacaucauggugggcaacgagaccggccuggagcugacccugaccaacaccagcaucaucaaccacaaguucugcaaccugagcgacgcccacaagaagaaccuguacgaccacgcccugaugagcaucaucagcaccuuccaccugagcauccccaacuucaaccaguacgaggccaugagcugcgacuucaacggcggcaagaucagcgugcaguacaaccugagccacaccuacgccguggacgccgccaaccacugcggcaccaucgccaacggcgugcugcagaccuucaugagaauggccuggggcggcagcuacaucgcccuggacagcggcaagggcagcugggacugcaucaugaccagcuaccaguaccugaucauccagaacaccaccugggaggaccacugccaguucagcagacccagccccaucggcuaccugggccugcugagccagagaaccagagacaucuacaucagcagaagacugcugggcaccuucaccuggacccugagcgacagcgagagcaacgagacccccggcggcuacugccugaccagauggaugcugaucgaggccgagcugaagugcuucggcaacaccgccguggccaagugcaacgagaagcacgacgaggaguucugcgacaugcugagacuguucgacuucugcaagcaggccaucagaagacugaaggcccccgcccagaugagcauccagcugaucaacaaggccgugaacgcccugaucaacgaccagcugaucaugaagaaccaccugagagacaucaugggcauccccuacugcaacuacagcaaguacugguaccugaaccacaccgugaccggcagaaccagccugcccagaugcuggcuggugagcaacggcagcuaccugaacgagacccacuucagcgacgacaucgagcagcaggccgacaacaugaucaccgagcugcugcagaaggaguacauggacagacagggcaagaccccccugggccugguggaccuguucguguucagcaccagcuucuaccugaucagcaucuuccugcaccuggugaagauccccacccacagacacgugaucggcaagcccugccccaagccccacagacugaaccacaugggcaucugcagcugcggccuguacaagcaccccggcgugcccgugaaguggaagagaugaggacuagucccuguucccagagcccacuuuuuuuucuuuuuuugaaauaaaauagccugucuuucagaucuaaaaaaaaaaaaaaaaaaaaaaaaaaaaaaaaaaaaaaaaaaaaaaaaaaaaaaaaaaaaaaaaaaaaaaaaaaaaaaaaaaaaaaaaaaaaaaaaaaaa

SEQ ID NO: 30612 - RNA, 1740 nt, Artificial Sequence
  mRNA product Design a-2 (A100) comprising derived and/or modified sequence from LASV(LASV035-NIG-2009;Clade II)__AIT17588__GPCmut6 (opt4)
aggagaguccgcucagccagguugcagaagcggcuuagcguguguccuaaucuucucucugcguguagguaggccugugccgcaaacaagcuuaccaugggccagaucaucaccuucuuccaggaggugccccacgugaucgaggaggugaugaacaucgugcugaucgcccugagccugcuggccauccugaagggcaucuacaacguggccaccugcggccuguucggccuggugagcuuccugcugcugugcggcagaagcugcagcaccaccuacaagggcguguacgagcugcagacccuggagcuggacauggccagccugaacaugugcaugccccugagcugcaccaagaacaacagccaccacuacaucauggugggcaacgagaccggccuggagcugacccugaccaacaccagcaucaucaaccacaaguucugcaaccugagcgacgcccacaagaagaaccuguacgaccacgcccugaugagcaucaucagcaccuuccaccugagcauccccaacuucaaccaguacgaggccaugagcugcgacuucaacggcggcaagaucagcgugcaguacaaccugagccacgccuacgccguggacgccgccaaccacugcggcaccaucgccaacggcgugcugcagaccuucaugagaauggccuggggcggcagcuacaucgcccuggacagcggcaagggcagcugggacugcaucaugaccagcuaccaguaccugaucauccagaacaccaccugggaggaccacugccaguucagcagacccagccccaucggcuaccugggccugcugagccagagaaccagagacaucuacaucagcagaagacugcugggcaccuucaccuggacccugagcgacagcgagggcaacgagacccccggcggcuacugccugaccagauggaugcugaucgaggccgagcugaagugcuucggcaacaccgccguggccaagugcaacgagaagcacgacgaggaguucugcgacaugcugagacuguucgacuucugcaagcaggccaucagaagacugaaggcccccgcccagaugagcauccagcugaucaacaaggccgugaacgcccugaucaacgaccagcugaucaugaagaaccaccugagagacaucaugggcauccccuacugcaacuacagcaaguacugguaccugaaccacaccgugaccggcaagaccagccugcccagaugcuggcuggugagcaacggcagcuaccugaacgagacccacuucagcgacgacaucgagcagcaggccgacaacaugaucaccgagcugcugcagaaggaguacaucgacagacagggcaagaccccccugggccugguggaccuguucguguucagcaccagcuucuaccugaucagcaucuuccugcaccuggugaagauccccacccacagacacgugaucggcaagcccugccccaagccccacagacugaaccacaugggcaucugcagcugcggccuguacaagcaccccggcgugcccgugaaguggaagagaugaggacuagucccuguucccagagcccacuuuuuuuucuuuuuuugaaauaaaauagccugucuuucagaucuaaaaaaaaaaaaaaaaaaaaaaaaaaaaaaaaaaaaaaaaaaaaaaaaaaaaaaaaaaaaaaaaaaaaaaaaaaaaaaaaaaaaaaaaaaaaaaaaaaaa

SEQ ID NO: 30613 - RNA, 1740 nt, Artificial Sequence
  mRNA product Design a-2 (A100) comprising derived and/or modified sequence from LASV(LASV1000-NIG-2009;Clade II)__AIT17782__GPCmut6 (opt4)
aggagaguccgcucagccagguugcagaagcggcuuagcguguguccuaaucuucucucugcguguagguaggccugugccgcaaacaagcuuaccaugggccagaucaucaccuucuuccaggaggugccccacgugaucgaggaggugaugaacaucgugcugaucgcccugagccugcuggccauccugaagggcaucuacaacguggccaccugcggccuguucggccuggugagcuuccugcugcugugcggcagaagcugcagcaccaccuacaagggcguguacgagcugcagacccuggagcuggacauggccagccugaacaugugcaugccccugagcugcaccaagaacaacagccaccacuacaucauggugggcaacgagaccggccuggagcugacccugaccaacaccagcaucaucaaccacaaguucugcaaccugagcgacgcccacaagaagaaccuguacgaccacgcccugaugagcaucaucagcaccuuccaccugagcauccccaacuucaaccaguacgaggccaugagcugcgacuucaacggcggcaagaucagcgugcaguacaaccugagccacaccuacgccguggacgccgccaaccacugcggcaccaucgccaacggcgugcugcagaccuucaugagaauggccuggggcggcagcuacaucgcccuggacagcggcaagggcagcugggacugcaucaugaccagcuaccaguaccugaucauccagaacaccaccugggaggaccacugccaguucagcagacccagccccaucggcuaccugggccugcugagccagagaaccagagacaucuacaucagcagaagacugcugggcaccuucaccuggacccugagcgacagcgagggcaacgagacccccggcggcuacugccugaccagauggaugcugaucgaggccgagcugaagugcuucggcaacaccgccguggccaagugcaacgagaagcacgacgaggaguucugcgacaugcugagacuguucgacuucugcaagcaggccaucaagagacugaagacccccgcccagaugagcauccagcugaucaacaaggccgugaacgcccugaucaacgaccagcugaucaugaagaaccaccugagagacaucaugggcauccccuacugcaacuacagcaaguacugguaccugaaccacaccgugaccggcaagaccagccugcccagaugcuggcuggugagcaacggcagcuaccugaacgagacccacuucagcgacgacaucgagcagcaggccgacaacaugaucaccgagcugcugcagaaggaguacaucgacagacagggcaagaccccccugggccugguggaccuguucguguucagcaccagcuucuaccugaucagcaucuuccugcaccuggugaagauccccacccacagacacguggugggcaagcccugccccaagccccacagacugaaccacaugggcaucugcagcugcggccuguacaagcaccccggcgugcccgugaaguggaagagaugaggacuagucccuguucccagagcccacuuuuuuuucuuuuuuugaaauaaaauagccugucuuucagaucuaaaaaaaaaaaaaaaaaaaaaaaaaaaaaaaaaaaaaaaaaaaaaaaaaaaaaaaaaaaaaaaaaaaaaaaaaaaaaaaaaaaaaaaaaaaaaaaaaaaa

SEQ ID NO: 30614 - RNA, 1740 nt, Artificial Sequence
  mRNA product Design a-2 (A100) comprising derived and/or modified sequence from LASV(LASV221-NIG-2010;Clade II)__AIT17624__GPCmut6 (opt4)
aggagaguccgcucagccagguugcagaagcggcuuagcguguguccuaaucuucucucugcguguagguaggccugugccgcaaacaagcuuaccaugggccagaucaucaccuucuuccaggaggugccccacgugaucgaggaggugaugaacaucgugcugaucgcccugagccugcuggccauccugaagggcaucuacaacguggccaccugcggccuguucggccuggugagcuuccugcugcugugcggcagaagcugcagcaccaccuacaagggcguguacgagcugcagacccuggagcuggacauggccagccugaacaugugcaugccccugagcugcaccaagaacaacagccaccacuacaucauggugggcaacgagaccggccuggagcugacccugaccaacaccagcaucaucaaccacaaguucugcaaccugagcgacgcccacaagaagaaccuguacgaccacgcccugaugagcaucaucagcaccuuccaccugagcauccccaacuucaaccaguacgaggccaugagcugcgacuucaacggcggcaagaucagcgugcaguacaaccugagccacaccuacgccaucgacgccgccaaccacugcggcaccaucgccaacggcgugcugcagaccuucaugagaauggccuggggcggcagcuacaucgcccuggacagcggcaagggcagcugggacugcaucaugaccagcuaccaguaccugaucauccagaacaccaccugggaggaccacugccaguucagcagacccagccccaucggcuaccugggccugcugagccagagaaccagagacaucuacaucagcagaagacugcugggcaccuucaccuggacccugagcgacagcgagggcaacgagacccccggcggcuacugccugaccagauggaugcugaucgaggccgagcugaagugcuucggcaacaccgccguggccaagugcaacgagaagcacgacgaggaguucugcgacaugcugagacuguucgacuucugcaagcaggccaucagaagacugaagacccccgcccagaugagcauccagcugaucaacaaggccgugaacgcccugaucaacgaccagcugaucaugaagaaccaccugagagacaucaugggcauccccuacugcaacuacagcaaguacugguaccugaaccacaccgugaccggcaagaccagccugcccagaugcuggcuggugagcaacggcagcuaccugaacgagacccacuucagcgacgacaucgagcagcaggccgacaacaugaucaccgagaugcugcagaaggaguacauggacagacagggcaagaccccccugggccugguggaccuguucguguucagcaccagcuucuaccugaucagcaucuuccugcaccuggugaagauccccacccacagacacgugaucggcaagcccugccccaagccccacagacugaaccacaugggcaucugcagcugcggccuguacaagcaccccggcgugcccgugaaguggaagagaugaggacuagucccuguucccagagcccacuuuuuuuucuuuuuuugaaauaaaauagccugucuuucagaucuaaaaaaaaaaaaaaaaaaaaaaaaaaaaaaaaaaaaaaaaaaaaaaaaaaaaaaaaaaaaaaaaaaaaaaaaaaaaaaaaaaaaaaaaaaaaaaaaaaaa

SEQ ID NO: 30615 - RNA, 1740 nt, Artificial Sequence
  mRNA product Design a-2 (A100) comprising derived and/or modified sequence from LASV(LASV237-NIG-2010;Clade II)__AIT17638__GPCmut6 (opt4)
aggagaguccgcucagccagguugcagaagcggcuuagcguguguccuaaucuucucucugcguguagguaggccugugccgcaaacaagcuuaccaugggccagaucaucaccuucuuccaggaggugccccacgugaucgaggaggugaugaacaucgugcugaucgcccugagccugcuggccauccugaagggcaucuacaacguggccaccugcggccuguucggccuggugagcuuccugcugcugugcggcagaagcugcagcaccaccuacaagggcguguacgagcugcagacccuggagcuggacauggccagccugaacaugugcaugccccugagcugcaccaagaacaacagccaccacuacaucauggugggcaacgagaccggccuggagcugacccugaccaacaccagcaucaucaaccacaaguucugcaaccugagcgacgcccacaagaaggaccuguacgaccacgcccugaugagcaucaucagcaccuuccaccugagcauccccaacuucaaccaguacgaggccaugagcugcgacuucaacggcggcaagaucagcgugcaguacaaccugagccacaccuacgccguggacgccgccaaccacugcggcaccaucgccaacggcgugcugcagaccuucaugagaauggccuggggcggcagcuacaucgcccuggacagcggcaagggcagcugggacugcaucaugaccagcuaccaguaccugaucauccagaacaccaccugggaggaccacugccaguucagcagacccagccccaucggcuaccugggccugcugagccagagaaccagagacaucuacaucagcagaagacugcugggcaccuucaccuggacccugagcgacagcgagggcaacgagacccccggcggcuacugccugaccagauggaugcugaucgaggccgagcugaagugcuucggcaacaccgccguggccaagugcaacgagaagcacgacgaggaguucugcgacaugcugagacuguucgacuucugcaagcaggccaucagaagacugaagacccccgcccagaugagcauccagcugaucaacaaggccgugaacgcccugaucaacgaccagcugaucaugaagaaccaccugagagacaucaugggcauccccuacugcaacuacagcaaguacugguaccugaaccacaccgugaccggcaagaccagccugcccagaugcuggcuggugagcaacggcagcuaccugaacgagacccacuucagcgacgacaucgagcagcaggccgacaacaugaucaccgagcugcugcagaaggaguacauggacagacagggcaagaccccccugggccugguggaccuguucguguucagcaccagcuucuaccugaucagcaucuuccugcaccugaucaagauccccacccacagacacaucaccggcaagcccugccccaagccccacagacugaaccacaugggcaucugcagcugcggccuguacaagcaccccggcgugcccgugaaguggaagagaugaggacuagucccuguucccagagcccacuuuuuuuucuuuuuuugaaauaaaauagccugucuuucagaucuaaaaaaaaaaaaaaaaaaaaaaaaaaaaaaaaaaaaaaaaaaaaaaaaaaaaaaaaaaaaaaaaaaaaaaaaaaaaaaaaaaaaaaaaaaaaaaaaaaaa

SEQ ID NO: 30616 - RNA, 1740 nt, Artificial Sequence
  mRNA product Design a-2 (A100) comprising derived and/or modified sequence from LASV(LASV253-NIG-2011;Clade II)__AIT17670__GPCmut6 (opt4)
aggagaguccgcucagccagguugcagaagcggcuuagcguguguccuaaucuucucucugcguguagguaggccugugccgcaaacaagcuuaccaugggccagaucaucaccuucuuccaggaggugccccacgugaucgaggaggugaugaacaucgugcugaucgcccugagccugcuggccauccugaagggcaucuacaacguggccaccugcggccuguucggccuggugagcuuccugcugcugugcggcagaagcugcagcaccaccuacaagggcguguacgagcugcagacccuggagcuggacauggccagccugaacaugugcaugccccugagcugcaccaagaacaacagccaccacuacaucauggugggcaacgagaccggccuggagcugacccugaccaacaccagcaucaucaaccacaaguucugcaaccugagcgacgcccacaagaagaaccuguacgaccacgcccugaugagcaucaucagcaccuuccaccugagcauccccaacuucaaccaguacgaggccaugagcugcgacuucaacggcggcaagaucagcgugcaguacaaccugagccacaccuacgccguggacgccgccaaccacugcggcaccaucgccaacggcgugcugcagaccuucaugagaauggccuggggcggcagcuacaucgcccuggacagcggcaagggcagcugggacugcaucaugaccagcuaccaguaccugaucauccagaacaccaccugggaggaccacugccaguucagcagacccagccccaucggcuaccugggccugcugagccagagaaccagagacaucuacaucagcagaagacugcugggcaccuucaccuggacccugagcgacagcgagggcaacgagacccccggcggcuacugccugaccagauggaugcugaucgaggccgagcugaagugcuucggcaacaccgccguggccaagugcaacgagaagcacgacgaggaguucugcgacaugcugagacuguucgacuucugcaagcaggccaucagaagacugaaggcccccgcccagaugagcauccagcugaucaacaaggccgugaacgcccugaucaacgaccagcugaucaugaagaaccaccugagagacaucaugggcauccccuacugcaacuacagcaaguacugguaccugaaccacaccgugaccggcagaaccagccugcccagaugcuggcuggugagcaacggcagcuaccugaacgagacccacuucagcgacgacaucgagcagcaggccgacaacaugaucaccgagcugcugcagaaggaguacaucgacagacagggcaagaccccccugggccugguggaccuguucguguucagcaccagcuucuaccugaucagcaucuuccugcaccuggugaagauccccacccacagacacaucaucggcaagcccugccccaagccccacagacugaaccacaugggcaucugcagcugcggccuguacaagcaccccggcgugcccgugaaguggaagagaugaggacuagucccuguucccagagcccacuuuuuuuucuuuuuuugaaauaaaauagccugucuuucagaucuaaaaaaaaaaaaaaaaaaaaaaaaaaaaaaaaaaaaaaaaaaaaaaaaaaaaaaaaaaaaaaaaaaaaaaaaaaaaaaaaaaaaaaaaaaaaaaaaaaaa

SEQ ID NO: 30617 - RNA, 1740 nt, Artificial Sequence
  mRNA product Design a-2 (A100) comprising derived and/or modified sequence from LASV(LASV254-NIG-2011;Clade II)__AIT17674__GPCmut6 (opt4)
aggagaguccgcucagccagguugcagaagcggcuuagcguguguccuaaucuucucucugcguguagguaggccugugccgcaaacaagcuuaccaugggccagaucaucaccuucuuccaggaggugccccacgugaucgaggaggugaugaacaucgugcugaucgcccugagccugcuggccauccugaagggcaucuacaacguggccaccugcggccuguucggccuggugagcuuccugcugcugugcggcagaagcugcagcaccaccuacaagggcguguacgagcugcagacccuggagcuggacaugaccaaccugaacaugugcaugccccugagcugcaccaagaacaacagccaccacuacaucauggugggcaacgagaccggccuggagcugacccugaccaacaccagcaucaucaaccacaaguucugcaaccugagcgacgcccacaagaagaaccuguacaaccacgcccugaugagcaucaucagcaccuuccaccugagcauccccaacuucaaccaguacgaggccaugagcugcgacuucaacggcggcaagaucagcgugcaguacaaccugagccacagcuacgccguggacgccgccaaccacugcggcaccaucgccaacggcgugcugcagaccuucaugagaauggccuggggcggcagcuacaucgcccuggacagcggcaagggcaacugggacugcaucaugaccagcuaccaguaccugaucauccagaacaccaccugggaggaccacugccaguucagcagacccagccccaucggcuaccugggccugcugagccagagaaccagagacaucuacaucagcagaagacugcugggcaccuucaccuggacccugagcgacagcgagggcaacgagacccccggcggcuacugccugaccagauggaugcugaucgaggccgagcugaagugcuucggcaacaccgccguggccaagugcaacgagaagcacgacgaggaguucugcgacaugcugagacuguucgacuucugcaagcaggccaucagaagacugaagacccccgcccaggccaacauccagcugaucaacaaggccgugaacgcccugaucaacgaccagcugaucaugaagaaccaccugagagacaucaugggcauccccuacugcaacuacagcaaguacugguaccugaaccacaccgugaccggcaagaccagccugcccagaugcuggcuggugagcaacggcagcuaccugaacgagacccacuucagcgacgacaucgagcagcaggccgacaacaugaucaccgagcugcugcagaaggaguacauggacagacagggcaagaccccccugggccugguggaccuguucguguucagcaccagcuucuaccugaucagcaucuuccugcaccuggugaagauccccacccacagacacgugaucggcaagcccugccccaagccccacagacugaaccacaugggcaucugcagcugcggccuguacaagcaccccggcgugcccgugaaguggaagagaugaggacuagucccuguucccagagcccacuuuuuuuucuuuuuuugaaauaaaauagccugucuuucagaucuaaaaaaaaaaaaaaaaaaaaaaaaaaaaaaaaaaaaaaaaaaaaaaaaaaaaaaaaaaaaaaaaaaaaaaaaaaaaaaaaaaaaaaaaaaaaaaaaaaaa

SEQ ID NO: 30618 - RNA, 1740 nt, Artificial Sequence
  mRNA product Design a-2 (A100) comprising derived and/or modified sequence from LASV(Nig08-A19;Clade III)__ADU56618__GPCmut6 (opt4)
aggagaguccgcucagccagguugcagaagcggcuuagcguguguccuaaucuucucucugcguguagguaggccugugccgcaaacaagcuuaccaugggccagaucgugaccuucuuccaggaggugccccacgugaucgaggaggugaugaacaucgugcugaucgcccugagcauccuggccauccugaagggccuguacaacaucgccaccugcggccugaucggccuggugaccuuccugcugcugagcggcagaagcugcagcaugaccuacaagggcguguacgagcugcagacccuggagcugaacaugaacacccugaacaugugcaugccccugagcugcaccaagaacaacagccaccacuacaucauggugggcaacgagaccggccuggagcugacccugaccaacaccagccugcugcaccacaaguucugcaaccugagcgacgcccacaagaagaaccuguacgaccacacccugaugagcaucaucagcaccuuccaccugagcauccccaacuucaaccaguacgaggccaugagcugcgacuucaacggcggcaagaucaccgugcaguacaaccugagccacagcuacgccaucgacgccgccaaccacugcggcaccguggccaacggcgugcugcagaccuucaugagaauggccuggggcggcagcuacaucgcccuggacagcggcagaggcaagugggacugcaucaugaccagcuaccaguaccugaucauccagaacaccaccugggaggaccacugccaguucagcagacccagccccaucggcuaccugggccugcugagccagagaaccagagacaucuacaucagcagaagacugcugggcaccuucaccuggacccugagcgacagcgagggcaacgagacccccggcggcuacugccugaccagauggaugcugaucgaggccgagcugaagugcuucggcaacaccgccguggccaagugcaacgagaagcacgacgaggaguucugcgacaugcugagacuguucgacuucugcaagcaggccaucagaagacugaaggcccccgcccagaugagcauccagcugaucaacaaggccgugaacgcccugaucaacgaccagcugaucaugaagaaccaccugagagacaucaugggcauccccuacugcaacuacagcaaguacugguaccugaaccacaccagcaccggcagaaccagccugcccagaugcuggcuggugagcaacggcagcuaccugaacgagacccacuucagcgacgacaucgagcagcaggccgacaacaugaucaccgagaugcugcagaaggaguaccuggacagacagggcaagaccccccugggccugguggaccuguucguguucagcaccagcuucuaccugaucagcaucuuccugcaccuggugaagauccccacccacagacacaucgugggcaagcccugccccaagccccacagacugaaccacaugggcaucugcagcugcggccuguacaagcagcccggcgugcccgugagauggaagagaugaggacuagucccuguucccagagcccacuuuuuuuucuuuuuuugaaauaaaauagccugucuuucagaucuaaaaaaaaaaaaaaaaaaaaaaaaaaaaaaaaaaaaaaaaaaaaaaaaaaaaaaaaaaaaaaaaaaaaaaaaaaaaaaaaaaaaaaaaaaaaaaaaaaaa

SEQ ID NO: 30619 - RNA, 1743 nt, Artificial Sequence
  mRNA product Design a-2 (A100) comprising derived and/or modified sequence from LASV(G1180-SLE-2010;Clade IV)__AIT17168__GPCmut6 (opt4)
aggagaguccgcucagccagguugcagaagcggcuuagcguguguccuaaucuucucucugcguguagguaggccugugccgcaaacaagcuuaccaugggccagaucgugaccuucuuccaggaggugccccacgugaucgaggaggugaugaacaucgugcugaucgcccugagcauccuggccgugcugaagggccuguacaacuucgccaccugcggccuggugggccugcugaccuuccugcugcugugcggcagaagcugcaccgccagcagauacaagggcguguacgagcugcagacccuggagcugaacauggagacccugaacaugugcaugccccugagcugcaccaagaacaacagccaccacuacaucauggugggcaacgagaccggccuggagcugacccugaccaacaccagcaucaucaaccacaaguucugcaaccugagcgacgcccacaagaagaaccuguacgaccacgcccugaugagcaucaucagcaccuuccaccugagcauccccaacuucaaccaguacgaggccaugagcugcgacuucaacggcggcaagaucagcgugcaguacaaccugagccacagcuacgccggcgacgccgccaaccacugcggcaccguggccaacggcgugcugcagaccuucaugagaauggccuggggcggcagcuacaucgcccuggacagcggccacggcagcugggacugcaucaugaccagcuaccaguaccugaucauccagaacaccaccugggaggaccacugccaguucagcagacccagccccaucggcuaccugggccugcugagccagagaaccagagacaucuacaucagcagaagacugcugggcaccuucaccuggacccugagcgacagcgagggcaaggacacccccggcggcuacugccugaccagauggaugcugaucgaggccgagcugaagugcuucggcaacaccgccguggccaagugcaacgagaagcacgacgaggaguucugcgacaugcugagacuguucgacuucugcaagcaggccauccagagacugaaggcccccgcccagaugagcauccagcugaucaacaaggccgugaacgcccugaucaacgaccagcugaucaugaagaaccaccugagagacaucaugggcauccccuacugcaacuacagcaaguacugguaccugaaccacaccaccaccggcaagaccagccugcccaagugcuggcuggugagcaacggcagcuaccugaacgagacccacuucagcgacgacaucgagcagcaggccgacaacaugaucaccgagaugcugcagaaggaguacauggagagacagggcaagaccccccugggccugguggaccuguucguguucagcaccagcuucuaccugaucagcaucuuccugcaccuggugaagauccccacccacagacacaucgugggcaagagcugccccaagccccacagacugaaccacaugggcaucugcagcugcggccuguacaagcagcccggcgugcccgugaaguggaagagaugaggacuagucccuguucccagagcccacuuuuuuuucuuuuuuugaaauaaaauagccugucuuucagaucuaaaaaaaaaaaaaaaaaaaaaaaaaaaaaaaaaaaaaaaaaaaaaaaaaaaaaaaaaaaaaaaaaaaaaaaaaaaaaaaaaaaaaaaaaaaaaaaaaaaa

SEQ ID NO: 30620 - RNA, 1743 nt, Artificial Sequence
  mRNA product Design a-2 (A100) comprising derived and/or modified sequence from LASV(G1442-SLE-2011;Clade IV)__AIT17180__GPCmut6 (opt4)
aggagaguccgcucagccagguugcagaagcggcuuagcguguguccuaaucuucucucugcguguagguaggccugugccgcaaacaagcuuaccaugggccagaucgugaccuucuuccaggaggugccccacgugaucgaggaggugaugaacaucgugcugaucgcccugagcauccuggccgugcugaagggccuguacaacguggccaccugcggccugaucggccuggugaccuuccugcugcugugcggcagaagcugcaccaccacccuguacaagggcguguacgagcugcagacccuggagcugaacauggagacccugaacaugugcaugccccugagcugcaccaagaacaacagccaccacuacaucagagugggcaacgagaccggccuggagcugacccugaccaacaccagcaucaucaaccacaaguucugcaaccugagcgacgcccacaagaagaaccuguacgaccacgcccugaugagcaucaucagcaccuuccaccugagcauccccaacuucaaccaguacgaggccaugagcugcgacuucaacggcggcaagaucagcgugcaguacaaccugagccacagcuacgccggcgacgccgccaaccacugcggcaccguggccaacggcgugcugcagaccuucaugagaauggccuggggcggcagcuacaucgcccuggacagcggcagaggcaacugggacugcaucaugaccagcuaccaguaccugaucauccagaacaccaccugggacgaccacugccaguucagcagacccagccccaucggcuaccugggccugcugagccagagaaccagagacguguacaucagcagaagacugcugggcaccuucaccuggacccugagcgacagcgagggcaaggacacccccggcggcuacugccugaccagauggaugcugaucgaggccgagcugaagugcuucggcaacaccgccguggccaagugcaacgagaagcacgacgaggaguucugcgacaugcugagacuguucgacuucugcaagcaggccauccagagacugaaggcccccgcccagaugagcauccagcugaucaacaaggccgugaacgcccugaucaacgaccagcugaucaugaagaaccaccugagagacaucaugggcauccccuacugcaacuacagcaaguacugguaccugaacaacaccgccaccggcaagaccagccugcccaagugcuggcugaucagcaacggcagcuaccugaacgagacccacuucagcgacgacaucgagcaggaggccgacaacaugaucaccgagaugcugcagaaggaguacauggagagacagggcaagaccccccugggccugguggaccuguucguguucagcaccagcuucuaccugaucagcaucuuccugcaccuggugaagauccccacccacagacacaucgugggcaagagcugccccaagccccacagacugaaccacaugggcaucugcagcugcggccuguacaagcagcccggcgugcccgugagauggaagagaugaggacuagucccuguucccagagcccacuuuuuuuucuuuuuuugaaauaaaauagccugucuuucagaucuaaaaaaaaaaaaaaaaaaaaaaaaaaaaaaaaaaaaaaaaaaaaaaaaaaaaaaaaaaaaaaaaaaaaaaaaaaaaaaaaaaaaaaaaaaaaaaaaaaaa

SEQ ID NO: 30621 - RNA, 1743 nt, Artificial Sequence
  mRNA product Design a-2 (A100) comprising derived and/or modified sequence from LASV(G3010-SLE-2013;Clade IV)__AIT17344__GPCmut6 (opt4)
aggagaguccgcucagccagguugcagaagcggcuuagcguguguccuaaucuucucucugcguguagguaggccugugccgcaaacaagcuuaccaugggccagaucgugaccuucuuccaggaggugccccacgugaucgaggaggugaugaacaucgugcugaucgcccugagcauccuggccgugcugaagggccuguacaacuucgccaccugcggccuggugggccuggugaccuuccugcugcugugcggcagaagcugcaccaccagccuguacaagggcguguacgagcugcagacccuggagcugaacauggagacccugaacaugugcaugccccugagcugcaccaagaacaacagccaccacuacaucauggugggcaacgagaccggccuggagcugacccugaccaacaccagcaucaucaaccacaaguucugcaaccugagcgacgcccacaagaagaaccuguacaaccacgcccugaugagcaucaucagcaccuuccaccugagcauccccaacuucaaccaguacgaggccaugagcugcgacuucaacggcggcaagaucagcgugcaguacaaccugagccacagcuacgccggcgacgccgccagccacugcggcaccguggccaacggcgugcugcagaccuucaugagaauggccuggggcggcagcuacaucgcccuggacagcggcuacggcaagugggacugcaucaugaccagcuaccaguaccugaucauccagaacaccaccugggaggaccacugccaguucagcagacccagccccaucggcuaccugggccugcugagccagagaaccagagacaucuacaucagcagaagacugcugggcaccuucaccuggacccugagcgacagcgagggcaaggacacccccggcggcuacugccugaccagauggaugcugaucgaggccgagcugaagugcuucggcaacaccgccguggccaagugcaacgagaagcacgacgaggaguucugcgacaugcugagacuguucgacuucugcaagcaggccauccagagacugaagacccccgcccagaugagcauccagcugaucaacaaggccgugaacgcccugaucaacgaccagcugaucaugaagaaccaccugagagacaucaugggcauccccuacugcaacuacagcaaguacugguaccugaaccacaccaccaccggcaagaccagccugcccaagugcuggcuggugagcaacggcagcuaccugaacgagacccacuucagcgacgacaucgagcagcaggccgacaacaugaucaccgagaugcugcagaaggaguacauggagagacagggcaagaccccccugggccugguggaccuguucguguucagcaccagcuucuaccugaucagcaucuuccugcaccuggugaagauccccacccacagacacaucgugggcaagagcugccccaagccccacagacugaaccacaugggcaucugcagcugcggccuguacaagcagcccggcgugcccgugagauggaagagaugaggacuagucccuguucccagagcccacuuuuuuuucuuuuuuugaaauaaaauagccugucuuucagaucuaaaaaaaaaaaaaaaaaaaaaaaaaaaaaaaaaaaaaaaaaaaaaaaaaaaaaaaaaaaaaaaaaaaaaaaaaaaaaaaaaaaaaaaaaaaaaaaaaaaa

SEQ ID NO: 30622 - RNA, 1743 nt, Artificial Sequence
  mRNA product Design a-2 (A100) comprising derived and/or modified sequence from LASV(G502-SLE-2009;Clade IV)__AIT17126__GPCmut6 (opt4)
aggagaguccgcucagccagguugcagaagcggcuuagcguguguccuaaucuucucucugcguguagguaggccugugccgcaaacaagcuuaccaugggccagaucgugaccuucuuccaggaggugccccacgugaucgaggaggugaugaacaucgugcugaucgcccugagcauccuggccgugcugaagggccuguacaacuucgccaccugcggccuggugggccugcugaccuuccugcugcugugcggcagaagcugcaccaccggccuguacaagggcguguacgagcugcagacccuggagcugaacauggagacccugaacaugugcaugccccugagcugcaccaagaacaacagccaccacuacaucauggugggcaacgagaccggccuggagcugacccugaccaacaccagcaucaucaaccacaaguucugcaaccugagcgacgcccacaagaagaaccuguacgaccacgcccugaugagcaucaucagcaccuuccaccugagcauccccaacuucaaccaguacgaggccaugagcugcgacuucaacggcggcaagaucagcgugcaguacaaccugagccacagcuacgccggcgacgccgccgaccacugcggcaccguggccaacggcgugcugcagaccuucaugagaauggccuggggcggcagcuacaucgcccuggacagcggcagaggcagaugggacugcaucaugaccagcuaccaguaccugaucauccagaacaccaccugggaggaccacugccaguucagcagacccagccccaucggcuaccugggccugcugagccagagaaccagagacaucuacaucagcagaagacugcugggcaccuucaccuggacccugagcgacagcgagggcaaggacacccccggcggcuacugccugaccagauggaugcugaucgaggccgagcugaagugcuucggcaacaccgccguggccaagugcaacgagaagcacgacgaggaguucugcgacaugcugagacuguucgacuucugcaagcaggccauccagagacugaaggcccccgcccagaugagcauccagcugaucaacaaggccgugaacgcccugaucaacgaccagcuggugaugaagaaccaccugagagacaucaugggcauccccuacugcaacuacagcagauacugguaccugaaccacaccaccaccggcagaaccagccugcccaagugcuggcuggugagcaacggcagcuaccugaacgagacccacuucagcgacgacaucgagcagcaggccgacaacaugaucaccgagaugcugcagaaggaguacauggagagacagggcaagaccccccugggccugguggaccuguucguguucagcaccagcuucuaccugaucagcaucuuccugcaccuggugaagauccccacccacagacacaucgugggcaagagcugccccaagccccacagacugaaccacaugggcaucugcagcugcggccuguacaagcagcccggcgugcccgugaaguggaagagaugaggacuagucccuguucccagagcccacuuuuuuuucuuuuuuugaaauaaaauagccugucuuucagaucuaaaaaaaaaaaaaaaaaaaaaaaaaaaaaaaaaaaaaaaaaaaaaaaaaaaaaaaaaaaaaaaaaaaaaaaaaaaaaaaaaaaaaaaaaaaaaaaaaaaa

SEQ ID NO: 30623 - RNA, 1743 nt, Artificial Sequence
  mRNA product Design a-2 (A100) comprising derived and/or modified sequence from LASV(G733-SLE-2010;Clade IV)__AIT17154__GPCmut6 (opt4)
aggagaguccgcucagccagguugcagaagcggcuuagcguguguccuaaucuucucucugcguguagguaggccugugccgcaaacaagcuuaccaugggccagaucgugaccuucuuccaggaggugccccacgugaucgaggaggugaugaacaucgugcugaucgcccugagcauccuggccgugcugaagggccuguacaacuucgccaccugcggcaucgugggccuggugagcuuccugcugcugugcggcagaagcugcaccaccagccuguacaagggcguguacgagcugcagacccuggagcugaacauggagacccugaacaugugcaugccccugagcugcaccaagaacaacagccaccacuacaucauggugggcaacgagaccggccuggagcugacccugaccaacaccagcaucaucaaccacaaguucugcaaccugagcgacgcccacaagaagaaccuguacgaccacgcccugaugagcaucaucagcaccuuccaccugagcauccccaacuucaaccaguacgaggccaugagcugcgacuucaacggcggcaagaucagcgugcaguacaaccugagccacagcuacgccggcgacgccgccaaccacugcggcaccaucgccaacggcgugcugcagaccuucaugagaauggccuggggcggcagcuacaucgcccuggacagcggcagagacagaugggacugcaucaugaccagcuaccaguaccugaucauccagaacaccaccugggaggaccacugccaguucagcagacccagccccaucggcuaccugggccugcugagccagagaaccagagacaucuacaucagcagaagacugcugggcaccuucaccuggacccugagcgacagcgagggcaaggacacccccggcggcuacugccugaccagauggaugcugaucgaggccgagcugaagugcuucggcaacaccgccguggccaagugcaacgagaagcacgacgaggaguucugcgacaugcugagacuguucgacuucugcaagcaggccauccagagacugaaggcccccgcccagaugagcauccagcugaucaacaaggccgugaacgcccugaucaacgaccagcugaucaugaagaaccaccugagagacaucaugggcauccccuacugcaacuacagcaaguacugguaccugaaccacaccaccaccggcaagaccagccugcccaagugcuggcuggugagcaacggcagcuaccugaacgagacccacuucagcgacgacaucgagcagcaggccgacaacaugaucaccgagaugcugcagaaggaguacauggagagacagggcaagaccccccugggccugguggaccuguucguguucagcaccagcuucuaccugaucagcaucuuccugcaccuggugaagauccccacccacagacacguggugggcaagagcugccccaagccccacagacugaaccacaugggcaucugcagcugcggccuguacggccagcccggcgugcccgugaaguggaagagaugaggacuagucccuguucccagagcccacuuuuuuuucuuuuuuugaaauaaaauagccugucuuucagaucuaaaaaaaaaaaaaaaaaaaaaaaaaaaaaaaaaaaaaaaaaaaaaaaaaaaaaaaaaaaaaaaaaaaaaaaaaaaaaaaaaaaaaaaaaaaaaaaaaaaa

SEQ ID NO: 30624 - RNA, 1743 nt, Artificial Sequence
  mRNA product Design a-2 (A100) comprising derived and/or modified sequence from MOPV/LASV reassortant(IGS-1;Clade IV)__AFY05576__GPCmut6 (opt4)
aggagaguccgcucagccagguugcagaagcggcuuagcguguguccuaaucuucucucugcguguagguaggccugugccgcaaacaagcuuaccaugggccagaucgugaccuucuuccaggaggugccccacgugaucgaggaggugaugaacaucgugcugaucgcccugagcgugcuggccgugcugaagggccuguacaacuucgccaccugcggccuggugggccuggugaccuuccugcugcugugcggcagaagcugcaccaccagccuguacaagggcguguacgagcugcagacccuggagcugaacauggagacccugaacaugugcaugccccugagcugcaccaagaacaacagccaccacuacaucauggugggcaacgagaccggccuggagcugacccugaccaacaccagcaucaucaaccacaaguucugcaaccugagcgacgcccacaagaagaaccuguacgaccacgcccugaugagcaucaucagcaccuuccaccugagcauccccaacuucaaccaguacgaggccaugagcugcgacuucaacggcggcaagaucagcgugcaguacaaccugagccacagcuacgccggcgacgccgccaaccacugcggcaccguggccaacggcgugcugcagaccuucaugagaauggccuggggcggcagcuacaucgcccuggacagcggcagaggcaacugggacugcaucaugaccagcuaccaguaccugaucauccagaacaccaccugggaggaccacugccaguucagcagacccagccccaucggcuaccugggccugcugagccagagaaccagagacaucuacaucagcagaagacugcugggcaccuucaccuggacccugagcgacagcgagggcgaggacacccccggcggcuacugccugaccagauggaugcugaucgaggccgagcugaagugcuucggcaacaccgccguggccaagugcaacgagaagcacgacgaggaguucugcgacaugcugagacuguucgacuucugcaagcaggccauccagagacugaaggcccccgcccagaugagcauccagcugaucaacaaggccgugaacgcccugaucaacgaccagcugaucaugaagaaccaccugagagacaucaugggcauccccuacugcaacuacagcaaguacugguaccugaaccacaccaccaccggcagaaccagccugcccaagugcuggcuggugagcaacggcagcuaccugaacgagacccacuucagcgacgacaucgagcagcaggccgacaacaugaucaccgagaugcugcagaaggaguacauggagagacagggcaagaccccccugggccugguggaccuguucguguucagcaccagcuucuaccugaucagcaucuuccugcaccuggugaagauccccacccacagacacaucgugggcaagagcugccccaagccccacagacugaaccacaugggcaucugcagcugcggccuguacaagcagcccggcgugcccgugaaguggaagagaugaggacuagucccuguucccagagcccacuuuuuuuucuuuuuuugaaauaaaauagccugucuuucagaucuaaaaaaaaaaaaaaaaaaaaaaaaaaaaaaaaaaaaaaaaaaaaaaaaaaaaaaaaaaaaaaaaaaaaaaaaaaaaaaaaaaaaaaaaaaaaaaaaaaaa

SEQ ID NO: 30625 - RNA, 1743 nt, Artificial Sequence
  mRNA product Design a-2 (A100) comprising derived and/or modified sequence from LASV(LM765-SLE-2012;Clade IV)__AIT17814__GPCmut6 (opt4)
aggagaguccgcucagccagguugcagaagcggcuuagcguguguccuaaucuucucucugcguguagguaggccugugccgcaaacaagcuuaccaugggccagaucgugaccuucuuccaggaggugccccacgugaucgaggaggugaugaacaucgugcugaucgcccugagcauccuggccgugcugaagggccuguacaacuucgccaccugcggccuggugggccuggugaccuuccugcugcugugcggcagaagcugcaccaccagccuguacaagggcguguacgagcugcagacccuggagcugaacauggagacccugaacaugugcaugccccugagcugcaccaagaacaacagccaccacuacaucauggugggcaacgagaccggccuggagcugacccugaccaacaccagcaucaucgaccacaaguucugcaaccugagcgacgcccacagaaagaaccuguacgaccacgcccugaugagcaucaucagcaccuuccaccugagcauccccaacuucaaccaguacgaggccaugagcugcgacuucaacggcggcaagaucagcgugcaguacaaccugagccacagcuacgccaaggacgccgccgaccacugcggcaccguggccaacggcgugcugcagaccuucaugagaauggccuggggcggcagcuacaucgcccuggacagcggcagaggcagaugggacugcaucaugaccagcuaccaguaccugaucauccagaacaccaccugggaggaccacugccaguucagcagacccagccccaucggcuaccugggccugcugagccagagaaccagagacaucuacaucagcagaagacugcugggcaccuucaccuggacccugagcgacagcgagggcaaggacacccccggcggcuacugccugaccagauggaugcugaucgaggccgagcugaagugcuucggcaacaccgccguggccaagugcaacgagaagcacgacgaggaguucugcgacaugcugagacuguucgacuucugcaagcaggccauccagagacugaaggcccccgcccagaugagcauccagcugaucaacaaggccgugaacgcccugaucaacgaccagcugaucaugaagaaccaccugagagacaucaugggcauccccuacugcaacuacagcaaguacugguaccugaaccacaccaccaccggcaagaccagccugcccaagugcuggcuggugagcaacggcagcuaccugaacgagacccacuucagcgacgacaucgagcagcaggccgacaacaugaucaccgagaugcugcagaaggaguacauggagagacagggcaagaccccccugggccugguggaccuguucguguucagcaccagcuucuaccugaucagcaucuuccugcaccuggugaagauccccacccacagacacaucgugggcaagcccugccccaagccccacagacugaaccacaugggcaucugcagcugcggccuguacaagcagcccggcgugcccgugaaguggaagagaugaggacuagucccuguucccagagcccacuuuuuuuucuuuuuuugaaauaaaauagccugucuuucagaucuaaaaaaaaaaaaaaaaaaaaaaaaaaaaaaaaaaaaaaaaaaaaaaaaaaaaaaaaaaaaaaaaaaaaaaaaaaaaaaaaaaaaaaaaaaaaaaaaaaaa

SEQ ID NO: 30626 - RNA, 1743 nt, Artificial Sequence
  mRNA product Design a-2 (A100) comprising derived and/or modified sequence from LASV(LM776-SLE-2012;Clade IV)__AIT17824__GPCmut6 (opt4)
aggagaguccgcucagccagguugcagaagcggcuuagcguguguccuaaucuucucucugcguguagguaggccugugccgcaaacaagcuuaccaugggccagaucgugaccuucuuccaggaggugccccacgugaucgaggaggugaugaacaucgugcugaucgcccugagcauccuggccgugcugaagggccuguacaacuucgccaccugcggccuggugggccuggugaccuuccugcugcugugcggcagaagcugcaccaccagcguguacaagggcguguacgagcugcagacccuggagcugaacauggagacccugaacaugugcaugccccugagcugcaccaagaacaacagccaccacuacaucauggugggcaacgagaccggccuggagcugacccugaccaacaccagcaucaucaaccacaaguucugcaaccugagcgacgcccacaagaagaaccuguacgaccacgcccugaugagcaucaucagcaccuuccaccugagcauccccaacuucaaccaguacgaggccaugagcugcgacuucaacggcggcaagaucagcgugcaguacaaccugagccacagcuacgccggcgacgccgccaaccacugcggcaccguggccaacggcgugcugcagaccuucaugagaauggccuggggcggcagcuacaucgcccuggacagcggccacggcaagugggacugcaucaugaccagcuaccaguaccugaucauccagaacaccaccugggaggaccacugccaguucagcagacccagccccaucggcuaccugggccugcugagccagagaaccagagacaucuacaucagcagaagacugcugggcaccuucaccuggacccugagcgacagcgagggcaaggacacccccggcggcuacugccugaccagauggaugcugaucgaggccgagcugaagugcuucggcaacaccgccguggccaagugcaacgagaagcacgacgaggaguucugcgacaugcugagacuguucgacuucugcaagcaggccauccagagacugaaggcccccgcccagaugagcauccagcugaucaacaaggccgugaacgcccugaucaacgaccagcugaucaugaagaaccaccugagagacaucaugggcauccccuacugcaacuacagcaaguacugguaccugaaccacaccaccaccggcaagaccagccugcccaagugcuggcuggugagcaacggcagcuaccugaacgagacccacuucagcgacgacaucgagcagcaggccgacaacaugaucaccgagaugcugcagaaggaguacauggagagacagggcaagaccccccugggccugguggaccuguucguguucagcaccagcuucuaccugaucagcaucuuccugcaccuggugaagauccccacccacagacacaucgugggcaagagcugccccaagccccacagacugaaccacaugggcaucugcagcugcggccuguacaagcagcccggcgugcccgugagauggaagagaugaggacuagucccuguucccagagcccacuuuuuuuucuuuuuuugaaauaaaauagccugucuuucagaucuaaaaaaaaaaaaaaaaaaaaaaaaaaaaaaaaaaaaaaaaaaaaaaaaaaaaaaaaaaaaaaaaaaaaaaaaaaaaaaaaaaaaaaaaaaaaaaaaaaaa

SEQ ID NO: 30627 - RNA, 1743 nt, Artificial Sequence
  mRNA product Design a-2 (A100) comprising derived and/or modified sequence from LASV(Mad39;Clade IV)__ANH09722__GPCmut6 (opt4)
aggagaguccgcucagccagguugcagaagcggcuuagcguguguccuaaucuucucucugcguguagguaggccugugccgcaaacaagcuuaccaugggccagaucgugaccuucuuccaggaggugccccacgugaucgaggaggugaugaacaucgugcugaucgcccugagcauccuggccgugcugaagggccuguacaacguggccaccugcggccugaucggccuggugaccuuccugcugcugugcggcagaagcugcaccaccacccuguacaagggcguguacgagcugcaggcccuggagcugaacauggagacccugaacaugugcaugccccugagcugcaccaagaacaacagccaccacuacaucagagugggcaacgagaccggccuggagcugacccugaccaacaccagccugaucaaccacaaguucugcaaccugagcgacgcccacaagaagaaccuguacgaccacgcccugaugagcaucaucagcaccuuccaccugagcauccccaacuucaaccaguacgaggccaugagcugcgacuucaacgacggcaagaucagcgugcaguacaaccugagccacaccuacgccggcgacaccgccaaccacugcggcaccguggccaacggcgugcugcagaccuucaugagaauggccuggggcggcagcuacaucgcccuggacagcggcagaggcggcugggacugcaucaugaccagcuaccaguaccugaucauccagaacaccaccugggaggaccacugccaguucagcagacccagccccaucggcuaccugggccugcugagccagagaaccagagacaucuacaucagcagaagacugcugggcaccuucaccuggacccugagcgacagcgagggcaaggacacccccggcggcuacugccugaccagauggaugcugaucgaggccgagcugaagugcuucggcaacaccgccguggccaagugcaacgagaagcacgacgaggaguucugcgacaugcugagacuguucgacuucugcaagcaggccauccagagacugaaggcccccgcccagaugagcauccagcugaucaacaaggccgugaacgcccugaucaacgaccagcugaucaugaagaaccaccugagagacaucaugggcauccccuacugcaacuacagcaaguacugguaccugaaccacaccgugaccggcaagaccagccugcccaagugcuggcuggugagcaacggcagcuaccugaacgagacccacuucagcgacgacaucgagcagcaggccgacaacaugaucaccgagaugcugcagaaggaguacauggagagacagggcaagaccccccugggccugguggaccuguucguguucagcaccagcuucuaccugaucagcaucuuccugcaccuggugaagauccccacccacagacacguggugggcaagcccugccccaagccccacagacugaaccacaugggcaucugcagcugcggcuucuacaagcagcccggcgugcccgugagauggaagagaugaggacuagucccuguucccagagcccacuuuuuuuucuuuuuuugaaauaaaauagccugucuuucagaucuaaaaaaaaaaaaaaaaaaaaaaaaaaaaaaaaaaaaaaaaaaaaaaaaaaaaaaaaaaaaaaaaaaaaaaaaaaaaaaaaaaaaaaaaaaaaaaaaaaaa

SEQ ID NO: 30628 - RNA, 1743 nt, Artificial Sequence
  mRNA product Design a-2 (A100) comprising derived and/or modified sequence from LASV(Z0947-SLE-2011;Clade IV)__AIT17840__GPCmut6 (opt4)
aggagaguccgcucagccagguugcagaagcggcuuagcguguguccuaaucuucucucugcguguagguaggccugugccgcaaacaagcuuaccaugggccagaucgugaccuucuuccaggaggugccccacgugaucgaggaggugaugaacaucgugcugaucgcccugagcauccuggccgugcugaagggccuguacaacuucgccaccugcggccuggugggccuggugaccuuccugcugcugugcggcagaagcugcaccaucagccuguacaagggcguguacgagcugcagacccuggagcugaacauggagacccugaacaugugcaugccccugagcugcaccaagaacaacagccaccacuacaucauggugggcaacgagaccggccuggagcugacccugaccaacaccagcaucaucaaccacaaguucugcaaccugagcgacgcccacaagaagaaccuguacgaccacgcccugaugagcaucaucagcaccuuccaccugagcauccccaacuucaaccaguacgaggccaugagcugcgacuucaacggcggcaagaucagcgugcaguacaaccugagccacagcuacgccggcgacgccgccaaccacugcggcaccguggccaacggcgugcugcagaccuucaugagaauggccuggggcggcagcuacaucgcccuggacagcggcagagacagaugggacugcaucaugaccagcuaccaguaccugaucauccagaacaccaccugggaggaccacugccaguucagcagacccagccccaucggcuaccugggccugcugagccagagaaccagagacaucuacaucagcagaagacugcugggcaccuucaccuggacccugagcgacagcgagggcaaggacacccccggcggcuacugccugaccagauggaugcugaucgaggccgagcugaagugcuucggcaacaccgccguggccaagugcaacgagaagcacgacgaggaguucugcgacaugcugagacuguucgacuucugcaagcaggccauccagagacugaaggcccccgcccagaugagcauccagcugaucaacaaggccgugaacgcccugaucaacgaccagcugaucaugaagaaccaccugagagacaucaugggcauccccuacugcaacuacagcaaguacugguaccugaaccacaccaccaccggcaagaccagccugcccaagugcuggcuggugagcaacggcagcuaccugaacgagacccacuucagcgacgacaucgagcagcaggccgacaacaugaucaccgagaugcugcagaaggaguacauggagagacagggcaagaccccccugggccugguggaccuguucguguucagcaccagcuucuaccugaucagcaucuuccugcaccuggugaagauccccacccacagacacaucgugggcaagcccugccccaagccccacagacugaaccacaugggcaucugcagcugcggccuguacaagcagcccggcgugcccgugaaguggaagagaugaggacuagucccuguucccagagcccacuuuuuuuucuuuuuuugaaauaaaauagccugucuuucagaucuaaaaaaaaaaaaaaaaaaaaaaaaaaaaaaaaaaaaaaaaaaaaaaaaaaaaaaaaaaaaaaaaaaaaaaaaaaaaaaaaaaaaaaaaaaaaaaaaaaaa

SEQ ID NO: 30629 - RNA, 1743 nt, Artificial Sequence
  mRNA product Design a-2 (A100) comprising derived and/or modified sequence from LASV(Josiah;Clade IV)__NP_694870__GPCmut6 (opt5)
aggagaguccgcucagccagguugcagaagcggcuuagcguguguccuaaucuucucucugcguguagguaggccugugccgcaaacaagcuuaccaugggccagaucgugaccuucuuucaagaggucccccacguuauugaagaggugaugaacaucgugcugauugcccucagcguccuggcugugcuuaaggggcuguacaauuucgccacaugcggacucguuggccuggugacguuucuucugcucugugggagauccugcaccacaucucuguauaaaggagucuacgaacugcagacccucgagcugaacauggaaacacuuaauauguguaugccucugagcugcaccaagaacaauucccaucacuauaucauggugggcaacgagacagggcucgagcugacccuuacgaauaccucuauuaucaaccauaaauucuguaaucugagcgacgcgcacaagaaaaaccucuacgaucaugcucugauguccaucauuucuacauuucaccugagcaucccgaauuucaaccaguaugaagccauguccugcgacuuuaauggaggcaagauuagcguucaguacaaccucucucacuccuaugccggcgaugcugccaaucauugugggaccguggcuaacggaguccugcaaacauucaugcggauggccuggggcgggagcuacaucgcgcuugacucuggacgcggcaacugggauugcauuaugaccuccuaccaguaucugaucauucagaauacgacaugggaggaccacugucaguuuagcagacccucuccuaucggguaccucggacugcuuucccaacggacccgcgauaucuauauuagcagacggcugcucggcacauucaccuggacccuguccgacucugaaggcaaggauacacccgggggauacugccugacgcgcuggaugcucaucgaggccgagcugaaauguuuuggcaacaccgcuguggccaagugcaaugaaaaacaugacgaggaguucugcgauaugcuuagacuguuugacuucuguaagcaggcuauucagcggcucaaagccccugcgcagaugagcauccaacugauuaacaaggccgugaaugcucuuaucaacgaucagcugaucaugaagaaucaccuccgcgacauuauggggauccccuauugcaacuacuccaaauauugguaccugaaucacacaaccacaggaagaaccagccugccuaaguguuggcucgucucuaacggcuccuaccugaaugaaacgcauuucagcgacgauauugaacagcaagccgacaacaugaucacagagaugcuucagaaagaguauauggaacggcaggggaagaccccgcugggacucguugaucuguuuguguucucuaccagcuuuuaccugauuuccaucuuccuucaccucgugaaaauccccacacaucgccacauugucggcaagucuugcccuaaaccccauagacugaaucacaugggcaucuguagcugcgggcuguauaagcagccuggagugcccguuaaguggaaacggugaggacuagucccuguucccagagcccacuuuuuuuucuuuuuuugaaauaaaauagccugucuuucagaucuaaaaaaaaaaaaaaaaaaaaaaaaaaaaaaaaaaaaaaaaaaaaaaaaaaaaaaaaaaaaaaaaaaaaaaaaaaaaaaaaaaaaaaaaaaaaaaaaaaaa

SEQ ID NO: 30630 - RNA, 1740 nt, Artificial Sequence
  mRNA product Design a-2 (A100) comprising derived and/or modified sequence from LASV(LP;Clade I)__AAF86701__GPCmut6 (opt5)
aggagaguccgcucagccagguugcagaagcggcuuagcguguguccuaaucuucucucugcguguagguaggccugugccgcaaacaagcuuaccaugggccagaucauuaccuucuuucaagaggugccccacgucaucgaagagguuaugaacauugugcugaucgcccucagccugcuugcuauucugaaggggcucuacaauaucgccacaugcggaaucauuggccugguggcguuccuuuuucugugugggaaauccugcucucucacgcugaagggaggcuaugaacugcagacccucgagcugaacauggaaacacuuaauauguguaugccucugagcugcaccaaaaacuccucucaucacuacaucagagucgggaaugagacaggacucgagcugacccuuacaaacaccagcauuaucaaucauaaguucuguaaccuguccgacgcucacaaaaagaaucucuaugaucaugcccugaugucuauuaucagcacguuucaccuguccauuccgaacuucaaucaguacgaagccaugagcugcgacuuuaacggcggcaagaucucugugcaguauaaucucucccacagcuacgcuggggaugccgcugagcauuguggaaccguugccaacggcgugcugcaaacauucaugcggauggcguggggagggcgcuauaucgcccuugacucuggcaaagggaauugggauugcauuaugaccuccuaccaguaccugaucauucagaacacaaccugggaagaccacugucaguuuagcagacccucuccuaucggauaucucggccugcuuucccaacggacgcgcgauauuuacaucagcagacggcugcucggcacauucaccuggacacuguccgacucugaggggaacgagacccccggaggcuauugccugacccgcuggaugcucaucgaagcugagcugaaguguuuugggaauacagccgucgcuaaaugcaacgaaaagcaugaugaggaguucugcgacaugcuuagacuguuugauuucuguaaacaggccauucggcgccucaaggcgccugcccagaugagcauccagcugauuaauaaggcugugaacgcccuuaucaaugaccaacugauuaugaaaaaccaccucagagauaucaugggaauccccuacugcaauuauuccaaguacugguaucugaaccacacgagcucuggccggaccucccugccuaaauguuggcucauuagcaaugggucuuaccugaacgaaacacaguucagcgacgacaucgagcagcaagcugauaauaugauuaccgaaaugcuucagaaggaguacaucgaacgccagggaaaaacaccgcugggccucguugacauuuuuaucuucuccaccucuuuuuaucugauuagcaucuuccugcaucuuaucaagauucccacgcacagacauaucgugggcaaaccuugccccaagccucaccggcucaaccauaugggggucuguuccugcggacuguacaagcaccccggcgugccgacaaaauggaagcgcugaggacuagucccuguucccagagcccacuuuuuuuucuuuuuuugaaauaaaauagccugucuuucagaucuaaaaaaaaaaaaaaaaaaaaaaaaaaaaaaaaaaaaaaaaaaaaaaaaaaaaaaaaaaaaaaaaaaaaaaaaaaaaaaaaaaaaaaaaaaaaaaaaaaaa

SEQ ID NO: 30631 - RNA, 1740 nt, Artificial Sequence
  mRNA product Design a-2 (A100) comprising derived and/or modified sequence from LASV(803213;Clade II)__AAF86703__GPCmut6 (opt5)
aggagaguccgcucagccagguugcagaagcggcuuagcguguguccuaaucuucucucugcguguagguaggccugugccgcaaacaagcuuaccaugggccagaucauuaccuucuuucaagaggugccccacgucaucgaagagguuaugaacauugugcugaucgcccucagccugcuugcuauucugaaggggaucuacaauguggccacaugcggacucuucggccugaucuccuuucuucugcucugugggagaucuugcagcgucacguauaaaggaguguacgaacugcagacccuggagcucaacauggcgaaucugaacauguguaugccucuuuccugcacaaagaauaacucucaucacuauauuaugguuggcaaugaaaccgggcuggagcucacacugaccaacacaagcaucauuaaucauaaauucuguaaccuuuccgacgcucacaagaaaaaucuguacgaucaugcccucaugucuaucauuagcaccuuucaccuguccaucccgaacuucaaucaguaugaggccaugagcugcgacuuuaacggaggcaagauuucugugcaguacaaucugucccacagcuucgcugucgaugccgcuaaccauuguggcacgaucgccaacggggugcuccaaaccuuuaugcggauggcguggggaggcucuuauaucgcccuggacuccgggaagggaaauugggauugcauuaugacaagcuaccaguaccuuaucauucagaacaccacaugggaagaccacugucaguucucucgccccuccccuaucggcuaucuggggcuccugagccaaagaacccgggauauuuacaucucccgcagacuucugggaacguuuacauggacccucucugacagcgagggcaaugaagcucccggcggguauugccugacacgguggaugcugaucgaggccgagcucaaauguuucggaaacaccgcuguugccaagugcaaugaaaaacaugaugaggaauuuugcgacaugcugcgccuuuucgauuucuguaagcaggcgauuaaaagacugaagaccccugcccagauguccauccagcucauuaacaaggcugugaaugcccugaucaacgaccaacuuauuaugaaaaaucaucugcgggauaucaugggcauccccuacugcaacuauagccgcuacugguaucucaaucacacagucacggggaagaccucucugccuagauguuggcugguguccaacggaagcuaccucaaugagacacacuuuucugacgacauugaacagcaggcugauaacaugaucaccgagaugcugcaaaaagaguacauggaccggcagggcaagacaccgcuugggcugguggaucucuucgucuuuagcaccuccuucuaucugauuucuaucuuucugcaccuuguuaaaauucccacgcaucgccacaucgugggaaagccuugccccaaaccucauagacucaaucacaugggcauuuguagcugcggccuguacaagcaccccggggugccggucaaguggaaacggugaggacuagucccuguucccagagcccacuuuuuuuucuuuuuuugaaauaaaauagccugucuuucagaucuaaaaaaaaaaaaaaaaaaaaaaaaaaaaaaaaaaaaaaaaaaaaaaaaaaaaaaaaaaaaaaaaaaaaaaaaaaaaaaaaaaaaaaaaaaaaaaaaaaaa

SEQ ID NO: 30632 - RNA, 1740 nt, Artificial Sequence
  mRNA product Design a-2 (A100) comprising derived and/or modified sequence from LASV(GA391;Clade III)__CAA36645__GPCmut6 (opt5)
aggagaguccgcucagccagguugcagaagcggcuuagcguguguccuaaucuucucucugcguguagguaggccugugccgcaaacaagcuuaccaugggccagaucgugaccuucuuucaagaggucccccacguuauugaagaggugaugaacaucgugcugauugcccucagcauccuggcuauucuuaaggggcuguacaaugucgccacaugcggacucaucggccuggugacguuccuucugcucuccgggagaucuuguagccugaucuauaaaggaaccuacgaacugcagacacucgagcugaacauggaaacccuuaauaugugcaugccucuguccuguacaaagaacaauucucaucacuauauucggguuggcaacgagaccgggcucgagcugacacuuaccaauacgagcauccugaaccauaaauuuugcaaucucuccgacgcgcacaagcgcaaccuguacgaucauucucugaugagcauuaucuccaccuuccaccucagcauuccgaauuuuaaccaguaugaagcuaugucuugugacuucaauggaggcaaaaucacagugcaguacaaccugucccacagcuuugccgucgaugccgcuggccauugcgggacccuugccaauggagugcugcaaacauucaugagaauggcuuggggcgggucuuauauugcccucgacuccggacggggcaacugggauuguaucaugaccagcuaccaguaccugaucauucagaacacgacaugggacgaucacugccaguuuucucgccccuccccuaucggguaucuuggacugcucagccaaagaacccgggacauuuacaucucccgcagacugcugggcacauucaccuggacccucucugauagcgagggcaaugaaacacccgggggauauugucugacgcgguggaugcuuauugaggcggagcugaagugcuuuggcaacaccgccguugcuaaguguaaugaaaaacaugacgaggaguucugcgauaugcuccgccuguuugacuucugcaagcaggccaucagacggcuuaaaaccccugcucagauguccauccagcugauuaacaaggccgugaaugcgcucaucaacgaucaacugauuaugaaaaaucaucugcgcgacaucauggggauucccuacuguaacuauagcagauacugguaucucaaucacacaucuacaggaaagaccucccugccucggugcuggcuuaucagcaacggcucuuaccugaaugaaacgaaguucagcgacgauaucgaacagcaggccgacaacaugauuacagagaugcuccaaaaagaguacaucgaucgccaggggaagaccccgcugggacuggucgaccuuuuuguguucuccaccucuuuuuaucucauuagcaucuuccugcaccuggugaaaauucccacacacagacauaucgucggcaagccuugucccaaaccucaccggcucaaucauaugggcauuugcuccugugggcuguacaagcagcccggaguuccggugagauggaaacgcugaggacuagucccuguucccagagcccacuuuuuuuucuuuuuuugaaauaaaauagccugucuuucagaucuaaaaaaaaaaaaaaaaaaaaaaaaaaaaaaaaaaaaaaaaaaaaaaaaaaaaaaaaaaaaaaaaaaaaaaaaaaaaaaaaaaaaaaaaaaaaaaaaaaaa

SEQ ID NO: 30633 - RNA, 1743 nt, Artificial Sequence
  mRNA product Design a-2 (A100) comprising derived and/or modified sequence from LASV(AV;Clade V)__CCA30314__GPCmut6 (opt5)
aggagaguccgcucagccagguugcagaagcggcuuagcguguguccuaaucuucucucugcguguagguaggccugugccgcaaacaagcuuaccaugggccagaucgugaccuucuuucaagaggucccccacguuauugaagaggugaugaacaucgugcugauugcccucagcauccuggcuguccuuaaggggcuguacaauauugccacaugcggacucaucggccugaucacguuccuucugcucugugggagauccugcucuagcaaccuguauaaaggaguguacgaacugcagucccucgaccugaauauggagacccuuaacauguguaugccucugucuugcacaaagaauaacagccaucacuauauucggguuggcaaugauaccgggcucgaacugacacuuaccaacacauccauccugaaucauaaauuuuguaaccucucugacgcgcacaagaaagaucuguacgaccaugcucugaugagcauuaucuccaccuuccaccucagcauuccgaauuuuaaccaguaugaggccaugucuugcgauuucaauggaggcaagaucuccgugcaguacaaccugagccacucuuaugccauugacgcugccaaucauuguggcacggucgcuaacgggauccuucaaaccuuuaugcgcauggccuggggaggcuccuacaucgcgcuggauagcgggagaggaaacugggacugcauuaugacaucuuaccaguaucucaucauucagaauaccacaugggagaaccacugucaguucucccggcccagcccuaucggcuaccuggggcuucugucccaacgcaccagagauauuuauaucucucggcgccuccugggaacguuuacauggacccugagcgacuccgaaggcaaugccacacccggcggguacugccucaccagauggaugcugaucgaggcugaacuuaaguguuucggaaacaccgccguggcuaaaugcaaugagaagcaugaugaggaauuuugcgacaugcugcgccucuucgauuuuuguaaacaggccauuagccggcugaagucuccugcgcagauguccauccagcuuauuaacaaagccguuaaugcucugaucaacgaccaacucauuaugaagaaucaccugagagacaucaugggcauccccuauugcaacuacagcaaguauugguaccugaaucacacaauuacggggaaaaccucucucccuaaguguuggcuggugagcaacggauccuaccuuaaugagacacauuucucugaugacaucgaacagcaggccgauaacaugauuaccgagaugcugcaaaaagaauauauggagcggcagggcaagacaccgcucgggcuggucgaccuguucguguuuagcaccuccuucuaccuuaucagcauuuuucuccgccuggugaaaauccccacgcacagacauauugucggaaagccuugccccaaaccucaccggcugaaucauaugggcaucuguucuugcggccucuauaagcagcccgggguuccggugcgcuggaagagaugaggacuagucccuguucccagagcccacuuuuuuuucuuuuuuugaaauaaaauagccugucuuucagaucuaaaaaaaaaaaaaaaaaaaaaaaaaaaaaaaaaaaaaaaaaaaaaaaaaaaaaaaaaaaaaaaaaaaaaaaaaaaaaaaaaaaaaaaaaaaaaaaaaaaa

SEQ ID NO: 30634 - RNA, 1740 nt, Artificial Sequence
  mRNA product Design a-2 (A100) comprising derived and/or modified sequence from LASV(Togo/2016/7082;Clade VI)__AMR44577__GPCmut6 (opt5)
aggagaguccgcucagccagguugcagaagcggcuuagcguguguccuaaucuucucucugcguguagguaggccugugccgcaaacaagcuuaccaugggccagaucauuaccuucuuucaagaggugccccacgucaucgaagagguuaugaacauugugcugaucgcccucagccugcuugcuauucugaaggggguguacaaugucgccacaugcggaaucaucggccucgugacguuccuguuucuuugugggagauccugcucucugauuuauaaaggaagcuacgaacuccagacccuggagcugaacauggaaacacucaauauguguaugccucuguccugcaccaagaacucuagccaucacuauauccggguuggcaaugagacagggcuugagcugacccucacaaacaccuccauuaucaaucauaaauucuguaaccugucugacgcgcacaagcgcaaucuuuacgaucaugcucugaugagcauucucuccacguuucaccugagcaucccgaacuucaaucaguaugaagccaugucuugcgacuuuaacggaggcaaaauuuccgugcaguacaaucugagccacgccuaugcugucgaugccgcugagcauuguggcaccguggccaacgggguucuccaaacauucaugagaauggcguggggaggcucuuacaucgcccuggacuccgggcggggaaauugggauugcaucaugaccagcuaccaguaucuuauuauccagaacacaaccugggaagaccacugucaguuuucucgccccuccccuauuggcuaccuggggcuccugagccaaagaacgcgggauaucuauauuucccgcagacuucugggaacauucaccuggacacucucugacagcgagggcaacgagacccccggcggguacugccugacccgguggaugcugaucgaagcugagcucaaguguuuuggaaauacagccguggcuaagugcaacgaaaaacaugaugaggaguucugcgacaugcugcgccuuuuugauuucuguaagcaggccauccagagacugaaauccccugcgcagaugagcauucaacucaucaauaaggccgucaacgcucugauuaaugaccagcuuaucaugaaaaaccaucugcgggauaugaugggcauucccuauugcaauuacucuaaguauugguaccucaaccacacguccagcgggcgcaccucucugccuaaguguuggcuggugagcaauggauccuaccucaacgaaacacacuucucugacgacaucgagcagcaagccgauaauaugaucaccgaaaugcugcagaaagaguauauugacagacagggcaagacaccgcuugggcugguggaucucuuugucuucagcaccuccuuuuaccugaucagcauuuuccugcaccuuaucaaaauucccacgcaucggcacaucguuggaaagccuugccccaaaccucaucgccucaaccacaugggcauuuguucuugcggccuguauaagcagcccggggugccgacaagauggaaacggugaggacuagucccuguucccagagcccacuuuuuuuucuuuuuuugaaauaaaauagccugucuuucagaucuaaaaaaaaaaaaaaaaaaaaaaaaaaaaaaaaaaaaaaaaaaaaaaaaaaaaaaaaaaaaaaaaaaaaaaaaaaaaaaaaaaaaaaaaaaaaaaaaaaaa

SEQ ID NO: 30635 - RNA, 1740 nt, Artificial Sequence
  mRNA product Design a-2 (A100) comprising derived and/or modified sequence from LASV(KAK-428;Clade n.d. (VII))__ANH09740__GPCmut6 (opt5)
aggagaguccgcucagccagguugcagaagcggcuuagcguguguccuaaucuucucucugcguguagguaggccugugccgcaaacaagcuuaccaugggccagaucgugaccuucuuucaagaggucccccacguuauugaagaggugaugaacaucgugcugauugcccucagccugcuugcuauccugaaggggcucuacaauuucgccacaugcggagucauuggccugaucacguuucuucugcucugugggagauccugcucugcgaccuauaaaggacaguacgaacugcagacacuggagcucaacauggaaagccugaauauguguaugccucuuuccugcaccaagaacaauucucaucacuauauccgggcuggcaacaauacagggcuggagcucacccugacaaacaccagcauuaucucccauaaauucuguaaucuuucugacgcccacaagaaaaaccuguacgaucauacgcucaugagcauuaucaccacauuucaccuguccauuccgaauuucaaccaguaugaggccaugagcugcgacuuuaauggaggcaagaucucuauucaauacaaccugucccacagcuaugcuggcgaugccgcucagcauugugggaccguggccaauggaguucuccagacauucaugcgcauggcguggggcgggucuuaccuggcccuugacuccggaagacggggcugggauugcaucaucagcucuuaccaguaucugauuauccaaaacaccacgugggacgaucacugucaguuuucccgccccagcccuauuggguaccucggauucgugucccagaagacaagagacaucuauauuucucggcgccugcuuggcaccuuuacauggacccugagcgauuccgaaggccaugacaugcccgggggauacugccucaccagauggaugcugaucgaggcugaucugaaauguuucggcaacacagccgucgcuaagugcaaugaaaaacacgacgaggaguuuugcgauauguggcgccucuucgacuucuguaagcaggccauccaacggcugaaagcgccugcccagaugaacauucagcuuaucaauaaggcugugaacgcccugauuaaugaccaacucaugaugaagaaccaccugagagauaucauggggauucccuauugcaauuacagcaaauuuugguaucuuaacaauacgaccacaggacggaccucucugccucgcuguuggcucaucuccaacggcagcuaccugaaugaaacacauuucucugacgauaucgagcagcaggcugacaacaugauuaccgaaaugcugcagaaggaguacauggauagacaagggaaaacgccgcucggacugguugaccuuuuuguguucagcacauccuuuuaucugaucaccauuuuccuccaccuggucaagauccccacccaucggcacauugugggcaaaccuugccccaagccucaucgccugaaucacaugggcaucuguucuugcgggcuuuacaaacagcccggagugccggucagauggaagcggugaggacuagucccuguucccagagcccacuuuuuuuucuuuuuuugaaauaaaauagccugucuuucagaucuaaaaaaaaaaaaaaaaaaaaaaaaaaaaaaaaaaaaaaaaaaaaaaaaaaaaaaaaaaaaaaaaaaaaaaaaaaaaaaaaaaaaaaaaaaaaaaaaaaaa

SEQ ID NO: 30636 - RNA, 1740 nt, Artificial Sequence; identical to SEQ ID NO: 30630
  mRNA product Design a-2 (A100) comprising derived and/or modified sequence from LASV(Pinneo-NIG-1969;Clade I)__AIT17836__GPCmut6 (opt5)

SEQ ID NO: 30637 - RNA, 1740 nt, Artificial Sequence
  mRNA product Design a-2 (A100) comprising derived and/or modified sequence from LASV(ISTH0009-NIG-2011;Clade II)__AIT17404__GPCmut6 (opt5)
aggagaguccgcucagccagguugcagaagcggcuuagcguguguccuaaucuucucucugcguguagguaggccugugccgcaaacaagcuuaccaugggccagaucauuaccuucuuucaagaggugccccacgucaucgaagagguuaugaacauugugcugaucgcccucagccugcuugcuauucugaaggggaucuacaauguggccacaugcggacucuucggccuggucuccuuucuucugcucugugggagaucuugcagcacgaccuauaaaggaguguacgaacugcagacacuggagcucgacauggcgucccugaacauguguaugccucuuucuugcaccaagaauaacagccaucacuauaucaugguuggcaaugaaacagggcuggagcucacccugacaaacaccuccauuaucaaucauaaauucuguaaccuuucugaugcucacaagaaaaaucuguacgaccaugcccucaugagcauuaucuccacguuucaccugagcauuccgaacuucaaucaguaugaggccaugucuugcgauuuuaacggaggcaagaucuccgugcaguacaaucugagccacgcuuaugccgucgacgcugccaaccauuguggcaccauugcgaauggggugcuccaaacauucaugcggauggccuggggaggcucuuacaucgcucuggauuccgggaagggaagcugggacugcaucaugaccucuuaccaguaucuuauuauccagaacacaaccugggaagaucacugucaguuuucccgccccagcccuauuggcuaccuggggcuccugucccaaagaacgcgggacaucuauauuucucgcagacuucugggaacauucaccuggacacucagcgauuccgagggcaacgaaacccccggcggguacugccugacccgguggaugcugaucgaggccgagcucaaauguuuuggaaauacagcuguugccaagugcaacgaaaaacaugacgaggaguucugcgauaugcugcgccuuuuugacuucuguaagcaggcgaucagacggcugaaaacgccugcccagaugagcauucagcucaucaauaaggcugugaacgcccugauuaaugaucaacuuaucaugaagaaccaucugcgcgacauuaugggcauccccuauugcaauuacucuaaauauugguaccucaaccacaccgucacagggaagaccucccugccuagauguuggcuggugagcaauggaucuuaccucaacgaaacacacuucagcgacgauaucgaacagcaggcugacaauaugauuaccgagcugcuucaaaaagaguauauggaucggcagggcaagacgccgcuggggcucguggaccuguuugucuucuccacaucuuuuuaccugaucagcauuuuccuucaccucaucaaaauucccacccaucgccacaucaccggaaagccuugccccaaaccucauagacugaaccacaugggcauuuguuccugcggccuguauaagcaccccgggguuccggugaaguggaaacggugaggacuagucccuguucccagagcccacuuuuuuuucuuuuuuugaaauaaaauagccugucuuucagaucuaaaaaaaaaaaaaaaaaaaaaaaaaaaaaaaaaaaaaaaaaaaaaaaaaaaaaaaaaaaaaaaaaaaaaaaaaaaaaaaaaaaaaaaaaaaaaaaaaaaa

SEQ ID NO: 30638 - RNA, 1740 nt, Artificial Sequence
  mRNA product Design a-2 (A100) comprising derived and/or modified sequence from LASV(ISTH2010-NIG-2012;Clade II)__AIT17482__GPCmut6 (opt5)
aggagaguccgcucagccagguugcagaagcggcuuagcguguguccuaaucuucucucugcguguagguaggccugugccgcaaacaagcuuaccaugggccagaucauuaccuucuuucaagaggugccccacgucaucgaagagguuaugaacauugugcugaucgcccucagccugcuugcuauucugaaggggaucuacaauguggccacaugcggacucuucggccuggucuccuuucuucugcucugugggagaucuugcagcacgaccuauaaaggaguguacgaacugcagacacuggagcucgacauggcgucccugaacauguguaugccucuuucuugcaccaagaauaacagccaucacuauaucaugguuggcaaugaaacagggcuggagcucacccugacaaacaccuccauuaucaaucauaaauucuguaaccuuucugaugcucacaagaaaaaucuguacgaccaugcccucaugagcauuaucuccacguuucaccugagcauuccgaacuucaaucaguaugaggccaugucuugcgauuuuaacggaggcaagaucuccgugcaguacaaucugagccacgcuuaugccgucgacgcugccaaccauuguggcaccauugcgaauggggugcuccaaacauucaugcggauggccuggggaggcucuuacaucgcucuggauuccgggaagggaagcugggacugcaucaugaccucuuaccaguaucuuauuauccagaacauuacaugggaagaucacugucaguuuucccgccccagcccuaucggcuaccuggggcuccugucccaaagaacccgggacauuuauaucucucgcagacuucugggaacguucacauggacccucagcgauuccgagggcaacgaaacacccggcggguacugccugacccgguggaugcugaucgaggccgagcucaaauguuuuggaaauaccgcuguugccaagugcaacgaaaaacaugacgaggaguucugcgauaugcugcgccuuuuugacuucuguaagcaggcgauuagacggcugaaaacgccugcccagaugagcauccagcucauuaauaaggcugugaacgcccugaucaaugaucaacuuauuaugaagaaccaucugcgcgacaucaugggcauccccuauugcaauuacucuaaauauugguaccucaaccacacagucaccgggaagacaucccugccuagauguuggcuggugagcaauggaucuuaccucaacgaaacccacuucagcgacgauauugaacagcaggcugacaauaugaucacagagcugcuucaaaaagaguauauugaucggcagggcaagaccccgcuggggcucguggaccuguuugucuucuccacgucuuuuuaccugaucagcauuuuccuucaccucguuaaaauccccacacaucgccacguggugggaaagccuugccccaaaccucauagacugaaccacaugggcauuuguuccugcggccuguauaagcaccccggggucccggugaaguggaaacggugaggacuagucccuguucccagagcccacuuuuuuuucuuuuuuugaaauaaaauagccugucuuucagaucuaaaaaaaaaaaaaaaaaaaaaaaaaaaaaaaaaaaaaaaaaaaaaaaaaaaaaaaaaaaaaaaaaaaaaaaaaaaaaaaaaaaaaaaaaaaaaaaaaaaa

SEQ ID NO: 30639 - RNA, 1740 nt, Artificial Sequence
  mRNA product Design a-2 (A100) comprising derived and/or modified sequence from LASV(Lassa virus/H.sapiens-wt/NGA/2015/ISTH_0543;Clade II)__AVO03639__GPCmut6 (opt5)
aggagaguccgcucagccagguugcagaagcggcuuagcguguguccuaaucuucucucugcguguagguaggccugugccgcaaacaagcuuaccaugggccagaucauuaccuucuuucaagaggugccccacgucaucgaagagguuaugaacauugugcugaucgcccucagccugcuugcuauucugaaggggaucuacaauguggccacaugcggacucuucggccuggucuccuuucuucugcucugugggagaucuugcagcacgaccuauaaaggaguguacgaacugcagacacuggagcucgacauggcgaaccugaauauguguaugccucuuuccugcaccaagaacaauucucaucacuauaucaugguuggcaacgaaacagggcuggagcucacccugacaaauaccagcauuaucaaccauaaauucuguaaucuuuccgaugcucacaagaaaaaccuguacgaccaugcccucaugucuauuaucagcacguuucaccuguccauuccgaauuucaaccaguaugaggccaugagcugcgauuuuaauggaggcaagaucucugugcaguacaaccugucccacaccuaugcugucgacgccgcuaaucauuguggcacaauugccaacggggugcuccaaaccuucaugcggauggcguggggaggcagcuacaucgcccuggauucugggaagggauccugggacugcaucaugacaagcuaccaguaucuuguuauucagaacaccacgugggaagaucacugucaguuuucucgccccuccccuaucggcuaccuggggcuccugagccaaagaacacgggacauuuauaucucccgcagacuucugggaaccuucacauggacccucucugauagcgagggcaaugaaacccccggcggguacugccugacacgguggaugcugauugaggcugagcucaaauguuuuggaaacacggccguggcuaagugcaaugaaaaacaugacgaggaguucugcgauaugcugcgccuuuuugacuucuguaagcaggccaucagacggcugaaaaccccugcgcagauguccauccagcucauuaacaaggccgucaaugcucugaucaacgaucaacuuauuaugaagaaucaucugcgcgacaucaugggcauucccuauugcaacuacagcaaauauugguaccucaaucacacagugaccgggaagacaucucugccuagauguuggcugguguccaacggaagcuaccucaaugaaacccacuucucugacgauaucgaacagcaggccgacaacaugaucacggagcugcuucaaaaagaguauauugaucggcagggcaagacaccgcuggggcucgucgaccuguuuguuuucagcaccuccuuuuaccugaucucuauuuuccuucaccucgugaaaauccccacccaucgccacauuacaggaaagccuugccccaaaccucauagacugaaucacaugggcaucuguagcugcggccuguauaagcaccccggggugccggucaaguggaaacggugaggacuagucccuguucccagagcccacuuuuuuuucuuuuuuugaaauaaaauagccugucuuucagaucuaaaaaaaaaaaaaaaaaaaaaaaaaaaaaaaaaaaaaaaaaaaaaaaaaaaaaaaaaaaaaaaaaaaaaaaaaaaaaaaaaaaaaaaaaaaaaaaaaaaa

SEQ ID NO: 30640 - RNA, 1740 nt, Artificial Sequence
  mRNA product Design a-2 (A100) comprising derived and/or modified sequence from LASV(Lassa virus/H.sapiens-wt/NGA/2016/ISTH_0009;Clade II)__AVO03571__GPCmut6 (opt5)
aggagaguccgcucagccagguugcagaagcggcuuagcguguguccuaaucuucucucugcguguagguaggccugugccgcaaacaagcuuaccaugggccagaucauuaccuucuuucaagaggugccccacgucaucgaagagguuaugaacauugugcugaucgcccucagccugcuugcuauucugaaggggaucuacaauguggccacaugcggacuccugggccuugucuccuuccugcuccugugugggagaucuugcagcacgaccuauaaaggaguguacgaacugcagacacucgagcuggacauggcgucccuuaacauguguaugccucugucuugcaccaagaauaacagccaucacuauaucaugguuggcaaugaaacagggcucgagcugacccuuacaaacaccuccauuaucaaucauaaauuuuguaaccugucugaugcucacaagaaaaaucucuacgaccaugcccugaugagcauuaucuccacguuccaccugagcauuccgaacuuuaaucaguaugaggccaugucuugcgauuucaacggaggccggaucuccgugcaguacaaucucagccacucuuaugcugucgacgccgcuaaccauuguggcaccauugccaauggggugcugcaaacauuuaugcgcauggcguggggaggcuccuacaucgcccuugauagcgggaagggaucuugggacugcaucaugaccuccuaccaguaucugauuauccagaacacaaccugggaagaucacugucaguucagcagacccuccccuauuggcuaccucgggcugcuuucucaacggacgcgcgacaucuauauuagcagacggcugcucggaacauuuaccuggacacuguccgauagcgagggcaacgaaacccccggcggguacugccugacccgcuggaugcucaucgaggcugagcugaaguguuucggaaauacagccguugcuaaaugcaacgaaaagcaugacgaggaauuuugcgauaugcuuagacuguucgacuuuuguaaacaggccauccggcgccucaagacgccugcgcagaugucuauucagcugaucaauaaagccgugaacgcucuuauuaaugaucaacugaucaugaagaaccaccucagagacauuaugggcauccccuauugcaauuacuccaaguauugguaccugaaccacaccgucacagggaaaaccagccugccucgguguuggcucgugucuaauggaagcuaccugaacgagacacauuucuccgacgauaucgaacagcaggccgacaauaugauuaccgagcuucugcaaaaggaguauaucgaucgccagggcaaaacgccgcucgggcugguggaccuguucgucuuuucuaccagcuucuaccuuauuuccaucuuucuccaccugguuaagauucccacacauagacacaucaccggaaaaccuugccccaagccucaucggcugaaccacaugggcauuuguagcugcggccucuauaaucaccccggggugccggugaaauggaagcgcugaggacuagucccuguucccagagcccacuuuuuuuucuuuuuuugaaauaaaauagccugucuuucagaucuaaaaaaaaaaaaaaaaaaaaaaaaaaaaaaaaaaaaaaaaaaaaaaaaaaaaaaaaaaaaaaaaaaaaaaaaaaaaaaaaaaaaaaaaaaaaaaaaaaaa

SEQ ID NO: 30641 - RNA, 1740 nt, Artificial Sequence
  mRNA product Design a-2 (A100) comprising derived and/or modified sequence from LASV(Lassa virus/H.sapiens-wt/NGA/2016/ISTH_0017;Clade II)__AVO03567__GPCmut6 (opt5)
aggagaguccgcucagccagguugcagaagcggcuuagcguguguccuaaucuucucucugcguguagguaggccugugccgcaaacaagcuuaccaugggccagaucauuaccuucuuucaagaggugccccacgucaucgaagagguuaugaacauugugcugaucgcccucagccugcuugcuauucugaaggggaucuacaauguggccacaugcggacucuucggccuggucuccuuucuucugcucugugggagaucuugcagcacgaccuauaaaggaguguacgaacugcagacacuggagcucgacauggcgucccugaacauguguaugccucuuucuugcaccaagaauaacagccaucacuauaucaugguuggcaaugaaacagggcuggagcucacccugacaaacaccuccauuaucaaucauaaauucuguaaccuuucugaugcucacaagaaaaaucuguacgaccaugcccucaugagcauuaucuccacguuucaccugagcauuccgaacuucaaucaguaugaggccaugucuugcgauuuuaacggaggcaagaucuccgugcaguacaaucugagccacaccuaugcuauugacgccgcuaaccauuguggcacaaucgccaaugggguccuccaaaccuucaugcggauggcguggggaggcucuuacaucgcccuggauuccgggaagggaagcugggacugcauuaugacaucuuaccaguaucuuaucauucagaacaccacgugggaagaucacugucaguuuucccgccccagcccuaucggcuaccuggggcuccugucccaaagaacacgggacauuuauaucucucgcagacuucugggaaccuucacauggacccucagcgauuccgagggcaacgaaacccccggcggguacugccugacacgguggaugcugaucgaggcugagcucaaauguuuuggaaauacggccguggcuaagugcaacgaaaaacaugacgaggaguucugcgauaugcugcgccuuuuugacuucuguaagcaggccauuagacggcugaaaaccccugcgcagaugagcauccagcucauuaauaaggccguuaacgcucugaucaaugaucaacuuauuaugaagaaccaucugcgcgacaucaugggcauccccuauugcaauuacucuaaauauugguaccucaaccacacagugaccgggaagacaucccugccuagauguuggcuggucagcaauggaucuuaccucaacgaaacccacuucagcgacgauauugaacagcaggccgacaauaugaucacggagcugcuucaaaaagaguauauggaucggcagggcaagacaccgcuggggcucguggaccuguuuguguucuccaccucuuuuuaccugauuagcaucuuccuucaccucguccgcauucccacccauagacacguuaucggaaaaccuugccccaagccucaucggcugaaccacaugggcauuuguuccugcggccuguauaaacaccccggggugccggugaaguggaagcgcugaggacuagucccuguucccagagcccacuuuuuuuucuuuuuuugaaauaaaauagccugucuuucagaucuaaaaaaaaaaaaaaaaaaaaaaaaaaaaaaaaaaaaaaaaaaaaaaaaaaaaaaaaaaaaaaaaaaaaaaaaaaaaaaaaaaaaaaaaaaaaaaaaaaaa

SEQ ID NO: 30642 - RNA, 1740 nt, Artificial Sequence
  mRNA product Design a-2 (A100) comprising derived and/or modified sequence from LASV(Lassa virus/H.sapiens-wt/NGA/2018/ISTH_0959;Clade II)__AVV65099__GPCmut6 (opt5)
aggagaguccgcucagccagguugcagaagcggcuuagcguguguccuaaucuucucucugcguguagguaggccugugccgcaaacaagcuuaccaugggccagaucauuaccuucuuucaagaggugccccacgucaucgaagagguuaugaacauugugcugaucgcccucagccugcuugcuauucugaaggggaucuacaauguggucacaugcggacucuucggccugguguccuuucuucugcucugugggagaucuugcagcacgaccuauaaaggaguuuacgaacugcagacacuggagcucgacauggccucccugaacauguguaugccucuuucuugcaccaagaauaacagccaucacuauaucauggugggcaaugaaacagggcuggagcucacccugacaaacaccuccauuaucaaucauaaauucuguaaccuuucugaugcgcacaagaaaaaucuguacgaccaugcucucaugagcauuaucuccacguuucaccugagcauuccgaacuucaaucaguaugaggccaugucuugcgauuuuaacggaggcaagaucuccguccaguacaaucugagccacgccuaugcuauugacgccgcuaaccauuguggcaccaucgccaauggggugcuccaaacauucaugcggauggcguggggaggcucuuacaucgcccuggauuccgggaagggaagcugggacugcauuaugaccucuuaccaguaucuuaucauucagaacacaaccugggaagaucacugucaguuuucccgccccagcccuaucggcuaccuggggcuccugucccaaagaacgcgggacauuuauaucucucgcagacuucugggaacauucaccuggacacucagcgauuccgagggcaacgaaacccccggcggguacugccugacccgguggaugcugaucgaggcugagcucaaauguuuuggaaauacagccguugcuaagugcaacgaaaaacaugacgaggaguucugcgauaugcugcgccuuuuugacuucuguaagcaggccauuagacggcugaaaacgccugcgcagaugagcauccagcucauuaauaaggccgugaacgcucugaucaaugaucaacuuauuaugaagaaccaucugcgcgacaucaugggcauccccuauugcaauuacucuaaauauugguaccucaaccacaccgucacagggaagaccucccugccuagauguuggcuggugagcaauggaucuuaccucaacgaaacacacuucagcgacgauauugaacagcaggccgacaauaugaucaccgagcugcuucaaaaagaguauauugaucggcagggcaagacgccgcuggggcucguggaccuguuugucuucuccacaucuuuuuaccugaucagcauuuuccuucaccucguuaaaauccccacccaucgccacgugauuggaaagccuugccccaaaccucauagacugaaccacaugggcaucuguuccugcggccuguauaagcaccccggggugccggucaaguggaaacggugaggacuagucccuguucccagagcccacuuuuuuuucuuuuuuugaaauaaaauagccugucuuucagaucuaaaaaaaaaaaaaaaaaaaaaaaaaaaaaaaaaaaaaaaaaaaaaaaaaaaaaaaaaaaaaaaaaaaaaaaaaaaaaaaaaaaaaaaaaaaaaaaaaaaa

SEQ ID NO: 30643 - RNA, 1740 nt, Artificial Sequence
  mRNA product Design a-2 (A100) comprising derived and/or modified sequence from LASV(LASV003-NIG-2008;Clade II)__AIT17580__GPCmut6 (opt5)
aggagaguccgcucagccagguugcagaagcggcuuagcguguguccuaaucuucucucugcguguagguaggccugugccgcaaacaagcuuaccaugggccagaucauuaccuucuuucaagaggugccccacgucaucgaagagguuaugaacauugugcugaucgcccucagccugcuugcuauucugaaggggaucuacaauguggccacaugcggacucuucggccuggucuccuuucuucugcucugugggagaucuugcagcacgaccuauaaaggaguguacgaacugcagacacuggagcucgacauggcgucccugaacauguguaugccucuuucuugcaccaagaauaacagccaucacuauaucaugguuggcaaugaaacagggcuggagcucacccugacaaacaccuccauuaucaaucauaaauucuguaaccuuucugaugcucacaagaaaaaucuguacgaccaugcccucaugagcauuaucuccacguuucaccugagcauuccgaacuucaaucaguaugaggccaugucuugcgauuuuaacggaggcaagaucuccgugcaguacaaucugagccacaccuaugcugucgacgccgcuaaccauuguggcacaauugccaauggggugcuccaaaccuucaugcggauggcguggggaggcucuuacaucgcccuggauuccgggaagggaagcugggacugcaucaugacaucuuaccaguaucuuauuauccagaacaccacgugggaagaucacugucaguuuucccgccccagcccuauuggcuaccuggggcuccugucccaaagaacacgggacaucuauauuucucgcagacuucugggaaccuucacauggacccucagcgauuccgagagcaacgaaacccccggcggcuacugccugacacgguggaugcugaucgaggcugagcucaaauguuuugggaauacggccguugcuaagugcaacgaaaaacaugacgaggaguucugcgauaugcugcgccuuuuugacuucuguaagcaggccaucagacggcugaaagcgccugcccagaugucuauucagcucaucaauaaggcugugaacgcccugauuaaugaucaacuuaucaugaagaaccaucugcgcgacauuaugggaauccccuauugcaauuacuccaaauauugguaccucaaccacaccgucacaggcagaaccagccugccucgguguuggcuggugucuaaugggagcuaccucaacgaaacacacuucuccgacgauaucgaacagcaggcugacaauaugauuaccgagcugcuucaaaaggaguauauggaucgccagggaaaaacgccgcugggccucguggaccuguuugucuucucuaccagcuuuuaccugaucuccauuuuccuucaccucguuaagauccccacacauagacacgugauugggaaaccuugccccaagccucaucggcugaaccacaugggaaucuguagcugcggccuguauaaacaccccggcgugccggucaaguggaagcgcugaggacuagucccuguucccagagcccacuuuuuuuucuuuuuuugaaauaaaauagccugucuuucagaucuaaaaaaaaaaaaaaaaaaaaaaaaaaaaaaaaaaaaaaaaaaaaaaaaaaaaaaaaaaaaaaaaaaaaaaaaaaaaaaaaaaaaaaaaaaaaaaaaaaaa

SEQ ID NO: 30644 - RNA, 1740 nt, Artificial Sequence
  mRNA product Design a-2 (A100) comprising derived and/or modified sequence from LASV(LASV035-NIG-2009;Clade II)__AIT17588__GPCmut6 (opt5)
aggagaguccgcucagccagguugcagaagcggcuuagcguguguccuaaucuucucucugcguguagguaggccugugccgcaaacaagcuuaccaugggccagaucauuaccuucuuucaagaggugccccacgucaucgaagagguuaugaacauugugcugaucgcccucagccugcuugcuauucugaaggggaucuacaauguggccacaugcggacucuucggccuggucuccuuucuucugcucugugggagaucuugcagcacgaccuauaaaggaguguacgaacugcagacacuggagcucgacauggcgucccugaacauguguaugccucuuucuugcaccaagaauaacagccaucacuauaucaugguuggcaaugaaacagggcuggagcucacccugacaaacaccuccauuaucaaucauaaauucuguaaccuuucugaugcucacaagaaaaaucuguacgaccaugcccucaugagcauuaucuccacguuucaccugagcauuccgaacuucaaucaguaugaggccaugucuugcgauuuuaacggaggcaagaucuccgugcaguacaaucugagccacgcuuaugccgucgacgcugccaaccauuguggcaccauugcgaauggggugcuccaaacauucaugcggauggccuggggaggcucuuacaucgcucuggauuccgggaagggaagcugggacugcaucaugaccucuuaccaguaucuuauuauccagaacacaaccugggaagaucacugucaguuuucccgccccagcccuauuggcuaccuggggcuccugucccaaagaacgcgggacaucuauauuucucgcagacuucugggaacauucaccuggacacucagcgauuccgagggcaacgaaacccccggcggguacugccugacccgguggaugcugaucgaggccgagcucaaauguuuuggaaauacagcuguugccaagugcaacgaaaaacaugacgaggaguucugcgauaugcugcgccuuuuugacuucuguaagcaggcgaucagacggcugaaagccccugcucagaugagcauucagcucaucaauaaggccgugaacgcucugauuaaugaucaacuuaucaugaagaaccaucugcgcgacauuaugggcauccccuauugcaauuacucuaaauauugguaccucaaccacacggucaccgggaagacaucccugccuagauguuggcuggugagcaauggaucuuaccucaacgaaacccacuucagcgacgauaucgaacagcaggccgacaauaugauuacagagcugcuucaaaaagaguauaucgaucggcagggcaagaccccgcuggggcucguggaccuguuugucuucuccacgucuuuuuaccugauuagcaucuuccuucaccucguuaaaauucccacacaucgccacgugaucggaaagccuugccccaaaccucauagacugaaccacaugggcauuuguuccugcggccuguauaagcaccccggggugccggucaaguggaaacggugaggacuagucccuguucccagagcccacuuuuuuuucuuuuuuugaaauaaaauagccugucuuucagaucuaaaaaaaaaaaaaaaaaaaaaaaaaaaaaaaaaaaaaaaaaaaaaaaaaaaaaaaaaaaaaaaaaaaaaaaaaaaaaaaaaaaaaaaaaaaaaaaaaaaa

SEQ ID NO: 30645 - RNA, 1740 nt, Artificial Sequence
  mRNA product Design a-2 (A100) comprising derived and/or modified sequence from LASV(LASV1000-NIG-2009;Clade II)__AIT17782__GPCmut6 (opt5)
aggagaguccgcucagccagguugcagaagcggcuuagcguguguccuaaucuucucucugcguguagguaggccugugccgcaaacaagcuuaccaugggccagaucauuaccuucuuucaagaggugccccacgucaucgaagagguuaugaacauugugcugaucgcccucagccugcuugcuauucugaaggggaucuacaauguggccacaugcggacucuucggccuggucuccuuucuucugcucugugggagaucuugcagcacgaccuauaaaggaguguacgaacugcagacacuggagcucgacauggcgucccugaacauguguaugccucuuucuugcaccaagaauaacagccaucacuauaucaugguuggcaaugaaacagggcuggagcucacccugacaaacaccuccauuaucaaucauaaauucuguaaccuuucugaugcucacaagaaaaaucuguacgaccaugcccucaugagcauuaucuccacguuucaccugagcauuccgaacuucaaucaguaugaggccaugucuugcgauuuuaacggaggcaagaucuccgugcaguacaaucugagccacaccuaugcugucgacgccgcuaaccauuguggcacaauugccaauggggugcuccaaaccuucaugcggauggcguggggaggcucuuacaucgcccuggauuccgggaagggaagcugggacugcaucaugacaucuuaccaguaucuuauuauccagaacaccacgugggaagaucacugucaguuuucccgccccagcccuauuggcuaccuggggcuccugucccaaagaacacgggacaucuauauuucucgcagacuucugggaaccuucacauggacccucagcgauuccgagggcaacgaaacccccggcggguacugccugacacgguggaugcugaucgaggcugagcucaaauguuuuggaaauacggccguugcuaagugcaacgaaaaacaugacgaggaguucugcgauaugcugcgccuuuuugacuucuguaagcaggccaucaaaagacugaagaccccugcgcagaugagcauucagcucaucaauaaggccgugaacgcucugauuaaugaucaacuuaucaugaaaaaccaucugcgggacauuaugggcauccccuauugcaauuacucuaaguauugguaccucaaccacacagucaccgggaaaacaucccugccucgcuguuggcuggugagcaauggaucuuaccucaacgaaacccacuucagcgacgauaucgaacagcaggccgacaauaugauuacggagcugcuucaaaaggaguauaucgauagacagggcaaaacaccgcuggggcucguggaccuguuugucuucuccaccucuuuuuaccugauuagcaucuuccuucaccucguuaagauucccacccaucggcacguggugggaaaaccuugccccaagccucaucgccugaaccacaugggcaucuguuccugcggccuguauaagcaccccggggucccggugaaauggaagagaugaggacuagucccuguucccagagcccacuuuuuuuucuuuuuuugaaauaaaauagccugucuuucagaucuaaaaaaaaaaaaaaaaaaaaaaaaaaaaaaaaaaaaaaaaaaaaaaaaaaaaaaaaaaaaaaaaaaaaaaaaaaaaaaaaaaaaaaaaaaaaaaaaaaaa

SEQ ID NO: 30646 - RNA, 1740 nt, Artificial Sequence
  mRNA product Design a-2 (A100) comprising derived and/or modified sequence from LASV(LASV221-NIG-2010;Clade II)__AIT17624__GPCmut6 (opt5)
aggagaguccgcucagccagguugcagaagcggcuuagcguguguccuaaucuucucucugcguguagguaggccugugccgcaaacaagcuuaccaugggccagaucauuaccuucuuucaagaggugccccacgucaucgaagagguuaugaacauugugcugaucgcccucagccugcuugcuauucugaaggggaucuacaauguggccacaugcggacucuucggccuggucuccuuucuucugcucugugggagaucuugcagcacgaccuauaaaggaguguacgaacugcagacacuggagcucgacauggcgucccugaacauguguaugccucuuucuugcaccaagaauaacagccaucacuauaucaugguuggcaaugaaacagggcuggagcucacccugacaaacaccuccauuaucaaucauaaauucuguaaccuuucugaugcucacaagaaaaaucuguacgaccaugcccucaugagcauuaucuccacguuucaccugagcauuccgaacuucaaucaguaugaggccaugucuugcgauuuuaacggaggcaagaucuccgugcaguacaaucugagccacaccuaugcuauugacgccgcuaaccauuguggcacaaucgccaaugggguccuccaaaccuucaugcggauggcguggggaggcucuuacaucgcccuggauuccgggaagggaagcugggacugcauuaugacaucuuaccaguaucuuaucauucagaacaccacgugggaagaucacugucaguuuucccgccccagcccuaucggcuaccuggggcuccugucccaaagaacacgggacauuuauaucucucgcagacuucugggaaccuucacauggacccucagcgauuccgagggcaacgaaacccccggcggguacugccugacacgguggaugcugaucgaggcugagcucaaauguuuuggaaauacggccguggcuaagugcaacgaaaaacaugacgaggaguucugcgauaugcugcgccuuuuugacuucuguaagcaggccauuagacggcugaaaaccccugcgcagaugagcauccagcucauuaauaaggccguuaacgcucugaucaaugaucaacuuauuaugaagaaccaucugcgcgacaucaugggcauccccuauugcaauuacucuaaauauugguaccucaaccacacagugaccgggaagacaucccugccuagauguuggcuggucagcaauggaucuuaccucaacgaaacccacuucagcgacgauauugaacagcaggccgacaauaugaucacggagaugcugcaaaaagaguauauggaucggcagggcaagacaccgcuugggcugguggaccucuuuguguucuccaccucuuuuuaccugauuagcaucuuccugcaccuugucaaaauucccacccaucgccacguuaucggaaagccuugccccaaaccucauagacucaaccacaugggcauuuguuccugcggccuguauaagcaccccggggugccggugaaguggaaacggugaggacuagucccuguucccagagcccacuuuuuuuucuuuuuuugaaauaaaauagccugucuuucagaucuaaaaaaaaaaaaaaaaaaaaaaaaaaaaaaaaaaaaaaaaaaaaaaaaaaaaaaaaaaaaaaaaaaaaaaaaaaaaaaaaaaaaaaaaaaaaaaaaaaaa

SEQ ID NO: 30647 - RNA, 1740 nt, Artificial Sequence
  mRNA product Design a-2 (A100) comprising derived and/or modified sequence from LASV(LASV237-NIG-2010;Clade II)__AIT17638__GPCmut6 (opt5)
aggagaguccgcucagccagguugcagaagcggcuuagcguguguccuaaucuucucucugcguguagguaggccugugccgcaaacaagcuuaccaugggccagaucauuaccuucuuucaagaggugccccacgucaucgaagagguuaugaacauugugcugaucgcccucagccugcuugcuauucugaaggggaucuacaauguggccacaugcggacucuucggccuggucuccuuucuucugcucugugggagaucuugcagcacgaccuauaaaggaguguacgaacugcagacacuggagcucgacauggcgucccugaacauguguaugccucuuucuugcaccaagaauaacagccaucacuauaucaugguuggcaaugaaacagggcuggagcucacccugacaaacaccuccauuaucaaucauaaauucuguaaccuuucugaugcucacaagaaagaccuguacgaucaugcccucaugagcauuaucuccacguuucaccugagcauuccgaauuucaaccaguaugaggccaugucuugcgacuuuaauggaggcaagaucuccgugcaguacaaccugagccacaccuaugcugucgaugccgcuaaucauuguggcacaauugccaacggggugcuccaaaccuucaugcggauggcguggggaggcucuuacaucgcccuggacuccgggaagggaagcugggauugcaucaugacaucuuaccaguaucuuauuauccagaauaccacgugggaagaccacugucaguuuucccgccccagcccuauuggcuaccuggggcuccugucccaaagaacacgggauaucuauauuucucgcagacuucugggaaccuucacauggacccucagcgacuccgagggcaacgaaacccccggcggguacugccugacacgguggaugcugaucgaggcugagcucaaauguuuuggaaacacggccguugcuaagugcaaugaaaaacaugaugaggaguucugcgacaugcugcgccuuuuugauuucuguaagcaggccaucagacggcugaaaaccccugcgcagaugagcauucagcucaucaacaaggccgugaaugcucugauuaacgaccaacuuaucaugaagaaucaucugcgcgacauuaugggcauccccuauugcaacuacucuaaauauugguaccucaaucacacagucaccgggaagacaucccugccuagauguuggcuggugagcaacggaucuuaccucaaugaaacccacuucagcgaugacaucgaacagcaggccgauaacaugauuacggagcugcuucaaaaagaguauauggaccggcagggcaagacaccgcuggggcucguggaucuguuugucuucuccaccucuuuuuaccugaucagcauuuuccuucaccucaucaaaauucccacccaucgccacaucacaggaaagccuugccccaaaccucauagacugaaucacaugggcauuuguuccugcggccuguauaagcaccccgggguuccggugaaguggaaacggugaggacuagucccuguucccagagcccacuuuuuuuucuuuuuuugaaauaaaauagccugucuuucagaucuaaaaaaaaaaaaaaaaaaaaaaaaaaaaaaaaaaaaaaaaaaaaaaaaaaaaaaaaaaaaaaaaaaaaaaaaaaaaaaaaaaaaaaaaaaaaaaaaaaaa

SEQ ID NO: 30648 - RNA, 1740 nt, Artificial Sequence
  mRNA product Design a-2 (A100) comprising derived and/or modified sequence from LASV(LASV253-NIG-2011;Clade II)__AIT17670__GPCmut6 (opt5)
aggagaguccgcucagccagguugcagaagcggcuuagcguguguccuaaucuucucucugcguguagguaggccugugccgcaaacaagcuuaccaugggccagaucauuaccuucuuucaagaggugccccacgucaucgaagagguuaugaacauugugcugaucgcccucagccugcuugcuauucugaaggggaucuacaauguggccacaugcggacucuucggccuggucuccuuucuucugcucugugggagaucuugcagcacgaccuauaaaggaguguacgaacugcagacacuggagcucgacauggcgucccugaacauguguaugccucuuucuugcaccaagaauaacagccaucacuauaucaugguuggcaaugaaacagggcuggagcucacccugacaaacaccuccauuaucaaucauaaauucuguaaccuuucugaugcucacaagaaaaaucuguacgaccaugcccucaugagcauuaucuccacguuucaccugagcauuccgaacuucaaucaguaugaggccaugucuugcgauuuuaacggaggcaagaucuccgugcaguacaaucugagccacaccuaugcugucgacgccgcuaaccauuguggcacaauugccaauggggugcuccaaaccuucaugcggauggcguggggaggcucuuacaucgcccuggauuccgggaagggaagcugggacugcaucaugacaucuuaccaguaucuuauuauccagaacaccacgugggaagaucacugucaguuuucccgccccagcccuauuggcuaccuggggcuccugucccaaagaacacgggacaucuauauuucucgcagacuucugggaaccuucacauggacccucagcgauuccgagggcaacgaaacccccggcggguacugccugacacgguggaugcugaucgaggcugagcucaaauguuuuggaaauacggccguugcuaagugcaacgaaaaacaugacgaggaguucugcgauaugcugcgccuuuuugacuucuguaagcaggccaucagacggcugaaagcgccugcccagaugagcauucagcucaucaauaaggcugugaacgcccugauuaaugaucaacuuaucaugaagaaccaucugcgcgacauuaugggcauccccuauugcaauuacucuaaauauugguaccucaaccacaccgucacagggagaaccucccugccucgguguuggcuggugagcaauggaucuuaccucaacgaaacacacuucagcgacgauaucgaacagcaggcugacaauaugauuaccgagcugcuucaaaaggaguauaucgaucgccagggcaaaacgccgcuggggcucguggaccuguuugucuucuccacaucuuuuuaccugauuagcaucuuccuucaccucguuaagauucccacccauagacacaucauuggaaaaccuugccccaagccucaucggcugaaccacaugggcaucuguuccugcggccuguauaaacaccccggggugccggugaaguggaagcgcugaggacuagucccuguucccagagcccacuuuuuuuucuuuuuuugaaauaaaauagccugucuuucagaucuaaaaaaaaaaaaaaaaaaaaaaaaaaaaaaaaaaaaaaaaaaaaaaaaaaaaaaaaaaaaaaaaaaaaaaaaaaaaaaaaaaaaaaaaaaaaaaaaaaaa

SEQ ID NO: 30649 - RNA, 1740 nt, Artificial Sequence
  mRNA product Design a-2 (A100) comprising derived and/or modified sequence from LASV(LASV254-NIG-2011;Clade II)__AIT17674__GPCmut6 (opt5)
aggagaguccgcucagccagguugcagaagcggcuuagcguguguccuaaucuucucucugcguguagguaggccugugccgcaaacaagcuuaccaugggccagaucauuaccuucuuucaagaggugccccacgucaucgaagagguuaugaacauugugcugaucgcccucagccugcuugcuauucugaaggggaucuacaauguggccacaugcggacucuucggccuggucuccuuucuucugcucugugggagaucuugcagcacgaccuauaaaggaguguacgaacugcagacacuggagcucgacaugaccaaccugaauauguguaugccucuuuccugcacaaagaacaauucucaucacuauaucaugguuggcaacgaaaccgggcuggagcucacacugaccaauacgagcauuaucaaccauaaauucuguaaucuuuccgaugcgcacaagaaaaaccuguacaaucaugcucucaugucuauuaucagcaccuuucaccuguccauuccgaacuucaaucaguaugaggccaugagcugcgacuuuaacggaggcaagaucucugugcaguacaaucugucccacagcuaugccgucgaugcugccaaccauuguggcacaauugcuaacggggugcuccaaaccuucaugcggauggccuggggaggcucuuacaucgcgcuggacuccgggaagggaaauugggauugcaucaugacaagcuaccaguaucuuauuauccagaacaccacgugggaagaccacugucaguuuucucgccccuccccuauuggcuaccuggggcuccugagccaaagaacacgggauaucuauauuucccgcagacuucugggaaccuucacauggacccucucugacagcgagggcaaugaaacccccggcggguacugccugacacgguggaugcugaucgaggccgagcucaaauguuuuggaaacacggcuguugccaagugcaaugaaaaacaugaugaggaguucugcgacaugcugcgccuuuuugauuucuguaagcaggcuaucagacggcugaaaaccccugcccaggcgaacauucagcucaucaauaaggccgugaacgcucugauuaaugaccaacuuaucaugaagaaccaucugcgcgauauuaugggcauccccuauugcaauuacuccaaauauugguaccucaaccacacagucaccgggaagacaagccugccuagauguuggcuggugucuaauggauccuaccucaacgaaacccacuucagcgacgacaucgaacagcaggccgauaauaugauuacggagcugcuucaaaaagaguauauggaccggcagggcaagacaccgcuggggcucguggaucuguuugucuucucuaccagcuuuuaccugaucuccauuuuccuucaccucguuaaaauccccacccaucgccacgugauuggaaagccuugccccaaaccucauagacugaaccacaugggcaucuguucuugcggccuguauaagcaccccggggugccggucaaguggaaacggugaggacuagucccuguucccagagcccacuuuuuuuucuuuuuuugaaauaaaauagccugucuuucagaucuaaaaaaaaaaaaaaaaaaaaaaaaaaaaaaaaaaaaaaaaaaaaaaaaaaaaaaaaaaaaaaaaaaaaaaaaaaaaaaaaaaaaaaaaaaaaaaaaaaaa

SEQ ID NO: 30650 - RNA, 1740 nt, Artificial Sequence
  mRNA product Design a-2 (A100) comprising derived and/or modified sequence from LASV(Nig08-A19;Clade III)__ADU56618__GPCmut6 (opt5)
aggagaguccgcucagccagguugcagaagcggcuuagcguguguccuaaucuucucucugcguguagguaggccugugccgcaaacaagcuuaccaugggccagaucgugaccuucuuucaagaggucccccacguuauugaagaggugaugaacaucgugcugauugcccucagcauccuggcuauucuuaaggggcuguacaauaucgccacaugcggacucaucggccuggucacguuccuucugcucuccgggagaucuuguagcaugaccuauaaaggaguguacgaacugcagacacuggagcucaacaugaauacccugaacaugugcaugccucuuuccuguacaaagaauaacucucaucacuauauuaugguuggcaaugaaaccgggcuggagcucacacugaccaacacgagccuucugcaucacaaauuuugcaaucucuccgacgcgcauaagaaaaaccuguacgaucacacccugaugucuaucauuagcacauuccaccucuccaucccgaauuuuaaccaguaugaggcuaugagcugugacuucaauggaggcaagauuaccgugcaguacaaccugucucauuccuaugccaucgaugccgcuaaucacugcggcacagucgccaacggggugcuucaaaccuuuaugcggauggcuuggggaggcagcuacauugcccuggacucugggcgcggaaagugggauuguaucaugacguccuaccaguaucucaucauucagaacacaaccugggaagaccauugccaguucagcagacccucuccuaucggcuaccuggggcuucugucccaacggacacgcgauauuuauaucagcagacggcuccugggaaccuuuaccuggacacuguccgacucugagggcaaugaaacgcccggcggguacugucucacccgcuggaugcugauugaggcggagcuuaaaugcuucggaaacacagccguugcuaaguguaaugaaaaacacgaugaggaauuuugcgacaugcugagacucuucgauuuuugcaagcaggccauccggcgccugaaagcuccugcccagaugagcauccagcuuauuaacaaggcggugaaugcccugaucaacgaccaacucauuaugaagaaucaccugagagauaucaugggcauucccuauuguaacuacuccaaauauugguaccugaaucauaccagcacagggcggaccucucucccucgcugcuggcuggucuccaacggaagcuaccuuaaugagacgcacuucucugacgacaucgaacagcaggcugauaacaugaucacagagaugcugcaaaaggaguaucucgacagacagggcaaaaccccgcuggggcugguggaucuuuucguguuuagcaccuccuucuaccucauuucuaucuuucugcaucuggucaagauucccacacaccggcauaucguuggaaaaccuugucccaagccucaccgccucaaucacaugggcauuugcagcuguggccuguauaaacagcccggggugccggugagauggaagcggugaggacuagucccuguucccagagcccacuuuuuuuucuuuuuuugaaauaaaauagccugucuuucagaucuaaaaaaaaaaaaaaaaaaaaaaaaaaaaaaaaaaaaaaaaaaaaaaaaaaaaaaaaaaaaaaaaaaaaaaaaaaaaaaaaaaaaaaaaaaaaaaaaaaaa

SEQ ID NO: 30651 - RNA, 1743 nt, Artificial Sequence
  mRNA product Design a-2 (A100) comprising derived and/or modified sequence from LASV(G1180-SLE-2010;Clade IV)__AIT17168__GPCmut6 (opt5)
aggagaguccgcucagccagguugcagaagcggcuuagcguguguccuaaucuucucucugcguguagguaggccugugccgcaaacaagcuuaccaugggccagaucgugaccuucuuucaagaggucccccacguuauugaagaggugaugaacaucgugcugauugcccucagcauccuggcuguccuuaaggggcuguacaauuucgccacaugcggacucgugggccugcuuacguuucugcuccugugugggagauccugcaccgcgucucgguauaaaggaguuuacgaacugcagacacucgagcugaacauggaaacccuuaauauguguaugccucugagcugcacaaagaacaauucccaucacuauauuauggugggcaacgagaccgggcucgagcugacacuuaccaauacgucuaucaucaaccauaaauucuguaaucugagcgacgcucacaagaaaaaccucuacgaucaugcccugauguccauuaucucuaccuuucaccugagcauuccgaauuucaaccaguaugaagccauguccugcgacuuuaauggaggcaagaucagcguccaguacaaccucucucacuccuaugcuggcgaugccgcuaaucauugugggacaguggccaacggaguucugcaaaccuucaugcgcauggcguggggcgggagcuacauugcccuugacucuggacacggcuccugggauugcaucaugacaagcuaccaguaucugauuauccagaacaccacgugggaggaccauugucaguuuucuagacccuccccuaucggguaccucggacugcuuagccaacggacacgcgauauuuauaucuccagacggcugcucggcaccuucacauggacccugucugacagcgaaggcaaggauacccccgggggauacugccugacacgcuggaugcucauugaggcugagcugaaauguuuuggcaauacggccguggcuaagugcaacgaaaaacacgacgaggaguucugcgauaugcuuagacuguuugacuucuguaagcaggccauccagcggcucaaagcgccugcccagauguccauucaacugaucaauaaggcugucaacgcccuuaucaaugaucagcugauuaugaagaaccaccuccgcgacaucauggggauucccuauugcaauuacagcaaauauugguaccugaaccauaccacaaccggaaagacaucucugccuaaauguuggcucguguccaauggcagcuaccugaacgaaacccacuucucugacgauaucgaacagcaagcugacaauaugauuacggagaugcuucagaaggaguauauggaaagacaggggaaaacaccgcugggacucguggaucuguuugucuucagcaccuccuuuuaccugaucucuaucuuccuucaucucguuaagauucccacccaccggcauaucgugggcaaaagcugcccuaagccccaccgccugaaccacaugggcauuuguuccugcgggcuguauaagcagccuggagugcccgucaaauggaagagaugaggacuagucccuguucccagagcccacuuuuuuuucuuuuuuugaaauaaaauagccugucuuucagaucuaaaaaaaaaaaaaaaaaaaaaaaaaaaaaaaaaaaaaaaaaaaaaaaaaaaaaaaaaaaaaaaaaaaaaaaaaaaaaaaaaaaaaaaaaaaaaaaaaaaa

SEQ ID NO: 30652 - RNA, 1743 nt, Artificial Sequence
  mRNA product Design a-2 (A100) comprising derived and/or modified sequence from LASV(G1442-SLE-2011;Clade IV)__AIT17180__GPCmut6 (opt5)
aggagaguccgcucagccagguugcagaagcggcuuagcguguguccuaaucuucucucugcguguagguaggccugugccgcaaacaagcuuaccaugggccagaucgugaccuucuuucaagaggucccccacguuauugaagaggugaugaacaucgugcugauugcccucagcauccuggcuguccuuaaggggcuguacaauguggccacaugcggacucauuggccugguuacguuccuucugcucugugggagauccugcaccacaacccuguauaaaggaguguacgaacugcagacacucgagcugaacauggaaacccuuaauauguguaugccucugucuugcacaaagaacaauagccaucacuauauccgggucggcaacgagaccgggcucgagcugacgcuuaccaauacauccaucauuaaccauaaauuuuguaaucugucugacgcgcacaagaaaaaccucuacgaucaugcucugaugagcaucauuuccaccuuccaccugucuaucccgaauuuuaaccaguaugaagccaugagcugcgacuucaauggaggcaagauuuccgugcaguacaaccucagccacucuuaugccggcgaugcugccaaucauugugggacaguugcuaacggagugcugcaaaccuuuaugcgcauggccuggggcggguccuacaucgcgcuugacagcggaagaggcaacugggauugcauuaugacgucuuaccaguaucugaucauccagaauacaaccugggacgaucacugucaguucucccggcccagcccuauuggguaccucggacugcuuucucaacgcacaagagacgucuauaucucccggcgccugcucggcaccuuuaccuggacacugagcgauuccgagggcaaggacacgcccgggggauacugccugaccagauggaugcucauugaagccgagcugaaauguuucggcaacacagcuguggccaagugcaaugagaaacaugaugaagaguuuugcgacaugcuucggcuguucgauuuuuguaagcaggcuauccagcgccucaaagccccugcgcagaugucuauucaacugaucaacaaggccgugaaugcucuuaucaacgaccagcugauuaugaagaaucaccucagagacaucauggggauucccuauugcaacuacagcaaauauugguaccugaauaacaccgccacaggaaagaccucccugccuaaauguuggcucaucagcaauggcucuuaccugaacgaaacgcacuucuccgaugacauugagcaggaagcugauaauaugaucacagagaugcuucaaaaggaguauauggaacggcaggggaaaaccccgcugggacucgucgaccuguucguuuuuagcaccucuuucuaccugaucagcauuuuucuucaucucgugaagauccccacacaccgccauauugugggcaaauccugcccuaagccccacagacugaaccauaugggcaucuguucuugcgggcuguauaagcagccuggaguccccgugcgguggaaacgcugaggacuagucccuguucccagagcccacuuuuuuuucuuuuuuugaaauaaaauagccugucuuucagaucuaaaaaaaaaaaaaaaaaaaaaaaaaaaaaaaaaaaaaaaaaaaaaaaaaaaaaaaaaaaaaaaaaaaaaaaaaaaaaaaaaaaaaaaaaaaaaaaaaaaa

SEQ ID NO: 30653 - RNA, 1743 nt, Artificial Sequence
  mRNA product Design a-2 (A100) comprising derived and/or modified sequence from LASV(G3010-SLE-2013;Clade IV)__AIT17344__GPCmut6 (opt5)
aggagaguccgcucagccagguugcagaagcggcuuagcguguguccuaaucuucucucugcguguagguaggccugugccgcaaacaagcuuaccaugggccagaucgugaccuucuuucaagaggucccccacguuauugaagaggugaugaacaucgugcugauugcccucagcauccuggcuguccuuaaggggcuguacaauuucgccacaugcggacucgugggccugguuacguuucuucugcucugugggagauccugcaccacaucucuguauaaaggaguguacgaacugcagacccucgagcugaacauggaaacacuuaauauguguaugccucugagcugcaccaagaacaauucccaucacuauauuauggucggcaacgagacagggcucgagcugacccuuacgaauaccucuaucaucaaccauaaauucuguaaucugagcgacgcgcacaagaaaaaccucuacaaucaugcucugauguccauuaucucuacauuucaccugagcauuccgaacuucaaucaguaugaagccauguccugcgauuuuaacggaggcaagaucagcgugcaguacaaucucucucacuccuaugccggcgacgcugccagccauugugggaccguugcuaacggagugcugcaaacauucaugcggauggccuggggcgggucuuacauugcgcuugauuccggauacggcaagugggacugcaucaugaccagcuaucaguaccugauuauccagaacacgacaugggaggaucacugucaguuuucucgccccuccccuaucggguaucucggacugcuuagccaaagaacccgggacauuuacaucucccgcagacugcucggcacauucaccuggacccugucugauagcgaaggcaaagacacacccgggggauauugccugacgcgguggaugcucauugaggccgagcugaaguguuuuggcaauaccgcugucgccaaaugcaacgaaaagcaugaugaggaguucugcgacaugcuucgccuguuugauuucuguaaacaggcuauccagagacucaagaccccugcccagauguccauucaacugaucaauaaggcggugaacgcccuuaucaaugaccagcugauuaugaaaaaccaccuccgggauaucauggggauucccuacugcaauuauagcaaguacugguaccugaaccacacaacaaccggaaaaacgucucugccuaaguguuggcucguguccaauggcagcuaucugaacgaaacacauuucucugacgacaucgaacagcaagcugauaauaugauuaccgagaugcuucagaaagaguacauggaacgccaggggaagaccccgcugggacucgucgaccuguuuguuuucagcacauccuuuuaucugaucucuaucuuccuucaccucgugaaaauucccacccauagacacaucgugggcaagagcugcccuaagccccaucggcugaaccacaugggcauuuguuccugcgggcuguacaaacagccuggaguccccgugcgcuggaagagaugaggacuagucccuguucccagagcccacuuuuuuuucuuuuuuugaaauaaaauagccugucuuucagaucuaaaaaaaaaaaaaaaaaaaaaaaaaaaaaaaaaaaaaaaaaaaaaaaaaaaaaaaaaaaaaaaaaaaaaaaaaaaaaaaaaaaaaaaaaaaaaaaaaaaa

SEQ ID NO: 30654 - RNA, 1743 nt, Artificial Sequence
  mRNA product Design a-2 (A100) comprising derived and/or modified sequence from LASV(G502-SLE-2009;Clade IV)__AIT17126__GPCmut6 (opt5)
aggagaguccgcucagccagguugcagaagcggcuuagcguguguccuaaucuucucucugcguguagguaggccugugccgcaaacaagcuuaccaugggccagaucgugaccuucuuucaagaggucccccacguuauugaagaggugaugaacaucgugcugauugcccucagcauccuggcuguccuuaaggggcuguacaauuucgccacaugcggacucgugggccugcuuacguuucugcuccugugugggagauccugcaccacaggacuguauaaaggcguuuacgaacuccagacccuggagcuuaacauggaaacacugaauauguguaugccucucucuugcaccaagaacaauagccaucacuauauuaugguggggaacgagacaggacuggagcuuacccugacgaauaccuccaucaucaaccauaaauucuguaaucucucugacgcgcacaagaaaaaccuguacgaucaugcucugaugagcauuaucuccacauuucaccucucuauuccgaauuucaaccaguaugaagccaugagcugcgacuuuaauggcggcaagaucuccguccaguacaaccugagccacucuuaugccggggaugcugccgaccauuguggaaccguggcuaauggcguucuucaaacauucaugcggauggccuggggaggguccuacauugcgcuggauagcggccgcgggagaugggacugcaucaugaccucuuaccaguaucucauuauccagaacacgacaugggaggaucacugucaguuuucccggcccagcccuaucggauaccugggccuucugucucaacgcaccagagacauuuauaucucccggcgccuccugggcacauucaccuggacccugagcgauuccgaagggaaggacacacccggaggcuacugccucacgagauggaugcugauugaggccgagcuuaaauguuuugggaacaccgcuguggccaagugcaaugaaaaacaugaugaggaguucugcgacaugcugcggcucuuugauuucuguaagcaggcuauccagcgccugaaagccccugcgcagaugucuauucaacuuaucaacaaggccgucaaugcucugaucaacgaccagcucgugaugaagaaucaccugagagacauuaugggaauccccuauugcaacuacagccgguauugguaccugaaucacacaaccacaggccgcaccucccucccuaaauguuggcuggugagcaacgggucuuaccuuaaugaaacgcauuucuccgaugacauugaacagcaagccgauaacaugaucacagagaugcugcagaaggaguauauggaaagacagggaaaaaccccgcucggccuggucgaccuguuuguuuucagcaccucuuuuuaccuuauuagcaucuuccuccaccuggugaagauccccacacaucggcacauugugggcaaauccugcccuaagccccaucgccugaaucacauggggaucuguucuugcggacucuauaaacagccuggcguccccgugaaguggaagagaugaggacuagucccuguucccagagcccacuuuuuuuucuuuuuuugaaauaaaauagccugucuuucagaucuaaaaaaaaaaaaaaaaaaaaaaaaaaaaaaaaaaaaaaaaaaaaaaaaaaaaaaaaaaaaaaaaaaaaaaaaaaaaaaaaaaaaaaaaaaaaaaaaaaaa

SEQ ID NO: 30655 - RNA, 1743 nt, Artificial Sequence
  mRNA product Design a-2 (A100) comprising derived and/or modified sequence from LASV(G733-SLE-2010;Clade IV)__AIT17154__GPCmut6 (opt5)
aggagaguccgcucagccagguugcagaagcggcuuagcguguguccuaaucuucucucugcguguagguaggccugugccgcaaacaagcuuaccaugggccagaucgugaccuucuuucaagaggucccccacguuauugaagaggugaugaacaucgugcugauugcccucagcauccuggcuguccuuaaggggcuguacaauuucgccacaugcggaauugugggccucguuuccuuucugcuucugugugggagaucuugcacgaccagccucuauaaaggaguguacgaacugcagacacuggagcucaacauggaaacccugaauauguguaugccucuuuccugcacaaagaacaauucucaucacuauaucauggucggcaacgagaccgggcuggagcucacacugaccaauacgagcaucauuaaccauaaauucuguaaucuuuccgacgcgcacaagaaaaaccuguacgaucaugcucucaugucuaucauuagcaccuuucaccuguccaucccgaauuucaaccaguaugaagccaugagcugcgacuuuaauggaggcaagauuucugugcaguacaaccugucccacagcuaugccggcgaugcugccaaucauugugggacaaucgcuaacggaguucuccaaaccuucaugcggauggccuggggcgggucuuacauugcgcuggacuccggacgcgauagaugggacugcaucaugacaagcuaccaguaucuuaucauucagaacaccacgugggaggaucacugucaguuuucucggcccuccccuaucggcuaccuggggcuccugagccaacgcacaagagacauuuauaucucccggcgccuucugggaaccuucacauggacccucucugauagcgaaggcaaggacacccccggcggguacugccugacaagauggaugcugauugaggccgagcucaaauguuuuggaaauacggcuguggccaagugcaacgaaaaacaugaugaggaguucugcgacaugcugcggcuuuuugauuucuguaagcaggcuauccagcgccugaaagccccugcgcagauguccauccaacucauuaauaaggccgucaacgcucugaucaaugaccagcuuauuaugaagaaccaccugagagacaucaugggcauucccuauugcaauuacagcaaauauugguaccucaaccacaccacaaccgggaagacaucucugccuaaauguuggcugguguccaauggaagcuaccucaacgaaacccauuucucugaugacaucgaacagcaagccgauaauaugaucacggagaugcugcagaaggaguauauggaacggcagggcaaaacaccgcuugggcugguggaccucuuugucuucagcaccuccuuuuaccugauuucuaucuuccugcaccuuguuaagauucccacccaucgccacguggugggaaaaagcugcccuaagccccauagacucaaccacaugggcaucuguuccugcggccuguaugggcagccuggaguccccgugaaguggaaacggugaggacuagucccuguucccagagcccacuuuuuuuucuuuuuuugaaauaaaauagccugucuuucagaucuaaaaaaaaaaaaaaaaaaaaaaaaaaaaaaaaaaaaaaaaaaaaaaaaaaaaaaaaaaaaaaaaaaaaaaaaaaaaaaaaaaaaaaaaaaaaaaaaaaaa

SEQ ID NO: 30656 - RNA, 1743 nt, Artificial Sequence
  mRNA product Design a-2 (A100) comprising derived and/or modified sequence from MOPV/LASV reassortant(IGS-1;Clade IV)__AFY05576__GPCmut6 (opt5)
aggagaguccgcucagccagguugcagaagcggcuuagcguguguccuaaucuucucucugcguguagguaggccugugccgcaaacaagcuuaccaugggccagaucgugaccuucuuucaagaggucccccacguuauugaagaggugaugaacaucgugcugauugcccucagcguccuggcugugcuuaaggggcuguacaauuucgccacaugcggacucguuggccuggugacguuucuucugcucugugggagauccugcaccacaucucuguauaaaggagucuacgaacugcagacccucgagcugaacauggaaacacuuaauauguguaugccucugagcugcaccaagaacaauucccaucacuauaucauggugggcaacgagacagggcucgagcugacccuuacgaauaccucuauuaucaaccauaaauucuguaaucugagcgacgcgcacaagaaaaaccucuacgaucaugcucugauguccaucauuucuacauuucaccugagcaucccgaauuucaaccaguaugaagccauguccugcgacuuuaauggaggcaagauuagcguucaguacaaccucucucacuccuaugccggcgaugcugccaaucauugugggaccguggcuaacggaguccugcaaacauucaugcggauggccuggggcgggagcuacaucgcgcuugacucuggacgcggcaacugggauugcauuaugaccuccuaccaguaucugaucauucagaauacgacaugggaggaccacugucaguuuagcagacccucuccuaucggguaccucggacugcuuucccaacggacccgcgauaucuauauuagcagacggcugcucggcacauucaccuggacccuguccgacucugaaggcgaggauacacccgggggauacugccugacgcgcuggaugcucaucgaggccgaacugaaguguuuuggcaacaccgcuguggccaaaugcaaugagaagcaugacgaagaguucugcgauaugcuuagacuguuugacuucuguaaacaggcuauucagcggcucaaggccccugcgcagaugagcauccaacugauuaacaaagccgugaaugcucuuaucaacgaucagcugaucaugaagaaucaccuccgcgacauuauggggauccccuauugcaacuacuccaaguauugguaccugaaucacacaaccacaggaagaaccagccugccuaaauguuggcucgucucuaacggcuccuaccugaaugaaacgcauuucagcgacgauauugagcagcaagccgacaacaugaucacagagaugcuucagaaggaauauauggagcggcaggggaaaaccccgcugggacucguugaucuguuuguguucucuaccagcuuuuaccugauuuccaucuuccuucaccucgugaagauccccacacaucgccacauugucggcaaaucuugcccuaagccccauagacugaaucacaugggcaucuguagcugcgggcuguauaaacagccuggagugcccguuaaguggaagcggugaggacuagucccuguucccagagcccacuuuuuuuucuuuuuuugaaauaaaauagccugucuuucagaucuaaaaaaaaaaaaaaaaaaaaaaaaaaaaaaaaaaaaaaaaaaaaaaaaaaaaaaaaaaaaaaaaaaaaaaaaaaaaaaaaaaaaaaaaaaaaaaaaaaaa

SEQ ID NO: 30657 - RNA, 1743 nt, Artificial Sequence
  mRNA product Design a-2 (A100) comprising derived and/or modified sequence from LASV(LM765-SLE-2012;Clade IV)__AIT17814__GPCmut6 (opt5)
aggagaguccgcucagccagguugcagaagcggcuuagcguguguccuaaucuucucucugcguguagguaggccugugccgcaaacaagcuuaccaugggccagaucgugaccuucuuucaagaggucccccacguuauugaagaggugaugaacaucgugcugauugcccucagcauccuggcuguccuuaaggggcuguacaauuucgccacaugcggacucgugggccugguuacguuucuucugcucugugggagauccugcaccacaucucuguauaaaggaguguacgaacugcagacccucgagcugaacauggaaacacuuaauauguguaugccucugagcugcaccaagaacaauucccaucacuauauuauggucggcaacgagacagggcucgagcugacccuuacgaauaccucuaucaucgaccauaaauucuguaaccugagcgaugcgcaccggaagaaucucuacgaccaugcucugauguccauuaucucuacauuucaccugagcauuccgaacuucaaucaguaugaagccauguccugcgauuuuaacggaggcaaaaucagcgugcaguacaaucucucucacuccuaugccaaggacgcugccgaucauuguggcaccguugcuaacggggugcugcaaacauucaugcgcauggccuggggaggcagcuacauugcgcuugacucugggagaggacggugggauugcaucaugaccuccuaccaguaucugauuauccagaauacgacaugggaggaccacugucaguuuagccgccccucuccuaucggcuaccucgggcugcuuucccaaagaacccgggauauuuauaucagccgcagacugcucggaacauucaccuggacccuguccgacucugaaggcaaggauacacccggcggguacugccugacgcgguggaugcucauugaggccgagcugaaauguuuuggaaacaccgcugucgccaagugcaacgaaaaacaugacgaggaguucugcgauaugcuucgccuguuugacuucuguaagcaggcuauccagagacucaaagccccugcgcagaugagcauucaacugaucaauaaggccgugaacgcucuuaucaaugaccagcugauuaugaagaaccaccuccgggauaucaugggcauucccuauugcaauuacuccaaauauugguaccugaaccacacaaccacagggaagaccagccugccuaaauguuggcucgugucuaauggauccuaccugaacgaaacgcauuucagcgacgauaucgaacagcaagccgacaauaugauuacagagaugcuucagaaggaguauauggaacgccagggcaaaaccccgcuggggcucgucgaucuguuuguuuucucuaccagcuuuuaccugaucuccaucuuccuucaccucgugaagauucccacacauagacacaucgugggaaaaccuugccccaagccucaucggcugaaccacaugggcauuuguucuugcggccuguauaagcagcccggggucccggugaaauggaagcgcugaggacuagucccuguucccagagcccacuuuuuuuucuuuuuuugaaauaaaauagccugucuuucagaucuaaaaaaaaaaaaaaaaaaaaaaaaaaaaaaaaaaaaaaaaaaaaaaaaaaaaaaaaaaaaaaaaaaaaaaaaaaaaaaaaaaaaaaaaaaaaaaaaaaaa

SEQ ID NO: 30658 - RNA, 1743 nt, Artificial Sequence
  mRNA product Design a-2 (A100) comprising derived and/or modified sequence from LASV(LM776-SLE-2012;Clade IV)__AIT17824__GPCmut6 (opt5)
aggagaguccgcucagccagguugcagaagcggcuuagcguguguccuaaucuucucucugcguguagguaggccugugccgcaaacaagcuuaccaugggccagaucgugaccuucuuucaagaggucccccacguuauugaagaggugaugaacaucgugcugauugcccucagcauccuggcuguccuuaaggggcuguacaauuucgccacaugcggacucgugggccugguuacguuucuucugcucugugggagauccugcaccacaucuguguauaaaggagucuacgaacugcagacccuggagcucaacauggaaacacugaauauguguaugccucuuagcugcaccaagaacaauucccaucacuauauuauggugggcaacgagacagggcuggagcucacccugacgaauaccucuaucaucaaccauaaauucuguaaucuuagcgacgcgcacaagaaaaaccuguacgaucaugcucucauguccauuaucucuacauuucaccugagcauuccgaauuucaaccaguaugaagccauguccugcgacuuuaauggaggcaagaucagcguucaguacaaccugucucacuccuaugccggcgaugcugccaaucauugugggaccguggcuaacggaguccuccaaacauucaugcggauggccuggggcgggagcuacauugcgcuggacucuggacacggcaagugggauugcaucaugaccuccuaccaguaucuuauuauccagaacacgacaugggaggaccauugucaguuuagccgccccucuccuaucggguaccugggacuccugucccaaagaacccgggauauuuauaucagccgcagacuucugggcacauucaccuggacccucuccgacucugaaggcaaagauacacccgggggauacugccugacgcgguggaugcugauugaggccgagcucaaguguuuuggcaauaccgcuguggccaaaugcaacgaaaagcacgacgaggaguucugcgauaugcugcgccuuuuugacuucuguaaacaggcuauccagagacugaaggccccugcgcagaugagcauucaacucaucaauaaggccgugaacgcucugaucaaugaucagcuuauuaugaaaaaccaucugcgggacaucauggggauucccuauugcaauuacuccaaguauugguaccucaaccacacaaccacaggaaaaaccagccugccuaaguguuggcuggucucuaauggcuccuaccucaacgaaacgcacuucagcgacgauaucgaacagcaagccgacaauaugauuacagagaugcugcagaaagaguauauggaacgccaggggaagaccccgcuuggacugguugaucucuuuguguucucuaccagcuuuuaccugaucuccaucuuccugcaucuugugaaaauucccacacacagacauaucgucggcaagucuugcccuaagccccaccggcucaaccacaugggcauuuguagcugcgggcuguauaaacagccuggagugcccguucgcuggaagagaugaggacuagucccuguucccagagcccacuuuuuuuucuuuuuuugaaauaaaauagccugucuuucagaucuaaaaaaaaaaaaaaaaaaaaaaaaaaaaaaaaaaaaaaaaaaaaaaaaaaaaaaaaaaaaaaaaaaaaaaaaaaaaaaaaaaaaaaaaaaaaaaaaaaaa

SEQ ID NO: 30659 - RNA, 1743 nt, Artificial Sequence
  mRNA product Design a-2 (A100) comprising derived and/or modified sequence from LASV(Mad39;Clade IV)__ANH09722__GPCmut6 (opt5)
aggagaguccgcucagccagguugcagaagcggcuuagcguguguccuaaucuucucucugcguguagguaggccugugccgcaaacaagcuuaccaugggccagaucgugaccuucuuucaagaggucccccacguuauugaagaggugaugaacaucgugcugauugcccucagcauccuggcuguccuuaaggggcuguacaauguggccacaugcggacucauuggccugguuacguuccuucugcucugugggagauccugcaccacaacccuguauaaaggaguguacgaacugcaggcgcucgagcugaacauggaaacacuuaauauguguaugccucugucuugcaccaagaacaauagccaucacuauauccgggucggcaacgagacagggcucgagcugacccuuacgaauaccucccugaucaaccauaaauuuuguaaucucucugacgcucacaagaaaaaccuguacgaucaugcccugaugagcauuaucuccacauuccaccucucuauuccgaauuuuaaccaguaugaagccaugagcugcgacuucaaugauggaaagaucuccgugcaguacaaccugagccacaccuaugcuggcgacacagccaaucauuguggcaccguugcuaacggggugcuucaaacguuuaugcgcauggccuggggaggcucuuacauugcgcuggauuccgggagaggaggcugggacugcaucaugacaagcuaccaguaucucauuauccagaacaccacaugggaggaucacugucaguucucucggcccuccccuaucggguaccugggacuucugagccaacgcaccagagacauuuauaucucucggcgccuccugggcaccuuuacauggacgcuguccgauagcgaaggcaaggacacccccgggggauacugccucacaagauggaugcugauugaggccgagcuuaaauguuucggcaauaccgcugucgccaagugcaacgaaaaacaugaugaggaauuuugcgacaugcugcgccucuucgauuuuuguaagcaggcuauccagcggcugaaagccccugcgcagauguccauucaacuuaucaauaaggccgugaacgcucugaucaaugaccagcucauuaugaagaaccaccugagagacaucauggggauucccuauugcaauuacucuaaauauugguaccugaaccacacagugaccggaaagacgagccucccuaaauguuggcuggucuccaauggcagcuaccuuaacgagacacauuucucugaugacaucgaacagcaagccgauaauaugauuaccgagaugcugcagaaggaguauauggaacggcaggggaaaaccccgcucggacugguugaccuguucguguuuuccaccagcuucuaccuuaucucuaucuuucuccaccuggugaagauucccacacaucgccacgucgugggcaaaccuugccccaagccucauagacugaaccacaugggcaucuguagcugcggguucuauaagcagcccggaguuccggugcgguggaaacgcugaggacuagucccuguucccagagcccacuuuuuuuucuuuuuuugaaauaaaauagccugucuuucagaucuaaaaaaaaaaaaaaaaaaaaaaaaaaaaaaaaaaaaaaaaaaaaaaaaaaaaaaaaaaaaaaaaaaaaaaaaaaaaaaaaaaaaaaaaaaaaaaaaaaaa

SEQ ID NO: 30660 - RNA, 1743 nt, Artificial Sequence
  mRNA product Design a-2 (A100) comprising derived and/or modified sequence from LASV(Z0947-SLE-2011;Clade IV)__AIT17840__GPCmut6 (opt5)
aggagaguccgcucagccagguugcagaagcggcuuagcguguguccuaaucuucucucugcguguagguaggccugugccgcaaacaagcuuaccaugggccagaucgugaccuucuuucaagaggucccccacguuauugaagaggugaugaacaucgugcugauugcccucagcauccuggcuguccuuaaggggcuguacaauuucgccacaugcggacucgugggccugguuacguuucuucugcucugugggagauccugcaccauuucucuguauaaaggaguguacgaacugcagacacucgagcugaacauggaaacccuuaauauguguaugccucugagcugcacaaagaacaauucccaucacuauaucauggucggcaacgagaccgggcucgagcugacacuuaccaauacgucuaucauuaaccauaaauucuguaaucugagcgacgcgcacaagaaaaaccucuacgaucaugcucugauguccaucauuucuaccuuucaccugagcaucccgaauuucaaccaguaugaagccauguccugcgacuuuaauggaggcaagauuagcgugcaguacaaccucucucacuccuaugccggcgaugcugccaaucauugugggacaguugcuaacggagugcugcaaaccuucaugcggauggccuggggcgggagcuacaucgcgcuugacucuggacgcgauagaugggacugcauuaugacauccuaccaguaucugaucauccagaacaccacgugggaggaucacugucaguuuagccggcccucuccuauuggcuaccucgggcugcuuucccaacgcacaagagacaucuauauuagccggcgccugcucggaaccuucacauggacccuguccgauucugaaggcaaggacacccccggcggguacugccugacaagauggaugcucaucgaggccgagcugaaauguuuuggaaauacggcugucgccaagugcaacgaaaaacaugaugaggaguucugcgacaugcuucggcuguuugauuucuguaagcaggcuauucagcgccucaaagccccugcgcagaugagcauccaacugaucaauaaggccgugaacgcucuuauuaaugaccagcugaucaugaagaaccaccucagagacauuaugggcauccccuauugcaauuacuccaaauauugguaccugaaccacaccacaaccgggaagacaagccugccuaaauguuggcucgugucuaauggauccuaccugaacgaaacccauuucagcgaugacauugaacagcaagccgauaauaugaucacggagaugcuucagaaggaguauauggaacggcagggcaaaacaccgcuggggcucgucgaccuguuuguuuucucuaccagcuuuuaccugaucuccauuuuccuucaccucgugaagauccccacccaucgccacauugugggaaaaccuugccccaagccucauagacugaaccacaugggcaucuguucuugcggccuguauaagcagcccggggucccggugaaauggaagcggugaggacuagucccuguucccagagcccacuuuuuuuucuuuuuuugaaauaaaauagccugucuuucagaucuaaaaaaaaaaaaaaaaaaaaaaaaaaaaaaaaaaaaaaaaaaaaaaaaaaaaaaaaaaaaaaaaaaaaaaaaaaaaaaaaaaaaaaaaaaaaaaaaaaaa

SEQ ID NO: 30661 - RNA, 1781 nt, Artificial Sequence
  mRNA product Design b-4 (hSL-A64-N5) comprising derived and/or modified sequence from LASV(Josiah;Clade IV)__NP_694870__GPCmut6 (opt1)
aggagagucccgcagucggcguccagcggcucugcuuguucgugugugugucguugcaggccuuauucaagcuuaccaugggccagaucgugaccuucuuccaggaggucccccacgugaucgaggaggugaugaacaucguccugaucgcccucagcgugcuggccgugcugaaggggcucuacaacuucgcgaccugcggccuggucgggcuggugacguuccuccugcugugcggccgcuccugcaccaccagccucuacaaggggguguacgagcugcagacccuggagcucaacauggagacgcugaacaugugcaugccgcuguccugcaccaagaacaacagccaccacuacaucauggucggcaacgagaccggccucgagcugacgcugaccaacaccuccaucaucaaccacaaguucugcaaccucagcgacgcccacaagaagaaccuguacgaccacgcccugauguccaucaucagcaccuuccaccucuccauccccaacuucaaccaguacgaggccaugagcugcgacuucaacgggggcaagaucuccgugcaguacaaccugagccacuccuacgccggggacgcggccaaccacugcggcacgguggccaacgggguccugcagaccuucaugcggauggccuggggcggcagcuacaucgcgcucgacuccgggcgcggcaacugggacugcaucaugaccagcuaccaguaccugaucauccagaacaccacgugggaggaccacugccaguucucccggcccagccccaucggguaccugggccuccugucccagcgcacccgggacaucuacaucagccgccggcugcucggcaccuucaccuggacgcugagcgacuccgaggggaaggacaccccgggcggguacugccugacccgcuggaugcucaucgaggccgagcugaagugcuucggcaacaccgccguggccaagugcaacgagaagcacgacgaggaguucugcgacaugcugcggcuguucgacuucugcaagcaggccauccagcgccugaaggcgcccgcccagaugagcauccagcugaucaacaaggccgugaacgcccucaucaacgaccagcugaucaugaagaaccaccuccgggacaucauggggauccccuacugcaacuacuccaaguacugguaccucaaccacacgaccaccggccgcaccagccugcccaagugcuggcuggucuccaacggcagcuaccucaacgagacgcacuucuccgacgacaucgagcagcaggccgacaacaugaucaccgagaugcugcagaaggaguacauggagcggcaggggaagacgccccugggccucguggaccuguucguguucagcaccuccuucuaccugaucagcaucuuccugcaccucgucaagaucccgacccaccgccacaucguggggaaguccugccccaagccccaccggcugaaccacaugggcaucugcagcugcgggcuguacaagcagcccggcgugccggucaaguggaagcgcugaggacuaguaauaaggaaacuguaugaaugucugugggcaggaagugaagagauccuucuguaaagguuuuuggaauuaugucugcugaauaauaaacuuuuuugaaauaauaaaucugguagaaaaaugagaucucaaaggcucuuuucagagccaccaaaaaaaaaaaaaaaaaaaaaaaaaaaaaaaaaaaaaaaaaaaaaaaaaaaaaaaaaaaaaaaaagaauu

SEQ ID NO: 30662 - RNA, 1778 nt, Artificial Sequence
  mRNA product Design b-4 (hSL-A64-N5) comprising derived and/or modified sequence from LASV(LP;Clade I)__AAF86701__GPCmut6 (opt1)
aggagagucccgcagucggcguccagcggcucugcuuguucgugugugugucguugcaggccuuauucaagcuuaccaugggccagaucaucaccuucuuccaggaggugccccacgucaucgaggaggugaugaacaucgugcugaucgcccucagccugcuggccauccucaaggggcuguacaacaucgcgaccugcggcaucaucgggcuggucgccuuccucuuccugugcggcaaguccugcagccugacgcucaagggcggguacgagcugcagacccuggagcucaacauggagacccugaacaugugcaugccgcuguccugcacgaagaacagcucccaccacuacauccgcgugggcaacgagaccgggcucgagcugacccugaccaacacgagcaucaucaaccacaaguucugcaaccucuccgacgcccacaagaagaaccuguacgaccacgcccugaugagcaucaucuccaccuuccaccucagcauccccaacuucaaccaguacgaggccauguccugcgacuucaacggcgggaagaucagcgugcaguacaaccugucccacagcuacgcgggcgacgccgccgagcacugcgggaccgucgccaacggcgugcugcagaccuucaugcggauggcguggggcgggcgcuacaucgcccucgacuccggcaaggggaacugggacugcaucaugacgagcuaccaguaccugaucauccagaacaccaccugggaggaccacugccaguucucccggcccagccccaucggcuaccugggccuccugucccagcgcacccgggacaucuacaucagccgccggcugcucgggacguucaccuggacccugagcgacuccgagggcaacgagacccccgggggcuacugccugacgcgcuggaugcucaucgaggccgagcugaagugcuucgggaacaccgccguggccaagugcaacgagaagcacgacgaggaguucugcgacaugcugcggcuguucgacuucugcaagcaggcgauccgccggcugaaggcccccgcccagaugagcauccagcugaucaacaaggccgucaacgcccucaucaacgaccagcugaucaugaagaaccaccuccgcgacaucaugggcauccccuacugcaacuacuccaaguacugguaccucaaccacaccagcuccggccggaccagccugcccaagugcuggcugaucuccaacgggagcuaccucaacgagacgcaguucuccgacgacaucgagcagcaggcggacaacaugaucaccgagaugcugcagaaggaguacaucgagcgccagggcaagaccccgcuggggcucguggacaucuucaucuucagcaccuccuucuaccugaucagcaucuuccugcaccugaucaagaucccgacgcaccggcacaucgugggcaagcccugccccaagccccaccgccucaaccacaugggggucugcuccugcggccuguacaagcacccgggcgugcccaccaaguggaagcggugaggacuaguaauaaggaaacuguaugaaugucugugggcaggaagugaagagauccuucuguaaagguuuuuggaauuaugucugcugaauaauaaacuuuuuugaaauaauaaaucugguagaaaaaugagaucucaaaggcucuuuucagagccaccaaaaaaaaaaaaaaaaaaaaaaaaaaaaaaaaaaaaaaaaaaaaaaaaaaaaaaaaaaaaaaaaagaauu

SEQ ID NO: 30663 - RNA, 1778 nt, Artificial Sequence
  mRNA product Design b-4 (hSL-A64-N5) comprising derived and/or modified sequence from LASV(803213;Clade II)__AAF86703__GPCmut6 (opt1)
aggagagucccgcagucggcguccagcggcucugcuuguucgugugugugucguugcaggccuuauucaagcuuaccaugggccagaucaucaccuucuuccaggaggugccccacgucaucgaggaggugaugaacaucgugcugaucgcccucagccugcuggccauccucaaggggaucuacaacgucgcgaccugcggccuguucgggcugaucuccuuccuccugcugugcggccgcagcugcuccgugacguacaaggggguguacgagcuccagacccuggagcugaacauggccaaccucaacaugugcaugccgcugagcugcaccaagaacaacucccaccacuacaucauggucggcaacgagacgggccuggagcucacccugaccaacaccagcaucaucaaccacaaguucugcaaccuguccgacgcccacaagaagaaccucuacgaccacgcccugaugagcaucaucuccacguuccaccugagcauccccaacuucaaccaguacgaggccauguccugcgacuucaacgggggcaagaucagcgugcaguacaaccucucccacagcuucgcgguggacgccgccaaccacugcgggaccaucgccaacggcguccugcagaccuucaugcggauggcguggggcggguccuacaucgcccuggacagcggcaaggggaacugggacugcaucaugaccuccuaccaguaccucaucauccagaacacgaccugggaggaccacugccaguucagccgccccucccccaucggcuaccuggggcugcucagccagcggacccgcgacaucuacaucagccggcgccugcugggcaccuucacguggacccucuccgacagcgagggcaacgaggcccccgggggcuacugccugacccgguggaugcugaucgaggccgagcucaagugcuucgggaacaccgccguggcgaagugcaacgagaagcacgacgaggaguucugcgacaugcugcgccuguucgacuucugcaagcaggccaucaagcggcucaagacgcccgcccagauguccauccagcugaucaacaaggccgugaacgcccugaucaacgaccagcucaucaugaagaaccaccuccgcgacaucaugggcauccccuacugcaacuacagccgguacugguaccugaaccacaccgucaccgggaagaccucccugccccgcugcuggcuggugagcaacggcuccuaccugaacgagacgcacuucagcgacgacaucgagcagcaggcggacaacaugaucaccgagaugcuccagaaggaguacauggaccggcagggcaagaccccgcuggggcugguggaccucuucgucuucuccaccagcuucuaccugaucuccaucuuccugcaccuggugaagaucccgacgcaccgccacaucgugggcaagcccugccccaagccccaccggcucaaccacauggggaucugcagcugcggccuguacaagcacccggggguccccgugaaguggaagcgcugaggacuaguaauaaggaaacuguaugaaugucugugggcaggaagugaagagauccuucuguaaagguuuuuggaauuaugucugcugaauaauaaacuuuuuugaaauaauaaaucugguagaaaaaugagaucucaaaggcucuuuucagagccaccaaaaaaaaaaaaaaaaaaaaaaaaaaaaaaaaaaaaaaaaaaaaaaaaaaaaaaaaaaaaaaaaagaauu

SEQ ID NO: 30664 - RNA, 1778 nt, Artificial Sequence
  mRNA product Design b-4 (hSL-A64-N5) comprising derived and/or modified sequence from LASV(GA391;Clade III)__CAA36645__GPCmut6 (opt1)
aggagagucccgcagucggcguccagcggcucugcuuguucgugugugugucguugcaggccuuauucaagcuuaccaugggccagaucgugaccuucuuccaggaggucccccacgugaucgaggaggugaugaacaucguccugaucgcccucagcauccuggccauccugaaggggcucuacaacguggcgaccugcggccugaucgggcuggugacguuccuccugcuguccggccgcagcugcucccucaucuacaaggggaccuacgagcugcagacccuggagcucaacauggagacccugaacaugugcaugccgcugagcugcaccaagaacaacucccaccacuacauccgggucggcaacgagaccggccucgagcugacccugacgaacaccagcauccucaaccacaaguucugcaaccuguccgacgcccacaagcgcaaccuguacgaccacagccucauguccaucaucagcaccuuccaccuguccauccccaacuucaaccaguacgaggccaugagcugcgacuucaacgggggcaagaucaccgugcaguacaaccugucccacagcuucgccguggacgccgcggggcacugcggcacgcucgccaacgggguccugcagaccuucaugcggauggccuggggcggcuccuacaucgcccuggacagcgggcgcggcaacugggacugcaucaugaccuccuaccaguaccucaucauccagaacaccacgugggacgaccacugccaguucagccggcccucccccaucggguaccugggccugcucagccagcgcacccgggacaucuacaucagccgccggcugcugggcaccuucaccuggacgcucuccgacagcgaggggaacgagaccccgggcggguacugccugacccgcuggaugcugaucgaggcggagcucaagugcuucggcaacaccgccguggccaagugcaacgagaagcacgacgaggaguucugcgacaugcugcggcuguucgacuucugcaagcaggccauccgccggcucaagacgcccgcccagauguccauccagcugaucaacaaggcggugaacgcccugaucaacgaccagcucaucaugaagaaccaccuccgcgacaucauggggauccccuacugcaacuacagccgguacugguaccugaaccacaccuccaccggcaagaccagccugccccgcugcuggcugaucuccaacggcagcuaccugaacgagacgaaguucuccgacgacaucgagcagcaggccgacaacaugaucaccgagaugcuccagaaggaguacaucgaccggcaggggaagacgccccugggccuggucgaccuguucguguucagcaccuccuucuaccucaucagcaucuuccugcaccuggugaagaucccgacccaccgccacaucgucgggaagcccugccccaagccccaccggcucaaccacaugggcaucugcuccugcgggcuguacaagcagccgggcgugcccgugcgcuggaagcggugaggacuaguaauaaggaaacuguaugaaugucugugggcaggaagugaagagauccuucuguaaagguuuuuggaauuaugucugcugaauaauaaacuuuuuugaaauaauaaaucugguagaaaaaugagaucucaaaggcucuuuucagagccaccaaaaaaaaaaaaaaaaaaaaaaaaaaaaaaaaaaaaaaaaaaaaaaaaaaaaaaaaaaaaaaaaagaauu

SEQ ID NO: 30665 - RNA, 1781 nt, Artificial Sequence
  mRNA product Design b-4 (hSL-A64-N5) comprising derived and/or modified sequence from LASV(AV;Clade V)__CCA30314__GPCmut6 (opt1)
aggagagucccgcagucggcguccagcggcucugcuuguucgugugugugucguugcaggccuuauucaagcuuaccaugggccagaucgugaccuucuuccaggaggucccccacgugaucgaggaggugaugaacaucguccugaucgcccucagcauccuggccgugcugaaggggcucuacaacaucgcgaccugcggccugaucgggcugaucacguuccuccugcugugcggccgcuccugcagcuccaaccucuacaaggggguguacgagcugcagagccuggaccucaacauggagacccugaacaugugcaugccgcuguccugcaccaagaacaacagccaccacuacauccgggucggcaacgacacgggccucgagcugacccugaccaacaccuccauccucaaccacaaguucugcaaccugagcgacgcccacaagaaggaccuguacgaccacgcccucauguccaucaucagcacguuccaccuguccauccccaacuucaaccaguacgaggccaugagcugcgacuucaacgggggcaagaucuccgugcaguacaaccugagccacuccuacgccaucgacgcggccaaccacugcgggaccguggccaacggcauccuccagaccuucaugcgcauggccuggggcgggagcuacaucgcgcuggacuccggccgggggaacugggacugcaucaugaccagcuaccaguaccugaucauccagaacacgaccugggagaaccacugccaguucucccgccccagccccaucggcuaccucgggcugcugagccagcggacccgcgacaucuacaucucccggcgccuccugggcaccuucacguggacccugagcgacuccgagggcaacgccacccccgggggcuacugccucacccgguggaugcugaucgaggccgagcugaagugcuucgggaacacggccgucgccaagugcaacgagaagcacgacgaggaguucugcgacaugcuccgccuguucgacuucugcaagcaggcgaucagccggcugaagucccccgcccagaugagcauccagcucaucaacaaggccgugaacgcccugaucaacgaccagcugaucaugaagaaccaccuccgcgacaucaugggcauccccuacugcaacuacuccaaguacugguaccugaaccacaccaucaccgggaagaccagccugcccaagugcuggcucguguccaacggcagcuaccugaacgagacgcacuucuccgacgacaucgagcagcaggccgacaacaugaucaccgagaugcugcagaaggaguacauggagcggcagggcaagaccccgcucgggcuggucgaccuguucguguucagcaccuccuucuaccugaucagcaucuuccuccgccuggugaagaucccgacgcaccggcacaucgucggcaagcccugccccaagccccaccgccugaaccacauggggaucugcuccugcggccucuacaagcagccgggggugcccgugcgguggaagcgcugaggacuaguaauaaggaaacuguaugaaugucugugggcaggaagugaagagauccuucuguaaagguuuuuggaauuaugucugcugaauaauaaacuuuuuugaaauaauaaaucugguagaaaaaugagaucucaaaggcucuuuucagagccaccaaaaaaaaaaaaaaaaaaaaaaaaaaaaaaaaaaaaaaaaaaaaaaaaaaaaaaaaaaaaaaaaagaauu

SEQ ID NO: 30666 - RNA, 1778 nt, Artificial Sequence
  mRNA product Design b-4 (hSL-A64-N5) comprising derived and/or modified sequence from LASV(Togo/2016/7082;Clade VI)__AMR44577__GPCmut6 (opt1)
aggagagucccgcagucggcguccagcggcucugcuuguucgugugugugucguugcaggccuuauucaagcuuaccaugggccagaucaucaccuucuuccaggaggugccccacgucaucgaggaggugaugaacaucgugcugaucgcccucagccugcuggccauccucaagggggucuacaacguggcgaccugcggcaucaucgggcuggugacguuccuguuccucugcggccgcuccugcagccugaucuacaagggguccuacgagcugcagacccucgagcugaacauggagacccugaacaugugcaugccgcucagcugcacgaagaacuccagccaccacuacauccgggucggcaacgagaccggccuggagcugacccucaccaacacguccaucaucaaccacaaguucugcaaccugagcgacgcccacaagcgcaaccuguacgaccacgcccucauguccauccugagcaccuuccaccuguccauccccaacuucaaccaguacgaggccaugagcugcgacuucaacgggggcaagaucuccgugcaguacaaccucagccacgccuacgcgguggacgccgccgagcacugcgggaccgucgccaacggcgugcugcagaccuucaugcggauggcguggggcggguccuacaucgcccuggacagcggccgcgggaacugggacugcaucaugacguccuaccaguaccucaucauccagaacaccaccugggaggaccacugccaguucagccggcccucccccaucggcuaccuggggcugcucagccagcgcacccgggacaucuacaucagccgccggcugcugggcacguucaccuggacccucuccgacagcgagggcaacgagacccccgggggcuacugccugacgcgcuggaugcugaucgaggccgagcucaagugcuucgggaacaccgccguggccaagugcaacgagaagcacgacgaggaguucugcgacaugcugcggcuguucgacuucugcaagcaggcgauccagcgccucaagucccccgcccagaugagcauccagcugaucaacaaggccgucaacgcccugaucaacgaccagcucaucaugaagaaccaccuccgggacaugaugggcauccccuacugcaacuacuccaaguacugguaccugaaccacaccagcuccgggcgcaccagccugcccaagugcuggcugguguccaacggcagcuaccugaacgagacgcacuucuccgacgacaucgagcagcaggccgacaacaugaucaccgagaugcuccagaaggaguacaucgaccggcagggcaagaccccgcuggggcugguggaccucuucgucuucagcaccuccuucuaccugaucagcaucuuccugcaccugaucaagaucccgacgcaccgccacaucgugggcaagcccugccccaagccccaccggcucaaccacauggggaucugcuccugcggccuguacaagcagccgggggugcccacccgcuggaagcggugaggacuaguaauaaggaaacuguaugaaugucugugggcaggaagugaagagauccuucuguaaagguuuuuggaauuaugucugcugaauaauaaacuuuuuugaaauaauaaaucugguagaaaaaugagaucucaaaggcucuuuucagagccaccaaaaaaaaaaaaaaaaaaaaaaaaaaaaaaaaaaaaaaaaaaaaaaaaaaaaaaaaaaaaaaaaagaauu

SEQ ID NO: 30667 - RNA, 1778 nt, Artificial Sequence
  mRNA product Design b-4 (hSL-A64-N5) comprising derived and/or modified sequence from LASV(KAK-428;Clade n.d. (VII))__ANH09740__GPCmut6 (opt1)
aggagagucccgcagucggcguccagcggcucugcuuguucgugugugugucguugcaggccuuauucaagcuuaccaugggccagaucgugaccuucuuccaggaggucccccacgugaucgaggaggugaugaacaucguccugaucgcccucagccugcuggccauccucaaggggcuguacaacuucgcgaccugcggcgugaucgggcugaucacguuccuccugcugugcggccgcuccugcagcgccaccuacaaggggcaguacgagcuccagacccuggagcugaacauggagucccucaacaugugcaugccgcugagcugcacgaagaacaacucccaccacuacauccgggccggcaacaacaccggccuggagcucacccugaccaacacgagcaucaucucccacaaguucugcaaccugagcgacgcccacaagaagaaccucuacgaccacacccugauguccaucaucaccaccuuccaccugagcauccccaacuucaaccaguacgaggccauguccugcgacuucaacgggggcaagaucagcauccaguacaaccucucccacagcuacgcgggggacgccgcccagcacugcggcacgguggccaacgggguccugcagaccuucaugcgcauggcguggggcggcuccuaccuggcccucgacagcgggcggcgcggcugggacugcaucaucuccagcuaccaguaccugaucauccagaacaccaccugggacgaccacugccaguucucccggcccagccccaucggguaccugggcuucgugagccagaagacgcgcgacaucuacaucucccggcgccuccugggcaccuucaccuggacccugagcgacuccgaggggcacgacaugccgggcggguacugccucacgcgguggaugcugaucgaggccgaccugaagugcuucggcaacaccgccguggccaagugcaacgagaagcacgacgaggaguucugcgacauguggcgccucuucgacuucugcaagcaggcgauccagcggcugaaggcccccgcccagaugaacauccagcugaucaacaaggccgucaacgcccucaucaacgaccagcugaugaugaagaaccaccuccgcgacaucauggggauccccuacugcaacuacagcaaguucugguaccugaacaacaccaccacgggccggaccucccugccccgcugcuggcugaucagcaacggcuccuaccucaacgagacccacuucagcgacgacaucgagcagcaggcggacaacaugaucaccgagaugcugcagaaggaguacauggaccggcaggggaagacgccccugggccucguggaccuguucguguucuccaccagcuucuaccugaucaccaucuuccuccaccuggucaagaucccgacccaccgccacaucguggggaagcccugccccaagccccaccggcugaaccacaugggcaucugcuccugcgggcuguacaagcagccgggcgugcccguccgcuggaagcggugaggacuaguaauaaggaaacuguaugaaugucugugggcaggaagugaagagauccuucuguaaagguuuuuggaauuaugucugcugaauaauaaacuuuuuugaaauaauaaaucugguagaaaaaugagaucucaaaggcucuuuucagagccaccaaaaaaaaaaaaaaaaaaaaaaaaaaaaaaaaaaaaaaaaaaaaaaaaaaaaaaaaaaaaaaaaagaauu

SEQ ID NO: 30668 - RNA, 1778 nt, Artificial Sequence; identical to SEQ ID NO: 30662
  mRNA product Design b-4 (hSL-A64-N5) comprising derived and/or modified sequence from LASV(Pinneo-NIG-1969;Clade I)__AIT17836__GPCmut6 (opt1)

SEQ ID NO: 30669 - RNA, 1778 nt, Artificial Sequence
  mRNA product Design b-4 (hSL-A64-N5) comprising derived and/or modified sequence from LASV(ISTH0009-NIG-2011;Clade II)__AIT17404__GPCmut6 (opt1)
aggagagucccgcagucggcguccagcggcucugcuuguucgugugugugucguugcaggccuuauucaagcuuaccaugggccagaucaucaccuucuuccaggaggugccccacgucaucgaggaggugaugaacaucgugcugaucgcccucagccugcuggccauccucaaggggaucuacaacgucgcgaccugcggccuguucgggcugguguccuuccuccugcugugcggccgcagcugcuccacgaccuacaaggggguguacgagcuccagacccuggagcuggacauggccagccucaacaugugcaugccgcuguccugcacgaagaacaacagccaccacuacaucauggucggcaacgagaccggccuggagcucacccugaccaacacguccaucaucaaccacaaguucugcaaccugagcgacgcccacaagaagaaccucuacgaccacgcccugauguccaucaucagcaccuuccaccuguccauccccaacuucaaccaguacgaggccaugagcugcgacuucaacgggggcaagaucuccgugcaguacaaccucagccacgcguacgccguggacgccgccaaccacugcgggaccaucgcgaacggcguccugcagaccuucaugcggauggccuggggcggguccuacaucgcccuggacagcggcaagggguccugggacugcaucaugacgagcuaccaguaccucaucauccagaacaccaccugggaggaccacugccaguucucccgccccagccccaucggcuaccuggggcugcucagccagcggacccgcgacaucuacaucucccggcgccugcugggcacguucaccuggacccucagcgacuccgagggcaacgagacccccgggggcuacugccugacgcgguggaugcugaucgaggccgagcucaagugcuucgggaacaccgccguggcgaagugcaacgagaagcacgacgaggaguucugcgacaugcugcgccuguucgacuucugcaagcaggccauccggcgccucaagacccccgcccagaugagcauccagcugaucaacaaggccgugaacgcccugaucaacgaccagcucaucaugaagaaccaccuccgggacaucaugggcaucccguacugcaacuacuccaaguacugguaccugaaccacaccgucacggggaagaccagccugccccgcugcuggcugguguccaacggcagcuaccugaacgagacccacuucuccgacgacaucgagcagcaggcggacaacaugaucaccgagcuccugcagaaggaguacauggaccggcagggcaagacgccccuggggcucguggaccuguucgucuucagcaccuccuucuaccugaucagcaucuuccugcaccucaucaagaucccgacccaccgccacaucaccggcaagcccugccccaagccccaccggcugaaccacauggggaucugcuccugcggccuguacaagcacccgggggugcccgugaaguggaagcgcugaggacuaguaauaaggaaacuguaugaaugucugugggcaggaagugaagagauccuucuguaaagguuuuuggaauuaugucugcugaauaauaaacuuuuuugaaauaauaaaucugguagaaaaaugagaucucaaaggcucuuuucagagccaccaaaaaaaaaaaaaaaaaaaaaaaaaaaaaaaaaaaaaaaaaaaaaaaaaaaaaaaaaaaaaaaaagaauu

SEQ ID NO: 30670 - RNA, 1778 nt, Artificial Sequence
  mRNA product Design b-4 (hSL-A64-N5) comprising derived and/or modified sequence from LASV(ISTH2010-NIG-2012;Clade II)__AIT17482__GPCmut6 (opt1)
aggagagucccgcagucggcguccagcggcucugcuuguucgugugugugucguugcaggccuuauucaagcuuaccaugggccagaucaucaccuucuuccaggaggugccccacgucaucgaggaggugaugaacaucgugcugaucgcccucagccugcuggccauccucaaggggaucuacaacgucgcgaccugcggccuguucgggcugguguccuuccuccugcugugcggccgcagcugcuccacgaccuacaaggggguguacgagcuccagacccuggagcuggacauggccagccucaacaugugcaugccgcuguccugcacgaagaacaacagccaccacuacaucauggucggcaacgagaccggccuggagcucacccugaccaacacguccaucaucaaccacaaguucugcaaccugagcgacgcccacaagaagaaccucuacgaccacgcccugauguccaucaucagcaccuuccaccuguccauccccaacuucaaccaguacgaggccaugagcugcgacuucaacgggggcaagaucuccgugcaguacaaccucagccacgcguacgccguggacgccgccaaccacugcgggaccaucgcgaacggcguccugcagaccuucaugcggauggccuggggcggguccuacaucgcccuggacagcggcaagggguccugggacugcaucaugacgagcuaccaguaccucaucauccagaacaucaccugggaggaccacugccaguucucccgccccagccccaucggcuaccuggggcugcucagccagcggacccgcgacaucuacaucucccggcgccugcugggcaccuucacguggacccucagcgacuccgagggcaacgagacccccgggggcuacugccugacccgguggaugcugaucgaggccgagcucaagugcuucgggaacacggccguggcgaagugcaacgagaagcacgacgaggaguucugcgacaugcugcgccuguucgacuucugcaagcaggccauccggcgccucaagacccccgcccagaugagcauccagcugaucaacaaggccgugaacgcccugaucaacgaccagcucaucaugaagaaccaccuccgggacaucaugggcauccccuacugcaacuacuccaaguacugguaccugaaccacaccgucaccgggaagacgagccugccccgcugcuggcugguguccaacggcagcuaccugaacgagacccacuucuccgacgacaucgagcagcaggcggacaacaugaucaccgagcuccugcagaaggaguacaucgaccggcagggcaagaccccgcuggggcucguggaccuguucgucuucagcacguccuucuaccugaucagcaucuuccugcaccucgugaagaucccgacccaccgccacguggucggcaagcccugccccaagccccaccggcugaaccacauggggaucugcuccugcggccuguacaagcacccgggggugcccgugaaguggaagcgcugaggacuaguaauaaggaaacuguaugaaugucugugggcaggaagugaagagauccuucuguaaagguuuuuggaauuaugucugcugaauaauaaacuuuuuugaaauaauaaaucugguagaaaaaugagaucucaaaggcucuuuucagagccaccaaaaaaaaaaaaaaaaaaaaaaaaaaaaaaaaaaaaaaaaaaaaaaaaaaaaaaaaaaaaaaaaagaauu

SEQ ID NO: 30671 - RNA, 1778 nt, Artificial Sequence
  mRNA product Design b-4 (hSL-A64-N5) comprising derived and/or modified sequence from LASV(Lassa virus/H.sapiens-wt/NGA/2015/ISTH_0543;Clade II)__AVO03639__GPCmut6 (opt1)
aggagagucccgcagucggcguccagcggcucugcuuguucgugugugugucguugcaggccuuauucaagcuuaccaugggccagaucaucaccuucuuccaggaggugccccacgucaucgaggaggugaugaacaucgugcugaucgcccucagccugcuggccauccucaaggggaucuacaacgucgcgaccugcggccuguucgggcugguguccuuccuccugcugugcggccgcagcugcuccacgaccuacaaggggguguacgagcuccagacccuggagcuggacauggccaaccucaacaugugcaugccgcugagcugcacgaagaacaacucccaccacuacaucauggucggcaacgagaccggccuggagcucacccugaccaacacgagcaucaucaaccacaaguucugcaaccuguccgacgcccacaagaagaaccucuacgaccacgcccugaugagcaucaucuccaccuuccaccugagcauccccaacuucaaccaguacgaggccauguccugcgacuucaacgggggcaagaucagcgugcaguacaaccucucccacaccuacgcgguggacgccgccaaccacugcgggaccaucgccaacggcguccugcagacguucaugcggauggcguggggcgggagcuacaucgcccuggacuccggcaaggggagcugggacugcaucaugaccuccuaccaguaccucgugauccagaacaccaccugggaggaccacugccaguucagccgccccucccccaucggcuaccuggggcugcucagccagcggacgcgcgacaucuacaucagccggcgccugcugggcaccuucaccuggacccucuccgacagcgagggcaacgagacgcccgggggcuacugccugacccgguggaugcugaucgaggccgagcucaagugcuucgggaacaccgccguggccaagugcaacgagaagcacgacgaggaguucugcgacaugcugcgccuguucgacuucugcaagcaggcgauccggcgccucaagacccccgcccagauguccauccagcugaucaacaaggccgucaacgcccugaucaacgaccagcucaucaugaagaaccaccuccgggacaucaugggcauccccuacugcaacuacagcaaguacugguaccugaaccacacggugaccgggaagaccucccugccccgcugcuggcuggugagcaacggcuccuaccugaacgagacccacuucagcgacgacaucgagcagcaggccgacaacaugaucacggagcuccugcagaaggaguacaucgaccggcagggcaagaccccgcuggggcucgucgaccuguucguguucuccaccagcuucuaccugaucuccaucuuccugcaccucgugaagaucccgacccaccgccacaucacgggcaagcccugccccaagccccaccggcugaaccacauggggaucugcagcugcggccuguacaagcacccggggguccccgugaaguggaagcgcugaggacuaguaauaaggaaacuguaugaaugucugugggcaggaagugaagagauccuucuguaaagguuuuuggaauuaugucugcugaauaauaaacuuuuuugaaauaauaaaucugguagaaaaaugagaucucaaaggcucuuuucagagccaccaaaaaaaaaaaaaaaaaaaaaaaaaaaaaaaaaaaaaaaaaaaaaaaaaaaaaaaaaaaaaaaaagaauu

SEQ ID NO: 30672 - RNA, 1778 nt, Artificial Sequence
  mRNA product Design b-4 (hSL-A64-N5) comprising derived and/or modified sequence from LASV(Lassa virus/H.sapiens-wt/NGA/2016/ISTH_0009;Clade II)__AVO03571__GPCmut6 (opt1)
aggagagucccgcagucggcguccagcggcucugcuuguucgugugugugucguugcaggccuuauucaagcuuaccaugggccagaucaucaccuucuuccaggaggugccccacgucaucgaggaggugaugaacaucgugcugaucgcccucagccugcuggccauccucaaggggaucuacaacgucgcgaccugcggccugcuggggcucguguccuuccugcugcucugcggccgcagcugcuccacgaccuacaaggggguguacgagcugcagacccuggagcucgacauggccagccugaacaugugcaugccgcuguccugcacgaagaacaacagccaccacuacaucauggucggcaacgagaccggccucgagcugacccugaccaacacguccaucaucaaccacaaguucugcaaccucagcgacgcccacaagaagaaccuguacgaccacgcccugauguccaucaucagcaccuuccaccucuccauccccaacuucaaccaguacgaggccaugagcugcgacuucaacgggggccggaucuccgugcaguacaaccugagccacuccuacgcgguggacgccgccaaccacugcgggaccaucgccaacggcguccugcagaccuucaugcgcauggcguggggcgggagcuacaucgcccucgacuccggcaaggggagcugggacugcaucaugacguccuaccaguaccugaucauccagaacaccaccugggaggaccacugccaguucagccggcccagccccaucggcuaccuggggcuccugucccagcgcacccgggacaucuacaucagccgccggcugcucggcacguucaccuggacccuguccgacagcgagggcaacgagacccccgggggcuacugccugacgcgcuggaugcucaucgaggccgagcugaagugcuucgggaacaccgccguggccaagugcaacgagaagcacgacgaggaguucugcgacaugcugcggcuguucgacuucugcaagcaggcgauccgccggcugaagacccccgcccagauguccauccagcugaucaacaaggccgugaacgcccucaucaacgaccagcugaucaugaagaaccaccuccgcgacaucaugggcaucccguacugcaacuacagcaaguacugguaccucaaccacaccgucacggggaagaccucccugccccggugcuggcuggugagcaacggcuccuaccucaacgagacccacuucagcgacgacaucgagcagcaggccgacaacaugaucaccgagcugcugcagaaggaguacaucgaccgccagggcaagacgccccucgggcugguggaccuguucgucuucuccaccagcuucuaccugaucuccaucuuccuccaccuggugaagaucccgacccaccggcacaucaccggcaagcccugccccaagccccaccgccugaaccacauggggaucugcagcugcggccucuacaaccacccgggggugcccgucaaguggaagcggugaggacuaguaauaaggaaacuguaugaaugucugugggcaggaagugaagagauccuucuguaaagguuuuuggaauuaugucugcugaauaauaaacuuuuuugaaauaauaaaucugguagaaaaaugagaucucaaaggcucuuuucagagccaccaaaaaaaaaaaaaaaaaaaaaaaaaaaaaaaaaaaaaaaaaaaaaaaaaaaaaaaaaaaaaaaaagaauu

SEQ ID NO: 30673 - RNA, 1778 nt, Artificial Sequence
  mRNA product Design b-4 (hSL-A64-N5) comprising derived and/or modified sequence from LASV(Lassa virus/H.sapiens-wt/NGA/2016/ISTH_0017;Clade II)__AVO03567__GPCmut6 (opt1)
aggagagucccgcagucggcguccagcggcucugcuuguucgugugugugucguugcaggccuuauucaagcuuaccaugggccagaucaucaccuucuuccaggaggugccccacgucaucgaggaggugaugaacaucgugcugaucgcccucagccugcuggccauccucaaggggaucuacaacgucgcgaccugcggccuguucgggcugguguccuuccuccugcugugcggccgcagcugcuccacgaccuacaaggggguguacgagcuccagacccuggagcuggacauggccagccucaacaugugcaugccgcuguccugcacgaagaacaacagccaccacuacaucauggucggcaacgagaccggccuggagcucacccugaccaacacguccaucaucaaccacaaguucugcaaccugagcgacgcccacaagaagaaccucuacgaccacgcccugauguccaucaucagcaccuuccaccuguccauccccaacuucaaccaguacgaggccaugagcugcgacuucaacgggggcaagaucuccgugcaguacaaccucagccacaccuacgcgaucgacgccgccaaccacugcgggaccaucgccaacggcgugcugcagacguucaugcggauggcguggggcggguccuacaucgcccuggacagcggcaagggguccugggacugcaucaugaccagcuaccaguaccucaucauccagaacaccaccugggaggaccacugccaguucucccgccccagccccaucggcuaccuggggcugcucagccagcggacgcgcgacaucuacaucucccggcgccugcugggcaccuucaccuggacccucagcgacuccgagggcaacgagacgcccgggggcuacugccugacccgguggaugcugaucgaggccgagcucaagugcuucgggaacaccgccgucgccaagugcaacgagaagcacgacgaggaguucugcgacaugcugcgccuguucgacuucugcaagcaggcgauccggcgccucaagacccccgcccagaugagcauccagcugaucaacaaggccgugaacgcccugaucaacgaccagcucaucaugaagaaccaccuccgggacaucaugggcauccccuacugcaacuacuccaaguacugguaccugaaccacacggugaccgggaagaccagccugccccgcugcuggcuggucuccaacggcagcuaccugaacgagacccacuucuccgacgacaucgagcagcaggccgacaacaugaucacggagcuccugcagaaggaguacauggaccggcagggcaagaccccgcuggggcucguggaccuguucguguucagcaccuccuucuaccugaucagcaucuuccugcaccucguccgcaucccgacccaccggcacgugaucggcaagcccugccccaagccccaccgccugaaccacauggggaucugcuccugcggccuguacaagcacccgggggugcccgucaaguggaagcggugaggacuaguaauaaggaaacuguaugaaugucugugggcaggaagugaagagauccuucuguaaagguuuuuggaauuaugucugcugaauaauaaacuuuuuugaaauaauaaaucugguagaaaaaugagaucucaaaggcucuuuucagagccaccaaaaaaaaaaaaaaaaaaaaaaaaaaaaaaaaaaaaaaaaaaaaaaaaaaaaaaaaaaaaaaaaagaauu

SEQ ID NO: 30674 - RNA, 1778 nt, Artificial Sequence
  mRNA product Design b-4 (hSL-A64-N5) comprising derived and/or modified sequence from LASV(Lassa virus/H.sapiens-wt/NGA/2018/ISTH_0959;Clade II)__AVV65099__GPCmut6 (opt1)
aggagagucccgcagucggcguccagcggcucugcuuguucgugugugugucguugcaggccuuauucaagcuuaccaugggccagaucaucaccuucuuccaggaggugccccacgucaucgaggaggugaugaacaucgugcugaucgcccucagccugcuggccauccucaaggggaucuacaacgucgugaccugcggccuguucgggcugguguccuuccuccugcugugcggccgcagcugcuccacgaccuacaagggggucuacgagcuccagacccuggagcuggacauggcgagccucaacaugugcaugccgcuguccugcacgaagaacaacagccaccacuacaucauggugggcaacgagaccggccuggagcucacccugaccaacacguccaucaucaaccacaaguucugcaaccugagcgacgcccacaagaagaaccucuacgaccacgcccugauguccaucaucagcaccuuccaccuguccauccccaacuucaaccaguacgaggccaugagcugcgacuucaacgggggcaagaucuccgugcaguacaaccucagccacgccuacgcgaucgacgccgccaaccacugcgggaccaucgccaacggcguccugcagaccuucaugcggauggcguggggcggguccuacaucgcccuggacagcggcaagggguccugggacugcaucaugacgagcuaccaguaccucaucauccagaacaccaccugggaggaccacugccaguucucccgccccagccccaucggcuaccuggggcugcucagccagcggacccgcgacaucuacaucucccggcgccugcugggcacguucaccuggacccucagcgacuccgagggcaacgagacccccgggggcuacugccugacgcgguggaugcugaucgaggccgagcucaagugcuucgggaacaccgccguggccaagugcaacgagaagcacgacgaggaguucugcgacaugcugcgccuguucgacuucugcaagcaggcgauccggcgccucaagacccccgcccagaugagcauccagcugaucaacaaggccgugaacgcccugaucaacgaccagcucaucaugaagaaccaccuccgggacaucaugggcaucccguacugcaacuacuccaaguacugguaccugaaccacaccgucacggggaagaccagccugccccgcugcuggcugguguccaacggcagcuaccugaacgagacccacuucuccgacgacaucgagcagcaggccgacaacaugaucaccgagcuccugcagaaggaguacaucgaccggcagggcaagacgccccuggggcucguggaccuguucgucuucagcaccuccuucuaccugaucagcaucuuccugcaccucgugaagaucccgacccaccgccacgugaucggcaagcccugccccaagccccaccggcugaaccacauggggaucugcuccugcggccuguacaagcacccggggguccccgugaaguggaagcgcugaggacuaguaauaaggaaacuguaugaaugucugugggcaggaagugaagagauccuucuguaaagguuuuuggaauuaugucugcugaauaauaaacuuuuuugaaauaauaaaucugguagaaaaaugagaucucaaaggcucuuuucagagccaccaaaaaaaaaaaaaaaaaaaaaaaaaaaaaaaaaaaaaaaaaaaaaaaaaaaaaaaaaaaaaaaaagaauu

SEQ ID NO: 30675 - RNA, 1778 nt, Artificial Sequence
  mRNA product Design b-4 (hSL-A64-N5) comprising derived and/or modified sequence from LASV(LASV003-NIG-2008;Clade II)__AIT17580__GPCmut6 (opt1)
aggagagucccgcagucggcguccagcggcucugcuuguucgugugugugucguugcaggccuuauucaagcuuaccaugggccagaucaucaccuucuuccaggaggugccccacgucaucgaggaggugaugaacaucgugcugaucgcccucagccugcuggccauccucaaggggaucuacaacgucgcgaccugcggccuguucgggcugguguccuuccuccugcugugcggccgcagcugcuccacgaccuacaaggggguguacgagcuccagacccuggagcuggacauggccagccucaacaugugcaugccgcuguccugcacgaagaacaacagccaccacuacaucauggucggcaacgagaccggccuggagcucacccugaccaacacguccaucaucaaccacaaguucugcaaccugagcgacgcccacaagaagaaccucuacgaccacgcccugauguccaucaucagcaccuuccaccuguccauccccaacuucaaccaguacgaggccaugagcugcgacuucaacgggggcaagaucuccgugcaguacaaccucagccacaccuacgcgguggacgccgccaaccacugcgggaccaucgccaacggcguccugcagacguucaugcggauggcguggggcggguccuacaucgcccuggacagcggcaagggguccugggacugcaucaugaccagcuaccaguaccucaucauccagaacaccaccugggaggaccacugccaguucucccgccccagccccaucggcuaccuggggcugcucagccagcggacgcgcgacaucuacaucucccggcgccugcugggcaccuucaccuggacccucagcgacuccgagagcaacgagacgccgggcggguacugccugacccgguggaugcugaucgaggccgagcucaagugcuucggcaacaccgccguggccaagugcaacgagaagcacgacgaggaguucugcgacaugcugcgccuguucgacuucugcaagcaggcgauccggcgccucaaggcccccgcccagauguccauccagcugaucaacaaggccgugaacgcccugaucaacgaccagcucaucaugaagaaccaccuccgggacaucauggggauccccuacugcaacuacagcaaguacugguaccugaaccacaccgucacgggccgcaccucccugccccggugcuggcuggugagcaacggguccuaccugaacgagacccacuucagcgacgacaucgagcagcaggcggacaacaugaucaccgagcuccugcagaaggaguacauggaccgccagggcaagacgccccugggccucguggaccuguucgucuucuccaccagcuucuaccugaucuccaucuuccugcaccucgugaagaucccgacccaccggcacgugaucgggaagcccugccccaagccccaccgccugaaccacaugggcaucugcagcugcgggcuguacaagcacccgggcguccccgugaaguggaagcggugaggacuaguaauaaggaaacuguaugaaugucugugggcaggaagugaagagauccuucuguaaagguuuuuggaauuaugucugcugaauaauaaacuuuuuugaaauaauaaaucugguagaaaaaugagaucucaaaggcucuuuucagagccaccaaaaaaaaaaaaaaaaaaaaaaaaaaaaaaaaaaaaaaaaaaaaaaaaaaaaaaaaaaaaaaaaagaauu

SEQ ID NO: 30676 - RNA, 1778 nt, Artificial Sequence
  mRNA product Design b-4 (hSL-A64-N5) comprising derived and/or modified sequence from LASV(LASV035-NIG-2009;Clade II)__AIT17588__GPCmut6 (opt1)
aggagagucccgcagucggcguccagcggcucugcuuguucgugugugugucguugcaggccuuauucaagcuuaccaugggccagaucaucaccuucuuccaggaggugccccacgucaucgaggaggugaugaacaucgugcugaucgcccucagccugcuggccauccucaaggggaucuacaacgucgcgaccugcggccuguucgggcugguguccuuccuccugcugugcggccgcagcugcuccacgaccuacaaggggguguacgagcuccagacccuggagcuggacauggccagccucaacaugugcaugccgcuguccugcacgaagaacaacagccaccacuacaucauggucggcaacgagaccggccuggagcucacccugaccaacacguccaucaucaaccacaaguucugcaaccugagcgacgcccacaagaagaaccucuacgaccacgcccugauguccaucaucagcaccuuccaccuguccauccccaacuucaaccaguacgaggccaugagcugcgacuucaacgggggcaagaucuccgugcaguacaaccucagccacgcguacgccguggacgccgccaaccacugcgggaccaucgcgaacggcguccugcagaccuucaugcggauggccuggggcggguccuacaucgcccuggacagcggcaagggguccugggacugcaucaugacgagcuaccaguaccucaucauccagaacaccaccugggaggaccacugccaguucucccgccccagccccaucggcuaccuggggcugcucagccagcggacccgcgacaucuacaucucccggcgccugcugggcacguucaccuggacccucagcgacuccgagggcaacgagacccccgggggcuacugccugacgcgguggaugcugaucgaggccgagcucaagugcuucgggaacaccgccguggcgaagugcaacgagaagcacgacgaggaguucugcgacaugcugcgccuguucgacuucugcaagcaggccauccggcgccucaaggcccccgcccagaugagcauccagcugaucaacaaggccgugaacgcgcugaucaacgaccagcucaucaugaagaaccaccuccgggacaucaugggcauccccuacugcaacuacuccaaguacugguaccugaaccacaccgucaccgggaagacgagccugccccgcugcuggcugguguccaacggcagcuaccugaacgagacccacuucuccgacgacaucgagcagcaggccgacaacaugaucaccgagcuccugcagaaggaguacaucgaccggcagggcaagaccccgcuggggcucguggaccuguucgucuucagcacguccuucuaccugaucagcaucuuccugcaccucgugaagaucccgacccaccgccacgugaucggcaagcccugccccaagccccaccggcugaaccacauggggaucugcuccugcggccuguacaagcacccggggguccccgugaaguggaagcgcugaggacuaguaauaaggaaacuguaugaaugucugugggcaggaagugaagagauccuucuguaaagguuuuuggaauuaugucugcugaauaauaaacuuuuuugaaauaauaaaucugguagaaaaaugagaucucaaaggcucuuuucagagccaccaaaaaaaaaaaaaaaaaaaaaaaaaaaaaaaaaaaaaaaaaaaaaaaaaaaaaaaaaaaaaaaaagaauu

SEQ ID NO: 30677 - RNA, 1778 nt, Artificial Sequence
  mRNA product Design b-4 (hSL-A64-N5) comprising derived and/or modified sequence from LASV(LASV1000-NIG-2009;Clade II)__AIT17782__GPCmut6 (opt1)
aggagagucccgcagucggcguccagcggcucugcuuguucgugugugugucguugcaggccuuauucaagcuuaccaugggccagaucaucaccuucuuccaggaggugccccacgucaucgaggaggugaugaacaucgugcugaucgcccucagccugcuggccauccucaaggggaucuacaacgucgcgaccugcggccuguucgggcugguguccuuccuccugcugugcggccgcagcugcuccacgaccuacaaggggguguacgagcuccagacccuggagcuggacauggccagccucaacaugugcaugccgcuguccugcacgaagaacaacagccaccacuacaucauggucggcaacgagaccggccuggagcucacccugaccaacacguccaucaucaaccacaaguucugcaaccugagcgacgcccacaagaagaaccucuacgaccacgcccugauguccaucaucagcaccuuccaccuguccauccccaacuucaaccaguacgaggccaugagcugcgacuucaacgggggcaagaucuccgugcaguacaaccucagccacaccuacgcgguggacgccgccaaccacugcgggaccaucgccaacggcguccugcagacguucaugcggauggcguggggcggguccuacaucgcccuggacagcggcaagggguccugggacugcaucaugaccagcuaccaguaccucaucauccagaacaccaccugggaggaccacugccaguucucccgccccagccccaucggcuaccuggggcugcucagccagcggacgcgcgacaucuacaucucccggcgccugcugggcaccuucaccuggacccucagcgacuccgagggcaacgagacgcccgggggcuacugccugacccgguggaugcugaucgaggccgagcucaagugcuucgggaacaccgccguggccaagugcaacgagaagcacgacgaggaguucugcgacaugcugcgccuguucgacuucugcaagcaggcgaucaagcggcucaagacccccgcccagaugagcauccagcugaucaacaaggccgugaacgcccugaucaacgaccagcucaucaugaagaaccaccuccgcgacaucaugggcauccccuacugcaacuacuccaaguacugguaccugaaccacacggucaccgggaagaccagccugccccggugcuggcugguguccaacggcagcuaccugaacgagacccacuucuccgacgacaucgagcagcaggccgacaacaugaucacggagcuccugcagaaggaguacaucgaccgccagggcaagaccccgcuggggcucguggaccuguucgucuucagcaccuccuucuaccugaucagcaucuuccugcaccucgugaagaucccgacccaccggcacguggucggcaagcccugccccaagccccaccgccugaaccacauggggaucugcuccugcggccuguacaagcacccgggggugcccgugaaguggaagcggugaggacuaguaauaaggaaacuguaugaaugucugugggcaggaagugaagagauccuucuguaaagguuuuuggaauuaugucugcugaauaauaaacuuuuuugaaauaauaaaucugguagaaaaaugagaucucaaaggcucuuuucagagccaccaaaaaaaaaaaaaaaaaaaaaaaaaaaaaaaaaaaaaaaaaaaaaaaaaaaaaaaaaaaaaaaaagaauu

SEQ ID NO: 30678 - RNA, 1778 nt, Artificial Sequence
  mRNA product Design b-4 (hSL-A64-N5) comprising derived and/or modified sequence from LASV(LASV221-NIG-2010;Clade II)__AIT17624__GPCmut6 (opt1)
aggagagucccgcagucggcguccagcggcucugcuuguucgugugugugucguugcaggccuuauucaagcuuaccaugggccagaucaucaccuucuuccaggaggugccccacgucaucgaggaggugaugaacaucgugcugaucgcccucagccugcuggccauccucaaggggaucuacaacgucgcgaccugcggccuguucgggcugguguccuuccuccugcugugcggccgcagcugcuccacgaccuacaaggggguguacgagcuccagacccuggagcuggacauggccagccucaacaugugcaugccgcuguccugcacgaagaacaacagccaccacuacaucauggucggcaacgagaccggccuggagcucacccugaccaacacguccaucaucaaccacaaguucugcaaccugagcgacgcccacaagaagaaccucuacgaccacgcccugauguccaucaucagcaccuuccaccuguccauccccaacuucaaccaguacgaggccaugagcugcgacuucaacgggggcaagaucuccgugcaguacaaccucagccacaccuacgcgaucgacgccgccaaccacugcgggaccaucgccaacggcgugcugcagacguucaugcggauggcguggggcggguccuacaucgcccuggacagcggcaagggguccugggacugcaucaugaccagcuaccaguaccucaucauccagaacaccaccugggaggaccacugccaguucucccgccccagccccaucggcuaccuggggcugcucagccagcggacgcgcgacaucuacaucucccggcgccugcugggcaccuucaccuggacccucagcgacuccgagggcaacgagacgcccgggggcuacugccugacccgguggaugcugaucgaggccgagcucaagugcuucgggaacaccgccgucgccaagugcaacgagaagcacgacgaggaguucugcgacaugcugcgccuguucgacuucugcaagcaggcgauccggcgccucaagacccccgcccagaugagcauccagcugaucaacaaggccgugaacgcccugaucaacgaccagcucaucaugaagaaccaccuccgggacaucaugggcauccccuacugcaacuacuccaaguacugguaccugaaccacacggugaccgggaagaccagccugccccgcugcuggcuggucuccaacggcagcuaccugaacgagacccacuucuccgacgacaucgagcagcaggccgacaacaugaucacggagaugcuccagaaggaguacauggaccggcagggcaagaccccgcuggggcugguggaccucuucguguucagcaccuccuucuaccugaucagcaucuuccugcaccuggucaagaucccgacccaccgccacgugaucggcaagcccugccccaagccccaccggcucaaccacauggggaucugcuccugcggccuguacaagcacccgggggugcccgucaaguggaagcgcugaggacuaguaauaaggaaacuguaugaaugucugugggcaggaagugaagagauccuucuguaaagguuuuuggaauuaugucugcugaauaauaaacuuuuuugaaauaauaaaucugguagaaaaaugagaucucaaaggcucuuuucagagccaccaaaaaaaaaaaaaaaaaaaaaaaaaaaaaaaaaaaaaaaaaaaaaaaaaaaaaaaaaaaaaaaaagaauu

SEQ ID NO: 30679 - RNA, 1778 nt, Artificial Sequence
  mRNA product Design b-4 (hSL-A64-N5) comprising derived and/or modified sequence from LASV(LASV237-NIG-2010;Clade II)__AIT17638__GPCmut6 (opt1)
aggagagucccgcagucggcguccagcggcucugcuuguucgugugugugucguugcaggccuuauucaagcuuaccaugggccagaucaucaccuucuuccaggaggugccccacgucaucgaggaggugaugaacaucgugcugaucgcccucagccugcuggccauccucaaggggaucuacaacgucgcgaccugcggccuguucgggcugguguccuuccuccugcugugcggccgcagcugcuccacgaccuacaaggggguguacgagcuccagacccuggagcuggacauggccagccucaacaugugcaugccgcuguccugcacgaagaacaacagccaccacuacaucauggucggcaacgagaccggccuggagcucacccugaccaacacguccaucaucaaccacaaguucugcaaccugagcgacgcccacaagaaggaccucuacgaccacgcccugauguccaucaucagcaccuuccaccuguccauccccaacuucaaccaguacgaggccaugagcugcgacuucaacgggggcaagaucuccgugcaguacaaccucagccacaccuacgcgguggacgccgccaaccacugcgggaccaucgccaacggcguccugcagacguucaugcggauggcguggggcggguccuacaucgcccuggacagcggcaagggguccugggacugcaucaugaccagcuaccaguaccucaucauccagaacaccaccugggaggaccacugccaguucucccgccccagccccaucggcuaccuggggcugcucagccagcggacgcgcgacaucuacaucucccggcgccugcugggcaccuucaccuggacccucagcgacuccgagggcaacgagacgcccgggggcuacugccugacccgguggaugcugaucgaggccgagcucaagugcuucgggaacaccgccguggccaagugcaacgagaagcacgacgaggaguucugcgacaugcugcgccuguucgacuucugcaagcaggcgauccggcgccucaagacccccgcccagaugagcauccagcugaucaacaaggccgugaacgcccugaucaacgaccagcucaucaugaagaaccaccuccgggacaucaugggcauccccuacugcaacuacuccaaguacugguaccugaaccacacggucaccgggaagaccagccugccccgcugcuggcugguguccaacggcagcuaccugaacgagacccacuucuccgacgacaucgagcagcaggccgacaacaugaucacggagcuccugcagaaggaguacauggaccggcagggcaagaccccgcuggggcucguggaccuguucgucuucagcaccuccuucuaccugaucagcaucuuccugcaccucaucaagaucccgacccaccgccacaucacgggcaagcccugccccaagccccaccggcugaaccacauggggaucugcuccugcggccuguacaagcacccgggggugcccgugaaguggaagcgcugaggacuaguaauaaggaaacuguaugaaugucugugggcaggaagugaagagauccuucuguaaagguuuuuggaauuaugucugcugaauaauaaacuuuuuugaaauaauaaaucugguagaaaaaugagaucucaaaggcucuuuucagagccaccaaaaaaaaaaaaaaaaaaaaaaaaaaaaaaaaaaaaaaaaaaaaaaaaaaaaaaaaaaaaaaaaagaauu

SEQ ID NO: 30680 - RNA, 1778 nt, Artificial Sequence
  mRNA product Design b-4 (hSL-A64-N5) comprising derived and/or modified sequence from LASV(LASV253-NIG-2011;Clade II)__AIT17670__GPCmut6 (opt1)
aggagagucccgcagucggcguccagcggcucugcuuguucgugugugugucguugcaggccuuauucaagcuuaccaugggccagaucaucaccuucuuccaggaggugccccacgucaucgaggaggugaugaacaucgugcugaucgcccucagccugcuggccauccucaaggggaucuacaacgucgcgaccugcggccuguucgggcugguguccuuccuccugcugugcggccgcagcugcuccacgaccuacaaggggguguacgagcuccagacccuggagcuggacauggccagccucaacaugugcaugccgcuguccugcacgaagaacaacagccaccacuacaucauggucggcaacgagaccggccuggagcucacccugaccaacacguccaucaucaaccacaaguucugcaaccugagcgacgcccacaagaagaaccucuacgaccacgcccugauguccaucaucagcaccuuccaccuguccauccccaacuucaaccaguacgaggccaugagcugcgacuucaacgggggcaagaucuccgugcaguacaaccucagccacaccuacgcgguggacgccgccaaccacugcgggaccaucgccaacggcguccugcagacguucaugcggauggcguggggcggguccuacaucgcccuggacagcggcaagggguccugggacugcaucaugaccagcuaccaguaccucaucauccagaacaccaccugggaggaccacugccaguucucccgccccagccccaucggcuaccuggggcugcucagccagcggacgcgcgacaucuacaucucccggcgccugcugggcaccuucaccuggacccucagcgacuccgagggcaacgagacgcccgggggcuacugccugacccgguggaugcugaucgaggccgagcucaagugcuucgggaacaccgccguggccaagugcaacgagaagcacgacgaggaguucugcgacaugcugcgccuguucgacuucugcaagcaggcgauccggcgccucaaggcccccgcccagaugagcauccagcugaucaacaaggccgugaacgcccugaucaacgaccagcucaucaugaagaaccaccuccgggacaucaugggcaucccguacugcaacuacuccaaguacugguaccugaaccacaccgucacggggcgcaccagccugccccggugcuggcugguguccaacggcagcuaccugaacgagacccacuucuccgacgacaucgagcagcaggcggacaacaugaucaccgagcuccugcagaaggaguacaucgaccgccagggcaagacgccccuggggcucguggaccuguucgucuucagcaccuccuucuaccugaucagcaucuuccugcaccucgugaagaucccgacccaccggcacaucaucggcaagcccugccccaagccccaccgccugaaccacauggggaucugcuccugcggccuguacaagcacccgggggugcccgucaaguggaagcggugaggacuaguaauaaggaaacuguaugaaugucugugggcaggaagugaagagauccuucuguaaagguuuuuggaauuaugucugcugaauaauaaacuuuuuugaaauaauaaaucugguagaaaaaugagaucucaaaggcucuuuucagagccaccaaaaaaaaaaaaaaaaaaaaaaaaaaaaaaaaaaaaaaaaaaaaaaaaaaaaaaaaaaaaaaaaagaauu

SEQ ID NO: 30681 - RNA, 1778 nt, Artificial Sequence
  mRNA product Design b-4 (hSL-A64-N5) comprising derived and/or modified sequence from LASV(LASV254-NIG-2011;Clade II)__AIT17674__GPCmut6 (opt1)
aggagagucccgcagucggcguccagcggcucugcuuguucgugugugugucguugcaggccuuauucaagcuuaccaugggccagaucaucaccuucuuccaggaggugccccacgucaucgaggaggugaugaacaucgugcugaucgcccucagccugcuggccauccucaaggggaucuacaacgucgcgaccugcggccuguucgggcugguguccuuccuccugcugugcggccgcagcugcuccacgaccuacaaggggguguacgagcuccagacccuggagcuggacaugaccaaccucaacaugugcaugccgcugagcugcaccaagaacaacucccaccacuacaucauggucggcaacgagaccggccuggagcucacccugacgaacaccagcaucaucaaccacaaguucugcaaccuguccgacgcccacaagaagaaccucuacaaccacgcccugaugagcaucaucuccaccuuccaccugagcauccccaacuucaaccaguacgaggccauguccugcgacuucaacgggggcaagaucagcgugcaguacaaccucucccacagcuacgccguggacgcggccaaccacugcgggaccaucgccaacggcguccugcagacguucaugcggauggccuggggcggguccuacaucgcgcuggacagcggcaaggggaacugggacugcaucaugaccuccuaccaguaccucaucauccagaacaccaccugggaggaccacugccaguucagccgccccucccccaucggcuaccuggggcugcucagccagcggacgcgcgacaucuacaucagccggcgccugcugggcaccuucaccuggacccucuccgacagcgagggcaacgagacgcccgggggcuacugccugacccgguggaugcugaucgaggccgagcucaagugcuucgggaacaccgccguggccaagugcaacgagaagcacgacgaggaguucugcgacaugcugcgccuguucgacuucugcaagcaggccauccggcgccucaagacccccgcgcaggccaacauccagcugaucaacaaggccgugaacgcccugaucaacgaccagcucaucaugaagaaccaccuccgggacaucaugggcauccccuacugcaacuacuccaaguacugguaccugaaccacacggucaccgggaagaccagccugccccgcugcuggcugguguccaacggcagcuaccugaacgagacccacuucuccgacgacaucgagcagcaggccgacaacaugaucacggagcuccugcagaaggaguacauggaccggcagggcaagaccccgcuggggcucguggaccuguucgucuucagcaccuccuucuaccugaucagcaucuuccugcaccucgugaagaucccgacccaccgccacgugaucggcaagcccugccccaagccccaccggcugaaccacauggggaucugcuccugcggccuguacaagcacccggggguccccgugaaguggaagcgcugaggacuaguaauaaggaaacuguaugaaugucugugggcaggaagugaagagauccuucuguaaagguuuuuggaauuaugucugcugaauaauaaacuuuuuugaaauaauaaaucugguagaaaaaugagaucucaaaggcucuuuucagagccaccaaaaaaaaaaaaaaaaaaaaaaaaaaaaaaaaaaaaaaaaaaaaaaaaaaaaaaaaaaaaaaaaagaauu

SEQ ID NO: 30682 - RNA, 1778 nt, Artificial Sequence
  mRNA product Design b-4 (hSL-A64-N5) comprising derived and/or modified sequence from LASV(Nig08-A19;Clade III)__ADU56618__GPCmut6 (opt1)
aggagagucccgcagucggcguccagcggcucugcuuguucgugugugugucguugcaggccuuauucaagcuuaccaugggccagaucgugaccuucuuccaggaggucccccacgugaucgaggaggugaugaacaucguccugaucgcccucagcauccuggccauccugaaggggcucuacaacaucgcgaccugcggccugaucgggcuggugacguuccuccugcuguccggccgcagcugcuccaugaccuacaaggggguguacgagcuccagacccuggagcugaacaugaacacccucaacaugugcaugccgcugagcugcaccaagaacaacucccaccacuacaucauggucggcaacgagaccggccuggagcucacccugacgaacaccagccugcuccaccacaaguucugcaaccuguccgacgcccacaagaagaaccuguacgaccacacccucaugagcaucaucuccaccuuccaccugagcauccccaacuucaaccaguacgaggccauguccugcgacuucaacgggggcaagaucacggugcaguacaaccugagccacuccuacgccaucgacgccgcgaaccacugcgggaccguggccaacggcguccuccagaccuucaugcggauggccuggggcgggagcuacaucgcccuggacuccggccgcgggaagugggacugcaucaugaccagcuaccaguaccugaucauccagaacacgaccugggaggaccacugccaguucucccggcccagccccaucggcuaccucgggcugcugucccagcgcacccgggacaucuacaucagccgccggcuccugggcaccuucacguggacccugagcgacuccgagggcaacgagacccccgggggcuacugccucacccgcuggaugcugaucgaggcggagcugaagugcuucgggaacacggccguggccaagugcaacgagaagcacgacgaggaguucugcgacaugcuccggcuguucgacuucugcaagcaggccauccgccggcugaaggcccccgcgcagaugagcauccagcucaucaacaaggccgugaacgcccugaucaacgaccagcugaucaugaagaaccaccuccgcgacaucaugggcauccccuacugcaacuacuccaaguacugguaccugaaccacaccagcaccgggcggaccucccugccccgcugcuggcucgucagcaacggcuccuaccugaacgagacgcacuucagcgacgacaucgagcagcaggccgacaacaugaucaccgagaugcugcagaaggaguaccucgaccggcagggcaagaccccgcuggggcugguggaccuguucguguucuccaccagcuucuaccucaucuccaucuuccugcaccuggucaagaucccgacgcaccgccacaucgugggcaagcccugccccaagccccaccggcucaaccacauggggaucugcagcugcggccuguacaagcagccgggggugcccguccgcuggaagcggugaggacuaguaauaaggaaacuguaugaaugucugugggcaggaagugaagagauccuucuguaaagguuuuuggaauuaugucugcugaauaauaaacuuuuuugaaauaauaaaucugguagaaaaaugagaucucaaaggcucuuuucagagccaccaaaaaaaaaaaaaaaaaaaaaaaaaaaaaaaaaaaaaaaaaaaaaaaaaaaaaaaaaaaaaaaaagaauu

SEQ ID NO: 30683 - RNA, 1781 nt, Artificial Sequence
  mRNA product Design b-4 (hSL-A64-N5) comprising derived and/or modified sequence from LASV(G1180-SLE-2010;Clade IV)__AIT17168__GPCmut6 (opt1)
aggagagucccgcagucggcguccagcggcucugcuuguucgugugugugucguugcaggccuuauucaagcuuaccaugggccagaucgugaccuucuuccaggaggucccccacgugaucgaggaggugaugaacaucguccugaucgcccucagcauccuggccgugcugaaggggcucuacaacuucgcgaccugcggccugguggggcugcucaccuuccugcugcucugcggccgcuccugcaccgccagccgguacaagggggucuacgagcugcagacccuggagcucaacauggagacccugaacaugugcaugccgcuguccugcaccaagaacaacagccaccacuacaucauggugggcaacgagaccggccucgagcugacccugacgaacaccuccaucaucaaccacaaguucugcaaccucagcgacgcccacaagaagaaccuguacgaccacgcccugauguccaucaucagcaccuuccaccucuccauccccaacuucaaccaguacgaggccaugagcugcgacuucaacgggggcaagaucuccgugcaguacaaccugagccacuccuacgcgggggacgccgccaaccacugcggcaccgucgccaacggggugcugcagacguucaugcgcauggcguggggcggcagcuacaucgcccucgacuccgggcacggcagcugggacugcaucaugaccuccuaccaguaccugaucauccagaacaccaccugggaggaccacugccaguucagccggcccucccccaucggguaccugggccuccugagccagcgcacgcgggacaucuacaucagccgccggcugcucggcaccuucaccuggacccuguccgacagcgaggggaaggacacgccgggcggguacugccugacccgcuggaugcucaucgaggccgagcugaagugcuucggcaacaccgccguggccaagugcaacgagaagcacgacgaggaguucugcgacaugcugcggcuguucgacuucugcaagcaggcgauccagcgccugaaggcccccgcccagauguccauccagcugaucaacaaggccgucaacgcccucaucaacgaccagcugaucaugaagaaccaccuccgggacaucauggggauccccuacugcaacuacagcaaguacugguaccucaaccacaccacgaccggcaagaccucccugcccaagugcuggcuggugagcaacggcuccuaccucaacgagacccacuucagcgacgacaucgagcagcaggcggacaacaugaucacggagaugcugcagaaggaguacauggagcgccaggggaagacgccccugggccucguggaccuguucgucuucuccaccagcuucuaccugaucuccaucuuccugcaccucgugaagaucccgacccaccggcacaucgugggcaagagcugccccaagccccaccgccugaaccacauggggaucugcuccugcgggcuguacaagcagcccggcgucccggugaaguggaagcggugaggacuaguaauaaggaaacuguaugaaugucugugggcaggaagugaagagauccuucuguaaagguuuuuggaauuaugucugcugaauaauaaacuuuuuugaaauaauaaaucugguagaaaaaugagaucucaaaggcucuuuucagagccaccaaaaaaaaaaaaaaaaaaaaaaaaaaaaaaaaaaaaaaaaaaaaaaaaaaaaaaaaaaaaaaaaagaauu

SEQ ID NO: 30684 - RNA, 1781 nt, Artificial Sequence
  mRNA product Design b-4 (hSL-A64-N5) comprising derived and/or modified sequence from LASV(G1442-SLE-2011;Clade IV)__AIT17180__GPCmut6 (opt1)
aggagagucccgcagucggcguccagcggcucugcuuguucgugugugugucguugcaggccuuauucaagcuuaccaugggccagaucgugaccuucuuccaggaggucccccacgugaucgaggaggugaugaacaucguccugaucgcccucagcauccuggccgugcugaaggggcucuacaacguggcgaccugcggccugaucgggcuggucacguuccuccugcugugcggccgcuccugcaccaccacccucuacaaggggguguacgagcugcagacgcuggagcucaacauggagacccugaacaugugcaugccgcugagcugcaccaagaacaacucccaccacuacauccgggugggcaacgagacgggccucgagcugacccugaccaacaccagcaucaucaaccacaaguucugcaaccucuccgacgcccacaagaagaaccuguacgaccacgcccugaugagcaucaucuccacguuccaccucagcauccccaacuucaaccaguacgaggccauguccugcgacuucaacgggggcaagaucagcguccaguacaaccugucccacagcuacgccggggacgcggccaaccacugcggcaccguggccaacggggugcugcagaccuucaugcgcauggccuggggcggcuccuacaucgcgcucgacagcgggcggggcaacugggacugcaucaugaccuccuaccaguaccugaucauccagaacacgaccugggacgaccacugccaguucagccgccccucccccaucggguaccugggccuccugagccagcggacccgcgacgucuacaucucccggcgccugcucggcaccuucacguggacccugagcgacagcgaggggaaggacaccccgggcggguacugccugacccgguggaugcucaucgaggccgagcugaagugcuucggcaacacggccguggccaagugcaacgagaagcacgacgaggaguucugcgacaugcugcgccucuucgacuucugcaagcaggccauccagcggcugaaggcgcccgcccagauguccauccagcugaucaacaaggccgugaacgcccucaucaacgaccagcugaucaugaagaaccaccuccgcgacaucauggggauccccuacugcaacuacagcaaguacugguaccugaacaacaccgccaccggcaagaccucccugcccaagugcuggcugaucagcaacggcuccuaccucaacgagacgcacuucagcgacgacaucgagcaggaggcggacaacaugaucaccgagaugcugcagaaggaguacauggagcggcaggggaagacgccccugggccucgucgaccuguucguguucuccaccagcuucuaccugaucuccaucuuccugcaccucgugaagaucccgacccaccgccacaucgucggcaagagcugccccaagccccaccggcugaaccacauggggaucugcuccugcgggcuguacaagcagcccggcgugccggugcgcuggaagcggugaggacuaguaauaaggaaacuguaugaaugucugugggcaggaagugaagagauccuucuguaaagguuuuuggaauuaugucugcugaauaauaaacuuuuuugaaauaauaaaucugguagaaaaaugagaucucaaaggcucuuuucagagccaccaaaaaaaaaaaaaaaaaaaaaaaaaaaaaaaaaaaaaaaaaaaaaaaaaaaaaaaaaaaaaaaaagaauu

SEQ ID NO: 30685 - RNA, 1781 nt, Artificial Sequence
  mRNA product Design b-4 (hSL-A64-N5) comprising derived and/or modified sequence from LASV(G3010-SLE-2013;Clade IV)__AIT17344__GPCmut6 (opt1)
aggagagucccgcagucggcguccagcggcucugcuuguucgugugugugucguugcaggccuuauucaagcuuaccaugggccagaucgugaccuucuuccaggaggucccccacgugaucgaggaggugaugaacaucguccugaucgcccucagcauccuggccgugcugaaggggcucuacaacuucgcgaccugcggccugguggggcuggucacguuccuccugcugugcggccgcuccugcaccaccagccucuacaaggggguguacgagcugcagacccuggagcucaacauggagacgcugaacaugugcaugccgcuguccugcaccaagaacaacagccaccacuacaucauggugggcaacgagaccggccucgagcugacgcugaccaacaccuccaucaucaaccacaaguucugcaaccucagcgacgcccacaagaagaaccuguacaaccacgcccugauguccaucaucagcaccuuccaccucuccauccccaacuucaaccaguacgaggccaugagcugcgacuucaacgggggcaagaucuccguccaguacaaccugagccacuccuacgccggggacgcggccagccacugcggcacgguggccaacggggugcugcagaccuucaugcggauggccuggggcggcuccuacaucgcgcucgacagcggguacggcaagugggacugcaucaugaccuccuaccaguaccugaucauccagaacaccacgugggaggaccacugccaguucagccgccccucccccaucggguaccugggccuccugagccagcggacccgcgacaucuacaucagccggcgccugcucggcaccuucaccuggacgcuguccgacagcgaggggaaggacaccccgggcggguacugccugacccgguggaugcucaucgaggccgagcugaagugcuucggcaacaccgccgucgccaagugcaacgagaagcacgacgaggaguucugcgacaugcugcgccucuucgacuucugcaagcaggccauccagcggcugaagacgcccgcgcagauguccauccagcugaucaacaaggccgugaacgcccucaucaacgaccagcugaucaugaagaaccaccuccgcgacaucauggggauccccuacugcaacuacagcaaguacugguaccugaaccacaccaccaccggcaagacgucccugcccaagugcuggcuggugagcaacggcuccuaccucaacgagacccacuucagcgacgacaucgagcagcaggccgacaacaugaucaccgagaugcugcagaaggaguacauggagcggcaggggaagacgccccugggccucgucgaccuguucguguucuccaccagcuucuaccugaucuccaucuuccugcaccucgugaagaucccgacccaccgccacaucgucggcaagagcugccccaagccccaccggcugaaccacauggggaucugcuccugcgggcuguacaagcagcccggcgugccggugcgcuggaagcggugaggacuaguaauaaggaaacuguaugaaugucugugggcaggaagugaagagauccuucuguaaagguuuuuggaauuaugucugcugaauaauaaacuuuuuugaaauaauaaaucugguagaaaaaugagaucucaaaggcucuuuucagagccaccaaaaaaaaaaaaaaaaaaaaaaaaaaaaaaaaaaaaaaaaaaaaaaaaaaaaaaaaaaaaaaaaagaauu

SEQ ID NO: 30686 - RNA, 1781 nt, Artificial Sequence
  mRNA product Design b-4 (hSL-A64-N5) comprising derived and/or modified sequence from LASV(G502-SLE-2009;Clade IV)__AIT17126__GPCmut6 (opt1)
aggagagucccgcagucggcguccagcggcucugcuuguucgugugugugucguugcaggccuuauucaagcuuaccaugggccagaucgugaccuucuuccaggaggucccccacgugaucgaggaggugaugaacaucguccugaucgcccucagcauccuggccgugcugaaggggcucuacaacuucgcgaccugcggccugguggggcugcucacguuccugcugcucugcggccgcuccugcaccaccgggcuguacaagggcgucuacgagcugcagacccucgagcugaacauggagacgcugaacaugugcaugccgcucagcugcaccaagaacaacucccaccacuacaucauggugggcaacgagaccgggcuggagcugacgcucaccaacaccagcaucaucaaccacaaguucugcaaccuguccgacgcccacaagaagaaccuguacgaccacgcccucaugagcaucaucuccaccuuccaccugagcauccccaacuucaaccaguacgaggccauguccugcgacuucaacggcgggaagaucagcgugcaguacaaccugucccacagcuacgccggcgacgcggccgaccacugcgggacggucgccaacggcgugcuccagaccuucaugcggauggccuggggcggguccuacaucgcgcuggacagcggccgcgggcggugggacugcaucaugaccuccuaccaguaccugaucauccagaacaccacgugggaggaccacugccaguucagccgccccucccccaucggcuaccucggccugcugagccagcggacccgcgacaucuacaucucccggcgccuccuggggaccuucaccuggacgcugagcgacagcgagggcaaggacacccccgggggcuacugccucacccgguggaugcugaucgaggccgagcugaagugcuucgggaacaccgccguggccaagugcaacgagaagcacgacgaggaguucugcgacaugcuccgccuguucgacuucugcaagcaggccauccagcggcugaaggcgcccgcccagauguccauccagcucaucaacaaggccgucaacgcccugaucaacgaccagcuggugaugaagaaccaccuccgcgacaucaugggcauccccuacugcaacuacagccgguacugguaccugaaccacacgaccaccggccgcaccucccugcccaagugcuggcucgugagcaacggguccuaccugaacgagacgcacuucagcgacgacaucgagcagcaggccgacaacaugaucaccgagaugcugcagaaggaguacauggagcggcagggcaagaccccgcucgggcuggucgaccuguucguguucuccaccagcuucuaccugaucuccaucuuccuccaccuggugaagaucccgacgcaccgccacaucgucggcaagagcugccccaagccccaccggcugaaccacauggggaucugcuccugcggccucuacaagcagcccggcgugccggugaaguggaagcgcugaggacuaguaauaaggaaacuguaugaaugucugugggcaggaagugaagagauccuucuguaaagguuuuuggaauuaugucugcugaauaauaaacuuuuuugaaauaauaaaucugguagaaaaaugagaucucaaaggcucuuuucagagccaccaaaaaaaaaaaaaaaaaaaaaaaaaaaaaaaaaaaaaaaaaaaaaaaaaaaaaaaaaaaaaaaaagaauu

SEQ ID NO: 30687 - RNA, 1781 nt, Artificial Sequence
  mRNA product Design b-4 (hSL-A64-N5) comprising derived and/or modified sequence from LASV(G733-SLE-2010;Clade IV)__AIT17154__GPCmut6 (opt1)
aggagagucccgcagucggcguccagcggcucugcuuguucgugugugugucguugcaggccuuauucaagcuuaccaugggccagaucgugaccuucuuccaggaggucccccacgugaucgaggaggugaugaacaucguccugaucgcccucagcauccuggccgugcugaaggggcucuacaacuucgcgaccugcggcaucguggggcuggucuccuuccugcuccugugcggccgcagcugcacgaccucccuguacaaggggguguacgagcuccagacccuggagcugaacauggagacccucaacaugugcaugccgcugagcugcaccaagaacaacucccaccacuacaucauggugggcaacgagaccggccuggagcucacccugacgaacaccagcaucaucaaccacaaguucugcaaccuguccgacgcccacaagaagaaccucuacgaccacgcccugaugagcaucaucuccaccuuccaccugagcauccccaacuucaaccaguacgaggccauguccugcgacuucaacgggggcaagaucagcguccaguacaaccucucccacagcuacgccggggacgcggccaaccacugcggcaccaucgccaacggggugcugcagacguucaugcggauggccuggggcggcuccuacaucgcgcuggacagcgggcgcgaccggugggacugcaucaugaccuccuaccaguaccucaucauccagaacaccaccugggaggaccacugccaguucagccgccccucccccaucggcuaccuggggcugcucagccagcggacgcgcgacaucuacaucagccggcgccugcugggcaccuucaccuggacccucuccgacagcgagggcaaggacacgcccgggggcuacugccugacccgguggaugcugaucgaggccgagcucaagugcuucgggaacaccgccguggccaagugcaacgagaagcacgacgaggaguucugcgacaugcugcgccuguucgacuucugcaagcaggccauccagcggcucaaggcgcccgcccagauguccauccagcugaucaacaaggccgucaacgcccugaucaacgaccagcucaucaugaagaaccaccuccgcgacaucaugggcauccccuacugcaacuacagcaaguacugguaccugaaccacaccacgaccgggaagaccucccugcccaagugcuggcuggugagcaacggcuccuaccugaacgagacccacuucagcgacgacaucgagcagcaggccgacaacaugaucacggagaugcuccagaaggaguacauggagcggcagggcaagaccccgcuggggcugguggaccucuucgucuucuccaccagcuucuaccugaucuccaucuuccugcaccuggugaagaucccgacccaccgccacguggucggcaagagcugccccaagccccaccggcucaaccacauggggaucugcuccugcggccuguacgggcagcccggcgugccggugaaguggaagcgcugaggacuaguaauaaggaaacuguaugaaugucugugggcaggaagugaagagauccuucuguaaagguuuuuggaauuaugucugcugaauaauaaacuuuuuugaaauaauaaaucugguagaaaaaugagaucucaaaggcucuuuucagagccaccaaaaaaaaaaaaaaaaaaaaaaaaaaaaaaaaaaaaaaaaaaaaaaaaaaaaaaaaaaaaaaaaagaauu

SEQ ID NO: 30688 - RNA, 1781 nt, Artificial Sequence
  mRNA product Design b-4 (hSL-A64-N5) comprising derived and/or modified sequence from MOPV/LASV reassortant(IGS-1;Clade IV)__AFY05576__GPCmut6 (opt1)
aggagagucccgcagucggcguccagcggcucugcuuguucgugugugugucguugcaggccuuauucaagcuuaccaugggccagaucgugaccuucuuccaggaggucccccacgugaucgaggaggugaugaacaucguccugaucgcccucagcgugcuggccgugcugaaggggcucuacaacuucgcgaccugcggccuggucgggcuggugacguuccuccugcugugcggccgcuccugcaccaccagccucuacaaggggguguacgagcugcagacccuggagcucaacauggagacgcugaacaugugcaugccgcuguccugcaccaagaacaacagccaccacuacaucauggucggcaacgagaccggccucgagcugacgcugaccaacaccuccaucaucaaccacaaguucugcaaccucagcgacgcccacaagaagaaccuguacgaccacgcccugauguccaucaucagcaccuuccaccucuccauccccaacuucaaccaguacgaggccaugagcugcgacuucaacgggggcaagaucuccgugcaguacaaccugagccacuccuacgccggggacgcggccaaccacugcggcacgguggccaacgggguccugcagaccuucaugcggauggccuggggcggcagcuacaucgcgcucgacuccgggcgcggcaacugggacugcaucaugaccagcuaccaguaccugaucauccagaacaccacgugggaggaccacugccaguucucccggcccagccccaucggguaccugggccuccugucccagcgcacccgggacaucuacaucagccgccggcugcucggcaccuucaccuggacgcugagcgacuccgagggggaggacaccccgggcggguacugccugacccgcuggaugcucaucgaggccgagcugaagugcuucggcaacaccgccguggccaagugcaacgagaagcacgacgaggaguucugcgacaugcugcggcuguucgacuucugcaagcaggccauccagcgccugaaggcgcccgcccagaugagcauccagcugaucaacaaggccgugaacgcccucaucaacgaccagcugaucaugaagaaccaccuccgggacaucauggggauccccuacugcaacuacuccaaguacugguaccucaaccacacgaccaccggccgcaccagccugcccaagugcuggcuggucuccaacggcagcuaccucaacgagacgcacuucuccgacgacaucgagcagcaggccgacaacaugaucaccgagaugcugcagaaggaguacauggagcggcaggggaagacgccccugggccucguggaccuguucguguucagcaccuccuucuaccugaucagcaucuuccugcaccucgucaagaucccgacccaccgccacaucguggggaaguccugccccaagccccaccggcugaaccacaugggcaucugcagcugcgggcuguacaagcagcccggcgugccggucaaguggaagcgcugaggacuaguaauaaggaaacuguaugaaugucugugggcaggaagugaagagauccuucuguaaagguuuuuggaauuaugucugcugaauaauaaacuuuuuugaaauaauaaaucugguagaaaaaugagaucucaaaggcucuuuucagagccaccaaaaaaaaaaaaaaaaaaaaaaaaaaaaaaaaaaaaaaaaaaaaaaaaaaaaaaaaaaaaaaaaagaauu

SEQ ID NO: 30689 - RNA, 1781 nt, Artificial Sequence
  mRNA product Design b-4 (hSL-A64-N5) comprising derived and/or modified sequence from LASV(LM765-SLE-2012;Clade IV)__AIT17814__GPCmut6 (opt1)
aggagagucccgcagucggcguccagcggcucugcuuguucgugugugugucguugcaggccuuauucaagcuuaccaugggccagaucgugaccuucuuccaggaggucccccacgugaucgaggaggugaugaacaucguccugaucgcccucagcauccuggccgugcugaaggggcucuacaacuucgcgaccugcggccugguggggcuggucacguuccuccugcugugcggccgcuccugcaccaccagccucuacaaggggguguacgagcugcagacccuggagcucaacauggagacgcugaacaugugcaugccgcuguccugcaccaagaacaacagccaccacuacaucauggugggcaacgagaccggccucgagcugacgcugaccaacaccuccaucaucgaccacaaguucugcaaccucagcgacgcccaccggaagaaccuguacgaccacgcccugauguccaucaucagcaccuuccaccucuccauccccaacuucaaccaguacgaggccaugagcugcgacuucaacgggggcaagaucuccguccaguacaaccugagccacuccuacgccaaggacgcggccgaccacugcgggacgguggccaacggcgugcugcagaccuucaugcgcauggccuggggcgggagcuacaucgcgcucgacuccggccgggggcgcugggacugcaucaugaccagcuaccaguaccugaucauccagaacaccacgugggaggaccacugccaguucucccggcccagccccaucggcuaccuggggcuccugucccagcgcacccgggacaucuacaucagccgccggcugcucggcaccuucaccuggacgcugagcgacuccgagggcaaggacacccccgggggcuacugccugacccgcuggaugcucaucgaggccgagcugaagugcuucgggaacaccgccgucgccaagugcaacgagaagcacgacgaggaguucugcgacaugcugcggcuguucgacuucugcaagcaggccauccagcgccugaaggcgcccgcccagaugagcauccagcugaucaacaaggccgugaacgcccucaucaacgaccagcugaucaugaagaaccaccuccgggacaucaugggcauccccuacugcaacuacuccaaguacugguaccucaaccacacgaccaccgggaagaccagccugcccaagugcuggcugguguccaacggcagcuaccucaacgagacgcacuucuccgacgacaucgagcagcaggccgacaacaugaucaccgagaugcugcagaaggaguacauggagcgccagggcaagaccccgcuggggcucgucgaccuguucguguucagcaccuccuucuaccugaucagcaucuuccugcaccucgugaagaucccgacgcaccggcacaucgucggcaagcccugccccaagccccaccgccugaaccacauggggaucugcuccugcggccuguacaagcagccgggggugcccgugaaguggaagcggugaggacuaguaauaaggaaacuguaugaaugucugugggcaggaagugaagagauccuucuguaaagguuuuuggaauuaugucugcugaauaauaaacuuuuuugaaauaauaaaucugguagaaaaaugagaucucaaaggcucuuuucagagccaccaaaaaaaaaaaaaaaaaaaaaaaaaaaaaaaaaaaaaaaaaaaaaaaaaaaaaaaaaaaaaaaaagaauu

SEQ ID NO: 30690 - RNA, 1781 nt, Artificial Sequence
  mRNA product Design b-4 (hSL-A64-N5) comprising derived and/or modified sequence from LASV(LM776-SLE-2012;Clade IV)__AIT17824__GPCmut6 (opt1)
aggagagucccgcagucggcguccagcggcucugcuuguucgugugugugucguugcaggccuuauucaagcuuaccaugggccagaucgugaccuucuuccaggaggucccccacgugaucgaggaggugaugaacaucguccugaucgcccucagcauccuggccgugcugaaggggcucuacaacuucgcgaccugcggccugguggggcuggucacguuccuccugcugugcggccgcuccugcaccaccagcguguacaaggggguguacgagcuccagacccuggagcugaacauggagacgcucaacaugugcaugccgcuguccugcaccaagaacaacagccaccacuacaucauggucggcaacgagaccggccuggagcucacgcugaccaacaccuccaucaucaaccacaaguucugcaaccugagcgacgcccacaagaagaaccucuacgaccacgcccugauguccaucaucagcaccuuccaccuguccauccccaacuucaaccaguacgaggccaugagcugcgacuucaacgggggcaagaucuccgugcaguacaaccucagccacuccuacgccggggacgcggccaaccacugcggcacgguggccaacgggguccugcagaccuucaugcggauggccuggggcggcagcuacaucgcgcuggacuccgggcacggcaagugggacugcaucaugaccagcuaccaguaccucaucauccagaacaccacgugggaggaccacugccaguucucccgccccagccccaucggguaccugggccugcucucccagcggacccgcgacaucuacaucagccggcgccugcugggcaccuucaccuggacgcucagcgacuccgaggggaaggacaccccgggcggguacugccugacccgguggaugcugaucgaggccgagcucaagugcuucggcaacaccgccguggccaagugcaacgagaagcacgacgaggaguucugcgacaugcugcgccuguucgacuucugcaagcaggccauccagcggcucaaggcgcccgcccagaugagcauccagcugaucaacaaggccgugaacgcccugaucaacgaccagcucaucaugaagaaccaccuccgcgacaucauggggauccccuacugcaacuacuccaaguacugguaccugaaccacacgaccaccggcaagaccagccugcccaagugcuggcuggucuccaacggcagcuaccugaacgagacgcacuucuccgacgacaucgagcagcaggccgacaacaugaucaccgagaugcuccagaaggaguacauggagcggcaggggaagacgccccugggccugguggaccucuucguguucagcaccuccuucuaccugaucagcaucuuccugcaccuggucaagaucccgacccaccgccacaucguggggaaguccugccccaagccccaccggcucaaccacaugggcaucugcagcugcgggcuguacaagcagcccggcgugccgguccgcuggaagcggugaggacuaguaauaaggaaacuguaugaaugucugugggcaggaagugaagagauccuucuguaaagguuuuuggaauuaugucugcugaauaauaaacuuuuuugaaauaauaaaucugguagaaaaaugagaucucaaaggcucuuuucagagccaccaaaaaaaaaaaaaaaaaaaaaaaaaaaaaaaaaaaaaaaaaaaaaaaaaaaaaaaaaaaaaaaaagaauu

SEQ ID NO: 30691 - RNA, 1781 nt, Artificial Sequence
  mRNA product Design b-4 (hSL-A64-N5) comprising derived and/or modified sequence from LASV(Mad39;Clade IV)__ANH09722__GPCmut6 (opt1)
aggagagucccgcagucggcguccagcggcucugcuuguucgugugugugucguugcaggccuuauucaagcuuaccaugggccagaucgugaccuucuuccaggaggucccccacgugaucgaggaggugaugaacaucguccugaucgcccucagcauccuggccgugcugaaggggcucuacaacguggcgaccugcggccugaucgggcuggucacguuccuccugcugugcggccgcuccugcaccaccacccucuacaaggggguguacgagcugcaggcccuggagcucaacauggagacgcugaacaugugcaugccgcugagcugcaccaagaacaacucccaccacuacauccgggugggcaacgagaccggccucgagcugacgcugaccaacaccagccucaucaaccacaaguucugcaaccuguccgacgcccacaagaagaaccuguacgaccacgcccucaugagcaucaucuccaccuuccaccugagcauccccaacuucaaccaguacgaggccauguccugcgacuucaacgacgggaagaucagcguccaguacaaccugucccacacguacgcgggcgacaccgccaaccacugcgggaccguggccaacggcgugcuccagaccuucaugcgcauggccuggggcgggagcuacaucgcgcuggacuccggccgcgggggcugggacugcaucaugacgagcuaccaguaccugaucauccagaacaccaccugggaggaccacugccaguucucccggcccagccccaucggguaccucggccugcugucccagcggacccgcgacaucuacaucagccggcgccuccugggcacguucaccuggacccuguccgacagcgaggggaaggacaccccgggcggguacugccucacgcgguggaugcugaucgaggccgagcugaagugcuucggcaacaccgccgucgccaagugcaacgagaagcacgacgaggaguucugcgacaugcuccgccuguucgacuucugcaagcaggccauccagcggcugaaggcgcccgcccagaugagcauccagcucaucaacaaggccgugaacgcccugaucaacgaccagcugaucaugaagaaccaccuccgcgacaucauggggauccccuacugcaacuacuccaaguacugguaccugaaccacaccgugaccggcaagacgagccugcccaagugcuggcucgucuccaacggcagcuaccugaacgagacccacuucuccgacgacaucgagcagcaggccgacaacaugaucaccgagaugcugcagaaggaguacauggagcggcaggggaagacgccccucggccugguggaccuguucguguucagcaccuccuucuaccugaucagcaucuuccuccaccuggucaagaucccgacccaccgccacgugguggggaagcccugccccaagccccaccggcugaaccacaugggcaucugcuccugcggguucuacaagcagccgggcguccccgugcgcuggaagcggugaggacuaguaauaaggaaacuguaugaaugucugugggcaggaagugaagagauccuucuguaaagguuuuuggaauuaugucugcugaauaauaaacuuuuuugaaauaauaaaucugguagaaaaaugagaucucaaaggcucuuuucagagccaccaaaaaaaaaaaaaaaaaaaaaaaaaaaaaaaaaaaaaaaaaaaaaaaaaaaaaaaaaaaaaaaaagaauu

SEQ ID NO: 30692 - RNA, 1781 nt, Artificial Sequence
  mRNA product Design b-4 (hSL-A64-N5) comprising derived and/or modified sequence from LASV(Z0947-SLE-2011;Clade IV)__AIT17840__GPCmut6 (opt1)
aggagagucccgcagucggcguccagcggcucugcuuguucgugugugugucguugcaggccuuauucaagcuuaccaugggccagaucgugaccuucuuccaggaggucccccacgugaucgaggaggugaugaacaucguccugaucgcccucagcauccuggccgugcugaaggggcucuacaacuucgcgaccugcggccugguggggcuggucacguuccuccugcugugcggccgcuccugcaccaucagccucuacaaggggguguacgagcugcagacccuggagcucaacauggagacccugaacaugugcaugccgcuguccugcaccaagaacaacagccaccacuacaucauggugggcaacgagaccggccucgagcugacccugacgaacaccuccaucaucaaccacaaguucugcaaccucagcgacgcccacaagaagaaccuguacgaccacgcccugauguccaucaucagcaccuuccaccucuccauccccaacuucaaccaguacgaggccaugagcugcgacuucaacgggggcaagaucuccguccaguacaaccugagccacuccuacgccggggacgcggccaaccacugcggcaccguggccaacggggugcugcagacguucaugcggauggccuggggcggcagcuacaucgcgcucgacuccgggcgcgaccggugggacugcaucaugaccagcuaccaguaccugaucauccagaacaccaccugggaggaccacugccaguucucccgccccagccccaucggcuaccuggggcuccugucccagcggacgcgcgacaucuacaucagccggcgccugcucggcaccuucaccuggacccugagcgacuccgagggcaaggacacgcccgggggcuacugccugacccgguggaugcucaucgaggccgagcugaagugcuucgggaacaccgccgucgccaagugcaacgagaagcacgacgaggaguucugcgacaugcugcgccucuucgacuucugcaagcaggccauccagcggcugaaggcgcccgcccagaugagcauccagcugaucaacaaggccgugaacgcccucaucaacgaccagcugaucaugaagaaccaccuccgcgacaucaugggcauccccuacugcaacuacuccaaguacugguaccugaaccacaccacgaccgggaagaccagccugcccaagugcuggcugguguccaacggcagcuaccucaacgagacccacuucuccgacgacaucgagcagcaggccgacaacaugaucacggagaugcugcagaaggaguacauggagcggcagggcaagaccccgcuggggcucgucgaccuguucguguucagcaccuccuucuaccugaucagcaucuuccugcaccucgugaagaucccgacccaccgccacaucgucggcaagcccugccccaagccccaccggcugaaccacauggggaucugcuccugcggccuguacaagcagccgggggugcccgugaaguggaagcgcugaggacuaguaauaaggaaacuguaugaaugucugugggcaggaagugaagagauccuucuguaaagguuuuuggaauuaugucugcugaauaauaaacuuuuuugaaauaauaaaucugguagaaaaaugagaucucaaaggcucuuuucagagccaccaaaaaaaaaaaaaaaaaaaaaaaaaaaaaaaaaaaaaaaaaaaaaaaaaaaaaaaaaaaaaaaaagaauu

SEQ ID NO: 30693 - RNA, 1781 nt, Artificial Sequence
  mRNA product Design b-4 (hSL-A64-N5) comprising derived and/or modified sequence from LASV(Josiah;Clade IV)__NP_694870__GPCmut6 (opt1)
aggagagucccgcagucggcguccagcggcucugcuuguucgugugugugucguugcaggccuuauucaagcuuaccaugggccagaucgugaccuucuuccaggaggucccccacgugaucgaggaggugaugaacaucguccugaucgcccucagcgugcuggccgugcugaaggggcucuacaacuucgcgaccugcggccuggucgggcuggugacguuccuccugcugugcggccgcuccugcaccaccagccucuacaaggggguguacgagcugcagacccuggagcucaacauggagacgcugaacaugugcaugccgcuguccugcaccaagaacaacagccaccacuacaucauggucggcaacgagaccggccucgagcugacccugacgaacaccuccaucaucaaccacaaguucugcaaccucagcgacgcccacaagaagaaccuguacgaccacgcccugauguccaucaucagcaccuuccaccucuccauccccaacuucaaccaguacgaggccaugagcugcgacuucaacgggggcaagaucuccgugcaguacaaccugagccacuccuacgccggggacgcggccaaccacugcggcaccguggccaacgggguccugcagacguucaugcggauggccuggggcggcagcuacaucgcgcucgacuccgggcgcggcaacugggacugcaucaugaccagcuaccaguaccugaucauccagaacaccaccugggaggaccacugccaguucucccggcccagccccaucggguaccugggccuccugucccagcgcacgcgggacaucuacaucagccgccggcugcucggcaccuucaccuggacccugagcgacuccgaggggaaggacacgccgggcggguacugccugacccgcuggaugcucaucgaggccgagcugaagugcuucggcaacaccgccguggccaagugcaacgagaagcacgacgaggaguucugcgacaugcugcggcuguucgacuucugcaagcaggccauccagcgccugaaggcgcccgcccagaugagcauccagcugaucaacaaggccgugaacgcccucaucaacgaccagcugaucaugaagaaccaccuccgggacaucauggggauccccuacugcaacuacuccaaguacugguaccucaaccacaccacgaccggccgcaccagccugcccaagugcuggcuggucuccaacggcagcuaccucaacgagacccacuucuccgacgacaucgagcagcaggccgacaacaugaucacggagaugcugcagaaggaguacauggagcggcaggggaagaccccgcugggccugguggaccucuucguguucagcaccuccuucuaccugaucagcaucuuccugcaccucgucaagauccccacccaccgccacaucguggggaaguccugccccaagccccaccggcugaaccacaugggcaucugcagcugcgggcuguacaagcagccgggcgugcccgucaaguggaagcgcugaggacuaguaauaaggaaacuguaugaaugucugugggcaggaagugaagagauccuucuguaaagguuuuuggaauuaugucugcugaauaauaaacuuuuuugaaauaauaaaucugguagaaaaaugagaucucaaaggcucuuuucagagccaccaaaaaaaaaaaaaaaaaaaaaaaaaaaaaaaaaaaaaaaaaaaaaaaaaaaaaaaaaaaaaaaaagaauu

SEQ ID NO: 30694 - RNA, 1778 nt, Artificial Sequence
  mRNA product Design b-4 (hSL-A64-N5) comprising derived and/or modified sequence from LASV(LP;Clade I)__AAF86701__GPCmut6 (opt1)
aggagagucccgcagucggcguccagcggcucugcuuguucgugugugugucguugcaggccuuauucaagcuuaccaugggccagaucaucaccuucuuccaggaggugccccacgucaucgaggaggugaugaacaucgugcugaucgcccucagccugcuggccauccucaaggggcuguacaacaucgcgaccugcggcaucaucgggcuggucgccuuccucuuccugugcggcaaguccugcagccugacgcucaagggcggguacgagcugcagacccuggagcucaacauggagacccugaacaugugcaugccgcuguccugcaccaagaacagcucccaccacuacauccgcgugggcaacgagacggggcucgagcugacccugaccaacaccagcaucaucaaccacaaguucugcaaccucuccgacgcccacaagaagaaccuguacgaccacgcccugaugagcaucaucuccacguuccaccucagcauccccaacuucaaccaguacgaggccauguccugcgacuucaacggcgggaagaucagcgugcaguacaaccugucccacagcuacgcgggcgacgccgccgagcacugcgggaccgucgccaacggcgugcugcagaccuucaugcggauggcguggggcgggcgcuacaucgcccucgacuccggcaaggggaacugggacugcaucaugaccagcuaccaguaccugaucauccagaacacgaccugggaggaccacugccaguucucccggcccagccccaucggcuaccugggccuccugucccagcgcacccgggacaucuacaucagccgccggcugcucgggaccuucacguggacccugagcgacuccgagggcaacgagacccccgggggcuacugccugacccgcuggaugcucaucgaggccgagcugaagugcuucgggaacacggccguggccaagugcaacgagaagcacgacgaggaguucugcgacaugcugcggcuguucgacuucugcaagcaggcgauccgccggcugaaggccccggcccagaugagcauccagcugaucaacaaggccgucaacgcccucaucaacgaccagcugaucaugaagaaccaccuccgcgacaucaugggcauccccuacugcaacuacuccaaguacugguaccucaaccacaccagcuccggccggaccagccugcccaagugcuggcugaucuccaacgggagcuaccucaacgagacccaguucuccgacgacaucgagcagcaggcggacaacaugaucacggagaugcugcagaaggaguacaucgagcgccagggcaagaccccgcuggggcugguggacaucuucaucuucagcaccuccuucuaccucaucagcaucuuccugcaccugaucaagauccccacccaccggcacaucgugggcaagcccugccccaagccgcaccgccucaaccacaugggggucugcuccugcggccuguacaagcaccccggcgugcccacgaaguggaagcggugaggacuaguaauaaggaaacuguaugaaugucugugggcaggaagugaagagauccuucuguaaagguuuuuggaauuaugucugcugaauaauaaacuuuuuugaaauaauaaaucugguagaaaaaugagaucucaaaggcucuuuucagagccaccaaaaaaaaaaaaaaaaaaaaaaaaaaaaaaaaaaaaaaaaaaaaaaaaaaaaaaaaaaaaaaaaagaauu

SEQ ID NO: 30695 - RNA, 1778 nt, Artificial Sequence
  mRNA product Design b-4 (hSL-A64-N5) comprising derived and/or modified sequence from LASV(803213;Clade II)__AAF86703__GPCmut6 (opt1)
aggagagucccgcagucggcguccagcggcucugcuuguucgugugugugucguugcaggccuuauucaagcuuaccaugggccagaucaucaccuucuuccaggaggugccccacgucaucgaggaggugaugaacaucgugcugaucgcccucagccugcuggccauccucaaggggaucuacaacgucgcgaccugcggccuguucgggcugaucuccuuccuccugcugugcggccgcagcugcuccgugacguacaaggggguguacgagcuccagacccuggagcugaacauggccaaccucaacaugugcaugccgcugagcugcaccaagaacaacucccaccacuacaucauggucggcaacgagaccggccuggagcucacgcugaccaacaccagcaucaucaaccacaaguucugcaaccuguccgacgcccacaagaagaaccucuacgaccacgcccugaugagcaucaucuccaccuuccaccugagcauccccaacuucaaccaguacgaggccauguccugcgacuucaacgggggcaagaucagcgugcaguacaaccucucccacagcuucgcgguggacgccgccaaccacugcgggacgaucgccaacggcguccugcagaccuucaugcggauggcguggggcggguccuacaucgcccuggacagcggcaaggggaacugggacugcaucaugaccuccuaccaguaccucaucauccagaacaccacgugggaggaccacugccaguucagccgccccucccccaucggcuaccuggggcugcucagccagcggacccgcgacaucuacaucagccggcgccugcugggcaccuucaccuggacgcucuccgacagcgagggcaacgaggcccccgggggcuacugccugacccgguggaugcugaucgaggccgagcucaagugcuucgggaacaccgccguggcgaagugcaacgagaagcacgacgaggaguucugcgacaugcugcgccuguucgacuucugcaagcaggccaucaagcggcucaagaccccggcccagauguccauccagcugaucaacaaggccgugaacgcccugaucaacgaccagcucaucaugaagaaccaccuccgcgacaucaugggcauccccuacugcaacuacagccgguacugguaccugaaccacacggucaccgggaagaccucccugccccgcugcuggcuggugagcaacggcuccuaccugaacgagacccacuucagcgacgacaucgagcagcaggcggacaacaugaucacggagaugcuccagaaggaguacauggaccggcagggcaagaccccgcuggggcugguggaccuguucgucuucuccaccagcuucuaccucaucuccaucuuccugcaccuggugaagauccccacccaccgccacaucgugggcaagcccugccccaagccgcaccggcucaaccacauggggaucugcagcugcggccuguacaagcaccccgggguccccgugaaguggaagcgcugaggacuaguaauaaggaaacuguaugaaugucugugggcaggaagugaagagauccuucuguaaagguuuuuggaauuaugucugcugaauaauaaacuuuuuugaaauaauaaaucugguagaaaaaugagaucucaaaggcucuuuucagagccaccaaaaaaaaaaaaaaaaaaaaaaaaaaaaaaaaaaaaaaaaaaaaaaaaaaaaaaaaaaaaaaaaagaauu

SEQ ID NO: 30696 - RNA, 1778 nt, Artificial Sequence
  mRNA product Design b-4 (hSL-A64-N5) comprising derived and/or modified sequence from LASV(GA391;Clade III)__CAA36645__GPCmut6 (opt1)
aggagagucccgcagucggcguccagcggcucugcuuguucgugugugugucguugcaggccuuauucaagcuuaccaugggccagaucgugaccuucuuccaggaggucccccacgugaucgaggaggugaugaacaucguccugaucgcccucagcauccuggccauccugaaggggcucuacaacguggcgaccugcggccugaucgggcuggugacguuccuccugcuguccggccgcagcugcucccucaucuacaaggggaccuacgagcugcagacccuggagcucaacauggagacccugaacaugugcaugccgcugagcugcacgaagaacaacucccaccacuacauccgggucggcaacgagaccggccucgagcugacccugaccaacacgagcauccucaaccacaaguucugcaaccuguccgacgcccacaagcgcaaccuguacgaccacagccucauguccaucaucagcaccuuccaccuguccauccccaacuucaaccaguacgaggccaugagcugcgacuucaacgggggcaagaucaccgugcaguacaaccugucccacagcuucgccguggacgccgcggggcacugcggcacccucgccaacgggguccugcagacguucaugcggauggccuggggcggcuccuacaucgcccuggacagcgggcgcggcaacugggacugcaucaugaccuccuaccaguaccucaucauccagaacaccaccugggacgaccacugccaguucagccggcccucccccaucggguaccugggccugcucagccagcgcacgcgggacaucuacaucagccgccggcugcugggcaccuucaccuggacccucuccgacagcgaggggaacgagacgccgggcggguacugccugacccgcuggaugcugaucgaggcggagcucaagugcuucggcaacaccgccguggccaagugcaacgagaagcacgacgaggaguucugcgacaugcugcggcuguucgacuucugcaagcaggccauccgccggcucaagacccccgcccagauguccauccagcugaucaacaaggcggugaacgcccugaucaacgaccagcucaucaugaagaaccaccuccgcgacaucauggggauccccuacugcaacuacagccgguacugguaccugaaccacacguccaccggcaagaccagccugccccgcugcuggcugaucuccaacggcagcuaccugaacgagaccaaguucuccgacgacaucgagcagcaggccgacaacaugaucacggagaugcugcagaaggaguacaucgaccggcaggggaagaccccgcucggccuggucgaccuguucguguucagcaccuccuucuaccucaucagcaucuuccugcaccuggugaagauccccacccaccgccacaucgucgggaagcccugccccaagccgcaccggcucaaccacaugggcaucugcuccugcgggcuguacaagcagcccggcgugcccgugcgcuggaagcggugaggacuaguaauaaggaaacuguaugaaugucugugggcaggaagugaagagauccuucuguaaagguuuuuggaauuaugucugcugaauaauaaacuuuuuugaaauaauaaaucugguagaaaaaugagaucucaaaggcucuuuucagagccaccaaaaaaaaaaaaaaaaaaaaaaaaaaaaaaaaaaaaaaaaaaaaaaaaaaaaaaaaaaaaaaaaagaauu

SEQ ID NO: 30697 - RNA, 1781 nt, Artificial Sequence
  mRNA product Design b-4 (hSL-A64-N5) comprising derived and/or modified sequence from LASV(AV;Clade V)__CCA30314__GPCmut6 (opt1)
aggagagucccgcagucggcguccagcggcucugcuuguucgugugugugucguugcaggccuuauucaagcuuaccaugggccagaucgugaccuucuuccaggaggucccccacgugaucgaggaggugaugaacaucguccugaucgcccucagcauccuggccgugcugaaggggcucuacaacaucgcgaccugcggccugaucgggcugaucacguuccuccugcugugcggccgcuccugcagcuccaaccucuacaaggggguguacgagcugcagagccuggaccucaacauggagacccugaacaugugcaugccgcuguccugcaccaagaacaacagccaccacuacauccgggucggcaacgacaccggccucgagcugacgcugaccaacaccuccauccucaaccacaaguucugcaaccugagcgacgcccacaagaaggaccuguacgaccacgcccucauguccaucaucagcaccuuccaccuguccauccccaacuucaaccaguacgaggccaugagcugcgacuucaacgggggcaagaucuccgugcaguacaaccugagccacuccuacgccaucgacgcggccaaccacugcgggacgguggccaacggcauccuccagaccuucaugcgcauggccuggggcgggagcuacaucgcgcuggacuccggccgggggaacugggacugcaucaugaccagcuaccaguaccugaucauccagaacaccacgugggagaaccacugccaguucucccgccccagccccaucggcuaccucgggcugcugagccagcggacccgcgacaucuacaucucccggcgccuccugggcaccuucaccuggacgcugagcgacuccgagggcaacgccacccccgggggcuacugccucacccgguggaugcugaucgaggccgagcugaagugcuucgggaacaccgccgucgccaagugcaacgagaagcacgacgaggaguucugcgacaugcuccgccuguucgacuucugcaagcaggcgaucagccggcugaaguccccggcccagaugagcauccagcucaucaacaaggccgugaacgcccugaucaacgaccagcugaucaugaagaaccaccuccgcgacaucaugggcauccccuacugcaacuacuccaaguacugguaccugaaccacacgaucaccgggaagaccagccugcccaagugcuggcucguguccaacggcagcuaccugaacgagacccacuucuccgacgacaucgagcagcaggccgacaacaugaucacggagaugcugcagaaggaguacauggagcggcagggcaagaccccgcuggggcucgucgaccuguucguguucagcaccuccuucuaccugaucagcaucuuccuccgccuggugaagauccccacccaccggcacaucgucggcaagcccugccccaagccgcaccgccugaaccacauggggaucugcuccugcggccucuacaagcagcccggggugcccgugcgguggaagcgcugaggacuaguaauaaggaaacuguaugaaugucugugggcaggaagugaagagauccuucuguaaagguuuuuggaauuaugucugcugaauaauaaacuuuuuugaaauaauaaaucugguagaaaaaugagaucucaaaggcucuuuucagagccaccaaaaaaaaaaaaaaaaaaaaaaaaaaaaaaaaaaaaaaaaaaaaaaaaaaaaaaaaaaaaaaaaagaauu

SEQ ID NO: 30698 - RNA, 1778 nt, Artificial Sequence
  mRNA product Design b-4 (hSL-A64-N5) comprising derived and/or modified sequence from LASV(Togo/2016/7082;Clade VI)__AMR44577__GPCmut6 (opt1)
aggagagucccgcagucggcguccagcggcucugcuuguucgugugugugucguugcaggccuuauucaagcuuaccaugggccagaucaucaccuucuuccaggaggugccccacgucaucgaggaggugaugaacaucgugcugaucgcccucagccugcuggccauccucaagggggucuacaacguggcgaccugcggcaucaucgggcuggugacguuccuguuccucugcggccgcuccugcagccugaucuacaagggguccuacgagcugcagacccucgagcugaacauggagacccugaacaugugcaugccgcucagcugcaccaagaacuccagccaccacuacauccgggucggcaacgagacgggccuggagcugacccucaccaacaccuccaucaucaaccacaaguucugcaaccugagcgacgcccacaagcgcaaccuguacgaccacgcccucauguccauccugagcacguuccaccuguccauccccaacuucaaccaguacgaggccaugagcugcgacuucaacgggggcaagaucuccgugcaguacaaccucagccacgccuacgcgguggacgccgccgagcacugcgggaccgucgccaacggcgugcugcagaccuucaugcggauggcguggggcggguccuacaucgcccuggacagcggccgcgggaacugggacugcaucaugaccuccuaccaguaccucaucauccagaacacgaccugggaggaccacugccaguucagccggcccucccccaucggcuaccuggggcugcucagccagcgcacccgggacaucuacaucagccgccggcugcugggcaccuucacguggacccucuccgacagcgagggcaacgagacccccgggggcuacugccugacccgcuggaugcugaucgaggccgagcucaagugcuucgggaacacggccguggccaagugcaacgagaagcacgacgaggaguucugcgacaugcugcggcuguucgacuucugcaagcaggcgauccagcgccucaaguccccggcccagaugagcauccagcugaucaacaaggccgucaacgcccugaucaacgaccagcucaucaugaagaaccaccuccgggacaugaugggcauccccuacugcaacuacuccaaguacugguaccugaaccacaccagcuccgggcgcaccagccugcccaagugcuggcugguguccaacggcagcuaccugaacgagacccacuucuccgacgacaucgagcagcaggccgacaacaugaucacggagaugcuccagaaggaguacaucgaccggcagggcaagaccccgcuggggcugguggaccuguucgucuucagcaccuccuucuaccucaucagcaucuuccugcaccugaucaagauccccacccaccgccacaucgugggcaagcccugccccaagccgcaccggcucaaccacauggggaucugcuccugcggccuguacaagcagcccggggugcccacgcgcuggaagcggugaggacuaguaauaaggaaacuguaugaaugucugugggcaggaagugaagagauccuucuguaaagguuuuuggaauuaugucugcugaauaauaaacuuuuuugaaauaauaaaucugguagaaaaaugagaucucaaaggcucuuuucagagccaccaaaaaaaaaaaaaaaaaaaaaaaaaaaaaaaaaaaaaaaaaaaaaaaaaaaaaaaaaaaaaaaaagaauu

SEQ ID NO: 30699 - RNA, 1778 nt, Artificial Sequence
  mRNA product Design b-4 (hSL-A64-N5) comprising derived and/or modified sequence from LASV(KAK-428;Clade n.d. (VII))__ANH09740__GPCmut6 (opt1)
aggagagucccgcagucggcguccagcggcucugcuuguucgugugugugucguugcaggccuuauucaagcuuaccaugggccagaucgugaccuucuuccaggaggucccccacgugaucgaggaggugaugaacaucguccugaucgcccucagccugcuggccauccucaaggggcuguacaacuucgcgaccugcggcgugaucgggcugaucacguuccuccugcugugcggccgcuccugcagcgccaccuacaaggggcaguacgagcuccagacccuggagcugaacauggagucccucaacaugugcaugccgcugagcugcaccaagaacaacucccaccacuacauccgggccggcaacaacacgggccuggagcucacccugaccaacaccagcaucaucucccacaaguucugcaaccugagcgacgcccacaagaagaaccucuacgaccacacgcugauguccaucaucaccaccuuccaccugagcauccccaacuucaaccaguacgaggccauguccugcgacuucaacgggggcaagaucagcauccaguacaaccucucccacagcuacgcgggggacgccgcccagcacugcggcaccguggccaacgggguccugcagacguucaugcgcauggcguggggcggcuccuaccuggcccucgacagcgggcggcgcggcugggacugcaucaucuccagcuaccaguaccugaucauccagaacaccaccugggacgaccacugccaguucucccggcccagccccaucggguaccugggcuucgugagccagaagacccgcgacaucuacaucucccggcgccuccugggcacguucaccuggacccugagcgacuccgaggggcacgacaugccgggcggguacugccucacccgguggaugcugaucgaggccgaccugaagugcuucggcaacacggccguggccaagugcaacgagaagcacgacgaggaguucugcgacauguggcgccucuucgacuucugcaagcaggcgauccagcggcugaaggcccccgcccagaugaacauccagcugaucaacaaggccgucaacgcccucaucaacgaccagcugaugaugaagaaccaccuccgcgacaucauggggauccccuacugcaacuacagcaaguucugguaccugaacaacaccaccaccggccggacgucccugccccgcugcuggcugaucagcaacggcuccuaccucaacgagacccacuucagcgacgacaucgagcagcaggcggacaacaugaucaccgagaugcugcagaaggaguacauggaccggcaggggaagaccccgcugggccucguggaccuguucguguucuccacgagcuucuaccugaucaccaucuuccugcaccucgucaagauccccacccaccgccacaucguggggaagcccugccccaagccgcaccggcugaaccacaugggcaucugcuccugcgggcuguacaagcagcccggcgugcccguccgcuggaagcggugaggacuaguaauaaggaaacuguaugaaugucugugggcaggaagugaagagauccuucuguaaagguuuuuggaauuaugucugcugaauaauaaacuuuuuugaaauaauaaaucugguagaaaaaugagaucucaaaggcucuuuucagagccaccaaaaaaaaaaaaaaaaaaaaaaaaaaaaaaaaaaaaaaaaaaaaaaaaaaaaaaaaaaaaaaaaagaauu

SEQ ID NO: 30700 - RNA, 1778 nt, Artificial Sequence; identical to SEQ ID NO: 30694
  mRNA product Design b-4 (hSL-A64-N5) comprising derived and/or modified sequence from LASV(Pinneo-NIG-1969;Clade I)__AIT17836__GPCmut6 (opt1)

SEQ ID NO: 30701 - RNA, 1778 nt, Artificial Sequence
  mRNA product Design b-4 (hSL-A64-N5) comprising derived and/or modified sequence from LASV(ISTH0009-NIG-2011;Clade II)__AIT17404__GPCmut6 (opt1)
aggagagucccgcagucggcguccagcggcucugcuuguucgugugugugucguugcaggccuuauucaagcuuaccaugggccagaucaucaccuucuuccaggaggugccccacgucaucgaggaggugaugaacaucgugcugaucgcccucagccugcuggccauccucaaggggaucuacaacgucgcgaccugcggccuguucgggcugguguccuuccuccugcugugcggccgcagcugcuccacgaccuacaaggggguguacgagcuccagacccuggagcuggacauggccagccucaacaugugcaugccgcuguccugcaccaagaacaacagccaccacuacaucauggucggcaacgagacgggccuggagcucacccugaccaacaccuccaucaucaaccacaaguucugcaaccugagcgacgcccacaagaagaaccucuacgaccacgcccugauguccaucaucagcacguuccaccuguccauccccaacuucaaccaguacgaggccaugagcugcgacuucaacgggggcaagaucuccgugcaguacaaccucagccacgcguacgccguggacgccgccaaccacugcgggaccaucgcgaacggcguccugcagaccuucaugcggauggccuggggcggguccuacaucgcccuggacagcggcaagggguccugggacugcaucaugaccagcuaccaguaccucaucauccagaacacgaccugggaggaccacugccaguucucccgccccagccccaucggcuaccuggggcugcucagccagcggacccgcgacaucuacaucucccggcgccugcugggcaccuucacguggacccucagcgacuccgagggcaacgagacccccgggggcuacugccugacccgguggaugcugaucgaggccgagcucaagugcuucgggaacacggccguggcgaagugcaacgagaagcacgacgaggaguucugcgacaugcugcgccuguucgacuucugcaagcaggccauccggcgccucaagaccccggcccagaugagcauccagcugaucaacaaggccgugaacgcccugaucaacgaccagcucaucaugaagaaccaccuccgggacaucaugggcauccccuacugcaacuacuccaaguacugguaccugaaccacaccgucaccgggaagacgagccugccccgcugcuggcugguguccaacggcagcuaccugaacgagacccacuucuccgacgacaucgagcagcaggcggacaacaugaucaccgagcuccugcagaaggaguacauggaccggcagggcaagaccccgcuggggcugguggaccucuucgucuucagcacguccuucuaccugaucagcaucuuccugcaccucaucaagauccccacccaccgccacaucaccggcaagcccugccccaagccgcaccggcugaaccacauggggaucugcuccugcggccuguacaagcaccccggggugcccgugaaguggaagcgcugaggacuaguaauaaggaaacuguaugaaugucugugggcaggaagugaagagauccuucuguaaagguuuuuggaauuaugucugcugaauaauaaacuuuuuugaaauaauaaaucugguagaaaaaugagaucucaaaggcucuuuucagagccaccaaaaaaaaaaaaaaaaaaaaaaaaaaaaaaaaaaaaaaaaaaaaaaaaaaaaaaaaaaaaaaaaagaauu

SEQ ID NO: 30702 - RNA, 1778 nt, Artificial Sequence
  mRNA product Design b-4 (hSL-A64-N5) comprising derived and/or modified sequence from LASV(ISTH2010-NIG-2012;Clade II)__AIT17482__GPCmut6 (opt1)
aggagagucccgcagucggcguccagcggcucugcuuguucgugugugugucguugcaggccuuauucaagcuuaccaugggccagaucaucaccuucuuccaggaggugccccacgucaucgaggaggugaugaacaucgugcugaucgcccucagccugcuggccauccucaaggggaucuacaacgucgcgaccugcggccuguucgggcugguguccuuccuccugcugugcggccgcagcugcuccacgaccuacaaggggguguacgagcuccagacccuggagcuggacauggccagccucaacaugugcaugccgcuguccugcaccaagaacaacagccaccacuacaucauggucggcaacgagacgggccuggagcucacccugaccaacaccuccaucaucaaccacaaguucugcaaccugagcgacgcccacaagaagaaccucuacgaccacgcccugauguccaucaucagcacguuccaccuguccauccccaacuucaaccaguacgaggccaugagcugcgacuucaacgggggcaagaucuccgugcaguacaaccucagccacgcguacgccguggacgccgccaaccacugcgggaccaucgcgaacggcguccugcagaccuucaugcggauggccuggggcggguccuacaucgcccuggacagcggcaagggguccugggacugcaucaugaccagcuaccaguaccucaucauccagaacaucacgugggaggaccacugccaguucucccgccccagccccaucggcuaccuggggcugcucagccagcggacccgcgacaucuacaucucccggcgccugcugggcaccuucaccuggacgcucagcgacuccgagggcaacgagacccccgggggcuacugccugacccgguggaugcugaucgaggccgagcucaagugcuucgggaacaccgccguggcgaagugcaacgagaagcacgacgaggaguucugcgacaugcugcgccuguucgacuucugcaagcaggccauccggcgccucaagacgccggcccagaugagcauccagcugaucaacaaggccgugaacgcccugaucaacgaccagcucaucaugaagaaccaccuccgggacaucaugggcauccccuacugcaacuacuccaaguacugguaccugaaccacaccgucaccgggaagaccagccugccccgcugcuggcugguguccaacggcagcuaccugaacgagacgcacuucuccgacgacaucgagcagcaggcggacaacaugaucaccgagcuccugcagaaggaguacaucgaccggcagggcaagaccccgcuggggcugguggaccucuucgucuucagcaccuccuucuaccugaucagcaucuuccugcaccucgugaagauccccacgcaccgccacguggucggcaagcccugccccaagccgcaccggcugaaccacauggggaucugcuccugcggccuguacaagcaccccggggugcccgugaaguggaagcgcugaggacuaguaauaaggaaacuguaugaaugucugugggcaggaagugaagagauccuucuguaaagguuuuuggaauuaugucugcugaauaauaaacuuuuuugaaauaauaaaucugguagaaaaaugagaucucaaaggcucuuuucagagccaccaaaaaaaaaaaaaaaaaaaaaaaaaaaaaaaaaaaaaaaaaaaaaaaaaaaaaaaaaaaaaaaaagaauu

SEQ ID NO: 30703 - RNA, 1778 nt, Artificial Sequence
  mRNA product Design b-4 (hSL-A64-N5) comprising derived and/or modified sequence from LASV(Lassa virus/H.sapiens-wt/NGA/2015/ISTH_0543;Clade II)__AVO03639__GPCmut6 (opt1)
aggagagucccgcagucggcguccagcggcucugcuuguucgugugugugucguugcaggccuuauucaagcuuaccaugggccagaucaucaccuucuuccaggaggugccccacgucaucgaggaggugaugaacaucgugcugaucgcccucagccugcuggccauccucaaggggaucuacaacgucgcgaccugcggccuguucgggcugguguccuuccuccugcugugcggccgcagcugcuccacgaccuacaaggggguguacgagcuccagacccuggagcuggacauggccaaccucaacaugugcaugccgcugagcugcaccaagaacaacucccaccacuacaucauggucggcaacgagacgggccuggagcucacccugaccaacaccagcaucaucaaccacaaguucugcaaccuguccgacgcccacaagaagaaccucuacgaccacgcccugaugagcaucaucuccacguuccaccugagcauccccaacuucaaccaguacgaggccauguccugcgacuucaacgggggcaagaucagcgugcaguacaaccucucccacaccuacgcgguggacgccgccaaccacugcgggaccaucgccaacggcguccugcagaccuucaugcggauggcguggggcgggagcuacaucgcccuggacuccggcaaggggagcugggacugcaucaugacguccuaccaguaccucgugauccagaacaccaccugggaggaccacugccaguucagccgccccucccccaucggcuaccuggggcugcucagccagcggacccgcgacaucuacaucagccggcgccugcugggcacguucaccuggacccucuccgacagcgagggcaacgagacccccgggggcuacugccugacgcgguggaugcugaucgaggccgagcucaagugcuucgggaacaccgccguggccaagugcaacgagaagcacgacgaggaguucugcgacaugcugcgccuguucgacuucugcaagcaggcgauccggcgccucaagaccccggcccagauguccauccagcugaucaacaaggccgucaacgcccugaucaacgaccagcucaucaugaagaaccaccuccgggacaucaugggcauccccuacugcaacuacagcaaguacugguaccugaaccacaccgugacggggaagaccucccugccccgcugcuggcuggugagcaacggcuccuaccugaacgagacccacuucagcgacgacaucgagcagcaggccgacaacaugaucaccgagcuccugcagaaggaguacaucgaccggcagggcaagacgccgcuggggcuggucgaccucuucguguucuccaccagcuucuaccugaucuccaucuuccugcaccucgugaagauccccacccaccgccacaucaccggcaagcccugccccaagccgcaccggcugaaccacauggggaucugcagcugcggccuguacaagcaccccgggguccccgugaaguggaagcgcugaggacuaguaauaaggaaacuguaugaaugucugugggcaggaagugaagagauccuucuguaaagguuuuuggaauuaugucugcugaauaauaaacuuuuuugaaauaauaaaucugguagaaaaaugagaucucaaaggcucuuuucagagccaccaaaaaaaaaaaaaaaaaaaaaaaaaaaaaaaaaaaaaaaaaaaaaaaaaaaaaaaaaaaaaaaaagaauu

SEQ ID NO: 30704 - RNA, 1778 nt, Artificial Sequence
  mRNA product Design b-4 (hSL-A64-N5) comprising derived and/or modified sequence from LASV(Lassa virus/H.sapiens-wt/NGA/2016/ISTH_0009;Clade II)__AVO03571__GPCmut6 (opt1)
aggagagucccgcagucggcguccagcggcucugcuuguucgugugugugucguugcaggccuuauucaagcuuaccaugggccagaucaucaccuucuuccaggaggugccccacgucaucgaggaggugaugaacaucgugcugaucgcccucagccugcuggccauccucaaggggaucuacaacgucgcgaccugcggccugcuggggcucguguccuuccugcugcucugcggccgcagcugcuccacgaccuacaaggggguguacgagcugcagacccuggagcucgacauggccagccugaacaugugcaugccgcuguccugcaccaagaacaacagccaccacuacaucauggucggcaacgagacgggccucgagcugacccugaccaacaccuccaucaucaaccacaaguucugcaaccucagcgacgcccacaagaagaaccuguacgaccacgcccugauguccaucaucagcacguuccaccucuccauccccaacuucaaccaguacgaggccaugagcugcgacuucaacgggggccggaucuccgugcaguacaaccugagccacuccuacgcgguggacgccgccaaccacugcgggaccaucgccaacggcguccugcagaccuucaugcgcauggcguggggcgggagcuacaucgcccucgacuccggcaaggggagcugggacugcaucaugaccuccuaccaguaccugaucauccagaacacgaccugggaggaccacugccaguucagccggcccagccccaucggcuaccuggggcuccugucccagcgcacccgggacaucuacaucagccgccggcugcucggcaccuucacguggacccuguccgacagcgagggcaacgagacccccgggggcuacugccugacccgcuggaugcucaucgaggccgagcugaagugcuucgggaacacggccguggccaagugcaacgagaagcacgacgaggaguucugcgacaugcugcggcuguucgacuucugcaagcaggcgauccgccggcugaagaccccggcccagauguccauccagcugaucaacaaggccgugaacgcccucaucaacgaccagcugaucaugaagaaccaccuccgcgacaucaugggcauccccuacugcaacuacagcaaguacugguaccucaaccacaccgucaccgggaagacgucccugccccggugcuggcuggugagcaacggcuccuaccucaacgagacccacuucagcgacgacaucgagcagcaggccgacaacaugaucaccgagcugcugcagaaggaguacaucgaccgccagggcaagaccccgcuggggcucguggaccuguucgucuucuccacgagcuucuaccugaucuccaucuuccuccaccuggugaagauccccacccaccggcacaucaccggcaagcccugccccaagccgcaccgccugaaccacauggggaucugcagcugcggccucuacaaccaccccggggugcccgucaaguggaagcggugaggacuaguaauaaggaaacuguaugaaugucugugggcaggaagugaagagauccuucuguaaagguuuuuggaauuaugucugcugaauaauaaacuuuuuugaaauaauaaaucugguagaaaaaugagaucucaaaggcucuuuucagagccaccaaaaaaaaaaaaaaaaaaaaaaaaaaaaaaaaaaaaaaaaaaaaaaaaaaaaaaaaaaaaaaaaagaauu

SEQ ID NO: 30705 - RNA, 1778 nt, Artificial Sequence
  mRNA product Design b-4 (hSL-A64-N5) comprising derived and/or modified sequence from LASV(Lassa virus/H.sapiens-wt/NGA/2016/ISTH_0017;Clade II)__AVO03567__GPCmut6 (opt1)
aggagagucccgcagucggcguccagcggcucugcuuguucgugugugugucguugcaggccuuauucaagcuuaccaugggccagaucaucaccuucuuccaggaggugccccacgucaucgaggaggugaugaacaucgugcugaucgcccucagccugcuggccauccucaaggggaucuacaacgucgcgaccugcggccuguucgggcugguguccuuccuccugcugugcggccgcagcugcuccacgaccuacaaggggguguacgagcuccagacccuggagcuggacauggccagccucaacaugugcaugccgcuguccugcaccaagaacaacagccaccacuacaucauggucggcaacgagacgggccuggagcucacccugaccaacaccuccaucaucaaccacaaguucugcaaccugagcgacgcccacaagaagaaccucuacgaccacgcccugauguccaucaucagcacguuccaccuguccauccccaacuucaaccaguacgaggccaugagcugcgacuucaacgggggcaagaucuccgugcaguacaaccucagccacaccuacgcgaucgacgccgccaaccacugcgggaccaucgccaacggcgugcugcagaccuucaugcggauggcguggggcggguccuacaucgcccuggacagcggcaagggguccugggacugcaucaugacgagcuaccaguaccucaucauccagaacaccaccugggaggaccacugccaguucucccgccccagccccaucggcuaccuggggcugcucagccagcggacccgcgacaucuacaucucccggcgccugcugggcacguucaccuggacccucagcgacuccgagggcaacgagacccccgggggcuacugccugacgcgguggaugcugaucgaggccgagcucaagugcuucgggaacaccgccgucgccaagugcaacgagaagcacgacgaggaguucugcgacaugcugcgccuguucgacuucugcaagcaggcgauccggcgccucaagaccccggcccagaugagcauccagcugaucaacaaggccgugaacgcccugaucaacgaccagcucaucaugaagaaccaccuccgggacaucaugggcauccccuacugcaacuacuccaaguacugguaccugaaccacaccgugacggggaagaccagccugccccgcugcuggcuggucuccaacggcagcuaccugaacgagacccacuucuccgacgacaucgagcagcaggccgacaacaugaucaccgagcuccugcagaaggaguacauggaccggcagggcaagacgccgcuggggcugguggaccucuucguguucagcaccuccuucuaccugaucagcaucuuccugcaccucguccgcauccccacccaccggcacgugaucggcaagcccugccccaagccgcaccgccugaaccacauggggaucugcuccugcggccuguacaagcaccccggggugcccgucaaguggaagcggugaggacuaguaauaaggaaacuguaugaaugucugugggcaggaagugaagagauccuucuguaaagguuuuuggaauuaugucugcugaauaauaaacuuuuuugaaauaauaaaucugguagaaaaaugagaucucaaaggcucuuuucagagccaccaaaaaaaaaaaaaaaaaaaaaaaaaaaaaaaaaaaaaaaaaaaaaaaaaaaaaaaaaaaaaaaaagaauu

SEQ ID NO: 30706 - RNA, 1778 nt, Artificial Sequence
  mRNA product Design b-4 (hSL-A64-N5) comprising derived and/or modified sequence from LASV(Lassa virus/H.sapiens-wt/NGA/2018/ISTH_0959;Clade II)__AVV65099__GPCmut6 (opt1)
aggagagucccgcagucggcguccagcggcucugcuuguucgugugugugucguugcaggccuuauucaagcuuaccaugggccagaucaucaccuucuuccaggaggugccccacgucaucgaggaggugaugaacaucgugcugaucgcccucagccugcuggccauccucaaggggaucuacaacgucgugaccugcggccuguucgggcugguguccuuccuccugcugugcggccgcagcugcuccacgaccuacaagggggucuacgagcuccagacccuggagcuggacauggcgagccucaacaugugcaugccgcuguccugcaccaagaacaacagccaccacuacaucauggugggcaacgagacgggccuggagcucacccugaccaacaccuccaucaucaaccacaaguucugcaaccugagcgacgcccacaagaagaaccucuacgaccacgcccugauguccaucaucagcacguuccaccuguccauccccaacuucaaccaguacgaggccaugagcugcgacuucaacgggggcaagaucuccgugcaguacaaccucagccacgccuacgcgaucgacgccgccaaccacugcgggaccaucgccaacggcguccugcagaccuucaugcggauggcguggggcggguccuacaucgcccuggacagcggcaagggguccugggacugcaucaugaccagcuaccaguaccucaucauccagaacacgaccugggaggaccacugccaguucucccgccccagccccaucggcuaccuggggcugcucagccagcggacccgcgacaucuacaucucccggcgccugcugggcaccuucacguggacccucagcgacuccgagggcaacgagacccccgggggcuacugccugacccgguggaugcugaucgaggccgagcucaagugcuucgggaacacggccguggccaagugcaacgagaagcacgacgaggaguucugcgacaugcugcgccuguucgacuucugcaagcaggcgauccggcgccucaagaccccggcccagaugagcauccagcugaucaacaaggccgugaacgcccugaucaacgaccagcucaucaugaagaaccaccuccgggacaucaugggcauccccuacugcaacuacuccaaguacugguaccugaaccacaccgucaccgggaagacgagccugccccgcugcuggcugguguccaacggcagcuaccugaacgagacccacuucuccgacgacaucgagcagcaggccgacaacaugaucaccgagcuccugcagaaggaguacaucgaccggcagggcaagaccccgcuggggcugguggaccucuucgucuucagcacguccuucuaccugaucagcaucuuccugcaccucgugaagauccccacccaccgccacgugaucggcaagcccugccccaagccgcaccggcugaaccacauggggaucugcuccugcggccuguacaagcaccccgggguccccgugaaguggaagcgcugaggacuaguaauaaggaaacuguaugaaugucugugggcaggaagugaagagauccuucuguaaagguuuuuggaauuaugucugcugaauaauaaacuuuuuugaaauaauaaaucugguagaaaaaugagaucucaaaggcucuuuucagagccaccaaaaaaaaaaaaaaaaaaaaaaaaaaaaaaaaaaaaaaaaaaaaaaaaaaaaaaaaaaaaaaaaagaauu

SEQ ID NO: 30707 - RNA, 1778 nt, Artificial Sequence
  mRNA product Design b-4 (hSL-A64-N5) comprising derived and/or modified sequence from LASV(LASV003-NIG-2008;Clade II)__AIT17580__GPCmut6 (opt1)
aggagagucccgcagucggcguccagcggcucugcuuguucgugugugugucguugcaggccuuauucaagcuuaccaugggccagaucaucaccuucuuccaggaggugccccacgucaucgaggaggugaugaacaucgugcugaucgcccucagccugcuggccauccucaaggggaucuacaacgucgcgaccugcggccuguucgggcugguguccuuccuccugcugugcggccgcagcugcuccacgaccuacaaggggguguacgagcuccagacccuggagcuggacauggccagccucaacaugugcaugccgcuguccugcaccaagaacaacagccaccacuacaucauggucggcaacgagacgggccuggagcucacccugaccaacaccuccaucaucaaccacaaguucugcaaccugagcgacgcccacaagaagaaccucuacgaccacgcccugauguccaucaucagcacguuccaccuguccauccccaacuucaaccaguacgaggccaugagcugcgacuucaacgggggcaagaucuccgugcaguacaaccucagccacaccuacgcgguggacgccgccaaccacugcgggaccaucgccaacggcguccugcagaccuucaugcggauggcguggggcggguccuacaucgcccuggacagcggcaagggguccugggacugcaucaugacgagcuaccaguaccucaucauccagaacaccaccugggaggaccacugccaguucucccgccccagccccaucggcuaccuggggcugcucagccagcggacccgcgacaucuacaucucccggcgccugcugggcacguucaccuggacccucagcgacuccgagagcaacgagaccccgggcggguacugccugacgcgguggaugcugaucgaggccgagcucaagugcuucggcaacaccgccguggccaagugcaacgagaagcacgacgaggaguucugcgacaugcugcgccuguucgacuucugcaagcaggcgauccggcgccucaaggcccccgcccagauguccauccagcugaucaacaaggccgugaacgcccugaucaacgaccagcucaucaugaagaaccaccuccgggacaucauggggauccccuacugcaacuacagcaaguacugguaccugaaccacaccgucaccggccgcacgucccugccccggugcuggcuggugagcaacggguccuaccugaacgagacccacuucagcgacgacaucgagcagcaggcggacaacaugaucaccgagcuccugcagaaggaguacauggaccgccagggcaagaccccgcugggccugguggaccucuucgucuucuccacgagcuucuaccugaucuccaucuuccugcaccucgugaagauccccacccaccggcacgugaucgggaagcccugccccaagccgcaccgccugaaccacaugggcaucugcagcugcgggcuguacaagcaccccggcguccccgugaaguggaagcggugaggacuaguaauaaggaaacuguaugaaugucugugggcaggaagugaagagauccuucuguaaagguuuuuggaauuaugucugcugaauaauaaacuuuuuugaaauaauaaaucugguagaaaaaugagaucucaaaggcucuuuucagagccaccaaaaaaaaaaaaaaaaaaaaaaaaaaaaaaaaaaaaaaaaaaaaaaaaaaaaaaaaaaaaaaaaagaauu

SEQ ID NO: 30708 - RNA, 1778 nt, Artificial Sequence
  mRNA product Design b-4 (hSL-A64-N5) comprising derived and/or modified sequence from LASV(LASV035-NIG-2009;Clade II)__AIT17588__GPCmut6 (opt1)
aggagagucccgcagucggcguccagcggcucugcuuguucgugugugugucguugcaggccuuauucaagcuuaccaugggccagaucaucaccuucuuccaggaggugccccacgucaucgaggaggugaugaacaucgugcugaucgcccucagccugcuggccauccucaaggggaucuacaacgucgcgaccugcggccuguucgggcugguguccuuccuccugcugugcggccgcagcugcuccacgaccuacaaggggguguacgagcuccagacccuggagcuggacauggccagccucaacaugugcaugccgcuguccugcaccaagaacaacagccaccacuacaucauggucggcaacgagacgggccuggagcucacccugaccaacaccuccaucaucaaccacaaguucugcaaccugagcgacgcccacaagaagaaccucuacgaccacgcccugauguccaucaucagcacguuccaccuguccauccccaacuucaaccaguacgaggccaugagcugcgacuucaacgggggcaagaucuccgugcaguacaaccucagccacgcguacgccguggacgccgccaaccacugcgggaccaucgcgaacggcguccugcagaccuucaugcggauggccuggggcggguccuacaucgcccuggacagcggcaagggguccugggacugcaucaugaccagcuaccaguaccucaucauccagaacacgaccugggaggaccacugccaguucucccgccccagccccaucggcuaccuggggcugcucagccagcggacccgcgacaucuacaucucccggcgccugcugggcaccuucacguggacccucagcgacuccgagggcaacgagacccccgggggcuacugccugacccgguggaugcugaucgaggccgagcucaagugcuucgggaacacggccguggcgaagugcaacgagaagcacgacgaggaguucugcgacaugcugcgccuguucgacuucugcaagcaggccauccggcgccucaaggccccggcccagaugagcauccagcugaucaacaaggccgugaacgcgcugaucaacgaccagcucaucaugaagaaccaccuccgggacaucaugggcauccccuacugcaacuacuccaaguacugguaccugaaccacaccgucaccgggaagaccagccugccccgcugcuggcugguguccaacggcagcuaccugaacgagacgcacuucuccgacgacaucgagcagcaggccgacaacaugaucaccgagcuccugcagaaggaguacaucgaccggcagggcaagaccccgcuggggcugguggaccucuucgucuucagcaccuccuucuaccugaucagcaucuuccugcaccucgugaagauccccacgcaccgccacgugaucggcaagcccugccccaagccgcaccggcugaaccacauggggaucugcuccugcggccuguacaagcaccccgggguccccgugaaguggaagcgcugaggacuaguaauaaggaaacuguaugaaugucugugggcaggaagugaagagauccuucuguaaagguuuuuggaauuaugucugcugaauaauaaacuuuuuugaaauaauaaaucugguagaaaaaugagaucucaaaggcucuuuucagagccaccaaaaaaaaaaaaaaaaaaaaaaaaaaaaaaaaaaaaaaaaaaaaaaaaaaaaaaaaaaaaaaaaagaauu

SEQ ID NO: 30709 - RNA, 1778 nt, Artificial Sequence
  mRNA product Design b-4 (hSL-A64-N5) comprising derived and/or modified sequence from LASV(LASV1000-NIG-2009;Clade II)__AIT17782__GPCmut6 (opt1)
aggagagucccgcagucggcguccagcggcucugcuuguucgugugugugucguugcaggccuuauucaagcuuaccaugggccagaucaucaccuucuuccaggaggugccccacgucaucgaggaggugaugaacaucgugcugaucgcccucagccugcuggccauccucaaggggaucuacaacgucgcgaccugcggccuguucgggcugguguccuuccuccugcugugcggccgcagcugcuccacgaccuacaaggggguguacgagcuccagacccuggagcuggacauggccagccucaacaugugcaugccgcuguccugcaccaagaacaacagccaccacuacaucauggucggcaacgagacgggccuggagcucacccugaccaacaccuccaucaucaaccacaaguucugcaaccugagcgacgcccacaagaagaaccucuacgaccacgcccugauguccaucaucagcacguuccaccuguccauccccaacuucaaccaguacgaggccaugagcugcgacuucaacgggggcaagaucuccgugcaguacaaccucagccacaccuacgcgguggacgccgccaaccacugcgggaccaucgccaacggcguccugcagaccuucaugcggauggcguggggcggguccuacaucgcccuggacagcggcaagggguccugggacugcaucaugacgagcuaccaguaccucaucauccagaacaccaccugggaggaccacugccaguucucccgccccagccccaucggcuaccuggggcugcucagccagcggacccgcgacaucuacaucucccggcgccugcugggcacguucaccuggacccucagcgacuccgagggcaacgagacccccgggggcuacugccugacgcgguggaugcugaucgaggccgagcucaagugcuucgggaacaccgccguggccaagugcaacgagaagcacgacgaggaguucugcgacaugcugcgccuguucgacuucugcaagcaggcgaucaagcggcucaagaccccggcccagaugagcauccagcugaucaacaaggccgugaacgcccugaucaacgaccagcucaucaugaagaaccaccuccgcgacaucaugggcauccccuacugcaacuacuccaaguacugguaccugaaccacaccgucacggggaagaccagccugccccggugcuggcugguguccaacggcagcuaccugaacgagacccacuucuccgacgacaucgagcagcaggccgacaacaugaucaccgagcuccugcagaaggaguacaucgaccgccagggcaagacgccgcuggggcugguggaccucuucgucuucagcaccuccuucuaccugaucagcaucuuccugcaccucgugaagauccccacccaccggcacguggucggcaagcccugccccaagccgcaccgccugaaccacauggggaucugcuccugcggccuguacaagcaccccggggugcccgugaaguggaagcggugaggacuaguaauaaggaaacuguaugaaugucugugggcaggaagugaagagauccuucuguaaagguuuuuggaauuaugucugcugaauaauaaacuuuuuugaaauaauaaaucugguagaaaaaugagaucucaaaggcucuuuucagagccaccaaaaaaaaaaaaaaaaaaaaaaaaaaaaaaaaaaaaaaaaaaaaaaaaaaaaaaaaaaaaaaaaagaauu

SEQ ID NO: 30710 - RNA, 1778 nt, Artificial Sequence
  mRNA product Design b-4 (hSL-A64-N5) comprising derived and/or modified sequence from LASV(LASV221-NIG-2010;Clade II)__AIT17624__GPCmut6 (opt1)
aggagagucccgcagucggcguccagcggcucugcuuguucgugugugugucguugcaggccuuauucaagcuuaccaugggccagaucaucaccuucuuccaggaggugccccacgucaucgaggaggugaugaacaucgugcugaucgcccucagccugcuggccauccucaaggggaucuacaacgucgcgaccugcggccuguucgggcugguguccuuccuccugcugugcggccgcagcugcuccacgaccuacaaggggguguacgagcuccagacccuggagcuggacauggccagccucaacaugugcaugccgcuguccugcaccaagaacaacagccaccacuacaucauggucggcaacgagacgggccuggagcucacccugaccaacaccuccaucaucaaccacaaguucugcaaccugagcgacgcccacaagaagaaccucuacgaccacgcccugauguccaucaucagcacguuccaccuguccauccccaacuucaaccaguacgaggccaugagcugcgacuucaacgggggcaagaucuccgugcaguacaaccucagccacaccuacgcgaucgacgccgccaaccacugcgggaccaucgccaacggcgugcugcagaccuucaugcggauggcguggggcggguccuacaucgcccuggacagcggcaagggguccugggacugcaucaugacgagcuaccaguaccucaucauccagaacaccaccugggaggaccacugccaguucucccgccccagccccaucggcuaccuggggcugcucagccagcggacccgcgacaucuacaucucccggcgccugcugggcacguucaccuggacccucagcgacuccgagggcaacgagacccccgggggcuacugccugacgcgguggaugcugaucgaggccgagcucaagugcuucgggaacaccgccgucgccaagugcaacgagaagcacgacgaggaguucugcgacaugcugcgccuguucgacuucugcaagcaggcgauccggcgccucaagaccccggcccagaugagcauccagcugaucaacaaggccgugaacgcccugaucaacgaccagcucaucaugaagaaccaccuccgggacaucaugggcauccccuacugcaacuacuccaaguacugguaccugaaccacaccgugacggggaagaccagccugccccgcugcuggcuggucuccaacggcagcuaccugaacgagacccacuucuccgacgacaucgagcagcaggccgacaacaugaucaccgagaugcuccagaaggaguacauggaccggcagggcaagacgccgcuggggcugguggaccuguucguguucagcaccuccuucuaccucaucagcaucuuccugcaccuggucaagauccccacccaccgccacgugaucggcaagcccugccccaagccgcaccggcucaaccacauggggaucugcuccugcggccuguacaagcaccccggggugcccgucaaguggaagcgcugaggacuaguaauaaggaaacuguaugaaugucugugggcaggaagugaagagauccuucuguaaagguuuuuggaauuaugucugcugaauaauaaacuuuuuugaaauaauaaaucugguagaaaaaugagaucucaaaggcucuuuucagagccaccaaaaaaaaaaaaaaaaaaaaaaaaaaaaaaaaaaaaaaaaaaaaaaaaaaaaaaaaaaaaaaaaagaauu

SEQ ID NO: 30711 - RNA, 1778 nt, Artificial Sequence
  mRNA product Design b-4 (hSL-A64-N5) comprising derived and/or modified sequence from LASV(LASV237-NIG-2010;Clade II)__AIT17638__GPCmut6 (opt1)
aggagagucccgcagucggcguccagcggcucugcuuguucgugugugugucguugcaggccuuauucaagcuuaccaugggccagaucaucaccuucuuccaggaggugccccacgucaucgaggaggugaugaacaucgugcugaucgcccucagccugcuggccauccucaaggggaucuacaacgucgcgaccugcggccuguucgggcugguguccuuccuccugcugugcggccgcagcugcuccacgaccuacaaggggguguacgagcuccagacccuggagcuggacauggccagccucaacaugugcaugccgcuguccugcaccaagaacaacagccaccacuacaucauggucggcaacgagacgggccuggagcucacccugaccaacaccuccaucaucaaccacaaguucugcaaccugagcgacgcccacaagaaggaccucuacgaccacgcccugauguccaucaucagcacguuccaccuguccauccccaacuucaaccaguacgaggccaugagcugcgacuucaacgggggcaagaucuccgugcaguacaaccucagccacaccuacgcgguggacgccgccaaccacugcgggaccaucgccaacggcguccugcagaccuucaugcggauggcguggggcggguccuacaucgcccuggacagcggcaagggguccugggacugcaucaugacgagcuaccaguaccucaucauccagaacaccaccugggaggaccacugccaguucucccgccccagccccaucggcuaccuggggcugcucagccagcggacccgcgacaucuacaucucccggcgccugcugggcacguucaccuggacccucagcgacuccgagggcaacgagacccccgggggcuacugccugacgcgguggaugcugaucgaggccgagcucaagugcuucgggaacaccgccguggccaagugcaacgagaagcacgacgaggaguucugcgacaugcugcgccuguucgacuucugcaagcaggcgauccggcgccucaagaccccggcccagaugagcauccagcugaucaacaaggccgugaacgcccugaucaacgaccagcucaucaugaagaaccaccuccgggacaucaugggcauccccuacugcaacuacuccaaguacugguaccugaaccacaccgucacggggaagaccagccugccccgcugcuggcugguguccaacggcagcuaccugaacgagacccacuucuccgacgacaucgagcagcaggccgacaacaugaucaccgagcuccugcagaaggaguacauggaccggcagggcaagacgccgcuggggcugguggaccucuucgucuucagcaccuccuucuaccugaucagcaucuuccugcaccucaucaagauccccacccaccgccacaucaccggcaagcccugccccaagccgcaccggcugaaccacauggggaucugcuccugcggccuguacaagcaccccggggugcccgugaaguggaagcgcugaggacuaguaauaaggaaacuguaugaaugucugugggcaggaagugaagagauccuucuguaaagguuuuuggaauuaugucugcugaauaauaaacuuuuuugaaauaauaaaucugguagaaaaaugagaucucaaaggcucuuuucagagccaccaaaaaaaaaaaaaaaaaaaaaaaaaaaaaaaaaaaaaaaaaaaaaaaaaaaaaaaaaaaaaaaaagaauu

SEQ ID NO: 30712 - RNA, 1778 nt, Artificial Sequence
  mRNA product Design b-4 (hSL-A64-N5) comprising derived and/or modified sequence from LASV(LASV253-NIG-2011;Clade II)__AIT17670__GPCmut6 (opt1)
aggagagucccgcagucggcguccagcggcucugcuuguucgugugugugucguugcaggccuuauucaagcuuaccaugggccagaucaucaccuucuuccaggaggugccccacgucaucgaggaggugaugaacaucgugcugaucgcccucagccugcuggccauccucaaggggaucuacaacgucgcgaccugcggccuguucgggcugguguccuuccuccugcugugcggccgcagcugcuccacgaccuacaaggggguguacgagcuccagacccuggagcuggacauggccagccucaacaugugcaugccgcuguccugcaccaagaacaacagccaccacuacaucauggucggcaacgagacgggccuggagcucacccugaccaacaccuccaucaucaaccacaaguucugcaaccugagcgacgcccacaagaagaaccucuacgaccacgcccugauguccaucaucagcacguuccaccuguccauccccaacuucaaccaguacgaggccaugagcugcgacuucaacgggggcaagaucuccgugcaguacaaccucagccacaccuacgcgguggacgccgccaaccacugcgggaccaucgccaacggcguccugcagaccuucaugcggauggcguggggcggguccuacaucgcccuggacagcggcaagggguccugggacugcaucaugacgagcuaccaguaccucaucauccagaacaccaccugggaggaccacugccaguucucccgccccagccccaucggcuaccuggggcugcucagccagcggacccgcgacaucuacaucucccggcgccugcugggcacguucaccuggacccucagcgacuccgagggcaacgagacccccgggggcuacugccugacgcgguggaugcugaucgaggccgagcucaagugcuucgggaacaccgccguggccaagugcaacgagaagcacgacgaggaguucugcgacaugcugcgccuguucgacuucugcaagcaggcgauccggcgccucaaggccccggcccagaugagcauccagcugaucaacaaggccgugaacgcccugaucaacgaccagcucaucaugaagaaccaccuccgggacaucaugggcauccccuacugcaacuacuccaaguacugguaccugaaccacaccgucaccgggcgcacgagccugccccggugcuggcugguguccaacggcagcuaccugaacgagacccacuucuccgacgacaucgagcagcaggcggacaacaugaucaccgagcuccugcagaaggaguacaucgaccgccagggcaagaccccgcuggggcugguggaccucuucgucuucagcacguccuucuaccugaucagcaucuuccugcaccucgugaagauccccacccaccggcacaucaucggcaagcccugccccaagccgcaccgccugaaccacauggggaucugcuccugcggccuguacaagcaccccggggugcccgucaaguggaagcggugaggacuaguaauaaggaaacuguaugaaugucugugggcaggaagugaagagauccuucuguaaagguuuuuggaauuaugucugcugaauaauaaacuuuuuugaaauaauaaaucugguagaaaaaugagaucucaaaggcucuuuucagagccaccaaaaaaaaaaaaaaaaaaaaaaaaaaaaaaaaaaaaaaaaaaaaaaaaaaaaaaaaaaaaaaaaagaauu

SEQ ID NO: 30713 - RNA, 1778 nt, Artificial Sequence
  mRNA product Design b-4 (hSL-A64-N5) comprising derived and/or modified sequence from LASV(LASV254-NIG-2011;Clade II)__AIT17674__GPCmut6 (opt1)
aggagagucccgcagucggcguccagcggcucugcuuguucgugugugugucguugcaggccuuauucaagcuuaccaugggccagaucaucaccuucuuccaggaggugccccacgucaucgaggaggugaugaacaucgugcugaucgcccucagccugcuggccauccucaaggggaucuacaacgucgcgaccugcggccuguucgggcugguguccuuccuccugcugugcggccgcagcugcuccacgaccuacaaggggguguacgagcuccagacccuggagcuggacaugaccaaccucaacaugugcaugccgcugagcugcacgaagaacaacucccaccacuacaucauggucggcaacgagaccggccuggagcucacccugaccaacacgagcaucaucaaccacaaguucugcaaccuguccgacgcccacaagaagaaccucuacaaccacgcccugaugagcaucaucuccaccuuccaccugagcauccccaacuucaaccaguacgaggccauguccugcgacuucaacgggggcaagaucagcgugcaguacaaccucucccacagcuacgccguggacgcggccaaccacugcgggaccaucgccaacggcguccugcagaccuucaugcggauggccuggggcggguccuacaucgcgcuggacagcggcaaggggaacugggacugcaucaugacguccuaccaguaccucaucauccagaacaccaccugggaggaccacugccaguucagccgccccucccccaucggcuaccuggggcugcucagccagcggacccgcgacaucuacaucagccggcgccugcugggcacguucaccuggacccucuccgacagcgagggcaacgagacccccgggggcuacugccugacgcgguggaugcugaucgaggccgagcucaagugcuucgggaacaccgccguggccaagugcaacgagaagcacgacgaggaguucugcgacaugcugcgccuguucgacuucugcaagcaggccauccggcgccucaagaccccggcgcaggccaacauccagcugaucaacaaggccgugaacgcccugaucaacgaccagcucaucaugaagaaccaccuccgggacaucaugggcauccccuacugcaacuacuccaaguacugguaccugaaccacaccgucacggggaagaccagccugccccgcugcuggcugguguccaacggcagcuaccugaacgagacccacuucuccgacgacaucgagcagcaggccgacaacaugaucaccgagcuccugcagaaggaguacauggaccggcagggcaagacgccgcuggggcugguggaccucuucgucuucagcaccuccuucuaccugaucagcaucuuccugcaccucgugaagauccccacccaccgccacgugaucggcaagcccugccccaagccgcaccggcugaaccacauggggaucugcuccugcggccuguacaagcaccccgggguccccgugaaguggaagcgcugaggacuaguaauaaggaaacuguaugaaugucugugggcaggaagugaagagauccuucuguaaagguuuuuggaauuaugucugcugaauaauaaacuuuuuugaaauaauaaaucugguagaaaaaugagaucucaaaggcucuuuucagagccaccaaaaaaaaaaaaaaaaaaaaaaaaaaaaaaaaaaaaaaaaaaaaaaaaaaaaaaaaaaaaaaaaagaauu

SEQ ID NO: 30714 - RNA, 1778 nt, Artificial Sequence
  mRNA product Design b-4 (hSL-A64-N5) comprising derived and/or modified sequence from LASV(Nig08-A19;Clade III)__ADU56618__GPCmut6 (opt1)
aggagagucccgcagucggcguccagcggcucugcuuguucgugugugugucguugcaggccuuauucaagcuuaccaugggccagaucgugaccuucuuccaggaggucccccacgugaucgaggaggugaugaacaucguccugaucgcccucagcauccuggccauccugaaggggcucuacaacaucgcgaccugcggccugaucgggcuggugacguuccuccugcuguccggccgcagcugcuccaugaccuacaaggggguguacgagcuccagacccuggagcugaacaugaacacccucaacaugugcaugccgcugagcugcacgaagaacaacucccaccacuacaucauggucggcaacgagaccggccuggagcucacccugaccaacacgagccugcuccaccacaaguucugcaaccuguccgacgcccacaagaagaaccuguacgaccacacccucaugagcaucaucuccaccuuccaccugagcauccccaacuucaaccaguacgaggccauguccugcgacuucaacgggggcaagaucaccgugcaguacaaccugagccacuccuacgccaucgacgccgcgaaccacugcgggacgguggccaacggcguccuccagaccuucaugcggauggccuggggcgggagcuacaucgcccuggacuccggccgcgggaagugggacugcaucaugaccagcuaccaguaccugaucauccagaacaccacgugggaggaccacugccaguucucccggcccagccccaucggcuaccucgggcugcugucccagcgcacccgggacaucuacaucagccgccggcuccugggcaccuucaccuggacgcugagcgacuccgagggcaacgagacccccgggggcuacugccucacccgcuggaugcugaucgaggcggagcugaagugcuucgggaacaccgccguggccaagugcaacgagaagcacgacgaggaguucugcgacaugcuccggcuguucgacuucugcaagcaggccauccgccggcugaaggccccggcgcagaugagcauccagcucaucaacaaggccgugaacgcccugaucaacgaccagcugaucaugaagaaccaccuccgcgacaucaugggcauccccuacugcaacuacuccaaguacugguaccugaaccacacgagcaccgggcggaccucccugccccgcugcuggcucgucagcaacggcuccuaccugaacgagacccacuucagcgacgacaucgagcagcaggccgacaacaugaucacggagaugcugcagaaggaguaccuggaccggcagggcaagaccccgcucgggcugguggaccuguucguguucuccaccagcuucuaccucaucuccaucuuccugcaccuggucaagauccccacccaccgccacaucgugggcaagcccugccccaagccgcaccggcucaaccacauggggaucugcagcugcggccuguacaagcagcccggggugcccguccgcuggaagcggugaggacuaguaauaaggaaacuguaugaaugucugugggcaggaagugaagagauccuucuguaaagguuuuuggaauuaugucugcugaauaauaaacuuuuuugaaauaauaaaucugguagaaaaaugagaucucaaaggcucuuuucagagccaccaaaaaaaaaaaaaaaaaaaaaaaaaaaaaaaaaaaaaaaaaaaaaaaaaaaaaaaaaaaaaaaaagaauu

SEQ ID NO: 30715 - RNA, 1781 nt, Artificial Sequence
  mRNA product Design b-4 (hSL-A64-N5) comprising derived and/or modified sequence from LASV(G1180-SLE-2010;Clade IV)__AIT17168__GPCmut6 (opt1)
aggagagucccgcagucggcguccagcggcucugcuuguucgugugugugucguugcaggccuuauucaagcuuaccaugggccagaucgugaccuucuuccaggaggucccccacgugaucgaggaggugaugaacaucguccugaucgcccucagcauccuggccgugcugaaggggcucuacaacuucgcgaccugcggccugguggggcugcucacguuccugcugcucugcggccgcuccugcaccgccagccgguacaagggggucuacgagcugcagacccuggagcucaacauggagacccugaacaugugcaugccgcuguccugcacgaagaacaacagccaccacuacaucauggugggcaacgagaccggccucgagcugacccugaccaacacguccaucaucaaccacaaguucugcaaccucagcgacgcccacaagaagaaccuguacgaccacgcccugauguccaucaucagcaccuuccaccucuccauccccaacuucaaccaguacgaggccaugagcugcgacuucaacgggggcaagaucuccgugcaguacaaccugagccacuccuacgcgggggacgccgccaaccacugcggcaccgucgccaacggggugcugcagaccuucaugcgcauggcguggggcggcagcuacaucgcccucgacuccgggcacggcagcugggacugcaucaugacguccuaccaguaccugaucauccagaacaccaccugggaggaccacugccaguucagccggcccucccccaucggguaccugggccuccugagccagcgcacccgggacaucuacaucagccgccggcugcucggcacguucaccuggacccuguccgacagcgaggggaaggacaccccgggcggguacugccugacgcgcuggaugcucaucgaggccgagcugaagugcuucggcaacaccgccguggccaagugcaacgagaagcacgacgaggaguucugcgacaugcugcggcuguucgacuucugcaagcaggcgauccagcgccugaaggcccccgcccagauguccauccagcugaucaacaaggccgucaacgcccucaucaacgaccagcugaucaugaagaaccaccuccgggacaucauggggauccccuacugcaacuacagcaaguacugguaccucaaccacaccaccacgggcaagaccucccugcccaagugcuggcuggugagcaacggcuccuaccucaacgagacccacuucagcgacgacaucgagcagcaggcggacaacaugaucaccgagaugcugcagaaggaguacauggagcgccaggggaagacgccgcugggccugguggaccucuucgucuucuccaccagcuucuaccugaucuccaucuuccugcaccucgugaagauccccacccaccggcacaucgugggcaagagcugccccaagccccaccgccugaaccacauggggaucugcuccugcgggcuguacaagcagccgggcguccccgugaaguggaagcggugaggacuaguaauaaggaaacuguaugaaugucugugggcaggaagugaagagauccuucuguaaagguuuuuggaauuaugucugcugaauaauaaacuuuuuugaaauaauaaaucugguagaaaaaugagaucucaaaggcucuuuucagagccaccaaaaaaaaaaaaaaaaaaaaaaaaaaaaaaaaaaaaaaaaaaaaaaaaaaaaaaaaaaaaaaaaagaauu

SEQ ID NO: 30716 - RNA, 1781 nt, Artificial Sequence
  mRNA product Design b-4 (hSL-A64-N5) comprising derived and/or modified sequence from LASV(G1442-SLE-2011;Clade IV)__AIT17180__GPCmut6 (opt1)
aggagagucccgcagucggcguccagcggcucugcuuguucgugugugugucguugcaggccuuauucaagcuuaccaugggccagaucgugaccuucuuccaggaggucccccacgugaucgaggaggugaugaacaucguccugaucgcccucagcauccuggccgugcugaaggggcucuacaacguggcgaccugcggccugaucgggcuggucacguuccuccugcugugcggccgcuccugcaccaccacccucuacaaggggguguacgagcugcagacgcuggagcucaacauggagacccugaacaugugcaugccgcugagcugcaccaagaacaacucccaccacuacauccgggugggcaacgagaccggccucgagcugacgcugaccaacaccagcaucaucaaccacaaguucugcaaccucuccgacgcccacaagaagaaccuguacgaccacgcccugaugagcaucaucuccaccuuccaccucagcauccccaacuucaaccaguacgaggccauguccugcgacuucaacgggggcaagaucagcguccaguacaaccugucccacagcuacgccggggacgcggccaaccacugcggcacgguggccaacggggugcugcagaccuucaugcgcauggccuggggcggcuccuacaucgcgcucgacagcgggcggggcaacugggacugcaucaugaccuccuaccaguaccugaucauccagaacaccacgugggacgaccacugccaguucagccgccccucccccaucggguaccugggccuccugagccagcggacccgcgacgucuacaucucccggcgccugcucggcaccuucaccuggacgcugagcgacagcgaggggaaggacaccccgggcggguacugccugacccgguggaugcucaucgaggccgagcugaagugcuucggcaacaccgccguggccaagugcaacgagaagcacgacgaggaguucugcgacaugcugcgccucuucgacuucugcaagcaggccauccagcggcugaaggcgcccgcccagauguccauccagcugaucaacaaggccgugaacgcccucaucaacgaccagcugaucaugaagaaccaccuccgcgacaucauggggauccccuacugcaacuacagcaaguacugguaccugaacaacacggccaccggcaagaccucccugcccaagugcuggcugaucagcaacggcuccuaccucaacgagacccacuucagcgacgacaucgagcaggaggcggacaacaugaucacggagaugcugcagaaggaguacauggagcggcaggggaagaccccgcugggccuggucgaccucuucguguucuccaccagcuucuaccugaucuccaucuuccugcaccucgugaagauccccacccaccgccacaucgucggcaagagcugccccaagccccaccggcugaaccacauggggaucugcuccugcgggcuguacaagcagccgggcgugcccgugcgcuggaagcggugaggacuaguaauaaggaaacuguaugaaugucugugggcaggaagugaagagauccuucuguaaagguuuuuggaauuaugucugcugaauaauaaacuuuuuugaaauaauaaaucugguagaaaaaugagaucucaaaggcucuuuucagagccaccaaaaaaaaaaaaaaaaaaaaaaaaaaaaaaaaaaaaaaaaaaaaaaaaaaaaaaaaaaaaaaaaagaauu

SEQ ID NO: 30717 - RNA, 1781 nt, Artificial Sequence
  mRNA product Design b-4 (hSL-A64-N5) comprising derived and/or modified sequence from LASV(G3010-SLE-2013;Clade IV)__AIT17344__GPCmut6 (opt1)
aggagagucccgcagucggcguccagcggcucugcuuguucgugugugugucguugcaggccuuauucaagcuuaccaugggccagaucgugaccuucuuccaggaggucccccacgugaucgaggaggugaugaacaucguccugaucgcccucagcauccuggccgugcugaaggggcucuacaacuucgcgaccugcggccugguggggcuggucacguuccuccugcugugcggccgcuccugcaccaccagccucuacaaggggguguacgagcugcagacccuggagcucaacauggagacgcugaacaugugcaugccgcuguccugcaccaagaacaacagccaccacuacaucauggugggcaacgagaccggccucgagcugacccugacgaacaccuccaucaucaaccacaaguucugcaaccucagcgacgcccacaagaagaaccuguacaaccacgcccugauguccaucaucagcaccuuccaccucuccauccccaacuucaaccaguacgaggccaugagcugcgacuucaacgggggcaagaucuccguccaguacaaccugagccacuccuacgccggggacgcggccagccacugcggcaccguggccaacggggugcugcagacguucaugcggauggccuggggcggcuccuacaucgcgcucgacagcggguacggcaagugggacugcaucaugaccuccuaccaguaccugaucauccagaacaccaccugggaggaccacugccaguucagccgccccucccccaucggguaccugggccuccugagccagcggacgcgcgacaucuacaucagccggcgccugcucggcaccuucaccuggacccuguccgacagcgaggggaaggacacgccgggcggguacugccugacccgguggaugcucaucgaggccgagcugaagugcuucggcaacaccgccgucgccaagugcaacgagaagcacgacgaggaguucugcgacaugcugcgccucuucgacuucugcaagcaggccauccagcggcugaagacccccgcgcagauguccauccagcugaucaacaaggccgugaacgcccucaucaacgaccagcugaucaugaagaaccaccuccgcgacaucauggggauccccuacugcaacuacagcaaguacugguaccugaaccacacgaccaccggcaagaccucccugcccaagugcuggcuggugagcaacggcuccuaccucaacgagacgcacuucagcgacgacaucgagcagcaggccgacaacaugaucaccgagaugcugcagaaggaguacauggagcggcaggggaagaccccgcugggccuggucgaccucuucguguucuccaccagcuucuaccugaucuccaucuuccugcaccucgugaagauccccacgcaccgccacaucgucggcaagagcugccccaagccccaccggcugaaccacauggggaucugcuccugcgggcuguacaagcagccgggcgugcccgugcgcuggaagcggugaggacuaguaauaaggaaacuguaugaaugucugugggcaggaagugaagagauccuucuguaaagguuuuuggaauuaugucugcugaauaauaaacuuuuuugaaauaauaaaucugguagaaaaaugagaucucaaaggcucuuuucagagccaccaaaaaaaaaaaaaaaaaaaaaaaaaaaaaaaaaaaaaaaaaaaaaaaaaaaaaaaaaaaaaaaaagaauu

SEQ ID NO: 30718 - RNA, 1781 nt, Artificial Sequence
  mRNA product Design b-4 (hSL-A64-N5) comprising derived and/or modified sequence from LASV(G502-SLE-2009;Clade IV)__AIT17126__GPCmut6 (opt1)
aggagagucccgcagucggcguccagcggcucugcuuguucgugugugugucguugcaggccuuauucaagcuuaccaugggccagaucgugaccuucuuccaggaggucccccacgugaucgaggaggugaugaacaucguccugaucgcccucagcauccuggccgugcugaaggggcucuacaacuucgcgaccugcggccugguggggcugcucacguuccugcugcucugcggccgcuccugcaccaccgggcuguacaagggcgucuacgagcugcagacccucgagcugaacauggagacgcugaacaugugcaugccgcucagcugcaccaagaacaacucccaccacuacaucauggugggcaacgagaccgggcuggagcugacccucacgaacaccagcaucaucaaccacaaguucugcaaccuguccgacgcccacaagaagaaccuguacgaccacgcccucaugagcaucaucuccaccuuccaccugagcauccccaacuucaaccaguacgaggccauguccugcgacuucaacggcgggaagaucagcgugcaguacaaccugucccacagcuacgccggcgacgcggccgaccacugcgggaccgucgccaacggcgugcuccagacguucaugcggauggccuggggcggguccuacaucgcgcuggacagcggccgcgggcggugggacugcaucaugaccuccuaccaguaccugaucauccagaacaccaccugggaggaccacugccaguucagccgccccucccccaucggcuaccucggccugcugagccagcggacgcgcgacaucuacaucucccggcgccuccuggggaccuucaccuggacccugagcgacagcgagggcaaggacacgcccgggggcuacugccucacccgguggaugcugaucgaggccgagcugaagugcuucgggaacaccgccguggccaagugcaacgagaagcacgacgaggaguucugcgacaugcuccgccuguucgacuucugcaagcaggccauccagcggcugaaggcgccggcccagauguccauccagcucaucaacaaggccgucaacgcccugaucaacgaccagcuggugaugaagaaccaccuccgcgacaucaugggcauccccuacugcaacuacagccgguacugguaccugaaccacaccacgaccggccgcaccucccugcccaagugcuggcucgugagcaacggguccuaccugaacgagacccacuucagcgacgacaucgagcagcaggccgacaacaugaucacggagaugcugcagaaggaguacauggagcggcagggcaagaccccgcuggggcucgucgaccuguucguguucuccaccagcuucuaccugaucuccaucuuccuccaccuggugaagauccccacccaccgccacaucgucggcaagagcugccccaagccccaccggcugaaccacauggggaucugcuccugcggccucuacaagcagccgggcgugcccgugaaguggaagcgcugaggacuaguaauaaggaaacuguaugaaugucugugggcaggaagugaagagauccuucuguaaagguuuuuggaauuaugucugcugaauaauaaacuuuuuugaaauaauaaaucugguagaaaaaugagaucucaaaggcucuuuucagagccaccaaaaaaaaaaaaaaaaaaaaaaaaaaaaaaaaaaaaaaaaaaaaaaaaaaaaaaaaaaaaaaaaagaauu

SEQ ID NO: 30719 - RNA, 1781 nt, Artificial Sequence
  mRNA product Design b-4 (hSL-A64-N5) comprising derived and/or modified sequence from LASV(G733-SLE-2010;Clade IV)__AIT17154__GPCmut6 (opt1)
aggagagucccgcagucggcguccagcggcucugcuuguucgugugugugucguugcaggccuuauucaagcuuaccaugggccagaucgugaccuucuuccaggaggucccccacgugaucgaggaggugaugaacaucguccugaucgcccucagcauccuggccgugcugaaggggcucuacaacuucgcgaccugcggcaucguggggcuggucuccuuccugcuccugugcggccgcagcugcacgaccucccuguacaaggggguguacgagcuccagacccuggagcugaacauggagacccucaacaugugcaugccgcugagcugcacgaagaacaacucccaccacuacaucauggugggcaacgagaccggccuggagcucacccugaccaacacgagcaucaucaaccacaaguucugcaaccuguccgacgcccacaagaagaaccucuacgaccacgcccugaugagcaucaucuccaccuuccaccugagcauccccaacuucaaccaguacgaggccauguccugcgacuucaacgggggcaagaucagcguccaguacaaccucucccacagcuacgccggggacgcggccaaccacugcggcaccaucgccaacggggugcugcagaccuucaugcggauggccuggggcggcuccuacaucgcgcuggacagcgggcgcgaccggugggacugcaucaugacguccuaccaguaccucaucauccagaacaccaccugggaggaccacugccaguucagccgccccucccccaucggcuaccuggggcugcucagccagcggacccgcgacaucuacaucagccggcgccugcugggcacguucaccuggacccucuccgacagcgagggcaaggacacccccgggggcuacugccugacgcgguggaugcugaucgaggccgagcucaagugcuucgggaacaccgccguggccaagugcaacgagaagcacgacgaggaguucugcgacaugcugcgccuguucgacuucugcaagcaggccauccagcggcucaaggcgccggcccagauguccauccagcugaucaacaaggccgucaacgcccugaucaacgaccagcucaucaugaagaaccaccuccgcgacaucaugggcauccccuacugcaacuacagcaaguacugguaccugaaccacaccaccacggggaagaccucccugcccaagugcuggcuggugagcaacggcuccuaccugaacgagacccacuucagcgacgacaucgagcagcaggccgacaacaugaucaccgagaugcuccagaaggaguacauggagcggcagggcaagacgccgcuggggcugguggaccuguucgucuucuccaccagcuucuaccucaucuccaucuuccugcaccuggugaagauccccacccaccgccacguggucggcaagagcugccccaagccccaccggcucaaccacauggggaucugcuccugcggccuguacgggcagccgggcgugcccgugaaguggaagcgcugaggacuaguaauaaggaaacuguaugaaugucugugggcaggaagugaagagauccuucuguaaagguuuuuggaauuaugucugcugaauaauaaacuuuuuugaaauaauaaaucugguagaaaaaugagaucucaaaggcucuuuucagagccaccaaaaaaaaaaaaaaaaaaaaaaaaaaaaaaaaaaaaaaaaaaaaaaaaaaaaaaaaaaaaaaaaagaauu

SEQ ID NO: 30720 - RNA, 1781 nt, Artificial Sequence
  mRNA product Design b-4 (hSL-A64-N5) comprising derived and/or modified sequence from MOPV/LASV reassortant(IGS-1;Clade IV)__AFY05576__GPCmut6 (opt1)
aggagagucccgcagucggcguccagcggcucugcuuguucgugugugugucguugcaggccuuauucaagcuuaccaugggccagaucgugaccuucuuccaggaggucccccacgugaucgaggaggugaugaacaucguccugaucgcccucagcgugcuggccgugcugaaggggcucuacaacuucgcgaccugcggccuggucgggcuggugacguuccuccugcugugcggccgcuccugcaccaccagccucuacaaggggguguacgagcugcagacccuggagcucaacauggagacgcugaacaugugcaugccgcuguccugcaccaagaacaacagccaccacuacaucauggucggcaacgagaccggccucgagcugacccugacgaacaccuccaucaucaaccacaaguucugcaaccucagcgacgcccacaagaagaaccuguacgaccacgcccugauguccaucaucagcaccuuccaccucuccauccccaacuucaaccaguacgaggccaugagcugcgacuucaacgggggcaagaucuccgugcaguacaaccugagccacuccuacgccggggacgcggccaaccacugcggcaccguggccaacgggguccugcagacguucaugcggauggccuggggcggcagcuacaucgcgcucgacuccgggcgcggcaacugggacugcaucaugaccagcuaccaguaccugaucauccagaacaccaccugggaggaccacugccaguucucccggcccagccccaucggguaccugggccuccugucccagcgcacgcgggacaucuacaucagccgccggcugcucggcaccuucaccuggacccugagcgacuccgagggggaggacacgccgggcggguacugccugacccgcuggaugcucaucgaggccgagcugaagugcuucggcaacaccgccguggccaagugcaacgagaagcacgacgaggaguucugcgacaugcugcggcuguucgacuucugcaagcaggccauccagcgccugaaggcgcccgcccagaugagcauccagcugaucaacaaggccgugaacgcccucaucaacgaccagcugaucaugaagaaccaccuccgggacaucauggggauccccuacugcaacuacuccaaguacugguaccucaaccacaccacgaccggccgcaccagccugcccaagugcuggcuggucuccaacggcagcuaccucaacgagacccacuucuccgacgacaucgagcagcaggccgacaacaugaucacggagaugcugcagaaggaguacauggagcggcaggggaagaccccgcugggccugguggaccucuucguguucagcaccuccuucuaccugaucagcaucuuccugcaccucgucaagauccccacccaccgccacaucguggggaaguccugccccaagccccaccggcugaaccacaugggcaucugcagcugcgggcuguacaagcagccgggcgugcccgucaaguggaagcgcugaggacuaguaauaaggaaacuguaugaaugucugugggcaggaagugaagagauccuucuguaaagguuuuuggaauuaugucugcugaauaauaaacuuuuuugaaauaauaaaucugguagaaaaaugagaucucaaaggcucuuuucagagccaccaaaaaaaaaaaaaaaaaaaaaaaaaaaaaaaaaaaaaaaaaaaaaaaaaaaaaaaaaaaaaaaaagaauu

SEQ ID NO: 30721 - RNA, 1781 nt, Artificial Sequence
  mRNA product Design b-4 (hSL-A64-N5) comprising derived and/or modified sequence from LASV(LM765-SLE-2012;Clade IV)__AIT17814__GPCmut6 (opt1)
aggagagucccgcagucggcguccagcggcucugcuuguucgugugugugucguugcaggccuuauucaagcuuaccaugggccagaucgugaccuucuuccaggaggucccccacgugaucgaggaggugaugaacaucguccugaucgcccucagcauccuggccgugcugaaggggcucuacaacuucgcgaccugcggccugguggggcuggucacguuccuccugcugugcggccgcuccugcaccaccagccucuacaaggggguguacgagcugcagacccuggagcucaacauggagacgcugaacaugugcaugccgcuguccugcaccaagaacaacagccaccacuacaucauggugggcaacgagaccggccucgagcugacccugacgaacaccuccaucaucgaccacaaguucugcaaccucagcgacgcccaccggaagaaccuguacgaccacgcccugauguccaucaucagcaccuuccaccucuccauccccaacuucaaccaguacgaggccaugagcugcgacuucaacgggggcaagaucuccguccaguacaaccugagccacuccuacgccaaggacgcggccgaccacugcgggaccguggccaacggcgugcugcagacguucaugcgcauggccuggggcgggagcuacaucgcgcucgacuccggccgggggcgcugggacugcaucaugaccagcuaccaguaccugaucauccagaacaccaccugggaggaccacugccaguucucccggcccagccccaucggcuaccuggggcuccugucccagcgcacgcgggacaucuacaucagccgccggcugcucggcaccuucaccuggacccugagcgacuccgagggcaaggacacgcccgggggcuacugccugacccgcuggaugcucaucgaggccgagcugaagugcuucgggaacaccgccgucgccaagugcaacgagaagcacgacgaggaguucugcgacaugcugcggcuguucgacuucugcaagcaggccauccagcgccugaaggcgccggcccagaugagcauccagcugaucaacaaggccgugaacgcccucaucaacgaccagcugaucaugaagaaccaccuccgggacaucaugggcauccccuacugcaacuacuccaaguacugguaccucaaccacaccacgaccgggaagaccagccugcccaagugcuggcugguguccaacggcagcuaccucaacgagacccacuucuccgacgacaucgagcagcaggccgacaacaugaucacggagaugcugcagaaggaguacauggagcgccagggcaagaccccgcuggggcuggucgaccucuucguguucagcaccuccuucuaccugaucagcaucuuccugcaccucgugaagauccccacccaccggcacaucgucggcaagcccugccccaagccgcaccgccugaaccacauggggaucugcuccugcggccuguacaagcagcccggggugcccgugaaguggaagcggugaggacuaguaauaaggaaacuguaugaaugucugugggcaggaagugaagagauccuucuguaaagguuuuuggaauuaugucugcugaauaauaaacuuuuuugaaauaauaaaucugguagaaaaaugagaucucaaaggcucuuuucagagccaccaaaaaaaaaaaaaaaaaaaaaaaaaaaaaaaaaaaaaaaaaaaaaaaaaaaaaaaaaaaaaaaaagaauu

SEQ ID NO: 30722 - RNA, 1781 nt, Artificial Sequence
  mRNA product Design b-4 (hSL-A64-N5) comprising derived and/or modified sequence from LASV(LM776-SLE-2012;Clade IV)__AIT17824__GPCmut6 (opt1)
aggagagucccgcagucggcguccagcggcucugcuuguucgugugugugucguugcaggccuuauucaagcuuaccaugggccagaucgugaccuucuuccaggaggucccccacgugaucgaggaggugaugaacaucguccugaucgcccucagcauccuggccgugcugaaggggcucuacaacuucgcgaccugcggccugguggggcuggucacguuccuccugcugugcggccgcuccugcaccaccagcguguacaaggggguguacgagcuccagacccuggagcugaacauggagacgcucaacaugugcaugccgcuguccugcaccaagaacaacagccaccacuacaucauggucggcaacgagaccggccuggagcucacccugacgaacaccuccaucaucaaccacaaguucugcaaccugagcgacgcccacaagaagaaccucuacgaccacgcccugauguccaucaucagcaccuuccaccuguccauccccaacuucaaccaguacgaggccaugagcugcgacuucaacgggggcaagaucuccgugcaguacaaccucagccacuccuacgccggggacgcggccaaccacugcggcaccguggccaacgggguccugcagacguucaugcggauggccuggggcggcagcuacaucgcgcuggacuccgggcacggcaagugggacugcaucaugaccagcuaccaguaccucaucauccagaacaccaccugggaggaccacugccaguucucccgccccagccccaucggguaccugggccugcucucccagcggacgcgcgacaucuacaucagccggcgccugcugggcaccuucaccuggacccucagcgacuccgaggggaaggacacgccgggcggguacugccugacccgguggaugcugaucgaggccgagcucaagugcuucggcaacaccgccguggccaagugcaacgagaagcacgacgaggaguucugcgacaugcugcgccuguucgacuucugcaagcaggccauccagcggcucaaggcgcccgcccagaugagcauccagcugaucaacaaggccgugaacgcccugaucaacgaccagcucaucaugaagaaccaccuccgcgacaucauggggauccccuacugcaacuacuccaaguacugguaccugaaccacaccacgaccggcaagaccagccugcccaagugcuggcuggucuccaacggcagcuaccugaacgagacccacuucuccgacgacaucgagcagcaggccgacaacaugaucacggagaugcuccagaaggaguacauggagcggcaggggaagaccccgcugggccugguggaccuguucguguucagcaccuccuucuaccucaucagcaucuuccugcaccuggucaagauccccacccaccgccacaucguggggaaguccugccccaagccccaccggcucaaccacaugggcaucugcagcugcgggcuguacaagcagccgggcgugcccguccgcuggaagcggugaggacuaguaauaaggaaacuguaugaaugucugugggcaggaagugaagagauccuucuguaaagguuuuuggaauuaugucugcugaauaauaaacuuuuuugaaauaauaaaucugguagaaaaaugagaucucaaaggcucuuuucagagccaccaaaaaaaaaaaaaaaaaaaaaaaaaaaaaaaaaaaaaaaaaaaaaaaaaaaaaaaaaaaaaaaaagaauu

SEQ ID NO: 30723 - RNA, 1781 nt, Artificial Sequence
  mRNA product Design b-4 (hSL-A64-N5) comprising derived and/or modified sequence from LASV(Mad39;Clade IV)__ANH09722__GPCmut6 (opt1)
aggagagucccgcagucggcguccagcggcucugcuuguucgugugugugucguugcaggccuuauucaagcuuaccaugggccagaucgugaccuucuuccaggaggucccccacgugaucgaggaggugaugaacaucguccugaucgcccucagcauccuggccgugcugaaggggcucuacaacguggcgaccugcggccugaucgggcuggucacguuccuccugcugugcggccgcuccugcaccaccacccucuacaaggggguguacgagcugcaggcccuggagcucaacauggagacgcugaacaugugcaugccgcugagcugcaccaagaacaacucccaccacuacauccgggugggcaacgagaccggccucgagcugacccugacgaacaccagccucaucaaccacaaguucugcaaccuguccgacgcccacaagaagaaccuguacgaccacgcccucaugagcaucaucuccaccuuccaccugagcauccccaacuucaaccaguacgaggccauguccugcgacuucaacgacgggaagaucagcguccaguacaaccugucccacaccuacgcgggcgacacggccaaccacugcgggaccguggccaacggcgugcuccagaccuucaugcgcauggccuggggcgggagcuacaucgcgcuggacuccggccgcgggggcugggacugcaucaugaccagcuaccaguaccugaucauccagaacacgaccugggaggaccacugccaguucucccggcccagccccaucggguaccucggccugcugucccagcggacccgcgacaucuacaucagccggcgccuccugggcaccuucacguggacccuguccgacagcgaggggaaggacaccccgggcggguacugccucacccgguggaugcugaucgaggccgagcugaagugcuucggcaacacggccgucgccaagugcaacgagaagcacgacgaggaguucugcgacaugcuccgccuguucgacuucugcaagcaggccauccagcggcugaaggcgcccgcccagaugagcauccagcucaucaacaaggccgugaacgcccugaucaacgaccagcugaucaugaagaaccaccuccgcgacaucauggggauccccuacugcaacuacuccaaguacugguaccugaaccacaccgugaccggcaagaccagccugcccaagugcuggcucgucuccaacggcagcuaccugaacgagacgcacuucuccgacgacaucgagcagcaggccgacaacaugaucaccgagaugcugcagaaggaguacauggagcggcaggggaagaccccgcugggccucguggaccuguucguguucagcaccuccuucuaccugaucagcaucuuccuccaccuggucaagauccccacgcaccgccacgugguggggaagcccugccccaagccgcaccggcugaaccacaugggcaucugcuccugcggguucuacaagcagcccggcguccccgugcgcuggaagcggugaggacuaguaauaaggaaacuguaugaaugucugugggcaggaagugaagagauccuucuguaaagguuuuuggaauuaugucugcugaauaauaaacuuuuuugaaauaauaaaucugguagaaaaaugagaucucaaaggcucuuuucagagccaccaaaaaaaaaaaaaaaaaaaaaaaaaaaaaaaaaaaaaaaaaaaaaaaaaaaaaaaaaaaaaaaaagaauu

SEQ ID NO: 30724 - RNA, 1781 nt, Artificial Sequence
  mRNA product Design b-4 (hSL-A64-N5) comprising derived and/or modified sequence from LASV(Z0947-SLE-2011;Clade IV)__AIT17840__GPCmut6 (opt1)
aggagagucccgcagucggcguccagcggcucugcuuguucgugugugugucguugcaggccuuauucaagcuuaccaugggccagaucgugaccuucuuccaggaggucccccacgugaucgaggaggugaugaacaucguccugaucgcccucagcauccuggccgugcugaaggggcucuacaacuucgcgaccugcggccugguggggcuggucacguuccuccugcugugcggccgcuccugcaccaucagccucuacaaggggguguacgagcugcagacccuggagcucaacauggagacccugaacaugugcaugccgcuguccugcacgaagaacaacagccaccacuacaucauggugggcaacgagaccggccucgagcugacccugaccaacacguccaucaucaaccacaaguucugcaaccucagcgacgcccacaagaagaaccuguacgaccacgcccugauguccaucaucagcaccuuccaccucuccauccccaacuucaaccaguacgaggccaugagcugcgacuucaacgggggcaagaucuccguccaguacaaccugagccacuccuacgccggggacgcggccaaccacugcggcaccguggccaacggggugcugcagaccuucaugcggauggccuggggcggcagcuacaucgcgcucgacuccgggcgcgaccggugggacugcaucaugacgagcuaccaguaccugaucauccagaacaccaccugggaggaccacugccaguucucccgccccagccccaucggcuaccuggggcuccugucccagcggacccgcgacaucuacaucagccggcgccugcucggcacguucaccuggacccugagcgacuccgagggcaaggacacccccgggggcuacugccugacgcgguggaugcucaucgaggccgagcugaagugcuucgggaacaccgccgucgccaagugcaacgagaagcacgacgaggaguucugcgacaugcugcgccucuucgacuucugcaagcaggccauccagcggcugaaggcgccggcccagaugagcauccagcugaucaacaaggccgugaacgcccucaucaacgaccagcugaucaugaagaaccaccuccgcgacaucaugggcauccccuacugcaacuacuccaaguacugguaccugaaccacaccaccacggggaagaccagccugcccaagugcuggcugguguccaacggcagcuaccucaacgagacccacuucuccgacgacaucgagcagcaggccgacaacaugaucaccgagaugcugcagaaggaguacauggagcggcagggcaagacgccgcuggggcuggucgaccucuucguguucagcaccuccuucuaccugaucagcaucuuccugcaccucgugaagauccccacccaccgccacaucgucggcaagcccugccccaagccgcaccggcugaaccacauggggaucugcuccugcggccuguacaagcagcccggggugcccgugaaguggaagcgcugaggacuaguaauaaggaaacuguaugaaugucugugggcaggaagugaagagauccuucuguaaagguuuuuggaauuaugucugcugaauaauaaacuuuuuugaaauaauaaaucugguagaaaaaugagaucucaaaggcucuuuucagagccaccaaaaaaaaaaaaaaaaaaaaaaaaaaaaaaaaaaaaaaaaaaaaaaaaaaaaaaaaaaaaaaaaagaauu

SEQ ID NO: 30725 - RNA, 1781 nt, Artificial Sequence
  mRNA product Design b-4 (hSL-A64-N5) comprising derived and/or modified sequence from LASV(Josiah;Clade IV)__NP_694870__GPCmut6 (opt4)
aggagagucccgcagucggcguccagcggcucugcuuguucgugugugugucguugcaggccuuauucaagcuuaccaugggccagaucgugaccuucuuccaggaggugccccacgugaucgaggaggugaugaacaucgugcugaucgcccugagcgugcuggccgugcugaagggccuguacaacuucgccaccugcggccuggugggccuggugaccuuccugcugcugugcggcagaagcugcaccaccagccuguacaagggcguguacgagcugcagacccuggagcugaacauggagacccugaacaugugcaugccccugagcugcaccaagaacaacagccaccacuacaucauggugggcaacgagaccggccuggagcugacccugaccaacaccagcaucaucaaccacaaguucugcaaccugagcgacgcccacaagaagaaccuguacgaccacgcccugaugagcaucaucagcaccuuccaccugagcauccccaacuucaaccaguacgaggccaugagcugcgacuucaacggcggcaagaucagcgugcaguacaaccugagccacagcuacgccggcgacgccgccaaccacugcggcaccguggccaacggcgugcugcagaccuucaugagaauggccuggggcggcagcuacaucgcccuggacagcggcagaggcaacugggacugcaucaugaccagcuaccaguaccugaucauccagaacaccaccugggaggaccacugccaguucagcagacccagccccaucggcuaccugggccugcugagccagagaaccagagacaucuacaucagcagaagacugcugggcaccuucaccuggacccugagcgacagcgagggcaaggacacccccggcggcuacugccugaccagauggaugcugaucgaggccgagcugaagugcuucggcaacaccgccguggccaagugcaacgagaagcacgacgaggaguucugcgacaugcugagacuguucgacuucugcaagcaggccauccagagacugaaggcccccgcccagaugagcauccagcugaucaacaaggccgugaacgcccugaucaacgaccagcugaucaugaagaaccaccugagagacaucaugggcauccccuacugcaacuacagcaaguacugguaccugaaccacaccaccaccggcagaaccagccugcccaagugcuggcuggugagcaacggcagcuaccugaacgagacccacuucagcgacgacaucgagcagcaggccgacaacaugaucaccgagaugcugcagaaggaguacauggagagacagggcaagaccccccugggccugguggaccuguucguguucagcaccagcuucuaccugaucagcaucuuccugcaccuggugaagauccccacccacagacacaucgugggcaagagcugccccaagccccacagacugaaccacaugggcaucugcagcugcggccuguacaagcagcccggcgugcccgugaaguggaagagaugaggacuaguaauaaggaaacuguaugaaugucugugggcaggaagugaagagauccuucuguaaagguuuuuggaauuaugucugcugaauaauaaacuuuuuugaaauaauaaaucugguagaaaaaugagaucucaaaggcucuuuucagagccaccaaaaaaaaaaaaaaaaaaaaaaaaaaaaaaaaaaaaaaaaaaaaaaaaaaaaaaaaaaaaaaaaagaauu

SEQ ID NO: 30726 - RNA, 1778 nt, Artificial Sequence
  mRNA product Design b-4 (hSL-A64-N5) comprising derived and/or modified sequence from LASV(LP;Clade I)__AAF86701__GPCmut6 (opt4)
aggagagucccgcagucggcguccagcggcucugcuuguucgugugugugucguugcaggccuuauucaagcuuaccaugggccagaucaucaccuucuuccaggaggugccccacgugaucgaggaggugaugaacaucgugcugaucgcccugagccugcuggccauccugaagggccuguacaacaucgccaccugcggcaucaucggccugguggccuuccuguuccugugcggcaagagcugcagccugacccugaagggcggcuacgagcugcagacccuggagcugaacauggagacccugaacaugugcaugccccugagcugcaccaagaacagcagccaccacuacaucagagugggcaacgagaccggccuggagcugacccugaccaacaccagcaucaucaaccacaaguucugcaaccugagcgacgcccacaagaagaaccuguacgaccacgcccugaugagcaucaucagcaccuuccaccugagcauccccaacuucaaccaguacgaggccaugagcugcgacuucaacggcggcaagaucagcgugcaguacaaccugagccacagcuacgccggcgacgccgccgagcacugcggcaccguggccaacggcgugcugcagaccuucaugagaauggccuggggcggcagauacaucgcccuggacagcggcaagggcaacugggacugcaucaugaccagcuaccaguaccugaucauccagaacaccaccugggaggaccacugccaguucagcagacccagccccaucggcuaccugggccugcugagccagagaaccagagacaucuacaucagcagaagacugcugggcaccuucaccuggacccugagcgacagcgagggcaacgagacccccggcggcuacugccugaccagauggaugcugaucgaggccgagcugaagugcuucggcaacaccgccguggccaagugcaacgagaagcacgacgaggaguucugcgacaugcugagacuguucgacuucugcaagcaggccaucagaagacugaaggcccccgcccagaugagcauccagcugaucaacaaggccgugaacgcccugaucaacgaccagcugaucaugaagaaccaccugagagacaucaugggcauccccuacugcaacuacagcaaguacugguaccugaaccacaccagcagcggcagaaccagccugcccaagugcuggcugaucagcaacggcagcuaccugaacgagacccaguucagcgacgacaucgagcagcaggccgacaacaugaucaccgagaugcugcagaaggaguacaucgagagacagggcaagaccccccugggccugguggacaucuucaucuucagcaccagcuucuaccugaucagcaucuuccugcaccugaucaagauccccacccacagacacaucgugggcaagcccugccccaagccccacagacugaaccacaugggcgugugcagcugcggccuguacaagcaccccggcgugcccaccaaguggaagagaugaggacuaguaauaaggaaacuguaugaaugucugugggcaggaagugaagagauccuucuguaaagguuuuuggaauuaugucugcugaauaauaaacuuuuuugaaauaauaaaucugguagaaaaaugagaucucaaaggcucuuuucagagccaccaaaaaaaaaaaaaaaaaaaaaaaaaaaaaaaaaaaaaaaaaaaaaaaaaaaaaaaaaaaaaaaaagaauu

SEQ ID NO: 30727 - RNA, 1778 nt, Artificial Sequence
  mRNA product Design b-4 (hSL-A64-N5) comprising derived and/or modified sequence from LASV(803213;Clade II)__AAF86703__GPCmut6 (opt4)
aggagagucccgcagucggcguccagcggcucugcuuguucgugugugugucguugcaggccuuauucaagcuuaccaugggccagaucaucaccuucuuccaggaggugccccacgugaucgaggaggugaugaacaucgugcugaucgcccugagccugcuggccauccugaagggcaucuacaacguggccaccugcggccuguucggccugaucagcuuccugcugcugugcggcagaagcugcagcgugaccuacaagggcguguacgagcugcagacccuggagcugaacauggccaaccugaacaugugcaugccccugagcugcaccaagaacaacagccaccacuacaucauggugggcaacgagaccggccuggagcugacccugaccaacaccagcaucaucaaccacaaguucugcaaccugagcgacgcccacaagaagaaccuguacgaccacgcccugaugagcaucaucagcaccuuccaccugagcauccccaacuucaaccaguacgaggccaugagcugcgacuucaacggcggcaagaucagcgugcaguacaaccugagccacagcuucgccguggacgccgccaaccacugcggcaccaucgccaacggcgugcugcagaccuucaugagaauggccuggggcggcagcuacaucgcccuggacagcggcaagggcaacugggacugcaucaugaccagcuaccaguaccugaucauccagaacaccaccugggaggaccacugccaguucagcagacccagccccaucggcuaccugggccugcugagccagagaaccagagacaucuacaucagcagaagacugcugggcaccuucaccuggacccugagcgacagcgagggcaacgaggcccccggcggcuacugccugaccagauggaugcugaucgaggccgagcugaagugcuucggcaacaccgccguggccaagugcaacgagaagcacgacgaggaguucugcgacaugcugagacuguucgacuucugcaagcaggccaucaagagacugaagacccccgcccagaugagcauccagcugaucaacaaggccgugaacgcccugaucaacgaccagcugaucaugaagaaccaccugagagacaucaugggcauccccuacugcaacuacagcagauacugguaccugaaccacaccgugaccggcaagaccagccugcccagaugcuggcuggugagcaacggcagcuaccugaacgagacccacuucagcgacgacaucgagcagcaggccgacaacaugaucaccgagaugcugcagaaggaguacauggacagacagggcaagaccccccugggccugguggaccuguucguguucagcaccagcuucuaccugaucagcaucuuccugcaccuggugaagauccccacccacagacacaucgugggcaagcccugccccaagccccacagacugaaccacaugggcaucugcagcugcggccuguacaagcaccccggcgugcccgugaaguggaagagaugaggacuaguaauaaggaaacuguaugaaugucugugggcaggaagugaagagauccuucuguaaagguuuuuggaauuaugucugcugaauaauaaacuuuuuugaaauaauaaaucugguagaaaaaugagaucucaaaggcucuuuucagagccaccaaaaaaaaaaaaaaaaaaaaaaaaaaaaaaaaaaaaaaaaaaaaaaaaaaaaaaaaaaaaaaaaagaauu

SEQ ID NO: 30728 - RNA, 1778 nt, Artificial Sequence
  mRNA product Design b-4 (hSL-A64-N5) comprising derived and/or modified sequence from LASV(GA391;Clade III)__CAA36645__GPCmut6 (opt4)
aggagagucccgcagucggcguccagcggcucugcuuguucgugugugugucguugcaggccuuauucaagcuuaccaugggccagaucgugaccuucuuccaggaggugccccacgugaucgaggaggugaugaacaucgugcugaucgcccugagcauccuggccauccugaagggccuguacaacguggccaccugcggccugaucggccuggugaccuuccugcugcugagcggcagaagcugcagccugaucuacaagggcaccuacgagcugcagacccuggagcugaacauggagacccugaacaugugcaugccccugagcugcaccaagaacaacagccaccacuacaucagagugggcaacgagaccggccuggagcugacccugaccaacaccagcauccugaaccacaaguucugcaaccugagcgacgcccacaagagaaaccuguacgaccacagccugaugagcaucaucagcaccuuccaccugagcauccccaacuucaaccaguacgaggccaugagcugcgacuucaacggcggcaagaucaccgugcaguacaaccugagccacagcuucgccguggacgccgccggccacugcggcacccuggccaacggcgugcugcagaccuucaugagaauggccuggggcggcagcuacaucgcccuggacagcggcagaggcaacugggacugcaucaugaccagcuaccaguaccugaucauccagaacaccaccugggacgaccacugccaguucagcagacccagccccaucggcuaccugggccugcugagccagagaaccagagacaucuacaucagcagaagacugcugggcaccuucaccuggacccugagcgacagcgagggcaacgagacccccggcggcuacugccugaccagauggaugcugaucgaggccgagcugaagugcuucggcaacaccgccguggccaagugcaacgagaagcacgacgaggaguucugcgacaugcugagacuguucgacuucugcaagcaggccaucagaagacugaagacccccgcccagaugagcauccagcugaucaacaaggccgugaacgcccugaucaacgaccagcugaucaugaagaaccaccugagagacaucaugggcauccccuacugcaacuacagcagauacugguaccugaaccacaccagcaccggcaagaccagccugcccagaugcuggcugaucagcaacggcagcuaccugaacgagaccaaguucagcgacgacaucgagcagcaggccgacaacaugaucaccgagaugcugcagaaggaguacaucgacagacagggcaagaccccccugggccugguggaccuguucguguucagcaccagcuucuaccugaucagcaucuuccugcaccuggugaagauccccacccacagacacaucgugggcaagcccugccccaagccccacagacugaaccacaugggcaucugcagcugcggccuguacaagcagcccggcgugcccgugagauggaagagaugaggacuaguaauaaggaaacuguaugaaugucugugggcaggaagugaagagauccuucuguaaagguuuuuggaauuaugucugcugaauaauaaacuuuuuugaaauaauaaaucugguagaaaaaugagaucucaaaggcucuuuucagagccaccaaaaaaaaaaaaaaaaaaaaaaaaaaaaaaaaaaaaaaaaaaaaaaaaaaaaaaaaaaaaaaaaagaauu

SEQ ID NO: 30729 - RNA, 1781 nt, Artificial Sequence
  mRNA product Design b-4 (hSL-A64-N5) comprising derived and/or modified sequence from LASV(AV;Clade V)__CCA30314__GPCmut6 (opt4)
aggagagucccgcagucggcguccagcggcucugcuuguucgugugugugucguugcaggccuuauucaagcuuaccaugggccagaucgugaccuucuuccaggaggugccccacgugaucgaggaggugaugaacaucgugcugaucgcccugagcauccuggccgugcugaagggccuguacaacaucgccaccugcggccugaucggccugaucaccuuccugcugcugugcggcagaagcugcagcagcaaccuguacaagggcguguacgagcugcagagccuggaccugaacauggagacccugaacaugugcaugccccugagcugcaccaagaacaacagccaccacuacaucagagugggcaacgacaccggccuggagcugacccugaccaacaccagcauccugaaccacaaguucugcaaccugagcgacgcccacaagaaggaccuguacgaccacgcccugaugagcaucaucagcaccuuccaccugagcauccccaacuucaaccaguacgaggccaugagcugcgacuucaacggcggcaagaucagcgugcaguacaaccugagccacagcuacgccaucgacgccgccaaccacugcggcaccguggccaacggcauccugcagaccuucaugagaauggccuggggcggcagcuacaucgcccuggacagcggcagaggcaacugggacugcaucaugaccagcuaccaguaccugaucauccagaacaccaccugggagaaccacugccaguucagcagacccagccccaucggcuaccugggccugcugagccagagaaccagagacaucuacaucagcagaagacugcugggcaccuucaccuggacccugagcgacagcgagggcaacgccacccccggcggcuacugccugaccagauggaugcugaucgaggccgagcugaagugcuucggcaacaccgccguggccaagugcaacgagaagcacgacgaggaguucugcgacaugcugagacuguucgacuucugcaagcaggccaucagcagacugaagagccccgcccagaugagcauccagcugaucaacaaggccgugaacgcccugaucaacgaccagcugaucaugaagaaccaccugagagacaucaugggcauccccuacugcaacuacagcaaguacugguaccugaaccacaccaucaccggcaagaccagccugcccaagugcuggcuggugagcaacggcagcuaccugaacgagacccacuucagcgacgacaucgagcagcaggccgacaacaugaucaccgagaugcugcagaaggaguacauggagagacagggcaagaccccccugggccugguggaccuguucguguucagcaccagcuucuaccugaucagcaucuuccugagacuggugaagauccccacccacagacacaucgugggcaagcccugccccaagccccacagacugaaccacaugggcaucugcagcugcggccuguacaagcagcccggcgugcccgugagauggaagagaugaggacuaguaauaaggaaacuguaugaaugucugugggcaggaagugaagagauccuucuguaaagguuuuuggaauuaugucugcugaauaauaaacuuuuuugaaauaauaaaucugguagaaaaaugagaucucaaaggcucuuuucagagccaccaaaaaaaaaaaaaaaaaaaaaaaaaaaaaaaaaaaaaaaaaaaaaaaaaaaaaaaaaaaaaaaaagaauu

SEQ ID NO: 30730 - RNA, 1778 nt, Artificial Sequence
  mRNA product Design b-4 (hSL-A64-N5) comprising derived and/or modified sequence from LASV(Togo/2016/7082;Clade VI)__AMR44577__GPCmut6 (opt4)
aggagagucccgcagucggcguccagcggcucugcuuguucgugugugugucguugcaggccuuauucaagcuuaccaugggccagaucaucaccuucuuccaggaggugccccacgugaucgaggaggugaugaacaucgugcugaucgcccugagccugcuggccauccugaagggcguguacaacguggccaccugcggcaucaucggccuggugaccuuccuguuccugugcggcagaagcugcagccugaucuacaagggcagcuacgagcugcagacccuggagcugaacauggagacccugaacaugugcaugccccugagcugcaccaagaacagcagccaccacuacaucagagugggcaacgagaccggccuggagcugacccugaccaacaccagcaucaucaaccacaaguucugcaaccugagcgacgcccacaagagaaaccuguacgaccacgcccugaugagcauccugagcaccuuccaccugagcauccccaacuucaaccaguacgaggccaugagcugcgacuucaacggcggcaagaucagcgugcaguacaaccugagccacgccuacgccguggacgccgccgagcacugcggcaccguggccaacggcgugcugcagaccuucaugagaauggccuggggcggcagcuacaucgcccuggacagcggcagaggcaacugggacugcaucaugaccagcuaccaguaccugaucauccagaacaccaccugggaggaccacugccaguucagcagacccagccccaucggcuaccugggccugcugagccagagaaccagagacaucuacaucagcagaagacugcugggcaccuucaccuggacccugagcgacagcgagggcaacgagacccccggcggcuacugccugaccagauggaugcugaucgaggccgagcugaagugcuucggcaacaccgccguggccaagugcaacgagaagcacgacgaggaguucugcgacaugcugagacuguucgacuucugcaagcaggccauccagagacugaagagccccgcccagaugagcauccagcugaucaacaaggccgugaacgcccugaucaacgaccagcugaucaugaagaaccaccugagagacaugaugggcauccccuacugcaacuacagcaaguacugguaccugaaccacaccagcagcggcagaaccagccugcccaagugcuggcuggugagcaacggcagcuaccugaacgagacccacuucagcgacgacaucgagcagcaggccgacaacaugaucaccgagaugcugcagaaggaguacaucgacagacagggcaagaccccccugggccugguggaccuguucguguucagcaccagcuucuaccugaucagcaucuuccugcaccugaucaagauccccacccacagacacaucgugggcaagcccugccccaagccccacagacugaaccacaugggcaucugcagcugcggccuguacaagcagcccggcgugcccaccagauggaagagaugaggacuaguaauaaggaaacuguaugaaugucugugggcaggaagugaagagauccuucuguaaagguuuuuggaauuaugucugcugaauaauaaacuuuuuugaaauaauaaaucugguagaaaaaugagaucucaaaggcucuuuucagagccaccaaaaaaaaaaaaaaaaaaaaaaaaaaaaaaaaaaaaaaaaaaaaaaaaaaaaaaaaaaaaaaaaagaauu

SEQ ID NO: 30731 - RNA, 1778 nt, Artificial Sequence
  mRNA product Design b-4 (hSL-A64-N5) comprising derived and/or modified sequence from LASV(KAK-428;Clade n.d. (VII))__ANH09740__GPCmut6 (opt4)
aggagagucccgcagucggcguccagcggcucugcuuguucgugugugugucguugcaggccuuauucaagcuuaccaugggccagaucgugaccuucuuccaggaggugccccacgugaucgaggaggugaugaacaucgugcugaucgcccugagccugcuggccauccugaagggccuguacaacuucgccaccugcggcgugaucggccugaucaccuuccugcugcugugcggcagaagcugcagcgccaccuacaagggccaguacgagcugcagacccuggagcugaacauggagagccugaacaugugcaugccccugagcugcaccaagaacaacagccaccacuacaucagagccggcaacaacaccggccuggagcugacccugaccaacaccagcaucaucagccacaaguucugcaaccugagcgacgcccacaagaagaaccuguacgaccacacccugaugagcaucaucaccaccuuccaccugagcauccccaacuucaaccaguacgaggccaugagcugcgacuucaacggcggcaagaucagcauccaguacaaccugagccacagcuacgccggcgacgccgcccagcacugcggcaccguggccaacggcgugcugcagaccuucaugagaauggccuggggcggcagcuaccuggcccuggacagcggcagaagaggcugggacugcaucaucagcagcuaccaguaccugaucauccagaacaccaccugggacgaccacugccaguucagcagacccagccccaucggcuaccugggcuucgugagccagaagaccagagacaucuacaucagcagaagacugcugggcaccuucaccuggacccugagcgacagcgagggccacgacaugcccggcggcuacugccugaccagauggaugcugaucgaggccgaccugaagugcuucggcaacaccgccguggccaagugcaacgagaagcacgacgaggaguucugcgacauguggagacuguucgacuucugcaagcaggccauccagagacugaaggcccccgcccagaugaacauccagcugaucaacaaggccgugaacgcccugaucaacgaccagcugaugaugaagaaccaccugagagacaucaugggcauccccuacugcaacuacagcaaguucugguaccugaacaacaccaccaccggcagaaccagccugcccagaugcuggcugaucagcaacggcagcuaccugaacgagacccacuucagcgacgacaucgagcagcaggccgacaacaugaucaccgagaugcugcagaaggaguacauggacagacagggcaagaccccccugggccugguggaccuguucguguucagcaccagcuucuaccugaucaccaucuuccugcaccuggugaagauccccacccacagacacaucgugggcaagcccugccccaagccccacagacugaaccacaugggcaucugcagcugcggccuguacaagcagcccggcgugcccgugagauggaagagaugaggacuaguaauaaggaaacuguaugaaugucugugggcaggaagugaagagauccuucuguaaagguuuuuggaauuaugucugcugaauaauaaacuuuuuugaaauaauaaaucugguagaaaaaugagaucucaaaggcucuuuucagagccaccaaaaaaaaaaaaaaaaaaaaaaaaaaaaaaaaaaaaaaaaaaaaaaaaaaaaaaaaaaaaaaaaagaauu

SEQ ID NO: 30732 - RNA, 1778 nt, Artificial Sequence; identical to SEQ ID NO: 30726
  mRNA product Design b-4 (hSL-A64-N5) comprising derived and/or modified sequence from LASV(Pinneo-NIG-1969;Clade I)__AIT17836__GPCmut6 (opt4)

SEQ ID NO: 30733 - RNA, 1778 nt, Artificial Sequence
  mRNA product Design b-4 (hSL-A64-N5) comprising derived and/or modified sequence from LASV(ISTH0009-NIG-2011;Clade II)__AIT17404__GPCmut6 (opt4)
aggagagucccgcagucggcguccagcggcucugcuuguucgugugugugucguugcaggccuuauucaagcuuaccaugggccagaucaucaccuucuuccaggaggugccccacgugaucgaggaggugaugaacaucgugcugaucgcccugagccugcuggccauccugaagggcaucuacaacguggccaccugcggccuguucggccuggugagcuuccugcugcugugcggcagaagcugcagcaccaccuacaagggcguguacgagcugcagacccuggagcuggacauggccagccugaacaugugcaugccccugagcugcaccaagaacaacagccaccacuacaucauggugggcaacgagaccggccuggagcugacccugaccaacaccagcaucaucaaccacaaguucugcaaccugagcgacgcccacaagaagaaccuguacgaccacgcccugaugagcaucaucagcaccuuccaccugagcauccccaacuucaaccaguacgaggccaugagcugcgacuucaacggcggcaagaucagcgugcaguacaaccugagccacgccuacgccguggacgccgccaaccacugcggcaccaucgccaacggcgugcugcagaccuucaugagaauggccuggggcggcagcuacaucgcccuggacagcggcaagggcagcugggacugcaucaugaccagcuaccaguaccugaucauccagaacaccaccugggaggaccacugccaguucagcagacccagccccaucggcuaccugggccugcugagccagagaaccagagacaucuacaucagcagaagacugcugggcaccuucaccuggacccugagcgacagcgagggcaacgagacccccggcggcuacugccugaccagauggaugcugaucgaggccgagcugaagugcuucggcaacaccgccguggccaagugcaacgagaagcacgacgaggaguucugcgacaugcugagacuguucgacuucugcaagcaggccaucagaagacugaagacccccgcccagaugagcauccagcugaucaacaaggccgugaacgcccugaucaacgaccagcugaucaugaagaaccaccugagagacaucaugggcauccccuacugcaacuacagcaaguacugguaccugaaccacaccgugaccggcaagaccagccugcccagaugcuggcuggugagcaacggcagcuaccugaacgagacccacuucagcgacgacaucgagcagcaggccgacaacaugaucaccgagcugcugcagaaggaguacauggacagacagggcaagaccccccugggccugguggaccuguucguguucagcaccagcuucuaccugaucagcaucuuccugcaccugaucaagauccccacccacagacacaucaccggcaagcccugccccaagccccacagacugaaccacaugggcaucugcagcugcggccuguacaagcaccccggcgugcccgugaaguggaagagaugaggacuaguaauaaggaaacuguaugaaugucugugggcaggaagugaagagauccuucuguaaagguuuuuggaauuaugucugcugaauaauaaacuuuuuugaaauaauaaaucugguagaaaaaugagaucucaaaggcucuuuucagagccaccaaaaaaaaaaaaaaaaaaaaaaaaaaaaaaaaaaaaaaaaaaaaaaaaaaaaaaaaaaaaaaaaagaauu

SEQ ID NO: 30734 - RNA, 1778 nt, Artificial Sequence
  mRNA product Design b-4 (hSL-A64-N5) comprising derived and/or modified sequence from LASV(ISTH2010-NIG-2012;Clade II)__AIT17482__GPCmut6 (opt4)
aggagagucccgcagucggcguccagcggcucugcuuguucgugugugugucguugcaggccuuauucaagcuuaccaugggccagaucaucaccuucuuccaggaggugccccacgugaucgaggaggugaugaacaucgugcugaucgcccugagccugcuggccauccugaagggcaucuacaacguggccaccugcggccuguucggccuggugagcuuccugcugcugugcggcagaagcugcagcaccaccuacaagggcguguacgagcugcagacccuggagcuggacauggccagccugaacaugugcaugccccugagcugcaccaagaacaacagccaccacuacaucauggugggcaacgagaccggccuggagcugacccugaccaacaccagcaucaucaaccacaaguucugcaaccugagcgacgcccacaagaagaaccuguacgaccacgcccugaugagcaucaucagcaccuuccaccugagcauccccaacuucaaccaguacgaggccaugagcugcgacuucaacggcggcaagaucagcgugcaguacaaccugagccacgccuacgccguggacgccgccaaccacugcggcaccaucgccaacggcgugcugcagaccuucaugagaauggccuggggcggcagcuacaucgcccuggacagcggcaagggcagcugggacugcaucaugaccagcuaccaguaccugaucauccagaacaucaccugggaggaccacugccaguucagcagacccagccccaucggcuaccugggccugcugagccagagaaccagagacaucuacaucagcagaagacugcugggcaccuucaccuggacccugagcgacagcgagggcaacgagacccccggcggcuacugccugaccagauggaugcugaucgaggccgagcugaagugcuucggcaacaccgccguggccaagugcaacgagaagcacgacgaggaguucugcgacaugcugagacuguucgacuucugcaagcaggccaucagaagacugaagacccccgcccagaugagcauccagcugaucaacaaggccgugaacgcccugaucaacgaccagcugaucaugaagaaccaccugagagacaucaugggcauccccuacugcaacuacagcaaguacugguaccugaaccacaccgugaccggcaagaccagccugcccagaugcuggcuggugagcaacggcagcuaccugaacgagacccacuucagcgacgacaucgagcagcaggccgacaacaugaucaccgagcugcugcagaaggaguacaucgacagacagggcaagaccccccugggccugguggaccuguucguguucagcaccagcuucuaccugaucagcaucuuccugcaccuggugaagauccccacccacagacacguggugggcaagcccugccccaagccccacagacugaaccacaugggcaucugcagcugcggccuguacaagcaccccggcgugcccgugaaguggaagagaugaggacuaguaauaaggaaacuguaugaaugucugugggcaggaagugaagagauccuucuguaaagguuuuuggaauuaugucugcugaauaauaaacuuuuuugaaauaauaaaucugguagaaaaaugagaucucaaaggcucuuuucagagccaccaaaaaaaaaaaaaaaaaaaaaaaaaaaaaaaaaaaaaaaaaaaaaaaaaaaaaaaaaaaaaaaaagaauu

SEQ ID NO: 30735 - RNA, 1778 nt, Artificial Sequence
  mRNA product Design b-4 (hSL-A64-N5) comprising derived and/or modified sequence from LASV(Lassa virus/H.sapiens-wt/NGA/2015/ISTH_0543;Clade II)__AVO03639__GPCmut6 (opt4)
aggagagucccgcagucggcguccagcggcucugcuuguucgugugugugucguugcaggccuuauucaagcuuaccaugggccagaucaucaccuucuuccaggaggugccccacgugaucgaggaggugaugaacaucgugcugaucgcccugagccugcuggccauccugaagggcaucuacaacguggccaccugcggccuguucggccuggugagcuuccugcugcugugcggcagaagcugcagcaccaccuacaagggcguguacgagcugcagacccuggagcuggacauggccaaccugaacaugugcaugccccugagcugcaccaagaacaacagccaccacuacaucauggugggcaacgagaccggccuggagcugacccugaccaacaccagcaucaucaaccacaaguucugcaaccugagcgacgcccacaagaagaaccuguacgaccacgcccugaugagcaucaucagcaccuuccaccugagcauccccaacuucaaccaguacgaggccaugagcugcgacuucaacggcggcaagaucagcgugcaguacaaccugagccacaccuacgccguggacgccgccaaccacugcggcaccaucgccaacggcgugcugcagaccuucaugagaauggccuggggcggcagcuacaucgcccuggacagcggcaagggcagcugggacugcaucaugaccagcuaccaguaccuggugauccagaacaccaccugggaggaccacugccaguucagcagacccagccccaucggcuaccugggccugcugagccagagaaccagagacaucuacaucagcagaagacugcugggcaccuucaccuggacccugagcgacagcgagggcaacgagacccccggcggcuacugccugaccagauggaugcugaucgaggccgagcugaagugcuucggcaacaccgccguggccaagugcaacgagaagcacgacgaggaguucugcgacaugcugagacuguucgacuucugcaagcaggccaucagaagacugaagacccccgcccagaugagcauccagcugaucaacaaggccgugaacgcccugaucaacgaccagcugaucaugaagaaccaccugagagacaucaugggcauccccuacugcaacuacagcaaguacugguaccugaaccacaccgugaccggcaagaccagccugcccagaugcuggcuggugagcaacggcagcuaccugaacgagacccacuucagcgacgacaucgagcagcaggccgacaacaugaucaccgagcugcugcagaaggaguacaucgacagacagggcaagaccccccugggccugguggaccuguucguguucagcaccagcuucuaccugaucagcaucuuccugcaccuggugaagauccccacccacagacacaucaccggcaagcccugccccaagccccacagacugaaccacaugggcaucugcagcugcggccuguacaagcaccccggcgugcccgugaaguggaagagaugaggacuaguaauaaggaaacuguaugaaugucugugggcaggaagugaagagauccuucuguaaagguuuuuggaauuaugucugcugaauaauaaacuuuuuugaaauaauaaaucugguagaaaaaugagaucucaaaggcucuuuucagagccaccaaaaaaaaaaaaaaaaaaaaaaaaaaaaaaaaaaaaaaaaaaaaaaaaaaaaaaaaaaaaaaaaagaauu

SEQ ID NO: 30736 - RNA, 1778 nt, Artificial Sequence
  mRNA product Design b-4 (hSL-A64-N5) comprising derived and/or modified sequence from LASV(Lassa virus/H.sapiens-wt/NGA/2016/ISTH_0009;Clade II)__AVO03571__GPCmut6 (opt4)
aggagagucccgcagucggcguccagcggcucugcuuguucgugugugugucguugcaggccuuauucaagcuuaccaugggccagaucaucaccuucuuccaggaggugccccacgugaucgaggaggugaugaacaucgugcugaucgcccugagccugcuggccauccugaagggcaucuacaacguggccaccugcggccugcugggccuggugagcuuccugcugcugugcggcagaagcugcagcaccaccuacaagggcguguacgagcugcagacccuggagcuggacauggccagccugaacaugugcaugccccugagcugcaccaagaacaacagccaccacuacaucauggugggcaacgagaccggccuggagcugacccugaccaacaccagcaucaucaaccacaaguucugcaaccugagcgacgcccacaagaagaaccuguacgaccacgcccugaugagcaucaucagcaccuuccaccugagcauccccaacuucaaccaguacgaggccaugagcugcgacuucaacggcggcagaaucagcgugcaguacaaccugagccacagcuacgccguggacgccgccaaccacugcggcaccaucgccaacggcgugcugcagaccuucaugagaauggccuggggcggcagcuacaucgcccuggacagcggcaagggcagcugggacugcaucaugaccagcuaccaguaccugaucauccagaacaccaccugggaggaccacugccaguucagcagacccagccccaucggcuaccugggccugcugagccagagaaccagagacaucuacaucagcagaagacugcugggcaccuucaccuggacccugagcgacagcgagggcaacgagacccccggcggcuacugccugaccagauggaugcugaucgaggccgagcugaagugcuucggcaacaccgccguggccaagugcaacgagaagcacgacgaggaguucugcgacaugcugagacuguucgacuucugcaagcaggccaucagaagacugaagacccccgcccagaugagcauccagcugaucaacaaggccgugaacgcccugaucaacgaccagcugaucaugaagaaccaccugagagacaucaugggcauccccuacugcaacuacagcaaguacugguaccugaaccacaccgugaccggcaagaccagccugcccagaugcuggcuggugagcaacggcagcuaccugaacgagacccacuucagcgacgacaucgagcagcaggccgacaacaugaucaccgagcugcugcagaaggaguacaucgacagacagggcaagaccccccugggccugguggaccuguucguguucagcaccagcuucuaccugaucagcaucuuccugcaccuggugaagauccccacccacagacacaucaccggcaagcccugccccaagccccacagacugaaccacaugggcaucugcagcugcggccuguacaaccaccccggcgugcccgugaaguggaagagaugaggacuaguaauaaggaaacuguaugaaugucugugggcaggaagugaagagauccuucuguaaagguuuuuggaauuaugucugcugaauaauaaacuuuuuugaaauaauaaaucugguagaaaaaugagaucucaaaggcucuuuucagagccaccaaaaaaaaaaaaaaaaaaaaaaaaaaaaaaaaaaaaaaaaaaaaaaaaaaaaaaaaaaaaaaaaagaauu

SEQ ID NO: 30737 - RNA, 1778 nt, Artificial Sequence
  mRNA product Design b-4 (hSL-A64-N5) comprising derived and/or modified sequence from LASV(Lassa virus/H.sapiens-wt/NGA/2016/ISTH_0017;Clade II)__AVO03567__GPCmut6 (opt4)
aggagagucccgcagucggcguccagcggcucugcuuguucgugugugugucguugcaggccuuauucaagcuuaccaugggccagaucaucaccuucuuccaggaggugccccacgugaucgaggaggugaugaacaucgugcugaucgcccugagccugcuggccauccugaagggcaucuacaacguggccaccugcggccuguucggccuggugagcuuccugcugcugugcggcagaagcugcagcaccaccuacaagggcguguacgagcugcagacccuggagcuggacauggccagccugaacaugugcaugccccugagcugcaccaagaacaacagccaccacuacaucauggugggcaacgagaccggccuggagcugacccugaccaacaccagcaucaucaaccacaaguucugcaaccugagcgacgcccacaagaagaaccuguacgaccacgcccugaugagcaucaucagcaccuuccaccugagcauccccaacuucaaccaguacgaggccaugagcugcgacuucaacggcggcaagaucagcgugcaguacaaccugagccacaccuacgccaucgacgccgccaaccacugcggcaccaucgccaacggcgugcugcagaccuucaugagaauggccuggggcggcagcuacaucgcccuggacagcggcaagggcagcugggacugcaucaugaccagcuaccaguaccugaucauccagaacaccaccugggaggaccacugccaguucagcagacccagccccaucggcuaccugggccugcugagccagagaaccagagacaucuacaucagcagaagacugcugggcaccuucaccuggacccugagcgacagcgagggcaacgagacccccggcggcuacugccugaccagauggaugcugaucgaggccgagcugaagugcuucggcaacaccgccguggccaagugcaacgagaagcacgacgaggaguucugcgacaugcugagacuguucgacuucugcaagcaggccaucagaagacugaagacccccgcccagaugagcauccagcugaucaacaaggccgugaacgcccugaucaacgaccagcugaucaugaagaaccaccugagagacaucaugggcauccccuacugcaacuacagcaaguacugguaccugaaccacaccgugaccggcaagaccagccugcccagaugcuggcuggugagcaacggcagcuaccugaacgagacccacuucagcgacgacaucgagcagcaggccgacaacaugaucaccgagcugcugcagaaggaguacauggacagacagggcaagaccccccugggccugguggaccuguucguguucagcaccagcuucuaccugaucagcaucuuccugcaccuggugagaauccccacccacagacacgugaucggcaagcccugccccaagccccacagacugaaccacaugggcaucugcagcugcggccuguacaagcaccccggcgugcccgugaaguggaagagaugaggacuaguaauaaggaaacuguaugaaugucugugggcaggaagugaagagauccuucuguaaagguuuuuggaauuaugucugcugaauaauaaacuuuuuugaaauaauaaaucugguagaaaaaugagaucucaaaggcucuuuucagagccaccaaaaaaaaaaaaaaaaaaaaaaaaaaaaaaaaaaaaaaaaaaaaaaaaaaaaaaaaaaaaaaaaagaauu

SEQ ID NO: 30738 - RNA, 1778 nt, Artificial Sequence
  mRNA product Design b-4 (hSL-A64-N5) comprising derived and/or modified sequence from LASV(Lassa virus/H.sapiens-wt/NGA/2018/ISTH_0959;Clade II)__AVV65099__GPCmut6 (opt4)
aggagagucccgcagucggcguccagcggcucugcuuguucgugugugugucguugcaggccuuauucaagcuuaccaugggccagaucaucaccuucuuccaggaggugccccacgugaucgaggaggugaugaacaucgugcugaucgcccugagccugcuggccauccugaagggcaucuacaacguggugaccugcggccuguucggccuggugagcuuccugcugcugugcggcagaagcugcagcaccaccuacaagggcguguacgagcugcagacccuggagcuggacauggccagccugaacaugugcaugccccugagcugcaccaagaacaacagccaccacuacaucauggugggcaacgagaccggccuggagcugacccugaccaacaccagcaucaucaaccacaaguucugcaaccugagcgacgcccacaagaagaaccuguacgaccacgcccugaugagcaucaucagcaccuuccaccugagcauccccaacuucaaccaguacgaggccaugagcugcgacuucaacggcggcaagaucagcgugcaguacaaccugagccacgccuacgccaucgacgccgccaaccacugcggcaccaucgccaacggcgugcugcagaccuucaugagaauggccuggggcggcagcuacaucgcccuggacagcggcaagggcagcugggacugcaucaugaccagcuaccaguaccugaucauccagaacaccaccugggaggaccacugccaguucagcagacccagccccaucggcuaccugggccugcugagccagagaaccagagacaucuacaucagcagaagacugcugggcaccuucaccuggacccugagcgacagcgagggcaacgagacccccggcggcuacugccugaccagauggaugcugaucgaggccgagcugaagugcuucggcaacaccgccguggccaagugcaacgagaagcacgacgaggaguucugcgacaugcugagacuguucgacuucugcaagcaggccaucagaagacugaagacccccgcccagaugagcauccagcugaucaacaaggccgugaacgcccugaucaacgaccagcugaucaugaagaaccaccugagagacaucaugggcauccccuacugcaacuacagcaaguacugguaccugaaccacaccgugaccggcaagaccagccugcccagaugcuggcuggugagcaacggcagcuaccugaacgagacccacuucagcgacgacaucgagcagcaggccgacaacaugaucaccgagcugcugcagaaggaguacaucgacagacagggcaagaccccccugggccugguggaccuguucguguucagcaccagcuucuaccugaucagcaucuuccugcaccuggugaagauccccacccacagacacgugaucggcaagcccugccccaagccccacagacugaaccacaugggcaucugcagcugcggccuguacaagcaccccggcgugcccgugaaguggaagagaugaggacuaguaauaaggaaacuguaugaaugucugugggcaggaagugaagagauccuucuguaaagguuuuuggaauuaugucugcugaauaauaaacuuuuuugaaauaauaaaucugguagaaaaaugagaucucaaaggcucuuuucagagccaccaaaaaaaaaaaaaaaaaaaaaaaaaaaaaaaaaaaaaaaaaaaaaaaaaaaaaaaaaaaaaaaaagaauu

SEQ ID NO: 30739 - RNA, 1778 nt, Artificial Sequence
  mRNA product Design b-4 (hSL-A64-N5) comprising derived and/or modified sequence from LASV(LASV003-NIG-2008;Clade II)__AIT17580__GPCmut6 (opt4)
aggagagucccgcagucggcguccagcggcucugcuuguucgugugugugucguugcaggccuuauucaagcuuaccaugggccagaucaucaccuucuuccaggaggugccccacgugaucgaggaggugaugaacaucgugcugaucgcccugagccugcuggccauccugaagggcaucuacaacguggccaccugcggccuguucggccuggugagcuuccugcugcugugcggcagaagcugcagcaccaccuacaagggcguguacgagcugcagacccuggagcuggacauggccagccugaacaugugcaugccccugagcugcaccaagaacaacagccaccacuacaucauggugggcaacgagaccggccuggagcugacccugaccaacaccagcaucaucaaccacaaguucugcaaccugagcgacgcccacaagaagaaccuguacgaccacgcccugaugagcaucaucagcaccuuccaccugagcauccccaacuucaaccaguacgaggccaugagcugcgacuucaacggcggcaagaucagcgugcaguacaaccugagccacaccuacgccguggacgccgccaaccacugcggcaccaucgccaacggcgugcugcagaccuucaugagaauggccuggggcggcagcuacaucgcccuggacagcggcaagggcagcugggacugcaucaugaccagcuaccaguaccugaucauccagaacaccaccugggaggaccacugccaguucagcagacccagccccaucggcuaccugggccugcugagccagagaaccagagacaucuacaucagcagaagacugcugggcaccuucaccuggacccugagcgacagcgagagcaacgagacccccggcggcuacugccugaccagauggaugcugaucgaggccgagcugaagugcuucggcaacaccgccguggccaagugcaacgagaagcacgacgaggaguucugcgacaugcugagacuguucgacuucugcaagcaggccaucagaagacugaaggcccccgcccagaugagcauccagcugaucaacaaggccgugaacgcccugaucaacgaccagcugaucaugaagaaccaccugagagacaucaugggcauccccuacugcaacuacagcaaguacugguaccugaaccacaccgugaccggcagaaccagccugcccagaugcuggcuggugagcaacggcagcuaccugaacgagacccacuucagcgacgacaucgagcagcaggccgacaacaugaucaccgagcugcugcagaaggaguacauggacagacagggcaagaccccccugggccugguggaccuguucguguucagcaccagcuucuaccugaucagcaucuuccugcaccuggugaagauccccacccacagacacgugaucggcaagcccugccccaagccccacagacugaaccacaugggcaucugcagcugcggccuguacaagcaccccggcgugcccgugaaguggaagagaugaggacuaguaauaaggaaacuguaugaaugucugugggcaggaagugaagagauccuucuguaaagguuuuuggaauuaugucugcugaauaauaaacuuuuuugaaauaauaaaucugguagaaaaaugagaucucaaaggcucuuuucagagccaccaaaaaaaaaaaaaaaaaaaaaaaaaaaaaaaaaaaaaaaaaaaaaaaaaaaaaaaaaaaaaaaaagaauu

SEQ ID NO: 30740 - RNA, 1778 nt, Artificial Sequence
  mRNA product Design b-4 (hSL-A64-N5) comprising derived and/or modified sequence from LASV(LASV035-NIG-2009;Clade II)__AIT17588__GPCmut6 (opt4)
aggagagucccgcagucggcguccagcggcucugcuuguucgugugugugucguugcaggccuuauucaagcuuaccaugggccagaucaucaccuucuuccaggaggugccccacgugaucgaggaggugaugaacaucgugcugaucgcccugagccugcuggccauccugaagggcaucuacaacguggccaccugcggccuguucggccuggugagcuuccugcugcugugcggcagaagcugcagcaccaccuacaagggcguguacgagcugcagacccuggagcuggacauggccagccugaacaugugcaugccccugagcugcaccaagaacaacagccaccacuacaucauggugggcaacgagaccggccuggagcugacccugaccaacaccagcaucaucaaccacaaguucugcaaccugagcgacgcccacaagaagaaccuguacgaccacgcccugaugagcaucaucagcaccuuccaccugagcauccccaacuucaaccaguacgaggccaugagcugcgacuucaacggcggcaagaucagcgugcaguacaaccugagccacgccuacgccguggacgccgccaaccacugcggcaccaucgccaacggcgugcugcagaccuucaugagaauggccuggggcggcagcuacaucgcccuggacagcggcaagggcagcugggacugcaucaugaccagcuaccaguaccugaucauccagaacaccaccugggaggaccacugccaguucagcagacccagccccaucggcuaccugggccugcugagccagagaaccagagacaucuacaucagcagaagacugcugggcaccuucaccuggacccugagcgacagcgagggcaacgagacccccggcggcuacugccugaccagauggaugcugaucgaggccgagcugaagugcuucggcaacaccgccguggccaagugcaacgagaagcacgacgaggaguucugcgacaugcugagacuguucgacuucugcaagcaggccaucagaagacugaaggcccccgcccagaugagcauccagcugaucaacaaggccgugaacgcccugaucaacgaccagcugaucaugaagaaccaccugagagacaucaugggcauccccuacugcaacuacagcaaguacugguaccugaaccacaccgugaccggcaagaccagccugcccagaugcuggcuggugagcaacggcagcuaccugaacgagacccacuucagcgacgacaucgagcagcaggccgacaacaugaucaccgagcugcugcagaaggaguacaucgacagacagggcaagaccccccugggccugguggaccuguucguguucagcaccagcuucuaccugaucagcaucuuccugcaccuggugaagauccccacccacagacacgugaucggcaagcccugccccaagccccacagacugaaccacaugggcaucugcagcugcggccuguacaagcaccccggcgugcccgugaaguggaagagaugaggacuaguaauaaggaaacuguaugaaugucugugggcaggaagugaagagauccuucuguaaagguuuuuggaauuaugucugcugaauaauaaacuuuuuugaaauaauaaaucugguagaaaaaugagaucucaaaggcucuuuucagagccaccaaaaaaaaaaaaaaaaaaaaaaaaaaaaaaaaaaaaaaaaaaaaaaaaaaaaaaaaaaaaaaaaagaauu

SEQ ID NO: 30741 - RNA, 1778 nt, Artificial Sequence
  mRNA product Design b-4 (hSL-A64-N5) comprising derived and/or modified sequence from LASV(LASV1000-NIG-2009;Clade II)__AIT17782__GPCmut6 (opt4)
aggagagucccgcagucggcguccagcggcucugcuuguucgugugugugucguugcaggccuuauucaagcuuaccaugggccagaucaucaccuucuuccaggaggugccccacgugaucgaggaggugaugaacaucgugcugaucgcccugagccugcuggccauccugaagggcaucuacaacguggccaccugcggccuguucggccuggugagcuuccugcugcugugcggcagaagcugcagcaccaccuacaagggcguguacgagcugcagacccuggagcuggacauggccagccugaacaugugcaugccccugagcugcaccaagaacaacagccaccacuacaucauggugggcaacgagaccggccuggagcugacccugaccaacaccagcaucaucaaccacaaguucugcaaccugagcgacgcccacaagaagaaccuguacgaccacgcccugaugagcaucaucagcaccuuccaccugagcauccccaacuucaaccaguacgaggccaugagcugcgacuucaacggcggcaagaucagcgugcaguacaaccugagccacaccuacgccguggacgccgccaaccacugcggcaccaucgccaacggcgugcugcagaccuucaugagaauggccuggggcggcagcuacaucgcccuggacagcggcaagggcagcugggacugcaucaugaccagcuaccaguaccugaucauccagaacaccaccugggaggaccacugccaguucagcagacccagccccaucggcuaccugggccugcugagccagagaaccagagacaucuacaucagcagaagacugcugggcaccuucaccuggacccugagcgacagcgagggcaacgagacccccggcggcuacugccugaccagauggaugcugaucgaggccgagcugaagugcuucggcaacaccgccguggccaagugcaacgagaagcacgacgaggaguucugcgacaugcugagacuguucgacuucugcaagcaggccaucaagagacugaagacccccgcccagaugagcauccagcugaucaacaaggccgugaacgcccugaucaacgaccagcugaucaugaagaaccaccugagagacaucaugggcauccccuacugcaacuacagcaaguacugguaccugaaccacaccgugaccggcaagaccagccugcccagaugcuggcuggugagcaacggcagcuaccugaacgagacccacuucagcgacgacaucgagcagcaggccgacaacaugaucaccgagcugcugcagaaggaguacaucgacagacagggcaagaccccccugggccugguggaccuguucguguucagcaccagcuucuaccugaucagcaucuuccugcaccuggugaagauccccacccacagacacguggugggcaagcccugccccaagccccacagacugaaccacaugggcaucugcagcugcggccuguacaagcaccccggcgugcccgugaaguggaagagaugaggacuaguaauaaggaaacuguaugaaugucugugggcaggaagugaagagauccuucuguaaagguuuuuggaauuaugucugcugaauaauaaacuuuuuugaaauaauaaaucugguagaaaaaugagaucucaaaggcucuuuucagagccaccaaaaaaaaaaaaaaaaaaaaaaaaaaaaaaaaaaaaaaaaaaaaaaaaaaaaaaaaaaaaaaaaagaauu

SEQ ID NO: 30742 - RNA, 1778 nt, Artificial Sequence
  mRNA product Design b-4 (hSL-A64-N5) comprising derived and/or modified sequence from LASV(LASV221-NIG-2010;Clade II)__AIT17624__GPCmut6 (opt4)
aggagagucccgcagucggcguccagcggcucugcuuguucgugugugugucguugcaggccuuauucaagcuuaccaugggccagaucaucaccuucuuccaggaggugccccacgugaucgaggaggugaugaacaucgugcugaucgcccugagccugcuggccauccugaagggcaucuacaacguggccaccugcggccuguucggccuggugagcuuccugcugcugugcggcagaagcugcagcaccaccuacaagggcguguacgagcugcagacccuggagcuggacauggccagccugaacaugugcaugccccugagcugcaccaagaacaacagccaccacuacaucauggugggcaacgagaccggccuggagcugacccugaccaacaccagcaucaucaaccacaaguucugcaaccugagcgacgcccacaagaagaaccuguacgaccacgcccugaugagcaucaucagcaccuuccaccugagcauccccaacuucaaccaguacgaggccaugagcugcgacuucaacggcggcaagaucagcgugcaguacaaccugagccacaccuacgccaucgacgccgccaaccacugcggcaccaucgccaacggcgugcugcagaccuucaugagaauggccuggggcggcagcuacaucgcccuggacagcggcaagggcagcugggacugcaucaugaccagcuaccaguaccugaucauccagaacaccaccugggaggaccacugccaguucagcagacccagccccaucggcuaccugggccugcugagccagagaaccagagacaucuacaucagcagaagacugcugggcaccuucaccuggacccugagcgacagcgagggcaacgagacccccggcggcuacugccugaccagauggaugcugaucgaggccgagcugaagugcuucggcaacaccgccguggccaagugcaacgagaagcacgacgaggaguucugcgacaugcugagacuguucgacuucugcaagcaggccaucagaagacugaagacccccgcccagaugagcauccagcugaucaacaaggccgugaacgcccugaucaacgaccagcugaucaugaagaaccaccugagagacaucaugggcauccccuacugcaacuacagcaaguacugguaccugaaccacaccgugaccggcaagaccagccugcccagaugcuggcuggugagcaacggcagcuaccugaacgagacccacuucagcgacgacaucgagcagcaggccgacaacaugaucaccgagaugcugcagaaggaguacauggacagacagggcaagaccccccugggccugguggaccuguucguguucagcaccagcuucuaccugaucagcaucuuccugcaccuggugaagauccccacccacagacacgugaucggcaagcccugccccaagccccacagacugaaccacaugggcaucugcagcugcggccuguacaagcaccccggcgugcccgugaaguggaagagaugaggacuaguaauaaggaaacuguaugaaugucugugggcaggaagugaagagauccuucuguaaagguuuuuggaauuaugucugcugaauaauaaacuuuuuugaaauaauaaaucugguagaaaaaugagaucucaaaggcucuuuucagagccaccaaaaaaaaaaaaaaaaaaaaaaaaaaaaaaaaaaaaaaaaaaaaaaaaaaaaaaaaaaaaaaaaagaauu

SEQ ID NO: 30743 - RNA, 1778 nt, Artificial Sequence
  mRNA product Design b-4 (hSL-A64-N5) comprising derived and/or modified sequence from LASV(LASV237-NIG-2010;Clade II)__AIT17638__GPCmut6 (opt4)
aggagagucccgcagucggcguccagcggcucugcuuguucgugugugugucguugcaggccuuauucaagcuuaccaugggccagaucaucaccuucuuccaggaggugccccacgugaucgaggaggugaugaacaucgugcugaucgcccugagccugcuggccauccugaagggcaucuacaacguggccaccugcggccuguucggccuggugagcuuccugcugcugugcggcagaagcugcagcaccaccuacaagggcguguacgagcugcagacccuggagcuggacauggccagccugaacaugugcaugccccugagcugcaccaagaacaacagccaccacuacaucauggugggcaacgagaccggccuggagcugacccugaccaacaccagcaucaucaaccacaaguucugcaaccugagcgacgcccacaagaaggaccuguacgaccacgcccugaugagcaucaucagcaccuuccaccugagcauccccaacuucaaccaguacgaggccaugagcugcgacuucaacggcggcaagaucagcgugcaguacaaccugagccacaccuacgccguggacgccgccaaccacugcggcaccaucgccaacggcgugcugcagaccuucaugagaauggccuggggcggcagcuacaucgcccuggacagcggcaagggcagcugggacugcaucaugaccagcuaccaguaccugaucauccagaacaccaccugggaggaccacugccaguucagcagacccagccccaucggcuaccugggccugcugagccagagaaccagagacaucuacaucagcagaagacugcugggcaccuucaccuggacccugagcgacagcgagggcaacgagacccccggcggcuacugccugaccagauggaugcugaucgaggccgagcugaagugcuucggcaacaccgccguggccaagugcaacgagaagcacgacgaggaguucugcgacaugcugagacuguucgacuucugcaagcaggccaucagaagacugaagacccccgcccagaugagcauccagcugaucaacaaggccgugaacgcccugaucaacgaccagcugaucaugaagaaccaccugagagacaucaugggcauccccuacugcaacuacagcaaguacugguaccugaaccacaccgugaccggcaagaccagccugcccagaugcuggcuggugagcaacggcagcuaccugaacgagacccacuucagcgacgacaucgagcagcaggccgacaacaugaucaccgagcugcugcagaaggaguacauggacagacagggcaagaccccccugggccugguggaccuguucguguucagcaccagcuucuaccugaucagcaucuuccugcaccugaucaagauccccacccacagacacaucaccggcaagcccugccccaagccccacagacugaaccacaugggcaucugcagcugcggccuguacaagcaccccggcgugcccgugaaguggaagagaugaggacuaguaauaaggaaacuguaugaaugucugugggcaggaagugaagagauccuucuguaaagguuuuuggaauuaugucugcugaauaauaaacuuuuuugaaauaauaaaucugguagaaaaaugagaucucaaaggcucuuuucagagccaccaaaaaaaaaaaaaaaaaaaaaaaaaaaaaaaaaaaaaaaaaaaaaaaaaaaaaaaaaaaaaaaaagaauu

SEQ ID NO: 30744 - RNA, 1778 nt, Artificial Sequence
  mRNA product Design b-4 (hSL-A64-N5) comprising derived and/or modified sequence from LASV(LASV253-NIG-2011;Clade II)__AIT17670__GPCmut6 (opt4)
aggagagucccgcagucggcguccagcggcucugcuuguucgugugugugucguugcaggccuuauucaagcuuaccaugggccagaucaucaccuucuuccaggaggugccccacgugaucgaggaggugaugaacaucgugcugaucgcccugagccugcuggccauccugaagggcaucuacaacguggccaccugcggccuguucggccuggugagcuuccugcugcugugcggcagaagcugcagcaccaccuacaagggcguguacgagcugcagacccuggagcuggacauggccagccugaacaugugcaugccccugagcugcaccaagaacaacagccaccacuacaucauggugggcaacgagaccggccuggagcugacccugaccaacaccagcaucaucaaccacaaguucugcaaccugagcgacgcccacaagaagaaccuguacgaccacgcccugaugagcaucaucagcaccuuccaccugagcauccccaacuucaaccaguacgaggccaugagcugcgacuucaacggcggcaagaucagcgugcaguacaaccugagccacaccuacgccguggacgccgccaaccacugcggcaccaucgccaacggcgugcugcagaccuucaugagaauggccuggggcggcagcuacaucgcccuggacagcggcaagggcagcugggacugcaucaugaccagcuaccaguaccugaucauccagaacaccaccugggaggaccacugccaguucagcagacccagccccaucggcuaccugggccugcugagccagagaaccagagacaucuacaucagcagaagacugcugggcaccuucaccuggacccugagcgacagcgagggcaacgagacccccggcggcuacugccugaccagauggaugcugaucgaggccgagcugaagugcuucggcaacaccgccguggccaagugcaacgagaagcacgacgaggaguucugcgacaugcugagacuguucgacuucugcaagcaggccaucagaagacugaaggcccccgcccagaugagcauccagcugaucaacaaggccgugaacgcccugaucaacgaccagcugaucaugaagaaccaccugagagacaucaugggcauccccuacugcaacuacagcaaguacugguaccugaaccacaccgugaccggcagaaccagccugcccagaugcuggcuggugagcaacggcagcuaccugaacgagacccacuucagcgacgacaucgagcagcaggccgacaacaugaucaccgagcugcugcagaaggaguacaucgacagacagggcaagaccccccugggccugguggaccuguucguguucagcaccagcuucuaccugaucagcaucuuccugcaccuggugaagauccccacccacagacacaucaucggcaagcccugccccaagccccacagacugaaccacaugggcaucugcagcugcggccuguacaagcaccccggcgugcccgugaaguggaagagaugaggacuaguaauaaggaaacuguaugaaugucugugggcaggaagugaagagauccuucuguaaagguuuuuggaauuaugucugcugaauaauaaacuuuuuugaaauaauaaaucugguagaaaaaugagaucucaaaggcucuuuucagagccaccaaaaaaaaaaaaaaaaaaaaaaaaaaaaaaaaaaaaaaaaaaaaaaaaaaaaaaaaaaaaaaaaagaauu

SEQ ID NO: 30745 - RNA, 1778 nt, Artificial Sequence
  mRNA product Design b-4 (hSL-A64-N5) comprising derived and/or modified sequence from LASV(LASV254-NIG-2011;Clade II)__AIT17674__GPCmut6 (opt4)
aggagagucccgcagucggcguccagcggcucugcuuguucgugugugugucguugcaggccuuauucaagcuuaccaugggccagaucaucaccuucuuccaggaggugccccacgugaucgaggaggugaugaacaucgugcugaucgcccugagccugcuggccauccugaagggcaucuacaacguggccaccugcggccuguucggccuggugagcuuccugcugcugugcggcagaagcugcagcaccaccuacaagggcguguacgagcugcagacccuggagcuggacaugaccaaccugaacaugugcaugccccugagcugcaccaagaacaacagccaccacuacaucauggugggcaacgagaccggccuggagcugacccugaccaacaccagcaucaucaaccacaaguucugcaaccugagcgacgcccacaagaagaaccuguacaaccacgcccugaugagcaucaucagcaccuuccaccugagcauccccaacuucaaccaguacgaggccaugagcugcgacuucaacggcggcaagaucagcgugcaguacaaccugagccacagcuacgccguggacgccgccaaccacugcggcaccaucgccaacggcgugcugcagaccuucaugagaauggccuggggcggcagcuacaucgcccuggacagcggcaagggcaacugggacugcaucaugaccagcuaccaguaccugaucauccagaacaccaccugggaggaccacugccaguucagcagacccagccccaucggcuaccugggccugcugagccagagaaccagagacaucuacaucagcagaagacugcugggcaccuucaccuggacccugagcgacagcgagggcaacgagacccccggcggcuacugccugaccagauggaugcugaucgaggccgagcugaagugcuucggcaacaccgccguggccaagugcaacgagaagcacgacgaggaguucugcgacaugcugagacuguucgacuucugcaagcaggccaucagaagacugaagacccccgcccaggccaacauccagcugaucaacaaggccgugaacgcccugaucaacgaccagcugaucaugaagaaccaccugagagacaucaugggcauccccuacugcaacuacagcaaguacugguaccugaaccacaccgugaccggcaagaccagccugcccagaugcuggcuggugagcaacggcagcuaccugaacgagacccacuucagcgacgacaucgagcagcaggccgacaacaugaucaccgagcugcugcagaaggaguacauggacagacagggcaagaccccccugggccugguggaccuguucguguucagcaccagcuucuaccugaucagcaucuuccugcaccuggugaagauccccacccacagacacgugaucggcaagcccugccccaagccccacagacugaaccacaugggcaucugcagcugcggccuguacaagcaccccggcgugcccgugaaguggaagagaugaggacuaguaauaaggaaacuguaugaaugucugugggcaggaagugaagagauccuucuguaaagguuuuuggaauuaugucugcugaauaauaaacuuuuuugaaauaauaaaucugguagaaaaaugagaucucaaaggcucuuuucagagccaccaaaaaaaaaaaaaaaaaaaaaaaaaaaaaaaaaaaaaaaaaaaaaaaaaaaaaaaaaaaaaaaaagaauu

SEQ ID NO: 30746 - RNA, 1778 nt, Artificial Sequence
  mRNA product Design b-4 (hSL-A64-N5) comprising derived and/or modified sequence from LASV(Nig08-A19;Clade III)__ADU56618__GPCmut6 (opt4)
aggagagucccgcagucggcguccagcggcucugcuuguucgugugugugucguugcaggccuuauucaagcuuaccaugggccagaucgugaccuucuuccaggaggugccccacgugaucgaggaggugaugaacaucgugcugaucgcccugagcauccuggccauccugaagggccuguacaacaucgccaccugcggccugaucggccuggugaccuuccugcugcugagcggcagaagcugcagcaugaccuacaagggcguguacgagcugcagacccuggagcugaacaugaacacccugaacaugugcaugccccugagcugcaccaagaacaacagccaccacuacaucauggugggcaacgagaccggccuggagcugacccugaccaacaccagccugcugcaccacaaguucugcaaccugagcgacgcccacaagaagaaccuguacgaccacacccugaugagcaucaucagcaccuuccaccugagcauccccaacuucaaccaguacgaggccaugagcugcgacuucaacggcggcaagaucaccgugcaguacaaccugagccacagcuacgccaucgacgccgccaaccacugcggcaccguggccaacggcgugcugcagaccuucaugagaauggccuggggcggcagcuacaucgcccuggacagcggcagaggcaagugggacugcaucaugaccagcuaccaguaccugaucauccagaacaccaccugggaggaccacugccaguucagcagacccagccccaucggcuaccugggccugcugagccagagaaccagagacaucuacaucagcagaagacugcugggcaccuucaccuggacccugagcgacagcgagggcaacgagacccccggcggcuacugccugaccagauggaugcugaucgaggccgagcugaagugcuucggcaacaccgccguggccaagugcaacgagaagcacgacgaggaguucugcgacaugcugagacuguucgacuucugcaagcaggccaucagaagacugaaggcccccgcccagaugagcauccagcugaucaacaaggccgugaacgcccugaucaacgaccagcugaucaugaagaaccaccugagagacaucaugggcauccccuacugcaacuacagcaaguacugguaccugaaccacaccagcaccggcagaaccagccugcccagaugcuggcuggugagcaacggcagcuaccugaacgagacccacuucagcgacgacaucgagcagcaggccgacaacaugaucaccgagaugcugcagaaggaguaccuggacagacagggcaagaccccccugggccugguggaccuguucguguucagcaccagcuucuaccugaucagcaucuuccugcaccuggugaagauccccacccacagacacaucgugggcaagcccugccccaagccccacagacugaaccacaugggcaucugcagcugcggccuguacaagcagcccggcgugcccgugagauggaagagaugaggacuaguaauaaggaaacuguaugaaugucugugggcaggaagugaagagauccuucuguaaagguuuuuggaauuaugucugcugaauaauaaacuuuuuugaaauaauaaaucugguagaaaaaugagaucucaaaggcucuuuucagagccaccaaaaaaaaaaaaaaaaaaaaaaaaaaaaaaaaaaaaaaaaaaaaaaaaaaaaaaaaaaaaaaaaagaauu

SEQ ID NO: 30747 - RNA, 1781 nt, Artificial Sequence
  mRNA product Design b-4 (hSL-A64-N5) comprising derived and/or modified sequence from LASV(G1180-SLE-2010;Clade IV)__AIT17168__GPCmut6 (opt4)
aggagagucccgcagucggcguccagcggcucugcuuguucgugugugugucguugcaggccuuauucaagcuuaccaugggccagaucgugaccuucuuccaggaggugccccacgugaucgaggaggugaugaacaucgugcugaucgcccugagcauccuggccgugcugaagggccuguacaacuucgccaccugcggccuggugggccugcugaccuuccugcugcugugcggcagaagcugcaccgccagcagauacaagggcguguacgagcugcagacccuggagcugaacauggagacccugaacaugugcaugccccugagcugcaccaagaacaacagccaccacuacaucauggugggcaacgagaccggccuggagcugacccugaccaacaccagcaucaucaaccacaaguucugcaaccugagcgacgcccacaagaagaaccuguacgaccacgcccugaugagcaucaucagcaccuuccaccugagcauccccaacuucaaccaguacgaggccaugagcugcgacuucaacggcggcaagaucagcgugcaguacaaccugagccacagcuacgccggcgacgccgccaaccacugcggcaccguggccaacggcgugcugcagaccuucaugagaauggccuggggcggcagcuacaucgcccuggacagcggccacggcagcugggacugcaucaugaccagcuaccaguaccugaucauccagaacaccaccugggaggaccacugccaguucagcagacccagccccaucggcuaccugggccugcugagccagagaaccagagacaucuacaucagcagaagacugcugggcaccuucaccuggacccugagcgacagcgagggcaaggacacccccggcggcuacugccugaccagauggaugcugaucgaggccgagcugaagugcuucggcaacaccgccguggccaagugcaacgagaagcacgacgaggaguucugcgacaugcugagacuguucgacuucugcaagcaggccauccagagacugaaggcccccgcccagaugagcauccagcugaucaacaaggccgugaacgcccugaucaacgaccagcugaucaugaagaaccaccugagagacaucaugggcauccccuacugcaacuacagcaaguacugguaccugaaccacaccaccaccggcaagaccagccugcccaagugcuggcuggugagcaacggcagcuaccugaacgagacccacuucagcgacgacaucgagcagcaggccgacaacaugaucaccgagaugcugcagaaggaguacauggagagacagggcaagaccccccugggccugguggaccuguucguguucagcaccagcuucuaccugaucagcaucuuccugcaccuggugaagauccccacccacagacacaucgugggcaagagcugccccaagccccacagacugaaccacaugggcaucugcagcugcggccuguacaagcagcccggcgugcccgugaaguggaagagaugaggacuaguaauaaggaaacuguaugaaugucugugggcaggaagugaagagauccuucuguaaagguuuuuggaauuaugucugcugaauaauaaacuuuuuugaaauaauaaaucugguagaaaaaugagaucucaaaggcucuuuucagagccaccaaaaaaaaaaaaaaaaaaaaaaaaaaaaaaaaaaaaaaaaaaaaaaaaaaaaaaaaaaaaaaaaagaauu

SEQ ID NO: 30748 - RNA, 1781 nt, Artificial Sequence
  mRNA product Design b-4 (hSL-A64-N5) comprising derived and/or modified sequence from LASV(G1442-SLE-2011;Clade IV)__AIT17180__GPCmut6 (opt4)
aggagagucccgcagucggcguccagcggcucugcuuguucgugugugugucguugcaggccuuauucaagcuuaccaugggccagaucgugaccuucuuccaggaggugccccacgugaucgaggaggugaugaacaucgugcugaucgcccugagcauccuggccgugcugaagggccuguacaacguggccaccugcggccugaucggccuggugaccuuccugcugcugugcggcagaagcugcaccaccacccuguacaagggcguguacgagcugcagacccuggagcugaacauggagacccugaacaugugcaugccccugagcugcaccaagaacaacagccaccacuacaucagagugggcaacgagaccggccuggagcugacccugaccaacaccagcaucaucaaccacaaguucugcaaccugagcgacgcccacaagaagaaccuguacgaccacgcccugaugagcaucaucagcaccuuccaccugagcauccccaacuucaaccaguacgaggccaugagcugcgacuucaacggcggcaagaucagcgugcaguacaaccugagccacagcuacgccggcgacgccgccaaccacugcggcaccguggccaacggcgugcugcagaccuucaugagaauggccuggggcggcagcuacaucgcccuggacagcggcagaggcaacugggacugcaucaugaccagcuaccaguaccugaucauccagaacaccaccugggacgaccacugccaguucagcagacccagccccaucggcuaccugggccugcugagccagagaaccagagacguguacaucagcagaagacugcugggcaccuucaccuggacccugagcgacagcgagggcaaggacacccccggcggcuacugccugaccagauggaugcugaucgaggccgagcugaagugcuucggcaacaccgccguggccaagugcaacgagaagcacgacgaggaguucugcgacaugcugagacuguucgacuucugcaagcaggccauccagagacugaaggcccccgcccagaugagcauccagcugaucaacaaggccgugaacgcccugaucaacgaccagcugaucaugaagaaccaccugagagacaucaugggcauccccuacugcaacuacagcaaguacugguaccugaacaacaccgccaccggcaagaccagccugcccaagugcuggcugaucagcaacggcagcuaccugaacgagacccacuucagcgacgacaucgagcaggaggccgacaacaugaucaccgagaugcugcagaaggaguacauggagagacagggcaagaccccccugggccugguggaccuguucguguucagcaccagcuucuaccugaucagcaucuuccugcaccuggugaagauccccacccacagacacaucgugggcaagagcugccccaagccccacagacugaaccacaugggcaucugcagcugcggccuguacaagcagcccggcgugcccgugagauggaagagaugaggacuaguaauaaggaaacuguaugaaugucugugggcaggaagugaagagauccuucuguaaagguuuuuggaauuaugucugcugaauaauaaacuuuuuugaaauaauaaaucugguagaaaaaugagaucucaaaggcucuuuucagagccaccaaaaaaaaaaaaaaaaaaaaaaaaaaaaaaaaaaaaaaaaaaaaaaaaaaaaaaaaaaaaaaaaagaauu

SEQ ID NO: 30749 - RNA, 1781 nt, Artificial Sequence
  mRNA product Design b-4 (hSL-A64-N5) comprising derived and/or modified sequence from LASV(G3010-SLE-2013;Clade IV)__AIT17344__GPCmut6 (opt4)
aggagagucccgcagucggcguccagcggcucugcuuguucgugugugugucguugcaggccuuauucaagcuuaccaugggccagaucgugaccuucuuccaggaggugccccacgugaucgaggaggugaugaacaucgugcugaucgcccugagcauccuggccgugcugaagggccuguacaacuucgccaccugcggccuggugggccuggugaccuuccugcugcugugcggcagaagcugcaccaccagccuguacaagggcguguacgagcugcagacccuggagcugaacauggagacccugaacaugugcaugccccugagcugcaccaagaacaacagccaccacuacaucauggugggcaacgagaccggccuggagcugacccugaccaacaccagcaucaucaaccacaaguucugcaaccugagcgacgcccacaagaagaaccuguacaaccacgcccugaugagcaucaucagcaccuuccaccugagcauccccaacuucaaccaguacgaggccaugagcugcgacuucaacggcggcaagaucagcgugcaguacaaccugagccacagcuacgccggcgacgccgccagccacugcggcaccguggccaacggcgugcugcagaccuucaugagaauggccuggggcggcagcuacaucgcccuggacagcggcuacggcaagugggacugcaucaugaccagcuaccaguaccugaucauccagaacaccaccugggaggaccacugccaguucagcagacccagccccaucggcuaccugggccugcugagccagagaaccagagacaucuacaucagcagaagacugcugggcaccuucaccuggacccugagcgacagcgagggcaaggacacccccggcggcuacugccugaccagauggaugcugaucgaggccgagcugaagugcuucggcaacaccgccguggccaagugcaacgagaagcacgacgaggaguucugcgacaugcugagacuguucgacuucugcaagcaggccauccagagacugaagacccccgcccagaugagcauccagcugaucaacaaggccgugaacgcccugaucaacgaccagcugaucaugaagaaccaccugagagacaucaugggcauccccuacugcaacuacagcaaguacugguaccugaaccacaccaccaccggcaagaccagccugcccaagugcuggcuggugagcaacggcagcuaccugaacgagacccacuucagcgacgacaucgagcagcaggccgacaacaugaucaccgagaugcugcagaaggaguacauggagagacagggcaagaccccccugggccugguggaccuguucguguucagcaccagcuucuaccugaucagcaucuuccugcaccuggugaagauccccacccacagacacaucgugggcaagagcugccccaagccccacagacugaaccacaugggcaucugcagcugcggccuguacaagcagcccggcgugcccgugagauggaagagaugaggacuaguaauaaggaaacuguaugaaugucugugggcaggaagugaagagauccuucuguaaagguuuuuggaauuaugucugcugaauaauaaacuuuuuugaaauaauaaaucugguagaaaaaugagaucucaaaggcucuuuucagagccaccaaaaaaaaaaaaaaaaaaaaaaaaaaaaaaaaaaaaaaaaaaaaaaaaaaaaaaaaaaaaaaaaagaauu

SEQ ID NO: 30750 - RNA, 1781 nt, Artificial Sequence
  mRNA product Design b-4 (hSL-A64-N5) comprising derived and/or modified sequence from LASV(G502-SLE-2009;Clade IV)__AIT17126__GPCmut6 (opt4)
aggagagucccgcagucggcguccagcggcucugcuuguucgugugugugucguugcaggccuuauucaagcuuaccaugggccagaucgugaccuucuuccaggaggugccccacgugaucgaggaggugaugaacaucgugcugaucgcccugagcauccuggccgugcugaagggccuguacaacuucgccaccugcggccuggugggccugcugaccuuccugcugcugugcggcagaagcugcaccaccggccuguacaagggcguguacgagcugcagacccuggagcugaacauggagacccugaacaugugcaugccccugagcugcaccaagaacaacagccaccacuacaucauggugggcaacgagaccggccuggagcugacccugaccaacaccagcaucaucaaccacaaguucugcaaccugagcgacgcccacaagaagaaccuguacgaccacgcccugaugagcaucaucagcaccuuccaccugagcauccccaacuucaaccaguacgaggccaugagcugcgacuucaacggcggcaagaucagcgugcaguacaaccugagccacagcuacgccggcgacgccgccgaccacugcggcaccguggccaacggcgugcugcagaccuucaugagaauggccuggggcggcagcuacaucgcccuggacagcggcagaggcagaugggacugcaucaugaccagcuaccaguaccugaucauccagaacaccaccugggaggaccacugccaguucagcagacccagccccaucggcuaccugggccugcugagccagagaaccagagacaucuacaucagcagaagacugcugggcaccuucaccuggacccugagcgacagcgagggcaaggacacccccggcggcuacugccugaccagauggaugcugaucgaggccgagcugaagugcuucggcaacaccgccguggccaagugcaacgagaagcacgacgaggaguucugcgacaugcugagacuguucgacuucugcaagcaggccauccagagacugaaggcccccgcccagaugagcauccagcugaucaacaaggccgugaacgcccugaucaacgaccagcuggugaugaagaaccaccugagagacaucaugggcauccccuacugcaacuacagcagauacugguaccugaaccacaccaccaccggcagaaccagccugcccaagugcuggcuggugagcaacggcagcuaccugaacgagacccacuucagcgacgacaucgagcagcaggccgacaacaugaucaccgagaugcugcagaaggaguacauggagagacagggcaagaccccccugggccugguggaccuguucguguucagcaccagcuucuaccugaucagcaucuuccugcaccuggugaagauccccacccacagacacaucgugggcaagagcugccccaagccccacagacugaaccacaugggcaucugcagcugcggccuguacaagcagcccggcgugcccgugaaguggaagagaugaggacuaguaauaaggaaacuguaugaaugucugugggcaggaagugaagagauccuucuguaaagguuuuuggaauuaugucugcugaauaauaaacuuuuuugaaauaauaaaucugguagaaaaaugagaucucaaaggcucuuuucagagccaccaaaaaaaaaaaaaaaaaaaaaaaaaaaaaaaaaaaaaaaaaaaaaaaaaaaaaaaaaaaaaaaaagaauu

SEQ ID NO: 30751 - RNA, 1781 nt, Artificial Sequence
  mRNA product Design b-4 (hSL-A64-N5) comprising derived and/or modified sequence from LASV(G733-SLE-2010;Clade IV)__AIT17154__GPCmut6 (opt4)
aggagagucccgcagucggcguccagcggcucugcuuguucgugugugugucguugcaggccuuauucaagcuuaccaugggccagaucgugaccuucuuccaggaggugccccacgugaucgaggaggugaugaacaucgugcugaucgcccugagcauccuggccgugcugaagggccuguacaacuucgccaccugcggcaucgugggccuggugagcuuccugcugcugugcggcagaagcugcaccaccagccuguacaagggcguguacgagcugcagacccuggagcugaacauggagacccugaacaugugcaugccccugagcugcaccaagaacaacagccaccacuacaucauggugggcaacgagaccggccuggagcugacccugaccaacaccagcaucaucaaccacaaguucugcaaccugagcgacgcccacaagaagaaccuguacgaccacgcccugaugagcaucaucagcaccuuccaccugagcauccccaacuucaaccaguacgaggccaugagcugcgacuucaacggcggcaagaucagcgugcaguacaaccugagccacagcuacgccggcgacgccgccaaccacugcggcaccaucgccaacggcgugcugcagaccuucaugagaauggccuggggcggcagcuacaucgcccuggacagcggcagagacagaugggacugcaucaugaccagcuaccaguaccugaucauccagaacaccaccugggaggaccacugccaguucagcagacccagccccaucggcuaccugggccugcugagccagagaaccagagacaucuacaucagcagaagacugcugggcaccuucaccuggacccugagcgacagcgagggcaaggacacccccggcggcuacugccugaccagauggaugcugaucgaggccgagcugaagugcuucggcaacaccgccguggccaagugcaacgagaagcacgacgaggaguucugcgacaugcugagacuguucgacuucugcaagcaggccauccagagacugaaggcccccgcccagaugagcauccagcugaucaacaaggccgugaacgcccugaucaacgaccagcugaucaugaagaaccaccugagagacaucaugggcauccccuacugcaacuacagcaaguacugguaccugaaccacaccaccaccggcaagaccagccugcccaagugcuggcuggugagcaacggcagcuaccugaacgagacccacuucagcgacgacaucgagcagcaggccgacaacaugaucaccgagaugcugcagaaggaguacauggagagacagggcaagaccccccugggccugguggaccuguucguguucagcaccagcuucuaccugaucagcaucuuccugcaccuggugaagauccccacccacagacacguggugggcaagagcugccccaagccccacagacugaaccacaugggcaucugcagcugcggccuguacggccagcccggcgugcccgugaaguggaagagaugaggacuaguaauaaggaaacuguaugaaugucugugggcaggaagugaagagauccuucuguaaagguuuuuggaauuaugucugcugaauaauaaacuuuuuugaaauaauaaaucugguagaaaaaugagaucucaaaggcucuuuucagagccaccaaaaaaaaaaaaaaaaaaaaaaaaaaaaaaaaaaaaaaaaaaaaaaaaaaaaaaaaaaaaaaaaagaauu

SEQ ID NO: 30752 - RNA, 1781 nt, Artificial Sequence
  mRNA product Design b-4 (hSL-A64-N5) comprising derived and/or modified sequence from MOPV/LASV reassortant(IGS-1;Clade IV)__AFY05576__GPCmut6 (opt4)
aggagagucccgcagucggcguccagcggcucugcuuguucgugugugugucguugcaggccuuauucaagcuuaccaugggccagaucgugaccuucuuccaggaggugccccacgugaucgaggaggugaugaacaucgugcugaucgcccugagcgugcuggccgugcugaagggccuguacaacuucgccaccugcggccuggugggccuggugaccuuccugcugcugugcggcagaagcugcaccaccagccuguacaagggcguguacgagcugcagacccuggagcugaacauggagacccugaacaugugcaugccccugagcugcaccaagaacaacagccaccacuacaucauggugggcaacgagaccggccuggagcugacccugaccaacaccagcaucaucaaccacaaguucugcaaccugagcgacgcccacaagaagaaccuguacgaccacgcccugaugagcaucaucagcaccuuccaccugagcauccccaacuucaaccaguacgaggccaugagcugcgacuucaacggcggcaagaucagcgugcaguacaaccugagccacagcuacgccggcgacgccgccaaccacugcggcaccguggccaacggcgugcugcagaccuucaugagaauggccuggggcggcagcuacaucgcccuggacagcggcagaggcaacugggacugcaucaugaccagcuaccaguaccugaucauccagaacaccaccugggaggaccacugccaguucagcagacccagccccaucggcuaccugggccugcugagccagagaaccagagacaucuacaucagcagaagacugcugggcaccuucaccuggacccugagcgacagcgagggcgaggacacccccggcggcuacugccugaccagauggaugcugaucgaggccgagcugaagugcuucggcaacaccgccguggccaagugcaacgagaagcacgacgaggaguucugcgacaugcugagacuguucgacuucugcaagcaggccauccagagacugaaggcccccgcccagaugagcauccagcugaucaacaaggccgugaacgcccugaucaacgaccagcugaucaugaagaaccaccugagagacaucaugggcauccccuacugcaacuacagcaaguacugguaccugaaccacaccaccaccggcagaaccagccugcccaagugcuggcuggugagcaacggcagcuaccugaacgagacccacuucagcgacgacaucgagcagcaggccgacaacaugaucaccgagaugcugcagaaggaguacauggagagacagggcaagaccccccugggccugguggaccuguucguguucagcaccagcuucuaccugaucagcaucuuccugcaccuggugaagauccccacccacagacacaucgugggcaagagcugccccaagccccacagacugaaccacaugggcaucugcagcugcggccuguacaagcagcccggcgugcccgugaaguggaagagaugaggacuaguaauaaggaaacuguaugaaugucugugggcaggaagugaagagauccuucuguaaagguuuuuggaauuaugucugcugaauaauaaacuuuuuugaaauaauaaaucugguagaaaaaugagaucucaaaggcucuuuucagagccaccaaaaaaaaaaaaaaaaaaaaaaaaaaaaaaaaaaaaaaaaaaaaaaaaaaaaaaaaaaaaaaaaagaauu

SEQ ID NO: 30753 - RNA, 1781 nt, Artificial Sequence
  mRNA product Design b-4 (hSL-A64-N5) comprising derived and/or modified sequence from LASV(LM765-SLE-2012;Clade IV)__AIT17814__GPCmut6 (opt4)
aggagagucccgcagucggcguccagcggcucugcuuguucgugugugugucguugcaggccuuauucaagcuuaccaugggccagaucgugaccuucuuccaggaggugccccacgugaucgaggaggugaugaacaucgugcugaucgcccugagcauccuggccgugcugaagggccuguacaacuucgccaccugcggccuggugggccuggugaccuuccugcugcugugcggcagaagcugcaccaccagccuguacaagggcguguacgagcugcagacccuggagcugaacauggagacccugaacaugugcaugccccugagcugcaccaagaacaacagccaccacuacaucauggugggcaacgagaccggccuggagcugacccugaccaacaccagcaucaucgaccacaaguucugcaaccugagcgacgcccacagaaagaaccuguacgaccacgcccugaugagcaucaucagcaccuuccaccugagcauccccaacuucaaccaguacgaggccaugagcugcgacuucaacggcggcaagaucagcgugcaguacaaccugagccacagcuacgccaaggacgccgccgaccacugcggcaccguggccaacggcgugcugcagaccuucaugagaauggccuggggcggcagcuacaucgcccuggacagcggcagaggcagaugggacugcaucaugaccagcuaccaguaccugaucauccagaacaccaccugggaggaccacugccaguucagcagacccagccccaucggcuaccugggccugcugagccagagaaccagagacaucuacaucagcagaagacugcugggcaccuucaccuggacccugagcgacagcgagggcaaggacacccccggcggcuacugccugaccagauggaugcugaucgaggccgagcugaagugcuucggcaacaccgccguggccaagugcaacgagaagcacgacgaggaguucugcgacaugcugagacuguucgacuucugcaagcaggccauccagagacugaaggcccccgcccagaugagcauccagcugaucaacaaggccgugaacgcccugaucaacgaccagcugaucaugaagaaccaccugagagacaucaugggcauccccuacugcaacuacagcaaguacugguaccugaaccacaccaccaccggcaagaccagccugcccaagugcuggcuggugagcaacggcagcuaccugaacgagacccacuucagcgacgacaucgagcagcaggccgacaacaugaucaccgagaugcugcagaaggaguacauggagagacagggcaagaccccccugggccugguggaccuguucguguucagcaccagcuucuaccugaucagcaucuuccugcaccuggugaagauccccacccacagacacaucgugggcaagcccugccccaagccccacagacugaaccacaugggcaucugcagcugcggccuguacaagcagcccggcgugcccgugaaguggaagagaugaggacuaguaauaaggaaacuguaugaaugucugugggcaggaagugaagagauccuucuguaaagguuuuuggaauuaugucugcugaauaauaaacuuuuuugaaauaauaaaucugguagaaaaaugagaucucaaaggcucuuuucagagccaccaaaaaaaaaaaaaaaaaaaaaaaaaaaaaaaaaaaaaaaaaaaaaaaaaaaaaaaaaaaaaaaaagaauu

SEQ ID NO: 30754 - RNA, 1781 nt, Artificial Sequence
  mRNA product Design b-4 (hSL-A64-N5) comprising derived and/or modified sequence from LASV(LM776-SLE-2012;Clade IV)__AIT17824__GPCmut6 (opt4)
aggagagucccgcagucggcguccagcggcucugcuuguucgugugugugucguugcaggccuuauucaagcuuaccaugggccagaucgugaccuucuuccaggaggugccccacgugaucgaggaggugaugaacaucgugcugaucgcccugagcauccuggccgugcugaagggccuguacaacuucgccaccugcggccuggugggccuggugaccuuccugcugcugugcggcagaagcugcaccaccagcguguacaagggcguguacgagcugcagacccuggagcugaacauggagacccugaacaugugcaugccccugagcugcaccaagaacaacagccaccacuacaucauggugggcaacgagaccggccuggagcugacccugaccaacaccagcaucaucaaccacaaguucugcaaccugagcgacgcccacaagaagaaccuguacgaccacgcccugaugagcaucaucagcaccuuccaccugagcauccccaacuucaaccaguacgaggccaugagcugcgacuucaacggcggcaagaucagcgugcaguacaaccugagccacagcuacgccggcgacgccgccaaccacugcggcaccguggccaacggcgugcugcagaccuucaugagaauggccuggggcggcagcuacaucgcccuggacagcggccacggcaagugggacugcaucaugaccagcuaccaguaccugaucauccagaacaccaccugggaggaccacugccaguucagcagacccagccccaucggcuaccugggccugcugagccagagaaccagagacaucuacaucagcagaagacugcugggcaccuucaccuggacccugagcgacagcgagggcaaggacacccccggcggcuacugccugaccagauggaugcugaucgaggccgagcugaagugcuucggcaacaccgccguggccaagugcaacgagaagcacgacgaggaguucugcgacaugcugagacuguucgacuucugcaagcaggccauccagagacugaaggcccccgcccagaugagcauccagcugaucaacaaggccgugaacgcccugaucaacgaccagcugaucaugaagaaccaccugagagacaucaugggcauccccuacugcaacuacagcaaguacugguaccugaaccacaccaccaccggcaagaccagccugcccaagugcuggcuggugagcaacggcagcuaccugaacgagacccacuucagcgacgacaucgagcagcaggccgacaacaugaucaccgagaugcugcagaaggaguacauggagagacagggcaagaccccccugggccugguggaccuguucguguucagcaccagcuucuaccugaucagcaucuuccugcaccuggugaagauccccacccacagacacaucgugggcaagagcugccccaagccccacagacugaaccacaugggcaucugcagcugcggccuguacaagcagcccggcgugcccgugagauggaagagaugaggacuaguaauaaggaaacuguaugaaugucugugggcaggaagugaagagauccuucuguaaagguuuuuggaauuaugucugcugaauaauaaacuuuuuugaaauaauaaaucugguagaaaaaugagaucucaaaggcucuuuucagagccaccaaaaaaaaaaaaaaaaaaaaaaaaaaaaaaaaaaaaaaaaaaaaaaaaaaaaaaaaaaaaaaaaagaauu

SEQ ID NO: 30755 - RNA, 1781 nt, Artificial Sequence
  mRNA product Design b-4 (hSL-A64-N5) comprising derived and/or modified sequence from LASV(Mad39;Clade IV)__ANH09722__GPCmut6 (opt4)
aggagagucccgcagucggcguccagcggcucugcuuguucgugugugugucguugcaggccuuauucaagcuuaccaugggccagaucgugaccuucuuccaggaggugccccacgugaucgaggaggugaugaacaucgugcugaucgcccugagcauccuggccgugcugaagggccuguacaacguggccaccugcggccugaucggccuggugaccuuccugcugcugugcggcagaagcugcaccaccacccuguacaagggcguguacgagcugcaggcccuggagcugaacauggagacccugaacaugugcaugccccugagcugcaccaagaacaacagccaccacuacaucagagugggcaacgagaccggccuggagcugacccugaccaacaccagccugaucaaccacaaguucugcaaccugagcgacgcccacaagaagaaccuguacgaccacgcccugaugagcaucaucagcaccuuccaccugagcauccccaacuucaaccaguacgaggccaugagcugcgacuucaacgacggcaagaucagcgugcaguacaaccugagccacaccuacgccggcgacaccgccaaccacugcggcaccguggccaacggcgugcugcagaccuucaugagaauggccuggggcggcagcuacaucgcccuggacagcggcagaggcggcugggacugcaucaugaccagcuaccaguaccugaucauccagaacaccaccugggaggaccacugccaguucagcagacccagccccaucggcuaccugggccugcugagccagagaaccagagacaucuacaucagcagaagacugcugggcaccuucaccuggacccugagcgacagcgagggcaaggacacccccggcggcuacugccugaccagauggaugcugaucgaggccgagcugaagugcuucggcaacaccgccguggccaagugcaacgagaagcacgacgaggaguucugcgacaugcugagacuguucgacuucugcaagcaggccauccagagacugaaggcccccgcccagaugagcauccagcugaucaacaaggccgugaacgcccugaucaacgaccagcugaucaugaagaaccaccugagagacaucaugggcauccccuacugcaacuacagcaaguacugguaccugaaccacaccgugaccggcaagaccagccugcccaagugcuggcuggugagcaacggcagcuaccugaacgagacccacuucagcgacgacaucgagcagcaggccgacaacaugaucaccgagaugcugcagaaggaguacauggagagacagggcaagaccccccugggccugguggaccuguucguguucagcaccagcuucuaccugaucagcaucuuccugcaccuggugaagauccccacccacagacacguggugggcaagcccugccccaagccccacagacugaaccacaugggcaucugcagcugcggcuucuacaagcagcccggcgugcccgugagauggaagagaugaggacuaguaauaaggaaacuguaugaaugucugugggcaggaagugaagagauccuucuguaaagguuuuuggaauuaugucugcugaauaauaaacuuuuuugaaauaauaaaucugguagaaaaaugagaucucaaaggcucuuuucagagccaccaaaaaaaaaaaaaaaaaaaaaaaaaaaaaaaaaaaaaaaaaaaaaaaaaaaaaaaaaaaaaaaaagaauu

SEQ ID NO: 30756 - RNA, 1781 nt, Artificial Sequence
  mRNA product Design b-4 (hSL-A64-N5) comprising derived and/or modified sequence from LASV(Z0947-SLE-2011;Clade IV)__AIT17840__GPCmut6 (opt4)
aggagagucccgcagucggcguccagcggcucugcuuguucgugugugugucguugcaggccuuauucaagcuuaccaugggccagaucgugaccuucuuccaggaggugccccacgugaucgaggaggugaugaacaucgugcugaucgcccugagcauccuggccgugcugaagggccuguacaacuucgccaccugcggccuggugggccuggugaccuuccugcugcugugcggcagaagcugcaccaucagccuguacaagggcguguacgagcugcagacccuggagcugaacauggagacccugaacaugugcaugccccugagcugcaccaagaacaacagccaccacuacaucauggugggcaacgagaccggccuggagcugacccugaccaacaccagcaucaucaaccacaaguucugcaaccugagcgacgcccacaagaagaaccuguacgaccacgcccugaugagcaucaucagcaccuuccaccugagcauccccaacuucaaccaguacgaggccaugagcugcgacuucaacggcggcaagaucagcgugcaguacaaccugagccacagcuacgccggcgacgccgccaaccacugcggcaccguggccaacggcgugcugcagaccuucaugagaauggccuggggcggcagcuacaucgcccuggacagcggcagagacagaugggacugcaucaugaccagcuaccaguaccugaucauccagaacaccaccugggaggaccacugccaguucagcagacccagccccaucggcuaccugggccugcugagccagagaaccagagacaucuacaucagcagaagacugcugggcaccuucaccuggacccugagcgacagcgagggcaaggacacccccggcggcuacugccugaccagauggaugcugaucgaggccgagcugaagugcuucggcaacaccgccguggccaagugcaacgagaagcacgacgaggaguucugcgacaugcugagacuguucgacuucugcaagcaggccauccagagacugaaggcccccgcccagaugagcauccagcugaucaacaaggccgugaacgcccugaucaacgaccagcugaucaugaagaaccaccugagagacaucaugggcauccccuacugcaacuacagcaaguacugguaccugaaccacaccaccaccggcaagaccagccugcccaagugcuggcuggugagcaacggcagcuaccugaacgagacccacuucagcgacgacaucgagcagcaggccgacaacaugaucaccgagaugcugcagaaggaguacauggagagacagggcaagaccccccugggccugguggaccuguucguguucagcaccagcuucuaccugaucagcaucuuccugcaccuggugaagauccccacccacagacacaucgugggcaagcccugccccaagccccacagacugaaccacaugggcaucugcagcugcggccuguacaagcagcccggcgugcccgugaaguggaagagaugaggacuaguaauaaggaaacuguaugaaugucugugggcaggaagugaagagauccuucuguaaagguuuuuggaauuaugucugcugaauaauaaacuuuuuugaaauaauaaaucugguagaaaaaugagaucucaaaggcucuuuucagagccaccaaaaaaaaaaaaaaaaaaaaaaaaaaaaaaaaaaaaaaaaaaaaaaaaaaaaaaaaaaaaaaaaagaauu

SEQ ID NO: 30757 - RNA, 1781 nt, Artificial Sequence
  mRNA product Design b-4 (hSL-A64-N5) comprising derived and/or modified sequence from LASV(Josiah;Clade IV)__NP_694870__GPCmut6 (opt5)
aggagagucccgcagucggcguccagcggcucugcuuguucgugugugugucguugcaggccuuauucaagcuuaccaugggccagaucgugaccuucuuucaagaggucccccacguuauugaagaggugaugaacaucgugcugauugcccucagcguccuggcugugcuuaaggggcuguacaauuucgccacaugcggacucguuggccuggugacguuucuucugcucugugggagauccugcaccacaucucuguauaaaggagucuacgaacugcagacccucgagcugaacauggaaacacuuaauauguguaugccucugagcugcaccaagaacaauucccaucacuauaucauggugggcaacgagacagggcucgagcugacccuuacgaauaccucuauuaucaaccauaaauucuguaaucugagcgacgcgcacaagaaaaaccucuacgaucaugcucugauguccaucauuucuacauuucaccugagcaucccgaauuucaaccaguaugaagccauguccugcgacuuuaauggaggcaagauuagcguucaguacaaccucucucacuccuaugccggcgaugcugccaaucauugugggaccguggcuaacggaguccugcaaacauucaugcggauggccuggggcgggagcuacaucgcgcuugacucuggacgcggcaacugggauugcauuaugaccuccuaccaguaucugaucauucagaauacgacaugggaggaccacugucaguuuagcagacccucuccuaucggguaccucggacugcuuucccaacggacccgcgauaucuauauuagcagacggcugcucggcacauucaccuggacccuguccgacucugaaggcaaggauacacccgggggauacugccugacgcgcuggaugcucaucgaggccgagcugaaauguuuuggcaacaccgcuguggccaagugcaaugaaaaacaugacgaggaguucugcgauaugcuuagacuguuugacuucuguaagcaggcuauucagcggcucaaagccccugcgcagaugagcauccaacugauuaacaaggccgugaaugcucuuaucaacgaucagcugaucaugaagaaucaccuccgcgacauuauggggauccccuauugcaacuacuccaaauauugguaccugaaucacacaaccacaggaagaaccagccugccuaaguguuggcucgucucuaacggcuccuaccugaaugaaacgcauuucagcgacgauauugaacagcaagccgacaacaugaucacagagaugcuucagaaagaguauauggaacggcaggggaagaccccgcugggacucguugaucuguuuguguucucuaccagcuuuuaccugauuuccaucuuccuucaccucgugaaaauccccacacaucgccacauugucggcaagucuugcccuaaaccccauagacugaaucacaugggcaucuguagcugcgggcuguauaagcagccuggagugcccguuaaguggaaacggugaggacuaguaauaaggaaacuguaugaaugucugugggcaggaagugaagagauccuucuguaaagguuuuuggaauuaugucugcugaauaauaaacuuuuuugaaauaauaaaucugguagaaaaaugagaucucaaaggcucuuuucagagccaccaaaaaaaaaaaaaaaaaaaaaaaaaaaaaaaaaaaaaaaaaaaaaaaaaaaaaaaaaaaaaaaaagaauu

SEQ ID NO: 30758 - RNA, 1778 nt, Artificial Sequence
  mRNA product Design b-4 (hSL-A64-N5) comprising derived and/or modified sequence from LASV(LP;Clade I)__AAF86701__GPCmut6 (opt5)
aggagagucccgcagucggcguccagcggcucugcuuguucgugugugugucguugcaggccuuauucaagcuuaccaugggccagaucauuaccuucuuucaagaggugccccacgucaucgaagagguuaugaacauugugcugaucgcccucagccugcuugcuauucugaaggggcucuacaauaucgccacaugcggaaucauuggccugguggcguuccuuuuucugugugggaaauccugcucucucacgcugaagggaggcuaugaacugcagacccucgagcugaacauggaaacacuuaauauguguaugccucugagcugcaccaaaaacuccucucaucacuacaucagagucgggaaugagacaggacucgagcugacccuuacaaacaccagcauuaucaaucauaaguucuguaaccuguccgacgcucacaaaaagaaucucuaugaucaugcccugaugucuauuaucagcacguuucaccuguccauuccgaacuucaaucaguacgaagccaugagcugcgacuuuaacggcggcaagaucucugugcaguauaaucucucccacagcuacgcuggggaugccgcugagcauuguggaaccguugccaacggcgugcugcaaacauucaugcggauggcguggggagggcgcuauaucgcccuugacucuggcaaagggaauugggauugcauuaugaccuccuaccaguaccugaucauucagaacacaaccugggaagaccacugucaguuuagcagacccucuccuaucggauaucucggccugcuuucccaacggacgcgcgauauuuacaucagcagacggcugcucggcacauucaccuggacacuguccgacucugaggggaacgagacccccggaggcuauugccugacccgcuggaugcucaucgaagcugagcugaaguguuuugggaauacagccgucgcuaaaugcaacgaaaagcaugaugaggaguucugcgacaugcuuagacuguuugauuucuguaaacaggccauucggcgccucaaggcgccugcccagaugagcauccagcugauuaauaaggcugugaacgcccuuaucaaugaccaacugauuaugaaaaaccaccucagagauaucaugggaauccccuacugcaauuauuccaaguacugguaucugaaccacacgagcucuggccggaccucccugccuaaauguuggcucauuagcaaugggucuuaccugaacgaaacacaguucagcgacgacaucgagcagcaagcugauaauaugauuaccgaaaugcuucagaaggaguacaucgaacgccagggaaaaacaccgcugggccucguugacauuuuuaucuucuccaccucuuuuuaucugauuagcaucuuccugcaucuuaucaagauucccacgcacagacauaucgugggcaaaccuugccccaagccucaccggcucaaccauaugggggucuguuccugcggacuguacaagcaccccggcgugccgacaaaauggaagcgcugaggacuaguaauaaggaaacuguaugaaugucugugggcaggaagugaagagauccuucuguaaagguuuuuggaauuaugucugcugaauaauaaacuuuuuugaaauaauaaaucugguagaaaaaugagaucucaaaggcucuuuucagagccaccaaaaaaaaaaaaaaaaaaaaaaaaaaaaaaaaaaaaaaaaaaaaaaaaaaaaaaaaaaaaaaaaagaauu

SEQ ID NO: 30759 - RNA, 1778 nt, Artificial Sequence
  mRNA product Design b-4 (hSL-A64-N5) comprising derived and/or modified sequence from LASV(803213;Clade II)__AAF86703__GPCmut6 (opt5)
aggagagucccgcagucggcguccagcggcucugcuuguucgugugugugucguugcaggccuuauucaagcuuaccaugggccagaucauuaccuucuuucaagaggugccccacgucaucgaagagguuaugaacauugugcugaucgcccucagccugcuugcuauucugaaggggaucuacaauguggccacaugcggacucuucggccugaucuccuuucuucugcucugugggagaucuugcagcgucacguauaaaggaguguacgaacugcagacccuggagcucaacauggcgaaucugaacauguguaugccucuuuccugcacaaagaauaacucucaucacuauauuaugguuggcaaugaaaccgggcuggagcucacacugaccaacacaagcaucauuaaucauaaauucuguaaccuuuccgacgcucacaagaaaaaucuguacgaucaugcccucaugucuaucauuagcaccuuucaccuguccaucccgaacuucaaucaguaugaggccaugagcugcgacuuuaacggaggcaagauuucugugcaguacaaucugucccacagcuucgcugucgaugccgcuaaccauuguggcacgaucgccaacggggugcuccaaaccuuuaugcggauggcguggggaggcucuuauaucgcccuggacuccgggaagggaaauugggauugcauuaugacaagcuaccaguaccuuaucauucagaacaccacaugggaagaccacugucaguucucucgccccuccccuaucggcuaucuggggcuccugagccaaagaacccgggauauuuacaucucccgcagacuucugggaacguuuacauggacccucucugacagcgagggcaaugaagcucccggcggguauugccugacacgguggaugcugaucgaggccgagcucaaauguuucggaaacaccgcuguugccaagugcaaugaaaaacaugaugaggaauuuugcgacaugcugcgccuuuucgauuucuguaagcaggcgauuaaaagacugaagaccccugcccagauguccauccagcucauuaacaaggcugugaaugcccugaucaacgaccaacuuauuaugaaaaaucaucugcgggauaucaugggcauccccuacugcaacuauagccgcuacugguaucucaaucacacagucacggggaagaccucucugccuagauguuggcugguguccaacggaagcuaccucaaugagacacacuuuucugacgacauugaacagcaggcugauaacaugaucaccgagaugcugcaaaaagaguacauggaccggcagggcaagacaccgcuugggcugguggaucucuucgucuuuagcaccuccuucuaucugauuucuaucuuucugcaccuuguuaaaauucccacgcaucgccacaucgugggaaagccuugccccaaaccucauagacucaaucacaugggcauuuguagcugcggccuguacaagcaccccggggugccggucaaguggaaacggugaggacuaguaauaaggaaacuguaugaaugucugugggcaggaagugaagagauccuucuguaaagguuuuuggaauuaugucugcugaauaauaaacuuuuuugaaauaauaaaucugguagaaaaaugagaucucaaaggcucuuuucagagccaccaaaaaaaaaaaaaaaaaaaaaaaaaaaaaaaaaaaaaaaaaaaaaaaaaaaaaaaaaaaaaaaaagaauu

SEQ ID NO: 30760 - RNA, 1778 nt, Artificial Sequence
  mRNA product Design b-4 (hSL-A64-N5) comprising derived and/or modified sequence from LASV(GA391;Clade III)__CAA36645__GPCmut6 (opt5)
aggagagucccgcagucggcguccagcggcucugcuuguucgugugugugucguugcaggccuuauucaagcuuaccaugggccagaucgugaccuucuuucaagaggucccccacguuauugaagaggugaugaacaucgugcugauugcccucagcauccuggcuauucuuaaggggcuguacaaugucgccacaugcggacucaucggccuggugacguuccuucugcucuccgggagaucuuguagccugaucuauaaaggaaccuacgaacugcagacacucgagcugaacauggaaacccuuaauaugugcaugccucuguccuguacaaagaacaauucucaucacuauauucggguuggcaacgagaccgggcucgagcugacacuuaccaauacgagcauccugaaccauaaauuuugcaaucucuccgacgcgcacaagcgcaaccuguacgaucauucucugaugagcauuaucuccaccuuccaccucagcauuccgaauuuuaaccaguaugaagcuaugucuugugacuucaauggaggcaaaaucacagugcaguacaaccugucccacagcuuugccgucgaugccgcuggccauugcgggacccuugccaauggagugcugcaaacauucaugagaauggcuuggggcgggucuuauauugcccucgacuccggacggggcaacugggauuguaucaugaccagcuaccaguaccugaucauucagaacacgacaugggacgaucacugccaguuuucucgccccuccccuaucggguaucuuggacugcucagccaaagaacccgggacauuuacaucucccgcagacugcugggcacauucaccuggacccucucugauagcgagggcaaugaaacacccgggggauauugucugacgcgguggaugcuuauugaggcggagcugaagugcuuuggcaacaccgccguugcuaaguguaaugaaaaacaugacgaggaguucugcgauaugcuccgccuguuugacuucugcaagcaggccaucagacggcuuaaaaccccugcucagauguccauccagcugauuaacaaggccgugaaugcgcucaucaacgaucaacugauuaugaaaaaucaucugcgcgacaucauggggauucccuacuguaacuauagcagauacugguaucucaaucacacaucuacaggaaagaccucccugccucggugcuggcuuaucagcaacggcucuuaccugaaugaaacgaaguucagcgacgauaucgaacagcaggccgacaacaugauuacagagaugcuccaaaaagaguacaucgaucgccaggggaagaccccgcugggacuggucgaccuuuuuguguucuccaccucuuuuuaucucauuagcaucuuccugcaccuggugaaaauucccacacacagacauaucgucggcaagccuugucccaaaccucaccggcucaaucauaugggcauuugcuccugugggcuguacaagcagcccggaguuccggugagauggaaacgcugaggacuaguaauaaggaaacuguaugaaugucugugggcaggaagugaagagauccuucuguaaagguuuuuggaauuaugucugcugaauaauaaacuuuuuugaaauaauaaaucugguagaaaaaugagaucucaaaggcucuuuucagagccaccaaaaaaaaaaaaaaaaaaaaaaaaaaaaaaaaaaaaaaaaaaaaaaaaaaaaaaaaaaaaaaaaagaauu

SEQ ID NO: 30761 - RNA, 1781 nt, Artificial Sequence
  mRNA product Design b-4 (hSL-A64-N5) comprising derived and/or modified sequence from LASV(AV;Clade V)__CCA30314__GPCmut6 (opt5)
aggagagucccgcagucggcguccagcggcucugcuuguucgugugugugucguugcaggccuuauucaagcuuaccaugggccagaucgugaccuucuuucaagaggucccccacguuauugaagaggugaugaacaucgugcugauugcccucagcauccuggcuguccuuaaggggcuguacaauauugccacaugcggacucaucggccugaucacguuccuucugcucugugggagauccugcucuagcaaccuguauaaaggaguguacgaacugcagucccucgaccugaauauggagacccuuaacauguguaugccucugucuugcacaaagaauaacagccaucacuauauucggguuggcaaugauaccgggcucgaacugacacuuaccaacacauccauccugaaucauaaauuuuguaaccucucugacgcgcacaagaaagaucuguacgaccaugcucugaugagcauuaucuccaccuuccaccucagcauuccgaauuuuaaccaguaugaggccaugucuugcgauuucaauggaggcaagaucuccgugcaguacaaccugagccacucuuaugccauugacgcugccaaucauuguggcacggucgcuaacgggauccuucaaaccuuuaugcgcauggccuggggaggcuccuacaucgcgcuggauagcgggagaggaaacugggacugcauuaugacaucuuaccaguaucucaucauucagaauaccacaugggagaaccacugucaguucucccggcccagcccuaucggcuaccuggggcuucugucccaacgcaccagagauauuuauaucucucggcgccuccugggaacguuuacauggacccugagcgacuccgaaggcaaugccacacccggcggguacugccucaccagauggaugcugaucgaggcugaacuuaaguguuucggaaacaccgccguggcuaaaugcaaugagaagcaugaugaggaauuuugcgacaugcugcgccucuucgauuuuuguaaacaggccauuagccggcugaagucuccugcgcagauguccauccagcuuauuaacaaagccguuaaugcucugaucaacgaccaacucauuaugaagaaucaccugagagacaucaugggcauccccuauugcaacuacagcaaguauugguaccugaaucacacaauuacggggaaaaccucucucccuaaguguuggcuggugagcaacggauccuaccuuaaugagacacauuucucugaugacaucgaacagcaggccgauaacaugauuaccgagaugcugcaaaaagaauauauggagcggcagggcaagacaccgcucgggcuggucgaccuguucguguuuagcaccuccuucuaccuuaucagcauuuuucuccgccuggugaaaauccccacgcacagacauauugucggaaagccuugccccaaaccucaccggcugaaucauaugggcaucuguucuugcggccucuauaagcagcccgggguuccggugcgcuggaagagaugaggacuaguaauaaggaaacuguaugaaugucugugggcaggaagugaagagauccuucuguaaagguuuuuggaauuaugucugcugaauaauaaacuuuuuugaaauaauaaaucugguagaaaaaugagaucucaaaggcucuuuucagagccaccaaaaaaaaaaaaaaaaaaaaaaaaaaaaaaaaaaaaaaaaaaaaaaaaaaaaaaaaaaaaaaaaagaauu

SEQ ID NO: 30762 - RNA, 1778 nt, Artificial Sequence
  mRNA product Design b-4 (hSL-A64-N5) comprising derived and/or modified sequence from LASV(Togo/2016/7082;Clade VI)__AMR44577__GPCmut6 (opt5)
aggagagucccgcagucggcguccagcggcucugcuuguucgugugugugucguugcaggccuuauucaagcuuaccaugggccagaucauuaccuucuuucaagaggugccccacgucaucgaagagguuaugaacauugugcugaucgcccucagccugcuugcuauucugaaggggguguacaaugucgccacaugcggaaucaucggccucgugacguuccuguuucuuugugggagauccugcucucugauuuauaaaggaagcuacgaacuccagacccuggagcugaacauggaaacacucaauauguguaugccucuguccugcaccaagaacucuagccaucacuauauccggguuggcaaugagacagggcuugagcugacccucacaaacaccuccauuaucaaucauaaauucuguaaccugucugacgcgcacaagcgcaaucuuuacgaucaugcucugaugagcauucucuccacguuucaccugagcaucccgaacuucaaucaguaugaagccaugucuugcgacuuuaacggaggcaaaauuuccgugcaguacaaucugagccacgccuaugcugucgaugccgcugagcauuguggcaccguggccaacgggguucuccaaacauucaugagaauggcguggggaggcucuuacaucgcccuggacuccgggcggggaaauugggauugcaucaugaccagcuaccaguaucuuauuauccagaacacaaccugggaagaccacugucaguuuucucgccccuccccuauuggcuaccuggggcuccugagccaaagaacgcgggauaucuauauuucccgcagacuucugggaacauucaccuggacacucucugacagcgagggcaacgagacccccggcggguacugccugacccgguggaugcugaucgaagcugagcucaaguguuuuggaaauacagccguggcuaagugcaacgaaaaacaugaugaggaguucugcgacaugcugcgccuuuuugauuucuguaagcaggccauccagagacugaaauccccugcgcagaugagcauucaacucaucaauaaggccgucaacgcucugauuaaugaccagcuuaucaugaaaaaccaucugcgggauaugaugggcauucccuauugcaauuacucuaaguauugguaccucaaccacacguccagcgggcgcaccucucugccuaaguguuggcuggugagcaauggauccuaccucaacgaaacacacuucucugacgacaucgagcagcaagccgauaauaugaucaccgaaaugcugcagaaagaguauauugacagacagggcaagacaccgcuugggcugguggaucucuuugucuucagcaccuccuuuuaccugaucagcauuuuccugcaccuuaucaaaauucccacgcaucggcacaucguuggaaagccuugccccaaaccucaucgccucaaccacaugggcauuuguucuugcggccuguauaagcagcccggggugccgacaagauggaaacggugaggacuaguaauaaggaaacuguaugaaugucugugggcaggaagugaagagauccuucuguaaagguuuuuggaauuaugucugcugaauaauaaacuuuuuugaaauaauaaaucugguagaaaaaugagaucucaaaggcucuuuucagagccaccaaaaaaaaaaaaaaaaaaaaaaaaaaaaaaaaaaaaaaaaaaaaaaaaaaaaaaaaaaaaaaaaagaauu

SEQ ID NO: 30763 - RNA, 1778 nt, Artificial Sequence
  mRNA product Design b-4 (hSL-A64-N5) comprising derived and/or modified sequence from LASV(KAK-428;Clade n.d. (VII))__ANH09740__GPCmut6 (opt5)
aggagagucccgcagucggcguccagcggcucugcuuguucgugugugugucguugcaggccuuauucaagcuuaccaugggccagaucgugaccuucuuucaagaggucccccacguuauugaagaggugaugaacaucgugcugauugcccucagccugcuugcuauccugaaggggcucuacaauuucgccacaugcggagucauuggccugaucacguuucuucugcucugugggagauccugcucugcgaccuauaaaggacaguacgaacugcagacacuggagcucaacauggaaagccugaauauguguaugccucuuuccugcaccaagaacaauucucaucacuauauccgggcuggcaacaauacagggcuggagcucacccugacaaacaccagcauuaucucccauaaauucuguaaucuuucugacgcccacaagaaaaaccuguacgaucauacgcucaugagcauuaucaccacauuucaccuguccauuccgaauuucaaccaguaugaggccaugagcugcgacuuuaauggaggcaagaucucuauucaauacaaccugucccacagcuaugcuggcgaugccgcucagcauugugggaccguggccaauggaguucuccagacauucaugcgcauggcguggggcgggucuuaccuggcccuugacuccggaagacggggcugggauugcaucaucagcucuuaccaguaucugauuauccaaaacaccacgugggacgaucacugucaguuuucccgccccagcccuauuggguaccucggauucgugucccagaagacaagagacaucuauauuucucggcgccugcuuggcaccuuuacauggacccugagcgauuccgaaggccaugacaugcccgggggauacugccucaccagauggaugcugaucgaggcugaucugaaauguuucggcaacacagccgucgcuaagugcaaugaaaaacacgacgaggaguuuugcgauauguggcgccucuucgacuucuguaagcaggccauccaacggcugaaagcgccugcccagaugaacauucagcuuaucaauaaggcugugaacgcccugauuaaugaccaacucaugaugaagaaccaccugagagauaucauggggauucccuauugcaauuacagcaaauuuugguaucuuaacaauacgaccacaggacggaccucucugccucgcuguuggcucaucuccaacggcagcuaccugaaugaaacacauuucucugacgauaucgagcagcaggcugacaacaugauuaccgaaaugcugcagaaggaguacauggauagacaagggaaaacgccgcucggacugguugaccuuuuuguguucagcacauccuuuuaucugaucaccauuuuccuccaccuggucaagauccccacccaucggcacauugugggcaaaccuugccccaagccucaucgccugaaucacaugggcaucuguucuugcgggcuuuacaaacagcccggagugccggucagauggaagcggugaggacuaguaauaaggaaacuguaugaaugucugugggcaggaagugaagagauccuucuguaaagguuuuuggaauuaugucugcugaauaauaaacuuuuuugaaauaauaaaucugguagaaaaaugagaucucaaaggcucuuuucagagccaccaaaaaaaaaaaaaaaaaaaaaaaaaaaaaaaaaaaaaaaaaaaaaaaaaaaaaaaaaaaaaaaaagaauu

SEQ ID NO: 30764 - RNA, 1778 nt, Artificial Sequence; identical to SEQ ID NO: 30758
  mRNA product Design b-4 (hSL-A64-N5) comprising derived and/or modified sequence from LASV(Pinneo-NIG-1969;Clade I)__AIT17836__GPCmut6 (opt5)

SEQ ID NO: 30765 - RNA, 1778 nt, Artificial Sequence
  mRNA product Design b-4 (hSL-A64-N5) comprising derived and/or modified sequence from LASV(ISTH0009-NIG-2011;Clade II)__AIT17404__GPCmut6 (opt5)
aggagagucccgcagucggcguccagcggcucugcuuguucgugugugugucguugcaggccuuauucaagcuuaccaugggccagaucauuaccuucuuucaagaggugccccacgucaucgaagagguuaugaacauugugcugaucgcccucagccugcuugcuauucugaaggggaucuacaauguggccacaugcggacucuucggccuggucuccuuucuucugcucugugggagaucuugcagcacgaccuauaaaggaguguacgaacugcagacacuggagcucgacauggcgucccugaacauguguaugccucuuucuugcaccaagaauaacagccaucacuauaucaugguuggcaaugaaacagggcuggagcucacccugacaaacaccuccauuaucaaucauaaauucuguaaccuuucugaugcucacaagaaaaaucuguacgaccaugcccucaugagcauuaucuccacguuucaccugagcauuccgaacuucaaucaguaugaggccaugucuugcgauuuuaacggaggcaagaucuccgugcaguacaaucugagccacgcuuaugccgucgacgcugccaaccauuguggcaccauugcgaauggggugcuccaaacauucaugcggauggccuggggaggcucuuacaucgcucuggauuccgggaagggaagcugggacugcaucaugaccucuuaccaguaucuuauuauccagaacacaaccugggaagaucacugucaguuuucccgccccagcccuauuggcuaccuggggcuccugucccaaagaacgcgggacaucuauauuucucgcagacuucugggaacauucaccuggacacucagcgauuccgagggcaacgaaacccccggcggguacugccugacccgguggaugcugaucgaggccgagcucaaauguuuuggaaauacagcuguugccaagugcaacgaaaaacaugacgaggaguucugcgauaugcugcgccuuuuugacuucuguaagcaggcgaucagacggcugaaaacgccugcccagaugagcauucagcucaucaauaaggcugugaacgcccugauuaaugaucaacuuaucaugaagaaccaucugcgcgacauuaugggcauccccuauugcaauuacucuaaauauugguaccucaaccacaccgucacagggaagaccucccugccuagauguuggcuggugagcaauggaucuuaccucaacgaaacacacuucagcgacgauaucgaacagcaggcugacaauaugauuaccgagcugcuucaaaaagaguauauggaucggcagggcaagacgccgcuggggcucguggaccuguuugucuucuccacaucuuuuuaccugaucagcauuuuccuucaccucaucaaaauucccacccaucgccacaucaccggaaagccuugccccaaaccucauagacugaaccacaugggcauuuguuccugcggccuguauaagcaccccgggguuccggugaaguggaaacggugaggacuaguaauaaggaaacuguaugaaugucugugggcaggaagugaagagauccuucuguaaagguuuuuggaauuaugucugcugaauaauaaacuuuuuugaaauaauaaaucugguagaaaaaugagaucucaaaggcucuuuucagagccaccaaaaaaaaaaaaaaaaaaaaaaaaaaaaaaaaaaaaaaaaaaaaaaaaaaaaaaaaaaaaaaaaagaauu

SEQ ID NO: 30766 - RNA, 1778 nt, Artificial Sequence
  mRNA product Design b-4 (hSL-A64-N5) comprising derived and/or modified sequence from LASV(ISTH2010-NIG-2012;Clade II)__AIT17482__GPCmut6 (opt5)
aggagagucccgcagucggcguccagcggcucugcuuguucgugugugugucguugcaggccuuauucaagcuuaccaugggccagaucauuaccuucuuucaagaggugccccacgucaucgaagagguuaugaacauugugcugaucgcccucagccugcuugcuauucugaaggggaucuacaauguggccacaugcggacucuucggccuggucuccuuucuucugcucugugggagaucuugcagcacgaccuauaaaggaguguacgaacugcagacacuggagcucgacauggcgucccugaacauguguaugccucuuucuugcaccaagaauaacagccaucacuauaucaugguuggcaaugaaacagggcuggagcucacccugacaaacaccuccauuaucaaucauaaauucuguaaccuuucugaugcucacaagaaaaaucuguacgaccaugcccucaugagcauuaucuccacguuucaccugagcauuccgaacuucaaucaguaugaggccaugucuugcgauuuuaacggaggcaagaucuccgugcaguacaaucugagccacgcuuaugccgucgacgcugccaaccauuguggcaccauugcgaauggggugcuccaaacauucaugcggauggccuggggaggcucuuacaucgcucuggauuccgggaagggaagcugggacugcaucaugaccucuuaccaguaucuuauuauccagaacauuacaugggaagaucacugucaguuuucccgccccagcccuaucggcuaccuggggcuccugucccaaagaacccgggacauuuauaucucucgcagacuucugggaacguucacauggacccucagcgauuccgagggcaacgaaacacccggcggguacugccugacccgguggaugcugaucgaggccgagcucaaauguuuuggaaauaccgcuguugccaagugcaacgaaaaacaugacgaggaguucugcgauaugcugcgccuuuuugacuucuguaagcaggcgauuagacggcugaaaacgccugcccagaugagcauccagcucauuaauaaggcugugaacgcccugaucaaugaucaacuuauuaugaagaaccaucugcgcgacaucaugggcauccccuauugcaauuacucuaaauauugguaccucaaccacacagucaccgggaagacaucccugccuagauguuggcuggugagcaauggaucuuaccucaacgaaacccacuucagcgacgauauugaacagcaggcugacaauaugaucacagagcugcuucaaaaagaguauauugaucggcagggcaagaccccgcuggggcucguggaccuguuugucuucuccacgucuuuuuaccugaucagcauuuuccuucaccucguuaaaauccccacacaucgccacguggugggaaagccuugccccaaaccucauagacugaaccacaugggcauuuguuccugcggccuguauaagcaccccggggucccggugaaguggaaacggugaggacuaguaauaaggaaacuguaugaaugucugugggcaggaagugaagagauccuucuguaaagguuuuuggaauuaugucugcugaauaauaaacuuuuuugaaauaauaaaucugguagaaaaaugagaucucaaaggcucuuuucagagccaccaaaaaaaaaaaaaaaaaaaaaaaaaaaaaaaaaaaaaaaaaaaaaaaaaaaaaaaaaaaaaaaaagaauu

SEQ ID NO: 30767 - RNA, 1778 nt, Artificial Sequence
  mRNA product Design b-4 (hSL-A64-N5) comprising derived and/or modified sequence from LASV(Lassa virus/H.sapiens-wt/NGA/2015/ISTH_0543;Clade II)__AVO03639__GPCmut6 (opt5)
aggagagucccgcagucggcguccagcggcucugcuuguucgugugugugucguugcaggccuuauucaagcuuaccaugggccagaucauuaccuucuuucaagaggugccccacgucaucgaagagguuaugaacauugugcugaucgcccucagccugcuugcuauucugaaggggaucuacaauguggccacaugcggacucuucggccuggucuccuuucuucugcucugugggagaucuugcagcacgaccuauaaaggaguguacgaacugcagacacuggagcucgacauggcgaaccugaauauguguaugccucuuuccugcaccaagaacaauucucaucacuauaucaugguuggcaacgaaacagggcuggagcucacccugacaaauaccagcauuaucaaccauaaauucuguaaucuuuccgaugcucacaagaaaaaccuguacgaccaugcccucaugucuauuaucagcacguuucaccuguccauuccgaauuucaaccaguaugaggccaugagcugcgauuuuaauggaggcaagaucucugugcaguacaaccugucccacaccuaugcugucgacgccgcuaaucauuguggcacaauugccaacggggugcuccaaaccuucaugcggauggcguggggaggcagcuacaucgcccuggauucugggaagggauccugggacugcaucaugacaagcuaccaguaucuuguuauucagaacaccacgugggaagaucacugucaguuuucucgccccuccccuaucggcuaccuggggcuccugagccaaagaacacgggacauuuauaucucccgcagacuucugggaaccuucacauggacccucucugauagcgagggcaaugaaacccccggcggguacugccugacacgguggaugcugauugaggcugagcucaaauguuuuggaaacacggccguggcuaagugcaaugaaaaacaugacgaggaguucugcgauaugcugcgccuuuuugacuucuguaagcaggccaucagacggcugaaaaccccugcgcagauguccauccagcucauuaacaaggccgucaaugcucugaucaacgaucaacuuauuaugaagaaucaucugcgcgacaucaugggcauucccuauugcaacuacagcaaauauugguaccucaaucacacagugaccgggaagacaucucugccuagauguuggcugguguccaacggaagcuaccucaaugaaacccacuucucugacgauaucgaacagcaggccgacaacaugaucacggagcugcuucaaaaagaguauauugaucggcagggcaagacaccgcuggggcucgucgaccuguuuguuuucagcaccuccuuuuaccugaucucuauuuuccuucaccucgugaaaauccccacccaucgccacauuacaggaaagccuugccccaaaccucauagacugaaucacaugggcaucuguagcugcggccuguauaagcaccccggggugccggucaaguggaaacggugaggacuaguaauaaggaaacuguaugaaugucugugggcaggaagugaagagauccuucuguaaagguuuuuggaauuaugucugcugaauaauaaacuuuuuugaaauaauaaaucugguagaaaaaugagaucucaaaggcucuuuucagagccaccaaaaaaaaaaaaaaaaaaaaaaaaaaaaaaaaaaaaaaaaaaaaaaaaaaaaaaaaaaaaaaaaagaauu

SEQ ID NO: 30768 - RNA, 1778 nt, Artificial Sequence
  mRNA product Design b-4 (hSL-A64-N5) comprising derived and/or modified sequence from LASV(Lassa virus/H.sapiens-wt/NGA/2016/ISTH_0009;Clade II)__AVO03571__GPCmut6 (opt5)
aggagagucccgcagucggcguccagcggcucugcuuguucgugugugugucguugcaggccuuauucaagcuuaccaugggccagaucauuaccuucuuucaagaggugccccacgucaucgaagagguuaugaacauugugcugaucgcccucagccugcuugcuauucugaaggggaucuacaauguggccacaugcggacuccugggccuugucuccuuccugcuccugugugggagaucuugcagcacgaccuauaaaggaguguacgaacugcagacacucgagcuggacauggcgucccuuaacauguguaugccucugucuugcaccaagaauaacagccaucacuauaucaugguuggcaaugaaacagggcucgagcugacccuuacaaacaccuccauuaucaaucauaaauuuuguaaccugucugaugcucacaagaaaaaucucuacgaccaugcccugaugagcauuaucuccacguuccaccugagcauuccgaacuuuaaucaguaugaggccaugucuugcgauuucaacggaggccggaucuccgugcaguacaaucucagccacucuuaugcugucgacgccgcuaaccauuguggcaccauugccaauggggugcugcaaacauuuaugcgcauggcguggggaggcuccuacaucgcccuugauagcgggaagggaucuugggacugcaucaugaccuccuaccaguaucugauuauccagaacacaaccugggaagaucacugucaguucagcagacccuccccuauuggcuaccucgggcugcuuucucaacggacgcgcgacaucuauauuagcagacggcugcucggaacauuuaccuggacacuguccgauagcgagggcaacgaaacccccggcggguacugccugacccgcuggaugcucaucgaggcugagcugaaguguuucggaaauacagccguugcuaaaugcaacgaaaagcaugacgaggaauuuugcgauaugcuuagacuguucgacuuuuguaaacaggccauccggcgccucaagacgccugcgcagaugucuauucagcugaucaauaaagccgugaacgcucuuauuaaugaucaacugaucaugaagaaccaccucagagacauuaugggcauccccuauugcaauuacuccaaguauugguaccugaaccacaccgucacagggaaaaccagccugccucgguguuggcucgugucuaauggaagcuaccugaacgagacacauuucuccgacgauaucgaacagcaggccgacaauaugauuaccgagcuucugcaaaaggaguauaucgaucgccagggcaaaacgccgcucgggcugguggaccuguucgucuuuucuaccagcuucuaccuuauuuccaucuuucuccaccugguuaagauucccacacauagacacaucaccggaaaaccuugccccaagccucaucggcugaaccacaugggcauuuguagcugcggccucuauaaucaccccggggugccggugaaauggaagcgcugaggacuaguaauaaggaaacuguaugaaugucugugggcaggaagugaagagauccuucuguaaagguuuuuggaauuaugucugcugaauaauaaacuuuuuugaaauaauaaaucugguagaaaaaugagaucucaaaggcucuuuucagagccaccaaaaaaaaaaaaaaaaaaaaaaaaaaaaaaaaaaaaaaaaaaaaaaaaaaaaaaaaaaaaaaaaagaauu

SEQ ID NO: 30769 - RNA, 1778 nt, Artificial Sequence
  mRNA product Design b-4 (hSL-A64-N5) comprising derived and/or modified sequence from LASV(Lassa virus/H.sapiens-wt/NGA/2016/ISTH_0017;Clade II)__AVO03567__GPCmut6 (opt5)
aggagagucccgcagucggcguccagcggcucugcuuguucgugugugugucguugcaggccuuauucaagcuuaccaugggccagaucauuaccuucuuucaagaggugccccacgucaucgaagagguuaugaacauugugcugaucgcccucagccugcuugcuauucugaaggggaucuacaauguggccacaugcggacucuucggccuggucuccuuucuucugcucugugggagaucuugcagcacgaccuauaaaggaguguacgaacugcagacacuggagcucgacauggcgucccugaacauguguaugccucuuucuugcaccaagaauaacagccaucacuauaucaugguuggcaaugaaacagggcuggagcucacccugacaaacaccuccauuaucaaucauaaauucuguaaccuuucugaugcucacaagaaaaaucuguacgaccaugcccucaugagcauuaucuccacguuucaccugagcauuccgaacuucaaucaguaugaggccaugucuugcgauuuuaacggaggcaagaucuccgugcaguacaaucugagccacaccuaugcuauugacgccgcuaaccauuguggcacaaucgccaaugggguccuccaaaccuucaugcggauggcguggggaggcucuuacaucgcccuggauuccgggaagggaagcugggacugcauuaugacaucuuaccaguaucuuaucauucagaacaccacgugggaagaucacugucaguuuucccgccccagcccuaucggcuaccuggggcuccugucccaaagaacacgggacauuuauaucucucgcagacuucugggaaccuucacauggacccucagcgauuccgagggcaacgaaacccccggcggguacugccugacacgguggaugcugaucgaggcugagcucaaauguuuuggaaauacggccguggcuaagugcaacgaaaaacaugacgaggaguucugcgauaugcugcgccuuuuugacuucuguaagcaggccauuagacggcugaaaaccccugcgcagaugagcauccagcucauuaauaaggccguuaacgcucugaucaaugaucaacuuauuaugaagaaccaucugcgcgacaucaugggcauccccuauugcaauuacucuaaauauugguaccucaaccacacagugaccgggaagacaucccugccuagauguuggcuggucagcaauggaucuuaccucaacgaaacccacuucagcgacgauauugaacagcaggccgacaauaugaucacggagcugcuucaaaaagaguauauggaucggcagggcaagacaccgcuggggcucguggaccuguuuguguucuccaccucuuuuuaccugauuagcaucuuccuucaccucguccgcauucccacccauagacacguuaucggaaaaccuugccccaagccucaucggcugaaccacaugggcauuuguuccugcggccuguauaaacaccccggggugccggugaaguggaagcgcugaggacuaguaauaaggaaacuguaugaaugucugugggcaggaagugaagagauccuucuguaaagguuuuuggaauuaugucugcugaauaauaaacuuuuuugaaauaauaaaucugguagaaaaaugagaucucaaaggcucuuuucagagccaccaaaaaaaaaaaaaaaaaaaaaaaaaaaaaaaaaaaaaaaaaaaaaaaaaaaaaaaaaaaaaaaaagaauu

SEQ ID NO: 30770 - RNA, 1778 nt, Artificial Sequence
  mRNA product Design b-4 (hSL-A64-N5) comprising derived and/or modified sequence from LASV(Lassa virus/H.sapiens-wt/NGA/2018/ISTH_0959;Clade II)__AVV65099__GPCmut6 (opt5)
aggagagucccgcagucggcguccagcggcucugcuuguucgugugugugucguugcaggccuuauucaagcuuaccaugggccagaucauuaccuucuuucaagaggugccccacgucaucgaagagguuaugaacauugugcugaucgcccucagccugcuugcuauucugaaggggaucuacaauguggucacaugcggacucuucggccugguguccuuucuucugcucugugggagaucuugcagcacgaccuauaaaggaguuuacgaacugcagacacuggagcucgacauggccucccugaacauguguaugccucuuucuugcaccaagaauaacagccaucacuauaucauggugggcaaugaaacagggcuggagcucacccugacaaacaccuccauuaucaaucauaaauucuguaaccuuucugaugcgcacaagaaaaaucuguacgaccaugcucucaugagcauuaucuccacguuucaccugagcauuccgaacuucaaucaguaugaggccaugucuugcgauuuuaacggaggcaagaucuccguccaguacaaucugagccacgccuaugcuauugacgccgcuaaccauuguggcaccaucgccaauggggugcuccaaacauucaugcggauggcguggggaggcucuuacaucgcccuggauuccgggaagggaagcugggacugcauuaugaccucuuaccaguaucuuaucauucagaacacaaccugggaagaucacugucaguuuucccgccccagcccuaucggcuaccuggggcuccugucccaaagaacgcgggacauuuauaucucucgcagacuucugggaacauucaccuggacacucagcgauuccgagggcaacgaaacccccggcggguacugccugacccgguggaugcugaucgaggcugagcucaaauguuuuggaaauacagccguugcuaagugcaacgaaaaacaugacgaggaguucugcgauaugcugcgccuuuuugacuucuguaagcaggccauuagacggcugaaaacgccugcgcagaugagcauccagcucauuaauaaggccgugaacgcucugaucaaugaucaacuuauuaugaagaaccaucugcgcgacaucaugggcauccccuauugcaauuacucuaaauauugguaccucaaccacaccgucacagggaagaccucccugccuagauguuggcuggugagcaauggaucuuaccucaacgaaacacacuucagcgacgauauugaacagcaggccgacaauaugaucaccgagcugcuucaaaaagaguauauugaucggcagggcaagacgccgcuggggcucguggaccuguuugucuucuccacaucuuuuuaccugaucagcauuuuccuucaccucguuaaaauccccacccaucgccacgugauuggaaagccuugccccaaaccucauagacugaaccacaugggcaucuguuccugcggccuguauaagcaccccggggugccggucaaguggaaacggugaggacuaguaauaaggaaacuguaugaaugucugugggcaggaagugaagagauccuucuguaaagguuuuuggaauuaugucugcugaauaauaaacuuuuuugaaauaauaaaucugguagaaaaaugagaucucaaaggcucuuuucagagccaccaaaaaaaaaaaaaaaaaaaaaaaaaaaaaaaaaaaaaaaaaaaaaaaaaaaaaaaaaaaaaaaaagaauu

SEQ ID NO: 30771 - RNA, 1778 nt, Artificial Sequence
  mRNA product Design b-4 (hSL-A64-N5) comprising derived and/or modified sequence from LASV(LASV003-NIG-2008;Clade II)__AIT17580__GPCmut6 (opt5)
aggagagucccgcagucggcguccagcggcucugcuuguucgugugugugucguugcaggccuuauucaagcuuaccaugggccagaucauuaccuucuuucaagaggugccccacgucaucgaagagguuaugaacauugugcugaucgcccucagccugcuugcuauucugaaggggaucuacaauguggccacaugcggacucuucggccuggucuccuuucuucugcucugugggagaucuugcagcacgaccuauaaaggaguguacgaacugcagacacuggagcucgacauggcgucccugaacauguguaugccucuuucuugcaccaagaauaacagccaucacuauaucaugguuggcaaugaaacagggcuggagcucacccugacaaacaccuccauuaucaaucauaaauucuguaaccuuucugaugcucacaagaaaaaucuguacgaccaugcccucaugagcauuaucuccacguuucaccugagcauuccgaacuucaaucaguaugaggccaugucuugcgauuuuaacggaggcaagaucuccgugcaguacaaucugagccacaccuaugcugucgacgccgcuaaccauuguggcacaauugccaauggggugcuccaaaccuucaugcggauggcguggggaggcucuuacaucgcccuggauuccgggaagggaagcugggacugcaucaugacaucuuaccaguaucuuauuauccagaacaccacgugggaagaucacugucaguuuucccgccccagcccuauuggcuaccuggggcuccugucccaaagaacacgggacaucuauauuucucgcagacuucugggaaccuucacauggacccucagcgauuccgagagcaacgaaacccccggcggcuacugccugacacgguggaugcugaucgaggcugagcucaaauguuuugggaauacggccguugcuaagugcaacgaaaaacaugacgaggaguucugcgauaugcugcgccuuuuugacuucuguaagcaggccaucagacggcugaaagcgccugcccagaugucuauucagcucaucaauaaggcugugaacgcccugauuaaugaucaacuuaucaugaagaaccaucugcgcgacauuaugggaauccccuauugcaauuacuccaaauauugguaccucaaccacaccgucacaggcagaaccagccugccucgguguuggcuggugucuaaugggagcuaccucaacgaaacacacuucuccgacgauaucgaacagcaggcugacaauaugauuaccgagcugcuucaaaaggaguauauggaucgccagggaaaaacgccgcugggccucguggaccuguuugucuucucuaccagcuuuuaccugaucuccauuuuccuucaccucguuaagauccccacacauagacacgugauugggaaaccuugccccaagccucaucggcugaaccacaugggaaucuguagcugcggccuguauaaacaccccggcgugccggucaaguggaagcgcugaggacuaguaauaaggaaacuguaugaaugucugugggcaggaagugaagagauccuucuguaaagguuuuuggaauuaugucugcugaauaauaaacuuuuuugaaauaauaaaucugguagaaaaaugagaucucaaaggcucuuuucagagccaccaaaaaaaaaaaaaaaaaaaaaaaaaaaaaaaaaaaaaaaaaaaaaaaaaaaaaaaaaaaaaaaaagaauu

SEQ ID NO: 30772 - RNA, 1778 nt, Artificial Sequence
  mRNA product Design b-4 (hSL-A64-N5) comprising derived and/or modified sequence from LASV(LASV035-NIG-2009;Clade II)__AIT17588__GPCmut6 (opt5)
aggagagucccgcagucggcguccagcggcucugcuuguucgugugugugucguugcaggccuuauucaagcuuaccaugggccagaucauuaccuucuuucaagaggugccccacgucaucgaagagguuaugaacauugugcugaucgcccucagccugcuugcuauucugaaggggaucuacaauguggccacaugcggacucuucggccuggucuccuuucuucugcucugugggagaucuugcagcacgaccuauaaaggaguguacgaacugcagacacuggagcucgacauggcgucccugaacauguguaugccucuuucuugcaccaagaauaacagccaucacuauaucaugguuggcaaugaaacagggcuggagcucacccugacaaacaccuccauuaucaaucauaaauucuguaaccuuucugaugcucacaagaaaaaucuguacgaccaugcccucaugagcauuaucuccacguuucaccugagcauuccgaacuucaaucaguaugaggccaugucuugcgauuuuaacggaggcaagaucuccgugcaguacaaucugagccacgcuuaugccgucgacgcugccaaccauuguggcaccauugcgaauggggugcuccaaacauucaugcggauggccuggggaggcucuuacaucgcucuggauuccgggaagggaagcugggacugcaucaugaccucuuaccaguaucuuauuauccagaacacaaccugggaagaucacugucaguuuucccgccccagcccuauuggcuaccuggggcuccugucccaaagaacgcgggacaucuauauuucucgcagacuucugggaacauucaccuggacacucagcgauuccgagggcaacgaaacccccggcggguacugccugacccgguggaugcugaucgaggccgagcucaaauguuuuggaaauacagcuguugccaagugcaacgaaaaacaugacgaggaguucugcgauaugcugcgccuuuuugacuucuguaagcaggcgaucagacggcugaaagccccugcucagaugagcauucagcucaucaauaaggccgugaacgcucugauuaaugaucaacuuaucaugaagaaccaucugcgcgacauuaugggcauccccuauugcaauuacucuaaauauugguaccucaaccacacggucaccgggaagacaucccugccuagauguuggcuggugagcaauggaucuuaccucaacgaaacccacuucagcgacgauaucgaacagcaggccgacaauaugauuacagagcugcuucaaaaagaguauaucgaucggcagggcaagaccccgcuggggcucguggaccuguuugucuucuccacgucuuuuuaccugauuagcaucuuccuucaccucguuaaaauucccacacaucgccacgugaucggaaagccuugccccaaaccucauagacugaaccacaugggcauuuguuccugcggccuguauaagcaccccggggugccggucaaguggaaacggugaggacuaguaauaaggaaacuguaugaaugucugugggcaggaagugaagagauccuucuguaaagguuuuuggaauuaugucugcugaauaauaaacuuuuuugaaauaauaaaucugguagaaaaaugagaucucaaaggcucuuuucagagccaccaaaaaaaaaaaaaaaaaaaaaaaaaaaaaaaaaaaaaaaaaaaaaaaaaaaaaaaaaaaaaaaaagaauu

SEQ ID NO: 30773 - RNA, 1778 nt, Artificial Sequence
  mRNA product Design b-4 (hSL-A64-N5) comprising derived and/or modified sequence from LASV(LASV1000-NIG-2009;Clade II)__AIT17782__GPCmut6 (opt5)
aggagagucccgcagucggcguccagcggcucugcuuguucgugugugugucguugcaggccuuauucaagcuuaccaugggccagaucauuaccuucuuucaagaggugccccacgucaucgaagagguuaugaacauugugcugaucgcccucagccugcuugcuauucugaaggggaucuacaauguggccacaugcggacucuucggccuggucuccuuucuucugcucugugggagaucuugcagcacgaccuauaaaggaguguacgaacugcagacacuggagcucgacauggcgucccugaacauguguaugccucuuucuugcaccaagaauaacagccaucacuauaucaugguuggcaaugaaacagggcuggagcucacccugacaaacaccuccauuaucaaucauaaauucuguaaccuuucugaugcucacaagaaaaaucuguacgaccaugcccucaugagcauuaucuccacguuucaccugagcauuccgaacuucaaucaguaugaggccaugucuugcgauuuuaacggaggcaagaucuccgugcaguacaaucugagccacaccuaugcugucgacgccgcuaaccauuguggcacaauugccaauggggugcuccaaaccuucaugcggauggcguggggaggcucuuacaucgcccuggauuccgggaagggaagcugggacugcaucaugacaucuuaccaguaucuuauuauccagaacaccacgugggaagaucacugucaguuuucccgccccagcccuauuggcuaccuggggcuccugucccaaagaacacgggacaucuauauuucucgcagacuucugggaaccuucacauggacccucagcgauuccgagggcaacgaaacccccggcggguacugccugacacgguggaugcugaucgaggcugagcucaaauguuuuggaaauacggccguugcuaagugcaacgaaaaacaugacgaggaguucugcgauaugcugcgccuuuuugacuucuguaagcaggccaucaaaagacugaagaccccugcgcagaugagcauucagcucaucaauaaggccgugaacgcucugauuaaugaucaacuuaucaugaaaaaccaucugcgggacauuaugggcauccccuauugcaauuacucuaaguauugguaccucaaccacacagucaccgggaaaacaucccugccucgcuguuggcuggugagcaauggaucuuaccucaacgaaacccacuucagcgacgauaucgaacagcaggccgacaauaugauuacggagcugcuucaaaaggaguauaucgauagacagggcaaaacaccgcuggggcucguggaccuguuugucuucuccaccucuuuuuaccugauuagcaucuuccuucaccucguuaagauucccacccaucggcacguggugggaaaaccuugccccaagccucaucgccugaaccacaugggcaucuguuccugcggccuguauaagcaccccggggucccggugaaauggaagagaugaggacuaguaauaaggaaacuguaugaaugucugugggcaggaagugaagagauccuucuguaaagguuuuuggaauuaugucugcugaauaauaaacuuuuuugaaauaauaaaucugguagaaaaaugagaucucaaaggcucuuuucagagccaccaaaaaaaaaaaaaaaaaaaaaaaaaaaaaaaaaaaaaaaaaaaaaaaaaaaaaaaaaaaaaaaaagaauu

SEQ ID NO: 30774 - RNA, 1778 nt, Artificial Sequence
  mRNA product Design b-4 (hSL-A64-N5) comprising derived and/or modified sequence from LASV(LASV221-NIG-2010;Clade II)__AIT17624__GPCmut6 (opt5)
aggagagucccgcagucggcguccagcggcucugcuuguucgugugugugucguugcaggccuuauucaagcuuaccaugggccagaucauuaccuucuuucaagaggugccccacgucaucgaagagguuaugaacauugugcugaucgcccucagccugcuugcuauucugaaggggaucuacaauguggccacaugcggacucuucggccuggucuccuuucuucugcucugugggagaucuugcagcacgaccuauaaaggaguguacgaacugcagacacuggagcucgacauggcgucccugaacauguguaugccucuuucuugcaccaagaauaacagccaucacuauaucaugguuggcaaugaaacagggcuggagcucacccugacaaacaccuccauuaucaaucauaaauucuguaaccuuucugaugcucacaagaaaaaucuguacgaccaugcccucaugagcauuaucuccacguuucaccugagcauuccgaacuucaaucaguaugaggccaugucuugcgauuuuaacggaggcaagaucuccgugcaguacaaucugagccacaccuaugcuauugacgccgcuaaccauuguggcacaaucgccaaugggguccuccaaaccuucaugcggauggcguggggaggcucuuacaucgcccuggauuccgggaagggaagcugggacugcauuaugacaucuuaccaguaucuuaucauucagaacaccacgugggaagaucacugucaguuuucccgccccagcccuaucggcuaccuggggcuccugucccaaagaacacgggacauuuauaucucucgcagacuucugggaaccuucacauggacccucagcgauuccgagggcaacgaaacccccggcggguacugccugacacgguggaugcugaucgaggcugagcucaaauguuuuggaaauacggccguggcuaagugcaacgaaaaacaugacgaggaguucugcgauaugcugcgccuuuuugacuucuguaagcaggccauuagacggcugaaaaccccugcgcagaugagcauccagcucauuaauaaggccguuaacgcucugaucaaugaucaacuuauuaugaagaaccaucugcgcgacaucaugggcauccccuauugcaauuacucuaaauauugguaccucaaccacacagugaccgggaagacaucccugccuagauguuggcuggucagcaauggaucuuaccucaacgaaacccacuucagcgacgauauugaacagcaggccgacaauaugaucacggagaugcugcaaaaagaguauauggaucggcagggcaagacaccgcuugggcugguggaccucuuuguguucuccaccucuuuuuaccugauuagcaucuuccugcaccuugucaaaauucccacccaucgccacguuaucggaaagccuugccccaaaccucauagacucaaccacaugggcauuuguuccugcggccuguauaagcaccccggggugccggugaaguggaaacggugaggacuaguaauaaggaaacuguaugaaugucugugggcaggaagugaagagauccuucuguaaagguuuuuggaauuaugucugcugaauaauaaacuuuuuugaaauaauaaaucugguagaaaaaugagaucucaaaggcucuuuucagagccaccaaaaaaaaaaaaaaaaaaaaaaaaaaaaaaaaaaaaaaaaaaaaaaaaaaaaaaaaaaaaaaaaagaauu

SEQ ID NO: 30775 - RNA, 1778 nt, Artificial Sequence
  mRNA product Design b-4 (hSL-A64-N5) comprising derived and/or modified sequence from LASV(LASV237-NIG-2010;Clade II)__AIT17638__GPCmut6 (opt5)
aggagagucccgcagucggcguccagcggcucugcuuguucgugugugugucguugcaggccuuauucaagcuuaccaugggccagaucauuaccuucuuucaagaggugccccacgucaucgaagagguuaugaacauugugcugaucgcccucagccugcuugcuauucugaaggggaucuacaauguggccacaugcggacucuucggccuggucuccuuucuucugcucugugggagaucuugcagcacgaccuauaaaggaguguacgaacugcagacacuggagcucgacauggcgucccugaacauguguaugccucuuucuugcaccaagaauaacagccaucacuauaucaugguuggcaaugaaacagggcuggagcucacccugacaaacaccuccauuaucaaucauaaauucuguaaccuuucugaugcucacaagaaagaccuguacgaucaugcccucaugagcauuaucuccacguuucaccugagcauuccgaauuucaaccaguaugaggccaugucuugcgacuuuaauggaggcaagaucuccgugcaguacaaccugagccacaccuaugcugucgaugccgcuaaucauuguggcacaauugccaacggggugcuccaaaccuucaugcggauggcguggggaggcucuuacaucgcccuggacuccgggaagggaagcugggauugcaucaugacaucuuaccaguaucuuauuauccagaauaccacgugggaagaccacugucaguuuucccgccccagcccuauuggcuaccuggggcuccugucccaaagaacacgggauaucuauauuucucgcagacuucugggaaccuucacauggacccucagcgacuccgagggcaacgaaacccccggcggguacugccugacacgguggaugcugaucgaggcugagcucaaauguuuuggaaacacggccguugcuaagugcaaugaaaaacaugaugaggaguucugcgacaugcugcgccuuuuugauuucuguaagcaggccaucagacggcugaaaaccccugcgcagaugagcauucagcucaucaacaaggccgugaaugcucugauuaacgaccaacuuaucaugaagaaucaucugcgcgacauuaugggcauccccuauugcaacuacucuaaauauugguaccucaaucacacagucaccgggaagacaucccugccuagauguuggcuggugagcaacggaucuuaccucaaugaaacccacuucagcgaugacaucgaacagcaggccgauaacaugauuacggagcugcuucaaaaagaguauauggaccggcagggcaagacaccgcuggggcucguggaucuguuugucuucuccaccucuuuuuaccugaucagcauuuuccuucaccucaucaaaauucccacccaucgccacaucacaggaaagccuugccccaaaccucauagacugaaucacaugggcauuuguuccugcggccuguauaagcaccccgggguuccggugaaguggaaacggugaggacuaguaauaaggaaacuguaugaaugucugugggcaggaagugaagagauccuucuguaaagguuuuuggaauuaugucugcugaauaauaaacuuuuuugaaauaauaaaucugguagaaaaaugagaucucaaaggcucuuuucagagccaccaaaaaaaaaaaaaaaaaaaaaaaaaaaaaaaaaaaaaaaaaaaaaaaaaaaaaaaaaaaaaaaaagaauu

SEQ ID NO: 30776 - RNA, 1778 nt, Artificial Sequence
  mRNA product Design b-4 (hSL-A64-N5) comprising derived and/or modified sequence from LASV(LASV253-NIG-2011;Clade II)__AIT17670__GPCmut6 (opt5)
aggagagucccgcagucggcguccagcggcucugcuuguucgugugugugucguugcaggccuuauucaagcuuaccaugggccagaucauuaccuucuuucaagaggugccccacgucaucgaagagguuaugaacauugugcugaucgcccucagccugcuugcuauucugaaggggaucuacaauguggccacaugcggacucuucggccuggucuccuuucuucugcucugugggagaucuugcagcacgaccuauaaaggaguguacgaacugcagacacuggagcucgacauggcgucccugaacauguguaugccucuuucuugcaccaagaauaacagccaucacuauaucaugguuggcaaugaaacagggcuggagcucacccugacaaacaccuccauuaucaaucauaaauucuguaaccuuucugaugcucacaagaaaaaucuguacgaccaugcccucaugagcauuaucuccacguuucaccugagcauuccgaacuucaaucaguaugaggccaugucuugcgauuuuaacggaggcaagaucuccgugcaguacaaucugagccacaccuaugcugucgacgccgcuaaccauuguggcacaauugccaauggggugcuccaaaccuucaugcggauggcguggggaggcucuuacaucgcccuggauuccgggaagggaagcugggacugcaucaugacaucuuaccaguaucuuauuauccagaacaccacgugggaagaucacugucaguuuucccgccccagcccuauuggcuaccuggggcuccugucccaaagaacacgggacaucuauauuucucgcagacuucugggaaccuucacauggacccucagcgauuccgagggcaacgaaacccccggcggguacugccugacacgguggaugcugaucgaggcugagcucaaauguuuuggaaauacggccguugcuaagugcaacgaaaaacaugacgaggaguucugcgauaugcugcgccuuuuugacuucuguaagcaggccaucagacggcugaaagcgccugcccagaugagcauucagcucaucaauaaggcugugaacgcccugauuaaugaucaacuuaucaugaagaaccaucugcgcgacauuaugggcauccccuauugcaauuacucuaaauauugguaccucaaccacaccgucacagggagaaccucccugccucgguguuggcuggugagcaauggaucuuaccucaacgaaacacacuucagcgacgauaucgaacagcaggcugacaauaugauuaccgagcugcuucaaaaggaguauaucgaucgccagggcaaaacgccgcuggggcucguggaccuguuugucuucuccacaucuuuuuaccugauuagcaucuuccuucaccucguuaagauucccacccauagacacaucauuggaaaaccuugccccaagccucaucggcugaaccacaugggcaucuguuccugcggccuguauaaacaccccggggugccggugaaguggaagcgcugaggacuaguaauaaggaaacuguaugaaugucugugggcaggaagugaagagauccuucuguaaagguuuuuggaauuaugucugcugaauaauaaacuuuuuugaaauaauaaaucugguagaaaaaugagaucucaaaggcucuuuucagagccaccaaaaaaaaaaaaaaaaaaaaaaaaaaaaaaaaaaaaaaaaaaaaaaaaaaaaaaaaaaaaaaaaagaauu

SEQ ID NO: 30777 - RNA, 1778 nt, Artificial Sequence
  mRNA product Design b-4 (hSL-A64-N5) comprising derived and/or modified sequence from LASV(LASV254-NIG-2011;Clade II)__AIT17674__GPCmut6 (opt5)
aggagagucccgcagucggcguccagcggcucugcuuguucgugugugugucguugcaggccuuauucaagcuuaccaugggccagaucauuaccuucuuucaagaggugccccacgucaucgaagagguuaugaacauugugcugaucgcccucagccugcuugcuauucugaaggggaucuacaauguggccacaugcggacucuucggccuggucuccuuucuucugcucugugggagaucuugcagcacgaccuauaaaggaguguacgaacugcagacacuggagcucgacaugaccaaccugaauauguguaugccucuuuccugcacaaagaacaauucucaucacuauaucaugguuggcaacgaaaccgggcuggagcucacacugaccaauacgagcauuaucaaccauaaauucuguaaucuuuccgaugcgcacaagaaaaaccuguacaaucaugcucucaugucuauuaucagcaccuuucaccuguccauuccgaacuucaaucaguaugaggccaugagcugcgacuuuaacggaggcaagaucucugugcaguacaaucugucccacagcuaugccgucgaugcugccaaccauuguggcacaauugcuaacggggugcuccaaaccuucaugcggauggccuggggaggcucuuacaucgcgcuggacuccgggaagggaaauugggauugcaucaugacaagcuaccaguaucuuauuauccagaacaccacgugggaagaccacugucaguuuucucgccccuccccuauuggcuaccuggggcuccugagccaaagaacacgggauaucuauauuucccgcagacuucugggaaccuucacauggacccucucugacagcgagggcaaugaaacccccggcggguacugccugacacgguggaugcugaucgaggccgagcucaaauguuuuggaaacacggcuguugccaagugcaaugaaaaacaugaugaggaguucugcgacaugcugcgccuuuuugauuucuguaagcaggcuaucagacggcugaaaaccccugcccaggcgaacauucagcucaucaauaaggccgugaacgcucugauuaaugaccaacuuaucaugaagaaccaucugcgcgauauuaugggcauccccuauugcaauuacuccaaauauugguaccucaaccacacagucaccgggaagacaagccugccuagauguuggcuggugucuaauggauccuaccucaacgaaacccacuucagcgacgacaucgaacagcaggccgauaauaugauuacggagcugcuucaaaaagaguauauggaccggcagggcaagacaccgcuggggcucguggaucuguuugucuucucuaccagcuuuuaccugaucuccauuuuccuucaccucguuaaaauccccacccaucgccacgugauuggaaagccuugccccaaaccucauagacugaaccacaugggcaucuguucuugcggccuguauaagcaccccggggugccggucaaguggaaacggugaggacuaguaauaaggaaacuguaugaaugucugugggcaggaagugaagagauccuucuguaaagguuuuuggaauuaugucugcugaauaauaaacuuuuuugaaauaauaaaucugguagaaaaaugagaucucaaaggcucuuuucagagccaccaaaaaaaaaaaaaaaaaaaaaaaaaaaaaaaaaaaaaaaaaaaaaaaaaaaaaaaaaaaaaaaaagaauu

SEQ ID NO: 30778 - RNA, 1778 nt, Artificial Sequence
  mRNA product Design b-4 (hSL-A64-N5) comprising derived and/or modified sequence from LASV(Nig08-A19;Clade III)__ADU56618__GPCmut6 (opt5)
aggagagucccgcagucggcguccagcggcucugcuuguucgugugugugucguugcaggccuuauucaagcuuaccaugggccagaucgugaccuucuuucaagaggucccccacguuauugaagaggugaugaacaucgugcugauugcccucagcauccuggcuauucuuaaggggcuguacaauaucgccacaugcggacucaucggccuggucacguuccuucugcucuccgggagaucuuguagcaugaccuauaaaggaguguacgaacugcagacacuggagcucaacaugaauacccugaacaugugcaugccucuuuccuguacaaagaauaacucucaucacuauauuaugguuggcaaugaaaccgggcuggagcucacacugaccaacacgagccuucugcaucacaaauuuugcaaucucuccgacgcgcauaagaaaaaccuguacgaucacacccugaugucuaucauuagcacauuccaccucuccaucccgaauuuuaaccaguaugaggcuaugagcugugacuucaauggaggcaagauuaccgugcaguacaaccugucucauuccuaugccaucgaugccgcuaaucacugcggcacagucgccaacggggugcuucaaaccuuuaugcggauggcuuggggaggcagcuacauugcccuggacucugggcgcggaaagugggauuguaucaugacguccuaccaguaucucaucauucagaacacaaccugggaagaccauugccaguucagcagacccucuccuaucggcuaccuggggcuucugucccaacggacacgcgauauuuauaucagcagacggcuccugggaaccuuuaccuggacacuguccgacucugagggcaaugaaacgcccggcggguacugucucacccgcuggaugcugauugaggcggagcuuaaaugcuucggaaacacagccguugcuaaguguaaugaaaaacacgaugaggaauuuugcgacaugcugagacucuucgauuuuugcaagcaggccauccggcgccugaaagcuccugcccagaugagcauccagcuuauuaacaaggcggugaaugcccugaucaacgaccaacucauuaugaagaaucaccugagagauaucaugggcauucccuauuguaacuacuccaaauauugguaccugaaucauaccagcacagggcggaccucucucccucgcugcuggcuggucuccaacggaagcuaccuuaaugagacgcacuucucugacgacaucgaacagcaggcugauaacaugaucacagagaugcugcaaaaggaguaucucgacagacagggcaaaaccccgcuggggcugguggaucuuuucguguuuagcaccuccuucuaccucauuucuaucuuucugcaucuggucaagauucccacacaccggcauaucguuggaaaaccuugucccaagccucaccgccucaaucacaugggcauuugcagcuguggccuguauaaacagcccggggugccggugagauggaagcggugaggacuaguaauaaggaaacuguaugaaugucugugggcaggaagugaagagauccuucuguaaagguuuuuggaauuaugucugcugaauaauaaacuuuuuugaaauaauaaaucugguagaaaaaugagaucucaaaggcucuuuucagagccaccaaaaaaaaaaaaaaaaaaaaaaaaaaaaaaaaaaaaaaaaaaaaaaaaaaaaaaaaaaaaaaaaagaauu

SEQ ID NO: 30779 - RNA, 1781 nt, Artificial Sequence
  mRNA product Design b-4 (hSL-A64-N5) comprising derived and/or modified sequence from LASV(G1180-SLE-2010;Clade IV)__AIT17168__GPCmut6 (opt5)
aggagagucccgcagucggcguccagcggcucugcuuguucgugugugugucguugcaggccuuauucaagcuuaccaugggccagaucgugaccuucuuucaagaggucccccacguuauugaagaggugaugaacaucgugcugauugcccucagcauccuggcuguccuuaaggggcuguacaauuucgccacaugcggacucgugggccugcuuacguuucugcuccugugugggagauccugcaccgcgucucgguauaaaggaguuuacgaacugcagacacucgagcugaacauggaaacccuuaauauguguaugccucugagcugcacaaagaacaauucccaucacuauauuauggugggcaacgagaccgggcucgagcugacacuuaccaauacgucuaucaucaaccauaaauucuguaaucugagcgacgcucacaagaaaaaccucuacgaucaugcccugauguccauuaucucuaccuuucaccugagcauuccgaauuucaaccaguaugaagccauguccugcgacuuuaauggaggcaagaucagcguccaguacaaccucucucacuccuaugcuggcgaugccgcuaaucauugugggacaguggccaacggaguucugcaaaccuucaugcgcauggcguggggcgggagcuacauugcccuugacucuggacacggcuccugggauugcaucaugacaagcuaccaguaucugauuauccagaacaccacgugggaggaccauugucaguuuucuagacccuccccuaucggguaccucggacugcuuagccaacggacacgcgauauuuauaucuccagacggcugcucggcaccuucacauggacccugucugacagcgaaggcaaggauacccccgggggauacugccugacacgcuggaugcucauugaggcugagcugaaauguuuuggcaauacggccguggcuaagugcaacgaaaaacacgacgaggaguucugcgauaugcuuagacuguuugacuucuguaagcaggccauccagcggcucaaagcgccugcccagauguccauucaacugaucaauaaggcugucaacgcccuuaucaaugaucagcugauuaugaagaaccaccuccgcgacaucauggggauucccuauugcaauuacagcaaauauugguaccugaaccauaccacaaccggaaagacaucucugccuaaauguuggcucguguccaauggcagcuaccugaacgaaacccacuucucugacgauaucgaacagcaagcugacaauaugauuacggagaugcuucagaaggaguauauggaaagacaggggaaaacaccgcugggacucguggaucuguuugucuucagcaccuccuuuuaccugaucucuaucuuccuucaucucguuaagauucccacccaccggcauaucgugggcaaaagcugcccuaagccccaccgccugaaccacaugggcauuuguuccugcgggcuguauaagcagccuggagugcccgucaaauggaagagaugaggacuaguaauaaggaaacuguaugaaugucugugggcaggaagugaagagauccuucuguaaagguuuuuggaauuaugucugcugaauaauaaacuuuuuugaaauaauaaaucugguagaaaaaugagaucucaaaggcucuuuucagagccaccaaaaaaaaaaaaaaaaaaaaaaaaaaaaaaaaaaaaaaaaaaaaaaaaaaaaaaaaaaaaaaaaagaauu

SEQ ID NO: 30780 - RNA, 1781 nt, Artificial Sequence
  mRNA product Design b-4 (hSL-A64-N5) comprising derived and/or modified sequence from LASV(G1442-SLE-2011;Clade IV)__AIT17180__GPCmut6 (opt5)
aggagagucccgcagucggcguccagcggcucugcuuguucgugugugugucguugcaggccuuauucaagcuuaccaugggccagaucgugaccuucuuucaagaggucccccacguuauugaagaggugaugaacaucgugcugauugcccucagcauccuggcuguccuuaaggggcuguacaauguggccacaugcggacucauuggccugguuacguuccuucugcucugugggagauccugcaccacaacccuguauaaaggaguguacgaacugcagacacucgagcugaacauggaaacccuuaauauguguaugccucugucuugcacaaagaacaauagccaucacuauauccgggucggcaacgagaccgggcucgagcugacgcuuaccaauacauccaucauuaaccauaaauuuuguaaucugucugacgcgcacaagaaaaaccucuacgaucaugcucugaugagcaucauuuccaccuuccaccugucuaucccgaauuuuaaccaguaugaagccaugagcugcgacuucaauggaggcaagauuuccgugcaguacaaccucagccacucuuaugccggcgaugcugccaaucauugugggacaguugcuaacggagugcugcaaaccuuuaugcgcauggccuggggcggguccuacaucgcgcuugacagcggaagaggcaacugggauugcauuaugacgucuuaccaguaucugaucauccagaauacaaccugggacgaucacugucaguucucccggcccagcccuauuggguaccucggacugcuuucucaacgcacaagagacgucuauaucucccggcgccugcucggcaccuuuaccuggacacugagcgauuccgagggcaaggacacgcccgggggauacugccugaccagauggaugcucauugaagccgagcugaaauguuucggcaacacagcuguggccaagugcaaugagaaacaugaugaagaguuuugcgacaugcuucggcuguucgauuuuuguaagcaggcuauccagcgccucaaagccccugcgcagaugucuauucaacugaucaacaaggccgugaaugcucuuaucaacgaccagcugauuaugaagaaucaccucagagacaucauggggauucccuauugcaacuacagcaaauauugguaccugaauaacaccgccacaggaaagaccucccugccuaaauguuggcucaucagcaauggcucuuaccugaacgaaacgcacuucuccgaugacauugagcaggaagcugauaauaugaucacagagaugcuucaaaaggaguauauggaacggcaggggaaaaccccgcugggacucgucgaccuguucguuuuuagcaccucuuucuaccugaucagcauuuuucuucaucucgugaagauccccacacaccgccauauugugggcaaauccugcccuaagccccacagacugaaccauaugggcaucuguucuugcgggcuguauaagcagccuggaguccccgugcgguggaaacgcugaggacuaguaauaaggaaacuguaugaaugucugugggcaggaagugaagagauccuucuguaaagguuuuuggaauuaugucugcugaauaauaaacuuuuuugaaauaauaaaucugguagaaaaaugagaucucaaaggcucuuuucagagccaccaaaaaaaaaaaaaaaaaaaaaaaaaaaaaaaaaaaaaaaaaaaaaaaaaaaaaaaaaaaaaaaaagaauu

SEQ ID NO: 30781 - RNA, 1781 nt, Artificial Sequence
  mRNA product Design b-4 (hSL-A64-N5) comprising derived and/or modified sequence from LASV(G3010-SLE-2013;Clade IV)__AIT17344__GPCmut6 (opt5)
aggagagucccgcagucggcguccagcggcucugcuuguucgugugugugucguugcaggccuuauucaagcuuaccaugggccagaucgugaccuucuuucaagaggucccccacguuauugaagaggugaugaacaucgugcugauugcccucagcauccuggcuguccuuaaggggcuguacaauuucgccacaugcggacucgugggccugguuacguuucuucugcucugugggagauccugcaccacaucucuguauaaaggaguguacgaacugcagacccucgagcugaacauggaaacacuuaauauguguaugccucugagcugcaccaagaacaauucccaucacuauauuauggucggcaacgagacagggcucgagcugacccuuacgaauaccucuaucaucaaccauaaauucuguaaucugagcgacgcgcacaagaaaaaccucuacaaucaugcucugauguccauuaucucuacauuucaccugagcauuccgaacuucaaucaguaugaagccauguccugcgauuuuaacggaggcaagaucagcgugcaguacaaucucucucacuccuaugccggcgacgcugccagccauugugggaccguugcuaacggagugcugcaaacauucaugcggauggccuggggcgggucuuacauugcgcuugauuccggauacggcaagugggacugcaucaugaccagcuaucaguaccugauuauccagaacacgacaugggaggaucacugucaguuuucucgccccuccccuaucggguaucucggacugcuuagccaaagaacccgggacauuuacaucucccgcagacugcucggcacauucaccuggacccugucugauagcgaaggcaaagacacacccgggggauauugccugacgcgguggaugcucauugaggccgagcugaaguguuuuggcaauaccgcugucgccaaaugcaacgaaaagcaugaugaggaguucugcgacaugcuucgccuguuugauuucuguaaacaggcuauccagagacucaagaccccugcccagauguccauucaacugaucaauaaggcggugaacgcccuuaucaaugaccagcugauuaugaaaaaccaccuccgggauaucauggggauucccuacugcaauuauagcaaguacugguaccugaaccacacaacaaccggaaaaacgucucugccuaaguguuggcucguguccaauggcagcuaucugaacgaaacacauuucucugacgacaucgaacagcaagcugauaauaugauuaccgagaugcuucagaaagaguacauggaacgccaggggaagaccccgcugggacucgucgaccuguuuguuuucagcacauccuuuuaucugaucucuaucuuccuucaccucgugaaaauucccacccauagacacaucgugggcaagagcugcccuaagccccaucggcugaaccacaugggcauuuguuccugcgggcuguacaaacagccuggaguccccgugcgcuggaagagaugaggacuaguaauaaggaaacuguaugaaugucugugggcaggaagugaagagauccuucuguaaagguuuuuggaauuaugucugcugaauaauaaacuuuuuugaaauaauaaaucugguagaaaaaugagaucucaaaggcucuuuucagagccaccaaaaaaaaaaaaaaaaaaaaaaaaaaaaaaaaaaaaaaaaaaaaaaaaaaaaaaaaaaaaaaaaagaauu

SEQ ID NO: 30782 - RNA, 1781 nt, Artificial Sequence
  mRNA product Design b-4 (hSL-A64-N5) comprising derived and/or modified sequence from LASV(G502-SLE-2009;Clade IV)__AIT17126__GPCmut6 (opt5)
aggagagucccgcagucggcguccagcggcucugcuuguucgugugugugucguugcaggccuuauucaagcuuaccaugggccagaucgugaccuucuuucaagaggucccccacguuauugaagaggugaugaacaucgugcugauugcccucagcauccuggcuguccuuaaggggcuguacaauuucgccacaugcggacucgugggccugcuuacguuucugcuccugugugggagauccugcaccacaggacuguauaaaggcguuuacgaacuccagacccuggagcuuaacauggaaacacugaauauguguaugccucucucuugcaccaagaacaauagccaucacuauauuaugguggggaacgagacaggacuggagcuuacccugacgaauaccuccaucaucaaccauaaauucuguaaucucucugacgcgcacaagaaaaaccuguacgaucaugcucugaugagcauuaucuccacauuucaccucucuauuccgaauuucaaccaguaugaagccaugagcugcgacuuuaauggcggcaagaucuccguccaguacaaccugagccacucuuaugccggggaugcugccgaccauuguggaaccguggcuaauggcguucuucaaacauucaugcggauggccuggggaggguccuacauugcgcuggauagcggccgcgggagaugggacugcaucaugaccucuuaccaguaucucauuauccagaacacgacaugggaggaucacugucaguuuucccggcccagcccuaucggauaccugggccuucugucucaacgcaccagagacauuuauaucucccggcgccuccugggcacauucaccuggacccugagcgauuccgaagggaaggacacacccggaggcuacugccucacgagauggaugcugauugaggccgagcuuaaauguuuugggaacaccgcuguggccaagugcaaugaaaaacaugaugaggaguucugcgacaugcugcggcucuuugauuucuguaagcaggcuauccagcgccugaaagccccugcgcagaugucuauucaacuuaucaacaaggccgucaaugcucugaucaacgaccagcucgugaugaagaaucaccugagagacauuaugggaauccccuauugcaacuacagccgguauugguaccugaaucacacaaccacaggccgcaccucccucccuaaauguuggcuggugagcaacgggucuuaccuuaaugaaacgcauuucuccgaugacauugaacagcaagccgauaacaugaucacagagaugcugcagaaggaguauauggaaagacagggaaaaaccccgcucggccuggucgaccuguuuguuuucagcaccucuuuuuaccuuauuagcaucuuccuccaccuggugaagauccccacacaucggcacauugugggcaaauccugcccuaagccccaucgccugaaucacauggggaucuguucuugcggacucuauaaacagccuggcguccccgugaaguggaagagaugaggacuaguaauaaggaaacuguaugaaugucugugggcaggaagugaagagauccuucuguaaagguuuuuggaauuaugucugcugaauaauaaacuuuuuugaaauaauaaaucugguagaaaaaugagaucucaaaggcucuuuucagagccaccaaaaaaaaaaaaaaaaaaaaaaaaaaaaaaaaaaaaaaaaaaaaaaaaaaaaaaaaaaaaaaaaagaauu

SEQ ID NO: 30783 - RNA, 1781 nt, Artificial Sequence
  mRNA product Design b-4 (hSL-A64-N5) comprising derived and/or modified sequence from LASV(G733-SLE-2010;Clade IV)__AIT17154__GPCmut6 (opt5)
aggagagucccgcagucggcguccagcggcucugcuuguucgugugugugucguugcaggccuuauucaagcuuaccaugggccagaucgugaccuucuuucaagaggucccccacguuauugaagaggugaugaacaucgugcugauugcccucagcauccuggcuguccuuaaggggcuguacaauuucgccacaugcggaauugugggccucguuuccuuucugcuucugugugggagaucuugcacgaccagccucuauaaaggaguguacgaacugcagacacuggagcucaacauggaaacccugaauauguguaugccucuuuccugcacaaagaacaauucucaucacuauaucauggucggcaacgagaccgggcuggagcucacacugaccaauacgagcaucauuaaccauaaauucuguaaucuuuccgacgcgcacaagaaaaaccuguacgaucaugcucucaugucuaucauuagcaccuuucaccuguccaucccgaauuucaaccaguaugaagccaugagcugcgacuuuaauggaggcaagauuucugugcaguacaaccugucccacagcuaugccggcgaugcugccaaucauugugggacaaucgcuaacggaguucuccaaaccuucaugcggauggccuggggcgggucuuacauugcgcuggacuccggacgcgauagaugggacugcaucaugacaagcuaccaguaucuuaucauucagaacaccacgugggaggaucacugucaguuuucucggcccuccccuaucggcuaccuggggcuccugagccaacgcacaagagacauuuauaucucccggcgccuucugggaaccuucacauggacccucucugauagcgaaggcaaggacacccccggcggguacugccugacaagauggaugcugauugaggccgagcucaaauguuuuggaaauacggcuguggccaagugcaacgaaaaacaugaugaggaguucugcgacaugcugcggcuuuuugauuucuguaagcaggcuauccagcgccugaaagccccugcgcagauguccauccaacucauuaauaaggccgucaacgcucugaucaaugaccagcuuauuaugaagaaccaccugagagacaucaugggcauucccuauugcaauuacagcaaauauugguaccucaaccacaccacaaccgggaagacaucucugccuaaauguuggcugguguccaauggaagcuaccucaacgaaacccauuucucugaugacaucgaacagcaagccgauaauaugaucacggagaugcugcagaaggaguauauggaacggcagggcaaaacaccgcuugggcugguggaccucuuugucuucagcaccuccuuuuaccugauuucuaucuuccugcaccuuguuaagauucccacccaucgccacguggugggaaaaagcugcccuaagccccauagacucaaccacaugggcaucuguuccugcggccuguaugggcagccuggaguccccgugaaguggaaacggugaggacuaguaauaaggaaacuguaugaaugucugugggcaggaagugaagagauccuucuguaaagguuuuuggaauuaugucugcugaauaauaaacuuuuuugaaauaauaaaucugguagaaaaaugagaucucaaaggcucuuuucagagccaccaaaaaaaaaaaaaaaaaaaaaaaaaaaaaaaaaaaaaaaaaaaaaaaaaaaaaaaaaaaaaaaaagaauu

SEQ ID NO: 30784 - RNA, 1781 nt, Artificial Sequence
  mRNA product Design b-4 (hSL-A64-N5) comprising derived and/or modified sequence from MOPV/LASV reassortant(IGS-1;Clade IV)__AFY05576__GPCmut6 (opt5)
aggagagucccgcagucggcguccagcggcucugcuuguucgugugugugucguugcaggccuuauucaagcuuaccaugggccagaucgugaccuucuuucaagaggucccccacguuauugaagaggugaugaacaucgugcugauugcccucagcguccuggcugugcuuaaggggcuguacaauuucgccacaugcggacucguuggccuggugacguuucuucugcucugugggagauccugcaccacaucucuguauaaaggagucuacgaacugcagacccucgagcugaacauggaaacacuuaauauguguaugccucugagcugcaccaagaacaauucccaucacuauaucauggugggcaacgagacagggcucgagcugacccuuacgaauaccucuauuaucaaccauaaauucuguaaucugagcgacgcgcacaagaaaaaccucuacgaucaugcucugauguccaucauuucuacauuucaccugagcaucccgaauuucaaccaguaugaagccauguccugcgacuuuaauggaggcaagauuagcguucaguacaaccucucucacuccuaugccggcgaugcugccaaucauugugggaccguggcuaacggaguccugcaaacauucaugcggauggccuggggcgggagcuacaucgcgcuugacucuggacgcggcaacugggauugcauuaugaccuccuaccaguaucugaucauucagaauacgacaugggaggaccacugucaguuuagcagacccucuccuaucggguaccucggacugcuuucccaacggacccgcgauaucuauauuagcagacggcugcucggcacauucaccuggacccuguccgacucugaaggcgaggauacacccgggggauacugccugacgcgcuggaugcucaucgaggccgaacugaaguguuuuggcaacaccgcuguggccaaaugcaaugagaagcaugacgaagaguucugcgauaugcuuagacuguuugacuucuguaaacaggcuauucagcggcucaaggccccugcgcagaugagcauccaacugauuaacaaagccgugaaugcucuuaucaacgaucagcugaucaugaagaaucaccuccgcgacauuauggggauccccuauugcaacuacuccaaguauugguaccugaaucacacaaccacaggaagaaccagccugccuaaauguuggcucgucucuaacggcuccuaccugaaugaaacgcauuucagcgacgauauugagcagcaagccgacaacaugaucacagagaugcuucagaaggaauauauggagcggcaggggaaaaccccgcugggacucguugaucuguuuguguucucuaccagcuuuuaccugauuuccaucuuccuucaccucgugaagauccccacacaucgccacauugucggcaaaucuugcccuaagccccauagacugaaucacaugggcaucuguagcugcgggcuguauaaacagccuggagugcccguuaaguggaagcggugaggacuaguaauaaggaaacuguaugaaugucugugggcaggaagugaagagauccuucuguaaagguuuuuggaauuaugucugcugaauaauaaacuuuuuugaaauaauaaaucugguagaaaaaugagaucucaaaggcucuuuucagagccaccaaaaaaaaaaaaaaaaaaaaaaaaaaaaaaaaaaaaaaaaaaaaaaaaaaaaaaaaaaaaaaaaagaauu

SEQ ID NO: 30785 - RNA, 1781 nt, Artificial Sequence
  mRNA product Design b-4 (hSL-A64-N5) comprising derived and/or modified sequence from LASV(LM765-SLE-2012;Clade IV)__AIT17814__GPCmut6 (opt5)
aggagagucccgcagucggcguccagcggcucugcuuguucgugugugugucguugcaggccuuauucaagcuuaccaugggccagaucgugaccuucuuucaagaggucccccacguuauugaagaggugaugaacaucgugcugauugcccucagcauccuggcuguccuuaaggggcuguacaauuucgccacaugcggacucgugggccugguuacguuucuucugcucugugggagauccugcaccacaucucuguauaaaggaguguacgaacugcagacccucgagcugaacauggaaacacuuaauauguguaugccucugagcugcaccaagaacaauucccaucacuauauuauggucggcaacgagacagggcucgagcugacccuuacgaauaccucuaucaucgaccauaaauucuguaaccugagcgaugcgcaccggaagaaucucuacgaccaugcucugauguccauuaucucuacauuucaccugagcauuccgaacuucaaucaguaugaagccauguccugcgauuuuaacggaggcaaaaucagcgugcaguacaaucucucucacuccuaugccaaggacgcugccgaucauuguggcaccguugcuaacggggugcugcaaacauucaugcgcauggccuggggaggcagcuacauugcgcuugacucugggagaggacggugggauugcaucaugaccuccuaccaguaucugauuauccagaauacgacaugggaggaccacugucaguuuagccgccccucuccuaucggcuaccucgggcugcuuucccaaagaacccgggauauuuauaucagccgcagacugcucggaacauucaccuggacccuguccgacucugaaggcaaggauacacccggcggguacugccugacgcgguggaugcucauugaggccgagcugaaauguuuuggaaacaccgcugucgccaagugcaacgaaaaacaugacgaggaguucugcgauaugcuucgccuguuugacuucuguaagcaggcuauccagagacucaaagccccugcgcagaugagcauucaacugaucaauaaggccgugaacgcucuuaucaaugaccagcugauuaugaagaaccaccuccgggauaucaugggcauucccuauugcaauuacuccaaauauugguaccugaaccacacaaccacagggaagaccagccugccuaaauguuggcucgugucuaauggauccuaccugaacgaaacgcauuucagcgacgauaucgaacagcaagccgacaauaugauuacagagaugcuucagaaggaguauauggaacgccagggcaaaaccccgcuggggcucgucgaucuguuuguuuucucuaccagcuuuuaccugaucuccaucuuccuucaccucgugaagauucccacacauagacacaucgugggaaaaccuugccccaagccucaucggcugaaccacaugggcauuuguucuugcggccuguauaagcagcccggggucccggugaaauggaagcgcugaggacuaguaauaaggaaacuguaugaaugucugugggcaggaagugaagagauccuucuguaaagguuuuuggaauuaugucugcugaauaauaaacuuuuuugaaauaauaaaucugguagaaaaaugagaucucaaaggcucuuuucagagccaccaaaaaaaaaaaaaaaaaaaaaaaaaaaaaaaaaaaaaaaaaaaaaaaaaaaaaaaaaaaaaaaaagaauu

SEQ ID NO: 30786 - RNA, 1781 nt, Artificial Sequence
  mRNA product Design b-4 (hSL-A64-N5) comprising derived and/or modified sequence from LASV(LM776-SLE-2012;Clade IV)__AIT17824__GPCmut6 (opt5)
aggagagucccgcagucggcguccagcggcucugcuuguucgugugugugucguugcaggccuuauucaagcuuaccaugggccagaucgugaccuucuuucaagaggucccccacguuauugaagaggugaugaacaucgugcugauugcccucagcauccuggcuguccuuaaggggcuguacaauuucgccacaugcggacucgugggccugguuacguuucuucugcucugugggagauccugcaccacaucuguguauaaaggagucuacgaacugcagacccuggagcucaacauggaaacacugaauauguguaugccucuuagcugcaccaagaacaauucccaucacuauauuauggugggcaacgagacagggcuggagcucacccugacgaauaccucuaucaucaaccauaaauucuguaaucuuagcgacgcgcacaagaaaaaccuguacgaucaugcucucauguccauuaucucuacauuucaccugagcauuccgaauuucaaccaguaugaagccauguccugcgacuuuaauggaggcaagaucagcguucaguacaaccugucucacuccuaugccggcgaugcugccaaucauugugggaccguggcuaacggaguccuccaaacauucaugcggauggccuggggcgggagcuacauugcgcuggacucuggacacggcaagugggauugcaucaugaccuccuaccaguaucuuauuauccagaacacgacaugggaggaccauugucaguuuagccgccccucuccuaucggguaccugggacuccugucccaaagaacccgggauauuuauaucagccgcagacuucugggcacauucaccuggacccucuccgacucugaaggcaaagauacacccgggggauacugccugacgcgguggaugcugauugaggccgagcucaaguguuuuggcaauaccgcuguggccaaaugcaacgaaaagcacgacgaggaguucugcgauaugcugcgccuuuuugacuucuguaaacaggcuauccagagacugaaggccccugcgcagaugagcauucaacucaucaauaaggccgugaacgcucugaucaaugaucagcuuauuaugaaaaaccaucugcgggacaucauggggauucccuauugcaauuacuccaaguauugguaccucaaccacacaaccacaggaaaaaccagccugccuaaguguuggcuggucucuaauggcuccuaccucaacgaaacgcacuucagcgacgauaucgaacagcaagccgacaauaugauuacagagaugcugcagaaagaguauauggaacgccaggggaagaccccgcuuggacugguugaucucuuuguguucucuaccagcuuuuaccugaucuccaucuuccugcaucuugugaaaauucccacacacagacauaucgucggcaagucuugcccuaagccccaccggcucaaccacaugggcauuuguagcugcgggcuguauaaacagccuggagugcccguucgcuggaagagaugaggacuaguaauaaggaaacuguaugaaugucugugggcaggaagugaagagauccuucuguaaagguuuuuggaauuaugucugcugaauaauaaacuuuuuugaaauaauaaaucugguagaaaaaugagaucucaaaggcucuuuucagagccaccaaaaaaaaaaaaaaaaaaaaaaaaaaaaaaaaaaaaaaaaaaaaaaaaaaaaaaaaaaaaaaaaagaauu

SEQ ID NO: 30787 - RNA, 1781 nt, Artificial Sequence
  mRNA product Design b-4 (hSL-A64-N5) comprising derived and/or modified sequence from LASV(Mad39;Clade IV)__ANH09722__GPCmut6 (opt5)
aggagagucccgcagucggcguccagcggcucugcuuguucgugugugugucguugcaggccuuauucaagcuuaccaugggccagaucgugaccuucuuucaagaggucccccacguuauugaagaggugaugaacaucgugcugauugcccucagcauccuggcuguccuuaaggggcuguacaauguggccacaugcggacucauuggccugguuacguuccuucugcucugugggagauccugcaccacaacccuguauaaaggaguguacgaacugcaggcgcucgagcugaacauggaaacacuuaauauguguaugccucugucuugcaccaagaacaauagccaucacuauauccgggucggcaacgagacagggcucgagcugacccuuacgaauaccucccugaucaaccauaaauuuuguaaucucucugacgcucacaagaaaaaccuguacgaucaugcccugaugagcauuaucuccacauuccaccucucuauuccgaauuuuaaccaguaugaagccaugagcugcgacuucaaugauggaaagaucuccgugcaguacaaccugagccacaccuaugcuggcgacacagccaaucauuguggcaccguugcuaacggggugcuucaaacguuuaugcgcauggccuggggaggcucuuacauugcgcuggauuccgggagaggaggcugggacugcaucaugacaagcuaccaguaucucauuauccagaacaccacaugggaggaucacugucaguucucucggcccuccccuaucggguaccugggacuucugagccaacgcaccagagacauuuauaucucucggcgccuccugggcaccuuuacauggacgcuguccgauagcgaaggcaaggacacccccgggggauacugccucacaagauggaugcugauugaggccgagcuuaaauguuucggcaauaccgcugucgccaagugcaacgaaaaacaugaugaggaauuuugcgacaugcugcgccucuucgauuuuuguaagcaggcuauccagcggcugaaagccccugcgcagauguccauucaacuuaucaauaaggccgugaacgcucugaucaaugaccagcucauuaugaagaaccaccugagagacaucauggggauucccuauugcaauuacucuaaauauugguaccugaaccacacagugaccggaaagacgagccucccuaaauguuggcuggucuccaauggcagcuaccuuaacgagacacauuucucugaugacaucgaacagcaagccgauaauaugauuaccgagaugcugcagaaggaguauauggaacggcaggggaaaaccccgcucggacugguugaccuguucguguuuuccaccagcuucuaccuuaucucuaucuuucuccaccuggugaagauucccacacaucgccacgucgugggcaaaccuugccccaagccucauagacugaaccacaugggcaucuguagcugcggguucuauaagcagcccggaguuccggugcgguggaaacgcugaggacuaguaauaaggaaacuguaugaaugucugugggcaggaagugaagagauccuucuguaaagguuuuuggaauuaugucugcugaauaauaaacuuuuuugaaauaauaaaucugguagaaaaaugagaucucaaaggcucuuuucagagccaccaaaaaaaaaaaaaaaaaaaaaaaaaaaaaaaaaaaaaaaaaaaaaaaaaaaaaaaaaaaaaaaaagaauu

SEQ ID NO: 30788 - RNA, 1781 nt, Artificial Sequence
  mRNA product Design b-4 (hSL-A64-N5) comprising derived and/or modified sequence from LASV(Z0947-SLE-2011;Clade IV)__AIT17840__GPCmut6 (opt5)
aggagagucccgcagucggcguccagcggcucugcuuguucgugugugugucguugcaggccuuauucaagcuuaccaugggccagaucgugaccuucuuucaagaggucccccacguuauugaagaggugaugaacaucgugcugauugcccucagcauccuggcuguccuuaaggggcuguacaauuucgccacaugcggacucgugggccugguuacguuucuucugcucugugggagauccugcaccauuucucuguauaaaggaguguacgaacugcagacacucgagcugaacauggaaacccuuaauauguguaugccucugagcugcacaaagaacaauucccaucacuauaucauggucggcaacgagaccgggcucgagcugacacuuaccaauacgucuaucauuaaccauaaauucuguaaucugagcgacgcgcacaagaaaaaccucuacgaucaugcucugauguccaucauuucuaccuuucaccugagcaucccgaauuucaaccaguaugaagccauguccugcgacuuuaauggaggcaagauuagcgugcaguacaaccucucucacuccuaugccggcgaugcugccaaucauugugggacaguugcuaacggagugcugcaaaccuucaugcggauggccuggggcgggagcuacaucgcgcuugacucuggacgcgauagaugggacugcauuaugacauccuaccaguaucugaucauccagaacaccacgugggaggaucacugucaguuuagccggcccucuccuauuggcuaccucgggcugcuuucccaacgcacaagagacaucuauauuagccggcgccugcucggaaccuucacauggacccuguccgauucugaaggcaaggacacccccggcggguacugccugacaagauggaugcucaucgaggccgagcugaaauguuuuggaaauacggcugucgccaagugcaacgaaaaacaugaugaggaguucugcgacaugcuucggcuguuugauuucuguaagcaggcuauucagcgccucaaagccccugcgcagaugagcauccaacugaucaauaaggccgugaacgcucuuauuaaugaccagcugaucaugaagaaccaccucagagacauuaugggcauccccuauugcaauuacuccaaauauugguaccugaaccacaccacaaccgggaagacaagccugccuaaauguuggcucgugucuaauggauccuaccugaacgaaacccauuucagcgaugacauugaacagcaagccgauaauaugaucacggagaugcuucagaaggaguauauggaacggcagggcaaaacaccgcuggggcucgucgaccuguuuguuuucucuaccagcuuuuaccugaucuccauuuuccuucaccucgugaagauccccacccaucgccacauugugggaaaaccuugccccaagccucauagacugaaccacaugggcaucuguucuugcggccuguauaagcagcccggggucccggugaaauggaagcggugaggacuaguaauaaggaaacuguaugaaugucugugggcaggaagugaagagauccuucuguaaagguuuuuggaauuaugucugcugaauaauaaacuuuuuugaaauaauaaaucugguagaaaaaugagaucucaaaggcucuuuucagagccaccaaaaaaaaaaaaaaaaaaaaaaaaaaaaaaaaaaaaaaaaaaaaaaaaaaaaaaaaaaaaaaaaagaauu

SEQ ID NO: 30789 - RNA, 1812 nt, Artificial Sequence
  mRNA product Design b-4 (hSL-A100) comprising derived and/or modified sequence from LASV(Josiah;Clade IV)__NP_694870__GPCmut6 (opt1)
aggagagucccgcagucggcguccagcggcucugcuuguucgugugugugucguugcaggccuuauucaagcuuaccaugggccagaucgugaccuucuuccaggaggucccccacgugaucgaggaggugaugaacaucguccugaucgcccucagcgugcuggccgugcugaaggggcucuacaacuucgcgaccugcggccuggucgggcuggugacguuccuccugcugugcggccgcuccugcaccaccagccucuacaaggggguguacgagcugcagacccuggagcucaacauggagacgcugaacaugugcaugccgcuguccugcaccaagaacaacagccaccacuacaucauggucggcaacgagaccggccucgagcugacgcugaccaacaccuccaucaucaaccacaaguucugcaaccucagcgacgcccacaagaagaaccuguacgaccacgcccugauguccaucaucagcaccuuccaccucuccauccccaacuucaaccaguacgaggccaugagcugcgacuucaacgggggcaagaucuccgugcaguacaaccugagccacuccuacgccggggacgcggccaaccacugcggcacgguggccaacgggguccugcagaccuucaugcggauggccuggggcggcagcuacaucgcgcucgacuccgggcgcggcaacugggacugcaucaugaccagcuaccaguaccugaucauccagaacaccacgugggaggaccacugccaguucucccggcccagccccaucggguaccugggccuccugucccagcgcacccgggacaucuacaucagccgccggcugcucggcaccuucaccuggacgcugagcgacuccgaggggaaggacaccccgggcggguacugccugacccgcuggaugcucaucgaggccgagcugaagugcuucggcaacaccgccguggccaagugcaacgagaagcacgacgaggaguucugcgacaugcugcggcuguucgacuucugcaagcaggccauccagcgccugaaggcgcccgcccagaugagcauccagcugaucaacaaggccgugaacgcccucaucaacgaccagcugaucaugaagaaccaccuccgggacaucauggggauccccuacugcaacuacuccaaguacugguaccucaaccacacgaccaccggccgcaccagccugcccaagugcuggcuggucuccaacggcagcuaccucaacgagacgcacuucuccgacgacaucgagcagcaggccgacaacaugaucaccgagaugcugcagaaggaguacauggagcggcaggggaagacgccccugggccucguggaccuguucguguucagcaccuccuucuaccugaucagcaucuuccugcaccucgucaagaucccgacccaccgccacaucguggggaaguccugccccaagccccaccggcugaaccacaugggcaucugcagcugcgggcuguacaagcagcccggcgugccggucaaguggaagcgcugaggacuaguaauaaggaaacuguaugaaugucugugggcaggaagugaagagauccuucuguaaagguuuuuggaauuaugucugcugaauaauaaacuuuuuugaaauaauaaaucugguagaaaaaugagaucucaaaggcucuuuucagagccaccaaaaaaaaaaaaaaaaaaaaaaaaaaaaaaaaaaaaaaaaaaaaaaaaaaaaaaaaaaaaaaaaaaaaaaaaaaaaaaaaaaaaaaaaaaaaaaaaaaaaa

SEQ ID NO: 30790 - RNA, 1809 nt, Artificial Sequence
  mRNA product Design b-4 (hSL-A100) comprising derived and/or modified sequence from LASV(LP;Clade I)__AAF86701__GPCmut6 (opt1)
aggagagucccgcagucggcguccagcggcucugcuuguucgugugugugucguugcaggccuuauucaagcuuaccaugggccagaucaucaccuucuuccaggaggugccccacgucaucgaggaggugaugaacaucgugcugaucgcccucagccugcuggccauccucaaggggcuguacaacaucgcgaccugcggcaucaucgggcuggucgccuuccucuuccugugcggcaaguccugcagccugacgcucaagggcggguacgagcugcagacccuggagcucaacauggagacccugaacaugugcaugccgcuguccugcacgaagaacagcucccaccacuacauccgcgugggcaacgagaccgggcucgagcugacccugaccaacacgagcaucaucaaccacaaguucugcaaccucuccgacgcccacaagaagaaccuguacgaccacgcccugaugagcaucaucuccaccuuccaccucagcauccccaacuucaaccaguacgaggccauguccugcgacuucaacggcgggaagaucagcgugcaguacaaccugucccacagcuacgcgggcgacgccgccgagcacugcgggaccgucgccaacggcgugcugcagaccuucaugcggauggcguggggcgggcgcuacaucgcccucgacuccggcaaggggaacugggacugcaucaugacgagcuaccaguaccugaucauccagaacaccaccugggaggaccacugccaguucucccggcccagccccaucggcuaccugggccuccugucccagcgcacccgggacaucuacaucagccgccggcugcucgggacguucaccuggacccugagcgacuccgagggcaacgagacccccgggggcuacugccugacgcgcuggaugcucaucgaggccgagcugaagugcuucgggaacaccgccguggccaagugcaacgagaagcacgacgaggaguucugcgacaugcugcggcuguucgacuucugcaagcaggcgauccgccggcugaaggcccccgcccagaugagcauccagcugaucaacaaggccgucaacgcccucaucaacgaccagcugaucaugaagaaccaccuccgcgacaucaugggcauccccuacugcaacuacuccaaguacugguaccucaaccacaccagcuccggccggaccagccugcccaagugcuggcugaucuccaacgggagcuaccucaacgagacgcaguucuccgacgacaucgagcagcaggcggacaacaugaucaccgagaugcugcagaaggaguacaucgagcgccagggcaagaccccgcuggggcucguggacaucuucaucuucagcaccuccuucuaccugaucagcaucuuccugcaccugaucaagaucccgacgcaccggcacaucgugggcaagcccugccccaagccccaccgccucaaccacaugggggucugcuccugcggccuguacaagcacccgggcgugcccaccaaguggaagcggugaggacuaguaauaaggaaacuguaugaaugucugugggcaggaagugaagagauccuucuguaaagguuuuuggaauuaugucugcugaauaauaaacuuuuuugaaauaauaaaucugguagaaaaaugagaucucaaaggcucuuuucagagccaccaaaaaaaaaaaaaaaaaaaaaaaaaaaaaaaaaaaaaaaaaaaaaaaaaaaaaaaaaaaaaaaaaaaaaaaaaaaaaaaaaaaaaaaaaaaaaaaaaaaaa

SEQ ID NO: 30791 - RNA, 1809 nt, Artificial Sequence
  mRNA product Design b-4 (hSL-A100) comprising derived and/or modified sequence from LASV(803213;Clade II)__AAF86703__GPCmut6 (opt1)
aggagagucccgcagucggcguccagcggcucugcuuguucgugugugugucguugcaggccuuauucaagcuuaccaugggccagaucaucaccuucuuccaggaggugccccacgucaucgaggaggugaugaacaucgugcugaucgcccucagccugcuggccauccucaaggggaucuacaacgucgcgaccugcggccuguucgggcugaucuccuuccuccugcugugcggccgcagcugcuccgugacguacaaggggguguacgagcuccagacccuggagcugaacauggccaaccucaacaugugcaugccgcugagcugcaccaagaacaacucccaccacuacaucauggucggcaacgagacgggccuggagcucacccugaccaacaccagcaucaucaaccacaaguucugcaaccuguccgacgcccacaagaagaaccucuacgaccacgcccugaugagcaucaucuccacguuccaccugagcauccccaacuucaaccaguacgaggccauguccugcgacuucaacgggggcaagaucagcgugcaguacaaccucucccacagcuucgcgguggacgccgccaaccacugcgggaccaucgccaacggcguccugcagaccuucaugcggauggcguggggcggguccuacaucgcccuggacagcggcaaggggaacugggacugcaucaugaccuccuaccaguaccucaucauccagaacacgaccugggaggaccacugccaguucagccgccccucccccaucggcuaccuggggcugcucagccagcggacccgcgacaucuacaucagccggcgccugcugggcaccuucacguggacccucuccgacagcgagggcaacgaggcccccgggggcuacugccugacccgguggaugcugaucgaggccgagcucaagugcuucgggaacaccgccguggcgaagugcaacgagaagcacgacgaggaguucugcgacaugcugcgccuguucgacuucugcaagcaggccaucaagcggcucaagacgcccgcccagauguccauccagcugaucaacaaggccgugaacgcccugaucaacgaccagcucaucaugaagaaccaccuccgcgacaucaugggcauccccuacugcaacuacagccgguacugguaccugaaccacaccgucaccgggaagaccucccugccccgcugcuggcuggugagcaacggcuccuaccugaacgagacgcacuucagcgacgacaucgagcagcaggcggacaacaugaucaccgagaugcuccagaaggaguacauggaccggcagggcaagaccccgcuggggcugguggaccucuucgucuucuccaccagcuucuaccugaucuccaucuuccugcaccuggugaagaucccgacgcaccgccacaucgugggcaagcccugccccaagccccaccggcucaaccacauggggaucugcagcugcggccuguacaagcacccggggguccccgugaaguggaagcgcugaggacuaguaauaaggaaacuguaugaaugucugugggcaggaagugaagagauccuucuguaaagguuuuuggaauuaugucugcugaauaauaaacuuuuuugaaauaauaaaucugguagaaaaaugagaucucaaaggcucuuuucagagccaccaaaaaaaaaaaaaaaaaaaaaaaaaaaaaaaaaaaaaaaaaaaaaaaaaaaaaaaaaaaaaaaaaaaaaaaaaaaaaaaaaaaaaaaaaaaaaaaaaaaaa

SEQ ID NO: 30792 - RNA, 1809 nt, Artificial Sequence
  mRNA product Design b-4 (hSL-A100) comprising derived and/or modified sequence from LASV(GA391;Clade III)__CAA36645__GPCmut6 (opt1)
aggagagucccgcagucggcguccagcggcucugcuuguucgugugugugucguugcaggccuuauucaagcuuaccaugggccagaucgugaccuucuuccaggaggucccccacgugaucgaggaggugaugaacaucguccugaucgcccucagcauccuggccauccugaaggggcucuacaacguggcgaccugcggccugaucgggcuggugacguuccuccugcuguccggccgcagcugcucccucaucuacaaggggaccuacgagcugcagacccuggagcucaacauggagacccugaacaugugcaugccgcugagcugcaccaagaacaacucccaccacuacauccgggucggcaacgagaccggccucgagcugacccugacgaacaccagcauccucaaccacaaguucugcaaccuguccgacgcccacaagcgcaaccuguacgaccacagccucauguccaucaucagcaccuuccaccuguccauccccaacuucaaccaguacgaggccaugagcugcgacuucaacgggggcaagaucaccgugcaguacaaccugucccacagcuucgccguggacgccgcggggcacugcggcacgcucgccaacgggguccugcagaccuucaugcggauggccuggggcggcuccuacaucgcccuggacagcgggcgcggcaacugggacugcaucaugaccuccuaccaguaccucaucauccagaacaccacgugggacgaccacugccaguucagccggcccucccccaucggguaccugggccugcucagccagcgcacccgggacaucuacaucagccgccggcugcugggcaccuucaccuggacgcucuccgacagcgaggggaacgagaccccgggcggguacugccugacccgcuggaugcugaucgaggcggagcucaagugcuucggcaacaccgccguggccaagugcaacgagaagcacgacgaggaguucugcgacaugcugcggcuguucgacuucugcaagcaggccauccgccggcucaagacgcccgcccagauguccauccagcugaucaacaaggcggugaacgcccugaucaacgaccagcucaucaugaagaaccaccuccgcgacaucauggggauccccuacugcaacuacagccgguacugguaccugaaccacaccuccaccggcaagaccagccugccccgcugcuggcugaucuccaacggcagcuaccugaacgagacgaaguucuccgacgacaucgagcagcaggccgacaacaugaucaccgagaugcuccagaaggaguacaucgaccggcaggggaagacgccccugggccuggucgaccuguucguguucagcaccuccuucuaccucaucagcaucuuccugcaccuggugaagaucccgacccaccgccacaucgucgggaagcccugccccaagccccaccggcucaaccacaugggcaucugcuccugcgggcuguacaagcagccgggcgugcccgugcgcuggaagcggugaggacuaguaauaaggaaacuguaugaaugucugugggcaggaagugaagagauccuucuguaaagguuuuuggaauuaugucugcugaauaauaaacuuuuuugaaauaauaaaucugguagaaaaaugagaucucaaaggcucuuuucagagccaccaaaaaaaaaaaaaaaaaaaaaaaaaaaaaaaaaaaaaaaaaaaaaaaaaaaaaaaaaaaaaaaaaaaaaaaaaaaaaaaaaaaaaaaaaaaaaaaaaaaaa

SEQ ID NO: 30793 - RNA, 1812 nt, Artificial Sequence
  mRNA product Design b-4 (hSL-A100) comprising derived and/or modified sequence from LASV(AV;Clade V)__CCA30314__GPCmut6 (opt1)
aggagagucccgcagucggcguccagcggcucugcuuguucgugugugugucguugcaggccuuauucaagcuuaccaugggccagaucgugaccuucuuccaggaggucccccacgugaucgaggaggugaugaacaucguccugaucgcccucagcauccuggccgugcugaaggggcucuacaacaucgcgaccugcggccugaucgggcugaucacguuccuccugcugugcggccgcuccugcagcuccaaccucuacaaggggguguacgagcugcagagccuggaccucaacauggagacccugaacaugugcaugccgcuguccugcaccaagaacaacagccaccacuacauccgggucggcaacgacacgggccucgagcugacccugaccaacaccuccauccucaaccacaaguucugcaaccugagcgacgcccacaagaaggaccuguacgaccacgcccucauguccaucaucagcacguuccaccuguccauccccaacuucaaccaguacgaggccaugagcugcgacuucaacgggggcaagaucuccgugcaguacaaccugagccacuccuacgccaucgacgcggccaaccacugcgggaccguggccaacggcauccuccagaccuucaugcgcauggccuggggcgggagcuacaucgcgcuggacuccggccgggggaacugggacugcaucaugaccagcuaccaguaccugaucauccagaacacgaccugggagaaccacugccaguucucccgccccagccccaucggcuaccucgggcugcugagccagcggacccgcgacaucuacaucucccggcgccuccugggcaccuucacguggacccugagcgacuccgagggcaacgccacccccgggggcuacugccucacccgguggaugcugaucgaggccgagcugaagugcuucgggaacacggccgucgccaagugcaacgagaagcacgacgaggaguucugcgacaugcuccgccuguucgacuucugcaagcaggcgaucagccggcugaagucccccgcccagaugagcauccagcucaucaacaaggccgugaacgcccugaucaacgaccagcugaucaugaagaaccaccuccgcgacaucaugggcauccccuacugcaacuacuccaaguacugguaccugaaccacaccaucaccgggaagaccagccugcccaagugcuggcucguguccaacggcagcuaccugaacgagacgcacuucuccgacgacaucgagcagcaggccgacaacaugaucaccgagaugcugcagaaggaguacauggagcggcagggcaagaccccgcucgggcuggucgaccuguucguguucagcaccuccuucuaccugaucagcaucuuccuccgccuggugaagaucccgacgcaccggcacaucgucggcaagcccugccccaagccccaccgccugaaccacauggggaucugcuccugcggccucuacaagcagccgggggugcccgugcgguggaagcgcugaggacuaguaauaaggaaacuguaugaaugucugugggcaggaagugaagagauccuucuguaaagguuuuuggaauuaugucugcugaauaauaaacuuuuuugaaauaauaaaucugguagaaaaaugagaucucaaaggcucuuuucagagccaccaaaaaaaaaaaaaaaaaaaaaaaaaaaaaaaaaaaaaaaaaaaaaaaaaaaaaaaaaaaaaaaaaaaaaaaaaaaaaaaaaaaaaaaaaaaaaaaaaaaaa

SEQ ID NO: 30794 - RNA, 1809 nt, Artificial Sequence
  mRNA product Design b-4 (hSL-A100) comprising derived and/or modified sequence from LASV(Togo/2016/7082;Clade VI)__AMR44577__GPCmut6 (opt1)
aggagagucccgcagucggcguccagcggcucugcuuguucgugugugugucguugcaggccuuauucaagcuuaccaugggccagaucaucaccuucuuccaggaggugccccacgucaucgaggaggugaugaacaucgugcugaucgcccucagccugcuggccauccucaagggggucuacaacguggcgaccugcggcaucaucgggcuggugacguuccuguuccucugcggccgcuccugcagccugaucuacaagggguccuacgagcugcagacccucgagcugaacauggagacccugaacaugugcaugccgcucagcugcacgaagaacuccagccaccacuacauccgggucggcaacgagaccggccuggagcugacccucaccaacacguccaucaucaaccacaaguucugcaaccugagcgacgcccacaagcgcaaccuguacgaccacgcccucauguccauccugagcaccuuccaccuguccauccccaacuucaaccaguacgaggccaugagcugcgacuucaacgggggcaagaucuccgugcaguacaaccucagccacgccuacgcgguggacgccgccgagcacugcgggaccgucgccaacggcgugcugcagaccuucaugcggauggcguggggcggguccuacaucgcccuggacagcggccgcgggaacugggacugcaucaugacguccuaccaguaccucaucauccagaacaccaccugggaggaccacugccaguucagccggcccucccccaucggcuaccuggggcugcucagccagcgcacccgggacaucuacaucagccgccggcugcugggcacguucaccuggacccucuccgacagcgagggcaacgagacccccgggggcuacugccugacgcgcuggaugcugaucgaggccgagcucaagugcuucgggaacaccgccguggccaagugcaacgagaagcacgacgaggaguucugcgacaugcugcggcuguucgacuucugcaagcaggcgauccagcgccucaagucccccgcccagaugagcauccagcugaucaacaaggccgucaacgcccugaucaacgaccagcucaucaugaagaaccaccuccgggacaugaugggcauccccuacugcaacuacuccaaguacugguaccugaaccacaccagcuccgggcgcaccagccugcccaagugcuggcugguguccaacggcagcuaccugaacgagacgcacuucuccgacgacaucgagcagcaggccgacaacaugaucaccgagaugcuccagaaggaguacaucgaccggcagggcaagaccccgcuggggcugguggaccucuucgucuucagcaccuccuucuaccugaucagcaucuuccugcaccugaucaagaucccgacgcaccgccacaucgugggcaagcccugccccaagccccaccggcucaaccacauggggaucugcuccugcggccuguacaagcagccgggggugcccacccgcuggaagcggugaggacuaguaauaaggaaacuguaugaaugucugugggcaggaagugaagagauccuucuguaaagguuuuuggaauuaugucugcugaauaauaaacuuuuuugaaauaauaaaucugguagaaaaaugagaucucaaaggcucuuuucagagccaccaaaaaaaaaaaaaaaaaaaaaaaaaaaaaaaaaaaaaaaaaaaaaaaaaaaaaaaaaaaaaaaaaaaaaaaaaaaaaaaaaaaaaaaaaaaaaaaaaaaaa

SEQ ID NO: 30795 - RNA, 1809 nt, Artificial Sequence
  mRNA product Design b-4 (hSL-A100) comprising derived and/or modified sequence from LASV(KAK-428;Clade n.d. (VII))__ANH09740__GPCmut6 (opt1)
aggagagucccgcagucggcguccagcggcucugcuuguucgugugugugucguugcaggccuuauucaagcuuaccaugggccagaucgugaccuucuuccaggaggucccccacgugaucgaggaggugaugaacaucguccugaucgcccucagccugcuggccauccucaaggggcuguacaacuucgcgaccugcggcgugaucgggcugaucacguuccuccugcugugcggccgcuccugcagcgccaccuacaaggggcaguacgagcuccagacccuggagcugaacauggagucccucaacaugugcaugccgcugagcugcacgaagaacaacucccaccacuacauccgggccggcaacaacaccggccuggagcucacccugaccaacacgagcaucaucucccacaaguucugcaaccugagcgacgcccacaagaagaaccucuacgaccacacccugauguccaucaucaccaccuuccaccugagcauccccaacuucaaccaguacgaggccauguccugcgacuucaacgggggcaagaucagcauccaguacaaccucucccacagcuacgcgggggacgccgcccagcacugcggcacgguggccaacgggguccugcagaccuucaugcgcauggcguggggcggcuccuaccuggcccucgacagcgggcggcgcggcugggacugcaucaucuccagcuaccaguaccugaucauccagaacaccaccugggacgaccacugccaguucucccggcccagccccaucggguaccugggcuucgugagccagaagacgcgcgacaucuacaucucccggcgccuccugggcaccuucaccuggacccugagcgacuccgaggggcacgacaugccgggcggguacugccucacgcgguggaugcugaucgaggccgaccugaagugcuucggcaacaccgccguggccaagugcaacgagaagcacgacgaggaguucugcgacauguggcgccucuucgacuucugcaagcaggcgauccagcggcugaaggcccccgcccagaugaacauccagcugaucaacaaggccgucaacgcccucaucaacgaccagcugaugaugaagaaccaccuccgcgacaucauggggauccccuacugcaacuacagcaaguucugguaccugaacaacaccaccacgggccggaccucccugccccgcugcuggcugaucagcaacggcuccuaccucaacgagacccacuucagcgacgacaucgagcagcaggcggacaacaugaucaccgagaugcugcagaaggaguacauggaccggcaggggaagacgccccugggccucguggaccuguucguguucuccaccagcuucuaccugaucaccaucuuccuccaccuggucaagaucccgacccaccgccacaucguggggaagcccugccccaagccccaccggcugaaccacaugggcaucugcuccugcgggcuguacaagcagccgggcgugcccguccgcuggaagcggugaggacuaguaauaaggaaacuguaugaaugucugugggcaggaagugaagagauccuucuguaaagguuuuuggaauuaugucugcugaauaauaaacuuuuuugaaauaauaaaucugguagaaaaaugagaucucaaaggcucuuuucagagccaccaaaaaaaaaaaaaaaaaaaaaaaaaaaaaaaaaaaaaaaaaaaaaaaaaaaaaaaaaaaaaaaaaaaaaaaaaaaaaaaaaaaaaaaaaaaaaaaaaaaaa

SEQ ID NO: 30796 - RNA, 1809 nt, Artificial Sequence; identical to SEQ ID NO: 30790
  mRNA product Design b-4 (hSL-A100) comprising derived and/or modified sequence from LASV(Pinneo-NIG-1969;Clade I)__AIT17836__GPCmut6 (opt1)

SEQ ID NO: 30797 - RNA, 1809 nt, Artificial Sequence
  mRNA product Design b-4 (hSL-A100) comprising derived and/or modified sequence from LASV(ISTH0009-NIG-2011;Clade II)__AIT17404__GPCmut6 (opt1)
aggagagucccgcagucggcguccagcggcucugcuuguucgugugugugucguugcaggccuuauucaagcuuaccaugggccagaucaucaccuucuuccaggaggugccccacgucaucgaggaggugaugaacaucgugcugaucgcccucagccugcuggccauccucaaggggaucuacaacgucgcgaccugcggccuguucgggcugguguccuuccuccugcugugcggccgcagcugcuccacgaccuacaaggggguguacgagcuccagacccuggagcuggacauggccagccucaacaugugcaugccgcuguccugcacgaagaacaacagccaccacuacaucauggucggcaacgagaccggccuggagcucacccugaccaacacguccaucaucaaccacaaguucugcaaccugagcgacgcccacaagaagaaccucuacgaccacgcccugauguccaucaucagcaccuuccaccuguccauccccaacuucaaccaguacgaggccaugagcugcgacuucaacgggggcaagaucuccgugcaguacaaccucagccacgcguacgccguggacgccgccaaccacugcgggaccaucgcgaacggcguccugcagaccuucaugcggauggccuggggcggguccuacaucgcccuggacagcggcaagggguccugggacugcaucaugacgagcuaccaguaccucaucauccagaacaccaccugggaggaccacugccaguucucccgccccagccccaucggcuaccuggggcugcucagccagcggacccgcgacaucuacaucucccggcgccugcugggcacguucaccuggacccucagcgacuccgagggcaacgagacccccgggggcuacugccugacgcgguggaugcugaucgaggccgagcucaagugcuucgggaacaccgccguggcgaagugcaacgagaagcacgacgaggaguucugcgacaugcugcgccuguucgacuucugcaagcaggccauccggcgccucaagacccccgcccagaugagcauccagcugaucaacaaggccgugaacgcccugaucaacgaccagcucaucaugaagaaccaccuccgggacaucaugggcaucccguacugcaacuacuccaaguacugguaccugaaccacaccgucacggggaagaccagccugccccgcugcuggcugguguccaacggcagcuaccugaacgagacccacuucuccgacgacaucgagcagcaggcggacaacaugaucaccgagcuccugcagaaggaguacauggaccggcagggcaagacgccccuggggcucguggaccuguucgucuucagcaccuccuucuaccugaucagcaucuuccugcaccucaucaagaucccgacccaccgccacaucaccggcaagcccugccccaagccccaccggcugaaccacauggggaucugcuccugcggccuguacaagcacccgggggugcccgugaaguggaagcgcugaggacuaguaauaaggaaacuguaugaaugucugugggcaggaagugaagagauccuucuguaaagguuuuuggaauuaugucugcugaauaauaaacuuuuuugaaauaauaaaucugguagaaaaaugagaucucaaaggcucuuuucagagccaccaaaaaaaaaaaaaaaaaaaaaaaaaaaaaaaaaaaaaaaaaaaaaaaaaaaaaaaaaaaaaaaaaaaaaaaaaaaaaaaaaaaaaaaaaaaaaaaaaaaaa

SEQ ID NO: 30798 - RNA, 1809 nt, Artificial Sequence
  mRNA product Design b-4 (hSL-A100) comprising derived and/or modified sequence from LASV(ISTH2010-NIG-2012;Clade II)__AIT17482__GPCmut6 (opt1)
aggagagucccgcagucggcguccagcggcucugcuuguucgugugugugucguugcaggccuuauucaagcuuaccaugggccagaucaucaccuucuuccaggaggugccccacgucaucgaggaggugaugaacaucgugcugaucgcccucagccugcuggccauccucaaggggaucuacaacgucgcgaccugcggccuguucgggcugguguccuuccuccugcugugcggccgcagcugcuccacgaccuacaaggggguguacgagcuccagacccuggagcuggacauggccagccucaacaugugcaugccgcuguccugcacgaagaacaacagccaccacuacaucauggucggcaacgagaccggccuggagcucacccugaccaacacguccaucaucaaccacaaguucugcaaccugagcgacgcccacaagaagaaccucuacgaccacgcccugauguccaucaucagcaccuuccaccuguccauccccaacuucaaccaguacgaggccaugagcugcgacuucaacgggggcaagaucuccgugcaguacaaccucagccacgcguacgccguggacgccgccaaccacugcgggaccaucgcgaacggcguccugcagaccuucaugcggauggccuggggcggguccuacaucgcccuggacagcggcaagggguccugggacugcaucaugacgagcuaccaguaccucaucauccagaacaucaccugggaggaccacugccaguucucccgccccagccccaucggcuaccuggggcugcucagccagcggacccgcgacaucuacaucucccggcgccugcugggcaccuucacguggacccucagcgacuccgagggcaacgagacccccgggggcuacugccugacccgguggaugcugaucgaggccgagcucaagugcuucgggaacacggccguggcgaagugcaacgagaagcacgacgaggaguucugcgacaugcugcgccuguucgacuucugcaagcaggccauccggcgccucaagacccccgcccagaugagcauccagcugaucaacaaggccgugaacgcccugaucaacgaccagcucaucaugaagaaccaccuccgggacaucaugggcauccccuacugcaacuacuccaaguacugguaccugaaccacaccgucaccgggaagacgagccugccccgcugcuggcugguguccaacggcagcuaccugaacgagacccacuucuccgacgacaucgagcagcaggcggacaacaugaucaccgagcuccugcagaaggaguacaucgaccggcagggcaagaccccgcuggggcucguggaccuguucgucuucagcacguccuucuaccugaucagcaucuuccugcaccucgugaagaucccgacccaccgccacguggucggcaagcccugccccaagccccaccggcugaaccacauggggaucugcuccugcggccuguacaagcacccgggggugcccgugaaguggaagcgcugaggacuaguaauaaggaaacuguaugaaugucugugggcaggaagugaagagauccuucuguaaagguuuuuggaauuaugucugcugaauaauaaacuuuuuugaaauaauaaaucugguagaaaaaugagaucucaaaggcucuuuucagagccaccaaaaaaaaaaaaaaaaaaaaaaaaaaaaaaaaaaaaaaaaaaaaaaaaaaaaaaaaaaaaaaaaaaaaaaaaaaaaaaaaaaaaaaaaaaaaaaaaaaaaa

SEQ ID NO: 30799 - RNA, 1809 nt, Artificial Sequence
  mRNA product Design b-4 (hSL-A100) comprising derived and/or modified sequence from LASV(Lassa virus/H.sapiens-wt/NGA/2015/ISTH_0543;Clade II)__AVO03639__GPCmut6 (opt1)
aggagagucccgcagucggcguccagcggcucugcuuguucgugugugugucguugcaggccuuauucaagcuuaccaugggccagaucaucaccuucuuccaggaggugccccacgucaucgaggaggugaugaacaucgugcugaucgcccucagccugcuggccauccucaaggggaucuacaacgucgcgaccugcggccuguucgggcugguguccuuccuccugcugugcggccgcagcugcuccacgaccuacaaggggguguacgagcuccagacccuggagcuggacauggccaaccucaacaugugcaugccgcugagcugcacgaagaacaacucccaccacuacaucauggucggcaacgagaccggccuggagcucacccugaccaacacgagcaucaucaaccacaaguucugcaaccuguccgacgcccacaagaagaaccucuacgaccacgcccugaugagcaucaucuccaccuuccaccugagcauccccaacuucaaccaguacgaggccauguccugcgacuucaacgggggcaagaucagcgugcaguacaaccucucccacaccuacgcgguggacgccgccaaccacugcgggaccaucgccaacggcguccugcagacguucaugcggauggcguggggcgggagcuacaucgcccuggacuccggcaaggggagcugggacugcaucaugaccuccuaccaguaccucgugauccagaacaccaccugggaggaccacugccaguucagccgccccucccccaucggcuaccuggggcugcucagccagcggacgcgcgacaucuacaucagccggcgccugcugggcaccuucaccuggacccucuccgacagcgagggcaacgagacgcccgggggcuacugccugacccgguggaugcugaucgaggccgagcucaagugcuucgggaacaccgccguggccaagugcaacgagaagcacgacgaggaguucugcgacaugcugcgccuguucgacuucugcaagcaggcgauccggcgccucaagacccccgcccagauguccauccagcugaucaacaaggccgucaacgcccugaucaacgaccagcucaucaugaagaaccaccuccgggacaucaugggcauccccuacugcaacuacagcaaguacugguaccugaaccacacggugaccgggaagaccucccugccccgcugcuggcuggugagcaacggcuccuaccugaacgagacccacuucagcgacgacaucgagcagcaggccgacaacaugaucacggagcuccugcagaaggaguacaucgaccggcagggcaagaccccgcuggggcucgucgaccuguucguguucuccaccagcuucuaccugaucuccaucuuccugcaccucgugaagaucccgacccaccgccacaucacgggcaagcccugccccaagccccaccggcugaaccacauggggaucugcagcugcggccuguacaagcacccggggguccccgugaaguggaagcgcugaggacuaguaauaaggaaacuguaugaaugucugugggcaggaagugaagagauccuucuguaaagguuuuuggaauuaugucugcugaauaauaaacuuuuuugaaauaauaaaucugguagaaaaaugagaucucaaaggcucuuuucagagccaccaaaaaaaaaaaaaaaaaaaaaaaaaaaaaaaaaaaaaaaaaaaaaaaaaaaaaaaaaaaaaaaaaaaaaaaaaaaaaaaaaaaaaaaaaaaaaaaaaaaaa

SEQ ID NO: 30800 - RNA, 1809 nt, Artificial Sequence
  mRNA product Design b-4 (hSL-A100) comprising derived and/or modified sequence from LASV(Lassa virus/H.sapiens-wt/NGA/2016/ISTH_0009;Clade II)__AVO03571__GPCmut6 (opt1)
aggagagucccgcagucggcguccagcggcucugcuuguucgugugugugucguugcaggccuuauucaagcuuaccaugggccagaucaucaccuucuuccaggaggugccccacgucaucgaggaggugaugaacaucgugcugaucgcccucagccugcuggccauccucaaggggaucuacaacgucgcgaccugcggccugcuggggcucguguccuuccugcugcucugcggccgcagcugcuccacgaccuacaaggggguguacgagcugcagacccuggagcucgacauggccagccugaacaugugcaugccgcuguccugcacgaagaacaacagccaccacuacaucauggucggcaacgagaccggccucgagcugacccugaccaacacguccaucaucaaccacaaguucugcaaccucagcgacgcccacaagaagaaccuguacgaccacgcccugauguccaucaucagcaccuuccaccucuccauccccaacuucaaccaguacgaggccaugagcugcgacuucaacgggggccggaucuccgugcaguacaaccugagccacuccuacgcgguggacgccgccaaccacugcgggaccaucgccaacggcguccugcagaccuucaugcgcauggcguggggcgggagcuacaucgcccucgacuccggcaaggggagcugggacugcaucaugacguccuaccaguaccugaucauccagaacaccaccugggaggaccacugccaguucagccggcccagccccaucggcuaccuggggcuccugucccagcgcacccgggacaucuacaucagccgccggcugcucggcacguucaccuggacccuguccgacagcgagggcaacgagacccccgggggcuacugccugacgcgcuggaugcucaucgaggccgagcugaagugcuucgggaacaccgccguggccaagugcaacgagaagcacgacgaggaguucugcgacaugcugcggcuguucgacuucugcaagcaggcgauccgccggcugaagacccccgcccagauguccauccagcugaucaacaaggccgugaacgcccucaucaacgaccagcugaucaugaagaaccaccuccgcgacaucaugggcaucccguacugcaacuacagcaaguacugguaccucaaccacaccgucacggggaagaccucccugccccggugcuggcuggugagcaacggcuccuaccucaacgagacccacuucagcgacgacaucgagcagcaggccgacaacaugaucaccgagcugcugcagaaggaguacaucgaccgccagggcaagacgccccucgggcugguggaccuguucgucuucuccaccagcuucuaccugaucuccaucuuccuccaccuggugaagaucccgacccaccggcacaucaccggcaagcccugccccaagccccaccgccugaaccacauggggaucugcagcugcggccucuacaaccacccgggggugcccgucaaguggaagcggugaggacuaguaauaaggaaacuguaugaaugucugugggcaggaagugaagagauccuucuguaaagguuuuuggaauuaugucugcugaauaauaaacuuuuuugaaauaauaaaucugguagaaaaaugagaucucaaaggcucuuuucagagccaccaaaaaaaaaaaaaaaaaaaaaaaaaaaaaaaaaaaaaaaaaaaaaaaaaaaaaaaaaaaaaaaaaaaaaaaaaaaaaaaaaaaaaaaaaaaaaaaaaaaaa

SEQ ID NO: 30801 - RNA, 1809 nt, Artificial Sequence
  mRNA product Design b-4 (hSL-A100) comprising derived and/or modified sequence from LASV(Lassa virus/H.sapiens-wt/NGA/2016/ISTH_0017;Clade II)__AVO03567__GPCmut6 (opt1)
aggagagucccgcagucggcguccagcggcucugcuuguucgugugugugucguugcaggccuuauucaagcuuaccaugggccagaucaucaccuucuuccaggaggugccccacgucaucgaggaggugaugaacaucgugcugaucgcccucagccugcuggccauccucaaggggaucuacaacgucgcgaccugcggccuguucgggcugguguccuuccuccugcugugcggccgcagcugcuccacgaccuacaaggggguguacgagcuccagacccuggagcuggacauggccagccucaacaugugcaugccgcuguccugcacgaagaacaacagccaccacuacaucauggucggcaacgagaccggccuggagcucacccugaccaacacguccaucaucaaccacaaguucugcaaccugagcgacgcccacaagaagaaccucuacgaccacgcccugauguccaucaucagcaccuuccaccuguccauccccaacuucaaccaguacgaggccaugagcugcgacuucaacgggggcaagaucuccgugcaguacaaccucagccacaccuacgcgaucgacgccgccaaccacugcgggaccaucgccaacggcgugcugcagacguucaugcggauggcguggggcggguccuacaucgcccuggacagcggcaagggguccugggacugcaucaugaccagcuaccaguaccucaucauccagaacaccaccugggaggaccacugccaguucucccgccccagccccaucggcuaccuggggcugcucagccagcggacgcgcgacaucuacaucucccggcgccugcugggcaccuucaccuggacccucagcgacuccgagggcaacgagacgcccgggggcuacugccugacccgguggaugcugaucgaggccgagcucaagugcuucgggaacaccgccgucgccaagugcaacgagaagcacgacgaggaguucugcgacaugcugcgccuguucgacuucugcaagcaggcgauccggcgccucaagacccccgcccagaugagcauccagcugaucaacaaggccgugaacgcccugaucaacgaccagcucaucaugaagaaccaccuccgggacaucaugggcauccccuacugcaacuacuccaaguacugguaccugaaccacacggugaccgggaagaccagccugccccgcugcuggcuggucuccaacggcagcuaccugaacgagacccacuucuccgacgacaucgagcagcaggccgacaacaugaucacggagcuccugcagaaggaguacauggaccggcagggcaagaccccgcuggggcucguggaccuguucguguucagcaccuccuucuaccugaucagcaucuuccugcaccucguccgcaucccgacccaccggcacgugaucggcaagcccugccccaagccccaccgccugaaccacauggggaucugcuccugcggccuguacaagcacccgggggugcccgucaaguggaagcggugaggacuaguaauaaggaaacuguaugaaugucugugggcaggaagugaagagauccuucuguaaagguuuuuggaauuaugucugcugaauaauaaacuuuuuugaaauaauaaaucugguagaaaaaugagaucucaaaggcucuuuucagagccaccaaaaaaaaaaaaaaaaaaaaaaaaaaaaaaaaaaaaaaaaaaaaaaaaaaaaaaaaaaaaaaaaaaaaaaaaaaaaaaaaaaaaaaaaaaaaaaaaaaaaa

SEQ ID NO: 30802 - RNA, 1809 nt, Artificial Sequence
  mRNA product Design b-4 (hSL-A100) comprising derived and/or modified sequence from LASV(Lassa virus/H.sapiens-wt/NGA/2018/ISTH_0959;Clade II)__AVV65099__GPCmut6 (opt1)
aggagagucccgcagucggcguccagcggcucugcuuguucgugugugugucguugcaggccuuauucaagcuuaccaugggccagaucaucaccuucuuccaggaggugccccacgucaucgaggaggugaugaacaucgugcugaucgcccucagccugcuggccauccucaaggggaucuacaacgucgugaccugcggccuguucgggcugguguccuuccuccugcugugcggccgcagcugcuccacgaccuacaagggggucuacgagcuccagacccuggagcuggacauggcgagccucaacaugugcaugccgcuguccugcacgaagaacaacagccaccacuacaucauggugggcaacgagaccggccuggagcucacccugaccaacacguccaucaucaaccacaaguucugcaaccugagcgacgcccacaagaagaaccucuacgaccacgcccugauguccaucaucagcaccuuccaccuguccauccccaacuucaaccaguacgaggccaugagcugcgacuucaacgggggcaagaucuccgugcaguacaaccucagccacgccuacgcgaucgacgccgccaaccacugcgggaccaucgccaacggcguccugcagaccuucaugcggauggcguggggcggguccuacaucgcccuggacagcggcaagggguccugggacugcaucaugacgagcuaccaguaccucaucauccagaacaccaccugggaggaccacugccaguucucccgccccagccccaucggcuaccuggggcugcucagccagcggacccgcgacaucuacaucucccggcgccugcugggcacguucaccuggacccucagcgacuccgagggcaacgagacccccgggggcuacugccugacgcgguggaugcugaucgaggccgagcucaagugcuucgggaacaccgccguggccaagugcaacgagaagcacgacgaggaguucugcgacaugcugcgccuguucgacuucugcaagcaggcgauccggcgccucaagacccccgcccagaugagcauccagcugaucaacaaggccgugaacgcccugaucaacgaccagcucaucaugaagaaccaccuccgggacaucaugggcaucccguacugcaacuacuccaaguacugguaccugaaccacaccgucacggggaagaccagccugccccgcugcuggcugguguccaacggcagcuaccugaacgagacccacuucuccgacgacaucgagcagcaggccgacaacaugaucaccgagcuccugcagaaggaguacaucgaccggcagggcaagacgccccuggggcucguggaccuguucgucuucagcaccuccuucuaccugaucagcaucuuccugcaccucgugaagaucccgacccaccgccacgugaucggcaagcccugccccaagccccaccggcugaaccacauggggaucugcuccugcggccuguacaagcacccggggguccccgugaaguggaagcgcugaggacuaguaauaaggaaacuguaugaaugucugugggcaggaagugaagagauccuucuguaaagguuuuuggaauuaugucugcugaauaauaaacuuuuuugaaauaauaaaucugguagaaaaaugagaucucaaaggcucuuuucagagccaccaaaaaaaaaaaaaaaaaaaaaaaaaaaaaaaaaaaaaaaaaaaaaaaaaaaaaaaaaaaaaaaaaaaaaaaaaaaaaaaaaaaaaaaaaaaaaaaaaaaaa

SEQ ID NO: 30803 - RNA, 1809 nt, Artificial Sequence
  mRNA product Design b-4 (hSL-A100) comprising derived and/or modified sequence from LASV(LASV003-NIG-2008;Clade II)__AIT17580__GPCmut6 (opt1)
aggagagucccgcagucggcguccagcggcucugcuuguucgugugugugucguugcaggccuuauucaagcuuaccaugggccagaucaucaccuucuuccaggaggugccccacgucaucgaggaggugaugaacaucgugcugaucgcccucagccugcuggccauccucaaggggaucuacaacgucgcgaccugcggccuguucgggcugguguccuuccuccugcugugcggccgcagcugcuccacgaccuacaaggggguguacgagcuccagacccuggagcuggacauggccagccucaacaugugcaugccgcuguccugcacgaagaacaacagccaccacuacaucauggucggcaacgagaccggccuggagcucacccugaccaacacguccaucaucaaccacaaguucugcaaccugagcgacgcccacaagaagaaccucuacgaccacgcccugauguccaucaucagcaccuuccaccuguccauccccaacuucaaccaguacgaggccaugagcugcgacuucaacgggggcaagaucuccgugcaguacaaccucagccacaccuacgcgguggacgccgccaaccacugcgggaccaucgccaacggcguccugcagacguucaugcggauggcguggggcggguccuacaucgcccuggacagcggcaagggguccugggacugcaucaugaccagcuaccaguaccucaucauccagaacaccaccugggaggaccacugccaguucucccgccccagccccaucggcuaccuggggcugcucagccagcggacgcgcgacaucuacaucucccggcgccugcugggcaccuucaccuggacccucagcgacuccgagagcaacgagacgccgggcggguacugccugacccgguggaugcugaucgaggccgagcucaagugcuucggcaacaccgccguggccaagugcaacgagaagcacgacgaggaguucugcgacaugcugcgccuguucgacuucugcaagcaggcgauccggcgccucaaggcccccgcccagauguccauccagcugaucaacaaggccgugaacgcccugaucaacgaccagcucaucaugaagaaccaccuccgggacaucauggggauccccuacugcaacuacagcaaguacugguaccugaaccacaccgucacgggccgcaccucccugccccggugcuggcuggugagcaacggguccuaccugaacgagacccacuucagcgacgacaucgagcagcaggcggacaacaugaucaccgagcuccugcagaaggaguacauggaccgccagggcaagacgccccugggccucguggaccuguucgucuucuccaccagcuucuaccugaucuccaucuuccugcaccucgugaagaucccgacccaccggcacgugaucgggaagcccugccccaagccccaccgccugaaccacaugggcaucugcagcugcgggcuguacaagcacccgggcguccccgugaaguggaagcggugaggacuaguaauaaggaaacuguaugaaugucugugggcaggaagugaagagauccuucuguaaagguuuuuggaauuaugucugcugaauaauaaacuuuuuugaaauaauaaaucugguagaaaaaugagaucucaaaggcucuuuucagagccaccaaaaaaaaaaaaaaaaaaaaaaaaaaaaaaaaaaaaaaaaaaaaaaaaaaaaaaaaaaaaaaaaaaaaaaaaaaaaaaaaaaaaaaaaaaaaaaaaaaaaa

SEQ ID NO: 30804 - RNA, 1809 nt, Artificial Sequence
  mRNA product Design b-4 (hSL-A100) comprising derived and/or modified sequence from LASV(LASV035-NIG-2009;Clade II)__AIT17588__GPCmut6 (opt1)
aggagagucccgcagucggcguccagcggcucugcuuguucgugugugugucguugcaggccuuauucaagcuuaccaugggccagaucaucaccuucuuccaggaggugccccacgucaucgaggaggugaugaacaucgugcugaucgcccucagccugcuggccauccucaaggggaucuacaacgucgcgaccugcggccuguucgggcugguguccuuccuccugcugugcggccgcagcugcuccacgaccuacaaggggguguacgagcuccagacccuggagcuggacauggccagccucaacaugugcaugccgcuguccugcacgaagaacaacagccaccacuacaucauggucggcaacgagaccggccuggagcucacccugaccaacacguccaucaucaaccacaaguucugcaaccugagcgacgcccacaagaagaaccucuacgaccacgcccugauguccaucaucagcaccuuccaccuguccauccccaacuucaaccaguacgaggccaugagcugcgacuucaacgggggcaagaucuccgugcaguacaaccucagccacgcguacgccguggacgccgccaaccacugcgggaccaucgcgaacggcguccugcagaccuucaugcggauggccuggggcggguccuacaucgcccuggacagcggcaagggguccugggacugcaucaugacgagcuaccaguaccucaucauccagaacaccaccugggaggaccacugccaguucucccgccccagccccaucggcuaccuggggcugcucagccagcggacccgcgacaucuacaucucccggcgccugcugggcacguucaccuggacccucagcgacuccgagggcaacgagacccccgggggcuacugccugacgcgguggaugcugaucgaggccgagcucaagugcuucgggaacaccgccguggcgaagugcaacgagaagcacgacgaggaguucugcgacaugcugcgccuguucgacuucugcaagcaggccauccggcgccucaaggcccccgcccagaugagcauccagcugaucaacaaggccgugaacgcgcugaucaacgaccagcucaucaugaagaaccaccuccgggacaucaugggcauccccuacugcaacuacuccaaguacugguaccugaaccacaccgucaccgggaagacgagccugccccgcugcuggcugguguccaacggcagcuaccugaacgagacccacuucuccgacgacaucgagcagcaggccgacaacaugaucaccgagcuccugcagaaggaguacaucgaccggcagggcaagaccccgcuggggcucguggaccuguucgucuucagcacguccuucuaccugaucagcaucuuccugcaccucgugaagaucccgacccaccgccacgugaucggcaagcccugccccaagccccaccggcugaaccacauggggaucugcuccugcggccuguacaagcacccggggguccccgugaaguggaagcgcugaggacuaguaauaaggaaacuguaugaaugucugugggcaggaagugaagagauccuucuguaaagguuuuuggaauuaugucugcugaauaauaaacuuuuuugaaauaauaaaucugguagaaaaaugagaucucaaaggcucuuuucagagccaccaaaaaaaaaaaaaaaaaaaaaaaaaaaaaaaaaaaaaaaaaaaaaaaaaaaaaaaaaaaaaaaaaaaaaaaaaaaaaaaaaaaaaaaaaaaaaaaaaaaaa

SEQ ID NO: 30805 - RNA, 1809 nt, Artificial Sequence
  mRNA product Design b-4 (hSL-A100) comprising derived and/or modified sequence from LASV(LASV1000-NIG-2009;Clade II)__AIT17782__GPCmut6 (opt1)
aggagagucccgcagucggcguccagcggcucugcuuguucgugugugugucguugcaggccuuauucaagcuuaccaugggccagaucaucaccuucuuccaggaggugccccacgucaucgaggaggugaugaacaucgugcugaucgcccucagccugcuggccauccucaaggggaucuacaacgucgcgaccugcggccuguucgggcugguguccuuccuccugcugugcggccgcagcugcuccacgaccuacaaggggguguacgagcuccagacccuggagcuggacauggccagccucaacaugugcaugccgcuguccugcacgaagaacaacagccaccacuacaucauggucggcaacgagaccggccuggagcucacccugaccaacacguccaucaucaaccacaaguucugcaaccugagcgacgcccacaagaagaaccucuacgaccacgcccugauguccaucaucagcaccuuccaccuguccauccccaacuucaaccaguacgaggccaugagcugcgacuucaacgggggcaagaucuccgugcaguacaaccucagccacaccuacgcgguggacgccgccaaccacugcgggaccaucgccaacggcguccugcagacguucaugcggauggcguggggcggguccuacaucgcccuggacagcggcaagggguccugggacugcaucaugaccagcuaccaguaccucaucauccagaacaccaccugggaggaccacugccaguucucccgccccagccccaucggcuaccuggggcugcucagccagcggacgcgcgacaucuacaucucccggcgccugcugggcaccuucaccuggacccucagcgacuccgagggcaacgagacgcccgggggcuacugccugacccgguggaugcugaucgaggccgagcucaagugcuucgggaacaccgccguggccaagugcaacgagaagcacgacgaggaguucugcgacaugcugcgccuguucgacuucugcaagcaggcgaucaagcggcucaagacccccgcccagaugagcauccagcugaucaacaaggccgugaacgcccugaucaacgaccagcucaucaugaagaaccaccuccgcgacaucaugggcauccccuacugcaacuacuccaaguacugguaccugaaccacacggucaccgggaagaccagccugccccggugcuggcugguguccaacggcagcuaccugaacgagacccacuucuccgacgacaucgagcagcaggccgacaacaugaucacggagcuccugcagaaggaguacaucgaccgccagggcaagaccccgcuggggcucguggaccuguucgucuucagcaccuccuucuaccugaucagcaucuuccugcaccucgugaagaucccgacccaccggcacguggucggcaagcccugccccaagccccaccgccugaaccacauggggaucugcuccugcggccuguacaagcacccgggggugcccgugaaguggaagcggugaggacuaguaauaaggaaacuguaugaaugucugugggcaggaagugaagagauccuucuguaaagguuuuuggaauuaugucugcugaauaauaaacuuuuuugaaauaauaaaucugguagaaaaaugagaucucaaaggcucuuuucagagccaccaaaaaaaaaaaaaaaaaaaaaaaaaaaaaaaaaaaaaaaaaaaaaaaaaaaaaaaaaaaaaaaaaaaaaaaaaaaaaaaaaaaaaaaaaaaaaaaaaaaaa

SEQ ID NO: 30806 - RNA, 1809 nt, Artificial Sequence
  mRNA product Design b-4 (hSL-A100) comprising derived and/or modified sequence from LASV(LASV221-NIG-2010;Clade II)__AIT17624__GPCmut6 (opt1)
aggagagucccgcagucggcguccagcggcucugcuuguucgugugugugucguugcaggccuuauucaagcuuaccaugggccagaucaucaccuucuuccaggaggugccccacgucaucgaggaggugaugaacaucgugcugaucgcccucagccugcuggccauccucaaggggaucuacaacgucgcgaccugcggccuguucgggcugguguccuuccuccugcugugcggccgcagcugcuccacgaccuacaaggggguguacgagcuccagacccuggagcuggacauggccagccucaacaugugcaugccgcuguccugcacgaagaacaacagccaccacuacaucauggucggcaacgagaccggccuggagcucacccugaccaacacguccaucaucaaccacaaguucugcaaccugagcgacgcccacaagaagaaccucuacgaccacgcccugauguccaucaucagcaccuuccaccuguccauccccaacuucaaccaguacgaggccaugagcugcgacuucaacgggggcaagaucuccgugcaguacaaccucagccacaccuacgcgaucgacgccgccaaccacugcgggaccaucgccaacggcgugcugcagacguucaugcggauggcguggggcggguccuacaucgcccuggacagcggcaagggguccugggacugcaucaugaccagcuaccaguaccucaucauccagaacaccaccugggaggaccacugccaguucucccgccccagccccaucggcuaccuggggcugcucagccagcggacgcgcgacaucuacaucucccggcgccugcugggcaccuucaccuggacccucagcgacuccgagggcaacgagacgcccgggggcuacugccugacccgguggaugcugaucgaggccgagcucaagugcuucgggaacaccgccgucgccaagugcaacgagaagcacgacgaggaguucugcgacaugcugcgccuguucgacuucugcaagcaggcgauccggcgccucaagacccccgcccagaugagcauccagcugaucaacaaggccgugaacgcccugaucaacgaccagcucaucaugaagaaccaccuccgggacaucaugggcauccccuacugcaacuacuccaaguacugguaccugaaccacacggugaccgggaagaccagccugccccgcugcuggcuggucuccaacggcagcuaccugaacgagacccacuucuccgacgacaucgagcagcaggccgacaacaugaucacggagaugcuccagaaggaguacauggaccggcagggcaagaccccgcuggggcugguggaccucuucguguucagcaccuccuucuaccugaucagcaucuuccugcaccuggucaagaucccgacccaccgccacgugaucggcaagcccugccccaagccccaccggcucaaccacauggggaucugcuccugcggccuguacaagcacccgggggugcccgucaaguggaagcgcugaggacuaguaauaaggaaacuguaugaaugucugugggcaggaagugaagagauccuucuguaaagguuuuuggaauuaugucugcugaauaauaaacuuuuuugaaauaauaaaucugguagaaaaaugagaucucaaaggcucuuuucagagccaccaaaaaaaaaaaaaaaaaaaaaaaaaaaaaaaaaaaaaaaaaaaaaaaaaaaaaaaaaaaaaaaaaaaaaaaaaaaaaaaaaaaaaaaaaaaaaaaaaaaaa

SEQ ID NO: 30807 - RNA, 1809 nt, Artificial Sequence
  mRNA product Design b-4 (hSL-A100) comprising derived and/or modified sequence from LASV(LASV237-NIG-2010;Clade II)__AIT17638__GPCmut6 (opt1)
aggagagucccgcagucggcguccagcggcucugcuuguucgugugugugucguugcaggccuuauucaagcuuaccaugggccagaucaucaccuucuuccaggaggugccccacgucaucgaggaggugaugaacaucgugcugaucgcccucagccugcuggccauccucaaggggaucuacaacgucgcgaccugcggccuguucgggcugguguccuuccuccugcugugcggccgcagcugcuccacgaccuacaaggggguguacgagcuccagacccuggagcuggacauggccagccucaacaugugcaugccgcuguccugcacgaagaacaacagccaccacuacaucauggucggcaacgagaccggccuggagcucacccugaccaacacguccaucaucaaccacaaguucugcaaccugagcgacgcccacaagaaggaccucuacgaccacgcccugauguccaucaucagcaccuuccaccuguccauccccaacuucaaccaguacgaggccaugagcugcgacuucaacgggggcaagaucuccgugcaguacaaccucagccacaccuacgcgguggacgccgccaaccacugcgggaccaucgccaacggcguccugcagacguucaugcggauggcguggggcggguccuacaucgcccuggacagcggcaagggguccugggacugcaucaugaccagcuaccaguaccucaucauccagaacaccaccugggaggaccacugccaguucucccgccccagccccaucggcuaccuggggcugcucagccagcggacgcgcgacaucuacaucucccggcgccugcugggcaccuucaccuggacccucagcgacuccgagggcaacgagacgcccgggggcuacugccugacccgguggaugcugaucgaggccgagcucaagugcuucgggaacaccgccguggccaagugcaacgagaagcacgacgaggaguucugcgacaugcugcgccuguucgacuucugcaagcaggcgauccggcgccucaagacccccgcccagaugagcauccagcugaucaacaaggccgugaacgcccugaucaacgaccagcucaucaugaagaaccaccuccgggacaucaugggcauccccuacugcaacuacuccaaguacugguaccugaaccacacggucaccgggaagaccagccugccccgcugcuggcugguguccaacggcagcuaccugaacgagacccacuucuccgacgacaucgagcagcaggccgacaacaugaucacggagcuccugcagaaggaguacauggaccggcagggcaagaccccgcuggggcucguggaccuguucgucuucagcaccuccuucuaccugaucagcaucuuccugcaccucaucaagaucccgacccaccgccacaucacgggcaagcccugccccaagccccaccggcugaaccacauggggaucugcuccugcggccuguacaagcacccgggggugcccgugaaguggaagcgcugaggacuaguaauaaggaaacuguaugaaugucugugggcaggaagugaagagauccuucuguaaagguuuuuggaauuaugucugcugaauaauaaacuuuuuugaaauaauaaaucugguagaaaaaugagaucucaaaggcucuuuucagagccaccaaaaaaaaaaaaaaaaaaaaaaaaaaaaaaaaaaaaaaaaaaaaaaaaaaaaaaaaaaaaaaaaaaaaaaaaaaaaaaaaaaaaaaaaaaaaaaaaaaaaa

SEQ ID NO: 30808 - RNA, 1809 nt, Artificial Sequence
  mRNA product Design b-4 (hSL-A100) comprising derived and/or modified sequence from LASV(LASV253-NIG-2011;Clade II)__AIT17670__GPCmut6 (opt1)
aggagagucccgcagucggcguccagcggcucugcuuguucgugugugugucguugcaggccuuauucaagcuuaccaugggccagaucaucaccuucuuccaggaggugccccacgucaucgaggaggugaugaacaucgugcugaucgcccucagccugcuggccauccucaaggggaucuacaacgucgcgaccugcggccuguucgggcugguguccuuccuccugcugugcggccgcagcugcuccacgaccuacaaggggguguacgagcuccagacccuggagcuggacauggccagccucaacaugugcaugccgcuguccugcacgaagaacaacagccaccacuacaucauggucggcaacgagaccggccuggagcucacccugaccaacacguccaucaucaaccacaaguucugcaaccugagcgacgcccacaagaagaaccucuacgaccacgcccugauguccaucaucagcaccuuccaccuguccauccccaacuucaaccaguacgaggccaugagcugcgacuucaacgggggcaagaucuccgugcaguacaaccucagccacaccuacgcgguggacgccgccaaccacugcgggaccaucgccaacggcguccugcagacguucaugcggauggcguggggcggguccuacaucgcccuggacagcggcaagggguccugggacugcaucaugaccagcuaccaguaccucaucauccagaacaccaccugggaggaccacugccaguucucccgccccagccccaucggcuaccuggggcugcucagccagcggacgcgcgacaucuacaucucccggcgccugcugggcaccuucaccuggacccucagcgacuccgagggcaacgagacgcccgggggcuacugccugacccgguggaugcugaucgaggccgagcucaagugcuucgggaacaccgccguggccaagugcaacgagaagcacgacgaggaguucugcgacaugcugcgccuguucgacuucugcaagcaggcgauccggcgccucaaggcccccgcccagaugagcauccagcugaucaacaaggccgugaacgcccugaucaacgaccagcucaucaugaagaaccaccuccgggacaucaugggcaucccguacugcaacuacuccaaguacugguaccugaaccacaccgucacggggcgcaccagccugccccggugcuggcugguguccaacggcagcuaccugaacgagacccacuucuccgacgacaucgagcagcaggcggacaacaugaucaccgagcuccugcagaaggaguacaucgaccgccagggcaagacgccccuggggcucguggaccuguucgucuucagcaccuccuucuaccugaucagcaucuuccugcaccucgugaagaucccgacccaccggcacaucaucggcaagcccugccccaagccccaccgccugaaccacauggggaucugcuccugcggccuguacaagcacccgggggugcccgucaaguggaagcggugaggacuaguaauaaggaaacuguaugaaugucugugggcaggaagugaagagauccuucuguaaagguuuuuggaauuaugucugcugaauaauaaacuuuuuugaaauaauaaaucugguagaaaaaugagaucucaaaggcucuuuucagagccaccaaaaaaaaaaaaaaaaaaaaaaaaaaaaaaaaaaaaaaaaaaaaaaaaaaaaaaaaaaaaaaaaaaaaaaaaaaaaaaaaaaaaaaaaaaaaaaaaaaaaa

SEQ ID NO: 30809 - RNA, 1809 nt, Artificial Sequence
  mRNA product Design b-4 (hSL-A100) comprising derived and/or modified sequence from LASV(LASV254-NIG-2011;Clade II)__AIT17674__GPCmut6 (opt1)
aggagagucccgcagucggcguccagcggcucugcuuguucgugugugugucguugcaggccuuauucaagcuuaccaugggccagaucaucaccuucuuccaggaggugccccacgucaucgaggaggugaugaacaucgugcugaucgcccucagccugcuggccauccucaaggggaucuacaacgucgcgaccugcggccuguucgggcugguguccuuccuccugcugugcggccgcagcugcuccacgaccuacaaggggguguacgagcuccagacccuggagcuggacaugaccaaccucaacaugugcaugccgcugagcugcaccaagaacaacucccaccacuacaucauggucggcaacgagaccggccuggagcucacccugacgaacaccagcaucaucaaccacaaguucugcaaccuguccgacgcccacaagaagaaccucuacaaccacgcccugaugagcaucaucuccaccuuccaccugagcauccccaacuucaaccaguacgaggccauguccugcgacuucaacgggggcaagaucagcgugcaguacaaccucucccacagcuacgccguggacgcggccaaccacugcgggaccaucgccaacggcguccugcagacguucaugcggauggccuggggcggguccuacaucgcgcuggacagcggcaaggggaacugggacugcaucaugaccuccuaccaguaccucaucauccagaacaccaccugggaggaccacugccaguucagccgccccucccccaucggcuaccuggggcugcucagccagcggacgcgcgacaucuacaucagccggcgccugcugggcaccuucaccuggacccucuccgacagcgagggcaacgagacgcccgggggcuacugccugacccgguggaugcugaucgaggccgagcucaagugcuucgggaacaccgccguggccaagugcaacgagaagcacgacgaggaguucugcgacaugcugcgccuguucgacuucugcaagcaggccauccggcgccucaagacccccgcgcaggccaacauccagcugaucaacaaggccgugaacgcccugaucaacgaccagcucaucaugaagaaccaccuccgggacaucaugggcauccccuacugcaacuacuccaaguacugguaccugaaccacacggucaccgggaagaccagccugccccgcugcuggcugguguccaacggcagcuaccugaacgagacccacuucuccgacgacaucgagcagcaggccgacaacaugaucacggagcuccugcagaaggaguacauggaccggcagggcaagaccccgcuggggcucguggaccuguucgucuucagcaccuccuucuaccugaucagcaucuuccugcaccucgugaagaucccgacccaccgccacgugaucggcaagcccugccccaagccccaccggcugaaccacauggggaucugcuccugcggccuguacaagcacccggggguccccgugaaguggaagcgcugaggacuaguaauaaggaaacuguaugaaugucugugggcaggaagugaagagauccuucuguaaagguuuuuggaauuaugucugcugaauaauaaacuuuuuugaaauaauaaaucugguagaaaaaugagaucucaaaggcucuuuucagagccaccaaaaaaaaaaaaaaaaaaaaaaaaaaaaaaaaaaaaaaaaaaaaaaaaaaaaaaaaaaaaaaaaaaaaaaaaaaaaaaaaaaaaaaaaaaaaaaaaaaaaa

SEQ ID NO: 30810 - RNA, 1809 nt, Artificial Sequence
  mRNA product Design b-4 (hSL-A100) comprising derived and/or modified sequence from LASV(Nig08-A19;Clade III)__ADU56618__GPCmut6 (opt1)
aggagagucccgcagucggcguccagcggcucugcuuguucgugugugugucguugcaggccuuauucaagcuuaccaugggccagaucgugaccuucuuccaggaggucccccacgugaucgaggaggugaugaacaucguccugaucgcccucagcauccuggccauccugaaggggcucuacaacaucgcgaccugcggccugaucgggcuggugacguuccuccugcuguccggccgcagcugcuccaugaccuacaaggggguguacgagcuccagacccuggagcugaacaugaacacccucaacaugugcaugccgcugagcugcaccaagaacaacucccaccacuacaucauggucggcaacgagaccggccuggagcucacccugacgaacaccagccugcuccaccacaaguucugcaaccuguccgacgcccacaagaagaaccuguacgaccacacccucaugagcaucaucuccaccuuccaccugagcauccccaacuucaaccaguacgaggccauguccugcgacuucaacgggggcaagaucacggugcaguacaaccugagccacuccuacgccaucgacgccgcgaaccacugcgggaccguggccaacggcguccuccagaccuucaugcggauggccuggggcgggagcuacaucgcccuggacuccggccgcgggaagugggacugcaucaugaccagcuaccaguaccugaucauccagaacacgaccugggaggaccacugccaguucucccggcccagccccaucggcuaccucgggcugcugucccagcgcacccgggacaucuacaucagccgccggcuccugggcaccuucacguggacccugagcgacuccgagggcaacgagacccccgggggcuacugccucacccgcuggaugcugaucgaggcggagcugaagugcuucgggaacacggccguggccaagugcaacgagaagcacgacgaggaguucugcgacaugcuccggcuguucgacuucugcaagcaggccauccgccggcugaaggcccccgcgcagaugagcauccagcucaucaacaaggccgugaacgcccugaucaacgaccagcugaucaugaagaaccaccuccgcgacaucaugggcauccccuacugcaacuacuccaaguacugguaccugaaccacaccagcaccgggcggaccucccugccccgcugcuggcucgucagcaacggcuccuaccugaacgagacgcacuucagcgacgacaucgagcagcaggccgacaacaugaucaccgagaugcugcagaaggaguaccucgaccggcagggcaagaccccgcuggggcugguggaccuguucguguucuccaccagcuucuaccucaucuccaucuuccugcaccuggucaagaucccgacgcaccgccacaucgugggcaagcccugccccaagccccaccggcucaaccacauggggaucugcagcugcggccuguacaagcagccgggggugcccguccgcuggaagcggugaggacuaguaauaaggaaacuguaugaaugucugugggcaggaagugaagagauccuucuguaaagguuuuuggaauuaugucugcugaauaauaaacuuuuuugaaauaauaaaucugguagaaaaaugagaucucaaaggcucuuuucagagccaccaaaaaaaaaaaaaaaaaaaaaaaaaaaaaaaaaaaaaaaaaaaaaaaaaaaaaaaaaaaaaaaaaaaaaaaaaaaaaaaaaaaaaaaaaaaaaaaaaaaaa

SEQ ID NO: 30811 - RNA, 1812 nt, Artificial Sequence
  mRNA product Design b-4 (hSL-A100) comprising derived and/or modified sequence from LASV(G1180-SLE-2010;Clade IV)__AIT17168__GPCmut6 (opt1)
aggagagucccgcagucggcguccagcggcucugcuuguucgugugugugucguugcaggccuuauucaagcuuaccaugggccagaucgugaccuucuuccaggaggucccccacgugaucgaggaggugaugaacaucguccugaucgcccucagcauccuggccgugcugaaggggcucuacaacuucgcgaccugcggccugguggggcugcucaccuuccugcugcucugcggccgcuccugcaccgccagccgguacaagggggucuacgagcugcagacccuggagcucaacauggagacccugaacaugugcaugccgcuguccugcaccaagaacaacagccaccacuacaucauggugggcaacgagaccggccucgagcugacccugacgaacaccuccaucaucaaccacaaguucugcaaccucagcgacgcccacaagaagaaccuguacgaccacgcccugauguccaucaucagcaccuuccaccucuccauccccaacuucaaccaguacgaggccaugagcugcgacuucaacgggggcaagaucuccgugcaguacaaccugagccacuccuacgcgggggacgccgccaaccacugcggcaccgucgccaacggggugcugcagacguucaugcgcauggcguggggcggcagcuacaucgcccucgacuccgggcacggcagcugggacugcaucaugaccuccuaccaguaccugaucauccagaacaccaccugggaggaccacugccaguucagccggcccucccccaucggguaccugggccuccugagccagcgcacgcgggacaucuacaucagccgccggcugcucggcaccuucaccuggacccuguccgacagcgaggggaaggacacgccgggcggguacugccugacccgcuggaugcucaucgaggccgagcugaagugcuucggcaacaccgccguggccaagugcaacgagaagcacgacgaggaguucugcgacaugcugcggcuguucgacuucugcaagcaggcgauccagcgccugaaggcccccgcccagauguccauccagcugaucaacaaggccgucaacgcccucaucaacgaccagcugaucaugaagaaccaccuccgggacaucauggggauccccuacugcaacuacagcaaguacugguaccucaaccacaccacgaccggcaagaccucccugcccaagugcuggcuggugagcaacggcuccuaccucaacgagacccacuucagcgacgacaucgagcagcaggcggacaacaugaucacggagaugcugcagaaggaguacauggagcgccaggggaagacgccccugggccucguggaccuguucgucuucuccaccagcuucuaccugaucuccaucuuccugcaccucgugaagaucccgacccaccggcacaucgugggcaagagcugccccaagccccaccgccugaaccacauggggaucugcuccugcgggcuguacaagcagcccggcgucccggugaaguggaagcggugaggacuaguaauaaggaaacuguaugaaugucugugggcaggaagugaagagauccuucuguaaagguuuuuggaauuaugucugcugaauaauaaacuuuuuugaaauaauaaaucugguagaaaaaugagaucucaaaggcucuuuucagagccaccaaaaaaaaaaaaaaaaaaaaaaaaaaaaaaaaaaaaaaaaaaaaaaaaaaaaaaaaaaaaaaaaaaaaaaaaaaaaaaaaaaaaaaaaaaaaaaaaaaaaa

SEQ ID NO: 30812 - RNA, 1812 nt, Artificial Sequence
  mRNA product Design b-4 (hSL-A100) comprising derived and/or modified sequence from LASV(G1442-SLE-2011;Clade IV)__AIT17180__GPCmut6 (opt1)
aggagagucccgcagucggcguccagcggcucugcuuguucgugugugugucguugcaggccuuauucaagcuuaccaugggccagaucgugaccuucuuccaggaggucccccacgugaucgaggaggugaugaacaucguccugaucgcccucagcauccuggccgugcugaaggggcucuacaacguggcgaccugcggccugaucgggcuggucacguuccuccugcugugcggccgcuccugcaccaccacccucuacaaggggguguacgagcugcagacgcuggagcucaacauggagacccugaacaugugcaugccgcugagcugcaccaagaacaacucccaccacuacauccgggugggcaacgagacgggccucgagcugacccugaccaacaccagcaucaucaaccacaaguucugcaaccucuccgacgcccacaagaagaaccuguacgaccacgcccugaugagcaucaucuccacguuccaccucagcauccccaacuucaaccaguacgaggccauguccugcgacuucaacgggggcaagaucagcguccaguacaaccugucccacagcuacgccggggacgcggccaaccacugcggcaccguggccaacggggugcugcagaccuucaugcgcauggccuggggcggcuccuacaucgcgcucgacagcgggcggggcaacugggacugcaucaugaccuccuaccaguaccugaucauccagaacacgaccugggacgaccacugccaguucagccgccccucccccaucggguaccugggccuccugagccagcggacccgcgacgucuacaucucccggcgccugcucggcaccuucacguggacccugagcgacagcgaggggaaggacaccccgggcggguacugccugacccgguggaugcucaucgaggccgagcugaagugcuucggcaacacggccguggccaagugcaacgagaagcacgacgaggaguucugcgacaugcugcgccucuucgacuucugcaagcaggccauccagcggcugaaggcgcccgcccagauguccauccagcugaucaacaaggccgugaacgcccucaucaacgaccagcugaucaugaagaaccaccuccgcgacaucauggggauccccuacugcaacuacagcaaguacugguaccugaacaacaccgccaccggcaagaccucccugcccaagugcuggcugaucagcaacggcuccuaccucaacgagacgcacuucagcgacgacaucgagcaggaggcggacaacaugaucaccgagaugcugcagaaggaguacauggagcggcaggggaagacgccccugggccucgucgaccuguucguguucuccaccagcuucuaccugaucuccaucuuccugcaccucgugaagaucccgacccaccgccacaucgucggcaagagcugccccaagccccaccggcugaaccacauggggaucugcuccugcgggcuguacaagcagcccggcgugccggugcgcuggaagcggugaggacuaguaauaaggaaacuguaugaaugucugugggcaggaagugaagagauccuucuguaaagguuuuuggaauuaugucugcugaauaauaaacuuuuuugaaauaauaaaucugguagaaaaaugagaucucaaaggcucuuuucagagccaccaaaaaaaaaaaaaaaaaaaaaaaaaaaaaaaaaaaaaaaaaaaaaaaaaaaaaaaaaaaaaaaaaaaaaaaaaaaaaaaaaaaaaaaaaaaaaaaaaaaaa

SEQ ID NO: 30813 - RNA, 1812 nt, Artificial Sequence
  mRNA product Design b-4 (hSL-A100) comprising derived and/or modified sequence from LASV(G3010-SLE-2013;Clade IV)__AIT17344__GPCmut6 (opt1)
aggagagucccgcagucggcguccagcggcucugcuuguucgugugugugucguugcaggccuuauucaagcuuaccaugggccagaucgugaccuucuuccaggaggucccccacgugaucgaggaggugaugaacaucguccugaucgcccucagcauccuggccgugcugaaggggcucuacaacuucgcgaccugcggccugguggggcuggucacguuccuccugcugugcggccgcuccugcaccaccagccucuacaaggggguguacgagcugcagacccuggagcucaacauggagacgcugaacaugugcaugccgcuguccugcaccaagaacaacagccaccacuacaucauggugggcaacgagaccggccucgagcugacgcugaccaacaccuccaucaucaaccacaaguucugcaaccucagcgacgcccacaagaagaaccuguacaaccacgcccugauguccaucaucagcaccuuccaccucuccauccccaacuucaaccaguacgaggccaugagcugcgacuucaacgggggcaagaucuccguccaguacaaccugagccacuccuacgccggggacgcggccagccacugcggcacgguggccaacggggugcugcagaccuucaugcggauggccuggggcggcuccuacaucgcgcucgacagcggguacggcaagugggacugcaucaugaccuccuaccaguaccugaucauccagaacaccacgugggaggaccacugccaguucagccgccccucccccaucggguaccugggccuccugagccagcggacccgcgacaucuacaucagccggcgccugcucggcaccuucaccuggacgcuguccgacagcgaggggaaggacaccccgggcggguacugccugacccgguggaugcucaucgaggccgagcugaagugcuucggcaacaccgccgucgccaagugcaacgagaagcacgacgaggaguucugcgacaugcugcgccucuucgacuucugcaagcaggccauccagcggcugaagacgcccgcgcagauguccauccagcugaucaacaaggccgugaacgcccucaucaacgaccagcugaucaugaagaaccaccuccgcgacaucauggggauccccuacugcaacuacagcaaguacugguaccugaaccacaccaccaccggcaagacgucccugcccaagugcuggcuggugagcaacggcuccuaccucaacgagacccacuucagcgacgacaucgagcagcaggccgacaacaugaucaccgagaugcugcagaaggaguacauggagcggcaggggaagacgccccugggccucgucgaccuguucguguucuccaccagcuucuaccugaucuccaucuuccugcaccucgugaagaucccgacccaccgccacaucgucggcaagagcugccccaagccccaccggcugaaccacauggggaucugcuccugcgggcuguacaagcagcccggcgugccggugcgcuggaagcggugaggacuaguaauaaggaaacuguaugaaugucugugggcaggaagugaagagauccuucuguaaagguuuuuggaauuaugucugcugaauaauaaacuuuuuugaaauaauaaaucugguagaaaaaugagaucucaaaggcucuuuucagagccaccaaaaaaaaaaaaaaaaaaaaaaaaaaaaaaaaaaaaaaaaaaaaaaaaaaaaaaaaaaaaaaaaaaaaaaaaaaaaaaaaaaaaaaaaaaaaaaaaaaaaa

SEQ ID NO: 30814 - RNA, 1812 nt, Artificial Sequence
  mRNA product Design b-4 (hSL-A100) comprising derived and/or modified sequence from LASV(G502-SLE-2009;Clade IV)__AIT17126__GPCmut6 (opt1)
aggagagucccgcagucggcguccagcggcucugcuuguucgugugugugucguugcaggccuuauucaagcuuaccaugggccagaucgugaccuucuuccaggaggucccccacgugaucgaggaggugaugaacaucguccugaucgcccucagcauccuggccgugcugaaggggcucuacaacuucgcgaccugcggccugguggggcugcucacguuccugcugcucugcggccgcuccugcaccaccgggcuguacaagggcgucuacgagcugcagacccucgagcugaacauggagacgcugaacaugugcaugccgcucagcugcaccaagaacaacucccaccacuacaucauggugggcaacgagaccgggcuggagcugacgcucaccaacaccagcaucaucaaccacaaguucugcaaccuguccgacgcccacaagaagaaccuguacgaccacgcccucaugagcaucaucuccaccuuccaccugagcauccccaacuucaaccaguacgaggccauguccugcgacuucaacggcgggaagaucagcgugcaguacaaccugucccacagcuacgccggcgacgcggccgaccacugcgggacggucgccaacggcgugcuccagaccuucaugcggauggccuggggcggguccuacaucgcgcuggacagcggccgcgggcggugggacugcaucaugaccuccuaccaguaccugaucauccagaacaccacgugggaggaccacugccaguucagccgccccucccccaucggcuaccucggccugcugagccagcggacccgcgacaucuacaucucccggcgccuccuggggaccuucaccuggacgcugagcgacagcgagggcaaggacacccccgggggcuacugccucacccgguggaugcugaucgaggccgagcugaagugcuucgggaacaccgccguggccaagugcaacgagaagcacgacgaggaguucugcgacaugcuccgccuguucgacuucugcaagcaggccauccagcggcugaaggcgcccgcccagauguccauccagcucaucaacaaggccgucaacgcccugaucaacgaccagcuggugaugaagaaccaccuccgcgacaucaugggcauccccuacugcaacuacagccgguacugguaccugaaccacacgaccaccggccgcaccucccugcccaagugcuggcucgugagcaacggguccuaccugaacgagacgcacuucagcgacgacaucgagcagcaggccgacaacaugaucaccgagaugcugcagaaggaguacauggagcggcagggcaagaccccgcucgggcuggucgaccuguucguguucuccaccagcuucuaccugaucuccaucuuccuccaccuggugaagaucccgacgcaccgccacaucgucggcaagagcugccccaagccccaccggcugaaccacauggggaucugcuccugcggccucuacaagcagcccggcgugccggugaaguggaagcgcugaggacuaguaauaaggaaacuguaugaaugucugugggcaggaagugaagagauccuucuguaaagguuuuuggaauuaugucugcugaauaauaaacuuuuuugaaauaauaaaucugguagaaaaaugagaucucaaaggcucuuuucagagccaccaaaaaaaaaaaaaaaaaaaaaaaaaaaaaaaaaaaaaaaaaaaaaaaaaaaaaaaaaaaaaaaaaaaaaaaaaaaaaaaaaaaaaaaaaaaaaaaaaaaaa

SEQ ID NO: 30815 - RNA, 1812 nt, Artificial Sequence
  mRNA product Design b-4 (hSL-A100) comprising derived and/or modified sequence from LASV(G733-SLE-2010;Clade IV)__AIT17154__GPCmut6 (opt1)
aggagagucccgcagucggcguccagcggcucugcuuguucgugugugugucguugcaggccuuauucaagcuuaccaugggccagaucgugaccuucuuccaggaggucccccacgugaucgaggaggugaugaacaucguccugaucgcccucagcauccuggccgugcugaaggggcucuacaacuucgcgaccugcggcaucguggggcuggucuccuuccugcuccugugcggccgcagcugcacgaccucccuguacaaggggguguacgagcuccagacccuggagcugaacauggagacccucaacaugugcaugccgcugagcugcaccaagaacaacucccaccacuacaucauggugggcaacgagaccggccuggagcucacccugacgaacaccagcaucaucaaccacaaguucugcaaccuguccgacgcccacaagaagaaccucuacgaccacgcccugaugagcaucaucuccaccuuccaccugagcauccccaacuucaaccaguacgaggccauguccugcgacuucaacgggggcaagaucagcguccaguacaaccucucccacagcuacgccggggacgcggccaaccacugcggcaccaucgccaacggggugcugcagacguucaugcggauggccuggggcggcuccuacaucgcgcuggacagcgggcgcgaccggugggacugcaucaugaccuccuaccaguaccucaucauccagaacaccaccugggaggaccacugccaguucagccgccccucccccaucggcuaccuggggcugcucagccagcggacgcgcgacaucuacaucagccggcgccugcugggcaccuucaccuggacccucuccgacagcgagggcaaggacacgcccgggggcuacugccugacccgguggaugcugaucgaggccgagcucaagugcuucgggaacaccgccguggccaagugcaacgagaagcacgacgaggaguucugcgacaugcugcgccuguucgacuucugcaagcaggccauccagcggcucaaggcgcccgcccagauguccauccagcugaucaacaaggccgucaacgcccugaucaacgaccagcucaucaugaagaaccaccuccgcgacaucaugggcauccccuacugcaacuacagcaaguacugguaccugaaccacaccacgaccgggaagaccucccugcccaagugcuggcuggugagcaacggcuccuaccugaacgagacccacuucagcgacgacaucgagcagcaggccgacaacaugaucacggagaugcuccagaaggaguacauggagcggcagggcaagaccccgcuggggcugguggaccucuucgucuucuccaccagcuucuaccugaucuccaucuuccugcaccuggugaagaucccgacccaccgccacguggucggcaagagcugccccaagccccaccggcucaaccacauggggaucugcuccugcggccuguacgggcagcccggcgugccggugaaguggaagcgcugaggacuaguaauaaggaaacuguaugaaugucugugggcaggaagugaagagauccuucuguaaagguuuuuggaauuaugucugcugaauaauaaacuuuuuugaaauaauaaaucugguagaaaaaugagaucucaaaggcucuuuucagagccaccaaaaaaaaaaaaaaaaaaaaaaaaaaaaaaaaaaaaaaaaaaaaaaaaaaaaaaaaaaaaaaaaaaaaaaaaaaaaaaaaaaaaaaaaaaaaaaaaaaaaa

SEQ ID NO: 30816 - RNA, 1812 nt, Artificial Sequence
  mRNA product Design b-4 (hSL-A100) comprising derived and/or modified sequence from MOPV/LASV reassortant(IGS-1;Clade IV)__AFY05576__GPCmut6 (opt1)
aggagagucccgcagucggcguccagcggcucugcuuguucgugugugugucguugcaggccuuauucaagcuuaccaugggccagaucgugaccuucuuccaggaggucccccacgugaucgaggaggugaugaacaucguccugaucgcccucagcgugcuggccgugcugaaggggcucuacaacuucgcgaccugcggccuggucgggcuggugacguuccuccugcugugcggccgcuccugcaccaccagccucuacaaggggguguacgagcugcagacccuggagcucaacauggagacgcugaacaugugcaugccgcuguccugcaccaagaacaacagccaccacuacaucauggucggcaacgagaccggccucgagcugacgcugaccaacaccuccaucaucaaccacaaguucugcaaccucagcgacgcccacaagaagaaccuguacgaccacgcccugauguccaucaucagcaccuuccaccucuccauccccaacuucaaccaguacgaggccaugagcugcgacuucaacgggggcaagaucuccgugcaguacaaccugagccacuccuacgccggggacgcggccaaccacugcggcacgguggccaacgggguccugcagaccuucaugcggauggccuggggcggcagcuacaucgcgcucgacuccgggcgcggcaacugggacugcaucaugaccagcuaccaguaccugaucauccagaacaccacgugggaggaccacugccaguucucccggcccagccccaucggguaccugggccuccugucccagcgcacccgggacaucuacaucagccgccggcugcucggcaccuucaccuggacgcugagcgacuccgagggggaggacaccccgggcggguacugccugacccgcuggaugcucaucgaggccgagcugaagugcuucggcaacaccgccguggccaagugcaacgagaagcacgacgaggaguucugcgacaugcugcggcuguucgacuucugcaagcaggccauccagcgccugaaggcgcccgcccagaugagcauccagcugaucaacaaggccgugaacgcccucaucaacgaccagcugaucaugaagaaccaccuccgggacaucauggggauccccuacugcaacuacuccaaguacugguaccucaaccacacgaccaccggccgcaccagccugcccaagugcuggcuggucuccaacggcagcuaccucaacgagacgcacuucuccgacgacaucgagcagcaggccgacaacaugaucaccgagaugcugcagaaggaguacauggagcggcaggggaagacgccccugggccucguggaccuguucguguucagcaccuccuucuaccugaucagcaucuuccugcaccucgucaagaucccgacccaccgccacaucguggggaaguccugccccaagccccaccggcugaaccacaugggcaucugcagcugcgggcuguacaagcagcccggcgugccggucaaguggaagcgcugaggacuaguaauaaggaaacuguaugaaugucugugggcaggaagugaagagauccuucuguaaagguuuuuggaauuaugucugcugaauaauaaacuuuuuugaaauaauaaaucugguagaaaaaugagaucucaaaggcucuuuucagagccaccaaaaaaaaaaaaaaaaaaaaaaaaaaaaaaaaaaaaaaaaaaaaaaaaaaaaaaaaaaaaaaaaaaaaaaaaaaaaaaaaaaaaaaaaaaaaaaaaaaaaa

SEQ ID NO: 30817 - RNA, 1812 nt, Artificial Sequence
  mRNA product Design b-4 (hSL-A100) comprising derived and/or modified sequence from LASV(LM765-SLE-2012;Clade IV)__AIT17814__GPCmut6 (opt1)
aggagagucccgcagucggcguccagcggcucugcuuguucgugugugugucguugcaggccuuauucaagcuuaccaugggccagaucgugaccuucuuccaggaggucccccacgugaucgaggaggugaugaacaucguccugaucgcccucagcauccuggccgugcugaaggggcucuacaacuucgcgaccugcggccugguggggcuggucacguuccuccugcugugcggccgcuccugcaccaccagccucuacaaggggguguacgagcugcagacccuggagcucaacauggagacgcugaacaugugcaugccgcuguccugcaccaagaacaacagccaccacuacaucauggugggcaacgagaccggccucgagcugacgcugaccaacaccuccaucaucgaccacaaguucugcaaccucagcgacgcccaccggaagaaccuguacgaccacgcccugauguccaucaucagcaccuuccaccucuccauccccaacuucaaccaguacgaggccaugagcugcgacuucaacgggggcaagaucuccguccaguacaaccugagccacuccuacgccaaggacgcggccgaccacugcgggacgguggccaacggcgugcugcagaccuucaugcgcauggccuggggcgggagcuacaucgcgcucgacuccggccgggggcgcugggacugcaucaugaccagcuaccaguaccugaucauccagaacaccacgugggaggaccacugccaguucucccggcccagccccaucggcuaccuggggcuccugucccagcgcacccgggacaucuacaucagccgccggcugcucggcaccuucaccuggacgcugagcgacuccgagggcaaggacacccccgggggcuacugccugacccgcuggaugcucaucgaggccgagcugaagugcuucgggaacaccgccgucgccaagugcaacgagaagcacgacgaggaguucugcgacaugcugcggcuguucgacuucugcaagcaggccauccagcgccugaaggcgcccgcccagaugagcauccagcugaucaacaaggccgugaacgcccucaucaacgaccagcugaucaugaagaaccaccuccgggacaucaugggcauccccuacugcaacuacuccaaguacugguaccucaaccacacgaccaccgggaagaccagccugcccaagugcuggcugguguccaacggcagcuaccucaacgagacgcacuucuccgacgacaucgagcagcaggccgacaacaugaucaccgagaugcugcagaaggaguacauggagcgccagggcaagaccccgcuggggcucgucgaccuguucguguucagcaccuccuucuaccugaucagcaucuuccugcaccucgugaagaucccgacgcaccggcacaucgucggcaagcccugccccaagccccaccgccugaaccacauggggaucugcuccugcggccuguacaagcagccgggggugcccgugaaguggaagcggugaggacuaguaauaaggaaacuguaugaaugucugugggcaggaagugaagagauccuucuguaaagguuuuuggaauuaugucugcugaauaauaaacuuuuuugaaauaauaaaucugguagaaaaaugagaucucaaaggcucuuuucagagccaccaaaaaaaaaaaaaaaaaaaaaaaaaaaaaaaaaaaaaaaaaaaaaaaaaaaaaaaaaaaaaaaaaaaaaaaaaaaaaaaaaaaaaaaaaaaaaaaaaaaaa

SEQ ID NO: 30818 - RNA, 1812 nt, Artificial Sequence
  mRNA product Design b-4 (hSL-A100) comprising derived and/or modified sequence from LASV(LM776-SLE-2012;Clade IV)__AIT17824__GPCmut6 (opt1)
aggagagucccgcagucggcguccagcggcucugcuuguucgugugugugucguugcaggccuuauucaagcuuaccaugggccagaucgugaccuucuuccaggaggucccccacgugaucgaggaggugaugaacaucguccugaucgcccucagcauccuggccgugcugaaggggcucuacaacuucgcgaccugcggccugguggggcuggucacguuccuccugcugugcggccgcuccugcaccaccagcguguacaaggggguguacgagcuccagacccuggagcugaacauggagacgcucaacaugugcaugccgcuguccugcaccaagaacaacagccaccacuacaucauggucggcaacgagaccggccuggagcucacgcugaccaacaccuccaucaucaaccacaaguucugcaaccugagcgacgcccacaagaagaaccucuacgaccacgcccugauguccaucaucagcaccuuccaccuguccauccccaacuucaaccaguacgaggccaugagcugcgacuucaacgggggcaagaucuccgugcaguacaaccucagccacuccuacgccggggacgcggccaaccacugcggcacgguggccaacgggguccugcagaccuucaugcggauggccuggggcggcagcuacaucgcgcuggacuccgggcacggcaagugggacugcaucaugaccagcuaccaguaccucaucauccagaacaccacgugggaggaccacugccaguucucccgccccagccccaucggguaccugggccugcucucccagcggacccgcgacaucuacaucagccggcgccugcugggcaccuucaccuggacgcucagcgacuccgaggggaaggacaccccgggcggguacugccugacccgguggaugcugaucgaggccgagcucaagugcuucggcaacaccgccguggccaagugcaacgagaagcacgacgaggaguucugcgacaugcugcgccuguucgacuucugcaagcaggccauccagcggcucaaggcgcccgcccagaugagcauccagcugaucaacaaggccgugaacgcccugaucaacgaccagcucaucaugaagaaccaccuccgcgacaucauggggauccccuacugcaacuacuccaaguacugguaccugaaccacacgaccaccggcaagaccagccugcccaagugcuggcuggucuccaacggcagcuaccugaacgagacgcacuucuccgacgacaucgagcagcaggccgacaacaugaucaccgagaugcuccagaaggaguacauggagcggcaggggaagacgccccugggccugguggaccucuucguguucagcaccuccuucuaccugaucagcaucuuccugcaccuggucaagaucccgacccaccgccacaucguggggaaguccugccccaagccccaccggcucaaccacaugggcaucugcagcugcgggcuguacaagcagcccggcgugccgguccgcuggaagcggugaggacuaguaauaaggaaacuguaugaaugucugugggcaggaagugaagagauccuucuguaaagguuuuuggaauuaugucugcugaauaauaaacuuuuuugaaauaauaaaucugguagaaaaaugagaucucaaaggcucuuuucagagccaccaaaaaaaaaaaaaaaaaaaaaaaaaaaaaaaaaaaaaaaaaaaaaaaaaaaaaaaaaaaaaaaaaaaaaaaaaaaaaaaaaaaaaaaaaaaaaaaaaaaaa

SEQ ID NO: 30819 - RNA, 1812 nt, Artificial Sequence
  mRNA product Design b-4 (hSL-A100) comprising derived and/or modified sequence from LASV(Mad39;Clade IV)__ANH09722__GPCmut6 (opt1)
aggagagucccgcagucggcguccagcggcucugcuuguucgugugugugucguugcaggccuuauucaagcuuaccaugggccagaucgugaccuucuuccaggaggucccccacgugaucgaggaggugaugaacaucguccugaucgcccucagcauccuggccgugcugaaggggcucuacaacguggcgaccugcggccugaucgggcuggucacguuccuccugcugugcggccgcuccugcaccaccacccucuacaaggggguguacgagcugcaggcccuggagcucaacauggagacgcugaacaugugcaugccgcugagcugcaccaagaacaacucccaccacuacauccgggugggcaacgagaccggccucgagcugacgcugaccaacaccagccucaucaaccacaaguucugcaaccuguccgacgcccacaagaagaaccuguacgaccacgcccucaugagcaucaucuccaccuuccaccugagcauccccaacuucaaccaguacgaggccauguccugcgacuucaacgacgggaagaucagcguccaguacaaccugucccacacguacgcgggcgacaccgccaaccacugcgggaccguggccaacggcgugcuccagaccuucaugcgcauggccuggggcgggagcuacaucgcgcuggacuccggccgcgggggcugggacugcaucaugacgagcuaccaguaccugaucauccagaacaccaccugggaggaccacugccaguucucccggcccagccccaucggguaccucggccugcugucccagcggacccgcgacaucuacaucagccggcgccuccugggcacguucaccuggacccuguccgacagcgaggggaaggacaccccgggcggguacugccucacgcgguggaugcugaucgaggccgagcugaagugcuucggcaacaccgccgucgccaagugcaacgagaagcacgacgaggaguucugcgacaugcuccgccuguucgacuucugcaagcaggccauccagcggcugaaggcgcccgcccagaugagcauccagcucaucaacaaggccgugaacgcccugaucaacgaccagcugaucaugaagaaccaccuccgcgacaucauggggauccccuacugcaacuacuccaaguacugguaccugaaccacaccgugaccggcaagacgagccugcccaagugcuggcucgucuccaacggcagcuaccugaacgagacccacuucuccgacgacaucgagcagcaggccgacaacaugaucaccgagaugcugcagaaggaguacauggagcggcaggggaagacgccccucggccugguggaccuguucguguucagcaccuccuucuaccugaucagcaucuuccuccaccuggucaagaucccgacccaccgccacgugguggggaagcccugccccaagccccaccggcugaaccacaugggcaucugcuccugcggguucuacaagcagccgggcguccccgugcgcuggaagcggugaggacuaguaauaaggaaacuguaugaaugucugugggcaggaagugaagagauccuucuguaaagguuuuuggaauuaugucugcugaauaauaaacuuuuuugaaauaauaaaucugguagaaaaaugagaucucaaaggcucuuuucagagccaccaaaaaaaaaaaaaaaaaaaaaaaaaaaaaaaaaaaaaaaaaaaaaaaaaaaaaaaaaaaaaaaaaaaaaaaaaaaaaaaaaaaaaaaaaaaaaaaaaaaaa

SEQ ID NO: 30820 - RNA, 1812 nt, Artificial Sequence
  mRNA product Design b-4 (hSL-A100) comprising derived and/or modified sequence from LASV(Z0947-SLE-2011;Clade IV)__AIT17840__GPCmut6 (opt1)
aggagagucccgcagucggcguccagcggcucugcuuguucgugugugugucguugcaggccuuauucaagcuuaccaugggccagaucgugaccuucuuccaggaggucccccacgugaucgaggaggugaugaacaucguccugaucgcccucagcauccuggccgugcugaaggggcucuacaacuucgcgaccugcggccugguggggcuggucacguuccuccugcugugcggccgcuccugcaccaucagccucuacaaggggguguacgagcugcagacccuggagcucaacauggagacccugaacaugugcaugccgcuguccugcaccaagaacaacagccaccacuacaucauggugggcaacgagaccggccucgagcugacccugacgaacaccuccaucaucaaccacaaguucugcaaccucagcgacgcccacaagaagaaccuguacgaccacgcccugauguccaucaucagcaccuuccaccucuccauccccaacuucaaccaguacgaggccaugagcugcgacuucaacgggggcaagaucuccguccaguacaaccugagccacuccuacgccggggacgcggccaaccacugcggcaccguggccaacggggugcugcagacguucaugcggauggccuggggcggcagcuacaucgcgcucgacuccgggcgcgaccggugggacugcaucaugaccagcuaccaguaccugaucauccagaacaccaccugggaggaccacugccaguucucccgccccagccccaucggcuaccuggggcuccugucccagcggacgcgcgacaucuacaucagccggcgccugcucggcaccuucaccuggacccugagcgacuccgagggcaaggacacgcccgggggcuacugccugacccgguggaugcucaucgaggccgagcugaagugcuucgggaacaccgccgucgccaagugcaacgagaagcacgacgaggaguucugcgacaugcugcgccucuucgacuucugcaagcaggccauccagcggcugaaggcgcccgcccagaugagcauccagcugaucaacaaggccgugaacgcccucaucaacgaccagcugaucaugaagaaccaccuccgcgacaucaugggcauccccuacugcaacuacuccaaguacugguaccugaaccacaccacgaccgggaagaccagccugcccaagugcuggcugguguccaacggcagcuaccucaacgagacccacuucuccgacgacaucgagcagcaggccgacaacaugaucacggagaugcugcagaaggaguacauggagcggcagggcaagaccccgcuggggcucgucgaccuguucguguucagcaccuccuucuaccugaucagcaucuuccugcaccucgugaagaucccgacccaccgccacaucgucggcaagcccugccccaagccccaccggcugaaccacauggggaucugcuccugcggccuguacaagcagccgggggugcccgugaaguggaagcgcugaggacuaguaauaaggaaacuguaugaaugucugugggcaggaagugaagagauccuucuguaaagguuuuuggaauuaugucugcugaauaauaaacuuuuuugaaauaauaaaucugguagaaaaaugagaucucaaaggcucuuuucagagccaccaaaaaaaaaaaaaaaaaaaaaaaaaaaaaaaaaaaaaaaaaaaaaaaaaaaaaaaaaaaaaaaaaaaaaaaaaaaaaaaaaaaaaaaaaaaaaaaaaaaaa

SEQ ID NO: 30821 - RNA, 1812 nt, Artificial Sequence
  mRNA product Design b-4 (hSL-A100) comprising derived and/or modified sequence from LASV(Josiah;Clade IV)__NP_694870__GPCmut6 (opt1)
aggagagucccgcagucggcguccagcggcucugcuuguucgugugugugucguugcaggccuuauucaagcuuaccaugggccagaucgugaccuucuuccaggaggucccccacgugaucgaggaggugaugaacaucguccugaucgcccucagcgugcuggccgugcugaaggggcucuacaacuucgcgaccugcggccuggucgggcuggugacguuccuccugcugugcggccgcuccugcaccaccagccucuacaaggggguguacgagcugcagacccuggagcucaacauggagacgcugaacaugugcaugccgcuguccugcaccaagaacaacagccaccacuacaucauggucggcaacgagaccggccucgagcugacccugacgaacaccuccaucaucaaccacaaguucugcaaccucagcgacgcccacaagaagaaccuguacgaccacgcccugauguccaucaucagcaccuuccaccucuccauccccaacuucaaccaguacgaggccaugagcugcgacuucaacgggggcaagaucuccgugcaguacaaccugagccacuccuacgccggggacgcggccaaccacugcggcaccguggccaacgggguccugcagacguucaugcggauggccuggggcggcagcuacaucgcgcucgacuccgggcgcggcaacugggacugcaucaugaccagcuaccaguaccugaucauccagaacaccaccugggaggaccacugccaguucucccggcccagccccaucggguaccugggccuccugucccagcgcacgcgggacaucuacaucagccgccggcugcucggcaccuucaccuggacccugagcgacuccgaggggaaggacacgccgggcggguacugccugacccgcuggaugcucaucgaggccgagcugaagugcuucggcaacaccgccguggccaagugcaacgagaagcacgacgaggaguucugcgacaugcugcggcuguucgacuucugcaagcaggccauccagcgccugaaggcgcccgcccagaugagcauccagcugaucaacaaggccgugaacgcccucaucaacgaccagcugaucaugaagaaccaccuccgggacaucauggggauccccuacugcaacuacuccaaguacugguaccucaaccacaccacgaccggccgcaccagccugcccaagugcuggcuggucuccaacggcagcuaccucaacgagacccacuucuccgacgacaucgagcagcaggccgacaacaugaucacggagaugcugcagaaggaguacauggagcggcaggggaagaccccgcugggccugguggaccucuucguguucagcaccuccuucuaccugaucagcaucuuccugcaccucgucaagauccccacccaccgccacaucguggggaaguccugccccaagccccaccggcugaaccacaugggcaucugcagcugcgggcuguacaagcagccgggcgugcccgucaaguggaagcgcugaggacuaguaauaaggaaacuguaugaaugucugugggcaggaagugaagagauccuucuguaaagguuuuuggaauuaugucugcugaauaauaaacuuuuuugaaauaauaaaucugguagaaaaaugagaucucaaaggcucuuuucagagccaccaaaaaaaaaaaaaaaaaaaaaaaaaaaaaaaaaaaaaaaaaaaaaaaaaaaaaaaaaaaaaaaaaaaaaaaaaaaaaaaaaaaaaaaaaaaaaaaaaaaaa

SEQ ID NO: 30822 - RNA, 1809 nt, Artificial Sequence
  mRNA product Design b-4 (hSL-A100) comprising derived and/or modified sequence from LASV(LP;Clade I)__AAF86701__GPCmut6 (opt1)
aggagagucccgcagucggcguccagcggcucugcuuguucgugugugugucguugcaggccuuauucaagcuuaccaugggccagaucaucaccuucuuccaggaggugccccacgucaucgaggaggugaugaacaucgugcugaucgcccucagccugcuggccauccucaaggggcuguacaacaucgcgaccugcggcaucaucgggcuggucgccuuccucuuccugugcggcaaguccugcagccugacgcucaagggcggguacgagcugcagacccuggagcucaacauggagacccugaacaugugcaugccgcuguccugcaccaagaacagcucccaccacuacauccgcgugggcaacgagacggggcucgagcugacccugaccaacaccagcaucaucaaccacaaguucugcaaccucuccgacgcccacaagaagaaccuguacgaccacgcccugaugagcaucaucuccacguuccaccucagcauccccaacuucaaccaguacgaggccauguccugcgacuucaacggcgggaagaucagcgugcaguacaaccugucccacagcuacgcgggcgacgccgccgagcacugcgggaccgucgccaacggcgugcugcagaccuucaugcggauggcguggggcgggcgcuacaucgcccucgacuccggcaaggggaacugggacugcaucaugaccagcuaccaguaccugaucauccagaacacgaccugggaggaccacugccaguucucccggcccagccccaucggcuaccugggccuccugucccagcgcacccgggacaucuacaucagccgccggcugcucgggaccuucacguggacccugagcgacuccgagggcaacgagacccccgggggcuacugccugacccgcuggaugcucaucgaggccgagcugaagugcuucgggaacacggccguggccaagugcaacgagaagcacgacgaggaguucugcgacaugcugcggcuguucgacuucugcaagcaggcgauccgccggcugaaggccccggcccagaugagcauccagcugaucaacaaggccgucaacgcccucaucaacgaccagcugaucaugaagaaccaccuccgcgacaucaugggcauccccuacugcaacuacuccaaguacugguaccucaaccacaccagcuccggccggaccagccugcccaagugcuggcugaucuccaacgggagcuaccucaacgagacccaguucuccgacgacaucgagcagcaggcggacaacaugaucacggagaugcugcagaaggaguacaucgagcgccagggcaagaccccgcuggggcugguggacaucuucaucuucagcaccuccuucuaccucaucagcaucuuccugcaccugaucaagauccccacccaccggcacaucgugggcaagcccugccccaagccgcaccgccucaaccacaugggggucugcuccugcggccuguacaagcaccccggcgugcccacgaaguggaagcggugaggacuaguaauaaggaaacuguaugaaugucugugggcaggaagugaagagauccuucuguaaagguuuuuggaauuaugucugcugaauaauaaacuuuuuugaaauaauaaaucugguagaaaaaugagaucucaaaggcucuuuucagagccaccaaaaaaaaaaaaaaaaaaaaaaaaaaaaaaaaaaaaaaaaaaaaaaaaaaaaaaaaaaaaaaaaaaaaaaaaaaaaaaaaaaaaaaaaaaaaaaaaaaaaa

SEQ ID NO: 30823 - RNA, 1809 nt, Artificial Sequence
  mRNA product Design b-4 (hSL-A100) comprising derived and/or modified sequence from LASV(803213;Clade II)__AAF86703__GPCmut6 (opt1)
aggagagucccgcagucggcguccagcggcucugcuuguucgugugugugucguugcaggccuuauucaagcuuaccaugggccagaucaucaccuucuuccaggaggugccccacgucaucgaggaggugaugaacaucgugcugaucgcccucagccugcuggccauccucaaggggaucuacaacgucgcgaccugcggccuguucgggcugaucuccuuccuccugcugugcggccgcagcugcuccgugacguacaaggggguguacgagcuccagacccuggagcugaacauggccaaccucaacaugugcaugccgcugagcugcaccaagaacaacucccaccacuacaucauggucggcaacgagaccggccuggagcucacgcugaccaacaccagcaucaucaaccacaaguucugcaaccuguccgacgcccacaagaagaaccucuacgaccacgcccugaugagcaucaucuccaccuuccaccugagcauccccaacuucaaccaguacgaggccauguccugcgacuucaacgggggcaagaucagcgugcaguacaaccucucccacagcuucgcgguggacgccgccaaccacugcgggacgaucgccaacggcguccugcagaccuucaugcggauggcguggggcggguccuacaucgcccuggacagcggcaaggggaacugggacugcaucaugaccuccuaccaguaccucaucauccagaacaccacgugggaggaccacugccaguucagccgccccucccccaucggcuaccuggggcugcucagccagcggacccgcgacaucuacaucagccggcgccugcugggcaccuucaccuggacgcucuccgacagcgagggcaacgaggcccccgggggcuacugccugacccgguggaugcugaucgaggccgagcucaagugcuucgggaacaccgccguggcgaagugcaacgagaagcacgacgaggaguucugcgacaugcugcgccuguucgacuucugcaagcaggccaucaagcggcucaagaccccggcccagauguccauccagcugaucaacaaggccgugaacgcccugaucaacgaccagcucaucaugaagaaccaccuccgcgacaucaugggcauccccuacugcaacuacagccgguacugguaccugaaccacacggucaccgggaagaccucccugccccgcugcuggcuggugagcaacggcuccuaccugaacgagacccacuucagcgacgacaucgagcagcaggcggacaacaugaucacggagaugcuccagaaggaguacauggaccggcagggcaagaccccgcuggggcugguggaccuguucgucuucuccaccagcuucuaccucaucuccaucuuccugcaccuggugaagauccccacccaccgccacaucgugggcaagcccugccccaagccgcaccggcucaaccacauggggaucugcagcugcggccuguacaagcaccccgggguccccgugaaguggaagcgcugaggacuaguaauaaggaaacuguaugaaugucugugggcaggaagugaagagauccuucuguaaagguuuuuggaauuaugucugcugaauaauaaacuuuuuugaaauaauaaaucugguagaaaaaugagaucucaaaggcucuuuucagagccaccaaaaaaaaaaaaaaaaaaaaaaaaaaaaaaaaaaaaaaaaaaaaaaaaaaaaaaaaaaaaaaaaaaaaaaaaaaaaaaaaaaaaaaaaaaaaaaaaaaaaa

SEQ ID NO: 30824 - RNA, 1809 nt, Artificial Sequence
  mRNA product Design b-4 (hSL-A100) comprising derived and/or modified sequence from LASV(GA391;Clade III)__CAA36645__GPCmut6 (opt1)
aggagagucccgcagucggcguccagcggcucugcuuguucgugugugugucguugcaggccuuauucaagcuuaccaugggccagaucgugaccuucuuccaggaggucccccacgugaucgaggaggugaugaacaucguccugaucgcccucagcauccuggccauccugaaggggcucuacaacguggcgaccugcggccugaucgggcuggugacguuccuccugcuguccggccgcagcugcucccucaucuacaaggggaccuacgagcugcagacccuggagcucaacauggagacccugaacaugugcaugccgcugagcugcacgaagaacaacucccaccacuacauccgggucggcaacgagaccggccucgagcugacccugaccaacacgagcauccucaaccacaaguucugcaaccuguccgacgcccacaagcgcaaccuguacgaccacagccucauguccaucaucagcaccuuccaccuguccauccccaacuucaaccaguacgaggccaugagcugcgacuucaacgggggcaagaucaccgugcaguacaaccugucccacagcuucgccguggacgccgcggggcacugcggcacccucgccaacgggguccugcagacguucaugcggauggccuggggcggcuccuacaucgcccuggacagcgggcgcggcaacugggacugcaucaugaccuccuaccaguaccucaucauccagaacaccaccugggacgaccacugccaguucagccggcccucccccaucggguaccugggccugcucagccagcgcacgcgggacaucuacaucagccgccggcugcugggcaccuucaccuggacccucuccgacagcgaggggaacgagacgccgggcggguacugccugacccgcuggaugcugaucgaggcggagcucaagugcuucggcaacaccgccguggccaagugcaacgagaagcacgacgaggaguucugcgacaugcugcggcuguucgacuucugcaagcaggccauccgccggcucaagacccccgcccagauguccauccagcugaucaacaaggcggugaacgcccugaucaacgaccagcucaucaugaagaaccaccuccgcgacaucauggggauccccuacugcaacuacagccgguacugguaccugaaccacacguccaccggcaagaccagccugccccgcugcuggcugaucuccaacggcagcuaccugaacgagaccaaguucuccgacgacaucgagcagcaggccgacaacaugaucacggagaugcugcagaaggaguacaucgaccggcaggggaagaccccgcucggccuggucgaccuguucguguucagcaccuccuucuaccucaucagcaucuuccugcaccuggugaagauccccacccaccgccacaucgucgggaagcccugccccaagccgcaccggcucaaccacaugggcaucugcuccugcgggcuguacaagcagcccggcgugcccgugcgcuggaagcggugaggacuaguaauaaggaaacuguaugaaugucugugggcaggaagugaagagauccuucuguaaagguuuuuggaauuaugucugcugaauaauaaacuuuuuugaaauaauaaaucugguagaaaaaugagaucucaaaggcucuuuucagagccaccaaaaaaaaaaaaaaaaaaaaaaaaaaaaaaaaaaaaaaaaaaaaaaaaaaaaaaaaaaaaaaaaaaaaaaaaaaaaaaaaaaaaaaaaaaaaaaaaaaaaa

SEQ ID NO: 30825 - RNA, 1812 nt, Artificial Sequence
  mRNA product Design b-4 (hSL-A100) comprising derived and/or modified sequence from LASV(AV;Clade V)__CCA30314__GPCmut6 (opt1)
aggagagucccgcagucggcguccagcggcucugcuuguucgugugugugucguugcaggccuuauucaagcuuaccaugggccagaucgugaccuucuuccaggaggucccccacgugaucgaggaggugaugaacaucguccugaucgcccucagcauccuggccgugcugaaggggcucuacaacaucgcgaccugcggccugaucgggcugaucacguuccuccugcugugcggccgcuccugcagcuccaaccucuacaaggggguguacgagcugcagagccuggaccucaacauggagacccugaacaugugcaugccgcuguccugcaccaagaacaacagccaccacuacauccgggucggcaacgacaccggccucgagcugacgcugaccaacaccuccauccucaaccacaaguucugcaaccugagcgacgcccacaagaaggaccuguacgaccacgcccucauguccaucaucagcaccuuccaccuguccauccccaacuucaaccaguacgaggccaugagcugcgacuucaacgggggcaagaucuccgugcaguacaaccugagccacuccuacgccaucgacgcggccaaccacugcgggacgguggccaacggcauccuccagaccuucaugcgcauggccuggggcgggagcuacaucgcgcuggacuccggccgggggaacugggacugcaucaugaccagcuaccaguaccugaucauccagaacaccacgugggagaaccacugccaguucucccgccccagccccaucggcuaccucgggcugcugagccagcggacccgcgacaucuacaucucccggcgccuccugggcaccuucaccuggacgcugagcgacuccgagggcaacgccacccccgggggcuacugccucacccgguggaugcugaucgaggccgagcugaagugcuucgggaacaccgccgucgccaagugcaacgagaagcacgacgaggaguucugcgacaugcuccgccuguucgacuucugcaagcaggcgaucagccggcugaaguccccggcccagaugagcauccagcucaucaacaaggccgugaacgcccugaucaacgaccagcugaucaugaagaaccaccuccgcgacaucaugggcauccccuacugcaacuacuccaaguacugguaccugaaccacacgaucaccgggaagaccagccugcccaagugcuggcucguguccaacggcagcuaccugaacgagacccacuucuccgacgacaucgagcagcaggccgacaacaugaucacggagaugcugcagaaggaguacauggagcggcagggcaagaccccgcuggggcucgucgaccuguucguguucagcaccuccuucuaccugaucagcaucuuccuccgccuggugaagauccccacccaccggcacaucgucggcaagcccugccccaagccgcaccgccugaaccacauggggaucugcuccugcggccucuacaagcagcccggggugcccgugcgguggaagcgcugaggacuaguaauaaggaaacuguaugaaugucugugggcaggaagugaagagauccuucuguaaagguuuuuggaauuaugucugcugaauaauaaacuuuuuugaaauaauaaaucugguagaaaaaugagaucucaaaggcucuuuucagagccaccaaaaaaaaaaaaaaaaaaaaaaaaaaaaaaaaaaaaaaaaaaaaaaaaaaaaaaaaaaaaaaaaaaaaaaaaaaaaaaaaaaaaaaaaaaaaaaaaaaaaa

SEQ ID NO: 30826 - RNA, 1809 nt, Artificial Sequence
  mRNA product Design b-4 (hSL-A100) comprising derived and/or modified sequence from LASV(Togo/2016/7082;Clade VI)__AMR44577__GPCmut6 (opt1)
aggagagucccgcagucggcguccagcggcucugcuuguucgugugugugucguugcaggccuuauucaagcuuaccaugggccagaucaucaccuucuuccaggaggugccccacgucaucgaggaggugaugaacaucgugcugaucgcccucagccugcuggccauccucaagggggucuacaacguggcgaccugcggcaucaucgggcuggugacguuccuguuccucugcggccgcuccugcagccugaucuacaagggguccuacgagcugcagacccucgagcugaacauggagacccugaacaugugcaugccgcucagcugcaccaagaacuccagccaccacuacauccgggucggcaacgagacgggccuggagcugacccucaccaacaccuccaucaucaaccacaaguucugcaaccugagcgacgcccacaagcgcaaccuguacgaccacgcccucauguccauccugagcacguuccaccuguccauccccaacuucaaccaguacgaggccaugagcugcgacuucaacgggggcaagaucuccgugcaguacaaccucagccacgccuacgcgguggacgccgccgagcacugcgggaccgucgccaacggcgugcugcagaccuucaugcggauggcguggggcggguccuacaucgcccuggacagcggccgcgggaacugggacugcaucaugaccuccuaccaguaccucaucauccagaacacgaccugggaggaccacugccaguucagccggcccucccccaucggcuaccuggggcugcucagccagcgcacccgggacaucuacaucagccgccggcugcugggcaccuucacguggacccucuccgacagcgagggcaacgagacccccgggggcuacugccugacccgcuggaugcugaucgaggccgagcucaagugcuucgggaacacggccguggccaagugcaacgagaagcacgacgaggaguucugcgacaugcugcggcuguucgacuucugcaagcaggcgauccagcgccucaaguccccggcccagaugagcauccagcugaucaacaaggccgucaacgcccugaucaacgaccagcucaucaugaagaaccaccuccgggacaugaugggcauccccuacugcaacuacuccaaguacugguaccugaaccacaccagcuccgggcgcaccagccugcccaagugcuggcugguguccaacggcagcuaccugaacgagacccacuucuccgacgacaucgagcagcaggccgacaacaugaucacggagaugcuccagaaggaguacaucgaccggcagggcaagaccccgcuggggcugguggaccuguucgucuucagcaccuccuucuaccucaucagcaucuuccugcaccugaucaagauccccacccaccgccacaucgugggcaagcccugccccaagccgcaccggcucaaccacauggggaucugcuccugcggccuguacaagcagcccggggugcccacgcgcuggaagcggugaggacuaguaauaaggaaacuguaugaaugucugugggcaggaagugaagagauccuucuguaaagguuuuuggaauuaugucugcugaauaauaaacuuuuuugaaauaauaaaucugguagaaaaaugagaucucaaaggcucuuuucagagccaccaaaaaaaaaaaaaaaaaaaaaaaaaaaaaaaaaaaaaaaaaaaaaaaaaaaaaaaaaaaaaaaaaaaaaaaaaaaaaaaaaaaaaaaaaaaaaaaaaaaaa

SEQ ID NO: 30827 - RNA, 1809 nt, Artificial Sequence
  mRNA product Design b-4 (hSL-A100) comprising derived and/or modified sequence from LASV(KAK-428;Clade n.d. (VII))__ANH09740__GPCmut6 (opt1)
aggagagucccgcagucggcguccagcggcucugcuuguucgugugugugucguugcaggccuuauucaagcuuaccaugggccagaucgugaccuucuuccaggaggucccccacgugaucgaggaggugaugaacaucguccugaucgcccucagccugcuggccauccucaaggggcuguacaacuucgcgaccugcggcgugaucgggcugaucacguuccuccugcugugcggccgcuccugcagcgccaccuacaaggggcaguacgagcuccagacccuggagcugaacauggagucccucaacaugugcaugccgcugagcugcaccaagaacaacucccaccacuacauccgggccggcaacaacacgggccuggagcucacccugaccaacaccagcaucaucucccacaaguucugcaaccugagcgacgcccacaagaagaaccucuacgaccacacgcugauguccaucaucaccaccuuccaccugagcauccccaacuucaaccaguacgaggccauguccugcgacuucaacgggggcaagaucagcauccaguacaaccucucccacagcuacgcgggggacgccgcccagcacugcggcaccguggccaacgggguccugcagacguucaugcgcauggcguggggcggcuccuaccuggcccucgacagcgggcggcgcggcugggacugcaucaucuccagcuaccaguaccugaucauccagaacaccaccugggacgaccacugccaguucucccggcccagccccaucggguaccugggcuucgugagccagaagacccgcgacaucuacaucucccggcgccuccugggcacguucaccuggacccugagcgacuccgaggggcacgacaugccgggcggguacugccucacccgguggaugcugaucgaggccgaccugaagugcuucggcaacacggccguggccaagugcaacgagaagcacgacgaggaguucugcgacauguggcgccucuucgacuucugcaagcaggcgauccagcggcugaaggcccccgcccagaugaacauccagcugaucaacaaggccgucaacgcccucaucaacgaccagcugaugaugaagaaccaccuccgcgacaucauggggauccccuacugcaacuacagcaaguucugguaccugaacaacaccaccaccggccggacgucccugccccgcugcuggcugaucagcaacggcuccuaccucaacgagacccacuucagcgacgacaucgagcagcaggcggacaacaugaucaccgagaugcugcagaaggaguacauggaccggcaggggaagaccccgcugggccucguggaccuguucguguucuccacgagcuucuaccugaucaccaucuuccugcaccucgucaagauccccacccaccgccacaucguggggaagcccugccccaagccgcaccggcugaaccacaugggcaucugcuccugcgggcuguacaagcagcccggcgugcccguccgcuggaagcggugaggacuaguaauaaggaaacuguaugaaugucugugggcaggaagugaagagauccuucuguaaagguuuuuggaauuaugucugcugaauaauaaacuuuuuugaaauaauaaaucugguagaaaaaugagaucucaaaggcucuuuucagagccaccaaaaaaaaaaaaaaaaaaaaaaaaaaaaaaaaaaaaaaaaaaaaaaaaaaaaaaaaaaaaaaaaaaaaaaaaaaaaaaaaaaaaaaaaaaaaaaaaaaaaa

SEQ ID NO: 30828 - RNA, 1809 nt, Artificial Sequence; identical to SEQ ID NO: 30822
  mRNA product Design b-4 (hSL-A100) comprising derived and/or modified sequence from LASV(Pinneo-NIG-1969;Clade I)__AIT17836__GPCmut6 (opt1)

SEQ ID NO: 30829 - RNA, 1809 nt, Artificial Sequence
  mRNA product Design b-4 (hSL-A100) comprising derived and/or modified sequence from LASV(ISTH0009-NIG-2011;Clade II)__AIT17404__GPCmut6 (opt1)
aggagagucccgcagucggcguccagcggcucugcuuguucgugugugugucguugcaggccuuauucaagcuuaccaugggccagaucaucaccuucuuccaggaggugccccacgucaucgaggaggugaugaacaucgugcugaucgcccucagccugcuggccauccucaaggggaucuacaacgucgcgaccugcggccuguucgggcugguguccuuccuccugcugugcggccgcagcugcuccacgaccuacaaggggguguacgagcuccagacccuggagcuggacauggccagccucaacaugugcaugccgcuguccugcaccaagaacaacagccaccacuacaucauggucggcaacgagacgggccuggagcucacccugaccaacaccuccaucaucaaccacaaguucugcaaccugagcgacgcccacaagaagaaccucuacgaccacgcccugauguccaucaucagcacguuccaccuguccauccccaacuucaaccaguacgaggccaugagcugcgacuucaacgggggcaagaucuccgugcaguacaaccucagccacgcguacgccguggacgccgccaaccacugcgggaccaucgcgaacggcguccugcagaccuucaugcggauggccuggggcggguccuacaucgcccuggacagcggcaagggguccugggacugcaucaugaccagcuaccaguaccucaucauccagaacacgaccugggaggaccacugccaguucucccgccccagccccaucggcuaccuggggcugcucagccagcggacccgcgacaucuacaucucccggcgccugcugggcaccuucacguggacccucagcgacuccgagggcaacgagacccccgggggcuacugccugacccgguggaugcugaucgaggccgagcucaagugcuucgggaacacggccguggcgaagugcaacgagaagcacgacgaggaguucugcgacaugcugcgccuguucgacuucugcaagcaggccauccggcgccucaagaccccggcccagaugagcauccagcugaucaacaaggccgugaacgcccugaucaacgaccagcucaucaugaagaaccaccuccgggacaucaugggcauccccuacugcaacuacuccaaguacugguaccugaaccacaccgucaccgggaagacgagccugccccgcugcuggcugguguccaacggcagcuaccugaacgagacccacuucuccgacgacaucgagcagcaggcggacaacaugaucaccgagcuccugcagaaggaguacauggaccggcagggcaagaccccgcuggggcugguggaccucuucgucuucagcacguccuucuaccugaucagcaucuuccugcaccucaucaagauccccacccaccgccacaucaccggcaagcccugccccaagccgcaccggcugaaccacauggggaucugcuccugcggccuguacaagcaccccggggugcccgugaaguggaagcgcugaggacuaguaauaaggaaacuguaugaaugucugugggcaggaagugaagagauccuucuguaaagguuuuuggaauuaugucugcugaauaauaaacuuuuuugaaauaauaaaucugguagaaaaaugagaucucaaaggcucuuuucagagccaccaaaaaaaaaaaaaaaaaaaaaaaaaaaaaaaaaaaaaaaaaaaaaaaaaaaaaaaaaaaaaaaaaaaaaaaaaaaaaaaaaaaaaaaaaaaaaaaaaaaaa

SEQ ID NO: 30830 - RNA, 1809 nt, Artificial Sequence
  mRNA product Design b-4 (hSL-A100) comprising derived and/or modified sequence from LASV(ISTH2010-NIG-2012;Clade II)__AIT17482__GPCmut6 (opt1)
aggagagucccgcagucggcguccagcggcucugcuuguucgugugugugucguugcaggccuuauucaagcuuaccaugggccagaucaucaccuucuuccaggaggugccccacgucaucgaggaggugaugaacaucgugcugaucgcccucagccugcuggccauccucaaggggaucuacaacgucgcgaccugcggccuguucgggcugguguccuuccuccugcugugcggccgcagcugcuccacgaccuacaaggggguguacgagcuccagacccuggagcuggacauggccagccucaacaugugcaugccgcuguccugcaccaagaacaacagccaccacuacaucauggucggcaacgagacgggccuggagcucacccugaccaacaccuccaucaucaaccacaaguucugcaaccugagcgacgcccacaagaagaaccucuacgaccacgcccugauguccaucaucagcacguuccaccuguccauccccaacuucaaccaguacgaggccaugagcugcgacuucaacgggggcaagaucuccgugcaguacaaccucagccacgcguacgccguggacgccgccaaccacugcgggaccaucgcgaacggcguccugcagaccuucaugcggauggccuggggcggguccuacaucgcccuggacagcggcaagggguccugggacugcaucaugaccagcuaccaguaccucaucauccagaacaucacgugggaggaccacugccaguucucccgccccagccccaucggcuaccuggggcugcucagccagcggacccgcgacaucuacaucucccggcgccugcugggcaccuucaccuggacgcucagcgacuccgagggcaacgagacccccgggggcuacugccugacccgguggaugcugaucgaggccgagcucaagugcuucgggaacaccgccguggcgaagugcaacgagaagcacgacgaggaguucugcgacaugcugcgccuguucgacuucugcaagcaggccauccggcgccucaagacgccggcccagaugagcauccagcugaucaacaaggccgugaacgcccugaucaacgaccagcucaucaugaagaaccaccuccgggacaucaugggcauccccuacugcaacuacuccaaguacugguaccugaaccacaccgucaccgggaagaccagccugccccgcugcuggcugguguccaacggcagcuaccugaacgagacgcacuucuccgacgacaucgagcagcaggcggacaacaugaucaccgagcuccugcagaaggaguacaucgaccggcagggcaagaccccgcuggggcugguggaccucuucgucuucagcaccuccuucuaccugaucagcaucuuccugcaccucgugaagauccccacgcaccgccacguggucggcaagcccugccccaagccgcaccggcugaaccacauggggaucugcuccugcggccuguacaagcaccccggggugcccgugaaguggaagcgcugaggacuaguaauaaggaaacuguaugaaugucugugggcaggaagugaagagauccuucuguaaagguuuuuggaauuaugucugcugaauaauaaacuuuuuugaaauaauaaaucugguagaaaaaugagaucucaaaggcucuuuucagagccaccaaaaaaaaaaaaaaaaaaaaaaaaaaaaaaaaaaaaaaaaaaaaaaaaaaaaaaaaaaaaaaaaaaaaaaaaaaaaaaaaaaaaaaaaaaaaaaaaaaaaa

SEQ ID NO: 30831 - RNA, 1809 nt, Artificial Sequence
  mRNA product Design b-4 (hSL-A100) comprising derived and/or modified sequence from LASV(Lassa virus/H.sapiens-wt/NGA/2015/ISTH_0543;Clade II)__AVO03639__GPCmut6 (opt1)
aggagagucccgcagucggcguccagcggcucugcuuguucgugugugugucguugcaggccuuauucaagcuuaccaugggccagaucaucaccuucuuccaggaggugccccacgucaucgaggaggugaugaacaucgugcugaucgcccucagccugcuggccauccucaaggggaucuacaacgucgcgaccugcggccuguucgggcugguguccuuccuccugcugugcggccgcagcugcuccacgaccuacaaggggguguacgagcuccagacccuggagcuggacauggccaaccucaacaugugcaugccgcugagcugcaccaagaacaacucccaccacuacaucauggucggcaacgagacgggccuggagcucacccugaccaacaccagcaucaucaaccacaaguucugcaaccuguccgacgcccacaagaagaaccucuacgaccacgcccugaugagcaucaucuccacguuccaccugagcauccccaacuucaaccaguacgaggccauguccugcgacuucaacgggggcaagaucagcgugcaguacaaccucucccacaccuacgcgguggacgccgccaaccacugcgggaccaucgccaacggcguccugcagaccuucaugcggauggcguggggcgggagcuacaucgcccuggacuccggcaaggggagcugggacugcaucaugacguccuaccaguaccucgugauccagaacaccaccugggaggaccacugccaguucagccgccccucccccaucggcuaccuggggcugcucagccagcggacccgcgacaucuacaucagccggcgccugcugggcacguucaccuggacccucuccgacagcgagggcaacgagacccccgggggcuacugccugacgcgguggaugcugaucgaggccgagcucaagugcuucgggaacaccgccguggccaagugcaacgagaagcacgacgaggaguucugcgacaugcugcgccuguucgacuucugcaagcaggcgauccggcgccucaagaccccggcccagauguccauccagcugaucaacaaggccgucaacgcccugaucaacgaccagcucaucaugaagaaccaccuccgggacaucaugggcauccccuacugcaacuacagcaaguacugguaccugaaccacaccgugacggggaagaccucccugccccgcugcuggcuggugagcaacggcuccuaccugaacgagacccacuucagcgacgacaucgagcagcaggccgacaacaugaucaccgagcuccugcagaaggaguacaucgaccggcagggcaagacgccgcuggggcuggucgaccucuucguguucuccaccagcuucuaccugaucuccaucuuccugcaccucgugaagauccccacccaccgccacaucaccggcaagcccugccccaagccgcaccggcugaaccacauggggaucugcagcugcggccuguacaagcaccccgggguccccgugaaguggaagcgcugaggacuaguaauaaggaaacuguaugaaugucugugggcaggaagugaagagauccuucuguaaagguuuuuggaauuaugucugcugaauaauaaacuuuuuugaaauaauaaaucugguagaaaaaugagaucucaaaggcucuuuucagagccaccaaaaaaaaaaaaaaaaaaaaaaaaaaaaaaaaaaaaaaaaaaaaaaaaaaaaaaaaaaaaaaaaaaaaaaaaaaaaaaaaaaaaaaaaaaaaaaaaaaaaa

SEQ ID NO: 30832 - RNA, 1809 nt, Artificial Sequence
  mRNA product Design b-4 (hSL-A100) comprising derived and/or modified sequence from LASV(Lassa virus/H.sapiens-wt/NGA/2016/ISTH_0009;Clade II)__AVO03571__GPCmut6 (opt1)
aggagagucccgcagucggcguccagcggcucugcuuguucgugugugugucguugcaggccuuauucaagcuuaccaugggccagaucaucaccuucuuccaggaggugccccacgucaucgaggaggugaugaacaucgugcugaucgcccucagccugcuggccauccucaaggggaucuacaacgucgcgaccugcggccugcuggggcucguguccuuccugcugcucugcggccgcagcugcuccacgaccuacaaggggguguacgagcugcagacccuggagcucgacauggccagccugaacaugugcaugccgcuguccugcaccaagaacaacagccaccacuacaucauggucggcaacgagacgggccucgagcugacccugaccaacaccuccaucaucaaccacaaguucugcaaccucagcgacgcccacaagaagaaccuguacgaccacgcccugauguccaucaucagcacguuccaccucuccauccccaacuucaaccaguacgaggccaugagcugcgacuucaacgggggccggaucuccgugcaguacaaccugagccacuccuacgcgguggacgccgccaaccacugcgggaccaucgccaacggcguccugcagaccuucaugcgcauggcguggggcgggagcuacaucgcccucgacuccggcaaggggagcugggacugcaucaugaccuccuaccaguaccugaucauccagaacacgaccugggaggaccacugccaguucagccggcccagccccaucggcuaccuggggcuccugucccagcgcacccgggacaucuacaucagccgccggcugcucggcaccuucacguggacccuguccgacagcgagggcaacgagacccccgggggcuacugccugacccgcuggaugcucaucgaggccgagcugaagugcuucgggaacacggccguggccaagugcaacgagaagcacgacgaggaguucugcgacaugcugcggcuguucgacuucugcaagcaggcgauccgccggcugaagaccccggcccagauguccauccagcugaucaacaaggccgugaacgcccucaucaacgaccagcugaucaugaagaaccaccuccgcgacaucaugggcauccccuacugcaacuacagcaaguacugguaccucaaccacaccgucaccgggaagacgucccugccccggugcuggcuggugagcaacggcuccuaccucaacgagacccacuucagcgacgacaucgagcagcaggccgacaacaugaucaccgagcugcugcagaaggaguacaucgaccgccagggcaagaccccgcuggggcucguggaccuguucgucuucuccacgagcuucuaccugaucuccaucuuccuccaccuggugaagauccccacccaccggcacaucaccggcaagcccugccccaagccgcaccgccugaaccacauggggaucugcagcugcggccucuacaaccaccccggggugcccgucaaguggaagcggugaggacuaguaauaaggaaacuguaugaaugucugugggcaggaagugaagagauccuucuguaaagguuuuuggaauuaugucugcugaauaauaaacuuuuuugaaauaauaaaucugguagaaaaaugagaucucaaaggcucuuuucagagccaccaaaaaaaaaaaaaaaaaaaaaaaaaaaaaaaaaaaaaaaaaaaaaaaaaaaaaaaaaaaaaaaaaaaaaaaaaaaaaaaaaaaaaaaaaaaaaaaaaaaaa

SEQ ID NO: 30833 - RNA, 1809 nt, Artificial Sequence
  mRNA product Design b-4 (hSL-A100) comprising derived and/or modified sequence from LASV(Lassa virus/H.sapiens-wt/NGA/2016/ISTH_0017;Clade II)__AVO03567__GPCmut6 (opt1)
aggagagucccgcagucggcguccagcggcucugcuuguucgugugugugucguugcaggccuuauucaagcuuaccaugggccagaucaucaccuucuuccaggaggugccccacgucaucgaggaggugaugaacaucgugcugaucgcccucagccugcuggccauccucaaggggaucuacaacgucgcgaccugcggccuguucgggcugguguccuuccuccugcugugcggccgcagcugcuccacgaccuacaaggggguguacgagcuccagacccuggagcuggacauggccagccucaacaugugcaugccgcuguccugcaccaagaacaacagccaccacuacaucauggucggcaacgagacgggccuggagcucacccugaccaacaccuccaucaucaaccacaaguucugcaaccugagcgacgcccacaagaagaaccucuacgaccacgcccugauguccaucaucagcacguuccaccuguccauccccaacuucaaccaguacgaggccaugagcugcgacuucaacgggggcaagaucuccgugcaguacaaccucagccacaccuacgcgaucgacgccgccaaccacugcgggaccaucgccaacggcgugcugcagaccuucaugcggauggcguggggcggguccuacaucgcccuggacagcggcaagggguccugggacugcaucaugacgagcuaccaguaccucaucauccagaacaccaccugggaggaccacugccaguucucccgccccagccccaucggcuaccuggggcugcucagccagcggacccgcgacaucuacaucucccggcgccugcugggcacguucaccuggacccucagcgacuccgagggcaacgagacccccgggggcuacugccugacgcgguggaugcugaucgaggccgagcucaagugcuucgggaacaccgccgucgccaagugcaacgagaagcacgacgaggaguucugcgacaugcugcgccuguucgacuucugcaagcaggcgauccggcgccucaagaccccggcccagaugagcauccagcugaucaacaaggccgugaacgcccugaucaacgaccagcucaucaugaagaaccaccuccgggacaucaugggcauccccuacugcaacuacuccaaguacugguaccugaaccacaccgugacggggaagaccagccugccccgcugcuggcuggucuccaacggcagcuaccugaacgagacccacuucuccgacgacaucgagcagcaggccgacaacaugaucaccgagcuccugcagaaggaguacauggaccggcagggcaagacgccgcuggggcugguggaccucuucguguucagcaccuccuucuaccugaucagcaucuuccugcaccucguccgcauccccacccaccggcacgugaucggcaagcccugccccaagccgcaccgccugaaccacauggggaucugcuccugcggccuguacaagcaccccggggugcccgucaaguggaagcggugaggacuaguaauaaggaaacuguaugaaugucugugggcaggaagugaagagauccuucuguaaagguuuuuggaauuaugucugcugaauaauaaacuuuuuugaaauaauaaaucugguagaaaaaugagaucucaaaggcucuuuucagagccaccaaaaaaaaaaaaaaaaaaaaaaaaaaaaaaaaaaaaaaaaaaaaaaaaaaaaaaaaaaaaaaaaaaaaaaaaaaaaaaaaaaaaaaaaaaaaaaaaaaaaa

SEQ ID NO: 30834 - RNA, 1809 nt, Artificial Sequence
  mRNA product Design b-4 (hSL-A100) comprising derived and/or modified sequence from LASV(Lassa virus/H.sapiens-wt/NGA/2018/ISTH_0959;Clade II)__AVV65099__GPCmut6 (opt1)
aggagagucccgcagucggcguccagcggcucugcuuguucgugugugugucguugcaggccuuauucaagcuuaccaugggccagaucaucaccuucuuccaggaggugccccacgucaucgaggaggugaugaacaucgugcugaucgcccucagccugcuggccauccucaaggggaucuacaacgucgugaccugcggccuguucgggcugguguccuuccuccugcugugcggccgcagcugcuccacgaccuacaagggggucuacgagcuccagacccuggagcuggacauggcgagccucaacaugugcaugccgcuguccugcaccaagaacaacagccaccacuacaucauggugggcaacgagacgggccuggagcucacccugaccaacaccuccaucaucaaccacaaguucugcaaccugagcgacgcccacaagaagaaccucuacgaccacgcccugauguccaucaucagcacguuccaccuguccauccccaacuucaaccaguacgaggccaugagcugcgacuucaacgggggcaagaucuccgugcaguacaaccucagccacgccuacgcgaucgacgccgccaaccacugcgggaccaucgccaacggcguccugcagaccuucaugcggauggcguggggcggguccuacaucgcccuggacagcggcaagggguccugggacugcaucaugaccagcuaccaguaccucaucauccagaacacgaccugggaggaccacugccaguucucccgccccagccccaucggcuaccuggggcugcucagccagcggacccgcgacaucuacaucucccggcgccugcugggcaccuucacguggacccucagcgacuccgagggcaacgagacccccgggggcuacugccugacccgguggaugcugaucgaggccgagcucaagugcuucgggaacacggccguggccaagugcaacgagaagcacgacgaggaguucugcgacaugcugcgccuguucgacuucugcaagcaggcgauccggcgccucaagaccccggcccagaugagcauccagcugaucaacaaggccgugaacgcccugaucaacgaccagcucaucaugaagaaccaccuccgggacaucaugggcauccccuacugcaacuacuccaaguacugguaccugaaccacaccgucaccgggaagacgagccugccccgcugcuggcugguguccaacggcagcuaccugaacgagacccacuucuccgacgacaucgagcagcaggccgacaacaugaucaccgagcuccugcagaaggaguacaucgaccggcagggcaagaccccgcuggggcugguggaccucuucgucuucagcacguccuucuaccugaucagcaucuuccugcaccucgugaagauccccacccaccgccacgugaucggcaagcccugccccaagccgcaccggcugaaccacauggggaucugcuccugcggccuguacaagcaccccgggguccccgugaaguggaagcgcugaggacuaguaauaaggaaacuguaugaaugucugugggcaggaagugaagagauccuucuguaaagguuuuuggaauuaugucugcugaauaauaaacuuuuuugaaauaauaaaucugguagaaaaaugagaucucaaaggcucuuuucagagccaccaaaaaaaaaaaaaaaaaaaaaaaaaaaaaaaaaaaaaaaaaaaaaaaaaaaaaaaaaaaaaaaaaaaaaaaaaaaaaaaaaaaaaaaaaaaaaaaaaaaaa

SEQ ID NO: 30835 - RNA, 1809 nt, Artificial Sequence
  mRNA product Design b-4 (hSL-A100) comprising derived and/or modified sequence from LASV(LASV003-NIG-2008;Clade II)__AIT17580__GPCmut6 (opt1)
aggagagucccgcagucggcguccagcggcucugcuuguucgugugugugucguugcaggccuuauucaagcuuaccaugggccagaucaucaccuucuuccaggaggugccccacgucaucgaggaggugaugaacaucgugcugaucgcccucagccugcuggccauccucaaggggaucuacaacgucgcgaccugcggccuguucgggcugguguccuuccuccugcugugcggccgcagcugcuccacgaccuacaaggggguguacgagcuccagacccuggagcuggacauggccagccucaacaugugcaugccgcuguccugcaccaagaacaacagccaccacuacaucauggucggcaacgagacgggccuggagcucacccugaccaacaccuccaucaucaaccacaaguucugcaaccugagcgacgcccacaagaagaaccucuacgaccacgcccugauguccaucaucagcacguuccaccuguccauccccaacuucaaccaguacgaggccaugagcugcgacuucaacgggggcaagaucuccgugcaguacaaccucagccacaccuacgcgguggacgccgccaaccacugcgggaccaucgccaacggcguccugcagaccuucaugcggauggcguggggcggguccuacaucgcccuggacagcggcaagggguccugggacugcaucaugacgagcuaccaguaccucaucauccagaacaccaccugggaggaccacugccaguucucccgccccagccccaucggcuaccuggggcugcucagccagcggacccgcgacaucuacaucucccggcgccugcugggcacguucaccuggacccucagcgacuccgagagcaacgagaccccgggcggguacugccugacgcgguggaugcugaucgaggccgagcucaagugcuucggcaacaccgccguggccaagugcaacgagaagcacgacgaggaguucugcgacaugcugcgccuguucgacuucugcaagcaggcgauccggcgccucaaggcccccgcccagauguccauccagcugaucaacaaggccgugaacgcccugaucaacgaccagcucaucaugaagaaccaccuccgggacaucauggggauccccuacugcaacuacagcaaguacugguaccugaaccacaccgucaccggccgcacgucccugccccggugcuggcuggugagcaacggguccuaccugaacgagacccacuucagcgacgacaucgagcagcaggcggacaacaugaucaccgagcuccugcagaaggaguacauggaccgccagggcaagaccccgcugggccugguggaccucuucgucuucuccacgagcuucuaccugaucuccaucuuccugcaccucgugaagauccccacccaccggcacgugaucgggaagcccugccccaagccgcaccgccugaaccacaugggcaucugcagcugcgggcuguacaagcaccccggcguccccgugaaguggaagcggugaggacuaguaauaaggaaacuguaugaaugucugugggcaggaagugaagagauccuucuguaaagguuuuuggaauuaugucugcugaauaauaaacuuuuuugaaauaauaaaucugguagaaaaaugagaucucaaaggcucuuuucagagccaccaaaaaaaaaaaaaaaaaaaaaaaaaaaaaaaaaaaaaaaaaaaaaaaaaaaaaaaaaaaaaaaaaaaaaaaaaaaaaaaaaaaaaaaaaaaaaaaaaaaaa

SEQ ID NO: 30836 - RNA, 1809 nt, Artificial Sequence
  mRNA product Design b-4 (hSL-A100) comprising derived and/or modified sequence from LASV(LASV035-NIG-2009;Clade II)__AIT17588__GPCmut6 (opt1)
aggagagucccgcagucggcguccagcggcucugcuuguucgugugugugucguugcaggccuuauucaagcuuaccaugggccagaucaucaccuucuuccaggaggugccccacgucaucgaggaggugaugaacaucgugcugaucgcccucagccugcuggccauccucaaggggaucuacaacgucgcgaccugcggccuguucgggcugguguccuuccuccugcugugcggccgcagcugcuccacgaccuacaaggggguguacgagcuccagacccuggagcuggacauggccagccucaacaugugcaugccgcuguccugcaccaagaacaacagccaccacuacaucauggucggcaacgagacgggccuggagcucacccugaccaacaccuccaucaucaaccacaaguucugcaaccugagcgacgcccacaagaagaaccucuacgaccacgcccugauguccaucaucagcacguuccaccuguccauccccaacuucaaccaguacgaggccaugagcugcgacuucaacgggggcaagaucuccgugcaguacaaccucagccacgcguacgccguggacgccgccaaccacugcgggaccaucgcgaacggcguccugcagaccuucaugcggauggccuggggcggguccuacaucgcccuggacagcggcaagggguccugggacugcaucaugaccagcuaccaguaccucaucauccagaacacgaccugggaggaccacugccaguucucccgccccagccccaucggcuaccuggggcugcucagccagcggacccgcgacaucuacaucucccggcgccugcugggcaccuucacguggacccucagcgacuccgagggcaacgagacccccgggggcuacugccugacccgguggaugcugaucgaggccgagcucaagugcuucgggaacacggccguggcgaagugcaacgagaagcacgacgaggaguucugcgacaugcugcgccuguucgacuucugcaagcaggccauccggcgccucaaggccccggcccagaugagcauccagcugaucaacaaggccgugaacgcgcugaucaacgaccagcucaucaugaagaaccaccuccgggacaucaugggcauccccuacugcaacuacuccaaguacugguaccugaaccacaccgucaccgggaagaccagccugccccgcugcuggcugguguccaacggcagcuaccugaacgagacgcacuucuccgacgacaucgagcagcaggccgacaacaugaucaccgagcuccugcagaaggaguacaucgaccggcagggcaagaccccgcuggggcugguggaccucuucgucuucagcaccuccuucuaccugaucagcaucuuccugcaccucgugaagauccccacgcaccgccacgugaucggcaagcccugccccaagccgcaccggcugaaccacauggggaucugcuccugcggccuguacaagcaccccgggguccccgugaaguggaagcgcugaggacuaguaauaaggaaacuguaugaaugucugugggcaggaagugaagagauccuucuguaaagguuuuuggaauuaugucugcugaauaauaaacuuuuuugaaauaauaaaucugguagaaaaaugagaucucaaaggcucuuuucagagccaccaaaaaaaaaaaaaaaaaaaaaaaaaaaaaaaaaaaaaaaaaaaaaaaaaaaaaaaaaaaaaaaaaaaaaaaaaaaaaaaaaaaaaaaaaaaaaaaaaaaaa

SEQ ID NO: 30837 - RNA, 1809 nt, Artificial Sequence
  mRNA product Design b-4 (hSL-A100) comprising derived and/or modified sequence from LASV(LASV1000-NIG-2009;Clade II)__AIT17782__GPCmut6 (opt1)
aggagagucccgcagucggcguccagcggcucugcuuguucgugugugugucguugcaggccuuauucaagcuuaccaugggccagaucaucaccuucuuccaggaggugccccacgucaucgaggaggugaugaacaucgugcugaucgcccucagccugcuggccauccucaaggggaucuacaacgucgcgaccugcggccuguucgggcugguguccuuccuccugcugugcggccgcagcugcuccacgaccuacaaggggguguacgagcuccagacccuggagcuggacauggccagccucaacaugugcaugccgcuguccugcaccaagaacaacagccaccacuacaucauggucggcaacgagacgggccuggagcucacccugaccaacaccuccaucaucaaccacaaguucugcaaccugagcgacgcccacaagaagaaccucuacgaccacgcccugauguccaucaucagcacguuccaccuguccauccccaacuucaaccaguacgaggccaugagcugcgacuucaacgggggcaagaucuccgugcaguacaaccucagccacaccuacgcgguggacgccgccaaccacugcgggaccaucgccaacggcguccugcagaccuucaugcggauggcguggggcggguccuacaucgcccuggacagcggcaagggguccugggacugcaucaugacgagcuaccaguaccucaucauccagaacaccaccugggaggaccacugccaguucucccgccccagccccaucggcuaccuggggcugcucagccagcggacccgcgacaucuacaucucccggcgccugcugggcacguucaccuggacccucagcgacuccgagggcaacgagacccccgggggcuacugccugacgcgguggaugcugaucgaggccgagcucaagugcuucgggaacaccgccguggccaagugcaacgagaagcacgacgaggaguucugcgacaugcugcgccuguucgacuucugcaagcaggcgaucaagcggcucaagaccccggcccagaugagcauccagcugaucaacaaggccgugaacgcccugaucaacgaccagcucaucaugaagaaccaccuccgcgacaucaugggcauccccuacugcaacuacuccaaguacugguaccugaaccacaccgucacggggaagaccagccugccccggugcuggcugguguccaacggcagcuaccugaacgagacccacuucuccgacgacaucgagcagcaggccgacaacaugaucaccgagcuccugcagaaggaguacaucgaccgccagggcaagacgccgcuggggcugguggaccucuucgucuucagcaccuccuucuaccugaucagcaucuuccugcaccucgugaagauccccacccaccggcacguggucggcaagcccugccccaagccgcaccgccugaaccacauggggaucugcuccugcggccuguacaagcaccccggggugcccgugaaguggaagcggugaggacuaguaauaaggaaacuguaugaaugucugugggcaggaagugaagagauccuucuguaaagguuuuuggaauuaugucugcugaauaauaaacuuuuuugaaauaauaaaucugguagaaaaaugagaucucaaaggcucuuuucagagccaccaaaaaaaaaaaaaaaaaaaaaaaaaaaaaaaaaaaaaaaaaaaaaaaaaaaaaaaaaaaaaaaaaaaaaaaaaaaaaaaaaaaaaaaaaaaaaaaaaaaaa

SEQ ID NO: 30838 - RNA, 1809 nt, Artificial Sequence
  mRNA product Design b-4 (hSL-A100) comprising derived and/or modified sequence from LASV(LASV221-NIG-2010;Clade II)__AIT17624__GPCmut6 (opt1)
aggagagucccgcagucggcguccagcggcucugcuuguucgugugugugucguugcaggccuuauucaagcuuaccaugggccagaucaucaccuucuuccaggaggugccccacgucaucgaggaggugaugaacaucgugcugaucgcccucagccugcuggccauccucaaggggaucuacaacgucgcgaccugcggccuguucgggcugguguccuuccuccugcugugcggccgcagcugcuccacgaccuacaaggggguguacgagcuccagacccuggagcuggacauggccagccucaacaugugcaugccgcuguccugcaccaagaacaacagccaccacuacaucauggucggcaacgagacgggccuggagcucacccugaccaacaccuccaucaucaaccacaaguucugcaaccugagcgacgcccacaagaagaaccucuacgaccacgcccugauguccaucaucagcacguuccaccuguccauccccaacuucaaccaguacgaggccaugagcugcgacuucaacgggggcaagaucuccgugcaguacaaccucagccacaccuacgcgaucgacgccgccaaccacugcgggaccaucgccaacggcgugcugcagaccuucaugcggauggcguggggcggguccuacaucgcccuggacagcggcaagggguccugggacugcaucaugacgagcuaccaguaccucaucauccagaacaccaccugggaggaccacugccaguucucccgccccagccccaucggcuaccuggggcugcucagccagcggacccgcgacaucuacaucucccggcgccugcugggcacguucaccuggacccucagcgacuccgagggcaacgagacccccgggggcuacugccugacgcgguggaugcugaucgaggccgagcucaagugcuucgggaacaccgccgucgccaagugcaacgagaagcacgacgaggaguucugcgacaugcugcgccuguucgacuucugcaagcaggcgauccggcgccucaagaccccggcccagaugagcauccagcugaucaacaaggccgugaacgcccugaucaacgaccagcucaucaugaagaaccaccuccgggacaucaugggcauccccuacugcaacuacuccaaguacugguaccugaaccacaccgugacggggaagaccagccugccccgcugcuggcuggucuccaacggcagcuaccugaacgagacccacuucuccgacgacaucgagcagcaggccgacaacaugaucaccgagaugcuccagaaggaguacauggaccggcagggcaagacgccgcuggggcugguggaccuguucguguucagcaccuccuucuaccucaucagcaucuuccugcaccuggucaagauccccacccaccgccacgugaucggcaagcccugccccaagccgcaccggcucaaccacauggggaucugcuccugcggccuguacaagcaccccggggugcccgucaaguggaagcgcugaggacuaguaauaaggaaacuguaugaaugucugugggcaggaagugaagagauccuucuguaaagguuuuuggaauuaugucugcugaauaauaaacuuuuuugaaauaauaaaucugguagaaaaaugagaucucaaaggcucuuuucagagccaccaaaaaaaaaaaaaaaaaaaaaaaaaaaaaaaaaaaaaaaaaaaaaaaaaaaaaaaaaaaaaaaaaaaaaaaaaaaaaaaaaaaaaaaaaaaaaaaaaaaaa

SEQ ID NO: 30839 - RNA, 1809 nt, Artificial Sequence
  mRNA product Design b-4 (hSL-A100) comprising derived and/or modified sequence from LASV(LASV237-NIG-2010;Clade II)__AIT17638__GPCmut6 (opt1)
aggagagucccgcagucggcguccagcggcucugcuuguucgugugugugucguugcaggccuuauucaagcuuaccaugggccagaucaucaccuucuuccaggaggugccccacgucaucgaggaggugaugaacaucgugcugaucgcccucagccugcuggccauccucaaggggaucuacaacgucgcgaccugcggccuguucgggcugguguccuuccuccugcugugcggccgcagcugcuccacgaccuacaaggggguguacgagcuccagacccuggagcuggacauggccagccucaacaugugcaugccgcuguccugcaccaagaacaacagccaccacuacaucauggucggcaacgagacgggccuggagcucacccugaccaacaccuccaucaucaaccacaaguucugcaaccugagcgacgcccacaagaaggaccucuacgaccacgcccugauguccaucaucagcacguuccaccuguccauccccaacuucaaccaguacgaggccaugagcugcgacuucaacgggggcaagaucuccgugcaguacaaccucagccacaccuacgcgguggacgccgccaaccacugcgggaccaucgccaacggcguccugcagaccuucaugcggauggcguggggcggguccuacaucgcccuggacagcggcaagggguccugggacugcaucaugacgagcuaccaguaccucaucauccagaacaccaccugggaggaccacugccaguucucccgccccagccccaucggcuaccuggggcugcucagccagcggacccgcgacaucuacaucucccggcgccugcugggcacguucaccuggacccucagcgacuccgagggcaacgagacccccgggggcuacugccugacgcgguggaugcugaucgaggccgagcucaagugcuucgggaacaccgccguggccaagugcaacgagaagcacgacgaggaguucugcgacaugcugcgccuguucgacuucugcaagcaggcgauccggcgccucaagaccccggcccagaugagcauccagcugaucaacaaggccgugaacgcccugaucaacgaccagcucaucaugaagaaccaccuccgggacaucaugggcauccccuacugcaacuacuccaaguacugguaccugaaccacaccgucacggggaagaccagccugccccgcugcuggcugguguccaacggcagcuaccugaacgagacccacuucuccgacgacaucgagcagcaggccgacaacaugaucaccgagcuccugcagaaggaguacauggaccggcagggcaagacgccgcuggggcugguggaccucuucgucuucagcaccuccuucuaccugaucagcaucuuccugcaccucaucaagauccccacccaccgccacaucaccggcaagcccugccccaagccgcaccggcugaaccacauggggaucugcuccugcggccuguacaagcaccccggggugcccgugaaguggaagcgcugaggacuaguaauaaggaaacuguaugaaugucugugggcaggaagugaagagauccuucuguaaagguuuuuggaauuaugucugcugaauaauaaacuuuuuugaaauaauaaaucugguagaaaaaugagaucucaaaggcucuuuucagagccaccaaaaaaaaaaaaaaaaaaaaaaaaaaaaaaaaaaaaaaaaaaaaaaaaaaaaaaaaaaaaaaaaaaaaaaaaaaaaaaaaaaaaaaaaaaaaaaaaaaaaa

SEQ ID NO: 30840 - RNA, 1809 nt, Artificial Sequence
  mRNA product Design b-4 (hSL-A100) comprising derived and/or modified sequence from LASV(LASV253-NIG-2011;Clade II)__AIT17670__GPCmut6 (opt1)
aggagagucccgcagucggcguccagcggcucugcuuguucgugugugugucguugcaggccuuauucaagcuuaccaugggccagaucaucaccuucuuccaggaggugccccacgucaucgaggaggugaugaacaucgugcugaucgcccucagccugcuggccauccucaaggggaucuacaacgucgcgaccugcggccuguucgggcugguguccuuccuccugcugugcggccgcagcugcuccacgaccuacaaggggguguacgagcuccagacccuggagcuggacauggccagccucaacaugugcaugccgcuguccugcaccaagaacaacagccaccacuacaucauggucggcaacgagacgggccuggagcucacccugaccaacaccuccaucaucaaccacaaguucugcaaccugagcgacgcccacaagaagaaccucuacgaccacgcccugauguccaucaucagcacguuccaccuguccauccccaacuucaaccaguacgaggccaugagcugcgacuucaacgggggcaagaucuccgugcaguacaaccucagccacaccuacgcgguggacgccgccaaccacugcgggaccaucgccaacggcguccugcagaccuucaugcggauggcguggggcggguccuacaucgcccuggacagcggcaagggguccugggacugcaucaugacgagcuaccaguaccucaucauccagaacaccaccugggaggaccacugccaguucucccgccccagccccaucggcuaccuggggcugcucagccagcggacccgcgacaucuacaucucccggcgccugcugggcacguucaccuggacccucagcgacuccgagggcaacgagacccccgggggcuacugccugacgcgguggaugcugaucgaggccgagcucaagugcuucgggaacaccgccguggccaagugcaacgagaagcacgacgaggaguucugcgacaugcugcgccuguucgacuucugcaagcaggcgauccggcgccucaaggccccggcccagaugagcauccagcugaucaacaaggccgugaacgcccugaucaacgaccagcucaucaugaagaaccaccuccgggacaucaugggcauccccuacugcaacuacuccaaguacugguaccugaaccacaccgucaccgggcgcacgagccugccccggugcuggcugguguccaacggcagcuaccugaacgagacccacuucuccgacgacaucgagcagcaggcggacaacaugaucaccgagcuccugcagaaggaguacaucgaccgccagggcaagaccccgcuggggcugguggaccucuucgucuucagcacguccuucuaccugaucagcaucuuccugcaccucgugaagauccccacccaccggcacaucaucggcaagcccugccccaagccgcaccgccugaaccacauggggaucugcuccugcggccuguacaagcaccccggggugcccgucaaguggaagcggugaggacuaguaauaaggaaacuguaugaaugucugugggcaggaagugaagagauccuucuguaaagguuuuuggaauuaugucugcugaauaauaaacuuuuuugaaauaauaaaucugguagaaaaaugagaucucaaaggcucuuuucagagccaccaaaaaaaaaaaaaaaaaaaaaaaaaaaaaaaaaaaaaaaaaaaaaaaaaaaaaaaaaaaaaaaaaaaaaaaaaaaaaaaaaaaaaaaaaaaaaaaaaaaaa

SEQ ID NO: 30841 - RNA, 1809 nt, Artificial Sequence
  mRNA product Design b-4 (hSL-A100) comprising derived and/or modified sequence from LASV(LASV254-NIG-2011;Clade II)__AIT17674__GPCmut6 (opt1)
aggagagucccgcagucggcguccagcggcucugcuuguucgugugugugucguugcaggccuuauucaagcuuaccaugggccagaucaucaccuucuuccaggaggugccccacgucaucgaggaggugaugaacaucgugcugaucgcccucagccugcuggccauccucaaggggaucuacaacgucgcgaccugcggccuguucgggcugguguccuuccuccugcugugcggccgcagcugcuccacgaccuacaaggggguguacgagcuccagacccuggagcuggacaugaccaaccucaacaugugcaugccgcugagcugcacgaagaacaacucccaccacuacaucauggucggcaacgagaccggccuggagcucacccugaccaacacgagcaucaucaaccacaaguucugcaaccuguccgacgcccacaagaagaaccucuacaaccacgcccugaugagcaucaucuccaccuuccaccugagcauccccaacuucaaccaguacgaggccauguccugcgacuucaacgggggcaagaucagcgugcaguacaaccucucccacagcuacgccguggacgcggccaaccacugcgggaccaucgccaacggcguccugcagaccuucaugcggauggccuggggcggguccuacaucgcgcuggacagcggcaaggggaacugggacugcaucaugacguccuaccaguaccucaucauccagaacaccaccugggaggaccacugccaguucagccgccccucccccaucggcuaccuggggcugcucagccagcggacccgcgacaucuacaucagccggcgccugcugggcacguucaccuggacccucuccgacagcgagggcaacgagacccccgggggcuacugccugacgcgguggaugcugaucgaggccgagcucaagugcuucgggaacaccgccguggccaagugcaacgagaagcacgacgaggaguucugcgacaugcugcgccuguucgacuucugcaagcaggccauccggcgccucaagaccccggcgcaggccaacauccagcugaucaacaaggccgugaacgcccugaucaacgaccagcucaucaugaagaaccaccuccgggacaucaugggcauccccuacugcaacuacuccaaguacugguaccugaaccacaccgucacggggaagaccagccugccccgcugcuggcugguguccaacggcagcuaccugaacgagacccacuucuccgacgacaucgagcagcaggccgacaacaugaucaccgagcuccugcagaaggaguacauggaccggcagggcaagacgccgcuggggcugguggaccucuucgucuucagcaccuccuucuaccugaucagcaucuuccugcaccucgugaagauccccacccaccgccacgugaucggcaagcccugccccaagccgcaccggcugaaccacauggggaucugcuccugcggccuguacaagcaccccgggguccccgugaaguggaagcgcugaggacuaguaauaaggaaacuguaugaaugucugugggcaggaagugaagagauccuucuguaaagguuuuuggaauuaugucugcugaauaauaaacuuuuuugaaauaauaaaucugguagaaaaaugagaucucaaaggcucuuuucagagccaccaaaaaaaaaaaaaaaaaaaaaaaaaaaaaaaaaaaaaaaaaaaaaaaaaaaaaaaaaaaaaaaaaaaaaaaaaaaaaaaaaaaaaaaaaaaaaaaaaaaaa

SEQ ID NO: 30842 - RNA, 1809 nt, Artificial Sequence
  mRNA product Design b-4 (hSL-A100) comprising derived and/or modified sequence from LASV(Nig08-A19;Clade III)__ADU56618__GPCmut6 (opt1)
aggagagucccgcagucggcguccagcggcucugcuuguucgugugugugucguugcaggccuuauucaagcuuaccaugggccagaucgugaccuucuuccaggaggucccccacgugaucgaggaggugaugaacaucguccugaucgcccucagcauccuggccauccugaaggggcucuacaacaucgcgaccugcggccugaucgggcuggugacguuccuccugcuguccggccgcagcugcuccaugaccuacaaggggguguacgagcuccagacccuggagcugaacaugaacacccucaacaugugcaugccgcugagcugcacgaagaacaacucccaccacuacaucauggucggcaacgagaccggccuggagcucacccugaccaacacgagccugcuccaccacaaguucugcaaccuguccgacgcccacaagaagaaccuguacgaccacacccucaugagcaucaucuccaccuuccaccugagcauccccaacuucaaccaguacgaggccauguccugcgacuucaacgggggcaagaucaccgugcaguacaaccugagccacuccuacgccaucgacgccgcgaaccacugcgggacgguggccaacggcguccuccagaccuucaugcggauggccuggggcgggagcuacaucgcccuggacuccggccgcgggaagugggacugcaucaugaccagcuaccaguaccugaucauccagaacaccacgugggaggaccacugccaguucucccggcccagccccaucggcuaccucgggcugcugucccagcgcacccgggacaucuacaucagccgccggcuccugggcaccuucaccuggacgcugagcgacuccgagggcaacgagacccccgggggcuacugccucacccgcuggaugcugaucgaggcggagcugaagugcuucgggaacaccgccguggccaagugcaacgagaagcacgacgaggaguucugcgacaugcuccggcuguucgacuucugcaagcaggccauccgccggcugaaggccccggcgcagaugagcauccagcucaucaacaaggccgugaacgcccugaucaacgaccagcugaucaugaagaaccaccuccgcgacaucaugggcauccccuacugcaacuacuccaaguacugguaccugaaccacacgagcaccgggcggaccucccugccccgcugcuggcucgucagcaacggcuccuaccugaacgagacccacuucagcgacgacaucgagcagcaggccgacaacaugaucacggagaugcugcagaaggaguaccuggaccggcagggcaagaccccgcucgggcugguggaccuguucguguucuccaccagcuucuaccucaucuccaucuuccugcaccuggucaagauccccacccaccgccacaucgugggcaagcccugccccaagccgcaccggcucaaccacauggggaucugcagcugcggccuguacaagcagcccggggugcccguccgcuggaagcggugaggacuaguaauaaggaaacuguaugaaugucugugggcaggaagugaagagauccuucuguaaagguuuuuggaauuaugucugcugaauaauaaacuuuuuugaaauaauaaaucugguagaaaaaugagaucucaaaggcucuuuucagagccaccaaaaaaaaaaaaaaaaaaaaaaaaaaaaaaaaaaaaaaaaaaaaaaaaaaaaaaaaaaaaaaaaaaaaaaaaaaaaaaaaaaaaaaaaaaaaaaaaaaaaa

SEQ ID NO: 30843 - RNA, 1812 nt, Artificial Sequence
  mRNA product Design b-4 (hSL-A100) comprising derived and/or modified sequence from LASV(G1180-SLE-2010;Clade IV)__AIT17168__GPCmut6 (opt1)
aggagagucccgcagucggcguccagcggcucugcuuguucgugugugugucguugcaggccuuauucaagcuuaccaugggccagaucgugaccuucuuccaggaggucccccacgugaucgaggaggugaugaacaucguccugaucgcccucagcauccuggccgugcugaaggggcucuacaacuucgcgaccugcggccugguggggcugcucacguuccugcugcucugcggccgcuccugcaccgccagccgguacaagggggucuacgagcugcagacccuggagcucaacauggagacccugaacaugugcaugccgcuguccugcacgaagaacaacagccaccacuacaucauggugggcaacgagaccggccucgagcugacccugaccaacacguccaucaucaaccacaaguucugcaaccucagcgacgcccacaagaagaaccuguacgaccacgcccugauguccaucaucagcaccuuccaccucuccauccccaacuucaaccaguacgaggccaugagcugcgacuucaacgggggcaagaucuccgugcaguacaaccugagccacuccuacgcgggggacgccgccaaccacugcggcaccgucgccaacggggugcugcagaccuucaugcgcauggcguggggcggcagcuacaucgcccucgacuccgggcacggcagcugggacugcaucaugacguccuaccaguaccugaucauccagaacaccaccugggaggaccacugccaguucagccggcccucccccaucggguaccugggccuccugagccagcgcacccgggacaucuacaucagccgccggcugcucggcacguucaccuggacccuguccgacagcgaggggaaggacaccccgggcggguacugccugacgcgcuggaugcucaucgaggccgagcugaagugcuucggcaacaccgccguggccaagugcaacgagaagcacgacgaggaguucugcgacaugcugcggcuguucgacuucugcaagcaggcgauccagcgccugaaggcccccgcccagauguccauccagcugaucaacaaggccgucaacgcccucaucaacgaccagcugaucaugaagaaccaccuccgggacaucauggggauccccuacugcaacuacagcaaguacugguaccucaaccacaccaccacgggcaagaccucccugcccaagugcuggcuggugagcaacggcuccuaccucaacgagacccacuucagcgacgacaucgagcagcaggcggacaacaugaucaccgagaugcugcagaaggaguacauggagcgccaggggaagacgccgcugggccugguggaccucuucgucuucuccaccagcuucuaccugaucuccaucuuccugcaccucgugaagauccccacccaccggcacaucgugggcaagagcugccccaagccccaccgccugaaccacauggggaucugcuccugcgggcuguacaagcagccgggcguccccgugaaguggaagcggugaggacuaguaauaaggaaacuguaugaaugucugugggcaggaagugaagagauccuucuguaaagguuuuuggaauuaugucugcugaauaauaaacuuuuuugaaauaauaaaucugguagaaaaaugagaucucaaaggcucuuuucagagccaccaaaaaaaaaaaaaaaaaaaaaaaaaaaaaaaaaaaaaaaaaaaaaaaaaaaaaaaaaaaaaaaaaaaaaaaaaaaaaaaaaaaaaaaaaaaaaaaaaaaaa

SEQ ID NO: 30844 - RNA, 1812 nt, Artificial Sequence
  mRNA product Design b-4 (hSL-A100) comprising derived and/or modified sequence from LASV(G1442-SLE-2011;Clade IV)__AIT17180__GPCmut6 (opt1)
aggagagucccgcagucggcguccagcggcucugcuuguucgugugugugucguugcaggccuuauucaagcuuaccaugggccagaucgugaccuucuuccaggaggucccccacgugaucgaggaggugaugaacaucguccugaucgcccucagcauccuggccgugcugaaggggcucuacaacguggcgaccugcggccugaucgggcuggucacguuccuccugcugugcggccgcuccugcaccaccacccucuacaaggggguguacgagcugcagacgcuggagcucaacauggagacccugaacaugugcaugccgcugagcugcaccaagaacaacucccaccacuacauccgggugggcaacgagaccggccucgagcugacgcugaccaacaccagcaucaucaaccacaaguucugcaaccucuccgacgcccacaagaagaaccuguacgaccacgcccugaugagcaucaucuccaccuuccaccucagcauccccaacuucaaccaguacgaggccauguccugcgacuucaacgggggcaagaucagcguccaguacaaccugucccacagcuacgccggggacgcggccaaccacugcggcacgguggccaacggggugcugcagaccuucaugcgcauggccuggggcggcuccuacaucgcgcucgacagcgggcggggcaacugggacugcaucaugaccuccuaccaguaccugaucauccagaacaccacgugggacgaccacugccaguucagccgccccucccccaucggguaccugggccuccugagccagcggacccgcgacgucuacaucucccggcgccugcucggcaccuucaccuggacgcugagcgacagcgaggggaaggacaccccgggcggguacugccugacccgguggaugcucaucgaggccgagcugaagugcuucggcaacaccgccguggccaagugcaacgagaagcacgacgaggaguucugcgacaugcugcgccucuucgacuucugcaagcaggccauccagcggcugaaggcgcccgcccagauguccauccagcugaucaacaaggccgugaacgcccucaucaacgaccagcugaucaugaagaaccaccuccgcgacaucauggggauccccuacugcaacuacagcaaguacugguaccugaacaacacggccaccggcaagaccucccugcccaagugcuggcugaucagcaacggcuccuaccucaacgagacccacuucagcgacgacaucgagcaggaggcggacaacaugaucacggagaugcugcagaaggaguacauggagcggcaggggaagaccccgcugggccuggucgaccucuucguguucuccaccagcuucuaccugaucuccaucuuccugcaccucgugaagauccccacccaccgccacaucgucggcaagagcugccccaagccccaccggcugaaccacauggggaucugcuccugcgggcuguacaagcagccgggcgugcccgugcgcuggaagcggugaggacuaguaauaaggaaacuguaugaaugucugugggcaggaagugaagagauccuucuguaaagguuuuuggaauuaugucugcugaauaauaaacuuuuuugaaauaauaaaucugguagaaaaaugagaucucaaaggcucuuuucagagccaccaaaaaaaaaaaaaaaaaaaaaaaaaaaaaaaaaaaaaaaaaaaaaaaaaaaaaaaaaaaaaaaaaaaaaaaaaaaaaaaaaaaaaaaaaaaaaaaaaaaaa

SEQ ID NO: 30845 - RNA, 1812 nt, Artificial Sequence
  mRNA product Design b-4 (hSL-A100) comprising derived and/or modified sequence from LASV(G3010-SLE-2013;Clade IV)__AIT17344__GPCmut6 (opt1)
aggagagucccgcagucggcguccagcggcucugcuuguucgugugugugucguugcaggccuuauucaagcuuaccaugggccagaucgugaccuucuuccaggaggucccccacgugaucgaggaggugaugaacaucguccugaucgcccucagcauccuggccgugcugaaggggcucuacaacuucgcgaccugcggccugguggggcuggucacguuccuccugcugugcggccgcuccugcaccaccagccucuacaaggggguguacgagcugcagacccuggagcucaacauggagacgcugaacaugugcaugccgcuguccugcaccaagaacaacagccaccacuacaucauggugggcaacgagaccggccucgagcugacccugacgaacaccuccaucaucaaccacaaguucugcaaccucagcgacgcccacaagaagaaccuguacaaccacgcccugauguccaucaucagcaccuuccaccucuccauccccaacuucaaccaguacgaggccaugagcugcgacuucaacgggggcaagaucuccguccaguacaaccugagccacuccuacgccggggacgcggccagccacugcggcaccguggccaacggggugcugcagacguucaugcggauggccuggggcggcuccuacaucgcgcucgacagcggguacggcaagugggacugcaucaugaccuccuaccaguaccugaucauccagaacaccaccugggaggaccacugccaguucagccgccccucccccaucggguaccugggccuccugagccagcggacgcgcgacaucuacaucagccggcgccugcucggcaccuucaccuggacccuguccgacagcgaggggaaggacacgccgggcggguacugccugacccgguggaugcucaucgaggccgagcugaagugcuucggcaacaccgccgucgccaagugcaacgagaagcacgacgaggaguucugcgacaugcugcgccucuucgacuucugcaagcaggccauccagcggcugaagacccccgcgcagauguccauccagcugaucaacaaggccgugaacgcccucaucaacgaccagcugaucaugaagaaccaccuccgcgacaucauggggauccccuacugcaacuacagcaaguacugguaccugaaccacacgaccaccggcaagaccucccugcccaagugcuggcuggugagcaacggcuccuaccucaacgagacgcacuucagcgacgacaucgagcagcaggccgacaacaugaucaccgagaugcugcagaaggaguacauggagcggcaggggaagaccccgcugggccuggucgaccucuucguguucuccaccagcuucuaccugaucuccaucuuccugcaccucgugaagauccccacgcaccgccacaucgucggcaagagcugccccaagccccaccggcugaaccacauggggaucugcuccugcgggcuguacaagcagccgggcgugcccgugcgcuggaagcggugaggacuaguaauaaggaaacuguaugaaugucugugggcaggaagugaagagauccuucuguaaagguuuuuggaauuaugucugcugaauaauaaacuuuuuugaaauaauaaaucugguagaaaaaugagaucucaaaggcucuuuucagagccaccaaaaaaaaaaaaaaaaaaaaaaaaaaaaaaaaaaaaaaaaaaaaaaaaaaaaaaaaaaaaaaaaaaaaaaaaaaaaaaaaaaaaaaaaaaaaaaaaaaaaa

SEQ ID NO: 30846 - RNA, 1812 nt, Artificial Sequence
  mRNA product Design b-4 (hSL-A100) comprising derived and/or modified sequence from LASV(G502-SLE-2009;Clade IV)__AIT17126__GPCmut6 (opt1)
aggagagucccgcagucggcguccagcggcucugcuuguucgugugugugucguugcaggccuuauucaagcuuaccaugggccagaucgugaccuucuuccaggaggucccccacgugaucgaggaggugaugaacaucguccugaucgcccucagcauccuggccgugcugaaggggcucuacaacuucgcgaccugcggccugguggggcugcucacguuccugcugcucugcggccgcuccugcaccaccgggcuguacaagggcgucuacgagcugcagacccucgagcugaacauggagacgcugaacaugugcaugccgcucagcugcaccaagaacaacucccaccacuacaucauggugggcaacgagaccgggcuggagcugacccucacgaacaccagcaucaucaaccacaaguucugcaaccuguccgacgcccacaagaagaaccuguacgaccacgcccucaugagcaucaucuccaccuuccaccugagcauccccaacuucaaccaguacgaggccauguccugcgacuucaacggcgggaagaucagcgugcaguacaaccugucccacagcuacgccggcgacgcggccgaccacugcgggaccgucgccaacggcgugcuccagacguucaugcggauggccuggggcggguccuacaucgcgcuggacagcggccgcgggcggugggacugcaucaugaccuccuaccaguaccugaucauccagaacaccaccugggaggaccacugccaguucagccgccccucccccaucggcuaccucggccugcugagccagcggacgcgcgacaucuacaucucccggcgccuccuggggaccuucaccuggacccugagcgacagcgagggcaaggacacgcccgggggcuacugccucacccgguggaugcugaucgaggccgagcugaagugcuucgggaacaccgccguggccaagugcaacgagaagcacgacgaggaguucugcgacaugcuccgccuguucgacuucugcaagcaggccauccagcggcugaaggcgccggcccagauguccauccagcucaucaacaaggccgucaacgcccugaucaacgaccagcuggugaugaagaaccaccuccgcgacaucaugggcauccccuacugcaacuacagccgguacugguaccugaaccacaccacgaccggccgcaccucccugcccaagugcuggcucgugagcaacggguccuaccugaacgagacccacuucagcgacgacaucgagcagcaggccgacaacaugaucacggagaugcugcagaaggaguacauggagcggcagggcaagaccccgcuggggcucgucgaccuguucguguucuccaccagcuucuaccugaucuccaucuuccuccaccuggugaagauccccacccaccgccacaucgucggcaagagcugccccaagccccaccggcugaaccacauggggaucugcuccugcggccucuacaagcagccgggcgugcccgugaaguggaagcgcugaggacuaguaauaaggaaacuguaugaaugucugugggcaggaagugaagagauccuucuguaaagguuuuuggaauuaugucugcugaauaauaaacuuuuuugaaauaauaaaucugguagaaaaaugagaucucaaaggcucuuuucagagccaccaaaaaaaaaaaaaaaaaaaaaaaaaaaaaaaaaaaaaaaaaaaaaaaaaaaaaaaaaaaaaaaaaaaaaaaaaaaaaaaaaaaaaaaaaaaaaaaaaaaaa

SEQ ID NO: 30847 - RNA, 1812 nt, Artificial Sequence
  mRNA product Design b-4 (hSL-A100) comprising derived and/or modified sequence from LASV(G733-SLE-2010;Clade IV)__AIT17154__GPCmut6 (opt1)
aggagagucccgcagucggcguccagcggcucugcuuguucgugugugugucguugcaggccuuauucaagcuuaccaugggccagaucgugaccuucuuccaggaggucccccacgugaucgaggaggugaugaacaucguccugaucgcccucagcauccuggccgugcugaaggggcucuacaacuucgcgaccugcggcaucguggggcuggucuccuuccugcuccugugcggccgcagcugcacgaccucccuguacaaggggguguacgagcuccagacccuggagcugaacauggagacccucaacaugugcaugccgcugagcugcacgaagaacaacucccaccacuacaucauggugggcaacgagaccggccuggagcucacccugaccaacacgagcaucaucaaccacaaguucugcaaccuguccgacgcccacaagaagaaccucuacgaccacgcccugaugagcaucaucuccaccuuccaccugagcauccccaacuucaaccaguacgaggccauguccugcgacuucaacgggggcaagaucagcguccaguacaaccucucccacagcuacgccggggacgcggccaaccacugcggcaccaucgccaacggggugcugcagaccuucaugcggauggccuggggcggcuccuacaucgcgcuggacagcgggcgcgaccggugggacugcaucaugacguccuaccaguaccucaucauccagaacaccaccugggaggaccacugccaguucagccgccccucccccaucggcuaccuggggcugcucagccagcggacccgcgacaucuacaucagccggcgccugcugggcacguucaccuggacccucuccgacagcgagggcaaggacacccccgggggcuacugccugacgcgguggaugcugaucgaggccgagcucaagugcuucgggaacaccgccguggccaagugcaacgagaagcacgacgaggaguucugcgacaugcugcgccuguucgacuucugcaagcaggccauccagcggcucaaggcgccggcccagauguccauccagcugaucaacaaggccgucaacgcccugaucaacgaccagcucaucaugaagaaccaccuccgcgacaucaugggcauccccuacugcaacuacagcaaguacugguaccugaaccacaccaccacggggaagaccucccugcccaagugcuggcuggugagcaacggcuccuaccugaacgagacccacuucagcgacgacaucgagcagcaggccgacaacaugaucaccgagaugcuccagaaggaguacauggagcggcagggcaagacgccgcuggggcugguggaccuguucgucuucuccaccagcuucuaccucaucuccaucuuccugcaccuggugaagauccccacccaccgccacguggucggcaagagcugccccaagccccaccggcucaaccacauggggaucugcuccugcggccuguacgggcagccgggcgugcccgugaaguggaagcgcugaggacuaguaauaaggaaacuguaugaaugucugugggcaggaagugaagagauccuucuguaaagguuuuuggaauuaugucugcugaauaauaaacuuuuuugaaauaauaaaucugguagaaaaaugagaucucaaaggcucuuuucagagccaccaaaaaaaaaaaaaaaaaaaaaaaaaaaaaaaaaaaaaaaaaaaaaaaaaaaaaaaaaaaaaaaaaaaaaaaaaaaaaaaaaaaaaaaaaaaaaaaaaaaaa

SEQ ID NO: 30848 - RNA, 1812 nt, Artificial Sequence
  mRNA product Design b-4 (hSL-A100) comprising derived and/or modified sequence from MOPV/LASV reassortant(IGS-1;Clade IV)__AFY05576__GPCmut6 (opt1)
aggagagucccgcagucggcguccagcggcucugcuuguucgugugugugucguugcaggccuuauucaagcuuaccaugggccagaucgugaccuucuuccaggaggucccccacgugaucgaggaggugaugaacaucguccugaucgcccucagcgugcuggccgugcugaaggggcucuacaacuucgcgaccugcggccuggucgggcuggugacguuccuccugcugugcggccgcuccugcaccaccagccucuacaaggggguguacgagcugcagacccuggagcucaacauggagacgcugaacaugugcaugccgcuguccugcaccaagaacaacagccaccacuacaucauggucggcaacgagaccggccucgagcugacccugacgaacaccuccaucaucaaccacaaguucugcaaccucagcgacgcccacaagaagaaccuguacgaccacgcccugauguccaucaucagcaccuuccaccucuccauccccaacuucaaccaguacgaggccaugagcugcgacuucaacgggggcaagaucuccgugcaguacaaccugagccacuccuacgccggggacgcggccaaccacugcggcaccguggccaacgggguccugcagacguucaugcggauggccuggggcggcagcuacaucgcgcucgacuccgggcgcggcaacugggacugcaucaugaccagcuaccaguaccugaucauccagaacaccaccugggaggaccacugccaguucucccggcccagccccaucggguaccugggccuccugucccagcgcacgcgggacaucuacaucagccgccggcugcucggcaccuucaccuggacccugagcgacuccgagggggaggacacgccgggcggguacugccugacccgcuggaugcucaucgaggccgagcugaagugcuucggcaacaccgccguggccaagugcaacgagaagcacgacgaggaguucugcgacaugcugcggcuguucgacuucugcaagcaggccauccagcgccugaaggcgcccgcccagaugagcauccagcugaucaacaaggccgugaacgcccucaucaacgaccagcugaucaugaagaaccaccuccgggacaucauggggauccccuacugcaacuacuccaaguacugguaccucaaccacaccacgaccggccgcaccagccugcccaagugcuggcuggucuccaacggcagcuaccucaacgagacccacuucuccgacgacaucgagcagcaggccgacaacaugaucacggagaugcugcagaaggaguacauggagcggcaggggaagaccccgcugggccugguggaccucuucguguucagcaccuccuucuaccugaucagcaucuuccugcaccucgucaagauccccacccaccgccacaucguggggaaguccugccccaagccccaccggcugaaccacaugggcaucugcagcugcgggcuguacaagcagccgggcgugcccgucaaguggaagcgcugaggacuaguaauaaggaaacuguaugaaugucugugggcaggaagugaagagauccuucuguaaagguuuuuggaauuaugucugcugaauaauaaacuuuuuugaaauaauaaaucugguagaaaaaugagaucucaaaggcucuuuucagagccaccaaaaaaaaaaaaaaaaaaaaaaaaaaaaaaaaaaaaaaaaaaaaaaaaaaaaaaaaaaaaaaaaaaaaaaaaaaaaaaaaaaaaaaaaaaaaaaaaaaaaa

SEQ ID NO: 30849 - RNA, 1812 nt, Artificial Sequence
  mRNA product Design b-4 (hSL-A100) comprising derived and/or modified sequence from LASV(LM765-SLE-2012;Clade IV)__AIT17814__GPCmut6 (opt1)
aggagagucccgcagucggcguccagcggcucugcuuguucgugugugugucguugcaggccuuauucaagcuuaccaugggccagaucgugaccuucuuccaggaggucccccacgugaucgaggaggugaugaacaucguccugaucgcccucagcauccuggccgugcugaaggggcucuacaacuucgcgaccugcggccugguggggcuggucacguuccuccugcugugcggccgcuccugcaccaccagccucuacaaggggguguacgagcugcagacccuggagcucaacauggagacgcugaacaugugcaugccgcuguccugcaccaagaacaacagccaccacuacaucauggugggcaacgagaccggccucgagcugacccugacgaacaccuccaucaucgaccacaaguucugcaaccucagcgacgcccaccggaagaaccuguacgaccacgcccugauguccaucaucagcaccuuccaccucuccauccccaacuucaaccaguacgaggccaugagcugcgacuucaacgggggcaagaucuccguccaguacaaccugagccacuccuacgccaaggacgcggccgaccacugcgggaccguggccaacggcgugcugcagacguucaugcgcauggccuggggcgggagcuacaucgcgcucgacuccggccgggggcgcugggacugcaucaugaccagcuaccaguaccugaucauccagaacaccaccugggaggaccacugccaguucucccggcccagccccaucggcuaccuggggcuccugucccagcgcacgcgggacaucuacaucagccgccggcugcucggcaccuucaccuggacccugagcgacuccgagggcaaggacacgcccgggggcuacugccugacccgcuggaugcucaucgaggccgagcugaagugcuucgggaacaccgccgucgccaagugcaacgagaagcacgacgaggaguucugcgacaugcugcggcuguucgacuucugcaagcaggccauccagcgccugaaggcgccggcccagaugagcauccagcugaucaacaaggccgugaacgcccucaucaacgaccagcugaucaugaagaaccaccuccgggacaucaugggcauccccuacugcaacuacuccaaguacugguaccucaaccacaccacgaccgggaagaccagccugcccaagugcuggcugguguccaacggcagcuaccucaacgagacccacuucuccgacgacaucgagcagcaggccgacaacaugaucacggagaugcugcagaaggaguacauggagcgccagggcaagaccccgcuggggcuggucgaccucuucguguucagcaccuccuucuaccugaucagcaucuuccugcaccucgugaagauccccacccaccggcacaucgucggcaagcccugccccaagccgcaccgccugaaccacauggggaucugcuccugcggccuguacaagcagcccggggugcccgugaaguggaagcggugaggacuaguaauaaggaaacuguaugaaugucugugggcaggaagugaagagauccuucuguaaagguuuuuggaauuaugucugcugaauaauaaacuuuuuugaaauaauaaaucugguagaaaaaugagaucucaaaggcucuuuucagagccaccaaaaaaaaaaaaaaaaaaaaaaaaaaaaaaaaaaaaaaaaaaaaaaaaaaaaaaaaaaaaaaaaaaaaaaaaaaaaaaaaaaaaaaaaaaaaaaaaaaaaa

SEQ ID NO: 30850 - RNA, 1812 nt, Artificial Sequence
  mRNA product Design b-4 (hSL-A100) comprising derived and/or modified sequence from LASV(LM776-SLE-2012;Clade IV)__AIT17824__GPCmut6 (opt1)
aggagagucccgcagucggcguccagcggcucugcuuguucgugugugugucguugcaggccuuauucaagcuuaccaugggccagaucgugaccuucuuccaggaggucccccacgugaucgaggaggugaugaacaucguccugaucgcccucagcauccuggccgugcugaaggggcucuacaacuucgcgaccugcggccugguggggcuggucacguuccuccugcugugcggccgcuccugcaccaccagcguguacaaggggguguacgagcuccagacccuggagcugaacauggagacgcucaacaugugcaugccgcuguccugcaccaagaacaacagccaccacuacaucauggucggcaacgagaccggccuggagcucacccugacgaacaccuccaucaucaaccacaaguucugcaaccugagcgacgcccacaagaagaaccucuacgaccacgcccugauguccaucaucagcaccuuccaccuguccauccccaacuucaaccaguacgaggccaugagcugcgacuucaacgggggcaagaucuccgugcaguacaaccucagccacuccuacgccggggacgcggccaaccacugcggcaccguggccaacgggguccugcagacguucaugcggauggccuggggcggcagcuacaucgcgcuggacuccgggcacggcaagugggacugcaucaugaccagcuaccaguaccucaucauccagaacaccaccugggaggaccacugccaguucucccgccccagccccaucggguaccugggccugcucucccagcggacgcgcgacaucuacaucagccggcgccugcugggcaccuucaccuggacccucagcgacuccgaggggaaggacacgccgggcggguacugccugacccgguggaugcugaucgaggccgagcucaagugcuucggcaacaccgccguggccaagugcaacgagaagcacgacgaggaguucugcgacaugcugcgccuguucgacuucugcaagcaggccauccagcggcucaaggcgcccgcccagaugagcauccagcugaucaacaaggccgugaacgcccugaucaacgaccagcucaucaugaagaaccaccuccgcgacaucauggggauccccuacugcaacuacuccaaguacugguaccugaaccacaccacgaccggcaagaccagccugcccaagugcuggcuggucuccaacggcagcuaccugaacgagacccacuucuccgacgacaucgagcagcaggccgacaacaugaucacggagaugcuccagaaggaguacauggagcggcaggggaagaccccgcugggccugguggaccuguucguguucagcaccuccuucuaccucaucagcaucuuccugcaccuggucaagauccccacccaccgccacaucguggggaaguccugccccaagccccaccggcucaaccacaugggcaucugcagcugcgggcuguacaagcagccgggcgugcccguccgcuggaagcggugaggacuaguaauaaggaaacuguaugaaugucugugggcaggaagugaagagauccuucuguaaagguuuuuggaauuaugucugcugaauaauaaacuuuuuugaaauaauaaaucugguagaaaaaugagaucucaaaggcucuuuucagagccaccaaaaaaaaaaaaaaaaaaaaaaaaaaaaaaaaaaaaaaaaaaaaaaaaaaaaaaaaaaaaaaaaaaaaaaaaaaaaaaaaaaaaaaaaaaaaaaaaaaaaa

SEQ ID NO: 30851 - RNA, 1812 nt, Artificial Sequence
  mRNA product Design b-4 (hSL-A100) comprising derived and/or modified sequence from LASV(Mad39;Clade IV)__ANH09722__GPCmut6 (opt1)
aggagagucccgcagucggcguccagcggcucugcuuguucgugugugugucguugcaggccuuauucaagcuuaccaugggccagaucgugaccuucuuccaggaggucccccacgugaucgaggaggugaugaacaucguccugaucgcccucagcauccuggccgugcugaaggggcucuacaacguggcgaccugcggccugaucgggcuggucacguuccuccugcugugcggccgcuccugcaccaccacccucuacaaggggguguacgagcugcaggcccuggagcucaacauggagacgcugaacaugugcaugccgcugagcugcaccaagaacaacucccaccacuacauccgggugggcaacgagaccggccucgagcugacccugacgaacaccagccucaucaaccacaaguucugcaaccuguccgacgcccacaagaagaaccuguacgaccacgcccucaugagcaucaucuccaccuuccaccugagcauccccaacuucaaccaguacgaggccauguccugcgacuucaacgacgggaagaucagcguccaguacaaccugucccacaccuacgcgggcgacacggccaaccacugcgggaccguggccaacggcgugcuccagaccuucaugcgcauggccuggggcgggagcuacaucgcgcuggacuccggccgcgggggcugggacugcaucaugaccagcuaccaguaccugaucauccagaacacgaccugggaggaccacugccaguucucccggcccagccccaucggguaccucggccugcugucccagcggacccgcgacaucuacaucagccggcgccuccugggcaccuucacguggacccuguccgacagcgaggggaaggacaccccgggcggguacugccucacccgguggaugcugaucgaggccgagcugaagugcuucggcaacacggccgucgccaagugcaacgagaagcacgacgaggaguucugcgacaugcuccgccuguucgacuucugcaagcaggccauccagcggcugaaggcgcccgcccagaugagcauccagcucaucaacaaggccgugaacgcccugaucaacgaccagcugaucaugaagaaccaccuccgcgacaucauggggauccccuacugcaacuacuccaaguacugguaccugaaccacaccgugaccggcaagaccagccugcccaagugcuggcucgucuccaacggcagcuaccugaacgagacgcacuucuccgacgacaucgagcagcaggccgacaacaugaucaccgagaugcugcagaaggaguacauggagcggcaggggaagaccccgcugggccucguggaccuguucguguucagcaccuccuucuaccugaucagcaucuuccuccaccuggucaagauccccacgcaccgccacgugguggggaagcccugccccaagccgcaccggcugaaccacaugggcaucugcuccugcggguucuacaagcagcccggcguccccgugcgcuggaagcggugaggacuaguaauaaggaaacuguaugaaugucugugggcaggaagugaagagauccuucuguaaagguuuuuggaauuaugucugcugaauaauaaacuuuuuugaaauaauaaaucugguagaaaaaugagaucucaaaggcucuuuucagagccaccaaaaaaaaaaaaaaaaaaaaaaaaaaaaaaaaaaaaaaaaaaaaaaaaaaaaaaaaaaaaaaaaaaaaaaaaaaaaaaaaaaaaaaaaaaaaaaaaaaaaa

SEQ ID NO: 30852 - RNA, 1812 nt, Artificial Sequence
  mRNA product Design b-4 (hSL-A100) comprising derived and/or modified sequence from LASV(Z0947-SLE-2011;Clade IV)__AIT17840__GPCmut6 (opt1)
aggagagucccgcagucggcguccagcggcucugcuuguucgugugugugucguugcaggccuuauucaagcuuaccaugggccagaucgugaccuucuuccaggaggucccccacgugaucgaggaggugaugaacaucguccugaucgcccucagcauccuggccgugcugaaggggcucuacaacuucgcgaccugcggccugguggggcuggucacguuccuccugcugugcggccgcuccugcaccaucagccucuacaaggggguguacgagcugcagacccuggagcucaacauggagacccugaacaugugcaugccgcuguccugcacgaagaacaacagccaccacuacaucauggugggcaacgagaccggccucgagcugacccugaccaacacguccaucaucaaccacaaguucugcaaccucagcgacgcccacaagaagaaccuguacgaccacgcccugauguccaucaucagcaccuuccaccucuccauccccaacuucaaccaguacgaggccaugagcugcgacuucaacgggggcaagaucuccguccaguacaaccugagccacuccuacgccggggacgcggccaaccacugcggcaccguggccaacggggugcugcagaccuucaugcggauggccuggggcggcagcuacaucgcgcucgacuccgggcgcgaccggugggacugcaucaugacgagcuaccaguaccugaucauccagaacaccaccugggaggaccacugccaguucucccgccccagccccaucggcuaccuggggcuccugucccagcggacccgcgacaucuacaucagccggcgccugcucggcacguucaccuggacccugagcgacuccgagggcaaggacacccccgggggcuacugccugacgcgguggaugcucaucgaggccgagcugaagugcuucgggaacaccgccgucgccaagugcaacgagaagcacgacgaggaguucugcgacaugcugcgccucuucgacuucugcaagcaggccauccagcggcugaaggcgccggcccagaugagcauccagcugaucaacaaggccgugaacgcccucaucaacgaccagcugaucaugaagaaccaccuccgcgacaucaugggcauccccuacugcaacuacuccaaguacugguaccugaaccacaccaccacggggaagaccagccugcccaagugcuggcugguguccaacggcagcuaccucaacgagacccacuucuccgacgacaucgagcagcaggccgacaacaugaucaccgagaugcugcagaaggaguacauggagcggcagggcaagacgccgcuggggcuggucgaccucuucguguucagcaccuccuucuaccugaucagcaucuuccugcaccucgugaagauccccacccaccgccacaucgucggcaagcccugccccaagccgcaccggcugaaccacauggggaucugcuccugcggccuguacaagcagcccggggugcccgugaaguggaagcgcugaggacuaguaauaaggaaacuguaugaaugucugugggcaggaagugaagagauccuucuguaaagguuuuuggaauuaugucugcugaauaauaaacuuuuuugaaauaauaaaucugguagaaaaaugagaucucaaaggcucuuuucagagccaccaaaaaaaaaaaaaaaaaaaaaaaaaaaaaaaaaaaaaaaaaaaaaaaaaaaaaaaaaaaaaaaaaaaaaaaaaaaaaaaaaaaaaaaaaaaaaaaaaaaaa

SEQ ID NO: 30853 - RNA, 1812 nt, Artificial Sequence
  mRNA product Design b-4 (hSL-A100) comprising derived and/or modified sequence from LASV(Josiah;Clade IV)__NP_694870__GPCmut6 (opt4)
aggagagucccgcagucggcguccagcggcucugcuuguucgugugugugucguugcaggccuuauucaagcuuaccaugggccagaucgugaccuucuuccaggaggugccccacgugaucgaggaggugaugaacaucgugcugaucgcccugagcgugcuggccgugcugaagggccuguacaacuucgccaccugcggccuggugggccuggugaccuuccugcugcugugcggcagaagcugcaccaccagccuguacaagggcguguacgagcugcagacccuggagcugaacauggagacccugaacaugugcaugccccugagcugcaccaagaacaacagccaccacuacaucauggugggcaacgagaccggccuggagcugacccugaccaacaccagcaucaucaaccacaaguucugcaaccugagcgacgcccacaagaagaaccuguacgaccacgcccugaugagcaucaucagcaccuuccaccugagcauccccaacuucaaccaguacgaggccaugagcugcgacuucaacggcggcaagaucagcgugcaguacaaccugagccacagcuacgccggcgacgccgccaaccacugcggcaccguggccaacggcgugcugcagaccuucaugagaauggccuggggcggcagcuacaucgcccuggacagcggcagaggcaacugggacugcaucaugaccagcuaccaguaccugaucauccagaacaccaccugggaggaccacugccaguucagcagacccagccccaucggcuaccugggccugcugagccagagaaccagagacaucuacaucagcagaagacugcugggcaccuucaccuggacccugagcgacagcgagggcaaggacacccccggcggcuacugccugaccagauggaugcugaucgaggccgagcugaagugcuucggcaacaccgccguggccaagugcaacgagaagcacgacgaggaguucugcgacaugcugagacuguucgacuucugcaagcaggccauccagagacugaaggcccccgcccagaugagcauccagcugaucaacaaggccgugaacgcccugaucaacgaccagcugaucaugaagaaccaccugagagacaucaugggcauccccuacugcaacuacagcaaguacugguaccugaaccacaccaccaccggcagaaccagccugcccaagugcuggcuggugagcaacggcagcuaccugaacgagacccacuucagcgacgacaucgagcagcaggccgacaacaugaucaccgagaugcugcagaaggaguacauggagagacagggcaagaccccccugggccugguggaccuguucguguucagcaccagcuucuaccugaucagcaucuuccugcaccuggugaagauccccacccacagacacaucgugggcaagagcugccccaagccccacagacugaaccacaugggcaucugcagcugcggccuguacaagcagcccggcgugcccgugaaguggaagagaugaggacuaguaauaaggaaacuguaugaaugucugugggcaggaagugaagagauccuucuguaaagguuuuuggaauuaugucugcugaauaauaaacuuuuuugaaauaauaaaucugguagaaaaaugagaucucaaaggcucuuuucagagccaccaaaaaaaaaaaaaaaaaaaaaaaaaaaaaaaaaaaaaaaaaaaaaaaaaaaaaaaaaaaaaaaaaaaaaaaaaaaaaaaaaaaaaaaaaaaaaaaaaaaaa

SEQ ID NO: 30854 - RNA, 1809 nt, Artificial Sequence
  mRNA product Design b-4 (hSL-A100) comprising derived and/or modified sequence from LASV(LP;Clade I)__AAF86701__GPCmut6 (opt4)
aggagagucccgcagucggcguccagcggcucugcuuguucgugugugugucguugcaggccuuauucaagcuuaccaugggccagaucaucaccuucuuccaggaggugccccacgugaucgaggaggugaugaacaucgugcugaucgcccugagccugcuggccauccugaagggccuguacaacaucgccaccugcggcaucaucggccugguggccuuccuguuccugugcggcaagagcugcagccugacccugaagggcggcuacgagcugcagacccuggagcugaacauggagacccugaacaugugcaugccccugagcugcaccaagaacagcagccaccacuacaucagagugggcaacgagaccggccuggagcugacccugaccaacaccagcaucaucaaccacaaguucugcaaccugagcgacgcccacaagaagaaccuguacgaccacgcccugaugagcaucaucagcaccuuccaccugagcauccccaacuucaaccaguacgaggccaugagcugcgacuucaacggcggcaagaucagcgugcaguacaaccugagccacagcuacgccggcgacgccgccgagcacugcggcaccguggccaacggcgugcugcagaccuucaugagaauggccuggggcggcagauacaucgcccuggacagcggcaagggcaacugggacugcaucaugaccagcuaccaguaccugaucauccagaacaccaccugggaggaccacugccaguucagcagacccagccccaucggcuaccugggccugcugagccagagaaccagagacaucuacaucagcagaagacugcugggcaccuucaccuggacccugagcgacagcgagggcaacgagacccccggcggcuacugccugaccagauggaugcugaucgaggccgagcugaagugcuucggcaacaccgccguggccaagugcaacgagaagcacgacgaggaguucugcgacaugcugagacuguucgacuucugcaagcaggccaucagaagacugaaggcccccgcccagaugagcauccagcugaucaacaaggccgugaacgcccugaucaacgaccagcugaucaugaagaaccaccugagagacaucaugggcauccccuacugcaacuacagcaaguacugguaccugaaccacaccagcagcggcagaaccagccugcccaagugcuggcugaucagcaacggcagcuaccugaacgagacccaguucagcgacgacaucgagcagcaggccgacaacaugaucaccgagaugcugcagaaggaguacaucgagagacagggcaagaccccccugggccugguggacaucuucaucuucagcaccagcuucuaccugaucagcaucuuccugcaccugaucaagauccccacccacagacacaucgugggcaagcccugccccaagccccacagacugaaccacaugggcgugugcagcugcggccuguacaagcaccccggcgugcccaccaaguggaagagaugaggacuaguaauaaggaaacuguaugaaugucugugggcaggaagugaagagauccuucuguaaagguuuuuggaauuaugucugcugaauaauaaacuuuuuugaaauaauaaaucugguagaaaaaugagaucucaaaggcucuuuucagagccaccaaaaaaaaaaaaaaaaaaaaaaaaaaaaaaaaaaaaaaaaaaaaaaaaaaaaaaaaaaaaaaaaaaaaaaaaaaaaaaaaaaaaaaaaaaaaaaaaaaaaa

SEQ ID NO: 30855 - RNA, 1809 nt, Artificial Sequence
  mRNA product Design b-4 (hSL-A100) comprising derived and/or modified sequence from LASV(803213;Clade II)__AAF86703__GPCmut6 (opt4)
aggagagucccgcagucggcguccagcggcucugcuuguucgugugugugucguugcaggccuuauucaagcuuaccaugggccagaucaucaccuucuuccaggaggugccccacgugaucgaggaggugaugaacaucgugcugaucgcccugagccugcuggccauccugaagggcaucuacaacguggccaccugcggccuguucggccugaucagcuuccugcugcugugcggcagaagcugcagcgugaccuacaagggcguguacgagcugcagacccuggagcugaacauggccaaccugaacaugugcaugccccugagcugcaccaagaacaacagccaccacuacaucauggugggcaacgagaccggccuggagcugacccugaccaacaccagcaucaucaaccacaaguucugcaaccugagcgacgcccacaagaagaaccuguacgaccacgcccugaugagcaucaucagcaccuuccaccugagcauccccaacuucaaccaguacgaggccaugagcugcgacuucaacggcggcaagaucagcgugcaguacaaccugagccacagcuucgccguggacgccgccaaccacugcggcaccaucgccaacggcgugcugcagaccuucaugagaauggccuggggcggcagcuacaucgcccuggacagcggcaagggcaacugggacugcaucaugaccagcuaccaguaccugaucauccagaacaccaccugggaggaccacugccaguucagcagacccagccccaucggcuaccugggccugcugagccagagaaccagagacaucuacaucagcagaagacugcugggcaccuucaccuggacccugagcgacagcgagggcaacgaggcccccggcggcuacugccugaccagauggaugcugaucgaggccgagcugaagugcuucggcaacaccgccguggccaagugcaacgagaagcacgacgaggaguucugcgacaugcugagacuguucgacuucugcaagcaggccaucaagagacugaagacccccgcccagaugagcauccagcugaucaacaaggccgugaacgcccugaucaacgaccagcugaucaugaagaaccaccugagagacaucaugggcauccccuacugcaacuacagcagauacugguaccugaaccacaccgugaccggcaagaccagccugcccagaugcuggcuggugagcaacggcagcuaccugaacgagacccacuucagcgacgacaucgagcagcaggccgacaacaugaucaccgagaugcugcagaaggaguacauggacagacagggcaagaccccccugggccugguggaccuguucguguucagcaccagcuucuaccugaucagcaucuuccugcaccuggugaagauccccacccacagacacaucgugggcaagcccugccccaagccccacagacugaaccacaugggcaucugcagcugcggccuguacaagcaccccggcgugcccgugaaguggaagagaugaggacuaguaauaaggaaacuguaugaaugucugugggcaggaagugaagagauccuucuguaaagguuuuuggaauuaugucugcugaauaauaaacuuuuuugaaauaauaaaucugguagaaaaaugagaucucaaaggcucuuuucagagccaccaaaaaaaaaaaaaaaaaaaaaaaaaaaaaaaaaaaaaaaaaaaaaaaaaaaaaaaaaaaaaaaaaaaaaaaaaaaaaaaaaaaaaaaaaaaaaaaaaaaaa

SEQ ID NO: 30856 - RNA, 1809 nt, Artificial Sequence
  mRNA product Design b-4 (hSL-A100) comprising derived and/or modified sequence from LASV(GA391;Clade III)__CAA36645__GPCmut6 (opt4)
aggagagucccgcagucggcguccagcggcucugcuuguucgugugugugucguugcaggccuuauucaagcuuaccaugggccagaucgugaccuucuuccaggaggugccccacgugaucgaggaggugaugaacaucgugcugaucgcccugagcauccuggccauccugaagggccuguacaacguggccaccugcggccugaucggccuggugaccuuccugcugcugagcggcagaagcugcagccugaucuacaagggcaccuacgagcugcagacccuggagcugaacauggagacccugaacaugugcaugccccugagcugcaccaagaacaacagccaccacuacaucagagugggcaacgagaccggccuggagcugacccugaccaacaccagcauccugaaccacaaguucugcaaccugagcgacgcccacaagagaaaccuguacgaccacagccugaugagcaucaucagcaccuuccaccugagcauccccaacuucaaccaguacgaggccaugagcugcgacuucaacggcggcaagaucaccgugcaguacaaccugagccacagcuucgccguggacgccgccggccacugcggcacccuggccaacggcgugcugcagaccuucaugagaauggccuggggcggcagcuacaucgcccuggacagcggcagaggcaacugggacugcaucaugaccagcuaccaguaccugaucauccagaacaccaccugggacgaccacugccaguucagcagacccagccccaucggcuaccugggccugcugagccagagaaccagagacaucuacaucagcagaagacugcugggcaccuucaccuggacccugagcgacagcgagggcaacgagacccccggcggcuacugccugaccagauggaugcugaucgaggccgagcugaagugcuucggcaacaccgccguggccaagugcaacgagaagcacgacgaggaguucugcgacaugcugagacuguucgacuucugcaagcaggccaucagaagacugaagacccccgcccagaugagcauccagcugaucaacaaggccgugaacgcccugaucaacgaccagcugaucaugaagaaccaccugagagacaucaugggcauccccuacugcaacuacagcagauacugguaccugaaccacaccagcaccggcaagaccagccugcccagaugcuggcugaucagcaacggcagcuaccugaacgagaccaaguucagcgacgacaucgagcagcaggccgacaacaugaucaccgagaugcugcagaaggaguacaucgacagacagggcaagaccccccugggccugguggaccuguucguguucagcaccagcuucuaccugaucagcaucuuccugcaccuggugaagauccccacccacagacacaucgugggcaagcccugccccaagccccacagacugaaccacaugggcaucugcagcugcggccuguacaagcagcccggcgugcccgugagauggaagagaugaggacuaguaauaaggaaacuguaugaaugucugugggcaggaagugaagagauccuucuguaaagguuuuuggaauuaugucugcugaauaauaaacuuuuuugaaauaauaaaucugguagaaaaaugagaucucaaaggcucuuuucagagccaccaaaaaaaaaaaaaaaaaaaaaaaaaaaaaaaaaaaaaaaaaaaaaaaaaaaaaaaaaaaaaaaaaaaaaaaaaaaaaaaaaaaaaaaaaaaaaaaaaaaaa

SEQ ID NO: 30857 - RNA, 1812 nt, Artificial Sequence
  mRNA product Design b-4 (hSL-A100) comprising derived and/or modified sequence from LASV(AV;Clade V)__CCA30314__GPCmut6 (opt4)
aggagagucccgcagucggcguccagcggcucugcuuguucgugugugugucguugcaggccuuauucaagcuuaccaugggccagaucgugaccuucuuccaggaggugccccacgugaucgaggaggugaugaacaucgugcugaucgcccugagcauccuggccgugcugaagggccuguacaacaucgccaccugcggccugaucggccugaucaccuuccugcugcugugcggcagaagcugcagcagcaaccuguacaagggcguguacgagcugcagagccuggaccugaacauggagacccugaacaugugcaugccccugagcugcaccaagaacaacagccaccacuacaucagagugggcaacgacaccggccuggagcugacccugaccaacaccagcauccugaaccacaaguucugcaaccugagcgacgcccacaagaaggaccuguacgaccacgcccugaugagcaucaucagcaccuuccaccugagcauccccaacuucaaccaguacgaggccaugagcugcgacuucaacggcggcaagaucagcgugcaguacaaccugagccacagcuacgccaucgacgccgccaaccacugcggcaccguggccaacggcauccugcagaccuucaugagaauggccuggggcggcagcuacaucgcccuggacagcggcagaggcaacugggacugcaucaugaccagcuaccaguaccugaucauccagaacaccaccugggagaaccacugccaguucagcagacccagccccaucggcuaccugggccugcugagccagagaaccagagacaucuacaucagcagaagacugcugggcaccuucaccuggacccugagcgacagcgagggcaacgccacccccggcggcuacugccugaccagauggaugcugaucgaggccgagcugaagugcuucggcaacaccgccguggccaagugcaacgagaagcacgacgaggaguucugcgacaugcugagacuguucgacuucugcaagcaggccaucagcagacugaagagccccgcccagaugagcauccagcugaucaacaaggccgugaacgcccugaucaacgaccagcugaucaugaagaaccaccugagagacaucaugggcauccccuacugcaacuacagcaaguacugguaccugaaccacaccaucaccggcaagaccagccugcccaagugcuggcuggugagcaacggcagcuaccugaacgagacccacuucagcgacgacaucgagcagcaggccgacaacaugaucaccgagaugcugcagaaggaguacauggagagacagggcaagaccccccugggccugguggaccuguucguguucagcaccagcuucuaccugaucagcaucuuccugagacuggugaagauccccacccacagacacaucgugggcaagcccugccccaagccccacagacugaaccacaugggcaucugcagcugcggccuguacaagcagcccggcgugcccgugagauggaagagaugaggacuaguaauaaggaaacuguaugaaugucugugggcaggaagugaagagauccuucuguaaagguuuuuggaauuaugucugcugaauaauaaacuuuuuugaaauaauaaaucugguagaaaaaugagaucucaaaggcucuuuucagagccaccaaaaaaaaaaaaaaaaaaaaaaaaaaaaaaaaaaaaaaaaaaaaaaaaaaaaaaaaaaaaaaaaaaaaaaaaaaaaaaaaaaaaaaaaaaaaaaaaaaaaa

SEQ ID NO: 30858 - RNA, 1809 nt, Artificial Sequence
  mRNA product Design b-4 (hSL-A100) comprising derived and/or modified sequence from LASV(Togo/2016/7082;Clade VI)__AMR44577__GPCmut6 (opt4)
aggagagucccgcagucggcguccagcggcucugcuuguucgugugugugucguugcaggccuuauucaagcuuaccaugggccagaucaucaccuucuuccaggaggugccccacgugaucgaggaggugaugaacaucgugcugaucgcccugagccugcuggccauccugaagggcguguacaacguggccaccugcggcaucaucggccuggugaccuuccuguuccugugcggcagaagcugcagccugaucuacaagggcagcuacgagcugcagacccuggagcugaacauggagacccugaacaugugcaugccccugagcugcaccaagaacagcagccaccacuacaucagagugggcaacgagaccggccuggagcugacccugaccaacaccagcaucaucaaccacaaguucugcaaccugagcgacgcccacaagagaaaccuguacgaccacgcccugaugagcauccugagcaccuuccaccugagcauccccaacuucaaccaguacgaggccaugagcugcgacuucaacggcggcaagaucagcgugcaguacaaccugagccacgccuacgccguggacgccgccgagcacugcggcaccguggccaacggcgugcugcagaccuucaugagaauggccuggggcggcagcuacaucgcccuggacagcggcagaggcaacugggacugcaucaugaccagcuaccaguaccugaucauccagaacaccaccugggaggaccacugccaguucagcagacccagccccaucggcuaccugggccugcugagccagagaaccagagacaucuacaucagcagaagacugcugggcaccuucaccuggacccugagcgacagcgagggcaacgagacccccggcggcuacugccugaccagauggaugcugaucgaggccgagcugaagugcuucggcaacaccgccguggccaagugcaacgagaagcacgacgaggaguucugcgacaugcugagacuguucgacuucugcaagcaggccauccagagacugaagagccccgcccagaugagcauccagcugaucaacaaggccgugaacgcccugaucaacgaccagcugaucaugaagaaccaccugagagacaugaugggcauccccuacugcaacuacagcaaguacugguaccugaaccacaccagcagcggcagaaccagccugcccaagugcuggcuggugagcaacggcagcuaccugaacgagacccacuucagcgacgacaucgagcagcaggccgacaacaugaucaccgagaugcugcagaaggaguacaucgacagacagggcaagaccccccugggccugguggaccuguucguguucagcaccagcuucuaccugaucagcaucuuccugcaccugaucaagauccccacccacagacacaucgugggcaagcccugccccaagccccacagacugaaccacaugggcaucugcagcugcggccuguacaagcagcccggcgugcccaccagauggaagagaugaggacuaguaauaaggaaacuguaugaaugucugugggcaggaagugaagagauccuucuguaaagguuuuuggaauuaugucugcugaauaauaaacuuuuuugaaauaauaaaucugguagaaaaaugagaucucaaaggcucuuuucagagccaccaaaaaaaaaaaaaaaaaaaaaaaaaaaaaaaaaaaaaaaaaaaaaaaaaaaaaaaaaaaaaaaaaaaaaaaaaaaaaaaaaaaaaaaaaaaaaaaaaaaaa

SEQ ID NO: 30859 - RNA, 1809 nt, Artificial Sequence
  mRNA product Design b-4 (hSL-A100) comprising derived and/or modified sequence from LASV(KAK-428;Clade n.d. (VII))__ANH09740__GPCmut6 (opt4)
aggagagucccgcagucggcguccagcggcucugcuuguucgugugugugucguugcaggccuuauucaagcuuaccaugggccagaucgugaccuucuuccaggaggugccccacgugaucgaggaggugaugaacaucgugcugaucgcccugagccugcuggccauccugaagggccuguacaacuucgccaccugcggcgugaucggccugaucaccuuccugcugcugugcggcagaagcugcagcgccaccuacaagggccaguacgagcugcagacccuggagcugaacauggagagccugaacaugugcaugccccugagcugcaccaagaacaacagccaccacuacaucagagccggcaacaacaccggccuggagcugacccugaccaacaccagcaucaucagccacaaguucugcaaccugagcgacgcccacaagaagaaccuguacgaccacacccugaugagcaucaucaccaccuuccaccugagcauccccaacuucaaccaguacgaggccaugagcugcgacuucaacggcggcaagaucagcauccaguacaaccugagccacagcuacgccggcgacgccgcccagcacugcggcaccguggccaacggcgugcugcagaccuucaugagaauggccuggggcggcagcuaccuggcccuggacagcggcagaagaggcugggacugcaucaucagcagcuaccaguaccugaucauccagaacaccaccugggacgaccacugccaguucagcagacccagccccaucggcuaccugggcuucgugagccagaagaccagagacaucuacaucagcagaagacugcugggcaccuucaccuggacccugagcgacagcgagggccacgacaugcccggcggcuacugccugaccagauggaugcugaucgaggccgaccugaagugcuucggcaacaccgccguggccaagugcaacgagaagcacgacgaggaguucugcgacauguggagacuguucgacuucugcaagcaggccauccagagacugaaggcccccgcccagaugaacauccagcugaucaacaaggccgugaacgcccugaucaacgaccagcugaugaugaagaaccaccugagagacaucaugggcauccccuacugcaacuacagcaaguucugguaccugaacaacaccaccaccggcagaaccagccugcccagaugcuggcugaucagcaacggcagcuaccugaacgagacccacuucagcgacgacaucgagcagcaggccgacaacaugaucaccgagaugcugcagaaggaguacauggacagacagggcaagaccccccugggccugguggaccuguucguguucagcaccagcuucuaccugaucaccaucuuccugcaccuggugaagauccccacccacagacacaucgugggcaagcccugccccaagccccacagacugaaccacaugggcaucugcagcugcggccuguacaagcagcccggcgugcccgugagauggaagagaugaggacuaguaauaaggaaacuguaugaaugucugugggcaggaagugaagagauccuucuguaaagguuuuuggaauuaugucugcugaauaauaaacuuuuuugaaauaauaaaucugguagaaaaaugagaucucaaaggcucuuuucagagccaccaaaaaaaaaaaaaaaaaaaaaaaaaaaaaaaaaaaaaaaaaaaaaaaaaaaaaaaaaaaaaaaaaaaaaaaaaaaaaaaaaaaaaaaaaaaaaaaaaaaaa

SEQ ID NO: 30860 - RNA, 1809 nt, Artificial Sequence; identical to SEQ ID NO: 30854
  mRNA product Design b-4 (hSL-A100) comprising derived and/or modified sequence from LASV(Pinneo-NIG-1969;Clade I)__AIT17836__GPCmut6 (opt4)

SEQ ID NO: 30861 - RNA, 1809 nt, Artificial Sequence
  mRNA product Design b-4 (hSL-A100) comprising derived and/or modified sequence from LASV(ISTH0009-NIG-2011;Clade II)__AIT17404__GPCmut6 (opt4)
aggagagucccgcagucggcguccagcggcucugcuuguucgugugugugucguugcaggccuuauucaagcuuaccaugggccagaucaucaccuucuuccaggaggugccccacgugaucgaggaggugaugaacaucgugcugaucgcccugagccugcuggccauccugaagggcaucuacaacguggccaccugcggccuguucggccuggugagcuuccugcugcugugcggcagaagcugcagcaccaccuacaagggcguguacgagcugcagacccuggagcuggacauggccagccugaacaugugcaugccccugagcugcaccaagaacaacagccaccacuacaucauggugggcaacgagaccggccuggagcugacccugaccaacaccagcaucaucaaccacaaguucugcaaccugagcgacgcccacaagaagaaccuguacgaccacgcccugaugagcaucaucagcaccuuccaccugagcauccccaacuucaaccaguacgaggccaugagcugcgacuucaacggcggcaagaucagcgugcaguacaaccugagccacgccuacgccguggacgccgccaaccacugcggcaccaucgccaacggcgugcugcagaccuucaugagaauggccuggggcggcagcuacaucgcccuggacagcggcaagggcagcugggacugcaucaugaccagcuaccaguaccugaucauccagaacaccaccugggaggaccacugccaguucagcagacccagccccaucggcuaccugggccugcugagccagagaaccagagacaucuacaucagcagaagacugcugggcaccuucaccuggacccugagcgacagcgagggcaacgagacccccggcggcuacugccugaccagauggaugcugaucgaggccgagcugaagugcuucggcaacaccgccguggccaagugcaacgagaagcacgacgaggaguucugcgacaugcugagacuguucgacuucugcaagcaggccaucagaagacugaagacccccgcccagaugagcauccagcugaucaacaaggccgugaacgcccugaucaacgaccagcugaucaugaagaaccaccugagagacaucaugggcauccccuacugcaacuacagcaaguacugguaccugaaccacaccgugaccggcaagaccagccugcccagaugcuggcuggugagcaacggcagcuaccugaacgagacccacuucagcgacgacaucgagcagcaggccgacaacaugaucaccgagcugcugcagaaggaguacauggacagacagggcaagaccccccugggccugguggaccuguucguguucagcaccagcuucuaccugaucagcaucuuccugcaccugaucaagauccccacccacagacacaucaccggcaagcccugccccaagccccacagacugaaccacaugggcaucugcagcugcggccuguacaagcaccccggcgugcccgugaaguggaagagaugaggacuaguaauaaggaaacuguaugaaugucugugggcaggaagugaagagauccuucuguaaagguuuuuggaauuaugucugcugaauaauaaacuuuuuugaaauaauaaaucugguagaaaaaugagaucucaaaggcucuuuucagagccaccaaaaaaaaaaaaaaaaaaaaaaaaaaaaaaaaaaaaaaaaaaaaaaaaaaaaaaaaaaaaaaaaaaaaaaaaaaaaaaaaaaaaaaaaaaaaaaaaaaaaa

SEQ ID NO: 30862 - RNA, 1809 nt, Artificial Sequence
  mRNA product Design b-4 (hSL-A100) comprising derived and/or modified sequence from LASV(ISTH2010-NIG-2012;Clade II)__AIT17482__GPCmut6 (opt4)
aggagagucccgcagucggcguccagcggcucugcuuguucgugugugugucguugcaggccuuauucaagcuuaccaugggccagaucaucaccuucuuccaggaggugccccacgugaucgaggaggugaugaacaucgugcugaucgcccugagccugcuggccauccugaagggcaucuacaacguggccaccugcggccuguucggccuggugagcuuccugcugcugugcggcagaagcugcagcaccaccuacaagggcguguacgagcugcagacccuggagcuggacauggccagccugaacaugugcaugccccugagcugcaccaagaacaacagccaccacuacaucauggugggcaacgagaccggccuggagcugacccugaccaacaccagcaucaucaaccacaaguucugcaaccugagcgacgcccacaagaagaaccuguacgaccacgcccugaugagcaucaucagcaccuuccaccugagcauccccaacuucaaccaguacgaggccaugagcugcgacuucaacggcggcaagaucagcgugcaguacaaccugagccacgccuacgccguggacgccgccaaccacugcggcaccaucgccaacggcgugcugcagaccuucaugagaauggccuggggcggcagcuacaucgcccuggacagcggcaagggcagcugggacugcaucaugaccagcuaccaguaccugaucauccagaacaucaccugggaggaccacugccaguucagcagacccagccccaucggcuaccugggccugcugagccagagaaccagagacaucuacaucagcagaagacugcugggcaccuucaccuggacccugagcgacagcgagggcaacgagacccccggcggcuacugccugaccagauggaugcugaucgaggccgagcugaagugcuucggcaacaccgccguggccaagugcaacgagaagcacgacgaggaguucugcgacaugcugagacuguucgacuucugcaagcaggccaucagaagacugaagacccccgcccagaugagcauccagcugaucaacaaggccgugaacgcccugaucaacgaccagcugaucaugaagaaccaccugagagacaucaugggcauccccuacugcaacuacagcaaguacugguaccugaaccacaccgugaccggcaagaccagccugcccagaugcuggcuggugagcaacggcagcuaccugaacgagacccacuucagcgacgacaucgagcagcaggccgacaacaugaucaccgagcugcugcagaaggaguacaucgacagacagggcaagaccccccugggccugguggaccuguucguguucagcaccagcuucuaccugaucagcaucuuccugcaccuggugaagauccccacccacagacacguggugggcaagcccugccccaagccccacagacugaaccacaugggcaucugcagcugcggccuguacaagcaccccggcgugcccgugaaguggaagagaugaggacuaguaauaaggaaacuguaugaaugucugugggcaggaagugaagagauccuucuguaaagguuuuuggaauuaugucugcugaauaauaaacuuuuuugaaauaauaaaucugguagaaaaaugagaucucaaaggcucuuuucagagccaccaaaaaaaaaaaaaaaaaaaaaaaaaaaaaaaaaaaaaaaaaaaaaaaaaaaaaaaaaaaaaaaaaaaaaaaaaaaaaaaaaaaaaaaaaaaaaaaaaaaaa

SEQ ID NO: 30863 - RNA, 1809 nt, Artificial Sequence
  mRNA product Design b-4 (hSL-A100) comprising derived and/or modified sequence from LASV(Lassa virus/H.sapiens-wt/NGA/2015/ISTH_0543;Clade II)__AVO03639__GPCmut6 (opt4)
aggagagucccgcagucggcguccagcggcucugcuuguucgugugugugucguugcaggccuuauucaagcuuaccaugggccagaucaucaccuucuuccaggaggugccccacgugaucgaggaggugaugaacaucgugcugaucgcccugagccugcuggccauccugaagggcaucuacaacguggccaccugcggccuguucggccuggugagcuuccugcugcugugcggcagaagcugcagcaccaccuacaagggcguguacgagcugcagacccuggagcuggacauggccaaccugaacaugugcaugccccugagcugcaccaagaacaacagccaccacuacaucauggugggcaacgagaccggccuggagcugacccugaccaacaccagcaucaucaaccacaaguucugcaaccugagcgacgcccacaagaagaaccuguacgaccacgcccugaugagcaucaucagcaccuuccaccugagcauccccaacuucaaccaguacgaggccaugagcugcgacuucaacggcggcaagaucagcgugcaguacaaccugagccacaccuacgccguggacgccgccaaccacugcggcaccaucgccaacggcgugcugcagaccuucaugagaauggccuggggcggcagcuacaucgcccuggacagcggcaagggcagcugggacugcaucaugaccagcuaccaguaccuggugauccagaacaccaccugggaggaccacugccaguucagcagacccagccccaucggcuaccugggccugcugagccagagaaccagagacaucuacaucagcagaagacugcugggcaccuucaccuggacccugagcgacagcgagggcaacgagacccccggcggcuacugccugaccagauggaugcugaucgaggccgagcugaagugcuucggcaacaccgccguggccaagugcaacgagaagcacgacgaggaguucugcgacaugcugagacuguucgacuucugcaagcaggccaucagaagacugaagacccccgcccagaugagcauccagcugaucaacaaggccgugaacgcccugaucaacgaccagcugaucaugaagaaccaccugagagacaucaugggcauccccuacugcaacuacagcaaguacugguaccugaaccacaccgugaccggcaagaccagccugcccagaugcuggcuggugagcaacggcagcuaccugaacgagacccacuucagcgacgacaucgagcagcaggccgacaacaugaucaccgagcugcugcagaaggaguacaucgacagacagggcaagaccccccugggccugguggaccuguucguguucagcaccagcuucuaccugaucagcaucuuccugcaccuggugaagauccccacccacagacacaucaccggcaagcccugccccaagccccacagacugaaccacaugggcaucugcagcugcggccuguacaagcaccccggcgugcccgugaaguggaagagaugaggacuaguaauaaggaaacuguaugaaugucugugggcaggaagugaagagauccuucuguaaagguuuuuggaauuaugucugcugaauaauaaacuuuuuugaaauaauaaaucugguagaaaaaugagaucucaaaggcucuuuucagagccaccaaaaaaaaaaaaaaaaaaaaaaaaaaaaaaaaaaaaaaaaaaaaaaaaaaaaaaaaaaaaaaaaaaaaaaaaaaaaaaaaaaaaaaaaaaaaaaaaaaaaa

SEQ ID NO: 30864 - RNA, 1809 nt, Artificial Sequence
  mRNA product Design b-4 (hSL-A100) comprising derived and/or modified sequence from LASV(Lassa virus/H.sapiens-wt/NGA/2016/ISTH_0009;Clade II)__AVO03571__GPCmut6 (opt4)
aggagagucccgcagucggcguccagcggcucugcuuguucgugugugugucguugcaggccuuauucaagcuuaccaugggccagaucaucaccuucuuccaggaggugccccacgugaucgaggaggugaugaacaucgugcugaucgcccugagccugcuggccauccugaagggcaucuacaacguggccaccugcggccugcugggccuggugagcuuccugcugcugugcggcagaagcugcagcaccaccuacaagggcguguacgagcugcagacccuggagcuggacauggccagccugaacaugugcaugccccugagcugcaccaagaacaacagccaccacuacaucauggugggcaacgagaccggccuggagcugacccugaccaacaccagcaucaucaaccacaaguucugcaaccugagcgacgcccacaagaagaaccuguacgaccacgcccugaugagcaucaucagcaccuuccaccugagcauccccaacuucaaccaguacgaggccaugagcugcgacuucaacggcggcagaaucagcgugcaguacaaccugagccacagcuacgccguggacgccgccaaccacugcggcaccaucgccaacggcgugcugcagaccuucaugagaauggccuggggcggcagcuacaucgcccuggacagcggcaagggcagcugggacugcaucaugaccagcuaccaguaccugaucauccagaacaccaccugggaggaccacugccaguucagcagacccagccccaucggcuaccugggccugcugagccagagaaccagagacaucuacaucagcagaagacugcugggcaccuucaccuggacccugagcgacagcgagggcaacgagacccccggcggcuacugccugaccagauggaugcugaucgaggccgagcugaagugcuucggcaacaccgccguggccaagugcaacgagaagcacgacgaggaguucugcgacaugcugagacuguucgacuucugcaagcaggccaucagaagacugaagacccccgcccagaugagcauccagcugaucaacaaggccgugaacgcccugaucaacgaccagcugaucaugaagaaccaccugagagacaucaugggcauccccuacugcaacuacagcaaguacugguaccugaaccacaccgugaccggcaagaccagccugcccagaugcuggcuggugagcaacggcagcuaccugaacgagacccacuucagcgacgacaucgagcagcaggccgacaacaugaucaccgagcugcugcagaaggaguacaucgacagacagggcaagaccccccugggccugguggaccuguucguguucagcaccagcuucuaccugaucagcaucuuccugcaccuggugaagauccccacccacagacacaucaccggcaagcccugccccaagccccacagacugaaccacaugggcaucugcagcugcggccuguacaaccaccccggcgugcccgugaaguggaagagaugaggacuaguaauaaggaaacuguaugaaugucugugggcaggaagugaagagauccuucuguaaagguuuuuggaauuaugucugcugaauaauaaacuuuuuugaaauaauaaaucugguagaaaaaugagaucucaaaggcucuuuucagagccaccaaaaaaaaaaaaaaaaaaaaaaaaaaaaaaaaaaaaaaaaaaaaaaaaaaaaaaaaaaaaaaaaaaaaaaaaaaaaaaaaaaaaaaaaaaaaaaaaaaaaa

SEQ ID NO: 30865 - RNA, 1809 nt, Artificial Sequence
  mRNA product Design b-4 (hSL-A100) comprising derived and/or modified sequence from LASV(Lassa virus/H.sapiens-wt/NGA/2016/ISTH_0017;Clade II)__AVO03567__GPCmut6 (opt4)
aggagagucccgcagucggcguccagcggcucugcuuguucgugugugugucguugcaggccuuauucaagcuuaccaugggccagaucaucaccuucuuccaggaggugccccacgugaucgaggaggugaugaacaucgugcugaucgcccugagccugcuggccauccugaagggcaucuacaacguggccaccugcggccuguucggccuggugagcuuccugcugcugugcggcagaagcugcagcaccaccuacaagggcguguacgagcugcagacccuggagcuggacauggccagccugaacaugugcaugccccugagcugcaccaagaacaacagccaccacuacaucauggugggcaacgagaccggccuggagcugacccugaccaacaccagcaucaucaaccacaaguucugcaaccugagcgacgcccacaagaagaaccuguacgaccacgcccugaugagcaucaucagcaccuuccaccugagcauccccaacuucaaccaguacgaggccaugagcugcgacuucaacggcggcaagaucagcgugcaguacaaccugagccacaccuacgccaucgacgccgccaaccacugcggcaccaucgccaacggcgugcugcagaccuucaugagaauggccuggggcggcagcuacaucgcccuggacagcggcaagggcagcugggacugcaucaugaccagcuaccaguaccugaucauccagaacaccaccugggaggaccacugccaguucagcagacccagccccaucggcuaccugggccugcugagccagagaaccagagacaucuacaucagcagaagacugcugggcaccuucaccuggacccugagcgacagcgagggcaacgagacccccggcggcuacugccugaccagauggaugcugaucgaggccgagcugaagugcuucggcaacaccgccguggccaagugcaacgagaagcacgacgaggaguucugcgacaugcugagacuguucgacuucugcaagcaggccaucagaagacugaagacccccgcccagaugagcauccagcugaucaacaaggccgugaacgcccugaucaacgaccagcugaucaugaagaaccaccugagagacaucaugggcauccccuacugcaacuacagcaaguacugguaccugaaccacaccgugaccggcaagaccagccugcccagaugcuggcuggugagcaacggcagcuaccugaacgagacccacuucagcgacgacaucgagcagcaggccgacaacaugaucaccgagcugcugcagaaggaguacauggacagacagggcaagaccccccugggccugguggaccuguucguguucagcaccagcuucuaccugaucagcaucuuccugcaccuggugagaauccccacccacagacacgugaucggcaagcccugccccaagccccacagacugaaccacaugggcaucugcagcugcggccuguacaagcaccccggcgugcccgugaaguggaagagaugaggacuaguaauaaggaaacuguaugaaugucugugggcaggaagugaagagauccuucuguaaagguuuuuggaauuaugucugcugaauaauaaacuuuuuugaaauaauaaaucugguagaaaaaugagaucucaaaggcucuuuucagagccaccaaaaaaaaaaaaaaaaaaaaaaaaaaaaaaaaaaaaaaaaaaaaaaaaaaaaaaaaaaaaaaaaaaaaaaaaaaaaaaaaaaaaaaaaaaaaaaaaaaaaa

SEQ ID NO: 30866 - RNA, 1809 nt, Artificial Sequence
  mRNA product Design b-4 (hSL-A100) comprising derived and/or modified sequence from LASV(Lassa virus/H.sapiens-wt/NGA/2018/ISTH_0959;Clade II)__AVV65099__GPCmut6 (opt4)
aggagagucccgcagucggcguccagcggcucugcuuguucgugugugugucguugcaggccuuauucaagcuuaccaugggccagaucaucaccuucuuccaggaggugccccacgugaucgaggaggugaugaacaucgugcugaucgcccugagccugcuggccauccugaagggcaucuacaacguggugaccugcggccuguucggccuggugagcuuccugcugcugugcggcagaagcugcagcaccaccuacaagggcguguacgagcugcagacccuggagcuggacauggccagccugaacaugugcaugccccugagcugcaccaagaacaacagccaccacuacaucauggugggcaacgagaccggccuggagcugacccugaccaacaccagcaucaucaaccacaaguucugcaaccugagcgacgcccacaagaagaaccuguacgaccacgcccugaugagcaucaucagcaccuuccaccugagcauccccaacuucaaccaguacgaggccaugagcugcgacuucaacggcggcaagaucagcgugcaguacaaccugagccacgccuacgccaucgacgccgccaaccacugcggcaccaucgccaacggcgugcugcagaccuucaugagaauggccuggggcggcagcuacaucgcccuggacagcggcaagggcagcugggacugcaucaugaccagcuaccaguaccugaucauccagaacaccaccugggaggaccacugccaguucagcagacccagccccaucggcuaccugggccugcugagccagagaaccagagacaucuacaucagcagaagacugcugggcaccuucaccuggacccugagcgacagcgagggcaacgagacccccggcggcuacugccugaccagauggaugcugaucgaggccgagcugaagugcuucggcaacaccgccguggccaagugcaacgagaagcacgacgaggaguucugcgacaugcugagacuguucgacuucugcaagcaggccaucagaagacugaagacccccgcccagaugagcauccagcugaucaacaaggccgugaacgcccugaucaacgaccagcugaucaugaagaaccaccugagagacaucaugggcauccccuacugcaacuacagcaaguacugguaccugaaccacaccgugaccggcaagaccagccugcccagaugcuggcuggugagcaacggcagcuaccugaacgagacccacuucagcgacgacaucgagcagcaggccgacaacaugaucaccgagcugcugcagaaggaguacaucgacagacagggcaagaccccccugggccugguggaccuguucguguucagcaccagcuucuaccugaucagcaucuuccugcaccuggugaagauccccacccacagacacgugaucggcaagcccugccccaagccccacagacugaaccacaugggcaucugcagcugcggccuguacaagcaccccggcgugcccgugaaguggaagagaugaggacuaguaauaaggaaacuguaugaaugucugugggcaggaagugaagagauccuucuguaaagguuuuuggaauuaugucugcugaauaauaaacuuuuuugaaauaauaaaucugguagaaaaaugagaucucaaaggcucuuuucagagccaccaaaaaaaaaaaaaaaaaaaaaaaaaaaaaaaaaaaaaaaaaaaaaaaaaaaaaaaaaaaaaaaaaaaaaaaaaaaaaaaaaaaaaaaaaaaaaaaaaaaaa

SEQ ID NO: 30867 - RNA, 1809 nt, Artificial Sequence
  mRNA product Design b-4 (hSL-A100) comprising derived and/or modified sequence from LASV(LASV003-NIG-2008;Clade II)__AIT17580__GPCmut6 (opt4)
aggagagucccgcagucggcguccagcggcucugcuuguucgugugugugucguugcaggccuuauucaagcuuaccaugggccagaucaucaccuucuuccaggaggugccccacgugaucgaggaggugaugaacaucgugcugaucgcccugagccugcuggccauccugaagggcaucuacaacguggccaccugcggccuguucggccuggugagcuuccugcugcugugcggcagaagcugcagcaccaccuacaagggcguguacgagcugcagacccuggagcuggacauggccagccugaacaugugcaugccccugagcugcaccaagaacaacagccaccacuacaucauggugggcaacgagaccggccuggagcugacccugaccaacaccagcaucaucaaccacaaguucugcaaccugagcgacgcccacaagaagaaccuguacgaccacgcccugaugagcaucaucagcaccuuccaccugagcauccccaacuucaaccaguacgaggccaugagcugcgacuucaacggcggcaagaucagcgugcaguacaaccugagccacaccuacgccguggacgccgccaaccacugcggcaccaucgccaacggcgugcugcagaccuucaugagaauggccuggggcggcagcuacaucgcccuggacagcggcaagggcagcugggacugcaucaugaccagcuaccaguaccugaucauccagaacaccaccugggaggaccacugccaguucagcagacccagccccaucggcuaccugggccugcugagccagagaaccagagacaucuacaucagcagaagacugcugggcaccuucaccuggacccugagcgacagcgagagcaacgagacccccggcggcuacugccugaccagauggaugcugaucgaggccgagcugaagugcuucggcaacaccgccguggccaagugcaacgagaagcacgacgaggaguucugcgacaugcugagacuguucgacuucugcaagcaggccaucagaagacugaaggcccccgcccagaugagcauccagcugaucaacaaggccgugaacgcccugaucaacgaccagcugaucaugaagaaccaccugagagacaucaugggcauccccuacugcaacuacagcaaguacugguaccugaaccacaccgugaccggcagaaccagccugcccagaugcuggcuggugagcaacggcagcuaccugaacgagacccacuucagcgacgacaucgagcagcaggccgacaacaugaucaccgagcugcugcagaaggaguacauggacagacagggcaagaccccccugggccugguggaccuguucguguucagcaccagcuucuaccugaucagcaucuuccugcaccuggugaagauccccacccacagacacgugaucggcaagcccugccccaagccccacagacugaaccacaugggcaucugcagcugcggccuguacaagcaccccggcgugcccgugaaguggaagagaugaggacuaguaauaaggaaacuguaugaaugucugugggcaggaagugaagagauccuucuguaaagguuuuuggaauuaugucugcugaauaauaaacuuuuuugaaauaauaaaucugguagaaaaaugagaucucaaaggcucuuuucagagccaccaaaaaaaaaaaaaaaaaaaaaaaaaaaaaaaaaaaaaaaaaaaaaaaaaaaaaaaaaaaaaaaaaaaaaaaaaaaaaaaaaaaaaaaaaaaaaaaaaaaaa

SEQ ID NO: 30868 - RNA, 1809 nt, Artificial Sequence
  mRNA product Design b-4 (hSL-A100) comprising derived and/or modified sequence from LASV(LASV035-NIG-2009;Clade II)__AIT17588__GPCmut6 (opt4)
aggagagucccgcagucggcguccagcggcucugcuuguucgugugugugucguugcaggccuuauucaagcuuaccaugggccagaucaucaccuucuuccaggaggugccccacgugaucgaggaggugaugaacaucgugcugaucgcccugagccugcuggccauccugaagggcaucuacaacguggccaccugcggccuguucggccuggugagcuuccugcugcugugcggcagaagcugcagcaccaccuacaagggcguguacgagcugcagacccuggagcuggacauggccagccugaacaugugcaugccccugagcugcaccaagaacaacagccaccacuacaucauggugggcaacgagaccggccuggagcugacccugaccaacaccagcaucaucaaccacaaguucugcaaccugagcgacgcccacaagaagaaccuguacgaccacgcccugaugagcaucaucagcaccuuccaccugagcauccccaacuucaaccaguacgaggccaugagcugcgacuucaacggcggcaagaucagcgugcaguacaaccugagccacgccuacgccguggacgccgccaaccacugcggcaccaucgccaacggcgugcugcagaccuucaugagaauggccuggggcggcagcuacaucgcccuggacagcggcaagggcagcugggacugcaucaugaccagcuaccaguaccugaucauccagaacaccaccugggaggaccacugccaguucagcagacccagccccaucggcuaccugggccugcugagccagagaaccagagacaucuacaucagcagaagacugcugggcaccuucaccuggacccugagcgacagcgagggcaacgagacccccggcggcuacugccugaccagauggaugcugaucgaggccgagcugaagugcuucggcaacaccgccguggccaagugcaacgagaagcacgacgaggaguucugcgacaugcugagacuguucgacuucugcaagcaggccaucagaagacugaaggcccccgcccagaugagcauccagcugaucaacaaggccgugaacgcccugaucaacgaccagcugaucaugaagaaccaccugagagacaucaugggcauccccuacugcaacuacagcaaguacugguaccugaaccacaccgugaccggcaagaccagccugcccagaugcuggcuggugagcaacggcagcuaccugaacgagacccacuucagcgacgacaucgagcagcaggccgacaacaugaucaccgagcugcugcagaaggaguacaucgacagacagggcaagaccccccugggccugguggaccuguucguguucagcaccagcuucuaccugaucagcaucuuccugcaccuggugaagauccccacccacagacacgugaucggcaagcccugccccaagccccacagacugaaccacaugggcaucugcagcugcggccuguacaagcaccccggcgugcccgugaaguggaagagaugaggacuaguaauaaggaaacuguaugaaugucugugggcaggaagugaagagauccuucuguaaagguuuuuggaauuaugucugcugaauaauaaacuuuuuugaaauaauaaaucugguagaaaaaugagaucucaaaggcucuuuucagagccaccaaaaaaaaaaaaaaaaaaaaaaaaaaaaaaaaaaaaaaaaaaaaaaaaaaaaaaaaaaaaaaaaaaaaaaaaaaaaaaaaaaaaaaaaaaaaaaaaaaaaa

SEQ ID NO: 30869 - RNA, 1809 nt, Artificial Sequence
  mRNA product Design b-4 (hSL-A100) comprising derived and/or modified sequence from LASV(LASV1000-NIG-2009;Clade II)__AIT17782__GPCmut6 (opt4)
aggagagucccgcagucggcguccagcggcucugcuuguucgugugugugucguugcaggccuuauucaagcuuaccaugggccagaucaucaccuucuuccaggaggugccccacgugaucgaggaggugaugaacaucgugcugaucgcccugagccugcuggccauccugaagggcaucuacaacguggccaccugcggccuguucggccuggugagcuuccugcugcugugcggcagaagcugcagcaccaccuacaagggcguguacgagcugcagacccuggagcuggacauggccagccugaacaugugcaugccccugagcugcaccaagaacaacagccaccacuacaucauggugggcaacgagaccggccuggagcugacccugaccaacaccagcaucaucaaccacaaguucugcaaccugagcgacgcccacaagaagaaccuguacgaccacgcccugaugagcaucaucagcaccuuccaccugagcauccccaacuucaaccaguacgaggccaugagcugcgacuucaacggcggcaagaucagcgugcaguacaaccugagccacaccuacgccguggacgccgccaaccacugcggcaccaucgccaacggcgugcugcagaccuucaugagaauggccuggggcggcagcuacaucgcccuggacagcggcaagggcagcugggacugcaucaugaccagcuaccaguaccugaucauccagaacaccaccugggaggaccacugccaguucagcagacccagccccaucggcuaccugggccugcugagccagagaaccagagacaucuacaucagcagaagacugcugggcaccuucaccuggacccugagcgacagcgagggcaacgagacccccggcggcuacugccugaccagauggaugcugaucgaggccgagcugaagugcuucggcaacaccgccguggccaagugcaacgagaagcacgacgaggaguucugcgacaugcugagacuguucgacuucugcaagcaggccaucaagagacugaagacccccgcccagaugagcauccagcugaucaacaaggccgugaacgcccugaucaacgaccagcugaucaugaagaaccaccugagagacaucaugggcauccccuacugcaacuacagcaaguacugguaccugaaccacaccgugaccggcaagaccagccugcccagaugcuggcuggugagcaacggcagcuaccugaacgagacccacuucagcgacgacaucgagcagcaggccgacaacaugaucaccgagcugcugcagaaggaguacaucgacagacagggcaagaccccccugggccugguggaccuguucguguucagcaccagcuucuaccugaucagcaucuuccugcaccuggugaagauccccacccacagacacguggugggcaagcccugccccaagccccacagacugaaccacaugggcaucugcagcugcggccuguacaagcaccccggcgugcccgugaaguggaagagaugaggacuaguaauaaggaaacuguaugaaugucugugggcaggaagugaagagauccuucuguaaagguuuuuggaauuaugucugcugaauaauaaacuuuuuugaaauaauaaaucugguagaaaaaugagaucucaaaggcucuuuucagagccaccaaaaaaaaaaaaaaaaaaaaaaaaaaaaaaaaaaaaaaaaaaaaaaaaaaaaaaaaaaaaaaaaaaaaaaaaaaaaaaaaaaaaaaaaaaaaaaaaaaaaa

SEQ ID NO: 30870 - RNA, 1809 nt, Artificial Sequence
  mRNA product Design b-4 (hSL-A100) comprising derived and/or modified sequence from LASV(LASV221-NIG-2010;Clade II)__AIT17624__GPCmut6 (opt4)
aggagagucccgcagucggcguccagcggcucugcuuguucgugugugugucguugcaggccuuauucaagcuuaccaugggccagaucaucaccuucuuccaggaggugccccacgugaucgaggaggugaugaacaucgugcugaucgcccugagccugcuggccauccugaagggcaucuacaacguggccaccugcggccuguucggccuggugagcuuccugcugcugugcggcagaagcugcagcaccaccuacaagggcguguacgagcugcagacccuggagcuggacauggccagccugaacaugugcaugccccugagcugcaccaagaacaacagccaccacuacaucauggugggcaacgagaccggccuggagcugacccugaccaacaccagcaucaucaaccacaaguucugcaaccugagcgacgcccacaagaagaaccuguacgaccacgcccugaugagcaucaucagcaccuuccaccugagcauccccaacuucaaccaguacgaggccaugagcugcgacuucaacggcggcaagaucagcgugcaguacaaccugagccacaccuacgccaucgacgccgccaaccacugcggcaccaucgccaacggcgugcugcagaccuucaugagaauggccuggggcggcagcuacaucgcccuggacagcggcaagggcagcugggacugcaucaugaccagcuaccaguaccugaucauccagaacaccaccugggaggaccacugccaguucagcagacccagccccaucggcuaccugggccugcugagccagagaaccagagacaucuacaucagcagaagacugcugggcaccuucaccuggacccugagcgacagcgagggcaacgagacccccggcggcuacugccugaccagauggaugcugaucgaggccgagcugaagugcuucggcaacaccgccguggccaagugcaacgagaagcacgacgaggaguucugcgacaugcugagacuguucgacuucugcaagcaggccaucagaagacugaagacccccgcccagaugagcauccagcugaucaacaaggccgugaacgcccugaucaacgaccagcugaucaugaagaaccaccugagagacaucaugggcauccccuacugcaacuacagcaaguacugguaccugaaccacaccgugaccggcaagaccagccugcccagaugcuggcuggugagcaacggcagcuaccugaacgagacccacuucagcgacgacaucgagcagcaggccgacaacaugaucaccgagaugcugcagaaggaguacauggacagacagggcaagaccccccugggccugguggaccuguucguguucagcaccagcuucuaccugaucagcaucuuccugcaccuggugaagauccccacccacagacacgugaucggcaagcccugccccaagccccacagacugaaccacaugggcaucugcagcugcggccuguacaagcaccccggcgugcccgugaaguggaagagaugaggacuaguaauaaggaaacuguaugaaugucugugggcaggaagugaagagauccuucuguaaagguuuuuggaauuaugucugcugaauaauaaacuuuuuugaaauaauaaaucugguagaaaaaugagaucucaaaggcucuuuucagagccaccaaaaaaaaaaaaaaaaaaaaaaaaaaaaaaaaaaaaaaaaaaaaaaaaaaaaaaaaaaaaaaaaaaaaaaaaaaaaaaaaaaaaaaaaaaaaaaaaaaaaa

SEQ ID NO: 30871 - RNA, 1809 nt, Artificial Sequence
  mRNA product Design b-4 (hSL-A100) comprising derived and/or modified sequence from LASV(LASV237-NIG-2010;Clade II)__AIT17638__GPCmut6 (opt4)
aggagagucccgcagucggcguccagcggcucugcuuguucgugugugugucguugcaggccuuauucaagcuuaccaugggccagaucaucaccuucuuccaggaggugccccacgugaucgaggaggugaugaacaucgugcugaucgcccugagccugcuggccauccugaagggcaucuacaacguggccaccugcggccuguucggccuggugagcuuccugcugcugugcggcagaagcugcagcaccaccuacaagggcguguacgagcugcagacccuggagcuggacauggccagccugaacaugugcaugccccugagcugcaccaagaacaacagccaccacuacaucauggugggcaacgagaccggccuggagcugacccugaccaacaccagcaucaucaaccacaaguucugcaaccugagcgacgcccacaagaaggaccuguacgaccacgcccugaugagcaucaucagcaccuuccaccugagcauccccaacuucaaccaguacgaggccaugagcugcgacuucaacggcggcaagaucagcgugcaguacaaccugagccacaccuacgccguggacgccgccaaccacugcggcaccaucgccaacggcgugcugcagaccuucaugagaauggccuggggcggcagcuacaucgcccuggacagcggcaagggcagcugggacugcaucaugaccagcuaccaguaccugaucauccagaacaccaccugggaggaccacugccaguucagcagacccagccccaucggcuaccugggccugcugagccagagaaccagagacaucuacaucagcagaagacugcugggcaccuucaccuggacccugagcgacagcgagggcaacgagacccccggcggcuacugccugaccagauggaugcugaucgaggccgagcugaagugcuucggcaacaccgccguggccaagugcaacgagaagcacgacgaggaguucugcgacaugcugagacuguucgacuucugcaagcaggccaucagaagacugaagacccccgcccagaugagcauccagcugaucaacaaggccgugaacgcccugaucaacgaccagcugaucaugaagaaccaccugagagacaucaugggcauccccuacugcaacuacagcaaguacugguaccugaaccacaccgugaccggcaagaccagccugcccagaugcuggcuggugagcaacggcagcuaccugaacgagacccacuucagcgacgacaucgagcagcaggccgacaacaugaucaccgagcugcugcagaaggaguacauggacagacagggcaagaccccccugggccugguggaccuguucguguucagcaccagcuucuaccugaucagcaucuuccugcaccugaucaagauccccacccacagacacaucaccggcaagcccugccccaagccccacagacugaaccacaugggcaucugcagcugcggccuguacaagcaccccggcgugcccgugaaguggaagagaugaggacuaguaauaaggaaacuguaugaaugucugugggcaggaagugaagagauccuucuguaaagguuuuuggaauuaugucugcugaauaauaaacuuuuuugaaauaauaaaucugguagaaaaaugagaucucaaaggcucuuuucagagccaccaaaaaaaaaaaaaaaaaaaaaaaaaaaaaaaaaaaaaaaaaaaaaaaaaaaaaaaaaaaaaaaaaaaaaaaaaaaaaaaaaaaaaaaaaaaaaaaaaaaaa

SEQ ID NO: 30872 - RNA, 1809 nt, Artificial Sequence
  mRNA product Design b-4 (hSL-A100) comprising derived and/or modified sequence from LASV(LASV253-NIG-2011;Clade II)__AIT17670__GPCmut6 (opt4)
aggagagucccgcagucggcguccagcggcucugcuuguucgugugugugucguugcaggccuuauucaagcuuaccaugggccagaucaucaccuucuuccaggaggugccccacgugaucgaggaggugaugaacaucgugcugaucgcccugagccugcuggccauccugaagggcaucuacaacguggccaccugcggccuguucggccuggugagcuuccugcugcugugcggcagaagcugcagcaccaccuacaagggcguguacgagcugcagacccuggagcuggacauggccagccugaacaugugcaugccccugagcugcaccaagaacaacagccaccacuacaucauggugggcaacgagaccggccuggagcugacccugaccaacaccagcaucaucaaccacaaguucugcaaccugagcgacgcccacaagaagaaccuguacgaccacgcccugaugagcaucaucagcaccuuccaccugagcauccccaacuucaaccaguacgaggccaugagcugcgacuucaacggcggcaagaucagcgugcaguacaaccugagccacaccuacgccguggacgccgccaaccacugcggcaccaucgccaacggcgugcugcagaccuucaugagaauggccuggggcggcagcuacaucgcccuggacagcggcaagggcagcugggacugcaucaugaccagcuaccaguaccugaucauccagaacaccaccugggaggaccacugccaguucagcagacccagccccaucggcuaccugggccugcugagccagagaaccagagacaucuacaucagcagaagacugcugggcaccuucaccuggacccugagcgacagcgagggcaacgagacccccggcggcuacugccugaccagauggaugcugaucgaggccgagcugaagugcuucggcaacaccgccguggccaagugcaacgagaagcacgacgaggaguucugcgacaugcugagacuguucgacuucugcaagcaggccaucagaagacugaaggcccccgcccagaugagcauccagcugaucaacaaggccgugaacgcccugaucaacgaccagcugaucaugaagaaccaccugagagacaucaugggcauccccuacugcaacuacagcaaguacugguaccugaaccacaccgugaccggcagaaccagccugcccagaugcuggcuggugagcaacggcagcuaccugaacgagacccacuucagcgacgacaucgagcagcaggccgacaacaugaucaccgagcugcugcagaaggaguacaucgacagacagggcaagaccccccugggccugguggaccuguucguguucagcaccagcuucuaccugaucagcaucuuccugcaccuggugaagauccccacccacagacacaucaucggcaagcccugccccaagccccacagacugaaccacaugggcaucugcagcugcggccuguacaagcaccccggcgugcccgugaaguggaagagaugaggacuaguaauaaggaaacuguaugaaugucugugggcaggaagugaagagauccuucuguaaagguuuuuggaauuaugucugcugaauaauaaacuuuuuugaaauaauaaaucugguagaaaaaugagaucucaaaggcucuuuucagagccaccaaaaaaaaaaaaaaaaaaaaaaaaaaaaaaaaaaaaaaaaaaaaaaaaaaaaaaaaaaaaaaaaaaaaaaaaaaaaaaaaaaaaaaaaaaaaaaaaaaaaa

SEQ ID NO: 30873 - RNA, 1809 nt, Artificial Sequence
  mRNA product Design b-4 (hSL-A100) comprising derived and/or modified sequence from LASV(LASV254-NIG-2011;Clade II)__AIT17674__GPCmut6 (opt4)
aggagagucccgcagucggcguccagcggcucugcuuguucgugugugugucguugcaggccuuauucaagcuuaccaugggccagaucaucaccuucuuccaggaggugccccacgugaucgaggaggugaugaacaucgugcugaucgcccugagccugcuggccauccugaagggcaucuacaacguggccaccugcggccuguucggccuggugagcuuccugcugcugugcggcagaagcugcagcaccaccuacaagggcguguacgagcugcagacccuggagcuggacaugaccaaccugaacaugugcaugccccugagcugcaccaagaacaacagccaccacuacaucauggugggcaacgagaccggccuggagcugacccugaccaacaccagcaucaucaaccacaaguucugcaaccugagcgacgcccacaagaagaaccuguacaaccacgcccugaugagcaucaucagcaccuuccaccugagcauccccaacuucaaccaguacgaggccaugagcugcgacuucaacggcggcaagaucagcgugcaguacaaccugagccacagcuacgccguggacgccgccaaccacugcggcaccaucgccaacggcgugcugcagaccuucaugagaauggccuggggcggcagcuacaucgcccuggacagcggcaagggcaacugggacugcaucaugaccagcuaccaguaccugaucauccagaacaccaccugggaggaccacugccaguucagcagacccagccccaucggcuaccugggccugcugagccagagaaccagagacaucuacaucagcagaagacugcugggcaccuucaccuggacccugagcgacagcgagggcaacgagacccccggcggcuacugccugaccagauggaugcugaucgaggccgagcugaagugcuucggcaacaccgccguggccaagugcaacgagaagcacgacgaggaguucugcgacaugcugagacuguucgacuucugcaagcaggccaucagaagacugaagacccccgcccaggccaacauccagcugaucaacaaggccgugaacgcccugaucaacgaccagcugaucaugaagaaccaccugagagacaucaugggcauccccuacugcaacuacagcaaguacugguaccugaaccacaccgugaccggcaagaccagccugcccagaugcuggcuggugagcaacggcagcuaccugaacgagacccacuucagcgacgacaucgagcagcaggccgacaacaugaucaccgagcugcugcagaaggaguacauggacagacagggcaagaccccccugggccugguggaccuguucguguucagcaccagcuucuaccugaucagcaucuuccugcaccuggugaagauccccacccacagacacgugaucggcaagcccugccccaagccccacagacugaaccacaugggcaucugcagcugcggccuguacaagcaccccggcgugcccgugaaguggaagagaugaggacuaguaauaaggaaacuguaugaaugucugugggcaggaagugaagagauccuucuguaaagguuuuuggaauuaugucugcugaauaauaaacuuuuuugaaauaauaaaucugguagaaaaaugagaucucaaaggcucuuuucagagccaccaaaaaaaaaaaaaaaaaaaaaaaaaaaaaaaaaaaaaaaaaaaaaaaaaaaaaaaaaaaaaaaaaaaaaaaaaaaaaaaaaaaaaaaaaaaaaaaaaaaaa

SEQ ID NO: 30874 - RNA, 1809 nt, Artificial Sequence
  mRNA product Design b-4 (hSL-A100) comprising derived and/or modified sequence from LASV(Nig08-A19;Clade III)__ADU56618__GPCmut6 (opt4)
aggagagucccgcagucggcguccagcggcucugcuuguucgugugugugucguugcaggccuuauucaagcuuaccaugggccagaucgugaccuucuuccaggaggugccccacgugaucgaggaggugaugaacaucgugcugaucgcccugagcauccuggccauccugaagggccuguacaacaucgccaccugcggccugaucggccuggugaccuuccugcugcugagcggcagaagcugcagcaugaccuacaagggcguguacgagcugcagacccuggagcugaacaugaacacccugaacaugugcaugccccugagcugcaccaagaacaacagccaccacuacaucauggugggcaacgagaccggccuggagcugacccugaccaacaccagccugcugcaccacaaguucugcaaccugagcgacgcccacaagaagaaccuguacgaccacacccugaugagcaucaucagcaccuuccaccugagcauccccaacuucaaccaguacgaggccaugagcugcgacuucaacggcggcaagaucaccgugcaguacaaccugagccacagcuacgccaucgacgccgccaaccacugcggcaccguggccaacggcgugcugcagaccuucaugagaauggccuggggcggcagcuacaucgcccuggacagcggcagaggcaagugggacugcaucaugaccagcuaccaguaccugaucauccagaacaccaccugggaggaccacugccaguucagcagacccagccccaucggcuaccugggccugcugagccagagaaccagagacaucuacaucagcagaagacugcugggcaccuucaccuggacccugagcgacagcgagggcaacgagacccccggcggcuacugccugaccagauggaugcugaucgaggccgagcugaagugcuucggcaacaccgccguggccaagugcaacgagaagcacgacgaggaguucugcgacaugcugagacuguucgacuucugcaagcaggccaucagaagacugaaggcccccgcccagaugagcauccagcugaucaacaaggccgugaacgcccugaucaacgaccagcugaucaugaagaaccaccugagagacaucaugggcauccccuacugcaacuacagcaaguacugguaccugaaccacaccagcaccggcagaaccagccugcccagaugcuggcuggugagcaacggcagcuaccugaacgagacccacuucagcgacgacaucgagcagcaggccgacaacaugaucaccgagaugcugcagaaggaguaccuggacagacagggcaagaccccccugggccugguggaccuguucguguucagcaccagcuucuaccugaucagcaucuuccugcaccuggugaagauccccacccacagacacaucgugggcaagcccugccccaagccccacagacugaaccacaugggcaucugcagcugcggccuguacaagcagcccggcgugcccgugagauggaagagaugaggacuaguaauaaggaaacuguaugaaugucugugggcaggaagugaagagauccuucuguaaagguuuuuggaauuaugucugcugaauaauaaacuuuuuugaaauaauaaaucugguagaaaaaugagaucucaaaggcucuuuucagagccaccaaaaaaaaaaaaaaaaaaaaaaaaaaaaaaaaaaaaaaaaaaaaaaaaaaaaaaaaaaaaaaaaaaaaaaaaaaaaaaaaaaaaaaaaaaaaaaaaaaaaa

SEQ ID NO: 30875 - RNA, 1812 nt, Artificial Sequence
  mRNA product Design b-4 (hSL-A100) comprising derived and/or modified sequence from LASV(G1180-SLE-2010;Clade IV)__AIT17168__GPCmut6 (opt4)
aggagagucccgcagucggcguccagcggcucugcuuguucgugugugugucguugcaggccuuauucaagcuuaccaugggccagaucgugaccuucuuccaggaggugccccacgugaucgaggaggugaugaacaucgugcugaucgcccugagcauccuggccgugcugaagggccuguacaacuucgccaccugcggccuggugggccugcugaccuuccugcugcugugcggcagaagcugcaccgccagcagauacaagggcguguacgagcugcagacccuggagcugaacauggagacccugaacaugugcaugccccugagcugcaccaagaacaacagccaccacuacaucauggugggcaacgagaccggccuggagcugacccugaccaacaccagcaucaucaaccacaaguucugcaaccugagcgacgcccacaagaagaaccuguacgaccacgcccugaugagcaucaucagcaccuuccaccugagcauccccaacuucaaccaguacgaggccaugagcugcgacuucaacggcggcaagaucagcgugcaguacaaccugagccacagcuacgccggcgacgccgccaaccacugcggcaccguggccaacggcgugcugcagaccuucaugagaauggccuggggcggcagcuacaucgcccuggacagcggccacggcagcugggacugcaucaugaccagcuaccaguaccugaucauccagaacaccaccugggaggaccacugccaguucagcagacccagccccaucggcuaccugggccugcugagccagagaaccagagacaucuacaucagcagaagacugcugggcaccuucaccuggacccugagcgacagcgagggcaaggacacccccggcggcuacugccugaccagauggaugcugaucgaggccgagcugaagugcuucggcaacaccgccguggccaagugcaacgagaagcacgacgaggaguucugcgacaugcugagacuguucgacuucugcaagcaggccauccagagacugaaggcccccgcccagaugagcauccagcugaucaacaaggccgugaacgcccugaucaacgaccagcugaucaugaagaaccaccugagagacaucaugggcauccccuacugcaacuacagcaaguacugguaccugaaccacaccaccaccggcaagaccagccugcccaagugcuggcuggugagcaacggcagcuaccugaacgagacccacuucagcgacgacaucgagcagcaggccgacaacaugaucaccgagaugcugcagaaggaguacauggagagacagggcaagaccccccugggccugguggaccuguucguguucagcaccagcuucuaccugaucagcaucuuccugcaccuggugaagauccccacccacagacacaucgugggcaagagcugccccaagccccacagacugaaccacaugggcaucugcagcugcggccuguacaagcagcccggcgugcccgugaaguggaagagaugaggacuaguaauaaggaaacuguaugaaugucugugggcaggaagugaagagauccuucuguaaagguuuuuggaauuaugucugcugaauaauaaacuuuuuugaaauaauaaaucugguagaaaaaugagaucucaaaggcucuuuucagagccaccaaaaaaaaaaaaaaaaaaaaaaaaaaaaaaaaaaaaaaaaaaaaaaaaaaaaaaaaaaaaaaaaaaaaaaaaaaaaaaaaaaaaaaaaaaaaaaaaaaaaa

SEQ ID NO: 30876 - RNA, 1812 nt, Artificial Sequence
  mRNA product Design b-4 (hSL-A100) comprising derived and/or modified sequence from LASV(G1442-SLE-2011;Clade IV)__AIT17180__GPCmut6 (opt4)
aggagagucccgcagucggcguccagcggcucugcuuguucgugugugugucguugcaggccuuauucaagcuuaccaugggccagaucgugaccuucuuccaggaggugccccacgugaucgaggaggugaugaacaucgugcugaucgcccugagcauccuggccgugcugaagggccuguacaacguggccaccugcggccugaucggccuggugaccuuccugcugcugugcggcagaagcugcaccaccacccuguacaagggcguguacgagcugcagacccuggagcugaacauggagacccugaacaugugcaugccccugagcugcaccaagaacaacagccaccacuacaucagagugggcaacgagaccggccuggagcugacccugaccaacaccagcaucaucaaccacaaguucugcaaccugagcgacgcccacaagaagaaccuguacgaccacgcccugaugagcaucaucagcaccuuccaccugagcauccccaacuucaaccaguacgaggccaugagcugcgacuucaacggcggcaagaucagcgugcaguacaaccugagccacagcuacgccggcgacgccgccaaccacugcggcaccguggccaacggcgugcugcagaccuucaugagaauggccuggggcggcagcuacaucgcccuggacagcggcagaggcaacugggacugcaucaugaccagcuaccaguaccugaucauccagaacaccaccugggacgaccacugccaguucagcagacccagccccaucggcuaccugggccugcugagccagagaaccagagacguguacaucagcagaagacugcugggcaccuucaccuggacccugagcgacagcgagggcaaggacacccccggcggcuacugccugaccagauggaugcugaucgaggccgagcugaagugcuucggcaacaccgccguggccaagugcaacgagaagcacgacgaggaguucugcgacaugcugagacuguucgacuucugcaagcaggccauccagagacugaaggcccccgcccagaugagcauccagcugaucaacaaggccgugaacgcccugaucaacgaccagcugaucaugaagaaccaccugagagacaucaugggcauccccuacugcaacuacagcaaguacugguaccugaacaacaccgccaccggcaagaccagccugcccaagugcuggcugaucagcaacggcagcuaccugaacgagacccacuucagcgacgacaucgagcaggaggccgacaacaugaucaccgagaugcugcagaaggaguacauggagagacagggcaagaccccccugggccugguggaccuguucguguucagcaccagcuucuaccugaucagcaucuuccugcaccuggugaagauccccacccacagacacaucgugggcaagagcugccccaagccccacagacugaaccacaugggcaucugcagcugcggccuguacaagcagcccggcgugcccgugagauggaagagaugaggacuaguaauaaggaaacuguaugaaugucugugggcaggaagugaagagauccuucuguaaagguuuuuggaauuaugucugcugaauaauaaacuuuuuugaaauaauaaaucugguagaaaaaugagaucucaaaggcucuuuucagagccaccaaaaaaaaaaaaaaaaaaaaaaaaaaaaaaaaaaaaaaaaaaaaaaaaaaaaaaaaaaaaaaaaaaaaaaaaaaaaaaaaaaaaaaaaaaaaaaaaaaaaa

SEQ ID NO: 30877 - RNA, 1812 nt, Artificial Sequence
  mRNA product Design b-4 (hSL-A100) comprising derived and/or modified sequence from LASV(G3010-SLE-2013;Clade IV)__AIT17344__GPCmut6 (opt4)
aggagagucccgcagucggcguccagcggcucugcuuguucgugugugugucguugcaggccuuauucaagcuuaccaugggccagaucgugaccuucuuccaggaggugccccacgugaucgaggaggugaugaacaucgugcugaucgcccugagcauccuggccgugcugaagggccuguacaacuucgccaccugcggccuggugggccuggugaccuuccugcugcugugcggcagaagcugcaccaccagccuguacaagggcguguacgagcugcagacccuggagcugaacauggagacccugaacaugugcaugccccugagcugcaccaagaacaacagccaccacuacaucauggugggcaacgagaccggccuggagcugacccugaccaacaccagcaucaucaaccacaaguucugcaaccugagcgacgcccacaagaagaaccuguacaaccacgcccugaugagcaucaucagcaccuuccaccugagcauccccaacuucaaccaguacgaggccaugagcugcgacuucaacggcggcaagaucagcgugcaguacaaccugagccacagcuacgccggcgacgccgccagccacugcggcaccguggccaacggcgugcugcagaccuucaugagaauggccuggggcggcagcuacaucgcccuggacagcggcuacggcaagugggacugcaucaugaccagcuaccaguaccugaucauccagaacaccaccugggaggaccacugccaguucagcagacccagccccaucggcuaccugggccugcugagccagagaaccagagacaucuacaucagcagaagacugcugggcaccuucaccuggacccugagcgacagcgagggcaaggacacccccggcggcuacugccugaccagauggaugcugaucgaggccgagcugaagugcuucggcaacaccgccguggccaagugcaacgagaagcacgacgaggaguucugcgacaugcugagacuguucgacuucugcaagcaggccauccagagacugaagacccccgcccagaugagcauccagcugaucaacaaggccgugaacgcccugaucaacgaccagcugaucaugaagaaccaccugagagacaucaugggcauccccuacugcaacuacagcaaguacugguaccugaaccacaccaccaccggcaagaccagccugcccaagugcuggcuggugagcaacggcagcuaccugaacgagacccacuucagcgacgacaucgagcagcaggccgacaacaugaucaccgagaugcugcagaaggaguacauggagagacagggcaagaccccccugggccugguggaccuguucguguucagcaccagcuucuaccugaucagcaucuuccugcaccuggugaagauccccacccacagacacaucgugggcaagagcugccccaagccccacagacugaaccacaugggcaucugcagcugcggccuguacaagcagcccggcgugcccgugagauggaagagaugaggacuaguaauaaggaaacuguaugaaugucugugggcaggaagugaagagauccuucuguaaagguuuuuggaauuaugucugcugaauaauaaacuuuuuugaaauaauaaaucugguagaaaaaugagaucucaaaggcucuuuucagagccaccaaaaaaaaaaaaaaaaaaaaaaaaaaaaaaaaaaaaaaaaaaaaaaaaaaaaaaaaaaaaaaaaaaaaaaaaaaaaaaaaaaaaaaaaaaaaaaaaaaaaa

SEQ ID NO: 30878 - RNA, 1812 nt, Artificial Sequence
  mRNA product Design b-4 (hSL-A100) comprising derived and/or modified sequence from LASV(G502-SLE-2009;Clade IV)__AIT17126__GPCmut6 (opt4)
aggagagucccgcagucggcguccagcggcucugcuuguucgugugugugucguugcaggccuuauucaagcuuaccaugggccagaucgugaccuucuuccaggaggugccccacgugaucgaggaggugaugaacaucgugcugaucgcccugagcauccuggccgugcugaagggccuguacaacuucgccaccugcggccuggugggccugcugaccuuccugcugcugugcggcagaagcugcaccaccggccuguacaagggcguguacgagcugcagacccuggagcugaacauggagacccugaacaugugcaugccccugagcugcaccaagaacaacagccaccacuacaucauggugggcaacgagaccggccuggagcugacccugaccaacaccagcaucaucaaccacaaguucugcaaccugagcgacgcccacaagaagaaccuguacgaccacgcccugaugagcaucaucagcaccuuccaccugagcauccccaacuucaaccaguacgaggccaugagcugcgacuucaacggcggcaagaucagcgugcaguacaaccugagccacagcuacgccggcgacgccgccgaccacugcggcaccguggccaacggcgugcugcagaccuucaugagaauggccuggggcggcagcuacaucgcccuggacagcggcagaggcagaugggacugcaucaugaccagcuaccaguaccugaucauccagaacaccaccugggaggaccacugccaguucagcagacccagccccaucggcuaccugggccugcugagccagagaaccagagacaucuacaucagcagaagacugcugggcaccuucaccuggacccugagcgacagcgagggcaaggacacccccggcggcuacugccugaccagauggaugcugaucgaggccgagcugaagugcuucggcaacaccgccguggccaagugcaacgagaagcacgacgaggaguucugcgacaugcugagacuguucgacuucugcaagcaggccauccagagacugaaggcccccgcccagaugagcauccagcugaucaacaaggccgugaacgcccugaucaacgaccagcuggugaugaagaaccaccugagagacaucaugggcauccccuacugcaacuacagcagauacugguaccugaaccacaccaccaccggcagaaccagccugcccaagugcuggcuggugagcaacggcagcuaccugaacgagacccacuucagcgacgacaucgagcagcaggccgacaacaugaucaccgagaugcugcagaaggaguacauggagagacagggcaagaccccccugggccugguggaccuguucguguucagcaccagcuucuaccugaucagcaucuuccugcaccuggugaagauccccacccacagacacaucgugggcaagagcugccccaagccccacagacugaaccacaugggcaucugcagcugcggccuguacaagcagcccggcgugcccgugaaguggaagagaugaggacuaguaauaaggaaacuguaugaaugucugugggcaggaagugaagagauccuucuguaaagguuuuuggaauuaugucugcugaauaauaaacuuuuuugaaauaauaaaucugguagaaaaaugagaucucaaaggcucuuuucagagccaccaaaaaaaaaaaaaaaaaaaaaaaaaaaaaaaaaaaaaaaaaaaaaaaaaaaaaaaaaaaaaaaaaaaaaaaaaaaaaaaaaaaaaaaaaaaaaaaaaaaaa

SEQ ID NO: 30879 - RNA, 1812 nt, Artificial Sequence
  mRNA product Design b-4 (hSL-A100) comprising derived and/or modified sequence from LASV(G733-SLE-2010;Clade IV)__AIT17154__GPCmut6 (opt4)
aggagagucccgcagucggcguccagcggcucugcuuguucgugugugugucguugcaggccuuauucaagcuuaccaugggccagaucgugaccuucuuccaggaggugccccacgugaucgaggaggugaugaacaucgugcugaucgcccugagcauccuggccgugcugaagggccuguacaacuucgccaccugcggcaucgugggccuggugagcuuccugcugcugugcggcagaagcugcaccaccagccuguacaagggcguguacgagcugcagacccuggagcugaacauggagacccugaacaugugcaugccccugagcugcaccaagaacaacagccaccacuacaucauggugggcaacgagaccggccuggagcugacccugaccaacaccagcaucaucaaccacaaguucugcaaccugagcgacgcccacaagaagaaccuguacgaccacgcccugaugagcaucaucagcaccuuccaccugagcauccccaacuucaaccaguacgaggccaugagcugcgacuucaacggcggcaagaucagcgugcaguacaaccugagccacagcuacgccggcgacgccgccaaccacugcggcaccaucgccaacggcgugcugcagaccuucaugagaauggccuggggcggcagcuacaucgcccuggacagcggcagagacagaugggacugcaucaugaccagcuaccaguaccugaucauccagaacaccaccugggaggaccacugccaguucagcagacccagccccaucggcuaccugggccugcugagccagagaaccagagacaucuacaucagcagaagacugcugggcaccuucaccuggacccugagcgacagcgagggcaaggacacccccggcggcuacugccugaccagauggaugcugaucgaggccgagcugaagugcuucggcaacaccgccguggccaagugcaacgagaagcacgacgaggaguucugcgacaugcugagacuguucgacuucugcaagcaggccauccagagacugaaggcccccgcccagaugagcauccagcugaucaacaaggccgugaacgcccugaucaacgaccagcugaucaugaagaaccaccugagagacaucaugggcauccccuacugcaacuacagcaaguacugguaccugaaccacaccaccaccggcaagaccagccugcccaagugcuggcuggugagcaacggcagcuaccugaacgagacccacuucagcgacgacaucgagcagcaggccgacaacaugaucaccgagaugcugcagaaggaguacauggagagacagggcaagaccccccugggccugguggaccuguucguguucagcaccagcuucuaccugaucagcaucuuccugcaccuggugaagauccccacccacagacacguggugggcaagagcugccccaagccccacagacugaaccacaugggcaucugcagcugcggccuguacggccagcccggcgugcccgugaaguggaagagaugaggacuaguaauaaggaaacuguaugaaugucugugggcaggaagugaagagauccuucuguaaagguuuuuggaauuaugucugcugaauaauaaacuuuuuugaaauaauaaaucugguagaaaaaugagaucucaaaggcucuuuucagagccaccaaaaaaaaaaaaaaaaaaaaaaaaaaaaaaaaaaaaaaaaaaaaaaaaaaaaaaaaaaaaaaaaaaaaaaaaaaaaaaaaaaaaaaaaaaaaaaaaaaaaa

SEQ ID NO: 30880 - RNA, 1812 nt, Artificial Sequence
  mRNA product Design b-4 (hSL-A100) comprising derived and/or modified sequence from MOPV/LASV reassortant(IGS-1;Clade IV)__AFY05576__GPCmut6 (opt4)
aggagagucccgcagucggcguccagcggcucugcuuguucgugugugugucguugcaggccuuauucaagcuuaccaugggccagaucgugaccuucuuccaggaggugccccacgugaucgaggaggugaugaacaucgugcugaucgcccugagcgugcuggccgugcugaagggccuguacaacuucgccaccugcggccuggugggccuggugaccuuccugcugcugugcggcagaagcugcaccaccagccuguacaagggcguguacgagcugcagacccuggagcugaacauggagacccugaacaugugcaugccccugagcugcaccaagaacaacagccaccacuacaucauggugggcaacgagaccggccuggagcugacccugaccaacaccagcaucaucaaccacaaguucugcaaccugagcgacgcccacaagaagaaccuguacgaccacgcccugaugagcaucaucagcaccuuccaccugagcauccccaacuucaaccaguacgaggccaugagcugcgacuucaacggcggcaagaucagcgugcaguacaaccugagccacagcuacgccggcgacgccgccaaccacugcggcaccguggccaacggcgugcugcagaccuucaugagaauggccuggggcggcagcuacaucgcccuggacagcggcagaggcaacugggacugcaucaugaccagcuaccaguaccugaucauccagaacaccaccugggaggaccacugccaguucagcagacccagccccaucggcuaccugggccugcugagccagagaaccagagacaucuacaucagcagaagacugcugggcaccuucaccuggacccugagcgacagcgagggcgaggacacccccggcggcuacugccugaccagauggaugcugaucgaggccgagcugaagugcuucggcaacaccgccguggccaagugcaacgagaagcacgacgaggaguucugcgacaugcugagacuguucgacuucugcaagcaggccauccagagacugaaggcccccgcccagaugagcauccagcugaucaacaaggccgugaacgcccugaucaacgaccagcugaucaugaagaaccaccugagagacaucaugggcauccccuacugcaacuacagcaaguacugguaccugaaccacaccaccaccggcagaaccagccugcccaagugcuggcuggugagcaacggcagcuaccugaacgagacccacuucagcgacgacaucgagcagcaggccgacaacaugaucaccgagaugcugcagaaggaguacauggagagacagggcaagaccccccugggccugguggaccuguucguguucagcaccagcuucuaccugaucagcaucuuccugcaccuggugaagauccccacccacagacacaucgugggcaagagcugccccaagccccacagacugaaccacaugggcaucugcagcugcggccuguacaagcagcccggcgugcccgugaaguggaagagaugaggacuaguaauaaggaaacuguaugaaugucugugggcaggaagugaagagauccuucuguaaagguuuuuggaauuaugucugcugaauaauaaacuuuuuugaaauaauaaaucugguagaaaaaugagaucucaaaggcucuuuucagagccaccaaaaaaaaaaaaaaaaaaaaaaaaaaaaaaaaaaaaaaaaaaaaaaaaaaaaaaaaaaaaaaaaaaaaaaaaaaaaaaaaaaaaaaaaaaaaaaaaaaaaa

SEQ ID NO: 30881 - RNA, 1812 nt, Artificial Sequence
  mRNA product Design b-4 (hSL-A100) comprising derived and/or modified sequence from LASV(LM765-SLE-2012;Clade IV)__AIT17814__GPCmut6 (opt4)
aggagagucccgcagucggcguccagcggcucugcuuguucgugugugugucguugcaggccuuauucaagcuuaccaugggccagaucgugaccuucuuccaggaggugccccacgugaucgaggaggugaugaacaucgugcugaucgcccugagcauccuggccgugcugaagggccuguacaacuucgccaccugcggccuggugggccuggugaccuuccugcugcugugcggcagaagcugcaccaccagccuguacaagggcguguacgagcugcagacccuggagcugaacauggagacccugaacaugugcaugccccugagcugcaccaagaacaacagccaccacuacaucauggugggcaacgagaccggccuggagcugacccugaccaacaccagcaucaucgaccacaaguucugcaaccugagcgacgcccacagaaagaaccuguacgaccacgcccugaugagcaucaucagcaccuuccaccugagcauccccaacuucaaccaguacgaggccaugagcugcgacuucaacggcggcaagaucagcgugcaguacaaccugagccacagcuacgccaaggacgccgccgaccacugcggcaccguggccaacggcgugcugcagaccuucaugagaauggccuggggcggcagcuacaucgcccuggacagcggcagaggcagaugggacugcaucaugaccagcuaccaguaccugaucauccagaacaccaccugggaggaccacugccaguucagcagacccagccccaucggcuaccugggccugcugagccagagaaccagagacaucuacaucagcagaagacugcugggcaccuucaccuggacccugagcgacagcgagggcaaggacacccccggcggcuacugccugaccagauggaugcugaucgaggccgagcugaagugcuucggcaacaccgccguggccaagugcaacgagaagcacgacgaggaguucugcgacaugcugagacuguucgacuucugcaagcaggccauccagagacugaaggcccccgcccagaugagcauccagcugaucaacaaggccgugaacgcccugaucaacgaccagcugaucaugaagaaccaccugagagacaucaugggcauccccuacugcaacuacagcaaguacugguaccugaaccacaccaccaccggcaagaccagccugcccaagugcuggcuggugagcaacggcagcuaccugaacgagacccacuucagcgacgacaucgagcagcaggccgacaacaugaucaccgagaugcugcagaaggaguacauggagagacagggcaagaccccccugggccugguggaccuguucguguucagcaccagcuucuaccugaucagcaucuuccugcaccuggugaagauccccacccacagacacaucgugggcaagcccugccccaagccccacagacugaaccacaugggcaucugcagcugcggccuguacaagcagcccggcgugcccgugaaguggaagagaugaggacuaguaauaaggaaacuguaugaaugucugugggcaggaagugaagagauccuucuguaaagguuuuuggaauuaugucugcugaauaauaaacuuuuuugaaauaauaaaucugguagaaaaaugagaucucaaaggcucuuuucagagccaccaaaaaaaaaaaaaaaaaaaaaaaaaaaaaaaaaaaaaaaaaaaaaaaaaaaaaaaaaaaaaaaaaaaaaaaaaaaaaaaaaaaaaaaaaaaaaaaaaaaaa

SEQ ID NO: 30882 - RNA, 1812 nt, Artificial Sequence
  mRNA product Design b-4 (hSL-A100) comprising derived and/or modified sequence from LASV(LM776-SLE-2012;Clade IV)__AIT17824__GPCmut6 (opt4)
aggagagucccgcagucggcguccagcggcucugcuuguucgugugugugucguugcaggccuuauucaagcuuaccaugggccagaucgugaccuucuuccaggaggugccccacgugaucgaggaggugaugaacaucgugcugaucgcccugagcauccuggccgugcugaagggccuguacaacuucgccaccugcggccuggugggccuggugaccuuccugcugcugugcggcagaagcugcaccaccagcguguacaagggcguguacgagcugcagacccuggagcugaacauggagacccugaacaugugcaugccccugagcugcaccaagaacaacagccaccacuacaucauggugggcaacgagaccggccuggagcugacccugaccaacaccagcaucaucaaccacaaguucugcaaccugagcgacgcccacaagaagaaccuguacgaccacgcccugaugagcaucaucagcaccuuccaccugagcauccccaacuucaaccaguacgaggccaugagcugcgacuucaacggcggcaagaucagcgugcaguacaaccugagccacagcuacgccggcgacgccgccaaccacugcggcaccguggccaacggcgugcugcagaccuucaugagaauggccuggggcggcagcuacaucgcccuggacagcggccacggcaagugggacugcaucaugaccagcuaccaguaccugaucauccagaacaccaccugggaggaccacugccaguucagcagacccagccccaucggcuaccugggccugcugagccagagaaccagagacaucuacaucagcagaagacugcugggcaccuucaccuggacccugagcgacagcgagggcaaggacacccccggcggcuacugccugaccagauggaugcugaucgaggccgagcugaagugcuucggcaacaccgccguggccaagugcaacgagaagcacgacgaggaguucugcgacaugcugagacuguucgacuucugcaagcaggccauccagagacugaaggcccccgcccagaugagcauccagcugaucaacaaggccgugaacgcccugaucaacgaccagcugaucaugaagaaccaccugagagacaucaugggcauccccuacugcaacuacagcaaguacugguaccugaaccacaccaccaccggcaagaccagccugcccaagugcuggcuggugagcaacggcagcuaccugaacgagacccacuucagcgacgacaucgagcagcaggccgacaacaugaucaccgagaugcugcagaaggaguacauggagagacagggcaagaccccccugggccugguggaccuguucguguucagcaccagcuucuaccugaucagcaucuuccugcaccuggugaagauccccacccacagacacaucgugggcaagagcugccccaagccccacagacugaaccacaugggcaucugcagcugcggccuguacaagcagcccggcgugcccgugagauggaagagaugaggacuaguaauaaggaaacuguaugaaugucugugggcaggaagugaagagauccuucuguaaagguuuuuggaauuaugucugcugaauaauaaacuuuuuugaaauaauaaaucugguagaaaaaugagaucucaaaggcucuuuucagagccaccaaaaaaaaaaaaaaaaaaaaaaaaaaaaaaaaaaaaaaaaaaaaaaaaaaaaaaaaaaaaaaaaaaaaaaaaaaaaaaaaaaaaaaaaaaaaaaaaaaaaa

SEQ ID NO: 30883 - RNA, 1812 nt, Artificial Sequence
  mRNA product Design b-4 (hSL-A100) comprising derived and/or modified sequence from LASV(Mad39;Clade IV)__ANH09722__GPCmut6 (opt4)
aggagagucccgcagucggcguccagcggcucugcuuguucgugugugugucguugcaggccuuauucaagcuuaccaugggccagaucgugaccuucuuccaggaggugccccacgugaucgaggaggugaugaacaucgugcugaucgcccugagcauccuggccgugcugaagggccuguacaacguggccaccugcggccugaucggccuggugaccuuccugcugcugugcggcagaagcugcaccaccacccuguacaagggcguguacgagcugcaggcccuggagcugaacauggagacccugaacaugugcaugccccugagcugcaccaagaacaacagccaccacuacaucagagugggcaacgagaccggccuggagcugacccugaccaacaccagccugaucaaccacaaguucugcaaccugagcgacgcccacaagaagaaccuguacgaccacgcccugaugagcaucaucagcaccuuccaccugagcauccccaacuucaaccaguacgaggccaugagcugcgacuucaacgacggcaagaucagcgugcaguacaaccugagccacaccuacgccggcgacaccgccaaccacugcggcaccguggccaacggcgugcugcagaccuucaugagaauggccuggggcggcagcuacaucgcccuggacagcggcagaggcggcugggacugcaucaugaccagcuaccaguaccugaucauccagaacaccaccugggaggaccacugccaguucagcagacccagccccaucggcuaccugggccugcugagccagagaaccagagacaucuacaucagcagaagacugcugggcaccuucaccuggacccugagcgacagcgagggcaaggacacccccggcggcuacugccugaccagauggaugcugaucgaggccgagcugaagugcuucggcaacaccgccguggccaagugcaacgagaagcacgacgaggaguucugcgacaugcugagacuguucgacuucugcaagcaggccauccagagacugaaggcccccgcccagaugagcauccagcugaucaacaaggccgugaacgcccugaucaacgaccagcugaucaugaagaaccaccugagagacaucaugggcauccccuacugcaacuacagcaaguacugguaccugaaccacaccgugaccggcaagaccagccugcccaagugcuggcuggugagcaacggcagcuaccugaacgagacccacuucagcgacgacaucgagcagcaggccgacaacaugaucaccgagaugcugcagaaggaguacauggagagacagggcaagaccccccugggccugguggaccuguucguguucagcaccagcuucuaccugaucagcaucuuccugcaccuggugaagauccccacccacagacacguggugggcaagcccugccccaagccccacagacugaaccacaugggcaucugcagcugcggcuucuacaagcagcccggcgugcccgugagauggaagagaugaggacuaguaauaaggaaacuguaugaaugucugugggcaggaagugaagagauccuucuguaaagguuuuuggaauuaugucugcugaauaauaaacuuuuuugaaauaauaaaucugguagaaaaaugagaucucaaaggcucuuuucagagccaccaaaaaaaaaaaaaaaaaaaaaaaaaaaaaaaaaaaaaaaaaaaaaaaaaaaaaaaaaaaaaaaaaaaaaaaaaaaaaaaaaaaaaaaaaaaaaaaaaaaaa

SEQ ID NO: 30884 - RNA, 1812 nt, Artificial Sequence
  mRNA product Design b-4 (hSL-A100) comprising derived and/or modified sequence from LASV(Z0947-SLE-2011;Clade IV)__AIT17840__GPCmut6 (opt4)
aggagagucccgcagucggcguccagcggcucugcuuguucgugugugugucguugcaggccuuauucaagcuuaccaugggccagaucgugaccuucuuccaggaggugccccacgugaucgaggaggugaugaacaucgugcugaucgcccugagcauccuggccgugcugaagggccuguacaacuucgccaccugcggccuggugggccuggugaccuuccugcugcugugcggcagaagcugcaccaucagccuguacaagggcguguacgagcugcagacccuggagcugaacauggagacccugaacaugugcaugccccugagcugcaccaagaacaacagccaccacuacaucauggugggcaacgagaccggccuggagcugacccugaccaacaccagcaucaucaaccacaaguucugcaaccugagcgacgcccacaagaagaaccuguacgaccacgcccugaugagcaucaucagcaccuuccaccugagcauccccaacuucaaccaguacgaggccaugagcugcgacuucaacggcggcaagaucagcgugcaguacaaccugagccacagcuacgccggcgacgccgccaaccacugcggcaccguggccaacggcgugcugcagaccuucaugagaauggccuggggcggcagcuacaucgcccuggacagcggcagagacagaugggacugcaucaugaccagcuaccaguaccugaucauccagaacaccaccugggaggaccacugccaguucagcagacccagccccaucggcuaccugggccugcugagccagagaaccagagacaucuacaucagcagaagacugcugggcaccuucaccuggacccugagcgacagcgagggcaaggacacccccggcggcuacugccugaccagauggaugcugaucgaggccgagcugaagugcuucggcaacaccgccguggccaagugcaacgagaagcacgacgaggaguucugcgacaugcugagacuguucgacuucugcaagcaggccauccagagacugaaggcccccgcccagaugagcauccagcugaucaacaaggccgugaacgcccugaucaacgaccagcugaucaugaagaaccaccugagagacaucaugggcauccccuacugcaacuacagcaaguacugguaccugaaccacaccaccaccggcaagaccagccugcccaagugcuggcuggugagcaacggcagcuaccugaacgagacccacuucagcgacgacaucgagcagcaggccgacaacaugaucaccgagaugcugcagaaggaguacauggagagacagggcaagaccccccugggccugguggaccuguucguguucagcaccagcuucuaccugaucagcaucuuccugcaccuggugaagauccccacccacagacacaucgugggcaagcccugccccaagccccacagacugaaccacaugggcaucugcagcugcggccuguacaagcagcccggcgugcccgugaaguggaagagaugaggacuaguaauaaggaaacuguaugaaugucugugggcaggaagugaagagauccuucuguaaagguuuuuggaauuaugucugcugaauaauaaacuuuuuugaaauaauaaaucugguagaaaaaugagaucucaaaggcucuuuucagagccaccaaaaaaaaaaaaaaaaaaaaaaaaaaaaaaaaaaaaaaaaaaaaaaaaaaaaaaaaaaaaaaaaaaaaaaaaaaaaaaaaaaaaaaaaaaaaaaaaaaaaa

SEQ ID NO: 30885 - RNA, 1812 nt, Artificial Sequence
  mRNA product Design b-4 (hSL-A100) comprising derived and/or modified sequence from LASV(Josiah;Clade IV)__NP_694870__GPCmut6 (opt5)
aggagagucccgcagucggcguccagcggcucugcuuguucgugugugugucguugcaggccuuauucaagcuuaccaugggccagaucgugaccuucuuucaagaggucccccacguuauugaagaggugaugaacaucgugcugauugcccucagcguccuggcugugcuuaaggggcuguacaauuucgccacaugcggacucguuggccuggugacguuucuucugcucugugggagauccugcaccacaucucuguauaaaggagucuacgaacugcagacccucgagcugaacauggaaacacuuaauauguguaugccucugagcugcaccaagaacaauucccaucacuauaucauggugggcaacgagacagggcucgagcugacccuuacgaauaccucuauuaucaaccauaaauucuguaaucugagcgacgcgcacaagaaaaaccucuacgaucaugcucugauguccaucauuucuacauuucaccugagcaucccgaauuucaaccaguaugaagccauguccugcgacuuuaauggaggcaagauuagcguucaguacaaccucucucacuccuaugccggcgaugcugccaaucauugugggaccguggcuaacggaguccugcaaacauucaugcggauggccuggggcgggagcuacaucgcgcuugacucuggacgcggcaacugggauugcauuaugaccuccuaccaguaucugaucauucagaauacgacaugggaggaccacugucaguuuagcagacccucuccuaucggguaccucggacugcuuucccaacggacccgcgauaucuauauuagcagacggcugcucggcacauucaccuggacccuguccgacucugaaggcaaggauacacccgggggauacugccugacgcgcuggaugcucaucgaggccgagcugaaauguuuuggcaacaccgcuguggccaagugcaaugaaaaacaugacgaggaguucugcgauaugcuuagacuguuugacuucuguaagcaggcuauucagcggcucaaagccccugcgcagaugagcauccaacugauuaacaaggccgugaaugcucuuaucaacgaucagcugaucaugaagaaucaccuccgcgacauuauggggauccccuauugcaacuacuccaaauauugguaccugaaucacacaaccacaggaagaaccagccugccuaaguguuggcucgucucuaacggcuccuaccugaaugaaacgcauuucagcgacgauauugaacagcaagccgacaacaugaucacagagaugcuucagaaagaguauauggaacggcaggggaagaccccgcugggacucguugaucuguuuguguucucuaccagcuuuuaccugauuuccaucuuccuucaccucgugaaaauccccacacaucgccacauugucggcaagucuugcccuaaaccccauagacugaaucacaugggcaucuguagcugcgggcuguauaagcagccuggagugcccguuaaguggaaacggugaggacuaguaauaaggaaacuguaugaaugucugugggcaggaagugaagagauccuucuguaaagguuuuuggaauuaugucugcugaauaauaaacuuuuuugaaauaauaaaucugguagaaaaaugagaucucaaaggcucuuuucagagccaccaaaaaaaaaaaaaaaaaaaaaaaaaaaaaaaaaaaaaaaaaaaaaaaaaaaaaaaaaaaaaaaaaaaaaaaaaaaaaaaaaaaaaaaaaaaaaaaaaaaaa

SEQ ID NO: 30886 - RNA, 1809 nt, Artificial Sequence
  mRNA product Design b-4 (hSL-A100) comprising derived and/or modified sequence from LASV(LP;Clade I)__AAF86701__GPCmut6 (opt5)
aggagagucccgcagucggcguccagcggcucugcuuguucgugugugugucguugcaggccuuauucaagcuuaccaugggccagaucauuaccuucuuucaagaggugccccacgucaucgaagagguuaugaacauugugcugaucgcccucagccugcuugcuauucugaaggggcucuacaauaucgccacaugcggaaucauuggccugguggcguuccuuuuucugugugggaaauccugcucucucacgcugaagggaggcuaugaacugcagacccucgagcugaacauggaaacacuuaauauguguaugccucugagcugcaccaaaaacuccucucaucacuacaucagagucgggaaugagacaggacucgagcugacccuuacaaacaccagcauuaucaaucauaaguucuguaaccuguccgacgcucacaaaaagaaucucuaugaucaugcccugaugucuauuaucagcacguuucaccuguccauuccgaacuucaaucaguacgaagccaugagcugcgacuuuaacggcggcaagaucucugugcaguauaaucucucccacagcuacgcuggggaugccgcugagcauuguggaaccguugccaacggcgugcugcaaacauucaugcggauggcguggggagggcgcuauaucgcccuugacucuggcaaagggaauugggauugcauuaugaccuccuaccaguaccugaucauucagaacacaaccugggaagaccacugucaguuuagcagacccucuccuaucggauaucucggccugcuuucccaacggacgcgcgauauuuacaucagcagacggcugcucggcacauucaccuggacacuguccgacucugaggggaacgagacccccggaggcuauugccugacccgcuggaugcucaucgaagcugagcugaaguguuuugggaauacagccgucgcuaaaugcaacgaaaagcaugaugaggaguucugcgacaugcuuagacuguuugauuucuguaaacaggccauucggcgccucaaggcgccugcccagaugagcauccagcugauuaauaaggcugugaacgcccuuaucaaugaccaacugauuaugaaaaaccaccucagagauaucaugggaauccccuacugcaauuauuccaaguacugguaucugaaccacacgagcucuggccggaccucccugccuaaauguuggcucauuagcaaugggucuuaccugaacgaaacacaguucagcgacgacaucgagcagcaagcugauaauaugauuaccgaaaugcuucagaaggaguacaucgaacgccagggaaaaacaccgcugggccucguugacauuuuuaucuucuccaccucuuuuuaucugauuagcaucuuccugcaucuuaucaagauucccacgcacagacauaucgugggcaaaccuugccccaagccucaccggcucaaccauaugggggucuguuccugcggacuguacaagcaccccggcgugccgacaaaauggaagcgcugaggacuaguaauaaggaaacuguaugaaugucugugggcaggaagugaagagauccuucuguaaagguuuuuggaauuaugucugcugaauaauaaacuuuuuugaaauaauaaaucugguagaaaaaugagaucucaaaggcucuuuucagagccaccaaaaaaaaaaaaaaaaaaaaaaaaaaaaaaaaaaaaaaaaaaaaaaaaaaaaaaaaaaaaaaaaaaaaaaaaaaaaaaaaaaaaaaaaaaaaaaaaaaaaa

SEQ ID NO: 30887 - RNA, 1809 nt, Artificial Sequence
  mRNA product Design b-4 (hSL-A100) comprising derived and/or modified sequence from LASV(803213;Clade II)__AAF86703__GPCmut6 (opt5)
aggagagucccgcagucggcguccagcggcucugcuuguucgugugugugucguugcaggccuuauucaagcuuaccaugggccagaucauuaccuucuuucaagaggugccccacgucaucgaagagguuaugaacauugugcugaucgcccucagccugcuugcuauucugaaggggaucuacaauguggccacaugcggacucuucggccugaucuccuuucuucugcucugugggagaucuugcagcgucacguauaaaggaguguacgaacugcagacccuggagcucaacauggcgaaucugaacauguguaugccucuuuccugcacaaagaauaacucucaucacuauauuaugguuggcaaugaaaccgggcuggagcucacacugaccaacacaagcaucauuaaucauaaauucuguaaccuuuccgacgcucacaagaaaaaucuguacgaucaugcccucaugucuaucauuagcaccuuucaccuguccaucccgaacuucaaucaguaugaggccaugagcugcgacuuuaacggaggcaagauuucugugcaguacaaucugucccacagcuucgcugucgaugccgcuaaccauuguggcacgaucgccaacggggugcuccaaaccuuuaugcggauggcguggggaggcucuuauaucgcccuggacuccgggaagggaaauugggauugcauuaugacaagcuaccaguaccuuaucauucagaacaccacaugggaagaccacugucaguucucucgccccuccccuaucggcuaucuggggcuccugagccaaagaacccgggauauuuacaucucccgcagacuucugggaacguuuacauggacccucucugacagcgagggcaaugaagcucccggcggguauugccugacacgguggaugcugaucgaggccgagcucaaauguuucggaaacaccgcuguugccaagugcaaugaaaaacaugaugaggaauuuugcgacaugcugcgccuuuucgauuucuguaagcaggcgauuaaaagacugaagaccccugcccagauguccauccagcucauuaacaaggcugugaaugcccugaucaacgaccaacuuauuaugaaaaaucaucugcgggauaucaugggcauccccuacugcaacuauagccgcuacugguaucucaaucacacagucacggggaagaccucucugccuagauguuggcugguguccaacggaagcuaccucaaugagacacacuuuucugacgacauugaacagcaggcugauaacaugaucaccgagaugcugcaaaaagaguacauggaccggcagggcaagacaccgcuugggcugguggaucucuucgucuuuagcaccuccuucuaucugauuucuaucuuucugcaccuuguuaaaauucccacgcaucgccacaucgugggaaagccuugccccaaaccucauagacucaaucacaugggcauuuguagcugcggccuguacaagcaccccggggugccggucaaguggaaacggugaggacuaguaauaaggaaacuguaugaaugucugugggcaggaagugaagagauccuucuguaaagguuuuuggaauuaugucugcugaauaauaaacuuuuuugaaauaauaaaucugguagaaaaaugagaucucaaaggcucuuuucagagccaccaaaaaaaaaaaaaaaaaaaaaaaaaaaaaaaaaaaaaaaaaaaaaaaaaaaaaaaaaaaaaaaaaaaaaaaaaaaaaaaaaaaaaaaaaaaaaaaaaaaaa

SEQ ID NO: 30888 - RNA, 1809 nt, Artificial Sequence
  mRNA product Design b-4 (hSL-A100) comprising derived and/or modified sequence from LASV(GA391;Clade III)__CAA36645__GPCmut6 (opt5)
aggagagucccgcagucggcguccagcggcucugcuuguucgugugugugucguugcaggccuuauucaagcuuaccaugggccagaucgugaccuucuuucaagaggucccccacguuauugaagaggugaugaacaucgugcugauugcccucagcauccuggcuauucuuaaggggcuguacaaugucgccacaugcggacucaucggccuggugacguuccuucugcucuccgggagaucuuguagccugaucuauaaaggaaccuacgaacugcagacacucgagcugaacauggaaacccuuaauaugugcaugccucuguccuguacaaagaacaauucucaucacuauauucggguuggcaacgagaccgggcucgagcugacacuuaccaauacgagcauccugaaccauaaauuuugcaaucucuccgacgcgcacaagcgcaaccuguacgaucauucucugaugagcauuaucuccaccuuccaccucagcauuccgaauuuuaaccaguaugaagcuaugucuugugacuucaauggaggcaaaaucacagugcaguacaaccugucccacagcuuugccgucgaugccgcuggccauugcgggacccuugccaauggagugcugcaaacauucaugagaauggcuuggggcgggucuuauauugcccucgacuccggacggggcaacugggauuguaucaugaccagcuaccaguaccugaucauucagaacacgacaugggacgaucacugccaguuuucucgccccuccccuaucggguaucuuggacugcucagccaaagaacccgggacauuuacaucucccgcagacugcugggcacauucaccuggacccucucugauagcgagggcaaugaaacacccgggggauauugucugacgcgguggaugcuuauugaggcggagcugaagugcuuuggcaacaccgccguugcuaaguguaaugaaaaacaugacgaggaguucugcgauaugcuccgccuguuugacuucugcaagcaggccaucagacggcuuaaaaccccugcucagauguccauccagcugauuaacaaggccgugaaugcgcucaucaacgaucaacugauuaugaaaaaucaucugcgcgacaucauggggauucccuacuguaacuauagcagauacugguaucucaaucacacaucuacaggaaagaccucccugccucggugcuggcuuaucagcaacggcucuuaccugaaugaaacgaaguucagcgacgauaucgaacagcaggccgacaacaugauuacagagaugcuccaaaaagaguacaucgaucgccaggggaagaccccgcugggacuggucgaccuuuuuguguucuccaccucuuuuuaucucauuagcaucuuccugcaccuggugaaaauucccacacacagacauaucgucggcaagccuugucccaaaccucaccggcucaaucauaugggcauuugcuccugugggcuguacaagcagcccggaguuccggugagauggaaacgcugaggacuaguaauaaggaaacuguaugaaugucugugggcaggaagugaagagauccuucuguaaagguuuuuggaauuaugucugcugaauaauaaacuuuuuugaaauaauaaaucugguagaaaaaugagaucucaaaggcucuuuucagagccaccaaaaaaaaaaaaaaaaaaaaaaaaaaaaaaaaaaaaaaaaaaaaaaaaaaaaaaaaaaaaaaaaaaaaaaaaaaaaaaaaaaaaaaaaaaaaaaaaaaaaa

SEQ ID NO: 30889 - RNA, 1812 nt, Artificial Sequence
  mRNA product Design b-4 (hSL-A100) comprising derived and/or modified sequence from LASV(AV;Clade V)__CCA30314__GPCmut6 (opt5)
aggagagucccgcagucggcguccagcggcucugcuuguucgugugugugucguugcaggccuuauucaagcuuaccaugggccagaucgugaccuucuuucaagaggucccccacguuauugaagaggugaugaacaucgugcugauugcccucagcauccuggcuguccuuaaggggcuguacaauauugccacaugcggacucaucggccugaucacguuccuucugcucugugggagauccugcucuagcaaccuguauaaaggaguguacgaacugcagucccucgaccugaauauggagacccuuaacauguguaugccucugucuugcacaaagaauaacagccaucacuauauucggguuggcaaugauaccgggcucgaacugacacuuaccaacacauccauccugaaucauaaauuuuguaaccucucugacgcgcacaagaaagaucuguacgaccaugcucugaugagcauuaucuccaccuuccaccucagcauuccgaauuuuaaccaguaugaggccaugucuugcgauuucaauggaggcaagaucuccgugcaguacaaccugagccacucuuaugccauugacgcugccaaucauuguggcacggucgcuaacgggauccuucaaaccuuuaugcgcauggccuggggaggcuccuacaucgcgcuggauagcgggagaggaaacugggacugcauuaugacaucuuaccaguaucucaucauucagaauaccacaugggagaaccacugucaguucucccggcccagcccuaucggcuaccuggggcuucugucccaacgcaccagagauauuuauaucucucggcgccuccugggaacguuuacauggacccugagcgacuccgaaggcaaugccacacccggcggguacugccucaccagauggaugcugaucgaggcugaacuuaaguguuucggaaacaccgccguggcuaaaugcaaugagaagcaugaugaggaauuuugcgacaugcugcgccucuucgauuuuuguaaacaggccauuagccggcugaagucuccugcgcagauguccauccagcuuauuaacaaagccguuaaugcucugaucaacgaccaacucauuaugaagaaucaccugagagacaucaugggcauccccuauugcaacuacagcaaguauugguaccugaaucacacaauuacggggaaaaccucucucccuaaguguuggcuggugagcaacggauccuaccuuaaugagacacauuucucugaugacaucgaacagcaggccgauaacaugauuaccgagaugcugcaaaaagaauauauggagcggcagggcaagacaccgcucgggcuggucgaccuguucguguuuagcaccuccuucuaccuuaucagcauuuuucuccgccuggugaaaauccccacgcacagacauauugucggaaagccuugccccaaaccucaccggcugaaucauaugggcaucuguucuugcggccucuauaagcagcccgggguuccggugcgcuggaagagaugaggacuaguaauaaggaaacuguaugaaugucugugggcaggaagugaagagauccuucuguaaagguuuuuggaauuaugucugcugaauaauaaacuuuuuugaaauaauaaaucugguagaaaaaugagaucucaaaggcucuuuucagagccaccaaaaaaaaaaaaaaaaaaaaaaaaaaaaaaaaaaaaaaaaaaaaaaaaaaaaaaaaaaaaaaaaaaaaaaaaaaaaaaaaaaaaaaaaaaaaaaaaaaaaa

SEQ ID NO: 30890 - RNA, 1809 nt, Artificial Sequence
  mRNA product Design b-4 (hSL-A100) comprising derived and/or modified sequence from LASV(Togo/2016/7082;Clade VI)__AMR44577__GPCmut6 (opt5)
aggagagucccgcagucggcguccagcggcucugcuuguucgugugugugucguugcaggccuuauucaagcuuaccaugggccagaucauuaccuucuuucaagaggugccccacgucaucgaagagguuaugaacauugugcugaucgcccucagccugcuugcuauucugaaggggguguacaaugucgccacaugcggaaucaucggccucgugacguuccuguuucuuugugggagauccugcucucugauuuauaaaggaagcuacgaacuccagacccuggagcugaacauggaaacacucaauauguguaugccucuguccugcaccaagaacucuagccaucacuauauccggguuggcaaugagacagggcuugagcugacccucacaaacaccuccauuaucaaucauaaauucuguaaccugucugacgcgcacaagcgcaaucuuuacgaucaugcucugaugagcauucucuccacguuucaccugagcaucccgaacuucaaucaguaugaagccaugucuugcgacuuuaacggaggcaaaauuuccgugcaguacaaucugagccacgccuaugcugucgaugccgcugagcauuguggcaccguggccaacgggguucuccaaacauucaugagaauggcguggggaggcucuuacaucgcccuggacuccgggcggggaaauugggauugcaucaugaccagcuaccaguaucuuauuauccagaacacaaccugggaagaccacugucaguuuucucgccccuccccuauuggcuaccuggggcuccugagccaaagaacgcgggauaucuauauuucccgcagacuucugggaacauucaccuggacacucucugacagcgagggcaacgagacccccggcggguacugccugacccgguggaugcugaucgaagcugagcucaaguguuuuggaaauacagccguggcuaagugcaacgaaaaacaugaugaggaguucugcgacaugcugcgccuuuuugauuucuguaagcaggccauccagagacugaaauccccugcgcagaugagcauucaacucaucaauaaggccgucaacgcucugauuaaugaccagcuuaucaugaaaaaccaucugcgggauaugaugggcauucccuauugcaauuacucuaaguauugguaccucaaccacacguccagcgggcgcaccucucugccuaaguguuggcuggugagcaauggauccuaccucaacgaaacacacuucucugacgacaucgagcagcaagccgauaauaugaucaccgaaaugcugcagaaagaguauauugacagacagggcaagacaccgcuugggcugguggaucucuuugucuucagcaccuccuuuuaccugaucagcauuuuccugcaccuuaucaaaauucccacgcaucggcacaucguuggaaagccuugccccaaaccucaucgccucaaccacaugggcauuuguucuugcggccuguauaagcagcccggggugccgacaagauggaaacggugaggacuaguaauaaggaaacuguaugaaugucugugggcaggaagugaagagauccuucuguaaagguuuuuggaauuaugucugcugaauaauaaacuuuuuugaaauaauaaaucugguagaaaaaugagaucucaaaggcucuuuucagagccaccaaaaaaaaaaaaaaaaaaaaaaaaaaaaaaaaaaaaaaaaaaaaaaaaaaaaaaaaaaaaaaaaaaaaaaaaaaaaaaaaaaaaaaaaaaaaaaaaaaaaa

SEQ ID NO: 30891 - RNA, 1809 nt, Artificial Sequence
  mRNA product Design b-4 (hSL-A100) comprising derived and/or modified sequence from LASV(KAK-428;Clade n.d. (VII))__ANH09740__GPCmut6 (opt5)
aggagagucccgcagucggcguccagcggcucugcuuguucgugugugugucguugcaggccuuauucaagcuuaccaugggccagaucgugaccuucuuucaagaggucccccacguuauugaagaggugaugaacaucgugcugauugcccucagccugcuugcuauccugaaggggcucuacaauuucgccacaugcggagucauuggccugaucacguuucuucugcucugugggagauccugcucugcgaccuauaaaggacaguacgaacugcagacacuggagcucaacauggaaagccugaauauguguaugccucuuuccugcaccaagaacaauucucaucacuauauccgggcuggcaacaauacagggcuggagcucacccugacaaacaccagcauuaucucccauaaauucuguaaucuuucugacgcccacaagaaaaaccuguacgaucauacgcucaugagcauuaucaccacauuucaccuguccauuccgaauuucaaccaguaugaggccaugagcugcgacuuuaauggaggcaagaucucuauucaauacaaccugucccacagcuaugcuggcgaugccgcucagcauugugggaccguggccaauggaguucuccagacauucaugcgcauggcguggggcgggucuuaccuggcccuugacuccggaagacggggcugggauugcaucaucagcucuuaccaguaucugauuauccaaaacaccacgugggacgaucacugucaguuuucccgccccagcccuauuggguaccucggauucgugucccagaagacaagagacaucuauauuucucggcgccugcuuggcaccuuuacauggacccugagcgauuccgaaggccaugacaugcccgggggauacugccucaccagauggaugcugaucgaggcugaucugaaauguuucggcaacacagccgucgcuaagugcaaugaaaaacacgacgaggaguuuugcgauauguggcgccucuucgacuucuguaagcaggccauccaacggcugaaagcgccugcccagaugaacauucagcuuaucaauaaggcugugaacgcccugauuaaugaccaacucaugaugaagaaccaccugagagauaucauggggauucccuauugcaauuacagcaaauuuugguaucuuaacaauacgaccacaggacggaccucucugccucgcuguuggcucaucuccaacggcagcuaccugaaugaaacacauuucucugacgauaucgagcagcaggcugacaacaugauuaccgaaaugcugcagaaggaguacauggauagacaagggaaaacgccgcucggacugguugaccuuuuuguguucagcacauccuuuuaucugaucaccauuuuccuccaccuggucaagauccccacccaucggcacauugugggcaaaccuugccccaagccucaucgccugaaucacaugggcaucuguucuugcgggcuuuacaaacagcccggagugccggucagauggaagcggugaggacuaguaauaaggaaacuguaugaaugucugugggcaggaagugaagagauccuucuguaaagguuuuuggaauuaugucugcugaauaauaaacuuuuuugaaauaauaaaucugguagaaaaaugagaucucaaaggcucuuuucagagccaccaaaaaaaaaaaaaaaaaaaaaaaaaaaaaaaaaaaaaaaaaaaaaaaaaaaaaaaaaaaaaaaaaaaaaaaaaaaaaaaaaaaaaaaaaaaaaaaaaaaaa

SEQ ID NO: 30892 - RNA, 1809 nt, Artificial Sequence; identical to SEQ ID NO: 30886
  mRNA product Design b-4 (hSL-A100) comprising derived and/or modified sequence from LASV(Pinneo-NIG-1969;Clade I)__AIT17836__GPCmut6 (opt5)

SEQ ID NO: 30893 - RNA, 1809 nt, Artificial Sequence
  mRNA product Design b-4 (hSL-A100) comprising derived and/or modified sequence from LASV(ISTH0009-NIG-2011;Clade II)__AIT17404__GPCmut6 (opt5)
aggagagucccgcagucggcguccagcggcucugcuuguucgugugugugucguugcaggccuuauucaagcuuaccaugggccagaucauuaccuucuuucaagaggugccccacgucaucgaagagguuaugaacauugugcugaucgcccucagccugcuugcuauucugaaggggaucuacaauguggccacaugcggacucuucggccuggucuccuuucuucugcucugugggagaucuugcagcacgaccuauaaaggaguguacgaacugcagacacuggagcucgacauggcgucccugaacauguguaugccucuuucuugcaccaagaauaacagccaucacuauaucaugguuggcaaugaaacagggcuggagcucacccugacaaacaccuccauuaucaaucauaaauucuguaaccuuucugaugcucacaagaaaaaucuguacgaccaugcccucaugagcauuaucuccacguuucaccugagcauuccgaacuucaaucaguaugaggccaugucuugcgauuuuaacggaggcaagaucuccgugcaguacaaucugagccacgcuuaugccgucgacgcugccaaccauuguggcaccauugcgaauggggugcuccaaacauucaugcggauggccuggggaggcucuuacaucgcucuggauuccgggaagggaagcugggacugcaucaugaccucuuaccaguaucuuauuauccagaacacaaccugggaagaucacugucaguuuucccgccccagcccuauuggcuaccuggggcuccugucccaaagaacgcgggacaucuauauuucucgcagacuucugggaacauucaccuggacacucagcgauuccgagggcaacgaaacccccggcggguacugccugacccgguggaugcugaucgaggccgagcucaaauguuuuggaaauacagcuguugccaagugcaacgaaaaacaugacgaggaguucugcgauaugcugcgccuuuuugacuucuguaagcaggcgaucagacggcugaaaacgccugcccagaugagcauucagcucaucaauaaggcugugaacgcccugauuaaugaucaacuuaucaugaagaaccaucugcgcgacauuaugggcauccccuauugcaauuacucuaaauauugguaccucaaccacaccgucacagggaagaccucccugccuagauguuggcuggugagcaauggaucuuaccucaacgaaacacacuucagcgacgauaucgaacagcaggcugacaauaugauuaccgagcugcuucaaaaagaguauauggaucggcagggcaagacgccgcuggggcucguggaccuguuugucuucuccacaucuuuuuaccugaucagcauuuuccuucaccucaucaaaauucccacccaucgccacaucaccggaaagccuugccccaaaccucauagacugaaccacaugggcauuuguuccugcggccuguauaagcaccccgggguuccggugaaguggaaacggugaggacuaguaauaaggaaacuguaugaaugucugugggcaggaagugaagagauccuucuguaaagguuuuuggaauuaugucugcugaauaauaaacuuuuuugaaauaauaaaucugguagaaaaaugagaucucaaaggcucuuuucagagccaccaaaaaaaaaaaaaaaaaaaaaaaaaaaaaaaaaaaaaaaaaaaaaaaaaaaaaaaaaaaaaaaaaaaaaaaaaaaaaaaaaaaaaaaaaaaaaaaaaaaaa

SEQ ID NO: 30894 - RNA, 1809 nt, Artificial Sequence
  mRNA product Design b-4 (hSL-A100) comprising derived and/or modified sequence from LASV(ISTH2010-NIG-2012;Clade II)__AIT17482__GPCmut6 (opt5)
aggagagucccgcagucggcguccagcggcucugcuuguucgugugugugucguugcaggccuuauucaagcuuaccaugggccagaucauuaccuucuuucaagaggugccccacgucaucgaagagguuaugaacauugugcugaucgcccucagccugcuugcuauucugaaggggaucuacaauguggccacaugcggacucuucggccuggucuccuuucuucugcucugugggagaucuugcagcacgaccuauaaaggaguguacgaacugcagacacuggagcucgacauggcgucccugaacauguguaugccucuuucuugcaccaagaauaacagccaucacuauaucaugguuggcaaugaaacagggcuggagcucacccugacaaacaccuccauuaucaaucauaaauucuguaaccuuucugaugcucacaagaaaaaucuguacgaccaugcccucaugagcauuaucuccacguuucaccugagcauuccgaacuucaaucaguaugaggccaugucuugcgauuuuaacggaggcaagaucuccgugcaguacaaucugagccacgcuuaugccgucgacgcugccaaccauuguggcaccauugcgaauggggugcuccaaacauucaugcggauggccuggggaggcucuuacaucgcucuggauuccgggaagggaagcugggacugcaucaugaccucuuaccaguaucuuauuauccagaacauuacaugggaagaucacugucaguuuucccgccccagcccuaucggcuaccuggggcuccugucccaaagaacccgggacauuuauaucucucgcagacuucugggaacguucacauggacccucagcgauuccgagggcaacgaaacacccggcggguacugccugacccgguggaugcugaucgaggccgagcucaaauguuuuggaaauaccgcuguugccaagugcaacgaaaaacaugacgaggaguucugcgauaugcugcgccuuuuugacuucuguaagcaggcgauuagacggcugaaaacgccugcccagaugagcauccagcucauuaauaaggcugugaacgcccugaucaaugaucaacuuauuaugaagaaccaucugcgcgacaucaugggcauccccuauugcaauuacucuaaauauugguaccucaaccacacagucaccgggaagacaucccugccuagauguuggcuggugagcaauggaucuuaccucaacgaaacccacuucagcgacgauauugaacagcaggcugacaauaugaucacagagcugcuucaaaaagaguauauugaucggcagggcaagaccccgcuggggcucguggaccuguuugucuucuccacgucuuuuuaccugaucagcauuuuccuucaccucguuaaaauccccacacaucgccacguggugggaaagccuugccccaaaccucauagacugaaccacaugggcauuuguuccugcggccuguauaagcaccccggggucccggugaaguggaaacggugaggacuaguaauaaggaaacuguaugaaugucugugggcaggaagugaagagauccuucuguaaagguuuuuggaauuaugucugcugaauaauaaacuuuuuugaaauaauaaaucugguagaaaaaugagaucucaaaggcucuuuucagagccaccaaaaaaaaaaaaaaaaaaaaaaaaaaaaaaaaaaaaaaaaaaaaaaaaaaaaaaaaaaaaaaaaaaaaaaaaaaaaaaaaaaaaaaaaaaaaaaaaaaaaa

SEQ ID NO: 30895 - RNA, 1809 nt, Artificial Sequence
  mRNA product Design b-4 (hSL-A100) comprising derived and/or modified sequence from LASV(Lassa virus/H.sapiens-wt/NGA/2015/ISTH_0543;Clade II)__AVO03639__GPCmut6 (opt5)
aggagagucccgcagucggcguccagcggcucugcuuguucgugugugugucguugcaggccuuauucaagcuuaccaugggccagaucauuaccuucuuucaagaggugccccacgucaucgaagagguuaugaacauugugcugaucgcccucagccugcuugcuauucugaaggggaucuacaauguggccacaugcggacucuucggccuggucuccuuucuucugcucugugggagaucuugcagcacgaccuauaaaggaguguacgaacugcagacacuggagcucgacauggcgaaccugaauauguguaugccucuuuccugcaccaagaacaauucucaucacuauaucaugguuggcaacgaaacagggcuggagcucacccugacaaauaccagcauuaucaaccauaaauucuguaaucuuuccgaugcucacaagaaaaaccuguacgaccaugcccucaugucuauuaucagcacguuucaccuguccauuccgaauuucaaccaguaugaggccaugagcugcgauuuuaauggaggcaagaucucugugcaguacaaccugucccacaccuaugcugucgacgccgcuaaucauuguggcacaauugccaacggggugcuccaaaccuucaugcggauggcguggggaggcagcuacaucgcccuggauucugggaagggauccugggacugcaucaugacaagcuaccaguaucuuguuauucagaacaccacgugggaagaucacugucaguuuucucgccccuccccuaucggcuaccuggggcuccugagccaaagaacacgggacauuuauaucucccgcagacuucugggaaccuucacauggacccucucugauagcgagggcaaugaaacccccggcggguacugccugacacgguggaugcugauugaggcugagcucaaauguuuuggaaacacggccguggcuaagugcaaugaaaaacaugacgaggaguucugcgauaugcugcgccuuuuugacuucuguaagcaggccaucagacggcugaaaaccccugcgcagauguccauccagcucauuaacaaggccgucaaugcucugaucaacgaucaacuuauuaugaagaaucaucugcgcgacaucaugggcauucccuauugcaacuacagcaaauauugguaccucaaucacacagugaccgggaagacaucucugccuagauguuggcugguguccaacggaagcuaccucaaugaaacccacuucucugacgauaucgaacagcaggccgacaacaugaucacggagcugcuucaaaaagaguauauugaucggcagggcaagacaccgcuggggcucgucgaccuguuuguuuucagcaccuccuuuuaccugaucucuauuuuccuucaccucgugaaaauccccacccaucgccacauuacaggaaagccuugccccaaaccucauagacugaaucacaugggcaucuguagcugcggccuguauaagcaccccggggugccggucaaguggaaacggugaggacuaguaauaaggaaacuguaugaaugucugugggcaggaagugaagagauccuucuguaaagguuuuuggaauuaugucugcugaauaauaaacuuuuuugaaauaauaaaucugguagaaaaaugagaucucaaaggcucuuuucagagccaccaaaaaaaaaaaaaaaaaaaaaaaaaaaaaaaaaaaaaaaaaaaaaaaaaaaaaaaaaaaaaaaaaaaaaaaaaaaaaaaaaaaaaaaaaaaaaaaaaaaaa

SEQ ID NO: 30896 - RNA, 1809 nt, Artificial Sequence
  mRNA product Design b-4 (hSL-A100) comprising derived and/or modified sequence from LASV(Lassa virus/H.sapiens-wt/NGA/2016/ISTH_0009;Clade II)__AVO03571__GPCmut6 (opt5)
aggagagucccgcagucggcguccagcggcucugcuuguucgugugugugucguugcaggccuuauucaagcuuaccaugggccagaucauuaccuucuuucaagaggugccccacgucaucgaagagguuaugaacauugugcugaucgcccucagccugcuugcuauucugaaggggaucuacaauguggccacaugcggacuccugggccuugucuccuuccugcuccugugugggagaucuugcagcacgaccuauaaaggaguguacgaacugcagacacucgagcuggacauggcgucccuuaacauguguaugccucugucuugcaccaagaauaacagccaucacuauaucaugguuggcaaugaaacagggcucgagcugacccuuacaaacaccuccauuaucaaucauaaauuuuguaaccugucugaugcucacaagaaaaaucucuacgaccaugcccugaugagcauuaucuccacguuccaccugagcauuccgaacuuuaaucaguaugaggccaugucuugcgauuucaacggaggccggaucuccgugcaguacaaucucagccacucuuaugcugucgacgccgcuaaccauuguggcaccauugccaauggggugcugcaaacauuuaugcgcauggcguggggaggcuccuacaucgcccuugauagcgggaagggaucuugggacugcaucaugaccuccuaccaguaucugauuauccagaacacaaccugggaagaucacugucaguucagcagacccuccccuauuggcuaccucgggcugcuuucucaacggacgcgcgacaucuauauuagcagacggcugcucggaacauuuaccuggacacuguccgauagcgagggcaacgaaacccccggcggguacugccugacccgcuggaugcucaucgaggcugagcugaaguguuucggaaauacagccguugcuaaaugcaacgaaaagcaugacgaggaauuuugcgauaugcuuagacuguucgacuuuuguaaacaggccauccggcgccucaagacgccugcgcagaugucuauucagcugaucaauaaagccgugaacgcucuuauuaaugaucaacugaucaugaagaaccaccucagagacauuaugggcauccccuauugcaauuacuccaaguauugguaccugaaccacaccgucacagggaaaaccagccugccucgguguuggcucgugucuaauggaagcuaccugaacgagacacauuucuccgacgauaucgaacagcaggccgacaauaugauuaccgagcuucugcaaaaggaguauaucgaucgccagggcaaaacgccgcucgggcugguggaccuguucgucuuuucuaccagcuucuaccuuauuuccaucuuucuccaccugguuaagauucccacacauagacacaucaccggaaaaccuugccccaagccucaucggcugaaccacaugggcauuuguagcugcggccucuauaaucaccccggggugccggugaaauggaagcgcugaggacuaguaauaaggaaacuguaugaaugucugugggcaggaagugaagagauccuucuguaaagguuuuuggaauuaugucugcugaauaauaaacuuuuuugaaauaauaaaucugguagaaaaaugagaucucaaaggcucuuuucagagccaccaaaaaaaaaaaaaaaaaaaaaaaaaaaaaaaaaaaaaaaaaaaaaaaaaaaaaaaaaaaaaaaaaaaaaaaaaaaaaaaaaaaaaaaaaaaaaaaaaaaaa

SEQ ID NO: 30897 - RNA, 1809 nt, Artificial Sequence
  mRNA product Design b-4 (hSL-A100) comprising derived and/or modified sequence from LASV(Lassa virus/H.sapiens-wt/NGA/2016/ISTH_0017;Clade II)__AVO03567__GPCmut6 (opt5)
aggagagucccgcagucggcguccagcggcucugcuuguucgugugugugucguugcaggccuuauucaagcuuaccaugggccagaucauuaccuucuuucaagaggugccccacgucaucgaagagguuaugaacauugugcugaucgcccucagccugcuugcuauucugaaggggaucuacaauguggccacaugcggacucuucggccuggucuccuuucuucugcucugugggagaucuugcagcacgaccuauaaaggaguguacgaacugcagacacuggagcucgacauggcgucccugaacauguguaugccucuuucuugcaccaagaauaacagccaucacuauaucaugguuggcaaugaaacagggcuggagcucacccugacaaacaccuccauuaucaaucauaaauucuguaaccuuucugaugcucacaagaaaaaucuguacgaccaugcccucaugagcauuaucuccacguuucaccugagcauuccgaacuucaaucaguaugaggccaugucuugcgauuuuaacggaggcaagaucuccgugcaguacaaucugagccacaccuaugcuauugacgccgcuaaccauuguggcacaaucgccaaugggguccuccaaaccuucaugcggauggcguggggaggcucuuacaucgcccuggauuccgggaagggaagcugggacugcauuaugacaucuuaccaguaucuuaucauucagaacaccacgugggaagaucacugucaguuuucccgccccagcccuaucggcuaccuggggcuccugucccaaagaacacgggacauuuauaucucucgcagacuucugggaaccuucacauggacccucagcgauuccgagggcaacgaaacccccggcggguacugccugacacgguggaugcugaucgaggcugagcucaaauguuuuggaaauacggccguggcuaagugcaacgaaaaacaugacgaggaguucugcgauaugcugcgccuuuuugacuucuguaagcaggccauuagacggcugaaaaccccugcgcagaugagcauccagcucauuaauaaggccguuaacgcucugaucaaugaucaacuuauuaugaagaaccaucugcgcgacaucaugggcauccccuauugcaauuacucuaaauauugguaccucaaccacacagugaccgggaagacaucccugccuagauguuggcuggucagcaauggaucuuaccucaacgaaacccacuucagcgacgauauugaacagcaggccgacaauaugaucacggagcugcuucaaaaagaguauauggaucggcagggcaagacaccgcuggggcucguggaccuguuuguguucuccaccucuuuuuaccugauuagcaucuuccuucaccucguccgcauucccacccauagacacguuaucggaaaaccuugccccaagccucaucggcugaaccacaugggcauuuguuccugcggccuguauaaacaccccggggugccggugaaguggaagcgcugaggacuaguaauaaggaaacuguaugaaugucugugggcaggaagugaagagauccuucuguaaagguuuuuggaauuaugucugcugaauaauaaacuuuuuugaaauaauaaaucugguagaaaaaugagaucucaaaggcucuuuucagagccaccaaaaaaaaaaaaaaaaaaaaaaaaaaaaaaaaaaaaaaaaaaaaaaaaaaaaaaaaaaaaaaaaaaaaaaaaaaaaaaaaaaaaaaaaaaaaaaaaaaaaa

SEQ ID NO: 30898 - RNA, 1809 nt, Artificial Sequence
  mRNA product Design b-4 (hSL-A100) comprising derived and/or modified sequence from LASV(Lassa virus/H.sapiens-wt/NGA/2018/ISTH_0959;Clade II)__AVV65099__GPCmut6 (opt5)
aggagagucccgcagucggcguccagcggcucugcuuguucgugugugugucguugcaggccuuauucaagcuuaccaugggccagaucauuaccuucuuucaagaggugccccacgucaucgaagagguuaugaacauugugcugaucgcccucagccugcuugcuauucugaaggggaucuacaauguggucacaugcggacucuucggccugguguccuuucuucugcucugugggagaucuugcagcacgaccuauaaaggaguuuacgaacugcagacacuggagcucgacauggccucccugaacauguguaugccucuuucuugcaccaagaauaacagccaucacuauaucauggugggcaaugaaacagggcuggagcucacccugacaaacaccuccauuaucaaucauaaauucuguaaccuuucugaugcgcacaagaaaaaucuguacgaccaugcucucaugagcauuaucuccacguuucaccugagcauuccgaacuucaaucaguaugaggccaugucuugcgauuuuaacggaggcaagaucuccguccaguacaaucugagccacgccuaugcuauugacgccgcuaaccauuguggcaccaucgccaauggggugcuccaaacauucaugcggauggcguggggaggcucuuacaucgcccuggauuccgggaagggaagcugggacugcauuaugaccucuuaccaguaucuuaucauucagaacacaaccugggaagaucacugucaguuuucccgccccagcccuaucggcuaccuggggcuccugucccaaagaacgcgggacauuuauaucucucgcagacuucugggaacauucaccuggacacucagcgauuccgagggcaacgaaacccccggcggguacugccugacccgguggaugcugaucgaggcugagcucaaauguuuuggaaauacagccguugcuaagugcaacgaaaaacaugacgaggaguucugcgauaugcugcgccuuuuugacuucuguaagcaggccauuagacggcugaaaacgccugcgcagaugagcauccagcucauuaauaaggccgugaacgcucugaucaaugaucaacuuauuaugaagaaccaucugcgcgacaucaugggcauccccuauugcaauuacucuaaauauugguaccucaaccacaccgucacagggaagaccucccugccuagauguuggcuggugagcaauggaucuuaccucaacgaaacacacuucagcgacgauauugaacagcaggccgacaauaugaucaccgagcugcuucaaaaagaguauauugaucggcagggcaagacgccgcuggggcucguggaccuguuugucuucuccacaucuuuuuaccugaucagcauuuuccuucaccucguuaaaauccccacccaucgccacgugauuggaaagccuugccccaaaccucauagacugaaccacaugggcaucuguuccugcggccuguauaagcaccccggggugccggucaaguggaaacggugaggacuaguaauaaggaaacuguaugaaugucugugggcaggaagugaagagauccuucuguaaagguuuuuggaauuaugucugcugaauaauaaacuuuuuugaaauaauaaaucugguagaaaaaugagaucucaaaggcucuuuucagagccaccaaaaaaaaaaaaaaaaaaaaaaaaaaaaaaaaaaaaaaaaaaaaaaaaaaaaaaaaaaaaaaaaaaaaaaaaaaaaaaaaaaaaaaaaaaaaaaaaaaaaa

SEQ ID NO: 30899 - RNA, 1809 nt, Artificial Sequence
  mRNA product Design b-4 (hSL-A100) comprising derived and/or modified sequence from LASV(LASV003-NIG-2008;Clade II)__AIT17580__GPCmut6 (opt5)
aggagagucccgcagucggcguccagcggcucugcuuguucgugugugugucguugcaggccuuauucaagcuuaccaugggccagaucauuaccuucuuucaagaggugccccacgucaucgaagagguuaugaacauugugcugaucgcccucagccugcuugcuauucugaaggggaucuacaauguggccacaugcggacucuucggccuggucuccuuucuucugcucugugggagaucuugcagcacgaccuauaaaggaguguacgaacugcagacacuggagcucgacauggcgucccugaacauguguaugccucuuucuugcaccaagaauaacagccaucacuauaucaugguuggcaaugaaacagggcuggagcucacccugacaaacaccuccauuaucaaucauaaauucuguaaccuuucugaugcucacaagaaaaaucuguacgaccaugcccucaugagcauuaucuccacguuucaccugagcauuccgaacuucaaucaguaugaggccaugucuugcgauuuuaacggaggcaagaucuccgugcaguacaaucugagccacaccuaugcugucgacgccgcuaaccauuguggcacaauugccaauggggugcuccaaaccuucaugcggauggcguggggaggcucuuacaucgcccuggauuccgggaagggaagcugggacugcaucaugacaucuuaccaguaucuuauuauccagaacaccacgugggaagaucacugucaguuuucccgccccagcccuauuggcuaccuggggcuccugucccaaagaacacgggacaucuauauuucucgcagacuucugggaaccuucacauggacccucagcgauuccgagagcaacgaaacccccggcggcuacugccugacacgguggaugcugaucgaggcugagcucaaauguuuugggaauacggccguugcuaagugcaacgaaaaacaugacgaggaguucugcgauaugcugcgccuuuuugacuucuguaagcaggccaucagacggcugaaagcgccugcccagaugucuauucagcucaucaauaaggcugugaacgcccugauuaaugaucaacuuaucaugaagaaccaucugcgcgacauuaugggaauccccuauugcaauuacuccaaauauugguaccucaaccacaccgucacaggcagaaccagccugccucgguguuggcuggugucuaaugggagcuaccucaacgaaacacacuucuccgacgauaucgaacagcaggcugacaauaugauuaccgagcugcuucaaaaggaguauauggaucgccagggaaaaacgccgcugggccucguggaccuguuugucuucucuaccagcuuuuaccugaucuccauuuuccuucaccucguuaagauccccacacauagacacgugauugggaaaccuugccccaagccucaucggcugaaccacaugggaaucuguagcugcggccuguauaaacaccccggcgugccggucaaguggaagcgcugaggacuaguaauaaggaaacuguaugaaugucugugggcaggaagugaagagauccuucuguaaagguuuuuggaauuaugucugcugaauaauaaacuuuuuugaaauaauaaaucugguagaaaaaugagaucucaaaggcucuuuucagagccaccaaaaaaaaaaaaaaaaaaaaaaaaaaaaaaaaaaaaaaaaaaaaaaaaaaaaaaaaaaaaaaaaaaaaaaaaaaaaaaaaaaaaaaaaaaaaaaaaaaaaa

SEQ ID NO: 30900 - RNA, 1809 nt, Artificial Sequence
  mRNA product Design b-4 (hSL-A100) comprising derived and/or modified sequence from LASV(LASV035-NIG-2009;Clade II)__AIT17588__GPCmut6 (opt5)
aggagagucccgcagucggcguccagcggcucugcuuguucgugugugugucguugcaggccuuauucaagcuuaccaugggccagaucauuaccuucuuucaagaggugccccacgucaucgaagagguuaugaacauugugcugaucgcccucagccugcuugcuauucugaaggggaucuacaauguggccacaugcggacucuucggccuggucuccuuucuucugcucugugggagaucuugcagcacgaccuauaaaggaguguacgaacugcagacacuggagcucgacauggcgucccugaacauguguaugccucuuucuugcaccaagaauaacagccaucacuauaucaugguuggcaaugaaacagggcuggagcucacccugacaaacaccuccauuaucaaucauaaauucuguaaccuuucugaugcucacaagaaaaaucuguacgaccaugcccucaugagcauuaucuccacguuucaccugagcauuccgaacuucaaucaguaugaggccaugucuugcgauuuuaacggaggcaagaucuccgugcaguacaaucugagccacgcuuaugccgucgacgcugccaaccauuguggcaccauugcgaauggggugcuccaaacauucaugcggauggccuggggaggcucuuacaucgcucuggauuccgggaagggaagcugggacugcaucaugaccucuuaccaguaucuuauuauccagaacacaaccugggaagaucacugucaguuuucccgccccagcccuauuggcuaccuggggcuccugucccaaagaacgcgggacaucuauauuucucgcagacuucugggaacauucaccuggacacucagcgauuccgagggcaacgaaacccccggcggguacugccugacccgguggaugcugaucgaggccgagcucaaauguuuuggaaauacagcuguugccaagugcaacgaaaaacaugacgaggaguucugcgauaugcugcgccuuuuugacuucuguaagcaggcgaucagacggcugaaagccccugcucagaugagcauucagcucaucaauaaggccgugaacgcucugauuaaugaucaacuuaucaugaagaaccaucugcgcgacauuaugggcauccccuauugcaauuacucuaaauauugguaccucaaccacacggucaccgggaagacaucccugccuagauguuggcuggugagcaauggaucuuaccucaacgaaacccacuucagcgacgauaucgaacagcaggccgacaauaugauuacagagcugcuucaaaaagaguauaucgaucggcagggcaagaccccgcuggggcucguggaccuguuugucuucuccacgucuuuuuaccugauuagcaucuuccuucaccucguuaaaauucccacacaucgccacgugaucggaaagccuugccccaaaccucauagacugaaccacaugggcauuuguuccugcggccuguauaagcaccccggggugccggucaaguggaaacggugaggacuaguaauaaggaaacuguaugaaugucugugggcaggaagugaagagauccuucuguaaagguuuuuggaauuaugucugcugaauaauaaacuuuuuugaaauaauaaaucugguagaaaaaugagaucucaaaggcucuuuucagagccaccaaaaaaaaaaaaaaaaaaaaaaaaaaaaaaaaaaaaaaaaaaaaaaaaaaaaaaaaaaaaaaaaaaaaaaaaaaaaaaaaaaaaaaaaaaaaaaaaaaaaa

SEQ ID NO: 30901 - RNA, 1809 nt, Artificial Sequence
  mRNA product Design b-4 (hSL-A100) comprising derived and/or modified sequence from LASV(LASV1000-NIG-2009;Clade II)__AIT17782__GPCmut6 (opt5)
aggagagucccgcagucggcguccagcggcucugcuuguucgugugugugucguugcaggccuuauucaagcuuaccaugggccagaucauuaccuucuuucaagaggugccccacgucaucgaagagguuaugaacauugugcugaucgcccucagccugcuugcuauucugaaggggaucuacaauguggccacaugcggacucuucggccuggucuccuuucuucugcucugugggagaucuugcagcacgaccuauaaaggaguguacgaacugcagacacuggagcucgacauggcgucccugaacauguguaugccucuuucuugcaccaagaauaacagccaucacuauaucaugguuggcaaugaaacagggcuggagcucacccugacaaacaccuccauuaucaaucauaaauucuguaaccuuucugaugcucacaagaaaaaucuguacgaccaugcccucaugagcauuaucuccacguuucaccugagcauuccgaacuucaaucaguaugaggccaugucuugcgauuuuaacggaggcaagaucuccgugcaguacaaucugagccacaccuaugcugucgacgccgcuaaccauuguggcacaauugccaauggggugcuccaaaccuucaugcggauggcguggggaggcucuuacaucgcccuggauuccgggaagggaagcugggacugcaucaugacaucuuaccaguaucuuauuauccagaacaccacgugggaagaucacugucaguuuucccgccccagcccuauuggcuaccuggggcuccugucccaaagaacacgggacaucuauauuucucgcagacuucugggaaccuucacauggacccucagcgauuccgagggcaacgaaacccccggcggguacugccugacacgguggaugcugaucgaggcugagcucaaauguuuuggaaauacggccguugcuaagugcaacgaaaaacaugacgaggaguucugcgauaugcugcgccuuuuugacuucuguaagcaggccaucaaaagacugaagaccccugcgcagaugagcauucagcucaucaauaaggccgugaacgcucugauuaaugaucaacuuaucaugaaaaaccaucugcgggacauuaugggcauccccuauugcaauuacucuaaguauugguaccucaaccacacagucaccgggaaaacaucccugccucgcuguuggcuggugagcaauggaucuuaccucaacgaaacccacuucagcgacgauaucgaacagcaggccgacaauaugauuacggagcugcuucaaaaggaguauaucgauagacagggcaaaacaccgcuggggcucguggaccuguuugucuucuccaccucuuuuuaccugauuagcaucuuccuucaccucguuaagauucccacccaucggcacguggugggaaaaccuugccccaagccucaucgccugaaccacaugggcaucuguuccugcggccuguauaagcaccccggggucccggugaaauggaagagaugaggacuaguaauaaggaaacuguaugaaugucugugggcaggaagugaagagauccuucuguaaagguuuuuggaauuaugucugcugaauaauaaacuuuuuugaaauaauaaaucugguagaaaaaugagaucucaaaggcucuuuucagagccaccaaaaaaaaaaaaaaaaaaaaaaaaaaaaaaaaaaaaaaaaaaaaaaaaaaaaaaaaaaaaaaaaaaaaaaaaaaaaaaaaaaaaaaaaaaaaaaaaaaaaa

SEQ ID NO: 30902 - RNA, 1809 nt, Artificial Sequence
  mRNA product Design b-4 (hSL-A100) comprising derived and/or modified sequence from LASV(LASV221-NIG-2010;Clade II)__AIT17624__GPCmut6 (opt5)
aggagagucccgcagucggcguccagcggcucugcuuguucgugugugugucguugcaggccuuauucaagcuuaccaugggccagaucauuaccuucuuucaagaggugccccacgucaucgaagagguuaugaacauugugcugaucgcccucagccugcuugcuauucugaaggggaucuacaauguggccacaugcggacucuucggccuggucuccuuucuucugcucugugggagaucuugcagcacgaccuauaaaggaguguacgaacugcagacacuggagcucgacauggcgucccugaacauguguaugccucuuucuugcaccaagaauaacagccaucacuauaucaugguuggcaaugaaacagggcuggagcucacccugacaaacaccuccauuaucaaucauaaauucuguaaccuuucugaugcucacaagaaaaaucuguacgaccaugcccucaugagcauuaucuccacguuucaccugagcauuccgaacuucaaucaguaugaggccaugucuugcgauuuuaacggaggcaagaucuccgugcaguacaaucugagccacaccuaugcuauugacgccgcuaaccauuguggcacaaucgccaaugggguccuccaaaccuucaugcggauggcguggggaggcucuuacaucgcccuggauuccgggaagggaagcugggacugcauuaugacaucuuaccaguaucuuaucauucagaacaccacgugggaagaucacugucaguuuucccgccccagcccuaucggcuaccuggggcuccugucccaaagaacacgggacauuuauaucucucgcagacuucugggaaccuucacauggacccucagcgauuccgagggcaacgaaacccccggcggguacugccugacacgguggaugcugaucgaggcugagcucaaauguuuuggaaauacggccguggcuaagugcaacgaaaaacaugacgaggaguucugcgauaugcugcgccuuuuugacuucuguaagcaggccauuagacggcugaaaaccccugcgcagaugagcauccagcucauuaauaaggccguuaacgcucugaucaaugaucaacuuauuaugaagaaccaucugcgcgacaucaugggcauccccuauugcaauuacucuaaauauugguaccucaaccacacagugaccgggaagacaucccugccuagauguuggcuggucagcaauggaucuuaccucaacgaaacccacuucagcgacgauauugaacagcaggccgacaauaugaucacggagaugcugcaaaaagaguauauggaucggcagggcaagacaccgcuugggcugguggaccucuuuguguucuccaccucuuuuuaccugauuagcaucuuccugcaccuugucaaaauucccacccaucgccacguuaucggaaagccuugccccaaaccucauagacucaaccacaugggcauuuguuccugcggccuguauaagcaccccggggugccggugaaguggaaacggugaggacuaguaauaaggaaacuguaugaaugucugugggcaggaagugaagagauccuucuguaaagguuuuuggaauuaugucugcugaauaauaaacuuuuuugaaauaauaaaucugguagaaaaaugagaucucaaaggcucuuuucagagccaccaaaaaaaaaaaaaaaaaaaaaaaaaaaaaaaaaaaaaaaaaaaaaaaaaaaaaaaaaaaaaaaaaaaaaaaaaaaaaaaaaaaaaaaaaaaaaaaaaaaaa

SEQ ID NO: 30903 - RNA, 1809 nt, Artificial Sequence
  mRNA product Design b-4 (hSL-A100) comprising derived and/or modified sequence from LASV(LASV237-NIG-2010;Clade II)__AIT17638__GPCmut6 (opt5)
aggagagucccgcagucggcguccagcggcucugcuuguucgugugugugucguugcaggccuuauucaagcuuaccaugggccagaucauuaccuucuuucaagaggugccccacgucaucgaagagguuaugaacauugugcugaucgcccucagccugcuugcuauucugaaggggaucuacaauguggccacaugcggacucuucggccuggucuccuuucuucugcucugugggagaucuugcagcacgaccuauaaaggaguguacgaacugcagacacuggagcucgacauggcgucccugaacauguguaugccucuuucuugcaccaagaauaacagccaucacuauaucaugguuggcaaugaaacagggcuggagcucacccugacaaacaccuccauuaucaaucauaaauucuguaaccuuucugaugcucacaagaaagaccuguacgaucaugcccucaugagcauuaucuccacguuucaccugagcauuccgaauuucaaccaguaugaggccaugucuugcgacuuuaauggaggcaagaucuccgugcaguacaaccugagccacaccuaugcugucgaugccgcuaaucauuguggcacaauugccaacggggugcuccaaaccuucaugcggauggcguggggaggcucuuacaucgcccuggacuccgggaagggaagcugggauugcaucaugacaucuuaccaguaucuuauuauccagaauaccacgugggaagaccacugucaguuuucccgccccagcccuauuggcuaccuggggcuccugucccaaagaacacgggauaucuauauuucucgcagacuucugggaaccuucacauggacccucagcgacuccgagggcaacgaaacccccggcggguacugccugacacgguggaugcugaucgaggcugagcucaaauguuuuggaaacacggccguugcuaagugcaaugaaaaacaugaugaggaguucugcgacaugcugcgccuuuuugauuucuguaagcaggccaucagacggcugaaaaccccugcgcagaugagcauucagcucaucaacaaggccgugaaugcucugauuaacgaccaacuuaucaugaagaaucaucugcgcgacauuaugggcauccccuauugcaacuacucuaaauauugguaccucaaucacacagucaccgggaagacaucccugccuagauguuggcuggugagcaacggaucuuaccucaaugaaacccacuucagcgaugacaucgaacagcaggccgauaacaugauuacggagcugcuucaaaaagaguauauggaccggcagggcaagacaccgcuggggcucguggaucuguuugucuucuccaccucuuuuuaccugaucagcauuuuccuucaccucaucaaaauucccacccaucgccacaucacaggaaagccuugccccaaaccucauagacugaaucacaugggcauuuguuccugcggccuguauaagcaccccgggguuccggugaaguggaaacggugaggacuaguaauaaggaaacuguaugaaugucugugggcaggaagugaagagauccuucuguaaagguuuuuggaauuaugucugcugaauaauaaacuuuuuugaaauaauaaaucugguagaaaaaugagaucucaaaggcucuuuucagagccaccaaaaaaaaaaaaaaaaaaaaaaaaaaaaaaaaaaaaaaaaaaaaaaaaaaaaaaaaaaaaaaaaaaaaaaaaaaaaaaaaaaaaaaaaaaaaaaaaaaaaa

SEQ ID NO: 30904 - RNA, 1809 nt, Artificial Sequence
  mRNA product Design b-4 (hSL-A100) comprising derived and/or modified sequence from LASV(LASV253-NIG-2011;Clade II)__AIT17670__GPCmut6 (opt5)
aggagagucccgcagucggcguccagcggcucugcuuguucgugugugugucguugcaggccuuauucaagcuuaccaugggccagaucauuaccuucuuucaagaggugccccacgucaucgaagagguuaugaacauugugcugaucgcccucagccugcuugcuauucugaaggggaucuacaauguggccacaugcggacucuucggccuggucuccuuucuucugcucugugggagaucuugcagcacgaccuauaaaggaguguacgaacugcagacacuggagcucgacauggcgucccugaacauguguaugccucuuucuugcaccaagaauaacagccaucacuauaucaugguuggcaaugaaacagggcuggagcucacccugacaaacaccuccauuaucaaucauaaauucuguaaccuuucugaugcucacaagaaaaaucuguacgaccaugcccucaugagcauuaucuccacguuucaccugagcauuccgaacuucaaucaguaugaggccaugucuugcgauuuuaacggaggcaagaucuccgugcaguacaaucugagccacaccuaugcugucgacgccgcuaaccauuguggcacaauugccaauggggugcuccaaaccuucaugcggauggcguggggaggcucuuacaucgcccuggauuccgggaagggaagcugggacugcaucaugacaucuuaccaguaucuuauuauccagaacaccacgugggaagaucacugucaguuuucccgccccagcccuauuggcuaccuggggcuccugucccaaagaacacgggacaucuauauuucucgcagacuucugggaaccuucacauggacccucagcgauuccgagggcaacgaaacccccggcggguacugccugacacgguggaugcugaucgaggcugagcucaaauguuuuggaaauacggccguugcuaagugcaacgaaaaacaugacgaggaguucugcgauaugcugcgccuuuuugacuucuguaagcaggccaucagacggcugaaagcgccugcccagaugagcauucagcucaucaauaaggcugugaacgcccugauuaaugaucaacuuaucaugaagaaccaucugcgcgacauuaugggcauccccuauugcaauuacucuaaauauugguaccucaaccacaccgucacagggagaaccucccugccucgguguuggcuggugagcaauggaucuuaccucaacgaaacacacuucagcgacgauaucgaacagcaggcugacaauaugauuaccgagcugcuucaaaaggaguauaucgaucgccagggcaaaacgccgcuggggcucguggaccuguuugucuucuccacaucuuuuuaccugauuagcaucuuccuucaccucguuaagauucccacccauagacacaucauuggaaaaccuugccccaagccucaucggcugaaccacaugggcaucuguuccugcggccuguauaaacaccccggggugccggugaaguggaagcgcugaggacuaguaauaaggaaacuguaugaaugucugugggcaggaagugaagagauccuucuguaaagguuuuuggaauuaugucugcugaauaauaaacuuuuuugaaauaauaaaucugguagaaaaaugagaucucaaaggcucuuuucagagccaccaaaaaaaaaaaaaaaaaaaaaaaaaaaaaaaaaaaaaaaaaaaaaaaaaaaaaaaaaaaaaaaaaaaaaaaaaaaaaaaaaaaaaaaaaaaaaaaaaaaaa

SEQ ID NO: 30905 - RNA, 1809 nt, Artificial Sequence
  mRNA product Design b-4 (hSL-A100) comprising derived and/or modified sequence from LASV(LASV254-NIG-2011;Clade II)__AIT17674__GPCmut6 (opt5)
aggagagucccgcagucggcguccagcggcucugcuuguucgugugugugucguugcaggccuuauucaagcuuaccaugggccagaucauuaccuucuuucaagaggugccccacgucaucgaagagguuaugaacauugugcugaucgcccucagccugcuugcuauucugaaggggaucuacaauguggccacaugcggacucuucggccuggucuccuuucuucugcucugugggagaucuugcagcacgaccuauaaaggaguguacgaacugcagacacuggagcucgacaugaccaaccugaauauguguaugccucuuuccugcacaaagaacaauucucaucacuauaucaugguuggcaacgaaaccgggcuggagcucacacugaccaauacgagcauuaucaaccauaaauucuguaaucuuuccgaugcgcacaagaaaaaccuguacaaucaugcucucaugucuauuaucagcaccuuucaccuguccauuccgaacuucaaucaguaugaggccaugagcugcgacuuuaacggaggcaagaucucugugcaguacaaucugucccacagcuaugccgucgaugcugccaaccauuguggcacaauugcuaacggggugcuccaaaccuucaugcggauggccuggggaggcucuuacaucgcgcuggacuccgggaagggaaauugggauugcaucaugacaagcuaccaguaucuuauuauccagaacaccacgugggaagaccacugucaguuuucucgccccuccccuauuggcuaccuggggcuccugagccaaagaacacgggauaucuauauuucccgcagacuucugggaaccuucacauggacccucucugacagcgagggcaaugaaacccccggcggguacugccugacacgguggaugcugaucgaggccgagcucaaauguuuuggaaacacggcuguugccaagugcaaugaaaaacaugaugaggaguucugcgacaugcugcgccuuuuugauuucuguaagcaggcuaucagacggcugaaaaccccugcccaggcgaacauucagcucaucaauaaggccgugaacgcucugauuaaugaccaacuuaucaugaagaaccaucugcgcgauauuaugggcauccccuauugcaauuacuccaaauauugguaccucaaccacacagucaccgggaagacaagccugccuagauguuggcuggugucuaauggauccuaccucaacgaaacccacuucagcgacgacaucgaacagcaggccgauaauaugauuacggagcugcuucaaaaagaguauauggaccggcagggcaagacaccgcuggggcucguggaucuguuugucuucucuaccagcuuuuaccugaucuccauuuuccuucaccucguuaaaauccccacccaucgccacgugauuggaaagccuugccccaaaccucauagacugaaccacaugggcaucuguucuugcggccuguauaagcaccccggggugccggucaaguggaaacggugaggacuaguaauaaggaaacuguaugaaugucugugggcaggaagugaagagauccuucuguaaagguuuuuggaauuaugucugcugaauaauaaacuuuuuugaaauaauaaaucugguagaaaaaugagaucucaaaggcucuuuucagagccaccaaaaaaaaaaaaaaaaaaaaaaaaaaaaaaaaaaaaaaaaaaaaaaaaaaaaaaaaaaaaaaaaaaaaaaaaaaaaaaaaaaaaaaaaaaaaaaaaaaaaa

SEQ ID NO: 30906 - RNA, 1809 nt, Artificial Sequence
  mRNA product Design b-4 (hSL-A100) comprising derived and/or modified sequence from LASV(Nig08-A19;Clade III)__ADU56618__GPCmut6 (opt5)
aggagagucccgcagucggcguccagcggcucugcuuguucgugugugugucguugcaggccuuauucaagcuuaccaugggccagaucgugaccuucuuucaagaggucccccacguuauugaagaggugaugaacaucgugcugauugcccucagcauccuggcuauucuuaaggggcuguacaauaucgccacaugcggacucaucggccuggucacguuccuucugcucuccgggagaucuuguagcaugaccuauaaaggaguguacgaacugcagacacuggagcucaacaugaauacccugaacaugugcaugccucuuuccuguacaaagaauaacucucaucacuauauuaugguuggcaaugaaaccgggcuggagcucacacugaccaacacgagccuucugcaucacaaauuuugcaaucucuccgacgcgcauaagaaaaaccuguacgaucacacccugaugucuaucauuagcacauuccaccucuccaucccgaauuuuaaccaguaugaggcuaugagcugugacuucaauggaggcaagauuaccgugcaguacaaccugucucauuccuaugccaucgaugccgcuaaucacugcggcacagucgccaacggggugcuucaaaccuuuaugcggauggcuuggggaggcagcuacauugcccuggacucugggcgcggaaagugggauuguaucaugacguccuaccaguaucucaucauucagaacacaaccugggaagaccauugccaguucagcagacccucuccuaucggcuaccuggggcuucugucccaacggacacgcgauauuuauaucagcagacggcuccugggaaccuuuaccuggacacuguccgacucugagggcaaugaaacgcccggcggguacugucucacccgcuggaugcugauugaggcggagcuuaaaugcuucggaaacacagccguugcuaaguguaaugaaaaacacgaugaggaauuuugcgacaugcugagacucuucgauuuuugcaagcaggccauccggcgccugaaagcuccugcccagaugagcauccagcuuauuaacaaggcggugaaugcccugaucaacgaccaacucauuaugaagaaucaccugagagauaucaugggcauucccuauuguaacuacuccaaauauugguaccugaaucauaccagcacagggcggaccucucucccucgcugcuggcuggucuccaacggaagcuaccuuaaugagacgcacuucucugacgacaucgaacagcaggcugauaacaugaucacagagaugcugcaaaaggaguaucucgacagacagggcaaaaccccgcuggggcugguggaucuuuucguguuuagcaccuccuucuaccucauuucuaucuuucugcaucuggucaagauucccacacaccggcauaucguuggaaaaccuugucccaagccucaccgccucaaucacaugggcauuugcagcuguggccuguauaaacagcccggggugccggugagauggaagcggugaggacuaguaauaaggaaacuguaugaaugucugugggcaggaagugaagagauccuucuguaaagguuuuuggaauuaugucugcugaauaauaaacuuuuuugaaauaauaaaucugguagaaaaaugagaucucaaaggcucuuuucagagccaccaaaaaaaaaaaaaaaaaaaaaaaaaaaaaaaaaaaaaaaaaaaaaaaaaaaaaaaaaaaaaaaaaaaaaaaaaaaaaaaaaaaaaaaaaaaaaaaaaaaaa

SEQ ID NO: 30907 - RNA, 1812 nt, Artificial Sequence
  mRNA product Design b-4 (hSL-A100) comprising derived and/or modified sequence from LASV(G1180-SLE-2010;Clade IV)__AIT17168__GPCmut6 (opt5)
aggagagucccgcagucggcguccagcggcucugcuuguucgugugugugucguugcaggccuuauucaagcuuaccaugggccagaucgugaccuucuuucaagaggucccccacguuauugaagaggugaugaacaucgugcugauugcccucagcauccuggcuguccuuaaggggcuguacaauuucgccacaugcggacucgugggccugcuuacguuucugcuccugugugggagauccugcaccgcgucucgguauaaaggaguuuacgaacugcagacacucgagcugaacauggaaacccuuaauauguguaugccucugagcugcacaaagaacaauucccaucacuauauuauggugggcaacgagaccgggcucgagcugacacuuaccaauacgucuaucaucaaccauaaauucuguaaucugagcgacgcucacaagaaaaaccucuacgaucaugcccugauguccauuaucucuaccuuucaccugagcauuccgaauuucaaccaguaugaagccauguccugcgacuuuaauggaggcaagaucagcguccaguacaaccucucucacuccuaugcuggcgaugccgcuaaucauugugggacaguggccaacggaguucugcaaaccuucaugcgcauggcguggggcgggagcuacauugcccuugacucuggacacggcuccugggauugcaucaugacaagcuaccaguaucugauuauccagaacaccacgugggaggaccauugucaguuuucuagacccuccccuaucggguaccucggacugcuuagccaacggacacgcgauauuuauaucuccagacggcugcucggcaccuucacauggacccugucugacagcgaaggcaaggauacccccgggggauacugccugacacgcuggaugcucauugaggcugagcugaaauguuuuggcaauacggccguggcuaagugcaacgaaaaacacgacgaggaguucugcgauaugcuuagacuguuugacuucuguaagcaggccauccagcggcucaaagcgccugcccagauguccauucaacugaucaauaaggcugucaacgcccuuaucaaugaucagcugauuaugaagaaccaccuccgcgacaucauggggauucccuauugcaauuacagcaaauauugguaccugaaccauaccacaaccggaaagacaucucugccuaaauguuggcucguguccaauggcagcuaccugaacgaaacccacuucucugacgauaucgaacagcaagcugacaauaugauuacggagaugcuucagaaggaguauauggaaagacaggggaaaacaccgcugggacucguggaucuguuugucuucagcaccuccuuuuaccugaucucuaucuuccuucaucucguuaagauucccacccaccggcauaucgugggcaaaagcugcccuaagccccaccgccugaaccacaugggcauuuguuccugcgggcuguauaagcagccuggagugcccgucaaauggaagagaugaggacuaguaauaaggaaacuguaugaaugucugugggcaggaagugaagagauccuucuguaaagguuuuuggaauuaugucugcugaauaauaaacuuuuuugaaauaauaaaucugguagaaaaaugagaucucaaaggcucuuuucagagccaccaaaaaaaaaaaaaaaaaaaaaaaaaaaaaaaaaaaaaaaaaaaaaaaaaaaaaaaaaaaaaaaaaaaaaaaaaaaaaaaaaaaaaaaaaaaaaaaaaaaaa

SEQ ID NO: 30908 - RNA, 1812 nt, Artificial Sequence
  mRNA product Design b-4 (hSL-A100) comprising derived and/or modified sequence from LASV(G1442-SLE-2011;Clade IV)__AIT17180__GPCmut6 (opt5)
aggagagucccgcagucggcguccagcggcucugcuuguucgugugugugucguugcaggccuuauucaagcuuaccaugggccagaucgugaccuucuuucaagaggucccccacguuauugaagaggugaugaacaucgugcugauugcccucagcauccuggcuguccuuaaggggcuguacaauguggccacaugcggacucauuggccugguuacguuccuucugcucugugggagauccugcaccacaacccuguauaaaggaguguacgaacugcagacacucgagcugaacauggaaacccuuaauauguguaugccucugucuugcacaaagaacaauagccaucacuauauccgggucggcaacgagaccgggcucgagcugacgcuuaccaauacauccaucauuaaccauaaauuuuguaaucugucugacgcgcacaagaaaaaccucuacgaucaugcucugaugagcaucauuuccaccuuccaccugucuaucccgaauuuuaaccaguaugaagccaugagcugcgacuucaauggaggcaagauuuccgugcaguacaaccucagccacucuuaugccggcgaugcugccaaucauugugggacaguugcuaacggagugcugcaaaccuuuaugcgcauggccuggggcggguccuacaucgcgcuugacagcggaagaggcaacugggauugcauuaugacgucuuaccaguaucugaucauccagaauacaaccugggacgaucacugucaguucucccggcccagcccuauuggguaccucggacugcuuucucaacgcacaagagacgucuauaucucccggcgccugcucggcaccuuuaccuggacacugagcgauuccgagggcaaggacacgcccgggggauacugccugaccagauggaugcucauugaagccgagcugaaauguuucggcaacacagcuguggccaagugcaaugagaaacaugaugaagaguuuugcgacaugcuucggcuguucgauuuuuguaagcaggcuauccagcgccucaaagccccugcgcagaugucuauucaacugaucaacaaggccgugaaugcucuuaucaacgaccagcugauuaugaagaaucaccucagagacaucauggggauucccuauugcaacuacagcaaauauugguaccugaauaacaccgccacaggaaagaccucccugccuaaauguuggcucaucagcaauggcucuuaccugaacgaaacgcacuucuccgaugacauugagcaggaagcugauaauaugaucacagagaugcuucaaaaggaguauauggaacggcaggggaaaaccccgcugggacucgucgaccuguucguuuuuagcaccucuuucuaccugaucagcauuuuucuucaucucgugaagauccccacacaccgccauauugugggcaaauccugcccuaagccccacagacugaaccauaugggcaucuguucuugcgggcuguauaagcagccuggaguccccgugcgguggaaacgcugaggacuaguaauaaggaaacuguaugaaugucugugggcaggaagugaagagauccuucuguaaagguuuuuggaauuaugucugcugaauaauaaacuuuuuugaaauaauaaaucugguagaaaaaugagaucucaaaggcucuuuucagagccaccaaaaaaaaaaaaaaaaaaaaaaaaaaaaaaaaaaaaaaaaaaaaaaaaaaaaaaaaaaaaaaaaaaaaaaaaaaaaaaaaaaaaaaaaaaaaaaaaaaaaa

SEQ ID NO: 30909 - RNA, 1812 nt, Artificial Sequence
  mRNA product Design b-4 (hSL-A100) comprising derived and/or modified sequence from LASV(G3010-SLE-2013;Clade IV)__AIT17344__GPCmut6 (opt5)
aggagagucccgcagucggcguccagcggcucugcuuguucgugugugugucguugcaggccuuauucaagcuuaccaugggccagaucgugaccuucuuucaagaggucccccacguuauugaagaggugaugaacaucgugcugauugcccucagcauccuggcuguccuuaaggggcuguacaauuucgccacaugcggacucgugggccugguuacguuucuucugcucugugggagauccugcaccacaucucuguauaaaggaguguacgaacugcagacccucgagcugaacauggaaacacuuaauauguguaugccucugagcugcaccaagaacaauucccaucacuauauuauggucggcaacgagacagggcucgagcugacccuuacgaauaccucuaucaucaaccauaaauucuguaaucugagcgacgcgcacaagaaaaaccucuacaaucaugcucugauguccauuaucucuacauuucaccugagcauuccgaacuucaaucaguaugaagccauguccugcgauuuuaacggaggcaagaucagcgugcaguacaaucucucucacuccuaugccggcgacgcugccagccauugugggaccguugcuaacggagugcugcaaacauucaugcggauggccuggggcgggucuuacauugcgcuugauuccggauacggcaagugggacugcaucaugaccagcuaucaguaccugauuauccagaacacgacaugggaggaucacugucaguuuucucgccccuccccuaucggguaucucggacugcuuagccaaagaacccgggacauuuacaucucccgcagacugcucggcacauucaccuggacccugucugauagcgaaggcaaagacacacccgggggauauugccugacgcgguggaugcucauugaggccgagcugaaguguuuuggcaauaccgcugucgccaaaugcaacgaaaagcaugaugaggaguucugcgacaugcuucgccuguuugauuucuguaaacaggcuauccagagacucaagaccccugcccagauguccauucaacugaucaauaaggcggugaacgcccuuaucaaugaccagcugauuaugaaaaaccaccuccgggauaucauggggauucccuacugcaauuauagcaaguacugguaccugaaccacacaacaaccggaaaaacgucucugccuaaguguuggcucguguccaauggcagcuaucugaacgaaacacauuucucugacgacaucgaacagcaagcugauaauaugauuaccgagaugcuucagaaagaguacauggaacgccaggggaagaccccgcugggacucgucgaccuguuuguuuucagcacauccuuuuaucugaucucuaucuuccuucaccucgugaaaauucccacccauagacacaucgugggcaagagcugcccuaagccccaucggcugaaccacaugggcauuuguuccugcgggcuguacaaacagccuggaguccccgugcgcuggaagagaugaggacuaguaauaaggaaacuguaugaaugucugugggcaggaagugaagagauccuucuguaaagguuuuuggaauuaugucugcugaauaauaaacuuuuuugaaauaauaaaucugguagaaaaaugagaucucaaaggcucuuuucagagccaccaaaaaaaaaaaaaaaaaaaaaaaaaaaaaaaaaaaaaaaaaaaaaaaaaaaaaaaaaaaaaaaaaaaaaaaaaaaaaaaaaaaaaaaaaaaaaaaaaaaaa

SEQ ID NO: 30910 - RNA, 1812 nt, Artificial Sequence
  mRNA product Design b-4 (hSL-A100) comprising derived and/or modified sequence from LASV(G502-SLE-2009;Clade IV)__AIT17126__GPCmut6 (opt5)
aggagagucccgcagucggcguccagcggcucugcuuguucgugugugugucguugcaggccuuauucaagcuuaccaugggccagaucgugaccuucuuucaagaggucccccacguuauugaagaggugaugaacaucgugcugauugcccucagcauccuggcuguccuuaaggggcuguacaauuucgccacaugcggacucgugggccugcuuacguuucugcuccugugugggagauccugcaccacaggacuguauaaaggcguuuacgaacuccagacccuggagcuuaacauggaaacacugaauauguguaugccucucucuugcaccaagaacaauagccaucacuauauuaugguggggaacgagacaggacuggagcuuacccugacgaauaccuccaucaucaaccauaaauucuguaaucucucugacgcgcacaagaaaaaccuguacgaucaugcucugaugagcauuaucuccacauuucaccucucuauuccgaauuucaaccaguaugaagccaugagcugcgacuuuaauggcggcaagaucuccguccaguacaaccugagccacucuuaugccggggaugcugccgaccauuguggaaccguggcuaauggcguucuucaaacauucaugcggauggccuggggaggguccuacauugcgcuggauagcggccgcgggagaugggacugcaucaugaccucuuaccaguaucucauuauccagaacacgacaugggaggaucacugucaguuuucccggcccagcccuaucggauaccugggccuucugucucaacgcaccagagacauuuauaucucccggcgccuccugggcacauucaccuggacccugagcgauuccgaagggaaggacacacccggaggcuacugccucacgagauggaugcugauugaggccgagcuuaaauguuuugggaacaccgcuguggccaagugcaaugaaaaacaugaugaggaguucugcgacaugcugcggcucuuugauuucuguaagcaggcuauccagcgccugaaagccccugcgcagaugucuauucaacuuaucaacaaggccgucaaugcucugaucaacgaccagcucgugaugaagaaucaccugagagacauuaugggaauccccuauugcaacuacagccgguauugguaccugaaucacacaaccacaggccgcaccucccucccuaaauguuggcuggugagcaacgggucuuaccuuaaugaaacgcauuucuccgaugacauugaacagcaagccgauaacaugaucacagagaugcugcagaaggaguauauggaaagacagggaaaaaccccgcucggccuggucgaccuguuuguuuucagcaccucuuuuuaccuuauuagcaucuuccuccaccuggugaagauccccacacaucggcacauugugggcaaauccugcccuaagccccaucgccugaaucacauggggaucuguucuugcggacucuauaaacagccuggcguccccgugaaguggaagagaugaggacuaguaauaaggaaacuguaugaaugucugugggcaggaagugaagagauccuucuguaaagguuuuuggaauuaugucugcugaauaauaaacuuuuuugaaauaauaaaucugguagaaaaaugagaucucaaaggcucuuuucagagccaccaaaaaaaaaaaaaaaaaaaaaaaaaaaaaaaaaaaaaaaaaaaaaaaaaaaaaaaaaaaaaaaaaaaaaaaaaaaaaaaaaaaaaaaaaaaaaaaaaaaaa

SEQ ID NO: 30911 - RNA, 1812 nt, Artificial Sequence
  mRNA product Design b-4 (hSL-A100) comprising derived and/or modified sequence from LASV(G733-SLE-2010;Clade IV)__AIT17154__GPCmut6 (opt5)
aggagagucccgcagucggcguccagcggcucugcuuguucgugugugugucguugcaggccuuauucaagcuuaccaugggccagaucgugaccuucuuucaagaggucccccacguuauugaagaggugaugaacaucgugcugauugcccucagcauccuggcuguccuuaaggggcuguacaauuucgccacaugcggaauugugggccucguuuccuuucugcuucugugugggagaucuugcacgaccagccucuauaaaggaguguacgaacugcagacacuggagcucaacauggaaacccugaauauguguaugccucuuuccugcacaaagaacaauucucaucacuauaucauggucggcaacgagaccgggcuggagcucacacugaccaauacgagcaucauuaaccauaaauucuguaaucuuuccgacgcgcacaagaaaaaccuguacgaucaugcucucaugucuaucauuagcaccuuucaccuguccaucccgaauuucaaccaguaugaagccaugagcugcgacuuuaauggaggcaagauuucugugcaguacaaccugucccacagcuaugccggcgaugcugccaaucauugugggacaaucgcuaacggaguucuccaaaccuucaugcggauggccuggggcgggucuuacauugcgcuggacuccggacgcgauagaugggacugcaucaugacaagcuaccaguaucuuaucauucagaacaccacgugggaggaucacugucaguuuucucggcccuccccuaucggcuaccuggggcuccugagccaacgcacaagagacauuuauaucucccggcgccuucugggaaccuucacauggacccucucugauagcgaaggcaaggacacccccggcggguacugccugacaagauggaugcugauugaggccgagcucaaauguuuuggaaauacggcuguggccaagugcaacgaaaaacaugaugaggaguucugcgacaugcugcggcuuuuugauuucuguaagcaggcuauccagcgccugaaagccccugcgcagauguccauccaacucauuaauaaggccgucaacgcucugaucaaugaccagcuuauuaugaagaaccaccugagagacaucaugggcauucccuauugcaauuacagcaaauauugguaccucaaccacaccacaaccgggaagacaucucugccuaaauguuggcugguguccaauggaagcuaccucaacgaaacccauuucucugaugacaucgaacagcaagccgauaauaugaucacggagaugcugcagaaggaguauauggaacggcagggcaaaacaccgcuugggcugguggaccucuuugucuucagcaccuccuuuuaccugauuucuaucuuccugcaccuuguuaagauucccacccaucgccacguggugggaaaaagcugcccuaagccccauagacucaaccacaugggcaucuguuccugcggccuguaugggcagccuggaguccccgugaaguggaaacggugaggacuaguaauaaggaaacuguaugaaugucugugggcaggaagugaagagauccuucuguaaagguuuuuggaauuaugucugcugaauaauaaacuuuuuugaaauaauaaaucugguagaaaaaugagaucucaaaggcucuuuucagagccaccaaaaaaaaaaaaaaaaaaaaaaaaaaaaaaaaaaaaaaaaaaaaaaaaaaaaaaaaaaaaaaaaaaaaaaaaaaaaaaaaaaaaaaaaaaaaaaaaaaaaa

SEQ ID NO: 30912 - RNA, 1812 nt, Artificial Sequence
  mRNA product Design b-4 (hSL-A100) comprising derived and/or modified sequence from MOPV/LASV reassortant(IGS-1;Clade IV)__AFY05576__GPCmut6 (opt5)
aggagagucccgcagucggcguccagcggcucugcuuguucgugugugugucguugcaggccuuauucaagcuuaccaugggccagaucgugaccuucuuucaagaggucccccacguuauugaagaggugaugaacaucgugcugauugcccucagcguccuggcugugcuuaaggggcuguacaauuucgccacaugcggacucguuggccuggugacguuucuucugcucugugggagauccugcaccacaucucuguauaaaggagucuacgaacugcagacccucgagcugaacauggaaacacuuaauauguguaugccucugagcugcaccaagaacaauucccaucacuauaucauggugggcaacgagacagggcucgagcugacccuuacgaauaccucuauuaucaaccauaaauucuguaaucugagcgacgcgcacaagaaaaaccucuacgaucaugcucugauguccaucauuucuacauuucaccugagcaucccgaauuucaaccaguaugaagccauguccugcgacuuuaauggaggcaagauuagcguucaguacaaccucucucacuccuaugccggcgaugcugccaaucauugugggaccguggcuaacggaguccugcaaacauucaugcggauggccuggggcgggagcuacaucgcgcuugacucuggacgcggcaacugggauugcauuaugaccuccuaccaguaucugaucauucagaauacgacaugggaggaccacugucaguuuagcagacccucuccuaucggguaccucggacugcuuucccaacggacccgcgauaucuauauuagcagacggcugcucggcacauucaccuggacccuguccgacucugaaggcgaggauacacccgggggauacugccugacgcgcuggaugcucaucgaggccgaacugaaguguuuuggcaacaccgcuguggccaaaugcaaugagaagcaugacgaagaguucugcgauaugcuuagacuguuugacuucuguaaacaggcuauucagcggcucaaggccccugcgcagaugagcauccaacugauuaacaaagccgugaaugcucuuaucaacgaucagcugaucaugaagaaucaccuccgcgacauuauggggauccccuauugcaacuacuccaaguauugguaccugaaucacacaaccacaggaagaaccagccugccuaaauguuggcucgucucuaacggcuccuaccugaaugaaacgcauuucagcgacgauauugagcagcaagccgacaacaugaucacagagaugcuucagaaggaauauauggagcggcaggggaaaaccccgcugggacucguugaucuguuuguguucucuaccagcuuuuaccugauuuccaucuuccuucaccucgugaagauccccacacaucgccacauugucggcaaaucuugcccuaagccccauagacugaaucacaugggcaucuguagcugcgggcuguauaaacagccuggagugcccguuaaguggaagcggugaggacuaguaauaaggaaacuguaugaaugucugugggcaggaagugaagagauccuucuguaaagguuuuuggaauuaugucugcugaauaauaaacuuuuuugaaauaauaaaucugguagaaaaaugagaucucaaaggcucuuuucagagccaccaaaaaaaaaaaaaaaaaaaaaaaaaaaaaaaaaaaaaaaaaaaaaaaaaaaaaaaaaaaaaaaaaaaaaaaaaaaaaaaaaaaaaaaaaaaaaaaaaaaaa

SEQ ID NO: 30913 - RNA, 1812 nt, Artificial Sequence
  mRNA product Design b-4 (hSL-A100) comprising derived and/or modified sequence from LASV(LM765-SLE-2012;Clade IV)__AIT17814__GPCmut6 (opt5)
aggagagucccgcagucggcguccagcggcucugcuuguucgugugugugucguugcaggccuuauucaagcuuaccaugggccagaucgugaccuucuuucaagaggucccccacguuauugaagaggugaugaacaucgugcugauugcccucagcauccuggcuguccuuaaggggcuguacaauuucgccacaugcggacucgugggccugguuacguuucuucugcucugugggagauccugcaccacaucucuguauaaaggaguguacgaacugcagacccucgagcugaacauggaaacacuuaauauguguaugccucugagcugcaccaagaacaauucccaucacuauauuauggucggcaacgagacagggcucgagcugacccuuacgaauaccucuaucaucgaccauaaauucuguaaccugagcgaugcgcaccggaagaaucucuacgaccaugcucugauguccauuaucucuacauuucaccugagcauuccgaacuucaaucaguaugaagccauguccugcgauuuuaacggaggcaaaaucagcgugcaguacaaucucucucacuccuaugccaaggacgcugccgaucauuguggcaccguugcuaacggggugcugcaaacauucaugcgcauggccuggggaggcagcuacauugcgcuugacucugggagaggacggugggauugcaucaugaccuccuaccaguaucugauuauccagaauacgacaugggaggaccacugucaguuuagccgccccucuccuaucggcuaccucgggcugcuuucccaaagaacccgggauauuuauaucagccgcagacugcucggaacauucaccuggacccuguccgacucugaaggcaaggauacacccggcggguacugccugacgcgguggaugcucauugaggccgagcugaaauguuuuggaaacaccgcugucgccaagugcaacgaaaaacaugacgaggaguucugcgauaugcuucgccuguuugacuucuguaagcaggcuauccagagacucaaagccccugcgcagaugagcauucaacugaucaauaaggccgugaacgcucuuaucaaugaccagcugauuaugaagaaccaccuccgggauaucaugggcauucccuauugcaauuacuccaaauauugguaccugaaccacacaaccacagggaagaccagccugccuaaauguuggcucgugucuaauggauccuaccugaacgaaacgcauuucagcgacgauaucgaacagcaagccgacaauaugauuacagagaugcuucagaaggaguauauggaacgccagggcaaaaccccgcuggggcucgucgaucuguuuguuuucucuaccagcuuuuaccugaucuccaucuuccuucaccucgugaagauucccacacauagacacaucgugggaaaaccuugccccaagccucaucggcugaaccacaugggcauuuguucuugcggccuguauaagcagcccggggucccggugaaauggaagcgcugaggacuaguaauaaggaaacuguaugaaugucugugggcaggaagugaagagauccuucuguaaagguuuuuggaauuaugucugcugaauaauaaacuuuuuugaaauaauaaaucugguagaaaaaugagaucucaaaggcucuuuucagagccaccaaaaaaaaaaaaaaaaaaaaaaaaaaaaaaaaaaaaaaaaaaaaaaaaaaaaaaaaaaaaaaaaaaaaaaaaaaaaaaaaaaaaaaaaaaaaaaaaaaaaa

SEQ ID NO: 30914 - RNA, 1812 nt, Artificial Sequence
  mRNA product Design b-4 (hSL-A100) comprising derived and/or modified sequence from LASV(LM776-SLE-2012;Clade IV)__AIT17824__GPCmut6 (opt5)
aggagagucccgcagucggcguccagcggcucugcuuguucgugugugugucguugcaggccuuauucaagcuuaccaugggccagaucgugaccuucuuucaagaggucccccacguuauugaagaggugaugaacaucgugcugauugcccucagcauccuggcuguccuuaaggggcuguacaauuucgccacaugcggacucgugggccugguuacguuucuucugcucugugggagauccugcaccacaucuguguauaaaggagucuacgaacugcagacccuggagcucaacauggaaacacugaauauguguaugccucuuagcugcaccaagaacaauucccaucacuauauuauggugggcaacgagacagggcuggagcucacccugacgaauaccucuaucaucaaccauaaauucuguaaucuuagcgacgcgcacaagaaaaaccuguacgaucaugcucucauguccauuaucucuacauuucaccugagcauuccgaauuucaaccaguaugaagccauguccugcgacuuuaauggaggcaagaucagcguucaguacaaccugucucacuccuaugccggcgaugcugccaaucauugugggaccguggcuaacggaguccuccaaacauucaugcggauggccuggggcgggagcuacauugcgcuggacucuggacacggcaagugggauugcaucaugaccuccuaccaguaucuuauuauccagaacacgacaugggaggaccauugucaguuuagccgccccucuccuaucggguaccugggacuccugucccaaagaacccgggauauuuauaucagccgcagacuucugggcacauucaccuggacccucuccgacucugaaggcaaagauacacccgggggauacugccugacgcgguggaugcugauugaggccgagcucaaguguuuuggcaauaccgcuguggccaaaugcaacgaaaagcacgacgaggaguucugcgauaugcugcgccuuuuugacuucuguaaacaggcuauccagagacugaaggccccugcgcagaugagcauucaacucaucaauaaggccgugaacgcucugaucaaugaucagcuuauuaugaaaaaccaucugcgggacaucauggggauucccuauugcaauuacuccaaguauugguaccucaaccacacaaccacaggaaaaaccagccugccuaaguguuggcuggucucuaauggcuccuaccucaacgaaacgcacuucagcgacgauaucgaacagcaagccgacaauaugauuacagagaugcugcagaaagaguauauggaacgccaggggaagaccccgcuuggacugguugaucucuuuguguucucuaccagcuuuuaccugaucuccaucuuccugcaucuugugaaaauucccacacacagacauaucgucggcaagucuugcccuaagccccaccggcucaaccacaugggcauuuguagcugcgggcuguauaaacagccuggagugcccguucgcuggaagagaugaggacuaguaauaaggaaacuguaugaaugucugugggcaggaagugaagagauccuucuguaaagguuuuuggaauuaugucugcugaauaauaaacuuuuuugaaauaauaaaucugguagaaaaaugagaucucaaaggcucuuuucagagccaccaaaaaaaaaaaaaaaaaaaaaaaaaaaaaaaaaaaaaaaaaaaaaaaaaaaaaaaaaaaaaaaaaaaaaaaaaaaaaaaaaaaaaaaaaaaaaaaaaaaaa

SEQ ID NO: 30915 - RNA, 1812 nt, Artificial Sequence
  mRNA product Design b-4 (hSL-A100) comprising derived and/or modified sequence from LASV(Mad39;Clade IV)__ANH09722__GPCmut6 (opt5)
aggagagucccgcagucggcguccagcggcucugcuuguucgugugugugucguugcaggccuuauucaagcuuaccaugggccagaucgugaccuucuuucaagaggucccccacguuauugaagaggugaugaacaucgugcugauugcccucagcauccuggcuguccuuaaggggcuguacaauguggccacaugcggacucauuggccugguuacguuccuucugcucugugggagauccugcaccacaacccuguauaaaggaguguacgaacugcaggcgcucgagcugaacauggaaacacuuaauauguguaugccucugucuugcaccaagaacaauagccaucacuauauccgggucggcaacgagacagggcucgagcugacccuuacgaauaccucccugaucaaccauaaauuuuguaaucucucugacgcucacaagaaaaaccuguacgaucaugcccugaugagcauuaucuccacauuccaccucucuauuccgaauuuuaaccaguaugaagccaugagcugcgacuucaaugauggaaagaucuccgugcaguacaaccugagccacaccuaugcuggcgacacagccaaucauuguggcaccguugcuaacggggugcuucaaacguuuaugcgcauggccuggggaggcucuuacauugcgcuggauuccgggagaggaggcugggacugcaucaugacaagcuaccaguaucucauuauccagaacaccacaugggaggaucacugucaguucucucggcccuccccuaucggguaccugggacuucugagccaacgcaccagagacauuuauaucucucggcgccuccugggcaccuuuacauggacgcuguccgauagcgaaggcaaggacacccccgggggauacugccucacaagauggaugcugauugaggccgagcuuaaauguuucggcaauaccgcugucgccaagugcaacgaaaaacaugaugaggaauuuugcgacaugcugcgccucuucgauuuuuguaagcaggcuauccagcggcugaaagccccugcgcagauguccauucaacuuaucaauaaggccgugaacgcucugaucaaugaccagcucauuaugaagaaccaccugagagacaucauggggauucccuauugcaauuacucuaaauauugguaccugaaccacacagugaccggaaagacgagccucccuaaauguuggcuggucuccaauggcagcuaccuuaacgagacacauuucucugaugacaucgaacagcaagccgauaauaugauuaccgagaugcugcagaaggaguauauggaacggcaggggaaaaccccgcucggacugguugaccuguucguguuuuccaccagcuucuaccuuaucucuaucuuucuccaccuggugaagauucccacacaucgccacgucgugggcaaaccuugccccaagccucauagacugaaccacaugggcaucuguagcugcggguucuauaagcagcccggaguuccggugcgguggaaacgcugaggacuaguaauaaggaaacuguaugaaugucugugggcaggaagugaagagauccuucuguaaagguuuuuggaauuaugucugcugaauaauaaacuuuuuugaaauaauaaaucugguagaaaaaugagaucucaaaggcucuuuucagagccaccaaaaaaaaaaaaaaaaaaaaaaaaaaaaaaaaaaaaaaaaaaaaaaaaaaaaaaaaaaaaaaaaaaaaaaaaaaaaaaaaaaaaaaaaaaaaaaaaaaaaa

SEQ ID NO: 30916 - RNA, 1812 nt, Artificial Sequence
  mRNA product Design b-4 (hSL-A100) comprising derived and/or modified sequence from LASV(Z0947-SLE-2011;Clade IV)__AIT17840__GPCmut6 (opt5)
aggagagucccgcagucggcguccagcggcucugcuuguucgugugugugucguugcaggccuuauucaagcuuaccaugggccagaucgugaccuucuuucaagaggucccccacguuauugaagaggugaugaacaucgugcugauugcccucagcauccuggcuguccuuaaggggcuguacaauuucgccacaugcggacucgugggccugguuacguuucuucugcucugugggagauccugcaccauuucucuguauaaaggaguguacgaacugcagacacucgagcugaacauggaaacccuuaauauguguaugccucugagcugcacaaagaacaauucccaucacuauaucauggucggcaacgagaccgggcucgagcugacacuuaccaauacgucuaucauuaaccauaaauucuguaaucugagcgacgcgcacaagaaaaaccucuacgaucaugcucugauguccaucauuucuaccuuucaccugagcaucccgaauuucaaccaguaugaagccauguccugcgacuuuaauggaggcaagauuagcgugcaguacaaccucucucacuccuaugccggcgaugcugccaaucauugugggacaguugcuaacggagugcugcaaaccuucaugcggauggccuggggcgggagcuacaucgcgcuugacucuggacgcgauagaugggacugcauuaugacauccuaccaguaucugaucauccagaacaccacgugggaggaucacugucaguuuagccggcccucuccuauuggcuaccucgggcugcuuucccaacgcacaagagacaucuauauuagccggcgccugcucggaaccuucacauggacccuguccgauucugaaggcaaggacacccccggcggguacugccugacaagauggaugcucaucgaggccgagcugaaauguuuuggaaauacggcugucgccaagugcaacgaaaaacaugaugaggaguucugcgacaugcuucggcuguuugauuucuguaagcaggcuauucagcgccucaaagccccugcgcagaugagcauccaacugaucaauaaggccgugaacgcucuuauuaaugaccagcugaucaugaagaaccaccucagagacauuaugggcauccccuauugcaauuacuccaaauauugguaccugaaccacaccacaaccgggaagacaagccugccuaaauguuggcucgugucuaauggauccuaccugaacgaaacccauuucagcgaugacauugaacagcaagccgauaauaugaucacggagaugcuucagaaggaguauauggaacggcagggcaaaacaccgcuggggcucgucgaccuguuuguuuucucuaccagcuuuuaccugaucuccauuuuccuucaccucgugaagauccccacccaucgccacauugugggaaaaccuugccccaagccucauagacugaaccacaugggcaucuguucuugcggccuguauaagcagcccggggucccggugaaauggaagcggugaggacuaguaauaaggaaacuguaugaaugucugugggcaggaagugaagagauccuucuguaaagguuuuuggaauuaugucugcugaauaauaaacuuuuuugaaauaauaaaucugguagaaaaaugagaucucaaaggcucuuuucagagccaccaaaaaaaaaaaaaaaaaaaaaaaaaaaaaaaaaaaaaaaaaaaaaaaaaaaaaaaaaaaaaaaaaaaaaaaaaaaaaaaaaaaaaaaaaaaaaaaaaaaaa

SEQ ID NO: 30917 - RNA, 1788 nt, Artificial Sequence
  mRNA product Design b-4 (A100) comprising derived and/or modified sequence from LASV(Josiah;Clade IV)__NP_694870__GPCmut6 (opt1)
aggagagucccgcagucggcguccagcggcucugcuuguucgugugugugucguugcaggccuuauucaagcuuaccaugggccagaucgugaccuucuuccaggaggucccccacgugaucgaggaggugaugaacaucguccugaucgcccucagcgugcuggccgugcugaaggggcucuacaacuucgcgaccugcggccuggucgggcuggugacguuccuccugcugugcggccgcuccugcaccaccagccucuacaaggggguguacgagcugcagacccuggagcucaacauggagacgcugaacaugugcaugccgcuguccugcaccaagaacaacagccaccacuacaucauggucggcaacgagaccggccucgagcugacgcugaccaacaccuccaucaucaaccacaaguucugcaaccucagcgacgcccacaagaagaaccuguacgaccacgcccugauguccaucaucagcaccuuccaccucuccauccccaacuucaaccaguacgaggccaugagcugcgacuucaacgggggcaagaucuccgugcaguacaaccugagccacuccuacgccggggacgcggccaaccacugcggcacgguggccaacgggguccugcagaccuucaugcggauggccuggggcggcagcuacaucgcgcucgacuccgggcgcggcaacugggacugcaucaugaccagcuaccaguaccugaucauccagaacaccacgugggaggaccacugccaguucucccggcccagccccaucggguaccugggccuccugucccagcgcacccgggacaucuacaucagccgccggcugcucggcaccuucaccuggacgcugagcgacuccgaggggaaggacaccccgggcggguacugccugacccgcuggaugcucaucgaggccgagcugaagugcuucggcaacaccgccguggccaagugcaacgagaagcacgacgaggaguucugcgacaugcugcggcuguucgacuucugcaagcaggccauccagcgccugaaggcgcccgcccagaugagcauccagcugaucaacaaggccgugaacgcccucaucaacgaccagcugaucaugaagaaccaccuccgggacaucauggggauccccuacugcaacuacuccaaguacugguaccucaaccacacgaccaccggccgcaccagccugcccaagugcuggcuggucuccaacggcagcuaccucaacgagacgcacuucuccgacgacaucgagcagcaggccgacaacaugaucaccgagaugcugcagaaggaguacauggagcggcaggggaagacgccccugggccucguggaccuguucguguucagcaccuccuucuaccugaucagcaucuuccugcaccucgucaagaucccgacccaccgccacaucguggggaaguccugccccaagccccaccggcugaaccacaugggcaucugcagcugcgggcuguacaagcagcccggcgugccggucaaguggaagcgcugaggacuaguaauaaggaaacuguaugaaugucugugggcaggaagugaagagauccuucuguaaagguuuuuggaauuaugucugcugaauaauaaacuuuuuugaaauaauaaaucugguagaaaaaugagaucuaaaaaaaaaaaaaaaaaaaaaaaaaaaaaaaaaaaaaaaaaaaaaaaaaaaaaaaaaaaaaaaaaaaaaaaaaaaaaaaaaaaaaaaaaaaaaaaaaaaa

SEQ ID NO: 30918 - RNA, 1785 nt, Artificial Sequence
  mRNA product Design b-4 (A100) comprising derived and/or modified sequence from LASV(LP;Clade I)__AAF86701__GPCmut6 (opt1)
aggagagucccgcagucggcguccagcggcucugcuuguucgugugugugucguugcaggccuuauucaagcuuaccaugggccagaucaucaccuucuuccaggaggugccccacgucaucgaggaggugaugaacaucgugcugaucgcccucagccugcuggccauccucaaggggcuguacaacaucgcgaccugcggcaucaucgggcuggucgccuuccucuuccugugcggcaaguccugcagccugacgcucaagggcggguacgagcugcagacccuggagcucaacauggagacccugaacaugugcaugccgcuguccugcacgaagaacagcucccaccacuacauccgcgugggcaacgagaccgggcucgagcugacccugaccaacacgagcaucaucaaccacaaguucugcaaccucuccgacgcccacaagaagaaccuguacgaccacgcccugaugagcaucaucuccaccuuccaccucagcauccccaacuucaaccaguacgaggccauguccugcgacuucaacggcgggaagaucagcgugcaguacaaccugucccacagcuacgcgggcgacgccgccgagcacugcgggaccgucgccaacggcgugcugcagaccuucaugcggauggcguggggcgggcgcuacaucgcccucgacuccggcaaggggaacugggacugcaucaugacgagcuaccaguaccugaucauccagaacaccaccugggaggaccacugccaguucucccggcccagccccaucggcuaccugggccuccugucccagcgcacccgggacaucuacaucagccgccggcugcucgggacguucaccuggacccugagcgacuccgagggcaacgagacccccgggggcuacugccugacgcgcuggaugcucaucgaggccgagcugaagugcuucgggaacaccgccguggccaagugcaacgagaagcacgacgaggaguucugcgacaugcugcggcuguucgacuucugcaagcaggcgauccgccggcugaaggcccccgcccagaugagcauccagcugaucaacaaggccgucaacgcccucaucaacgaccagcugaucaugaagaaccaccuccgcgacaucaugggcauccccuacugcaacuacuccaaguacugguaccucaaccacaccagcuccggccggaccagccugcccaagugcuggcugaucuccaacgggagcuaccucaacgagacgcaguucuccgacgacaucgagcagcaggcggacaacaugaucaccgagaugcugcagaaggaguacaucgagcgccagggcaagaccccgcuggggcucguggacaucuucaucuucagcaccuccuucuaccugaucagcaucuuccugcaccugaucaagaucccgacgcaccggcacaucgugggcaagcccugccccaagccccaccgccucaaccacaugggggucugcuccugcggccuguacaagcacccgggcgugcccaccaaguggaagcggugaggacuaguaauaaggaaacuguaugaaugucugugggcaggaagugaagagauccuucuguaaagguuuuuggaauuaugucugcugaauaauaaacuuuuuugaaauaauaaaucugguagaaaaaugagaucuaaaaaaaaaaaaaaaaaaaaaaaaaaaaaaaaaaaaaaaaaaaaaaaaaaaaaaaaaaaaaaaaaaaaaaaaaaaaaaaaaaaaaaaaaaaaaaaaaaaa

SEQ ID NO: 30919 - RNA, 1785 nt, Artificial Sequence
  mRNA product Design b-4 (A100) comprising derived and/or modified sequence from LASV(803213;Clade II)__AAF86703__GPCmut6 (opt1)
aggagagucccgcagucggcguccagcggcucugcuuguucgugugugugucguugcaggccuuauucaagcuuaccaugggccagaucaucaccuucuuccaggaggugccccacgucaucgaggaggugaugaacaucgugcugaucgcccucagccugcuggccauccucaaggggaucuacaacgucgcgaccugcggccuguucgggcugaucuccuuccuccugcugugcggccgcagcugcuccgugacguacaaggggguguacgagcuccagacccuggagcugaacauggccaaccucaacaugugcaugccgcugagcugcaccaagaacaacucccaccacuacaucauggucggcaacgagacgggccuggagcucacccugaccaacaccagcaucaucaaccacaaguucugcaaccuguccgacgcccacaagaagaaccucuacgaccacgcccugaugagcaucaucuccacguuccaccugagcauccccaacuucaaccaguacgaggccauguccugcgacuucaacgggggcaagaucagcgugcaguacaaccucucccacagcuucgcgguggacgccgccaaccacugcgggaccaucgccaacggcguccugcagaccuucaugcggauggcguggggcggguccuacaucgcccuggacagcggcaaggggaacugggacugcaucaugaccuccuaccaguaccucaucauccagaacacgaccugggaggaccacugccaguucagccgccccucccccaucggcuaccuggggcugcucagccagcggacccgcgacaucuacaucagccggcgccugcugggcaccuucacguggacccucuccgacagcgagggcaacgaggcccccgggggcuacugccugacccgguggaugcugaucgaggccgagcucaagugcuucgggaacaccgccguggcgaagugcaacgagaagcacgacgaggaguucugcgacaugcugcgccuguucgacuucugcaagcaggccaucaagcggcucaagacgcccgcccagauguccauccagcugaucaacaaggccgugaacgcccugaucaacgaccagcucaucaugaagaaccaccuccgcgacaucaugggcauccccuacugcaacuacagccgguacugguaccugaaccacaccgucaccgggaagaccucccugccccgcugcuggcuggugagcaacggcuccuaccugaacgagacgcacuucagcgacgacaucgagcagcaggcggacaacaugaucaccgagaugcuccagaaggaguacauggaccggcagggcaagaccccgcuggggcugguggaccucuucgucuucuccaccagcuucuaccugaucuccaucuuccugcaccuggugaagaucccgacgcaccgccacaucgugggcaagcccugccccaagccccaccggcucaaccacauggggaucugcagcugcggccuguacaagcacccggggguccccgugaaguggaagcgcugaggacuaguaauaaggaaacuguaugaaugucugugggcaggaagugaagagauccuucuguaaagguuuuuggaauuaugucugcugaauaauaaacuuuuuugaaauaauaaaucugguagaaaaaugagaucuaaaaaaaaaaaaaaaaaaaaaaaaaaaaaaaaaaaaaaaaaaaaaaaaaaaaaaaaaaaaaaaaaaaaaaaaaaaaaaaaaaaaaaaaaaaaaaaaaaaa

SEQ ID NO: 30920 - RNA, 1785 nt, Artificial Sequence
  mRNA product Design b-4 (A100) comprising derived and/or modified sequence from LASV(GA391;Clade III)__CAA36645__GPCmut6 (opt1)
aggagagucccgcagucggcguccagcggcucugcuuguucgugugugugucguugcaggccuuauucaagcuuaccaugggccagaucgugaccuucuuccaggaggucccccacgugaucgaggaggugaugaacaucguccugaucgcccucagcauccuggccauccugaaggggcucuacaacguggcgaccugcggccugaucgggcuggugacguuccuccugcuguccggccgcagcugcucccucaucuacaaggggaccuacgagcugcagacccuggagcucaacauggagacccugaacaugugcaugccgcugagcugcaccaagaacaacucccaccacuacauccgggucggcaacgagaccggccucgagcugacccugacgaacaccagcauccucaaccacaaguucugcaaccuguccgacgcccacaagcgcaaccuguacgaccacagccucauguccaucaucagcaccuuccaccuguccauccccaacuucaaccaguacgaggccaugagcugcgacuucaacgggggcaagaucaccgugcaguacaaccugucccacagcuucgccguggacgccgcggggcacugcggcacgcucgccaacgggguccugcagaccuucaugcggauggccuggggcggcuccuacaucgcccuggacagcgggcgcggcaacugggacugcaucaugaccuccuaccaguaccucaucauccagaacaccacgugggacgaccacugccaguucagccggcccucccccaucggguaccugggccugcucagccagcgcacccgggacaucuacaucagccgccggcugcugggcaccuucaccuggacgcucuccgacagcgaggggaacgagaccccgggcggguacugccugacccgcuggaugcugaucgaggcggagcucaagugcuucggcaacaccgccguggccaagugcaacgagaagcacgacgaggaguucugcgacaugcugcggcuguucgacuucugcaagcaggccauccgccggcucaagacgcccgcccagauguccauccagcugaucaacaaggcggugaacgcccugaucaacgaccagcucaucaugaagaaccaccuccgcgacaucauggggauccccuacugcaacuacagccgguacugguaccugaaccacaccuccaccggcaagaccagccugccccgcugcuggcugaucuccaacggcagcuaccugaacgagacgaaguucuccgacgacaucgagcagcaggccgacaacaugaucaccgagaugcuccagaaggaguacaucgaccggcaggggaagacgccccugggccuggucgaccuguucguguucagcaccuccuucuaccucaucagcaucuuccugcaccuggugaagaucccgacccaccgccacaucgucgggaagcccugccccaagccccaccggcucaaccacaugggcaucugcuccugcgggcuguacaagcagccgggcgugcccgugcgcuggaagcggugaggacuaguaauaaggaaacuguaugaaugucugugggcaggaagugaagagauccuucuguaaagguuuuuggaauuaugucugcugaauaauaaacuuuuuugaaauaauaaaucugguagaaaaaugagaucuaaaaaaaaaaaaaaaaaaaaaaaaaaaaaaaaaaaaaaaaaaaaaaaaaaaaaaaaaaaaaaaaaaaaaaaaaaaaaaaaaaaaaaaaaaaaaaaaaaaa

SEQ ID NO: 30921 - RNA, 1788 nt, Artificial Sequence
  mRNA product Design b-4 (A100) comprising derived and/or modified sequence from LASV(AV;Clade V)__CCA30314__GPCmut6 (opt1)
aggagagucccgcagucggcguccagcggcucugcuuguucgugugugugucguugcaggccuuauucaagcuuaccaugggccagaucgugaccuucuuccaggaggucccccacgugaucgaggaggugaugaacaucguccugaucgcccucagcauccuggccgugcugaaggggcucuacaacaucgcgaccugcggccugaucgggcugaucacguuccuccugcugugcggccgcuccugcagcuccaaccucuacaaggggguguacgagcugcagagccuggaccucaacauggagacccugaacaugugcaugccgcuguccugcaccaagaacaacagccaccacuacauccgggucggcaacgacacgggccucgagcugacccugaccaacaccuccauccucaaccacaaguucugcaaccugagcgacgcccacaagaaggaccuguacgaccacgcccucauguccaucaucagcacguuccaccuguccauccccaacuucaaccaguacgaggccaugagcugcgacuucaacgggggcaagaucuccgugcaguacaaccugagccacuccuacgccaucgacgcggccaaccacugcgggaccguggccaacggcauccuccagaccuucaugcgcauggccuggggcgggagcuacaucgcgcuggacuccggccgggggaacugggacugcaucaugaccagcuaccaguaccugaucauccagaacacgaccugggagaaccacugccaguucucccgccccagccccaucggcuaccucgggcugcugagccagcggacccgcgacaucuacaucucccggcgccuccugggcaccuucacguggacccugagcgacuccgagggcaacgccacccccgggggcuacugccucacccgguggaugcugaucgaggccgagcugaagugcuucgggaacacggccgucgccaagugcaacgagaagcacgacgaggaguucugcgacaugcuccgccuguucgacuucugcaagcaggcgaucagccggcugaagucccccgcccagaugagcauccagcucaucaacaaggccgugaacgcccugaucaacgaccagcugaucaugaagaaccaccuccgcgacaucaugggcauccccuacugcaacuacuccaaguacugguaccugaaccacaccaucaccgggaagaccagccugcccaagugcuggcucguguccaacggcagcuaccugaacgagacgcacuucuccgacgacaucgagcagcaggccgacaacaugaucaccgagaugcugcagaaggaguacauggagcggcagggcaagaccccgcucgggcuggucgaccuguucguguucagcaccuccuucuaccugaucagcaucuuccuccgccuggugaagaucccgacgcaccggcacaucgucggcaagcccugccccaagccccaccgccugaaccacauggggaucugcuccugcggccucuacaagcagccgggggugcccgugcgguggaagcgcugaggacuaguaauaaggaaacuguaugaaugucugugggcaggaagugaagagauccuucuguaaagguuuuuggaauuaugucugcugaauaauaaacuuuuuugaaauaauaaaucugguagaaaaaugagaucuaaaaaaaaaaaaaaaaaaaaaaaaaaaaaaaaaaaaaaaaaaaaaaaaaaaaaaaaaaaaaaaaaaaaaaaaaaaaaaaaaaaaaaaaaaaaaaaaaaaa

SEQ ID NO: 30922 - RNA, 1785 nt, Artificial Sequence
  mRNA product Design b-4 (A100) comprising derived and/or modified sequence from LASV(Togo/2016/7082;Clade VI)__AMR44577__GPCmut6 (opt1)
aggagagucccgcagucggcguccagcggcucugcuuguucgugugugugucguugcaggccuuauucaagcuuaccaugggccagaucaucaccuucuuccaggaggugccccacgucaucgaggaggugaugaacaucgugcugaucgcccucagccugcuggccauccucaagggggucuacaacguggcgaccugcggcaucaucgggcuggugacguuccuguuccucugcggccgcuccugcagccugaucuacaagggguccuacgagcugcagacccucgagcugaacauggagacccugaacaugugcaugccgcucagcugcacgaagaacuccagccaccacuacauccgggucggcaacgagaccggccuggagcugacccucaccaacacguccaucaucaaccacaaguucugcaaccugagcgacgcccacaagcgcaaccuguacgaccacgcccucauguccauccugagcaccuuccaccuguccauccccaacuucaaccaguacgaggccaugagcugcgacuucaacgggggcaagaucuccgugcaguacaaccucagccacgccuacgcgguggacgccgccgagcacugcgggaccgucgccaacggcgugcugcagaccuucaugcggauggcguggggcggguccuacaucgcccuggacagcggccgcgggaacugggacugcaucaugacguccuaccaguaccucaucauccagaacaccaccugggaggaccacugccaguucagccggcccucccccaucggcuaccuggggcugcucagccagcgcacccgggacaucuacaucagccgccggcugcugggcacguucaccuggacccucuccgacagcgagggcaacgagacccccgggggcuacugccugacgcgcuggaugcugaucgaggccgagcucaagugcuucgggaacaccgccguggccaagugcaacgagaagcacgacgaggaguucugcgacaugcugcggcuguucgacuucugcaagcaggcgauccagcgccucaagucccccgcccagaugagcauccagcugaucaacaaggccgucaacgcccugaucaacgaccagcucaucaugaagaaccaccuccgggacaugaugggcauccccuacugcaacuacuccaaguacugguaccugaaccacaccagcuccgggcgcaccagccugcccaagugcuggcugguguccaacggcagcuaccugaacgagacgcacuucuccgacgacaucgagcagcaggccgacaacaugaucaccgagaugcuccagaaggaguacaucgaccggcagggcaagaccccgcuggggcugguggaccucuucgucuucagcaccuccuucuaccugaucagcaucuuccugcaccugaucaagaucccgacgcaccgccacaucgugggcaagcccugccccaagccccaccggcucaaccacauggggaucugcuccugcggccuguacaagcagccgggggugcccacccgcuggaagcggugaggacuaguaauaaggaaacuguaugaaugucugugggcaggaagugaagagauccuucuguaaagguuuuuggaauuaugucugcugaauaauaaacuuuuuugaaauaauaaaucugguagaaaaaugagaucuaaaaaaaaaaaaaaaaaaaaaaaaaaaaaaaaaaaaaaaaaaaaaaaaaaaaaaaaaaaaaaaaaaaaaaaaaaaaaaaaaaaaaaaaaaaaaaaaaaaa

SEQ ID NO: 30923 - RNA, 1785 nt, Artificial Sequence
  mRNA product Design b-4 (A100) comprising derived and/or modified sequence from LASV(KAK-428;Clade n.d. (VII))__ANH09740__GPCmut6 (opt1)
aggagagucccgcagucggcguccagcggcucugcuuguucgugugugugucguugcaggccuuauucaagcuuaccaugggccagaucgugaccuucuuccaggaggucccccacgugaucgaggaggugaugaacaucguccugaucgcccucagccugcuggccauccucaaggggcuguacaacuucgcgaccugcggcgugaucgggcugaucacguuccuccugcugugcggccgcuccugcagcgccaccuacaaggggcaguacgagcuccagacccuggagcugaacauggagucccucaacaugugcaugccgcugagcugcacgaagaacaacucccaccacuacauccgggccggcaacaacaccggccuggagcucacccugaccaacacgagcaucaucucccacaaguucugcaaccugagcgacgcccacaagaagaaccucuacgaccacacccugauguccaucaucaccaccuuccaccugagcauccccaacuucaaccaguacgaggccauguccugcgacuucaacgggggcaagaucagcauccaguacaaccucucccacagcuacgcgggggacgccgcccagcacugcggcacgguggccaacgggguccugcagaccuucaugcgcauggcguggggcggcuccuaccuggcccucgacagcgggcggcgcggcugggacugcaucaucuccagcuaccaguaccugaucauccagaacaccaccugggacgaccacugccaguucucccggcccagccccaucggguaccugggcuucgugagccagaagacgcgcgacaucuacaucucccggcgccuccugggcaccuucaccuggacccugagcgacuccgaggggcacgacaugccgggcggguacugccucacgcgguggaugcugaucgaggccgaccugaagugcuucggcaacaccgccguggccaagugcaacgagaagcacgacgaggaguucugcgacauguggcgccucuucgacuucugcaagcaggcgauccagcggcugaaggcccccgcccagaugaacauccagcugaucaacaaggccgucaacgcccucaucaacgaccagcugaugaugaagaaccaccuccgcgacaucauggggauccccuacugcaacuacagcaaguucugguaccugaacaacaccaccacgggccggaccucccugccccgcugcuggcugaucagcaacggcuccuaccucaacgagacccacuucagcgacgacaucgagcagcaggcggacaacaugaucaccgagaugcugcagaaggaguacauggaccggcaggggaagacgccccugggccucguggaccuguucguguucuccaccagcuucuaccugaucaccaucuuccuccaccuggucaagaucccgacccaccgccacaucguggggaagcccugccccaagccccaccggcugaaccacaugggcaucugcuccugcgggcuguacaagcagccgggcgugcccguccgcuggaagcggugaggacuaguaauaaggaaacuguaugaaugucugugggcaggaagugaagagauccuucuguaaagguuuuuggaauuaugucugcugaauaauaaacuuuuuugaaauaauaaaucugguagaaaaaugagaucuaaaaaaaaaaaaaaaaaaaaaaaaaaaaaaaaaaaaaaaaaaaaaaaaaaaaaaaaaaaaaaaaaaaaaaaaaaaaaaaaaaaaaaaaaaaaaaaaaaaa

SEQ ID NO: 30924 - RNA, 1785 nt, Artificial Sequence; identical to SEQ ID NO: 30918
  mRNA product Design b-4 (A100) comprising derived and/or modified sequence from LASV(Pinneo-NIG-1969;Clade I)__AIT17836__GPCmut6 (opt1)

SEQ ID NO: 30925 - RNA, 1785 nt, Artificial Sequence
  mRNA product Design b-4 (A100) comprising derived and/or modified sequence from LASV(ISTH0009-NIG-2011;Clade II)__AIT17404__GPCmut6 (opt1)
aggagagucccgcagucggcguccagcggcucugcuuguucgugugugugucguugcaggccuuauucaagcuuaccaugggccagaucaucaccuucuuccaggaggugccccacgucaucgaggaggugaugaacaucgugcugaucgcccucagccugcuggccauccucaaggggaucuacaacgucgcgaccugcggccuguucgggcugguguccuuccuccugcugugcggccgcagcugcuccacgaccuacaaggggguguacgagcuccagacccuggagcuggacauggccagccucaacaugugcaugccgcuguccugcacgaagaacaacagccaccacuacaucauggucggcaacgagaccggccuggagcucacccugaccaacacguccaucaucaaccacaaguucugcaaccugagcgacgcccacaagaagaaccucuacgaccacgcccugauguccaucaucagcaccuuccaccuguccauccccaacuucaaccaguacgaggccaugagcugcgacuucaacgggggcaagaucuccgugcaguacaaccucagccacgcguacgccguggacgccgccaaccacugcgggaccaucgcgaacggcguccugcagaccuucaugcggauggccuggggcggguccuacaucgcccuggacagcggcaagggguccugggacugcaucaugacgagcuaccaguaccucaucauccagaacaccaccugggaggaccacugccaguucucccgccccagccccaucggcuaccuggggcugcucagccagcggacccgcgacaucuacaucucccggcgccugcugggcacguucaccuggacccucagcgacuccgagggcaacgagacccccgggggcuacugccugacgcgguggaugcugaucgaggccgagcucaagugcuucgggaacaccgccguggcgaagugcaacgagaagcacgacgaggaguucugcgacaugcugcgccuguucgacuucugcaagcaggccauccggcgccucaagacccccgcccagaugagcauccagcugaucaacaaggccgugaacgcccugaucaacgaccagcucaucaugaagaaccaccuccgggacaucaugggcaucccguacugcaacuacuccaaguacugguaccugaaccacaccgucacggggaagaccagccugccccgcugcuggcugguguccaacggcagcuaccugaacgagacccacuucuccgacgacaucgagcagcaggcggacaacaugaucaccgagcuccugcagaaggaguacauggaccggcagggcaagacgccccuggggcucguggaccuguucgucuucagcaccuccuucuaccugaucagcaucuuccugcaccucaucaagaucccgacccaccgccacaucaccggcaagcccugccccaagccccaccggcugaaccacauggggaucugcuccugcggccuguacaagcacccgggggugcccgugaaguggaagcgcugaggacuaguaauaaggaaacuguaugaaugucugugggcaggaagugaagagauccuucuguaaagguuuuuggaauuaugucugcugaauaauaaacuuuuuugaaauaauaaaucugguagaaaaaugagaucuaaaaaaaaaaaaaaaaaaaaaaaaaaaaaaaaaaaaaaaaaaaaaaaaaaaaaaaaaaaaaaaaaaaaaaaaaaaaaaaaaaaaaaaaaaaaaaaaaaaa

SEQ ID NO: 30926 - RNA, 1785 nt, Artificial Sequence
  mRNA product Design b-4 (A100) comprising derived and/or modified sequence from LASV(ISTH2010-NIG-2012;Clade II)__AIT17482__GPCmut6 (opt1)
aggagagucccgcagucggcguccagcggcucugcuuguucgugugugugucguugcaggccuuauucaagcuuaccaugggccagaucaucaccuucuuccaggaggugccccacgucaucgaggaggugaugaacaucgugcugaucgcccucagccugcuggccauccucaaggggaucuacaacgucgcgaccugcggccuguucgggcugguguccuuccuccugcugugcggccgcagcugcuccacgaccuacaaggggguguacgagcuccagacccuggagcuggacauggccagccucaacaugugcaugccgcuguccugcacgaagaacaacagccaccacuacaucauggucggcaacgagaccggccuggagcucacccugaccaacacguccaucaucaaccacaaguucugcaaccugagcgacgcccacaagaagaaccucuacgaccacgcccugauguccaucaucagcaccuuccaccuguccauccccaacuucaaccaguacgaggccaugagcugcgacuucaacgggggcaagaucuccgugcaguacaaccucagccacgcguacgccguggacgccgccaaccacugcgggaccaucgcgaacggcguccugcagaccuucaugcggauggccuggggcggguccuacaucgcccuggacagcggcaagggguccugggacugcaucaugacgagcuaccaguaccucaucauccagaacaucaccugggaggaccacugccaguucucccgccccagccccaucggcuaccuggggcugcucagccagcggacccgcgacaucuacaucucccggcgccugcugggcaccuucacguggacccucagcgacuccgagggcaacgagacccccgggggcuacugccugacccgguggaugcugaucgaggccgagcucaagugcuucgggaacacggccguggcgaagugcaacgagaagcacgacgaggaguucugcgacaugcugcgccuguucgacuucugcaagcaggccauccggcgccucaagacccccgcccagaugagcauccagcugaucaacaaggccgugaacgcccugaucaacgaccagcucaucaugaagaaccaccuccgggacaucaugggcauccccuacugcaacuacuccaaguacugguaccugaaccacaccgucaccgggaagacgagccugccccgcugcuggcugguguccaacggcagcuaccugaacgagacccacuucuccgacgacaucgagcagcaggcggacaacaugaucaccgagcuccugcagaaggaguacaucgaccggcagggcaagaccccgcuggggcucguggaccuguucgucuucagcacguccuucuaccugaucagcaucuuccugcaccucgugaagaucccgacccaccgccacguggucggcaagcccugccccaagccccaccggcugaaccacauggggaucugcuccugcggccuguacaagcacccgggggugcccgugaaguggaagcgcugaggacuaguaauaaggaaacuguaugaaugucugugggcaggaagugaagagauccuucuguaaagguuuuuggaauuaugucugcugaauaauaaacuuuuuugaaauaauaaaucugguagaaaaaugagaucuaaaaaaaaaaaaaaaaaaaaaaaaaaaaaaaaaaaaaaaaaaaaaaaaaaaaaaaaaaaaaaaaaaaaaaaaaaaaaaaaaaaaaaaaaaaaaaaaaaaa

SEQ ID NO: 30927 - RNA, 1785 nt, Artificial Sequence
  mRNA product Design b-4 (A100) comprising derived and/or modified sequence from LASV(Lassa virus/H.sapiens-wt/NGA/2015/ISTH_0543;Clade II)__AVO03639__GPCmut6 (opt1)
aggagagucccgcagucggcguccagcggcucugcuuguucgugugugugucguugcaggccuuauucaagcuuaccaugggccagaucaucaccuucuuccaggaggugccccacgucaucgaggaggugaugaacaucgugcugaucgcccucagccugcuggccauccucaaggggaucuacaacgucgcgaccugcggccuguucgggcugguguccuuccuccugcugugcggccgcagcugcuccacgaccuacaaggggguguacgagcuccagacccuggagcuggacauggccaaccucaacaugugcaugccgcugagcugcacgaagaacaacucccaccacuacaucauggucggcaacgagaccggccuggagcucacccugaccaacacgagcaucaucaaccacaaguucugcaaccuguccgacgcccacaagaagaaccucuacgaccacgcccugaugagcaucaucuccaccuuccaccugagcauccccaacuucaaccaguacgaggccauguccugcgacuucaacgggggcaagaucagcgugcaguacaaccucucccacaccuacgcgguggacgccgccaaccacugcgggaccaucgccaacggcguccugcagacguucaugcggauggcguggggcgggagcuacaucgcccuggacuccggcaaggggagcugggacugcaucaugaccuccuaccaguaccucgugauccagaacaccaccugggaggaccacugccaguucagccgccccucccccaucggcuaccuggggcugcucagccagcggacgcgcgacaucuacaucagccggcgccugcugggcaccuucaccuggacccucuccgacagcgagggcaacgagacgcccgggggcuacugccugacccgguggaugcugaucgaggccgagcucaagugcuucgggaacaccgccguggccaagugcaacgagaagcacgacgaggaguucugcgacaugcugcgccuguucgacuucugcaagcaggcgauccggcgccucaagacccccgcccagauguccauccagcugaucaacaaggccgucaacgcccugaucaacgaccagcucaucaugaagaaccaccuccgggacaucaugggcauccccuacugcaacuacagcaaguacugguaccugaaccacacggugaccgggaagaccucccugccccgcugcuggcuggugagcaacggcuccuaccugaacgagacccacuucagcgacgacaucgagcagcaggccgacaacaugaucacggagcuccugcagaaggaguacaucgaccggcagggcaagaccccgcuggggcucgucgaccuguucguguucuccaccagcuucuaccugaucuccaucuuccugcaccucgugaagaucccgacccaccgccacaucacgggcaagcccugccccaagccccaccggcugaaccacauggggaucugcagcugcggccuguacaagcacccggggguccccgugaaguggaagcgcugaggacuaguaauaaggaaacuguaugaaugucugugggcaggaagugaagagauccuucuguaaagguuuuuggaauuaugucugcugaauaauaaacuuuuuugaaauaauaaaucugguagaaaaaugagaucuaaaaaaaaaaaaaaaaaaaaaaaaaaaaaaaaaaaaaaaaaaaaaaaaaaaaaaaaaaaaaaaaaaaaaaaaaaaaaaaaaaaaaaaaaaaaaaaaaaaa

SEQ ID NO: 30928 - RNA, 1785 nt, Artificial Sequence
  mRNA product Design b-4 (A100) comprising derived and/or modified sequence from LASV(Lassa virus/H.sapiens-wt/NGA/2016/ISTH_0009;Clade II)__AVO03571__GPCmut6 (opt1)
aggagagucccgcagucggcguccagcggcucugcuuguucgugugugugucguugcaggccuuauucaagcuuaccaugggccagaucaucaccuucuuccaggaggugccccacgucaucgaggaggugaugaacaucgugcugaucgcccucagccugcuggccauccucaaggggaucuacaacgucgcgaccugcggccugcuggggcucguguccuuccugcugcucugcggccgcagcugcuccacgaccuacaaggggguguacgagcugcagacccuggagcucgacauggccagccugaacaugugcaugccgcuguccugcacgaagaacaacagccaccacuacaucauggucggcaacgagaccggccucgagcugacccugaccaacacguccaucaucaaccacaaguucugcaaccucagcgacgcccacaagaagaaccuguacgaccacgcccugauguccaucaucagcaccuuccaccucuccauccccaacuucaaccaguacgaggccaugagcugcgacuucaacgggggccggaucuccgugcaguacaaccugagccacuccuacgcgguggacgccgccaaccacugcgggaccaucgccaacggcguccugcagaccuucaugcgcauggcguggggcgggagcuacaucgcccucgacuccggcaaggggagcugggacugcaucaugacguccuaccaguaccugaucauccagaacaccaccugggaggaccacugccaguucagccggcccagccccaucggcuaccuggggcuccugucccagcgcacccgggacaucuacaucagccgccggcugcucggcacguucaccuggacccuguccgacagcgagggcaacgagacccccgggggcuacugccugacgcgcuggaugcucaucgaggccgagcugaagugcuucgggaacaccgccguggccaagugcaacgagaagcacgacgaggaguucugcgacaugcugcggcuguucgacuucugcaagcaggcgauccgccggcugaagacccccgcccagauguccauccagcugaucaacaaggccgugaacgcccucaucaacgaccagcugaucaugaagaaccaccuccgcgacaucaugggcaucccguacugcaacuacagcaaguacugguaccucaaccacaccgucacggggaagaccucccugccccggugcuggcuggugagcaacggcuccuaccucaacgagacccacuucagcgacgacaucgagcagcaggccgacaacaugaucaccgagcugcugcagaaggaguacaucgaccgccagggcaagacgccccucgggcugguggaccuguucgucuucuccaccagcuucuaccugaucuccaucuuccuccaccuggugaagaucccgacccaccggcacaucaccggcaagcccugccccaagccccaccgccugaaccacauggggaucugcagcugcggccucuacaaccacccgggggugcccgucaaguggaagcggugaggacuaguaauaaggaaacuguaugaaugucugugggcaggaagugaagagauccuucuguaaagguuuuuggaauuaugucugcugaauaauaaacuuuuuugaaauaauaaaucugguagaaaaaugagaucuaaaaaaaaaaaaaaaaaaaaaaaaaaaaaaaaaaaaaaaaaaaaaaaaaaaaaaaaaaaaaaaaaaaaaaaaaaaaaaaaaaaaaaaaaaaaaaaaaaaa

SEQ ID NO: 30929 - RNA, 1785 nt, Artificial Sequence
  mRNA product Design b-4 (A100) comprising derived and/or modified sequence from LASV(Lassa virus/H.sapiens-wt/NGA/2016/ISTH_0017;Clade II)__AVO03567__GPCmut6 (opt1)
aggagagucccgcagucggcguccagcggcucugcuuguucgugugugugucguugcaggccuuauucaagcuuaccaugggccagaucaucaccuucuuccaggaggugccccacgucaucgaggaggugaugaacaucgugcugaucgcccucagccugcuggccauccucaaggggaucuacaacgucgcgaccugcggccuguucgggcugguguccuuccuccugcugugcggccgcagcugcuccacgaccuacaaggggguguacgagcuccagacccuggagcuggacauggccagccucaacaugugcaugccgcuguccugcacgaagaacaacagccaccacuacaucauggucggcaacgagaccggccuggagcucacccugaccaacacguccaucaucaaccacaaguucugcaaccugagcgacgcccacaagaagaaccucuacgaccacgcccugauguccaucaucagcaccuuccaccuguccauccccaacuucaaccaguacgaggccaugagcugcgacuucaacgggggcaagaucuccgugcaguacaaccucagccacaccuacgcgaucgacgccgccaaccacugcgggaccaucgccaacggcgugcugcagacguucaugcggauggcguggggcggguccuacaucgcccuggacagcggcaagggguccugggacugcaucaugaccagcuaccaguaccucaucauccagaacaccaccugggaggaccacugccaguucucccgccccagccccaucggcuaccuggggcugcucagccagcggacgcgcgacaucuacaucucccggcgccugcugggcaccuucaccuggacccucagcgacuccgagggcaacgagacgcccgggggcuacugccugacccgguggaugcugaucgaggccgagcucaagugcuucgggaacaccgccgucgccaagugcaacgagaagcacgacgaggaguucugcgacaugcugcgccuguucgacuucugcaagcaggcgauccggcgccucaagacccccgcccagaugagcauccagcugaucaacaaggccgugaacgcccugaucaacgaccagcucaucaugaagaaccaccuccgggacaucaugggcauccccuacugcaacuacuccaaguacugguaccugaaccacacggugaccgggaagaccagccugccccgcugcuggcuggucuccaacggcagcuaccugaacgagacccacuucuccgacgacaucgagcagcaggccgacaacaugaucacggagcuccugcagaaggaguacauggaccggcagggcaagaccccgcuggggcucguggaccuguucguguucagcaccuccuucuaccugaucagcaucuuccugcaccucguccgcaucccgacccaccggcacgugaucggcaagcccugccccaagccccaccgccugaaccacauggggaucugcuccugcggccuguacaagcacccgggggugcccgucaaguggaagcggugaggacuaguaauaaggaaacuguaugaaugucugugggcaggaagugaagagauccuucuguaaagguuuuuggaauuaugucugcugaauaauaaacuuuuuugaaauaauaaaucugguagaaaaaugagaucuaaaaaaaaaaaaaaaaaaaaaaaaaaaaaaaaaaaaaaaaaaaaaaaaaaaaaaaaaaaaaaaaaaaaaaaaaaaaaaaaaaaaaaaaaaaaaaaaaaaa

SEQ ID NO: 30930 - RNA, 1785 nt, Artificial Sequence
  mRNA product Design b-4 (A100) comprising derived and/or modified sequence from LASV(Lassa virus/H.sapiens-wt/NGA/2018/ISTH_0959;Clade II)__AVV65099__GPCmut6 (opt1)
aggagagucccgcagucggcguccagcggcucugcuuguucgugugugugucguugcaggccuuauucaagcuuaccaugggccagaucaucaccuucuuccaggaggugccccacgucaucgaggaggugaugaacaucgugcugaucgcccucagccugcuggccauccucaaggggaucuacaacgucgugaccugcggccuguucgggcugguguccuuccuccugcugugcggccgcagcugcuccacgaccuacaagggggucuacgagcuccagacccuggagcuggacauggcgagccucaacaugugcaugccgcuguccugcacgaagaacaacagccaccacuacaucauggugggcaacgagaccggccuggagcucacccugaccaacacguccaucaucaaccacaaguucugcaaccugagcgacgcccacaagaagaaccucuacgaccacgcccugauguccaucaucagcaccuuccaccuguccauccccaacuucaaccaguacgaggccaugagcugcgacuucaacgggggcaagaucuccgugcaguacaaccucagccacgccuacgcgaucgacgccgccaaccacugcgggaccaucgccaacggcguccugcagaccuucaugcggauggcguggggcggguccuacaucgcccuggacagcggcaagggguccugggacugcaucaugacgagcuaccaguaccucaucauccagaacaccaccugggaggaccacugccaguucucccgccccagccccaucggcuaccuggggcugcucagccagcggacccgcgacaucuacaucucccggcgccugcugggcacguucaccuggacccucagcgacuccgagggcaacgagacccccgggggcuacugccugacgcgguggaugcugaucgaggccgagcucaagugcuucgggaacaccgccguggccaagugcaacgagaagcacgacgaggaguucugcgacaugcugcgccuguucgacuucugcaagcaggcgauccggcgccucaagacccccgcccagaugagcauccagcugaucaacaaggccgugaacgcccugaucaacgaccagcucaucaugaagaaccaccuccgggacaucaugggcaucccguacugcaacuacuccaaguacugguaccugaaccacaccgucacggggaagaccagccugccccgcugcuggcugguguccaacggcagcuaccugaacgagacccacuucuccgacgacaucgagcagcaggccgacaacaugaucaccgagcuccugcagaaggaguacaucgaccggcagggcaagacgccccuggggcucguggaccuguucgucuucagcaccuccuucuaccugaucagcaucuuccugcaccucgugaagaucccgacccaccgccacgugaucggcaagcccugccccaagccccaccggcugaaccacauggggaucugcuccugcggccuguacaagcacccggggguccccgugaaguggaagcgcugaggacuaguaauaaggaaacuguaugaaugucugugggcaggaagugaagagauccuucuguaaagguuuuuggaauuaugucugcugaauaauaaacuuuuuugaaauaauaaaucugguagaaaaaugagaucuaaaaaaaaaaaaaaaaaaaaaaaaaaaaaaaaaaaaaaaaaaaaaaaaaaaaaaaaaaaaaaaaaaaaaaaaaaaaaaaaaaaaaaaaaaaaaaaaaaaa

SEQ ID NO: 30931 - RNA, 1785 nt, Artificial Sequence
  mRNA product Design b-4 (A100) comprising derived and/or modified sequence from LASV(LASV003-NIG-2008;Clade II)__AIT17580__GPCmut6 (opt1)
aggagagucccgcagucggcguccagcggcucugcuuguucgugugugugucguugcaggccuuauucaagcuuaccaugggccagaucaucaccuucuuccaggaggugccccacgucaucgaggaggugaugaacaucgugcugaucgcccucagccugcuggccauccucaaggggaucuacaacgucgcgaccugcggccuguucgggcugguguccuuccuccugcugugcggccgcagcugcuccacgaccuacaaggggguguacgagcuccagacccuggagcuggacauggccagccucaacaugugcaugccgcuguccugcacgaagaacaacagccaccacuacaucauggucggcaacgagaccggccuggagcucacccugaccaacacguccaucaucaaccacaaguucugcaaccugagcgacgcccacaagaagaaccucuacgaccacgcccugauguccaucaucagcaccuuccaccuguccauccccaacuucaaccaguacgaggccaugagcugcgacuucaacgggggcaagaucuccgugcaguacaaccucagccacaccuacgcgguggacgccgccaaccacugcgggaccaucgccaacggcguccugcagacguucaugcggauggcguggggcggguccuacaucgcccuggacagcggcaagggguccugggacugcaucaugaccagcuaccaguaccucaucauccagaacaccaccugggaggaccacugccaguucucccgccccagccccaucggcuaccuggggcugcucagccagcggacgcgcgacaucuacaucucccggcgccugcugggcaccuucaccuggacccucagcgacuccgagagcaacgagacgccgggcggguacugccugacccgguggaugcugaucgaggccgagcucaagugcuucggcaacaccgccguggccaagugcaacgagaagcacgacgaggaguucugcgacaugcugcgccuguucgacuucugcaagcaggcgauccggcgccucaaggcccccgcccagauguccauccagcugaucaacaaggccgugaacgcccugaucaacgaccagcucaucaugaagaaccaccuccgggacaucauggggauccccuacugcaacuacagcaaguacugguaccugaaccacaccgucacgggccgcaccucccugccccggugcuggcuggugagcaacggguccuaccugaacgagacccacuucagcgacgacaucgagcagcaggcggacaacaugaucaccgagcuccugcagaaggaguacauggaccgccagggcaagacgccccugggccucguggaccuguucgucuucuccaccagcuucuaccugaucuccaucuuccugcaccucgugaagaucccgacccaccggcacgugaucgggaagcccugccccaagccccaccgccugaaccacaugggcaucugcagcugcgggcuguacaagcacccgggcguccccgugaaguggaagcggugaggacuaguaauaaggaaacuguaugaaugucugugggcaggaagugaagagauccuucuguaaagguuuuuggaauuaugucugcugaauaauaaacuuuuuugaaauaauaaaucugguagaaaaaugagaucuaaaaaaaaaaaaaaaaaaaaaaaaaaaaaaaaaaaaaaaaaaaaaaaaaaaaaaaaaaaaaaaaaaaaaaaaaaaaaaaaaaaaaaaaaaaaaaaaaaaa

SEQ ID NO: 30932 - RNA, 1785 nt, Artificial Sequence
  mRNA product Design b-4 (A100) comprising derived and/or modified sequence from LASV(LASV035-NIG-2009;Clade II)__AIT17588__GPCmut6 (opt1)
aggagagucccgcagucggcguccagcggcucugcuuguucgugugugugucguugcaggccuuauucaagcuuaccaugggccagaucaucaccuucuuccaggaggugccccacgucaucgaggaggugaugaacaucgugcugaucgcccucagccugcuggccauccucaaggggaucuacaacgucgcgaccugcggccuguucgggcugguguccuuccuccugcugugcggccgcagcugcuccacgaccuacaaggggguguacgagcuccagacccuggagcuggacauggccagccucaacaugugcaugccgcuguccugcacgaagaacaacagccaccacuacaucauggucggcaacgagaccggccuggagcucacccugaccaacacguccaucaucaaccacaaguucugcaaccugagcgacgcccacaagaagaaccucuacgaccacgcccugauguccaucaucagcaccuuccaccuguccauccccaacuucaaccaguacgaggccaugagcugcgacuucaacgggggcaagaucuccgugcaguacaaccucagccacgcguacgccguggacgccgccaaccacugcgggaccaucgcgaacggcguccugcagaccuucaugcggauggccuggggcggguccuacaucgcccuggacagcggcaagggguccugggacugcaucaugacgagcuaccaguaccucaucauccagaacaccaccugggaggaccacugccaguucucccgccccagccccaucggcuaccuggggcugcucagccagcggacccgcgacaucuacaucucccggcgccugcugggcacguucaccuggacccucagcgacuccgagggcaacgagacccccgggggcuacugccugacgcgguggaugcugaucgaggccgagcucaagugcuucgggaacaccgccguggcgaagugcaacgagaagcacgacgaggaguucugcgacaugcugcgccuguucgacuucugcaagcaggccauccggcgccucaaggcccccgcccagaugagcauccagcugaucaacaaggccgugaacgcgcugaucaacgaccagcucaucaugaagaaccaccuccgggacaucaugggcauccccuacugcaacuacuccaaguacugguaccugaaccacaccgucaccgggaagacgagccugccccgcugcuggcugguguccaacggcagcuaccugaacgagacccacuucuccgacgacaucgagcagcaggccgacaacaugaucaccgagcuccugcagaaggaguacaucgaccggcagggcaagaccccgcuggggcucguggaccuguucgucuucagcacguccuucuaccugaucagcaucuuccugcaccucgugaagaucccgacccaccgccacgugaucggcaagcccugccccaagccccaccggcugaaccacauggggaucugcuccugcggccuguacaagcacccggggguccccgugaaguggaagcgcugaggacuaguaauaaggaaacuguaugaaugucugugggcaggaagugaagagauccuucuguaaagguuuuuggaauuaugucugcugaauaauaaacuuuuuugaaauaauaaaucugguagaaaaaugagaucuaaaaaaaaaaaaaaaaaaaaaaaaaaaaaaaaaaaaaaaaaaaaaaaaaaaaaaaaaaaaaaaaaaaaaaaaaaaaaaaaaaaaaaaaaaaaaaaaaaaa

SEQ ID NO: 30933 - RNA, 1785 nt, Artificial Sequence
  mRNA product Design b-4 (A100) comprising derived and/or modified sequence from LASV(LASV1000-NIG-2009;Clade II)__AIT17782__GPCmut6 (opt1)
aggagagucccgcagucggcguccagcggcucugcuuguucgugugugugucguugcaggccuuauucaagcuuaccaugggccagaucaucaccuucuuccaggaggugccccacgucaucgaggaggugaugaacaucgugcugaucgcccucagccugcuggccauccucaaggggaucuacaacgucgcgaccugcggccuguucgggcugguguccuuccuccugcugugcggccgcagcugcuccacgaccuacaaggggguguacgagcuccagacccuggagcuggacauggccagccucaacaugugcaugccgcuguccugcacgaagaacaacagccaccacuacaucauggucggcaacgagaccggccuggagcucacccugaccaacacguccaucaucaaccacaaguucugcaaccugagcgacgcccacaagaagaaccucuacgaccacgcccugauguccaucaucagcaccuuccaccuguccauccccaacuucaaccaguacgaggccaugagcugcgacuucaacgggggcaagaucuccgugcaguacaaccucagccacaccuacgcgguggacgccgccaaccacugcgggaccaucgccaacggcguccugcagacguucaugcggauggcguggggcggguccuacaucgcccuggacagcggcaagggguccugggacugcaucaugaccagcuaccaguaccucaucauccagaacaccaccugggaggaccacugccaguucucccgccccagccccaucggcuaccuggggcugcucagccagcggacgcgcgacaucuacaucucccggcgccugcugggcaccuucaccuggacccucagcgacuccgagggcaacgagacgcccgggggcuacugccugacccgguggaugcugaucgaggccgagcucaagugcuucgggaacaccgccguggccaagugcaacgagaagcacgacgaggaguucugcgacaugcugcgccuguucgacuucugcaagcaggcgaucaagcggcucaagacccccgcccagaugagcauccagcugaucaacaaggccgugaacgcccugaucaacgaccagcucaucaugaagaaccaccuccgcgacaucaugggcauccccuacugcaacuacuccaaguacugguaccugaaccacacggucaccgggaagaccagccugccccggugcuggcugguguccaacggcagcuaccugaacgagacccacuucuccgacgacaucgagcagcaggccgacaacaugaucacggagcuccugcagaaggaguacaucgaccgccagggcaagaccccgcuggggcucguggaccuguucgucuucagcaccuccuucuaccugaucagcaucuuccugcaccucgugaagaucccgacccaccggcacguggucggcaagcccugccccaagccccaccgccugaaccacauggggaucugcuccugcggccuguacaagcacccgggggugcccgugaaguggaagcggugaggacuaguaauaaggaaacuguaugaaugucugugggcaggaagugaagagauccuucuguaaagguuuuuggaauuaugucugcugaauaauaaacuuuuuugaaauaauaaaucugguagaaaaaugagaucuaaaaaaaaaaaaaaaaaaaaaaaaaaaaaaaaaaaaaaaaaaaaaaaaaaaaaaaaaaaaaaaaaaaaaaaaaaaaaaaaaaaaaaaaaaaaaaaaaaaa

SEQ ID NO: 30934 - RNA, 1785 nt, Artificial Sequence
  mRNA product Design b-4 (A100) comprising derived and/or modified sequence from LASV(LASV221-NIG-2010;Clade II)__AIT17624__GPCmut6 (opt1)
aggagagucccgcagucggcguccagcggcucugcuuguucgugugugugucguugcaggccuuauucaagcuuaccaugggccagaucaucaccuucuuccaggaggugccccacgucaucgaggaggugaugaacaucgugcugaucgcccucagccugcuggccauccucaaggggaucuacaacgucgcgaccugcggccuguucgggcugguguccuuccuccugcugugcggccgcagcugcuccacgaccuacaaggggguguacgagcuccagacccuggagcuggacauggccagccucaacaugugcaugccgcuguccugcacgaagaacaacagccaccacuacaucauggucggcaacgagaccggccuggagcucacccugaccaacacguccaucaucaaccacaaguucugcaaccugagcgacgcccacaagaagaaccucuacgaccacgcccugauguccaucaucagcaccuuccaccuguccauccccaacuucaaccaguacgaggccaugagcugcgacuucaacgggggcaagaucuccgugcaguacaaccucagccacaccuacgcgaucgacgccgccaaccacugcgggaccaucgccaacggcgugcugcagacguucaugcggauggcguggggcggguccuacaucgcccuggacagcggcaagggguccugggacugcaucaugaccagcuaccaguaccucaucauccagaacaccaccugggaggaccacugccaguucucccgccccagccccaucggcuaccuggggcugcucagccagcggacgcgcgacaucuacaucucccggcgccugcugggcaccuucaccuggacccucagcgacuccgagggcaacgagacgcccgggggcuacugccugacccgguggaugcugaucgaggccgagcucaagugcuucgggaacaccgccgucgccaagugcaacgagaagcacgacgaggaguucugcgacaugcugcgccuguucgacuucugcaagcaggcgauccggcgccucaagacccccgcccagaugagcauccagcugaucaacaaggccgugaacgcccugaucaacgaccagcucaucaugaagaaccaccuccgggacaucaugggcauccccuacugcaacuacuccaaguacugguaccugaaccacacggugaccgggaagaccagccugccccgcugcuggcuggucuccaacggcagcuaccugaacgagacccacuucuccgacgacaucgagcagcaggccgacaacaugaucacggagaugcuccagaaggaguacauggaccggcagggcaagaccccgcuggggcugguggaccucuucguguucagcaccuccuucuaccugaucagcaucuuccugcaccuggucaagaucccgacccaccgccacgugaucggcaagcccugccccaagccccaccggcucaaccacauggggaucugcuccugcggccuguacaagcacccgggggugcccgucaaguggaagcgcugaggacuaguaauaaggaaacuguaugaaugucugugggcaggaagugaagagauccuucuguaaagguuuuuggaauuaugucugcugaauaauaaacuuuuuugaaauaauaaaucugguagaaaaaugagaucuaaaaaaaaaaaaaaaaaaaaaaaaaaaaaaaaaaaaaaaaaaaaaaaaaaaaaaaaaaaaaaaaaaaaaaaaaaaaaaaaaaaaaaaaaaaaaaaaaaaa

SEQ ID NO: 30935 - RNA, 1785 nt, Artificial Sequence
  mRNA product Design b-4 (A100) comprising derived and/or modified sequence from LASV(LASV237-NIG-2010;Clade II)__AIT17638__GPCmut6 (opt1)
aggagagucccgcagucggcguccagcggcucugcuuguucgugugugugucguugcaggccuuauucaagcuuaccaugggccagaucaucaccuucuuccaggaggugccccacgucaucgaggaggugaugaacaucgugcugaucgcccucagccugcuggccauccucaaggggaucuacaacgucgcgaccugcggccuguucgggcugguguccuuccuccugcugugcggccgcagcugcuccacgaccuacaaggggguguacgagcuccagacccuggagcuggacauggccagccucaacaugugcaugccgcuguccugcacgaagaacaacagccaccacuacaucauggucggcaacgagaccggccuggagcucacccugaccaacacguccaucaucaaccacaaguucugcaaccugagcgacgcccacaagaaggaccucuacgaccacgcccugauguccaucaucagcaccuuccaccuguccauccccaacuucaaccaguacgaggccaugagcugcgacuucaacgggggcaagaucuccgugcaguacaaccucagccacaccuacgcgguggacgccgccaaccacugcgggaccaucgccaacggcguccugcagacguucaugcggauggcguggggcggguccuacaucgcccuggacagcggcaagggguccugggacugcaucaugaccagcuaccaguaccucaucauccagaacaccaccugggaggaccacugccaguucucccgccccagccccaucggcuaccuggggcugcucagccagcggacgcgcgacaucuacaucucccggcgccugcugggcaccuucaccuggacccucagcgacuccgagggcaacgagacgcccgggggcuacugccugacccgguggaugcugaucgaggccgagcucaagugcuucgggaacaccgccguggccaagugcaacgagaagcacgacgaggaguucugcgacaugcugcgccuguucgacuucugcaagcaggcgauccggcgccucaagacccccgcccagaugagcauccagcugaucaacaaggccgugaacgcccugaucaacgaccagcucaucaugaagaaccaccuccgggacaucaugggcauccccuacugcaacuacuccaaguacugguaccugaaccacacggucaccgggaagaccagccugccccgcugcuggcugguguccaacggcagcuaccugaacgagacccacuucuccgacgacaucgagcagcaggccgacaacaugaucacggagcuccugcagaaggaguacauggaccggcagggcaagaccccgcuggggcucguggaccuguucgucuucagcaccuccuucuaccugaucagcaucuuccugcaccucaucaagaucccgacccaccgccacaucacgggcaagcccugccccaagccccaccggcugaaccacauggggaucugcuccugcggccuguacaagcacccgggggugcccgugaaguggaagcgcugaggacuaguaauaaggaaacuguaugaaugucugugggcaggaagugaagagauccuucuguaaagguuuuuggaauuaugucugcugaauaauaaacuuuuuugaaauaauaaaucugguagaaaaaugagaucuaaaaaaaaaaaaaaaaaaaaaaaaaaaaaaaaaaaaaaaaaaaaaaaaaaaaaaaaaaaaaaaaaaaaaaaaaaaaaaaaaaaaaaaaaaaaaaaaaaaa

SEQ ID NO: 30936 - RNA, 1785 nt, Artificial Sequence
  mRNA product Design b-4 (A100) comprising derived and/or modified sequence from LASV(LASV253-NIG-2011;Clade II)__AIT17670__GPCmut6 (opt1)
aggagagucccgcagucggcguccagcggcucugcuuguucgugugugugucguugcaggccuuauucaagcuuaccaugggccagaucaucaccuucuuccaggaggugccccacgucaucgaggaggugaugaacaucgugcugaucgcccucagccugcuggccauccucaaggggaucuacaacgucgcgaccugcggccuguucgggcugguguccuuccuccugcugugcggccgcagcugcuccacgaccuacaaggggguguacgagcuccagacccuggagcuggacauggccagccucaacaugugcaugccgcuguccugcacgaagaacaacagccaccacuacaucauggucggcaacgagaccggccuggagcucacccugaccaacacguccaucaucaaccacaaguucugcaaccugagcgacgcccacaagaagaaccucuacgaccacgcccugauguccaucaucagcaccuuccaccuguccauccccaacuucaaccaguacgaggccaugagcugcgacuucaacgggggcaagaucuccgugcaguacaaccucagccacaccuacgcgguggacgccgccaaccacugcgggaccaucgccaacggcguccugcagacguucaugcggauggcguggggcggguccuacaucgcccuggacagcggcaagggguccugggacugcaucaugaccagcuaccaguaccucaucauccagaacaccaccugggaggaccacugccaguucucccgccccagccccaucggcuaccuggggcugcucagccagcggacgcgcgacaucuacaucucccggcgccugcugggcaccuucaccuggacccucagcgacuccgagggcaacgagacgcccgggggcuacugccugacccgguggaugcugaucgaggccgagcucaagugcuucgggaacaccgccguggccaagugcaacgagaagcacgacgaggaguucugcgacaugcugcgccuguucgacuucugcaagcaggcgauccggcgccucaaggcccccgcccagaugagcauccagcugaucaacaaggccgugaacgcccugaucaacgaccagcucaucaugaagaaccaccuccgggacaucaugggcaucccguacugcaacuacuccaaguacugguaccugaaccacaccgucacggggcgcaccagccugccccggugcuggcugguguccaacggcagcuaccugaacgagacccacuucuccgacgacaucgagcagcaggcggacaacaugaucaccgagcuccugcagaaggaguacaucgaccgccagggcaagacgccccuggggcucguggaccuguucgucuucagcaccuccuucuaccugaucagcaucuuccugcaccucgugaagaucccgacccaccggcacaucaucggcaagcccugccccaagccccaccgccugaaccacauggggaucugcuccugcggccuguacaagcacccgggggugcccgucaaguggaagcggugaggacuaguaauaaggaaacuguaugaaugucugugggcaggaagugaagagauccuucuguaaagguuuuuggaauuaugucugcugaauaauaaacuuuuuugaaauaauaaaucugguagaaaaaugagaucuaaaaaaaaaaaaaaaaaaaaaaaaaaaaaaaaaaaaaaaaaaaaaaaaaaaaaaaaaaaaaaaaaaaaaaaaaaaaaaaaaaaaaaaaaaaaaaaaaaaa

SEQ ID NO: 30937 - RNA, 1785 nt, Artificial Sequence
  mRNA product Design b-4 (A100) comprising derived and/or modified sequence from LASV(LASV254-NIG-2011;Clade II)__AIT17674__GPCmut6 (opt1)
aggagagucccgcagucggcguccagcggcucugcuuguucgugugugugucguugcaggccuuauucaagcuuaccaugggccagaucaucaccuucuuccaggaggugccccacgucaucgaggaggugaugaacaucgugcugaucgcccucagccugcuggccauccucaaggggaucuacaacgucgcgaccugcggccuguucgggcugguguccuuccuccugcugugcggccgcagcugcuccacgaccuacaaggggguguacgagcuccagacccuggagcuggacaugaccaaccucaacaugugcaugccgcugagcugcaccaagaacaacucccaccacuacaucauggucggcaacgagaccggccuggagcucacccugacgaacaccagcaucaucaaccacaaguucugcaaccuguccgacgcccacaagaagaaccucuacaaccacgcccugaugagcaucaucuccaccuuccaccugagcauccccaacuucaaccaguacgaggccauguccugcgacuucaacgggggcaagaucagcgugcaguacaaccucucccacagcuacgccguggacgcggccaaccacugcgggaccaucgccaacggcguccugcagacguucaugcggauggccuggggcggguccuacaucgcgcuggacagcggcaaggggaacugggacugcaucaugaccuccuaccaguaccucaucauccagaacaccaccugggaggaccacugccaguucagccgccccucccccaucggcuaccuggggcugcucagccagcggacgcgcgacaucuacaucagccggcgccugcugggcaccuucaccuggacccucuccgacagcgagggcaacgagacgcccgggggcuacugccugacccgguggaugcugaucgaggccgagcucaagugcuucgggaacaccgccguggccaagugcaacgagaagcacgacgaggaguucugcgacaugcugcgccuguucgacuucugcaagcaggccauccggcgccucaagacccccgcgcaggccaacauccagcugaucaacaaggccgugaacgcccugaucaacgaccagcucaucaugaagaaccaccuccgggacaucaugggcauccccuacugcaacuacuccaaguacugguaccugaaccacacggucaccgggaagaccagccugccccgcugcuggcugguguccaacggcagcuaccugaacgagacccacuucuccgacgacaucgagcagcaggccgacaacaugaucacggagcuccugcagaaggaguacauggaccggcagggcaagaccccgcuggggcucguggaccuguucgucuucagcaccuccuucuaccugaucagcaucuuccugcaccucgugaagaucccgacccaccgccacgugaucggcaagcccugccccaagccccaccggcugaaccacauggggaucugcuccugcggccuguacaagcacccggggguccccgugaaguggaagcgcugaggacuaguaauaaggaaacuguaugaaugucugugggcaggaagugaagagauccuucuguaaagguuuuuggaauuaugucugcugaauaauaaacuuuuuugaaauaauaaaucugguagaaaaaugagaucuaaaaaaaaaaaaaaaaaaaaaaaaaaaaaaaaaaaaaaaaaaaaaaaaaaaaaaaaaaaaaaaaaaaaaaaaaaaaaaaaaaaaaaaaaaaaaaaaaaaa

SEQ ID NO: 30938 - RNA, 1785 nt, Artificial Sequence
  mRNA product Design b-4 (A100) comprising derived and/or modified sequence from LASV(Nig08-A19;Clade III)__ADU56618__GPCmut6 (opt1)
aggagagucccgcagucggcguccagcggcucugcuuguucgugugugugucguugcaggccuuauucaagcuuaccaugggccagaucgugaccuucuuccaggaggucccccacgugaucgaggaggugaugaacaucguccugaucgcccucagcauccuggccauccugaaggggcucuacaacaucgcgaccugcggccugaucgggcuggugacguuccuccugcuguccggccgcagcugcuccaugaccuacaaggggguguacgagcuccagacccuggagcugaacaugaacacccucaacaugugcaugccgcugagcugcaccaagaacaacucccaccacuacaucauggucggcaacgagaccggccuggagcucacccugacgaacaccagccugcuccaccacaaguucugcaaccuguccgacgcccacaagaagaaccuguacgaccacacccucaugagcaucaucuccaccuuccaccugagcauccccaacuucaaccaguacgaggccauguccugcgacuucaacgggggcaagaucacggugcaguacaaccugagccacuccuacgccaucgacgccgcgaaccacugcgggaccguggccaacggcguccuccagaccuucaugcggauggccuggggcgggagcuacaucgcccuggacuccggccgcgggaagugggacugcaucaugaccagcuaccaguaccugaucauccagaacacgaccugggaggaccacugccaguucucccggcccagccccaucggcuaccucgggcugcugucccagcgcacccgggacaucuacaucagccgccggcuccugggcaccuucacguggacccugagcgacuccgagggcaacgagacccccgggggcuacugccucacccgcuggaugcugaucgaggcggagcugaagugcuucgggaacacggccguggccaagugcaacgagaagcacgacgaggaguucugcgacaugcuccggcuguucgacuucugcaagcaggccauccgccggcugaaggcccccgcgcagaugagcauccagcucaucaacaaggccgugaacgcccugaucaacgaccagcugaucaugaagaaccaccuccgcgacaucaugggcauccccuacugcaacuacuccaaguacugguaccugaaccacaccagcaccgggcggaccucccugccccgcugcuggcucgucagcaacggcuccuaccugaacgagacgcacuucagcgacgacaucgagcagcaggccgacaacaugaucaccgagaugcugcagaaggaguaccucgaccggcagggcaagaccccgcuggggcugguggaccuguucguguucuccaccagcuucuaccucaucuccaucuuccugcaccuggucaagaucccgacgcaccgccacaucgugggcaagcccugccccaagccccaccggcucaaccacauggggaucugcagcugcggccuguacaagcagccgggggugcccguccgcuggaagcggugaggacuaguaauaaggaaacuguaugaaugucugugggcaggaagugaagagauccuucuguaaagguuuuuggaauuaugucugcugaauaauaaacuuuuuugaaauaauaaaucugguagaaaaaugagaucuaaaaaaaaaaaaaaaaaaaaaaaaaaaaaaaaaaaaaaaaaaaaaaaaaaaaaaaaaaaaaaaaaaaaaaaaaaaaaaaaaaaaaaaaaaaaaaaaaaaa

SEQ ID NO: 30939 - RNA, 1788 nt, Artificial Sequence
  mRNA product Design b-4 (A100) comprising derived and/or modified sequence from LASV(G1180-SLE-2010;Clade IV)__AIT17168__GPCmut6 (opt1)
aggagagucccgcagucggcguccagcggcucugcuuguucgugugugugucguugcaggccuuauucaagcuuaccaugggccagaucgugaccuucuuccaggaggucccccacgugaucgaggaggugaugaacaucguccugaucgcccucagcauccuggccgugcugaaggggcucuacaacuucgcgaccugcggccugguggggcugcucaccuuccugcugcucugcggccgcuccugcaccgccagccgguacaagggggucuacgagcugcagacccuggagcucaacauggagacccugaacaugugcaugccgcuguccugcaccaagaacaacagccaccacuacaucauggugggcaacgagaccggccucgagcugacccugacgaacaccuccaucaucaaccacaaguucugcaaccucagcgacgcccacaagaagaaccuguacgaccacgcccugauguccaucaucagcaccuuccaccucuccauccccaacuucaaccaguacgaggccaugagcugcgacuucaacgggggcaagaucuccgugcaguacaaccugagccacuccuacgcgggggacgccgccaaccacugcggcaccgucgccaacggggugcugcagacguucaugcgcauggcguggggcggcagcuacaucgcccucgacuccgggcacggcagcugggacugcaucaugaccuccuaccaguaccugaucauccagaacaccaccugggaggaccacugccaguucagccggcccucccccaucggguaccugggccuccugagccagcgcacgcgggacaucuacaucagccgccggcugcucggcaccuucaccuggacccuguccgacagcgaggggaaggacacgccgggcggguacugccugacccgcuggaugcucaucgaggccgagcugaagugcuucggcaacaccgccguggccaagugcaacgagaagcacgacgaggaguucugcgacaugcugcggcuguucgacuucugcaagcaggcgauccagcgccugaaggcccccgcccagauguccauccagcugaucaacaaggccgucaacgcccucaucaacgaccagcugaucaugaagaaccaccuccgggacaucauggggauccccuacugcaacuacagcaaguacugguaccucaaccacaccacgaccggcaagaccucccugcccaagugcuggcuggugagcaacggcuccuaccucaacgagacccacuucagcgacgacaucgagcagcaggcggacaacaugaucacggagaugcugcagaaggaguacauggagcgccaggggaagacgccccugggccucguggaccuguucgucuucuccaccagcuucuaccugaucuccaucuuccugcaccucgugaagaucccgacccaccggcacaucgugggcaagagcugccccaagccccaccgccugaaccacauggggaucugcuccugcgggcuguacaagcagcccggcgucccggugaaguggaagcggugaggacuaguaauaaggaaacuguaugaaugucugugggcaggaagugaagagauccuucuguaaagguuuuuggaauuaugucugcugaauaauaaacuuuuuugaaauaauaaaucugguagaaaaaugagaucuaaaaaaaaaaaaaaaaaaaaaaaaaaaaaaaaaaaaaaaaaaaaaaaaaaaaaaaaaaaaaaaaaaaaaaaaaaaaaaaaaaaaaaaaaaaaaaaaaaaa

SEQ ID NO: 30940 - RNA, 1788 nt, Artificial Sequence
  mRNA product Design b-4 (A100) comprising derived and/or modified sequence from LASV(G1442-SLE-2011;Clade IV)__AIT17180__GPCmut6 (opt1)
aggagagucccgcagucggcguccagcggcucugcuuguucgugugugugucguugcaggccuuauucaagcuuaccaugggccagaucgugaccuucuuccaggaggucccccacgugaucgaggaggugaugaacaucguccugaucgcccucagcauccuggccgugcugaaggggcucuacaacguggcgaccugcggccugaucgggcuggucacguuccuccugcugugcggccgcuccugcaccaccacccucuacaaggggguguacgagcugcagacgcuggagcucaacauggagacccugaacaugugcaugccgcugagcugcaccaagaacaacucccaccacuacauccgggugggcaacgagacgggccucgagcugacccugaccaacaccagcaucaucaaccacaaguucugcaaccucuccgacgcccacaagaagaaccuguacgaccacgcccugaugagcaucaucuccacguuccaccucagcauccccaacuucaaccaguacgaggccauguccugcgacuucaacgggggcaagaucagcguccaguacaaccugucccacagcuacgccggggacgcggccaaccacugcggcaccguggccaacggggugcugcagaccuucaugcgcauggccuggggcggcuccuacaucgcgcucgacagcgggcggggcaacugggacugcaucaugaccuccuaccaguaccugaucauccagaacacgaccugggacgaccacugccaguucagccgccccucccccaucggguaccugggccuccugagccagcggacccgcgacgucuacaucucccggcgccugcucggcaccuucacguggacccugagcgacagcgaggggaaggacaccccgggcggguacugccugacccgguggaugcucaucgaggccgagcugaagugcuucggcaacacggccguggccaagugcaacgagaagcacgacgaggaguucugcgacaugcugcgccucuucgacuucugcaagcaggccauccagcggcugaaggcgcccgcccagauguccauccagcugaucaacaaggccgugaacgcccucaucaacgaccagcugaucaugaagaaccaccuccgcgacaucauggggauccccuacugcaacuacagcaaguacugguaccugaacaacaccgccaccggcaagaccucccugcccaagugcuggcugaucagcaacggcuccuaccucaacgagacgcacuucagcgacgacaucgagcaggaggcggacaacaugaucaccgagaugcugcagaaggaguacauggagcggcaggggaagacgccccugggccucgucgaccuguucguguucuccaccagcuucuaccugaucuccaucuuccugcaccucgugaagaucccgacccaccgccacaucgucggcaagagcugccccaagccccaccggcugaaccacauggggaucugcuccugcgggcuguacaagcagcccggcgugccggugcgcuggaagcggugaggacuaguaauaaggaaacuguaugaaugucugugggcaggaagugaagagauccuucuguaaagguuuuuggaauuaugucugcugaauaauaaacuuuuuugaaauaauaaaucugguagaaaaaugagaucuaaaaaaaaaaaaaaaaaaaaaaaaaaaaaaaaaaaaaaaaaaaaaaaaaaaaaaaaaaaaaaaaaaaaaaaaaaaaaaaaaaaaaaaaaaaaaaaaaaaa

SEQ ID NO: 30941 - RNA, 1788 nt, Artificial Sequence
  mRNA product Design b-4 (A100) comprising derived and/or modified sequence from LASV(G3010-SLE-2013;Clade IV)__AIT17344__GPCmut6 (opt1)
aggagagucccgcagucggcguccagcggcucugcuuguucgugugugugucguugcaggccuuauucaagcuuaccaugggccagaucgugaccuucuuccaggaggucccccacgugaucgaggaggugaugaacaucguccugaucgcccucagcauccuggccgugcugaaggggcucuacaacuucgcgaccugcggccugguggggcuggucacguuccuccugcugugcggccgcuccugcaccaccagccucuacaaggggguguacgagcugcagacccuggagcucaacauggagacgcugaacaugugcaugccgcuguccugcaccaagaacaacagccaccacuacaucauggugggcaacgagaccggccucgagcugacgcugaccaacaccuccaucaucaaccacaaguucugcaaccucagcgacgcccacaagaagaaccuguacaaccacgcccugauguccaucaucagcaccuuccaccucuccauccccaacuucaaccaguacgaggccaugagcugcgacuucaacgggggcaagaucuccguccaguacaaccugagccacuccuacgccggggacgcggccagccacugcggcacgguggccaacggggugcugcagaccuucaugcggauggccuggggcggcuccuacaucgcgcucgacagcggguacggcaagugggacugcaucaugaccuccuaccaguaccugaucauccagaacaccacgugggaggaccacugccaguucagccgccccucccccaucggguaccugggccuccugagccagcggacccgcgacaucuacaucagccggcgccugcucggcaccuucaccuggacgcuguccgacagcgaggggaaggacaccccgggcggguacugccugacccgguggaugcucaucgaggccgagcugaagugcuucggcaacaccgccgucgccaagugcaacgagaagcacgacgaggaguucugcgacaugcugcgccucuucgacuucugcaagcaggccauccagcggcugaagacgcccgcgcagauguccauccagcugaucaacaaggccgugaacgcccucaucaacgaccagcugaucaugaagaaccaccuccgcgacaucauggggauccccuacugcaacuacagcaaguacugguaccugaaccacaccaccaccggcaagacgucccugcccaagugcuggcuggugagcaacggcuccuaccucaacgagacccacuucagcgacgacaucgagcagcaggccgacaacaugaucaccgagaugcugcagaaggaguacauggagcggcaggggaagacgccccugggccucgucgaccuguucguguucuccaccagcuucuaccugaucuccaucuuccugcaccucgugaagaucccgacccaccgccacaucgucggcaagagcugccccaagccccaccggcugaaccacauggggaucugcuccugcgggcuguacaagcagcccggcgugccggugcgcuggaagcggugaggacuaguaauaaggaaacuguaugaaugucugugggcaggaagugaagagauccuucuguaaagguuuuuggaauuaugucugcugaauaauaaacuuuuuugaaauaauaaaucugguagaaaaaugagaucuaaaaaaaaaaaaaaaaaaaaaaaaaaaaaaaaaaaaaaaaaaaaaaaaaaaaaaaaaaaaaaaaaaaaaaaaaaaaaaaaaaaaaaaaaaaaaaaaaaaa

SEQ ID NO: 30942 - RNA, 1788 nt, Artificial Sequence
  mRNA product Design b-4 (A100) comprising derived and/or modified sequence from LASV(G502-SLE-2009;Clade IV)__AIT17126__GPCmut6 (opt1)
aggagagucccgcagucggcguccagcggcucugcuuguucgugugugugucguugcaggccuuauucaagcuuaccaugggccagaucgugaccuucuuccaggaggucccccacgugaucgaggaggugaugaacaucguccugaucgcccucagcauccuggccgugcugaaggggcucuacaacuucgcgaccugcggccugguggggcugcucacguuccugcugcucugcggccgcuccugcaccaccgggcuguacaagggcgucuacgagcugcagacccucgagcugaacauggagacgcugaacaugugcaugccgcucagcugcaccaagaacaacucccaccacuacaucauggugggcaacgagaccgggcuggagcugacgcucaccaacaccagcaucaucaaccacaaguucugcaaccuguccgacgcccacaagaagaaccuguacgaccacgcccucaugagcaucaucuccaccuuccaccugagcauccccaacuucaaccaguacgaggccauguccugcgacuucaacggcgggaagaucagcgugcaguacaaccugucccacagcuacgccggcgacgcggccgaccacugcgggacggucgccaacggcgugcuccagaccuucaugcggauggccuggggcggguccuacaucgcgcuggacagcggccgcgggcggugggacugcaucaugaccuccuaccaguaccugaucauccagaacaccacgugggaggaccacugccaguucagccgccccucccccaucggcuaccucggccugcugagccagcggacccgcgacaucuacaucucccggcgccuccuggggaccuucaccuggacgcugagcgacagcgagggcaaggacacccccgggggcuacugccucacccgguggaugcugaucgaggccgagcugaagugcuucgggaacaccgccguggccaagugcaacgagaagcacgacgaggaguucugcgacaugcuccgccuguucgacuucugcaagcaggccauccagcggcugaaggcgcccgcccagauguccauccagcucaucaacaaggccgucaacgcccugaucaacgaccagcuggugaugaagaaccaccuccgcgacaucaugggcauccccuacugcaacuacagccgguacugguaccugaaccacacgaccaccggccgcaccucccugcccaagugcuggcucgugagcaacggguccuaccugaacgagacgcacuucagcgacgacaucgagcagcaggccgacaacaugaucaccgagaugcugcagaaggaguacauggagcggcagggcaagaccccgcucgggcuggucgaccuguucguguucuccaccagcuucuaccugaucuccaucuuccuccaccuggugaagaucccgacgcaccgccacaucgucggcaagagcugccccaagccccaccggcugaaccacauggggaucugcuccugcggccucuacaagcagcccggcgugccggugaaguggaagcgcugaggacuaguaauaaggaaacuguaugaaugucugugggcaggaagugaagagauccuucuguaaagguuuuuggaauuaugucugcugaauaauaaacuuuuuugaaauaauaaaucugguagaaaaaugagaucuaaaaaaaaaaaaaaaaaaaaaaaaaaaaaaaaaaaaaaaaaaaaaaaaaaaaaaaaaaaaaaaaaaaaaaaaaaaaaaaaaaaaaaaaaaaaaaaaaaaa

SEQ ID NO: 30943 - RNA, 1788 nt, Artificial Sequence
  mRNA product Design b-4 (A100) comprising derived and/or modified sequence from LASV(G733-SLE-2010;Clade IV)__AIT17154__GPCmut6 (opt1)
aggagagucccgcagucggcguccagcggcucugcuuguucgugugugugucguugcaggccuuauucaagcuuaccaugggccagaucgugaccuucuuccaggaggucccccacgugaucgaggaggugaugaacaucguccugaucgcccucagcauccuggccgugcugaaggggcucuacaacuucgcgaccugcggcaucguggggcuggucuccuuccugcuccugugcggccgcagcugcacgaccucccuguacaaggggguguacgagcuccagacccuggagcugaacauggagacccucaacaugugcaugccgcugagcugcaccaagaacaacucccaccacuacaucauggugggcaacgagaccggccuggagcucacccugacgaacaccagcaucaucaaccacaaguucugcaaccuguccgacgcccacaagaagaaccucuacgaccacgcccugaugagcaucaucuccaccuuccaccugagcauccccaacuucaaccaguacgaggccauguccugcgacuucaacgggggcaagaucagcguccaguacaaccucucccacagcuacgccggggacgcggccaaccacugcggcaccaucgccaacggggugcugcagacguucaugcggauggccuggggcggcuccuacaucgcgcuggacagcgggcgcgaccggugggacugcaucaugaccuccuaccaguaccucaucauccagaacaccaccugggaggaccacugccaguucagccgccccucccccaucggcuaccuggggcugcucagccagcggacgcgcgacaucuacaucagccggcgccugcugggcaccuucaccuggacccucuccgacagcgagggcaaggacacgcccgggggcuacugccugacccgguggaugcugaucgaggccgagcucaagugcuucgggaacaccgccguggccaagugcaacgagaagcacgacgaggaguucugcgacaugcugcgccuguucgacuucugcaagcaggccauccagcggcucaaggcgcccgcccagauguccauccagcugaucaacaaggccgucaacgcccugaucaacgaccagcucaucaugaagaaccaccuccgcgacaucaugggcauccccuacugcaacuacagcaaguacugguaccugaaccacaccacgaccgggaagaccucccugcccaagugcuggcuggugagcaacggcuccuaccugaacgagacccacuucagcgacgacaucgagcagcaggccgacaacaugaucacggagaugcuccagaaggaguacauggagcggcagggcaagaccccgcuggggcugguggaccucuucgucuucuccaccagcuucuaccugaucuccaucuuccugcaccuggugaagaucccgacccaccgccacguggucggcaagagcugccccaagccccaccggcucaaccacauggggaucugcuccugcggccuguacgggcagcccggcgugccggugaaguggaagcgcugaggacuaguaauaaggaaacuguaugaaugucugugggcaggaagugaagagauccuucuguaaagguuuuuggaauuaugucugcugaauaauaaacuuuuuugaaauaauaaaucugguagaaaaaugagaucuaaaaaaaaaaaaaaaaaaaaaaaaaaaaaaaaaaaaaaaaaaaaaaaaaaaaaaaaaaaaaaaaaaaaaaaaaaaaaaaaaaaaaaaaaaaaaaaaaaaa

SEQ ID NO: 30944 - RNA, 1788 nt, Artificial Sequence
  mRNA product Design b-4 (A100) comprising derived and/or modified sequence from MOPV/LASV reassortant(IGS-1;Clade IV)__AFY05576__GPCmut6 (opt1)
aggagagucccgcagucggcguccagcggcucugcuuguucgugugugugucguugcaggccuuauucaagcuuaccaugggccagaucgugaccuucuuccaggaggucccccacgugaucgaggaggugaugaacaucguccugaucgcccucagcgugcuggccgugcugaaggggcucuacaacuucgcgaccugcggccuggucgggcuggugacguuccuccugcugugcggccgcuccugcaccaccagccucuacaaggggguguacgagcugcagacccuggagcucaacauggagacgcugaacaugugcaugccgcuguccugcaccaagaacaacagccaccacuacaucauggucggcaacgagaccggccucgagcugacgcugaccaacaccuccaucaucaaccacaaguucugcaaccucagcgacgcccacaagaagaaccuguacgaccacgcccugauguccaucaucagcaccuuccaccucuccauccccaacuucaaccaguacgaggccaugagcugcgacuucaacgggggcaagaucuccgugcaguacaaccugagccacuccuacgccggggacgcggccaaccacugcggcacgguggccaacgggguccugcagaccuucaugcggauggccuggggcggcagcuacaucgcgcucgacuccgggcgcggcaacugggacugcaucaugaccagcuaccaguaccugaucauccagaacaccacgugggaggaccacugccaguucucccggcccagccccaucggguaccugggccuccugucccagcgcacccgggacaucuacaucagccgccggcugcucggcaccuucaccuggacgcugagcgacuccgagggggaggacaccccgggcggguacugccugacccgcuggaugcucaucgaggccgagcugaagugcuucggcaacaccgccguggccaagugcaacgagaagcacgacgaggaguucugcgacaugcugcggcuguucgacuucugcaagcaggccauccagcgccugaaggcgcccgcccagaugagcauccagcugaucaacaaggccgugaacgcccucaucaacgaccagcugaucaugaagaaccaccuccgggacaucauggggauccccuacugcaacuacuccaaguacugguaccucaaccacacgaccaccggccgcaccagccugcccaagugcuggcuggucuccaacggcagcuaccucaacgagacgcacuucuccgacgacaucgagcagcaggccgacaacaugaucaccgagaugcugcagaaggaguacauggagcggcaggggaagacgccccugggccucguggaccuguucguguucagcaccuccuucuaccugaucagcaucuuccugcaccucgucaagaucccgacccaccgccacaucguggggaaguccugccccaagccccaccggcugaaccacaugggcaucugcagcugcgggcuguacaagcagcccggcgugccggucaaguggaagcgcugaggacuaguaauaaggaaacuguaugaaugucugugggcaggaagugaagagauccuucuguaaagguuuuuggaauuaugucugcugaauaauaaacuuuuuugaaauaauaaaucugguagaaaaaugagaucuaaaaaaaaaaaaaaaaaaaaaaaaaaaaaaaaaaaaaaaaaaaaaaaaaaaaaaaaaaaaaaaaaaaaaaaaaaaaaaaaaaaaaaaaaaaaaaaaaaaa

SEQ ID NO: 30945 - RNA, 1788 nt, Artificial Sequence
  mRNA product Design b-4 (A100) comprising derived and/or modified sequence from LASV(LM765-SLE-2012;Clade IV)__AIT17814__GPCmut6 (opt1)
aggagagucccgcagucggcguccagcggcucugcuuguucgugugugugucguugcaggccuuauucaagcuuaccaugggccagaucgugaccuucuuccaggaggucccccacgugaucgaggaggugaugaacaucguccugaucgcccucagcauccuggccgugcugaaggggcucuacaacuucgcgaccugcggccugguggggcuggucacguuccuccugcugugcggccgcuccugcaccaccagccucuacaaggggguguacgagcugcagacccuggagcucaacauggagacgcugaacaugugcaugccgcuguccugcaccaagaacaacagccaccacuacaucauggugggcaacgagaccggccucgagcugacgcugaccaacaccuccaucaucgaccacaaguucugcaaccucagcgacgcccaccggaagaaccuguacgaccacgcccugauguccaucaucagcaccuuccaccucuccauccccaacuucaaccaguacgaggccaugagcugcgacuucaacgggggcaagaucuccguccaguacaaccugagccacuccuacgccaaggacgcggccgaccacugcgggacgguggccaacggcgugcugcagaccuucaugcgcauggccuggggcgggagcuacaucgcgcucgacuccggccgggggcgcugggacugcaucaugaccagcuaccaguaccugaucauccagaacaccacgugggaggaccacugccaguucucccggcccagccccaucggcuaccuggggcuccugucccagcgcacccgggacaucuacaucagccgccggcugcucggcaccuucaccuggacgcugagcgacuccgagggcaaggacacccccgggggcuacugccugacccgcuggaugcucaucgaggccgagcugaagugcuucgggaacaccgccgucgccaagugcaacgagaagcacgacgaggaguucugcgacaugcugcggcuguucgacuucugcaagcaggccauccagcgccugaaggcgcccgcccagaugagcauccagcugaucaacaaggccgugaacgcccucaucaacgaccagcugaucaugaagaaccaccuccgggacaucaugggcauccccuacugcaacuacuccaaguacugguaccucaaccacacgaccaccgggaagaccagccugcccaagugcuggcugguguccaacggcagcuaccucaacgagacgcacuucuccgacgacaucgagcagcaggccgacaacaugaucaccgagaugcugcagaaggaguacauggagcgccagggcaagaccccgcuggggcucgucgaccuguucguguucagcaccuccuucuaccugaucagcaucuuccugcaccucgugaagaucccgacgcaccggcacaucgucggcaagcccugccccaagccccaccgccugaaccacauggggaucugcuccugcggccuguacaagcagccgggggugcccgugaaguggaagcggugaggacuaguaauaaggaaacuguaugaaugucugugggcaggaagugaagagauccuucuguaaagguuuuuggaauuaugucugcugaauaauaaacuuuuuugaaauaauaaaucugguagaaaaaugagaucuaaaaaaaaaaaaaaaaaaaaaaaaaaaaaaaaaaaaaaaaaaaaaaaaaaaaaaaaaaaaaaaaaaaaaaaaaaaaaaaaaaaaaaaaaaaaaaaaaaaa

SEQ ID NO: 30946 - RNA, 1788 nt, Artificial Sequence
  mRNA product Design b-4 (A100) comprising derived and/or modified sequence from LASV(LM776-SLE-2012;Clade IV)__AIT17824__GPCmut6 (opt1)
aggagagucccgcagucggcguccagcggcucugcuuguucgugugugugucguugcaggccuuauucaagcuuaccaugggccagaucgugaccuucuuccaggaggucccccacgugaucgaggaggugaugaacaucguccugaucgcccucagcauccuggccgugcugaaggggcucuacaacuucgcgaccugcggccugguggggcuggucacguuccuccugcugugcggccgcuccugcaccaccagcguguacaaggggguguacgagcuccagacccuggagcugaacauggagacgcucaacaugugcaugccgcuguccugcaccaagaacaacagccaccacuacaucauggucggcaacgagaccggccuggagcucacgcugaccaacaccuccaucaucaaccacaaguucugcaaccugagcgacgcccacaagaagaaccucuacgaccacgcccugauguccaucaucagcaccuuccaccuguccauccccaacuucaaccaguacgaggccaugagcugcgacuucaacgggggcaagaucuccgugcaguacaaccucagccacuccuacgccggggacgcggccaaccacugcggcacgguggccaacgggguccugcagaccuucaugcggauggccuggggcggcagcuacaucgcgcuggacuccgggcacggcaagugggacugcaucaugaccagcuaccaguaccucaucauccagaacaccacgugggaggaccacugccaguucucccgccccagccccaucggguaccugggccugcucucccagcggacccgcgacaucuacaucagccggcgccugcugggcaccuucaccuggacgcucagcgacuccgaggggaaggacaccccgggcggguacugccugacccgguggaugcugaucgaggccgagcucaagugcuucggcaacaccgccguggccaagugcaacgagaagcacgacgaggaguucugcgacaugcugcgccuguucgacuucugcaagcaggccauccagcggcucaaggcgcccgcccagaugagcauccagcugaucaacaaggccgugaacgcccugaucaacgaccagcucaucaugaagaaccaccuccgcgacaucauggggauccccuacugcaacuacuccaaguacugguaccugaaccacacgaccaccggcaagaccagccugcccaagugcuggcuggucuccaacggcagcuaccugaacgagacgcacuucuccgacgacaucgagcagcaggccgacaacaugaucaccgagaugcuccagaaggaguacauggagcggcaggggaagacgccccugggccugguggaccucuucguguucagcaccuccuucuaccugaucagcaucuuccugcaccuggucaagaucccgacccaccgccacaucguggggaaguccugccccaagccccaccggcucaaccacaugggcaucugcagcugcgggcuguacaagcagcccggcgugccgguccgcuggaagcggugaggacuaguaauaaggaaacuguaugaaugucugugggcaggaagugaagagauccuucuguaaagguuuuuggaauuaugucugcugaauaauaaacuuuuuugaaauaauaaaucugguagaaaaaugagaucuaaaaaaaaaaaaaaaaaaaaaaaaaaaaaaaaaaaaaaaaaaaaaaaaaaaaaaaaaaaaaaaaaaaaaaaaaaaaaaaaaaaaaaaaaaaaaaaaaaaa

SEQ ID NO: 30947 - RNA, 1788 nt, Artificial Sequence
  mRNA product Design b-4 (A100) comprising derived and/or modified sequence from LASV(Mad39;Clade IV)__ANH09722__GPCmut6 (opt1)
aggagagucccgcagucggcguccagcggcucugcuuguucgugugugugucguugcaggccuuauucaagcuuaccaugggccagaucgugaccuucuuccaggaggucccccacgugaucgaggaggugaugaacaucguccugaucgcccucagcauccuggccgugcugaaggggcucuacaacguggcgaccugcggccugaucgggcuggucacguuccuccugcugugcggccgcuccugcaccaccacccucuacaaggggguguacgagcugcaggcccuggagcucaacauggagacgcugaacaugugcaugccgcugagcugcaccaagaacaacucccaccacuacauccgggugggcaacgagaccggccucgagcugacgcugaccaacaccagccucaucaaccacaaguucugcaaccuguccgacgcccacaagaagaaccuguacgaccacgcccucaugagcaucaucuccaccuuccaccugagcauccccaacuucaaccaguacgaggccauguccugcgacuucaacgacgggaagaucagcguccaguacaaccugucccacacguacgcgggcgacaccgccaaccacugcgggaccguggccaacggcgugcuccagaccuucaugcgcauggccuggggcgggagcuacaucgcgcuggacuccggccgcgggggcugggacugcaucaugacgagcuaccaguaccugaucauccagaacaccaccugggaggaccacugccaguucucccggcccagccccaucggguaccucggccugcugucccagcggacccgcgacaucuacaucagccggcgccuccugggcacguucaccuggacccuguccgacagcgaggggaaggacaccccgggcggguacugccucacgcgguggaugcugaucgaggccgagcugaagugcuucggcaacaccgccgucgccaagugcaacgagaagcacgacgaggaguucugcgacaugcuccgccuguucgacuucugcaagcaggccauccagcggcugaaggcgcccgcccagaugagcauccagcucaucaacaaggccgugaacgcccugaucaacgaccagcugaucaugaagaaccaccuccgcgacaucauggggauccccuacugcaacuacuccaaguacugguaccugaaccacaccgugaccggcaagacgagccugcccaagugcuggcucgucuccaacggcagcuaccugaacgagacccacuucuccgacgacaucgagcagcaggccgacaacaugaucaccgagaugcugcagaaggaguacauggagcggcaggggaagacgccccucggccugguggaccuguucguguucagcaccuccuucuaccugaucagcaucuuccuccaccuggucaagaucccgacccaccgccacgugguggggaagcccugccccaagccccaccggcugaaccacaugggcaucugcuccugcggguucuacaagcagccgggcguccccgugcgcuggaagcggugaggacuaguaauaaggaaacuguaugaaugucugugggcaggaagugaagagauccuucuguaaagguuuuuggaauuaugucugcugaauaauaaacuuuuuugaaauaauaaaucugguagaaaaaugagaucuaaaaaaaaaaaaaaaaaaaaaaaaaaaaaaaaaaaaaaaaaaaaaaaaaaaaaaaaaaaaaaaaaaaaaaaaaaaaaaaaaaaaaaaaaaaaaaaaaaaa

SEQ ID NO: 30948 - RNA, 1788 nt, Artificial Sequence
  mRNA product Design b-4 (A100) comprising derived and/or modified sequence from LASV(Z0947-SLE-2011;Clade IV)__AIT17840__GPCmut6 (opt1)
aggagagucccgcagucggcguccagcggcucugcuuguucgugugugugucguugcaggccuuauucaagcuuaccaugggccagaucgugaccuucuuccaggaggucccccacgugaucgaggaggugaugaacaucguccugaucgcccucagcauccuggccgugcugaaggggcucuacaacuucgcgaccugcggccugguggggcuggucacguuccuccugcugugcggccgcuccugcaccaucagccucuacaaggggguguacgagcugcagacccuggagcucaacauggagacccugaacaugugcaugccgcuguccugcaccaagaacaacagccaccacuacaucauggugggcaacgagaccggccucgagcugacccugacgaacaccuccaucaucaaccacaaguucugcaaccucagcgacgcccacaagaagaaccuguacgaccacgcccugauguccaucaucagcaccuuccaccucuccauccccaacuucaaccaguacgaggccaugagcugcgacuucaacgggggcaagaucuccguccaguacaaccugagccacuccuacgccggggacgcggccaaccacugcggcaccguggccaacggggugcugcagacguucaugcggauggccuggggcggcagcuacaucgcgcucgacuccgggcgcgaccggugggacugcaucaugaccagcuaccaguaccugaucauccagaacaccaccugggaggaccacugccaguucucccgccccagccccaucggcuaccuggggcuccugucccagcggacgcgcgacaucuacaucagccggcgccugcucggcaccuucaccuggacccugagcgacuccgagggcaaggacacgcccgggggcuacugccugacccgguggaugcucaucgaggccgagcugaagugcuucgggaacaccgccgucgccaagugcaacgagaagcacgacgaggaguucugcgacaugcugcgccucuucgacuucugcaagcaggccauccagcggcugaaggcgcccgcccagaugagcauccagcugaucaacaaggccgugaacgcccucaucaacgaccagcugaucaugaagaaccaccuccgcgacaucaugggcauccccuacugcaacuacuccaaguacugguaccugaaccacaccacgaccgggaagaccagccugcccaagugcuggcugguguccaacggcagcuaccucaacgagacccacuucuccgacgacaucgagcagcaggccgacaacaugaucacggagaugcugcagaaggaguacauggagcggcagggcaagaccccgcuggggcucgucgaccuguucguguucagcaccuccuucuaccugaucagcaucuuccugcaccucgugaagaucccgacccaccgccacaucgucggcaagcccugccccaagccccaccggcugaaccacauggggaucugcuccugcggccuguacaagcagccgggggugcccgugaaguggaagcgcugaggacuaguaauaaggaaacuguaugaaugucugugggcaggaagugaagagauccuucuguaaagguuuuuggaauuaugucugcugaauaauaaacuuuuuugaaauaauaaaucugguagaaaaaugagaucuaaaaaaaaaaaaaaaaaaaaaaaaaaaaaaaaaaaaaaaaaaaaaaaaaaaaaaaaaaaaaaaaaaaaaaaaaaaaaaaaaaaaaaaaaaaaaaaaaaaa

SEQ ID NO: 30949 - RNA, 1788 nt, Artificial Sequence
  mRNA product Design b-4 (A100) comprising derived and/or modified sequence from LASV(Josiah;Clade IV)__NP_694870__GPCmut6 (opt1)
aggagagucccgcagucggcguccagcggcucugcuuguucgugugugugucguugcaggccuuauucaagcuuaccaugggccagaucgugaccuucuuccaggaggucccccacgugaucgaggaggugaugaacaucguccugaucgcccucagcgugcuggccgugcugaaggggcucuacaacuucgcgaccugcggccuggucgggcuggugacguuccuccugcugugcggccgcuccugcaccaccagccucuacaaggggguguacgagcugcagacccuggagcucaacauggagacgcugaacaugugcaugccgcuguccugcaccaagaacaacagccaccacuacaucauggucggcaacgagaccggccucgagcugacccugacgaacaccuccaucaucaaccacaaguucugcaaccucagcgacgcccacaagaagaaccuguacgaccacgcccugauguccaucaucagcaccuuccaccucuccauccccaacuucaaccaguacgaggccaugagcugcgacuucaacgggggcaagaucuccgugcaguacaaccugagccacuccuacgccggggacgcggccaaccacugcggcaccguggccaacgggguccugcagacguucaugcggauggccuggggcggcagcuacaucgcgcucgacuccgggcgcggcaacugggacugcaucaugaccagcuaccaguaccugaucauccagaacaccaccugggaggaccacugccaguucucccggcccagccccaucggguaccugggccuccugucccagcgcacgcgggacaucuacaucagccgccggcugcucggcaccuucaccuggacccugagcgacuccgaggggaaggacacgccgggcggguacugccugacccgcuggaugcucaucgaggccgagcugaagugcuucggcaacaccgccguggccaagugcaacgagaagcacgacgaggaguucugcgacaugcugcggcuguucgacuucugcaagcaggccauccagcgccugaaggcgcccgcccagaugagcauccagcugaucaacaaggccgugaacgcccucaucaacgaccagcugaucaugaagaaccaccuccgggacaucauggggauccccuacugcaacuacuccaaguacugguaccucaaccacaccacgaccggccgcaccagccugcccaagugcuggcuggucuccaacggcagcuaccucaacgagacccacuucuccgacgacaucgagcagcaggccgacaacaugaucacggagaugcugcagaaggaguacauggagcggcaggggaagaccccgcugggccugguggaccucuucguguucagcaccuccuucuaccugaucagcaucuuccugcaccucgucaagauccccacccaccgccacaucguggggaaguccugccccaagccccaccggcugaaccacaugggcaucugcagcugcgggcuguacaagcagccgggcgugcccgucaaguggaagcgcugaggacuaguaauaaggaaacuguaugaaugucugugggcaggaagugaagagauccuucuguaaagguuuuuggaauuaugucugcugaauaauaaacuuuuuugaaauaauaaaucugguagaaaaaugagaucuaaaaaaaaaaaaaaaaaaaaaaaaaaaaaaaaaaaaaaaaaaaaaaaaaaaaaaaaaaaaaaaaaaaaaaaaaaaaaaaaaaaaaaaaaaaaaaaaaaaa

SEQ ID NO: 30950 - RNA, 1785 nt, Artificial Sequence
  mRNA product Design b-4 (A100) comprising derived and/or modified sequence from LASV(LP;Clade I)__AAF86701__GPCmut6 (opt1)
aggagagucccgcagucggcguccagcggcucugcuuguucgugugugugucguugcaggccuuauucaagcuuaccaugggccagaucaucaccuucuuccaggaggugccccacgucaucgaggaggugaugaacaucgugcugaucgcccucagccugcuggccauccucaaggggcuguacaacaucgcgaccugcggcaucaucgggcuggucgccuuccucuuccugugcggcaaguccugcagccugacgcucaagggcggguacgagcugcagacccuggagcucaacauggagacccugaacaugugcaugccgcuguccugcaccaagaacagcucccaccacuacauccgcgugggcaacgagacggggcucgagcugacccugaccaacaccagcaucaucaaccacaaguucugcaaccucuccgacgcccacaagaagaaccuguacgaccacgcccugaugagcaucaucuccacguuccaccucagcauccccaacuucaaccaguacgaggccauguccugcgacuucaacggcgggaagaucagcgugcaguacaaccugucccacagcuacgcgggcgacgccgccgagcacugcgggaccgucgccaacggcgugcugcagaccuucaugcggauggcguggggcgggcgcuacaucgcccucgacuccggcaaggggaacugggacugcaucaugaccagcuaccaguaccugaucauccagaacacgaccugggaggaccacugccaguucucccggcccagccccaucggcuaccugggccuccugucccagcgcacccgggacaucuacaucagccgccggcugcucgggaccuucacguggacccugagcgacuccgagggcaacgagacccccgggggcuacugccugacccgcuggaugcucaucgaggccgagcugaagugcuucgggaacacggccguggccaagugcaacgagaagcacgacgaggaguucugcgacaugcugcggcuguucgacuucugcaagcaggcgauccgccggcugaaggccccggcccagaugagcauccagcugaucaacaaggccgucaacgcccucaucaacgaccagcugaucaugaagaaccaccuccgcgacaucaugggcauccccuacugcaacuacuccaaguacugguaccucaaccacaccagcuccggccggaccagccugcccaagugcuggcugaucuccaacgggagcuaccucaacgagacccaguucuccgacgacaucgagcagcaggcggacaacaugaucacggagaugcugcagaaggaguacaucgagcgccagggcaagaccccgcuggggcugguggacaucuucaucuucagcaccuccuucuaccucaucagcaucuuccugcaccugaucaagauccccacccaccggcacaucgugggcaagcccugccccaagccgcaccgccucaaccacaugggggucugcuccugcggccuguacaagcaccccggcgugcccacgaaguggaagcggugaggacuaguaauaaggaaacuguaugaaugucugugggcaggaagugaagagauccuucuguaaagguuuuuggaauuaugucugcugaauaauaaacuuuuuugaaauaauaaaucugguagaaaaaugagaucuaaaaaaaaaaaaaaaaaaaaaaaaaaaaaaaaaaaaaaaaaaaaaaaaaaaaaaaaaaaaaaaaaaaaaaaaaaaaaaaaaaaaaaaaaaaaaaaaaaaa

SEQ ID NO: 30951 - RNA, 1785 nt, Artificial Sequence
  mRNA product Design b-4 (A100) comprising derived and/or modified sequence from LASV(803213;Clade II)__AAF86703__GPCmut6 (opt1)
aggagagucccgcagucggcguccagcggcucugcuuguucgugugugugucguugcaggccuuauucaagcuuaccaugggccagaucaucaccuucuuccaggaggugccccacgucaucgaggaggugaugaacaucgugcugaucgcccucagccugcuggccauccucaaggggaucuacaacgucgcgaccugcggccuguucgggcugaucuccuuccuccugcugugcggccgcagcugcuccgugacguacaaggggguguacgagcuccagacccuggagcugaacauggccaaccucaacaugugcaugccgcugagcugcaccaagaacaacucccaccacuacaucauggucggcaacgagaccggccuggagcucacgcugaccaacaccagcaucaucaaccacaaguucugcaaccuguccgacgcccacaagaagaaccucuacgaccacgcccugaugagcaucaucuccaccuuccaccugagcauccccaacuucaaccaguacgaggccauguccugcgacuucaacgggggcaagaucagcgugcaguacaaccucucccacagcuucgcgguggacgccgccaaccacugcgggacgaucgccaacggcguccugcagaccuucaugcggauggcguggggcggguccuacaucgcccuggacagcggcaaggggaacugggacugcaucaugaccuccuaccaguaccucaucauccagaacaccacgugggaggaccacugccaguucagccgccccucccccaucggcuaccuggggcugcucagccagcggacccgcgacaucuacaucagccggcgccugcugggcaccuucaccuggacgcucuccgacagcgagggcaacgaggcccccgggggcuacugccugacccgguggaugcugaucgaggccgagcucaagugcuucgggaacaccgccguggcgaagugcaacgagaagcacgacgaggaguucugcgacaugcugcgccuguucgacuucugcaagcaggccaucaagcggcucaagaccccggcccagauguccauccagcugaucaacaaggccgugaacgcccugaucaacgaccagcucaucaugaagaaccaccuccgcgacaucaugggcauccccuacugcaacuacagccgguacugguaccugaaccacacggucaccgggaagaccucccugccccgcugcuggcuggugagcaacggcuccuaccugaacgagacccacuucagcgacgacaucgagcagcaggcggacaacaugaucacggagaugcuccagaaggaguacauggaccggcagggcaagaccccgcuggggcugguggaccuguucgucuucuccaccagcuucuaccucaucuccaucuuccugcaccuggugaagauccccacccaccgccacaucgugggcaagcccugccccaagccgcaccggcucaaccacauggggaucugcagcugcggccuguacaagcaccccgggguccccgugaaguggaagcgcugaggacuaguaauaaggaaacuguaugaaugucugugggcaggaagugaagagauccuucuguaaagguuuuuggaauuaugucugcugaauaauaaacuuuuuugaaauaauaaaucugguagaaaaaugagaucuaaaaaaaaaaaaaaaaaaaaaaaaaaaaaaaaaaaaaaaaaaaaaaaaaaaaaaaaaaaaaaaaaaaaaaaaaaaaaaaaaaaaaaaaaaaaaaaaaaaa

SEQ ID NO: 30952 - RNA, 1785 nt, Artificial Sequence
  mRNA product Design b-4 (A100) comprising derived and/or modified sequence from LASV(GA391;Clade III)__CAA36645__GPCmut6 (opt1)
aggagagucccgcagucggcguccagcggcucugcuuguucgugugugugucguugcaggccuuauucaagcuuaccaugggccagaucgugaccuucuuccaggaggucccccacgugaucgaggaggugaugaacaucguccugaucgcccucagcauccuggccauccugaaggggcucuacaacguggcgaccugcggccugaucgggcuggugacguuccuccugcuguccggccgcagcugcucccucaucuacaaggggaccuacgagcugcagacccuggagcucaacauggagacccugaacaugugcaugccgcugagcugcacgaagaacaacucccaccacuacauccgggucggcaacgagaccggccucgagcugacccugaccaacacgagcauccucaaccacaaguucugcaaccuguccgacgcccacaagcgcaaccuguacgaccacagccucauguccaucaucagcaccuuccaccuguccauccccaacuucaaccaguacgaggccaugagcugcgacuucaacgggggcaagaucaccgugcaguacaaccugucccacagcuucgccguggacgccgcggggcacugcggcacccucgccaacgggguccugcagacguucaugcggauggccuggggcggcuccuacaucgcccuggacagcgggcgcggcaacugggacugcaucaugaccuccuaccaguaccucaucauccagaacaccaccugggacgaccacugccaguucagccggcccucccccaucggguaccugggccugcucagccagcgcacgcgggacaucuacaucagccgccggcugcugggcaccuucaccuggacccucuccgacagcgaggggaacgagacgccgggcggguacugccugacccgcuggaugcugaucgaggcggagcucaagugcuucggcaacaccgccguggccaagugcaacgagaagcacgacgaggaguucugcgacaugcugcggcuguucgacuucugcaagcaggccauccgccggcucaagacccccgcccagauguccauccagcugaucaacaaggcggugaacgcccugaucaacgaccagcucaucaugaagaaccaccuccgcgacaucauggggauccccuacugcaacuacagccgguacugguaccugaaccacacguccaccggcaagaccagccugccccgcugcuggcugaucuccaacggcagcuaccugaacgagaccaaguucuccgacgacaucgagcagcaggccgacaacaugaucacggagaugcugcagaaggaguacaucgaccggcaggggaagaccccgcucggccuggucgaccuguucguguucagcaccuccuucuaccucaucagcaucuuccugcaccuggugaagauccccacccaccgccacaucgucgggaagcccugccccaagccgcaccggcucaaccacaugggcaucugcuccugcgggcuguacaagcagcccggcgugcccgugcgcuggaagcggugaggacuaguaauaaggaaacuguaugaaugucugugggcaggaagugaagagauccuucuguaaagguuuuuggaauuaugucugcugaauaauaaacuuuuuugaaauaauaaaucugguagaaaaaugagaucuaaaaaaaaaaaaaaaaaaaaaaaaaaaaaaaaaaaaaaaaaaaaaaaaaaaaaaaaaaaaaaaaaaaaaaaaaaaaaaaaaaaaaaaaaaaaaaaaaaaa

SEQ ID NO: 30953 - RNA, 1788 nt, Artificial Sequence
  mRNA product Design b-4 (A100) comprising derived and/or modified sequence from LASV(AV;Clade V)__CCA30314__GPCmut6 (opt1)
aggagagucccgcagucggcguccagcggcucugcuuguucgugugugugucguugcaggccuuauucaagcuuaccaugggccagaucgugaccuucuuccaggaggucccccacgugaucgaggaggugaugaacaucguccugaucgcccucagcauccuggccgugcugaaggggcucuacaacaucgcgaccugcggccugaucgggcugaucacguuccuccugcugugcggccgcuccugcagcuccaaccucuacaaggggguguacgagcugcagagccuggaccucaacauggagacccugaacaugugcaugccgcuguccugcaccaagaacaacagccaccacuacauccgggucggcaacgacaccggccucgagcugacgcugaccaacaccuccauccucaaccacaaguucugcaaccugagcgacgcccacaagaaggaccuguacgaccacgcccucauguccaucaucagcaccuuccaccuguccauccccaacuucaaccaguacgaggccaugagcugcgacuucaacgggggcaagaucuccgugcaguacaaccugagccacuccuacgccaucgacgcggccaaccacugcgggacgguggccaacggcauccuccagaccuucaugcgcauggccuggggcgggagcuacaucgcgcuggacuccggccgggggaacugggacugcaucaugaccagcuaccaguaccugaucauccagaacaccacgugggagaaccacugccaguucucccgccccagccccaucggcuaccucgggcugcugagccagcggacccgcgacaucuacaucucccggcgccuccugggcaccuucaccuggacgcugagcgacuccgagggcaacgccacccccgggggcuacugccucacccgguggaugcugaucgaggccgagcugaagugcuucgggaacaccgccgucgccaagugcaacgagaagcacgacgaggaguucugcgacaugcuccgccuguucgacuucugcaagcaggcgaucagccggcugaaguccccggcccagaugagcauccagcucaucaacaaggccgugaacgcccugaucaacgaccagcugaucaugaagaaccaccuccgcgacaucaugggcauccccuacugcaacuacuccaaguacugguaccugaaccacacgaucaccgggaagaccagccugcccaagugcuggcucguguccaacggcagcuaccugaacgagacccacuucuccgacgacaucgagcagcaggccgacaacaugaucacggagaugcugcagaaggaguacauggagcggcagggcaagaccccgcuggggcucgucgaccuguucguguucagcaccuccuucuaccugaucagcaucuuccuccgccuggugaagauccccacccaccggcacaucgucggcaagcccugccccaagccgcaccgccugaaccacauggggaucugcuccugcggccucuacaagcagcccggggugcccgugcgguggaagcgcugaggacuaguaauaaggaaacuguaugaaugucugugggcaggaagugaagagauccuucuguaaagguuuuuggaauuaugucugcugaauaauaaacuuuuuugaaauaauaaaucugguagaaaaaugagaucuaaaaaaaaaaaaaaaaaaaaaaaaaaaaaaaaaaaaaaaaaaaaaaaaaaaaaaaaaaaaaaaaaaaaaaaaaaaaaaaaaaaaaaaaaaaaaaaaaaaa

SEQ ID NO: 30954 - RNA, 1785 nt, Artificial Sequence
  mRNA product Design b-4 (A100) comprising derived and/or modified sequence from LASV(Togo/2016/7082;Clade VI)__AMR44577__GPCmut6 (opt1)
aggagagucccgcagucggcguccagcggcucugcuuguucgugugugugucguugcaggccuuauucaagcuuaccaugggccagaucaucaccuucuuccaggaggugccccacgucaucgaggaggugaugaacaucgugcugaucgcccucagccugcuggccauccucaagggggucuacaacguggcgaccugcggcaucaucgggcuggugacguuccuguuccucugcggccgcuccugcagccugaucuacaagggguccuacgagcugcagacccucgagcugaacauggagacccugaacaugugcaugccgcucagcugcaccaagaacuccagccaccacuacauccgggucggcaacgagacgggccuggagcugacccucaccaacaccuccaucaucaaccacaaguucugcaaccugagcgacgcccacaagcgcaaccuguacgaccacgcccucauguccauccugagcacguuccaccuguccauccccaacuucaaccaguacgaggccaugagcugcgacuucaacgggggcaagaucuccgugcaguacaaccucagccacgccuacgcgguggacgccgccgagcacugcgggaccgucgccaacggcgugcugcagaccuucaugcggauggcguggggcggguccuacaucgcccuggacagcggccgcgggaacugggacugcaucaugaccuccuaccaguaccucaucauccagaacacgaccugggaggaccacugccaguucagccggcccucccccaucggcuaccuggggcugcucagccagcgcacccgggacaucuacaucagccgccggcugcugggcaccuucacguggacccucuccgacagcgagggcaacgagacccccgggggcuacugccugacccgcuggaugcugaucgaggccgagcucaagugcuucgggaacacggccguggccaagugcaacgagaagcacgacgaggaguucugcgacaugcugcggcuguucgacuucugcaagcaggcgauccagcgccucaaguccccggcccagaugagcauccagcugaucaacaaggccgucaacgcccugaucaacgaccagcucaucaugaagaaccaccuccgggacaugaugggcauccccuacugcaacuacuccaaguacugguaccugaaccacaccagcuccgggcgcaccagccugcccaagugcuggcugguguccaacggcagcuaccugaacgagacccacuucuccgacgacaucgagcagcaggccgacaacaugaucacggagaugcuccagaaggaguacaucgaccggcagggcaagaccccgcuggggcugguggaccuguucgucuucagcaccuccuucuaccucaucagcaucuuccugcaccugaucaagauccccacccaccgccacaucgugggcaagcccugccccaagccgcaccggcucaaccacauggggaucugcuccugcggccuguacaagcagcccggggugcccacgcgcuggaagcggugaggacuaguaauaaggaaacuguaugaaugucugugggcaggaagugaagagauccuucuguaaagguuuuuggaauuaugucugcugaauaauaaacuuuuuugaaauaauaaaucugguagaaaaaugagaucuaaaaaaaaaaaaaaaaaaaaaaaaaaaaaaaaaaaaaaaaaaaaaaaaaaaaaaaaaaaaaaaaaaaaaaaaaaaaaaaaaaaaaaaaaaaaaaaaaaaa

SEQ ID NO: 30955 - RNA, 1785 nt, Artificial Sequence
  mRNA product Design b-4 (A100) comprising derived and/or modified sequence from LASV(KAK-428;Clade n.d. (VII))__ANH09740__GPCmut6 (opt1)
aggagagucccgcagucggcguccagcggcucugcuuguucgugugugugucguugcaggccuuauucaagcuuaccaugggccagaucgugaccuucuuccaggaggucccccacgugaucgaggaggugaugaacaucguccugaucgcccucagccugcuggccauccucaaggggcuguacaacuucgcgaccugcggcgugaucgggcugaucacguuccuccugcugugcggccgcuccugcagcgccaccuacaaggggcaguacgagcuccagacccuggagcugaacauggagucccucaacaugugcaugccgcugagcugcaccaagaacaacucccaccacuacauccgggccggcaacaacacgggccuggagcucacccugaccaacaccagcaucaucucccacaaguucugcaaccugagcgacgcccacaagaagaaccucuacgaccacacgcugauguccaucaucaccaccuuccaccugagcauccccaacuucaaccaguacgaggccauguccugcgacuucaacgggggcaagaucagcauccaguacaaccucucccacagcuacgcgggggacgccgcccagcacugcggcaccguggccaacgggguccugcagacguucaugcgcauggcguggggcggcuccuaccuggcccucgacagcgggcggcgcggcugggacugcaucaucuccagcuaccaguaccugaucauccagaacaccaccugggacgaccacugccaguucucccggcccagccccaucggguaccugggcuucgugagccagaagacccgcgacaucuacaucucccggcgccuccugggcacguucaccuggacccugagcgacuccgaggggcacgacaugccgggcggguacugccucacccgguggaugcugaucgaggccgaccugaagugcuucggcaacacggccguggccaagugcaacgagaagcacgacgaggaguucugcgacauguggcgccucuucgacuucugcaagcaggcgauccagcggcugaaggcccccgcccagaugaacauccagcugaucaacaaggccgucaacgcccucaucaacgaccagcugaugaugaagaaccaccuccgcgacaucauggggauccccuacugcaacuacagcaaguucugguaccugaacaacaccaccaccggccggacgucccugccccgcugcuggcugaucagcaacggcuccuaccucaacgagacccacuucagcgacgacaucgagcagcaggcggacaacaugaucaccgagaugcugcagaaggaguacauggaccggcaggggaagaccccgcugggccucguggaccuguucguguucuccacgagcuucuaccugaucaccaucuuccugcaccucgucaagauccccacccaccgccacaucguggggaagcccugccccaagccgcaccggcugaaccacaugggcaucugcuccugcgggcuguacaagcagcccggcgugcccguccgcuggaagcggugaggacuaguaauaaggaaacuguaugaaugucugugggcaggaagugaagagauccuucuguaaagguuuuuggaauuaugucugcugaauaauaaacuuuuuugaaauaauaaaucugguagaaaaaugagaucuaaaaaaaaaaaaaaaaaaaaaaaaaaaaaaaaaaaaaaaaaaaaaaaaaaaaaaaaaaaaaaaaaaaaaaaaaaaaaaaaaaaaaaaaaaaaaaaaaaaa

SEQ ID NO: 30956 - RNA, 1785 nt, Artificial Sequence; identical to SEQ ID NO: 30950
  mRNA product Design b-4 (A100) comprising derived and/or modified sequence from LASV(Pinneo-NIG-1969;Clade I)__AIT17836__GPCmut6 (opt1)

SEQ ID NO: 30957 - RNA, 1785 nt, Artificial Sequence
  mRNA product Design b-4 (A100) comprising derived and/or modified sequence from LASV(ISTH0009-NIG-2011;Clade II)__AIT17404__GPCmut6 (opt1)
aggagagucccgcagucggcguccagcggcucugcuuguucgugugugugucguugcaggccuuauucaagcuuaccaugggccagaucaucaccuucuuccaggaggugccccacgucaucgaggaggugaugaacaucgugcugaucgcccucagccugcuggccauccucaaggggaucuacaacgucgcgaccugcggccuguucgggcugguguccuuccuccugcugugcggccgcagcugcuccacgaccuacaaggggguguacgagcuccagacccuggagcuggacauggccagccucaacaugugcaugccgcuguccugcaccaagaacaacagccaccacuacaucauggucggcaacgagacgggccuggagcucacccugaccaacaccuccaucaucaaccacaaguucugcaaccugagcgacgcccacaagaagaaccucuacgaccacgcccugauguccaucaucagcacguuccaccuguccauccccaacuucaaccaguacgaggccaugagcugcgacuucaacgggggcaagaucuccgugcaguacaaccucagccacgcguacgccguggacgccgccaaccacugcgggaccaucgcgaacggcguccugcagaccuucaugcggauggccuggggcggguccuacaucgcccuggacagcggcaagggguccugggacugcaucaugaccagcuaccaguaccucaucauccagaacacgaccugggaggaccacugccaguucucccgccccagccccaucggcuaccuggggcugcucagccagcggacccgcgacaucuacaucucccggcgccugcugggcaccuucacguggacccucagcgacuccgagggcaacgagacccccgggggcuacugccugacccgguggaugcugaucgaggccgagcucaagugcuucgggaacacggccguggcgaagugcaacgagaagcacgacgaggaguucugcgacaugcugcgccuguucgacuucugcaagcaggccauccggcgccucaagaccccggcccagaugagcauccagcugaucaacaaggccgugaacgcccugaucaacgaccagcucaucaugaagaaccaccuccgggacaucaugggcauccccuacugcaacuacuccaaguacugguaccugaaccacaccgucaccgggaagacgagccugccccgcugcuggcugguguccaacggcagcuaccugaacgagacccacuucuccgacgacaucgagcagcaggcggacaacaugaucaccgagcuccugcagaaggaguacauggaccggcagggcaagaccccgcuggggcugguggaccucuucgucuucagcacguccuucuaccugaucagcaucuuccugcaccucaucaagauccccacccaccgccacaucaccggcaagcccugccccaagccgcaccggcugaaccacauggggaucugcuccugcggccuguacaagcaccccggggugcccgugaaguggaagcgcugaggacuaguaauaaggaaacuguaugaaugucugugggcaggaagugaagagauccuucuguaaagguuuuuggaauuaugucugcugaauaauaaacuuuuuugaaauaauaaaucugguagaaaaaugagaucuaaaaaaaaaaaaaaaaaaaaaaaaaaaaaaaaaaaaaaaaaaaaaaaaaaaaaaaaaaaaaaaaaaaaaaaaaaaaaaaaaaaaaaaaaaaaaaaaaaaa

SEQ ID NO: 30958 - RNA, 1785 nt, Artificial Sequence
  mRNA product Design b-4 (A100) comprising derived and/or modified sequence from LASV(ISTH2010-NIG-2012;Clade II)__AIT17482__GPCmut6 (opt1)
aggagagucccgcagucggcguccagcggcucugcuuguucgugugugugucguugcaggccuuauucaagcuuaccaugggccagaucaucaccuucuuccaggaggugccccacgucaucgaggaggugaugaacaucgugcugaucgcccucagccugcuggccauccucaaggggaucuacaacgucgcgaccugcggccuguucgggcugguguccuuccuccugcugugcggccgcagcugcuccacgaccuacaaggggguguacgagcuccagacccuggagcuggacauggccagccucaacaugugcaugccgcuguccugcaccaagaacaacagccaccacuacaucauggucggcaacgagacgggccuggagcucacccugaccaacaccuccaucaucaaccacaaguucugcaaccugagcgacgcccacaagaagaaccucuacgaccacgcccugauguccaucaucagcacguuccaccuguccauccccaacuucaaccaguacgaggccaugagcugcgacuucaacgggggcaagaucuccgugcaguacaaccucagccacgcguacgccguggacgccgccaaccacugcgggaccaucgcgaacggcguccugcagaccuucaugcggauggccuggggcggguccuacaucgcccuggacagcggcaagggguccugggacugcaucaugaccagcuaccaguaccucaucauccagaacaucacgugggaggaccacugccaguucucccgccccagccccaucggcuaccuggggcugcucagccagcggacccgcgacaucuacaucucccggcgccugcugggcaccuucaccuggacgcucagcgacuccgagggcaacgagacccccgggggcuacugccugacccgguggaugcugaucgaggccgagcucaagugcuucgggaacaccgccguggcgaagugcaacgagaagcacgacgaggaguucugcgacaugcugcgccuguucgacuucugcaagcaggccauccggcgccucaagacgccggcccagaugagcauccagcugaucaacaaggccgugaacgcccugaucaacgaccagcucaucaugaagaaccaccuccgggacaucaugggcauccccuacugcaacuacuccaaguacugguaccugaaccacaccgucaccgggaagaccagccugccccgcugcuggcugguguccaacggcagcuaccugaacgagacgcacuucuccgacgacaucgagcagcaggcggacaacaugaucaccgagcuccugcagaaggaguacaucgaccggcagggcaagaccccgcuggggcugguggaccucuucgucuucagcaccuccuucuaccugaucagcaucuuccugcaccucgugaagauccccacgcaccgccacguggucggcaagcccugccccaagccgcaccggcugaaccacauggggaucugcuccugcggccuguacaagcaccccggggugcccgugaaguggaagcgcugaggacuaguaauaaggaaacuguaugaaugucugugggcaggaagugaagagauccuucuguaaagguuuuuggaauuaugucugcugaauaauaaacuuuuuugaaauaauaaaucugguagaaaaaugagaucuaaaaaaaaaaaaaaaaaaaaaaaaaaaaaaaaaaaaaaaaaaaaaaaaaaaaaaaaaaaaaaaaaaaaaaaaaaaaaaaaaaaaaaaaaaaaaaaaaaaa

SEQ ID NO: 30959 - RNA, 1785 nt, Artificial Sequence
  mRNA product Design b-4 (A100) comprising derived and/or modified sequence from LASV(Lassa virus/H.sapiens-wt/NGA/2015/ISTH_0543;Clade II)__AVO03639__GPCmut6 (opt1)
aggagagucccgcagucggcguccagcggcucugcuuguucgugugugugucguugcaggccuuauucaagcuuaccaugggccagaucaucaccuucuuccaggaggugccccacgucaucgaggaggugaugaacaucgugcugaucgcccucagccugcuggccauccucaaggggaucuacaacgucgcgaccugcggccuguucgggcugguguccuuccuccugcugugcggccgcagcugcuccacgaccuacaaggggguguacgagcuccagacccuggagcuggacauggccaaccucaacaugugcaugccgcugagcugcaccaagaacaacucccaccacuacaucauggucggcaacgagacgggccuggagcucacccugaccaacaccagcaucaucaaccacaaguucugcaaccuguccgacgcccacaagaagaaccucuacgaccacgcccugaugagcaucaucuccacguuccaccugagcauccccaacuucaaccaguacgaggccauguccugcgacuucaacgggggcaagaucagcgugcaguacaaccucucccacaccuacgcgguggacgccgccaaccacugcgggaccaucgccaacggcguccugcagaccuucaugcggauggcguggggcgggagcuacaucgcccuggacuccggcaaggggagcugggacugcaucaugacguccuaccaguaccucgugauccagaacaccaccugggaggaccacugccaguucagccgccccucccccaucggcuaccuggggcugcucagccagcggacccgcgacaucuacaucagccggcgccugcugggcacguucaccuggacccucuccgacagcgagggcaacgagacccccgggggcuacugccugacgcgguggaugcugaucgaggccgagcucaagugcuucgggaacaccgccguggccaagugcaacgagaagcacgacgaggaguucugcgacaugcugcgccuguucgacuucugcaagcaggcgauccggcgccucaagaccccggcccagauguccauccagcugaucaacaaggccgucaacgcccugaucaacgaccagcucaucaugaagaaccaccuccgggacaucaugggcauccccuacugcaacuacagcaaguacugguaccugaaccacaccgugacggggaagaccucccugccccgcugcuggcuggugagcaacggcuccuaccugaacgagacccacuucagcgacgacaucgagcagcaggccgacaacaugaucaccgagcuccugcagaaggaguacaucgaccggcagggcaagacgccgcuggggcuggucgaccucuucguguucuccaccagcuucuaccugaucuccaucuuccugcaccucgugaagauccccacccaccgccacaucaccggcaagcccugccccaagccgcaccggcugaaccacauggggaucugcagcugcggccuguacaagcaccccgggguccccgugaaguggaagcgcugaggacuaguaauaaggaaacuguaugaaugucugugggcaggaagugaagagauccuucuguaaagguuuuuggaauuaugucugcugaauaauaaacuuuuuugaaauaauaaaucugguagaaaaaugagaucuaaaaaaaaaaaaaaaaaaaaaaaaaaaaaaaaaaaaaaaaaaaaaaaaaaaaaaaaaaaaaaaaaaaaaaaaaaaaaaaaaaaaaaaaaaaaaaaaaaaa

SEQ ID NO: 30960 - RNA, 1785 nt, Artificial Sequence
  mRNA product Design b-4 (A100) comprising derived and/or modified sequence from LASV(Lassa virus/H.sapiens-wt/NGA/2016/ISTH_0009;Clade II)__AVO03571__GPCmut6 (opt1)
aggagagucccgcagucggcguccagcggcucugcuuguucgugugugugucguugcaggccuuauucaagcuuaccaugggccagaucaucaccuucuuccaggaggugccccacgucaucgaggaggugaugaacaucgugcugaucgcccucagccugcuggccauccucaaggggaucuacaacgucgcgaccugcggccugcuggggcucguguccuuccugcugcucugcggccgcagcugcuccacgaccuacaaggggguguacgagcugcagacccuggagcucgacauggccagccugaacaugugcaugccgcuguccugcaccaagaacaacagccaccacuacaucauggucggcaacgagacgggccucgagcugacccugaccaacaccuccaucaucaaccacaaguucugcaaccucagcgacgcccacaagaagaaccuguacgaccacgcccugauguccaucaucagcacguuccaccucuccauccccaacuucaaccaguacgaggccaugagcugcgacuucaacgggggccggaucuccgugcaguacaaccugagccacuccuacgcgguggacgccgccaaccacugcgggaccaucgccaacggcguccugcagaccuucaugcgcauggcguggggcgggagcuacaucgcccucgacuccggcaaggggagcugggacugcaucaugaccuccuaccaguaccugaucauccagaacacgaccugggaggaccacugccaguucagccggcccagccccaucggcuaccuggggcuccugucccagcgcacccgggacaucuacaucagccgccggcugcucggcaccuucacguggacccuguccgacagcgagggcaacgagacccccgggggcuacugccugacccgcuggaugcucaucgaggccgagcugaagugcuucgggaacacggccguggccaagugcaacgagaagcacgacgaggaguucugcgacaugcugcggcuguucgacuucugcaagcaggcgauccgccggcugaagaccccggcccagauguccauccagcugaucaacaaggccgugaacgcccucaucaacgaccagcugaucaugaagaaccaccuccgcgacaucaugggcauccccuacugcaacuacagcaaguacugguaccucaaccacaccgucaccgggaagacgucccugccccggugcuggcuggugagcaacggcuccuaccucaacgagacccacuucagcgacgacaucgagcagcaggccgacaacaugaucaccgagcugcugcagaaggaguacaucgaccgccagggcaagaccccgcuggggcucguggaccuguucgucuucuccacgagcuucuaccugaucuccaucuuccuccaccuggugaagauccccacccaccggcacaucaccggcaagcccugccccaagccgcaccgccugaaccacauggggaucugcagcugcggccucuacaaccaccccggggugcccgucaaguggaagcggugaggacuaguaauaaggaaacuguaugaaugucugugggcaggaagugaagagauccuucuguaaagguuuuuggaauuaugucugcugaauaauaaacuuuuuugaaauaauaaaucugguagaaaaaugagaucuaaaaaaaaaaaaaaaaaaaaaaaaaaaaaaaaaaaaaaaaaaaaaaaaaaaaaaaaaaaaaaaaaaaaaaaaaaaaaaaaaaaaaaaaaaaaaaaaaaaa

SEQ ID NO: 30961 - RNA, 1785 nt, Artificial Sequence
  mRNA product Design b-4 (A100) comprising derived and/or modified sequence from LASV(Lassa virus/H.sapiens-wt/NGA/2016/ISTH_0017;Clade II)__AVO03567__GPCmut6 (opt1)
aggagagucccgcagucggcguccagcggcucugcuuguucgugugugugucguugcaggccuuauucaagcuuaccaugggccagaucaucaccuucuuccaggaggugccccacgucaucgaggaggugaugaacaucgugcugaucgcccucagccugcuggccauccucaaggggaucuacaacgucgcgaccugcggccuguucgggcugguguccuuccuccugcugugcggccgcagcugcuccacgaccuacaaggggguguacgagcuccagacccuggagcuggacauggccagccucaacaugugcaugccgcuguccugcaccaagaacaacagccaccacuacaucauggucggcaacgagacgggccuggagcucacccugaccaacaccuccaucaucaaccacaaguucugcaaccugagcgacgcccacaagaagaaccucuacgaccacgcccugauguccaucaucagcacguuccaccuguccauccccaacuucaaccaguacgaggccaugagcugcgacuucaacgggggcaagaucuccgugcaguacaaccucagccacaccuacgcgaucgacgccgccaaccacugcgggaccaucgccaacggcgugcugcagaccuucaugcggauggcguggggcggguccuacaucgcccuggacagcggcaagggguccugggacugcaucaugacgagcuaccaguaccucaucauccagaacaccaccugggaggaccacugccaguucucccgccccagccccaucggcuaccuggggcugcucagccagcggacccgcgacaucuacaucucccggcgccugcugggcacguucaccuggacccucagcgacuccgagggcaacgagacccccgggggcuacugccugacgcgguggaugcugaucgaggccgagcucaagugcuucgggaacaccgccgucgccaagugcaacgagaagcacgacgaggaguucugcgacaugcugcgccuguucgacuucugcaagcaggcgauccggcgccucaagaccccggcccagaugagcauccagcugaucaacaaggccgugaacgcccugaucaacgaccagcucaucaugaagaaccaccuccgggacaucaugggcauccccuacugcaacuacuccaaguacugguaccugaaccacaccgugacggggaagaccagccugccccgcugcuggcuggucuccaacggcagcuaccugaacgagacccacuucuccgacgacaucgagcagcaggccgacaacaugaucaccgagcuccugcagaaggaguacauggaccggcagggcaagacgccgcuggggcugguggaccucuucguguucagcaccuccuucuaccugaucagcaucuuccugcaccucguccgcauccccacccaccggcacgugaucggcaagcccugccccaagccgcaccgccugaaccacauggggaucugcuccugcggccuguacaagcaccccggggugcccgucaaguggaagcggugaggacuaguaauaaggaaacuguaugaaugucugugggcaggaagugaagagauccuucuguaaagguuuuuggaauuaugucugcugaauaauaaacuuuuuugaaauaauaaaucugguagaaaaaugagaucuaaaaaaaaaaaaaaaaaaaaaaaaaaaaaaaaaaaaaaaaaaaaaaaaaaaaaaaaaaaaaaaaaaaaaaaaaaaaaaaaaaaaaaaaaaaaaaaaaaaa

SEQ ID NO: 30962 - RNA, 1785 nt, Artificial Sequence
  mRNA product Design b-4 (A100) comprising derived and/or modified sequence from LASV(Lassa virus/H.sapiens-wt/NGA/2018/ISTH_0959;Clade II)__AVV65099__GPCmut6 (opt1)
aggagagucccgcagucggcguccagcggcucugcuuguucgugugugugucguugcaggccuuauucaagcuuaccaugggccagaucaucaccuucuuccaggaggugccccacgucaucgaggaggugaugaacaucgugcugaucgcccucagccugcuggccauccucaaggggaucuacaacgucgugaccugcggccuguucgggcugguguccuuccuccugcugugcggccgcagcugcuccacgaccuacaagggggucuacgagcuccagacccuggagcuggacauggcgagccucaacaugugcaugccgcuguccugcaccaagaacaacagccaccacuacaucauggugggcaacgagacgggccuggagcucacccugaccaacaccuccaucaucaaccacaaguucugcaaccugagcgacgcccacaagaagaaccucuacgaccacgcccugauguccaucaucagcacguuccaccuguccauccccaacuucaaccaguacgaggccaugagcugcgacuucaacgggggcaagaucuccgugcaguacaaccucagccacgccuacgcgaucgacgccgccaaccacugcgggaccaucgccaacggcguccugcagaccuucaugcggauggcguggggcggguccuacaucgcccuggacagcggcaagggguccugggacugcaucaugaccagcuaccaguaccucaucauccagaacacgaccugggaggaccacugccaguucucccgccccagccccaucggcuaccuggggcugcucagccagcggacccgcgacaucuacaucucccggcgccugcugggcaccuucacguggacccucagcgacuccgagggcaacgagacccccgggggcuacugccugacccgguggaugcugaucgaggccgagcucaagugcuucgggaacacggccguggccaagugcaacgagaagcacgacgaggaguucugcgacaugcugcgccuguucgacuucugcaagcaggcgauccggcgccucaagaccccggcccagaugagcauccagcugaucaacaaggccgugaacgcccugaucaacgaccagcucaucaugaagaaccaccuccgggacaucaugggcauccccuacugcaacuacuccaaguacugguaccugaaccacaccgucaccgggaagacgagccugccccgcugcuggcugguguccaacggcagcuaccugaacgagacccacuucuccgacgacaucgagcagcaggccgacaacaugaucaccgagcuccugcagaaggaguacaucgaccggcagggcaagaccccgcuggggcugguggaccucuucgucuucagcacguccuucuaccugaucagcaucuuccugcaccucgugaagauccccacccaccgccacgugaucggcaagcccugccccaagccgcaccggcugaaccacauggggaucugcuccugcggccuguacaagcaccccgggguccccgugaaguggaagcgcugaggacuaguaauaaggaaacuguaugaaugucugugggcaggaagugaagagauccuucuguaaagguuuuuggaauuaugucugcugaauaauaaacuuuuuugaaauaauaaaucugguagaaaaaugagaucuaaaaaaaaaaaaaaaaaaaaaaaaaaaaaaaaaaaaaaaaaaaaaaaaaaaaaaaaaaaaaaaaaaaaaaaaaaaaaaaaaaaaaaaaaaaaaaaaaaaa

SEQ ID NO: 30963 - RNA, 1785 nt, Artificial Sequence
  mRNA product Design b-4 (A100) comprising derived and/or modified sequence from LASV(LASV003-NIG-2008;Clade II)__AIT17580__GPCmut6 (opt1)
aggagagucccgcagucggcguccagcggcucugcuuguucgugugugugucguugcaggccuuauucaagcuuaccaugggccagaucaucaccuucuuccaggaggugccccacgucaucgaggaggugaugaacaucgugcugaucgcccucagccugcuggccauccucaaggggaucuacaacgucgcgaccugcggccuguucgggcugguguccuuccuccugcugugcggccgcagcugcuccacgaccuacaaggggguguacgagcuccagacccuggagcuggacauggccagccucaacaugugcaugccgcuguccugcaccaagaacaacagccaccacuacaucauggucggcaacgagacgggccuggagcucacccugaccaacaccuccaucaucaaccacaaguucugcaaccugagcgacgcccacaagaagaaccucuacgaccacgcccugauguccaucaucagcacguuccaccuguccauccccaacuucaaccaguacgaggccaugagcugcgacuucaacgggggcaagaucuccgugcaguacaaccucagccacaccuacgcgguggacgccgccaaccacugcgggaccaucgccaacggcguccugcagaccuucaugcggauggcguggggcggguccuacaucgcccuggacagcggcaagggguccugggacugcaucaugacgagcuaccaguaccucaucauccagaacaccaccugggaggaccacugccaguucucccgccccagccccaucggcuaccuggggcugcucagccagcggacccgcgacaucuacaucucccggcgccugcugggcacguucaccuggacccucagcgacuccgagagcaacgagaccccgggcggguacugccugacgcgguggaugcugaucgaggccgagcucaagugcuucggcaacaccgccguggccaagugcaacgagaagcacgacgaggaguucugcgacaugcugcgccuguucgacuucugcaagcaggcgauccggcgccucaaggcccccgcccagauguccauccagcugaucaacaaggccgugaacgcccugaucaacgaccagcucaucaugaagaaccaccuccgggacaucauggggauccccuacugcaacuacagcaaguacugguaccugaaccacaccgucaccggccgcacgucccugccccggugcuggcuggugagcaacggguccuaccugaacgagacccacuucagcgacgacaucgagcagcaggcggacaacaugaucaccgagcuccugcagaaggaguacauggaccgccagggcaagaccccgcugggccugguggaccucuucgucuucuccacgagcuucuaccugaucuccaucuuccugcaccucgugaagauccccacccaccggcacgugaucgggaagcccugccccaagccgcaccgccugaaccacaugggcaucugcagcugcgggcuguacaagcaccccggcguccccgugaaguggaagcggugaggacuaguaauaaggaaacuguaugaaugucugugggcaggaagugaagagauccuucuguaaagguuuuuggaauuaugucugcugaauaauaaacuuuuuugaaauaauaaaucugguagaaaaaugagaucuaaaaaaaaaaaaaaaaaaaaaaaaaaaaaaaaaaaaaaaaaaaaaaaaaaaaaaaaaaaaaaaaaaaaaaaaaaaaaaaaaaaaaaaaaaaaaaaaaaaa

SEQ ID NO: 30964 - RNA, 1785 nt, Artificial Sequence
  mRNA product Design b-4 (A100) comprising derived and/or modified sequence from LASV(LASV035-NIG-2009;Clade II)__AIT17588__GPCmut6 (opt1)
aggagagucccgcagucggcguccagcggcucugcuuguucgugugugugucguugcaggccuuauucaagcuuaccaugggccagaucaucaccuucuuccaggaggugccccacgucaucgaggaggugaugaacaucgugcugaucgcccucagccugcuggccauccucaaggggaucuacaacgucgcgaccugcggccuguucgggcugguguccuuccuccugcugugcggccgcagcugcuccacgaccuacaaggggguguacgagcuccagacccuggagcuggacauggccagccucaacaugugcaugccgcuguccugcaccaagaacaacagccaccacuacaucauggucggcaacgagacgggccuggagcucacccugaccaacaccuccaucaucaaccacaaguucugcaaccugagcgacgcccacaagaagaaccucuacgaccacgcccugauguccaucaucagcacguuccaccuguccauccccaacuucaaccaguacgaggccaugagcugcgacuucaacgggggcaagaucuccgugcaguacaaccucagccacgcguacgccguggacgccgccaaccacugcgggaccaucgcgaacggcguccugcagaccuucaugcggauggccuggggcggguccuacaucgcccuggacagcggcaagggguccugggacugcaucaugaccagcuaccaguaccucaucauccagaacacgaccugggaggaccacugccaguucucccgccccagccccaucggcuaccuggggcugcucagccagcggacccgcgacaucuacaucucccggcgccugcugggcaccuucacguggacccucagcgacuccgagggcaacgagacccccgggggcuacugccugacccgguggaugcugaucgaggccgagcucaagugcuucgggaacacggccguggcgaagugcaacgagaagcacgacgaggaguucugcgacaugcugcgccuguucgacuucugcaagcaggccauccggcgccucaaggccccggcccagaugagcauccagcugaucaacaaggccgugaacgcgcugaucaacgaccagcucaucaugaagaaccaccuccgggacaucaugggcauccccuacugcaacuacuccaaguacugguaccugaaccacaccgucaccgggaagaccagccugccccgcugcuggcugguguccaacggcagcuaccugaacgagacgcacuucuccgacgacaucgagcagcaggccgacaacaugaucaccgagcuccugcagaaggaguacaucgaccggcagggcaagaccccgcuggggcugguggaccucuucgucuucagcaccuccuucuaccugaucagcaucuuccugcaccucgugaagauccccacgcaccgccacgugaucggcaagcccugccccaagccgcaccggcugaaccacauggggaucugcuccugcggccuguacaagcaccccgggguccccgugaaguggaagcgcugaggacuaguaauaaggaaacuguaugaaugucugugggcaggaagugaagagauccuucuguaaagguuuuuggaauuaugucugcugaauaauaaacuuuuuugaaauaauaaaucugguagaaaaaugagaucuaaaaaaaaaaaaaaaaaaaaaaaaaaaaaaaaaaaaaaaaaaaaaaaaaaaaaaaaaaaaaaaaaaaaaaaaaaaaaaaaaaaaaaaaaaaaaaaaaaaa

SEQ ID NO: 30965 - RNA, 1785 nt, Artificial Sequence
  mRNA product Design b-4 (A100) comprising derived and/or modified sequence from LASV(LASV1000-NIG-2009;Clade II)__AIT17782__GPCmut6 (opt1)
aggagagucccgcagucggcguccagcggcucugcuuguucgugugugugucguugcaggccuuauucaagcuuaccaugggccagaucaucaccuucuuccaggaggugccccacgucaucgaggaggugaugaacaucgugcugaucgcccucagccugcuggccauccucaaggggaucuacaacgucgcgaccugcggccuguucgggcugguguccuuccuccugcugugcggccgcagcugcuccacgaccuacaaggggguguacgagcuccagacccuggagcuggacauggccagccucaacaugugcaugccgcuguccugcaccaagaacaacagccaccacuacaucauggucggcaacgagacgggccuggagcucacccugaccaacaccuccaucaucaaccacaaguucugcaaccugagcgacgcccacaagaagaaccucuacgaccacgcccugauguccaucaucagcacguuccaccuguccauccccaacuucaaccaguacgaggccaugagcugcgacuucaacgggggcaagaucuccgugcaguacaaccucagccacaccuacgcgguggacgccgccaaccacugcgggaccaucgccaacggcguccugcagaccuucaugcggauggcguggggcggguccuacaucgcccuggacagcggcaagggguccugggacugcaucaugacgagcuaccaguaccucaucauccagaacaccaccugggaggaccacugccaguucucccgccccagccccaucggcuaccuggggcugcucagccagcggacccgcgacaucuacaucucccggcgccugcugggcacguucaccuggacccucagcgacuccgagggcaacgagacccccgggggcuacugccugacgcgguggaugcugaucgaggccgagcucaagugcuucgggaacaccgccguggccaagugcaacgagaagcacgacgaggaguucugcgacaugcugcgccuguucgacuucugcaagcaggcgaucaagcggcucaagaccccggcccagaugagcauccagcugaucaacaaggccgugaacgcccugaucaacgaccagcucaucaugaagaaccaccuccgcgacaucaugggcauccccuacugcaacuacuccaaguacugguaccugaaccacaccgucacggggaagaccagccugccccggugcuggcugguguccaacggcagcuaccugaacgagacccacuucuccgacgacaucgagcagcaggccgacaacaugaucaccgagcuccugcagaaggaguacaucgaccgccagggcaagacgccgcuggggcugguggaccucuucgucuucagcaccuccuucuaccugaucagcaucuuccugcaccucgugaagauccccacccaccggcacguggucggcaagcccugccccaagccgcaccgccugaaccacauggggaucugcuccugcggccuguacaagcaccccggggugcccgugaaguggaagcggugaggacuaguaauaaggaaacuguaugaaugucugugggcaggaagugaagagauccuucuguaaagguuuuuggaauuaugucugcugaauaauaaacuuuuuugaaauaauaaaucugguagaaaaaugagaucuaaaaaaaaaaaaaaaaaaaaaaaaaaaaaaaaaaaaaaaaaaaaaaaaaaaaaaaaaaaaaaaaaaaaaaaaaaaaaaaaaaaaaaaaaaaaaaaaaaaa

SEQ ID NO: 30966 - RNA, 1785 nt, Artificial Sequence
  mRNA product Design b-4 (A100) comprising derived and/or modified sequence from LASV(LASV221-NIG-2010;Clade II)__AIT17624__GPCmut6 (opt1)
aggagagucccgcagucggcguccagcggcucugcuuguucgugugugugucguugcaggccuuauucaagcuuaccaugggccagaucaucaccuucuuccaggaggugccccacgucaucgaggaggugaugaacaucgugcugaucgcccucagccugcuggccauccucaaggggaucuacaacgucgcgaccugcggccuguucgggcugguguccuuccuccugcugugcggccgcagcugcuccacgaccuacaaggggguguacgagcuccagacccuggagcuggacauggccagccucaacaugugcaugccgcuguccugcaccaagaacaacagccaccacuacaucauggucggcaacgagacgggccuggagcucacccugaccaacaccuccaucaucaaccacaaguucugcaaccugagcgacgcccacaagaagaaccucuacgaccacgcccugauguccaucaucagcacguuccaccuguccauccccaacuucaaccaguacgaggccaugagcugcgacuucaacgggggcaagaucuccgugcaguacaaccucagccacaccuacgcgaucgacgccgccaaccacugcgggaccaucgccaacggcgugcugcagaccuucaugcggauggcguggggcggguccuacaucgcccuggacagcggcaagggguccugggacugcaucaugacgagcuaccaguaccucaucauccagaacaccaccugggaggaccacugccaguucucccgccccagccccaucggcuaccuggggcugcucagccagcggacccgcgacaucuacaucucccggcgccugcugggcacguucaccuggacccucagcgacuccgagggcaacgagacccccgggggcuacugccugacgcgguggaugcugaucgaggccgagcucaagugcuucgggaacaccgccgucgccaagugcaacgagaagcacgacgaggaguucugcgacaugcugcgccuguucgacuucugcaagcaggcgauccggcgccucaagaccccggcccagaugagcauccagcugaucaacaaggccgugaacgcccugaucaacgaccagcucaucaugaagaaccaccuccgggacaucaugggcauccccuacugcaacuacuccaaguacugguaccugaaccacaccgugacggggaagaccagccugccccgcugcuggcuggucuccaacggcagcuaccugaacgagacccacuucuccgacgacaucgagcagcaggccgacaacaugaucaccgagaugcuccagaaggaguacauggaccggcagggcaagacgccgcuggggcugguggaccuguucguguucagcaccuccuucuaccucaucagcaucuuccugcaccuggucaagauccccacccaccgccacgugaucggcaagcccugccccaagccgcaccggcucaaccacauggggaucugcuccugcggccuguacaagcaccccggggugcccgucaaguggaagcgcugaggacuaguaauaaggaaacuguaugaaugucugugggcaggaagugaagagauccuucuguaaagguuuuuggaauuaugucugcugaauaauaaacuuuuuugaaauaauaaaucugguagaaaaaugagaucuaaaaaaaaaaaaaaaaaaaaaaaaaaaaaaaaaaaaaaaaaaaaaaaaaaaaaaaaaaaaaaaaaaaaaaaaaaaaaaaaaaaaaaaaaaaaaaaaaaaa

SEQ ID NO: 30967 - RNA, 1785 nt, Artificial Sequence
  mRNA product Design b-4 (A100) comprising derived and/or modified sequence from LASV(LASV237-NIG-2010;Clade II)__AIT17638__GPCmut6 (opt1)
aggagagucccgcagucggcguccagcggcucugcuuguucgugugugugucguugcaggccuuauucaagcuuaccaugggccagaucaucaccuucuuccaggaggugccccacgucaucgaggaggugaugaacaucgugcugaucgcccucagccugcuggccauccucaaggggaucuacaacgucgcgaccugcggccuguucgggcugguguccuuccuccugcugugcggccgcagcugcuccacgaccuacaaggggguguacgagcuccagacccuggagcuggacauggccagccucaacaugugcaugccgcuguccugcaccaagaacaacagccaccacuacaucauggucggcaacgagacgggccuggagcucacccugaccaacaccuccaucaucaaccacaaguucugcaaccugagcgacgcccacaagaaggaccucuacgaccacgcccugauguccaucaucagcacguuccaccuguccauccccaacuucaaccaguacgaggccaugagcugcgacuucaacgggggcaagaucuccgugcaguacaaccucagccacaccuacgcgguggacgccgccaaccacugcgggaccaucgccaacggcguccugcagaccuucaugcggauggcguggggcggguccuacaucgcccuggacagcggcaagggguccugggacugcaucaugacgagcuaccaguaccucaucauccagaacaccaccugggaggaccacugccaguucucccgccccagccccaucggcuaccuggggcugcucagccagcggacccgcgacaucuacaucucccggcgccugcugggcacguucaccuggacccucagcgacuccgagggcaacgagacccccgggggcuacugccugacgcgguggaugcugaucgaggccgagcucaagugcuucgggaacaccgccguggccaagugcaacgagaagcacgacgaggaguucugcgacaugcugcgccuguucgacuucugcaagcaggcgauccggcgccucaagaccccggcccagaugagcauccagcugaucaacaaggccgugaacgcccugaucaacgaccagcucaucaugaagaaccaccuccgggacaucaugggcauccccuacugcaacuacuccaaguacugguaccugaaccacaccgucacggggaagaccagccugccccgcugcuggcugguguccaacggcagcuaccugaacgagacccacuucuccgacgacaucgagcagcaggccgacaacaugaucaccgagcuccugcagaaggaguacauggaccggcagggcaagacgccgcuggggcugguggaccucuucgucuucagcaccuccuucuaccugaucagcaucuuccugcaccucaucaagauccccacccaccgccacaucaccggcaagcccugccccaagccgcaccggcugaaccacauggggaucugcuccugcggccuguacaagcaccccggggugcccgugaaguggaagcgcugaggacuaguaauaaggaaacuguaugaaugucugugggcaggaagugaagagauccuucuguaaagguuuuuggaauuaugucugcugaauaauaaacuuuuuugaaauaauaaaucugguagaaaaaugagaucuaaaaaaaaaaaaaaaaaaaaaaaaaaaaaaaaaaaaaaaaaaaaaaaaaaaaaaaaaaaaaaaaaaaaaaaaaaaaaaaaaaaaaaaaaaaaaaaaaaaa

SEQ ID NO: 30968 - RNA, 1785 nt, Artificial Sequence
  mRNA product Design b-4 (A100) comprising derived and/or modified sequence from LASV(LASV253-NIG-2011;Clade II)__AIT17670__GPCmut6 (opt1)
aggagagucccgcagucggcguccagcggcucugcuuguucgugugugugucguugcaggccuuauucaagcuuaccaugggccagaucaucaccuucuuccaggaggugccccacgucaucgaggaggugaugaacaucgugcugaucgcccucagccugcuggccauccucaaggggaucuacaacgucgcgaccugcggccuguucgggcugguguccuuccuccugcugugcggccgcagcugcuccacgaccuacaaggggguguacgagcuccagacccuggagcuggacauggccagccucaacaugugcaugccgcuguccugcaccaagaacaacagccaccacuacaucauggucggcaacgagacgggccuggagcucacccugaccaacaccuccaucaucaaccacaaguucugcaaccugagcgacgcccacaagaagaaccucuacgaccacgcccugauguccaucaucagcacguuccaccuguccauccccaacuucaaccaguacgaggccaugagcugcgacuucaacgggggcaagaucuccgugcaguacaaccucagccacaccuacgcgguggacgccgccaaccacugcgggaccaucgccaacggcguccugcagaccuucaugcggauggcguggggcggguccuacaucgcccuggacagcggcaagggguccugggacugcaucaugacgagcuaccaguaccucaucauccagaacaccaccugggaggaccacugccaguucucccgccccagccccaucggcuaccuggggcugcucagccagcggacccgcgacaucuacaucucccggcgccugcugggcacguucaccuggacccucagcgacuccgagggcaacgagacccccgggggcuacugccugacgcgguggaugcugaucgaggccgagcucaagugcuucgggaacaccgccguggccaagugcaacgagaagcacgacgaggaguucugcgacaugcugcgccuguucgacuucugcaagcaggcgauccggcgccucaaggccccggcccagaugagcauccagcugaucaacaaggccgugaacgcccugaucaacgaccagcucaucaugaagaaccaccuccgggacaucaugggcauccccuacugcaacuacuccaaguacugguaccugaaccacaccgucaccgggcgcacgagccugccccggugcuggcugguguccaacggcagcuaccugaacgagacccacuucuccgacgacaucgagcagcaggcggacaacaugaucaccgagcuccugcagaaggaguacaucgaccgccagggcaagaccccgcuggggcugguggaccucuucgucuucagcacguccuucuaccugaucagcaucuuccugcaccucgugaagauccccacccaccggcacaucaucggcaagcccugccccaagccgcaccgccugaaccacauggggaucugcuccugcggccuguacaagcaccccggggugcccgucaaguggaagcggugaggacuaguaauaaggaaacuguaugaaugucugugggcaggaagugaagagauccuucuguaaagguuuuuggaauuaugucugcugaauaauaaacuuuuuugaaauaauaaaucugguagaaaaaugagaucuaaaaaaaaaaaaaaaaaaaaaaaaaaaaaaaaaaaaaaaaaaaaaaaaaaaaaaaaaaaaaaaaaaaaaaaaaaaaaaaaaaaaaaaaaaaaaaaaaaaa

SEQ ID NO: 30969 - RNA, 1785 nt, Artificial Sequence
  mRNA product Design b-4 (A100) comprising derived and/or modified sequence from LASV(LASV254-NIG-2011;Clade II)__AIT17674__GPCmut6 (opt1)
aggagagucccgcagucggcguccagcggcucugcuuguucgugugugugucguugcaggccuuauucaagcuuaccaugggccagaucaucaccuucuuccaggaggugccccacgucaucgaggaggugaugaacaucgugcugaucgcccucagccugcuggccauccucaaggggaucuacaacgucgcgaccugcggccuguucgggcugguguccuuccuccugcugugcggccgcagcugcuccacgaccuacaaggggguguacgagcuccagacccuggagcuggacaugaccaaccucaacaugugcaugccgcugagcugcacgaagaacaacucccaccacuacaucauggucggcaacgagaccggccuggagcucacccugaccaacacgagcaucaucaaccacaaguucugcaaccuguccgacgcccacaagaagaaccucuacaaccacgcccugaugagcaucaucuccaccuuccaccugagcauccccaacuucaaccaguacgaggccauguccugcgacuucaacgggggcaagaucagcgugcaguacaaccucucccacagcuacgccguggacgcggccaaccacugcgggaccaucgccaacggcguccugcagaccuucaugcggauggccuggggcggguccuacaucgcgcuggacagcggcaaggggaacugggacugcaucaugacguccuaccaguaccucaucauccagaacaccaccugggaggaccacugccaguucagccgccccucccccaucggcuaccuggggcugcucagccagcggacccgcgacaucuacaucagccggcgccugcugggcacguucaccuggacccucuccgacagcgagggcaacgagacccccgggggcuacugccugacgcgguggaugcugaucgaggccgagcucaagugcuucgggaacaccgccguggccaagugcaacgagaagcacgacgaggaguucugcgacaugcugcgccuguucgacuucugcaagcaggccauccggcgccucaagaccccggcgcaggccaacauccagcugaucaacaaggccgugaacgcccugaucaacgaccagcucaucaugaagaaccaccuccgggacaucaugggcauccccuacugcaacuacuccaaguacugguaccugaaccacaccgucacggggaagaccagccugccccgcugcuggcugguguccaacggcagcuaccugaacgagacccacuucuccgacgacaucgagcagcaggccgacaacaugaucaccgagcuccugcagaaggaguacauggaccggcagggcaagacgccgcuggggcugguggaccucuucgucuucagcaccuccuucuaccugaucagcaucuuccugcaccucgugaagauccccacccaccgccacgugaucggcaagcccugccccaagccgcaccggcugaaccacauggggaucugcuccugcggccuguacaagcaccccgggguccccgugaaguggaagcgcugaggacuaguaauaaggaaacuguaugaaugucugugggcaggaagugaagagauccuucuguaaagguuuuuggaauuaugucugcugaauaauaaacuuuuuugaaauaauaaaucugguagaaaaaugagaucuaaaaaaaaaaaaaaaaaaaaaaaaaaaaaaaaaaaaaaaaaaaaaaaaaaaaaaaaaaaaaaaaaaaaaaaaaaaaaaaaaaaaaaaaaaaaaaaaaaaa

SEQ ID NO: 30970 - RNA, 1785 nt, Artificial Sequence
  mRNA product Design b-4 (A100) comprising derived and/or modified sequence from LASV(Nig08-A19;Clade III)__ADU56618__GPCmut6 (opt1)
aggagagucccgcagucggcguccagcggcucugcuuguucgugugugugucguugcaggccuuauucaagcuuaccaugggccagaucgugaccuucuuccaggaggucccccacgugaucgaggaggugaugaacaucguccugaucgcccucagcauccuggccauccugaaggggcucuacaacaucgcgaccugcggccugaucgggcuggugacguuccuccugcuguccggccgcagcugcuccaugaccuacaaggggguguacgagcuccagacccuggagcugaacaugaacacccucaacaugugcaugccgcugagcugcacgaagaacaacucccaccacuacaucauggucggcaacgagaccggccuggagcucacccugaccaacacgagccugcuccaccacaaguucugcaaccuguccgacgcccacaagaagaaccuguacgaccacacccucaugagcaucaucuccaccuuccaccugagcauccccaacuucaaccaguacgaggccauguccugcgacuucaacgggggcaagaucaccgugcaguacaaccugagccacuccuacgccaucgacgccgcgaaccacugcgggacgguggccaacggcguccuccagaccuucaugcggauggccuggggcgggagcuacaucgcccuggacuccggccgcgggaagugggacugcaucaugaccagcuaccaguaccugaucauccagaacaccacgugggaggaccacugccaguucucccggcccagccccaucggcuaccucgggcugcugucccagcgcacccgggacaucuacaucagccgccggcuccugggcaccuucaccuggacgcugagcgacuccgagggcaacgagacccccgggggcuacugccucacccgcuggaugcugaucgaggcggagcugaagugcuucgggaacaccgccguggccaagugcaacgagaagcacgacgaggaguucugcgacaugcuccggcuguucgacuucugcaagcaggccauccgccggcugaaggccccggcgcagaugagcauccagcucaucaacaaggccgugaacgcccugaucaacgaccagcugaucaugaagaaccaccuccgcgacaucaugggcauccccuacugcaacuacuccaaguacugguaccugaaccacacgagcaccgggcggaccucccugccccgcugcuggcucgucagcaacggcuccuaccugaacgagacccacuucagcgacgacaucgagcagcaggccgacaacaugaucacggagaugcugcagaaggaguaccuggaccggcagggcaagaccccgcucgggcugguggaccuguucguguucuccaccagcuucuaccucaucuccaucuuccugcaccuggucaagauccccacccaccgccacaucgugggcaagcccugccccaagccgcaccggcucaaccacauggggaucugcagcugcggccuguacaagcagcccggggugcccguccgcuggaagcggugaggacuaguaauaaggaaacuguaugaaugucugugggcaggaagugaagagauccuucuguaaagguuuuuggaauuaugucugcugaauaauaaacuuuuuugaaauaauaaaucugguagaaaaaugagaucuaaaaaaaaaaaaaaaaaaaaaaaaaaaaaaaaaaaaaaaaaaaaaaaaaaaaaaaaaaaaaaaaaaaaaaaaaaaaaaaaaaaaaaaaaaaaaaaaaaaa

SEQ ID NO: 30971 - RNA, 1788 nt, Artificial Sequence
  mRNA product Design b-4 (A100) comprising derived and/or modified sequence from LASV(G1180-SLE-2010;Clade IV)__AIT17168__GPCmut6 (opt1)
aggagagucccgcagucggcguccagcggcucugcuuguucgugugugugucguugcaggccuuauucaagcuuaccaugggccagaucgugaccuucuuccaggaggucccccacgugaucgaggaggugaugaacaucguccugaucgcccucagcauccuggccgugcugaaggggcucuacaacuucgcgaccugcggccugguggggcugcucacguuccugcugcucugcggccgcuccugcaccgccagccgguacaagggggucuacgagcugcagacccuggagcucaacauggagacccugaacaugugcaugccgcuguccugcacgaagaacaacagccaccacuacaucauggugggcaacgagaccggccucgagcugacccugaccaacacguccaucaucaaccacaaguucugcaaccucagcgacgcccacaagaagaaccuguacgaccacgcccugauguccaucaucagcaccuuccaccucuccauccccaacuucaaccaguacgaggccaugagcugcgacuucaacgggggcaagaucuccgugcaguacaaccugagccacuccuacgcgggggacgccgccaaccacugcggcaccgucgccaacggggugcugcagaccuucaugcgcauggcguggggcggcagcuacaucgcccucgacuccgggcacggcagcugggacugcaucaugacguccuaccaguaccugaucauccagaacaccaccugggaggaccacugccaguucagccggcccucccccaucggguaccugggccuccugagccagcgcacccgggacaucuacaucagccgccggcugcucggcacguucaccuggacccuguccgacagcgaggggaaggacaccccgggcggguacugccugacgcgcuggaugcucaucgaggccgagcugaagugcuucggcaacaccgccguggccaagugcaacgagaagcacgacgaggaguucugcgacaugcugcggcuguucgacuucugcaagcaggcgauccagcgccugaaggcccccgcccagauguccauccagcugaucaacaaggccgucaacgcccucaucaacgaccagcugaucaugaagaaccaccuccgggacaucauggggauccccuacugcaacuacagcaaguacugguaccucaaccacaccaccacgggcaagaccucccugcccaagugcuggcuggugagcaacggcuccuaccucaacgagacccacuucagcgacgacaucgagcagcaggcggacaacaugaucaccgagaugcugcagaaggaguacauggagcgccaggggaagacgccgcugggccugguggaccucuucgucuucuccaccagcuucuaccugaucuccaucuuccugcaccucgugaagauccccacccaccggcacaucgugggcaagagcugccccaagccccaccgccugaaccacauggggaucugcuccugcgggcuguacaagcagccgggcguccccgugaaguggaagcggugaggacuaguaauaaggaaacuguaugaaugucugugggcaggaagugaagagauccuucuguaaagguuuuuggaauuaugucugcugaauaauaaacuuuuuugaaauaauaaaucugguagaaaaaugagaucuaaaaaaaaaaaaaaaaaaaaaaaaaaaaaaaaaaaaaaaaaaaaaaaaaaaaaaaaaaaaaaaaaaaaaaaaaaaaaaaaaaaaaaaaaaaaaaaaaaaa

SEQ ID NO: 30972 - RNA, 1788 nt, Artificial Sequence
  mRNA product Design b-4 (A100) comprising derived and/or modified sequence from LASV(G1442-SLE-2011;Clade IV)__AIT17180__GPCmut6 (opt1)
aggagagucccgcagucggcguccagcggcucugcuuguucgugugugugucguugcaggccuuauucaagcuuaccaugggccagaucgugaccuucuuccaggaggucccccacgugaucgaggaggugaugaacaucguccugaucgcccucagcauccuggccgugcugaaggggcucuacaacguggcgaccugcggccugaucgggcuggucacguuccuccugcugugcggccgcuccugcaccaccacccucuacaaggggguguacgagcugcagacgcuggagcucaacauggagacccugaacaugugcaugccgcugagcugcaccaagaacaacucccaccacuacauccgggugggcaacgagaccggccucgagcugacgcugaccaacaccagcaucaucaaccacaaguucugcaaccucuccgacgcccacaagaagaaccuguacgaccacgcccugaugagcaucaucuccaccuuccaccucagcauccccaacuucaaccaguacgaggccauguccugcgacuucaacgggggcaagaucagcguccaguacaaccugucccacagcuacgccggggacgcggccaaccacugcggcacgguggccaacggggugcugcagaccuucaugcgcauggccuggggcggcuccuacaucgcgcucgacagcgggcggggcaacugggacugcaucaugaccuccuaccaguaccugaucauccagaacaccacgugggacgaccacugccaguucagccgccccucccccaucggguaccugggccuccugagccagcggacccgcgacgucuacaucucccggcgccugcucggcaccuucaccuggacgcugagcgacagcgaggggaaggacaccccgggcggguacugccugacccgguggaugcucaucgaggccgagcugaagugcuucggcaacaccgccguggccaagugcaacgagaagcacgacgaggaguucugcgacaugcugcgccucuucgacuucugcaagcaggccauccagcggcugaaggcgcccgcccagauguccauccagcugaucaacaaggccgugaacgcccucaucaacgaccagcugaucaugaagaaccaccuccgcgacaucauggggauccccuacugcaacuacagcaaguacugguaccugaacaacacggccaccggcaagaccucccugcccaagugcuggcugaucagcaacggcuccuaccucaacgagacccacuucagcgacgacaucgagcaggaggcggacaacaugaucacggagaugcugcagaaggaguacauggagcggcaggggaagaccccgcugggccuggucgaccucuucguguucuccaccagcuucuaccugaucuccaucuuccugcaccucgugaagauccccacccaccgccacaucgucggcaagagcugccccaagccccaccggcugaaccacauggggaucugcuccugcgggcuguacaagcagccgggcgugcccgugcgcuggaagcggugaggacuaguaauaaggaaacuguaugaaugucugugggcaggaagugaagagauccuucuguaaagguuuuuggaauuaugucugcugaauaauaaacuuuuuugaaauaauaaaucugguagaaaaaugagaucuaaaaaaaaaaaaaaaaaaaaaaaaaaaaaaaaaaaaaaaaaaaaaaaaaaaaaaaaaaaaaaaaaaaaaaaaaaaaaaaaaaaaaaaaaaaaaaaaaaaa

SEQ ID NO: 30973 - RNA, 1788 nt, Artificial Sequence
  mRNA product Design b-4 (A100) comprising derived and/or modified sequence from LASV(G3010-SLE-2013;Clade IV)__AIT17344__GPCmut6 (opt1)
aggagagucccgcagucggcguccagcggcucugcuuguucgugugugugucguugcaggccuuauucaagcuuaccaugggccagaucgugaccuucuuccaggaggucccccacgugaucgaggaggugaugaacaucguccugaucgcccucagcauccuggccgugcugaaggggcucuacaacuucgcgaccugcggccugguggggcuggucacguuccuccugcugugcggccgcuccugcaccaccagccucuacaaggggguguacgagcugcagacccuggagcucaacauggagacgcugaacaugugcaugccgcuguccugcaccaagaacaacagccaccacuacaucauggugggcaacgagaccggccucgagcugacccugacgaacaccuccaucaucaaccacaaguucugcaaccucagcgacgcccacaagaagaaccuguacaaccacgcccugauguccaucaucagcaccuuccaccucuccauccccaacuucaaccaguacgaggccaugagcugcgacuucaacgggggcaagaucuccguccaguacaaccugagccacuccuacgccggggacgcggccagccacugcggcaccguggccaacggggugcugcagacguucaugcggauggccuggggcggcuccuacaucgcgcucgacagcggguacggcaagugggacugcaucaugaccuccuaccaguaccugaucauccagaacaccaccugggaggaccacugccaguucagccgccccucccccaucggguaccugggccuccugagccagcggacgcgcgacaucuacaucagccggcgccugcucggcaccuucaccuggacccuguccgacagcgaggggaaggacacgccgggcggguacugccugacccgguggaugcucaucgaggccgagcugaagugcuucggcaacaccgccgucgccaagugcaacgagaagcacgacgaggaguucugcgacaugcugcgccucuucgacuucugcaagcaggccauccagcggcugaagacccccgcgcagauguccauccagcugaucaacaaggccgugaacgcccucaucaacgaccagcugaucaugaagaaccaccuccgcgacaucauggggauccccuacugcaacuacagcaaguacugguaccugaaccacacgaccaccggcaagaccucccugcccaagugcuggcuggugagcaacggcuccuaccucaacgagacgcacuucagcgacgacaucgagcagcaggccgacaacaugaucaccgagaugcugcagaaggaguacauggagcggcaggggaagaccccgcugggccuggucgaccucuucguguucuccaccagcuucuaccugaucuccaucuuccugcaccucgugaagauccccacgcaccgccacaucgucggcaagagcugccccaagccccaccggcugaaccacauggggaucugcuccugcgggcuguacaagcagccgggcgugcccgugcgcuggaagcggugaggacuaguaauaaggaaacuguaugaaugucugugggcaggaagugaagagauccuucuguaaagguuuuuggaauuaugucugcugaauaauaaacuuuuuugaaauaauaaaucugguagaaaaaugagaucuaaaaaaaaaaaaaaaaaaaaaaaaaaaaaaaaaaaaaaaaaaaaaaaaaaaaaaaaaaaaaaaaaaaaaaaaaaaaaaaaaaaaaaaaaaaaaaaaaaaa

SEQ ID NO: 30974 - RNA, 1788 nt, Artificial Sequence
  mRNA product Design b-4 (A100) comprising derived and/or modified sequence from LASV(G502-SLE-2009;Clade IV)__AIT17126__GPCmut6 (opt1)
aggagagucccgcagucggcguccagcggcucugcuuguucgugugugugucguugcaggccuuauucaagcuuaccaugggccagaucgugaccuucuuccaggaggucccccacgugaucgaggaggugaugaacaucguccugaucgcccucagcauccuggccgugcugaaggggcucuacaacuucgcgaccugcggccugguggggcugcucacguuccugcugcucugcggccgcuccugcaccaccgggcuguacaagggcgucuacgagcugcagacccucgagcugaacauggagacgcugaacaugugcaugccgcucagcugcaccaagaacaacucccaccacuacaucauggugggcaacgagaccgggcuggagcugacccucacgaacaccagcaucaucaaccacaaguucugcaaccuguccgacgcccacaagaagaaccuguacgaccacgcccucaugagcaucaucuccaccuuccaccugagcauccccaacuucaaccaguacgaggccauguccugcgacuucaacggcgggaagaucagcgugcaguacaaccugucccacagcuacgccggcgacgcggccgaccacugcgggaccgucgccaacggcgugcuccagacguucaugcggauggccuggggcggguccuacaucgcgcuggacagcggccgcgggcggugggacugcaucaugaccuccuaccaguaccugaucauccagaacaccaccugggaggaccacugccaguucagccgccccucccccaucggcuaccucggccugcugagccagcggacgcgcgacaucuacaucucccggcgccuccuggggaccuucaccuggacccugagcgacagcgagggcaaggacacgcccgggggcuacugccucacccgguggaugcugaucgaggccgagcugaagugcuucgggaacaccgccguggccaagugcaacgagaagcacgacgaggaguucugcgacaugcuccgccuguucgacuucugcaagcaggccauccagcggcugaaggcgccggcccagauguccauccagcucaucaacaaggccgucaacgcccugaucaacgaccagcuggugaugaagaaccaccuccgcgacaucaugggcauccccuacugcaacuacagccgguacugguaccugaaccacaccacgaccggccgcaccucccugcccaagugcuggcucgugagcaacggguccuaccugaacgagacccacuucagcgacgacaucgagcagcaggccgacaacaugaucacggagaugcugcagaaggaguacauggagcggcagggcaagaccccgcuggggcucgucgaccuguucguguucuccaccagcuucuaccugaucuccaucuuccuccaccuggugaagauccccacccaccgccacaucgucggcaagagcugccccaagccccaccggcugaaccacauggggaucugcuccugcggccucuacaagcagccgggcgugcccgugaaguggaagcgcugaggacuaguaauaaggaaacuguaugaaugucugugggcaggaagugaagagauccuucuguaaagguuuuuggaauuaugucugcugaauaauaaacuuuuuugaaauaauaaaucugguagaaaaaugagaucuaaaaaaaaaaaaaaaaaaaaaaaaaaaaaaaaaaaaaaaaaaaaaaaaaaaaaaaaaaaaaaaaaaaaaaaaaaaaaaaaaaaaaaaaaaaaaaaaaaaa

SEQ ID NO: 30975 - RNA, 1788 nt, Artificial Sequence
  mRNA product Design b-4 (A100) comprising derived and/or modified sequence from LASV(G733-SLE-2010;Clade IV)__AIT17154__GPCmut6 (opt1)
aggagagucccgcagucggcguccagcggcucugcuuguucgugugugugucguugcaggccuuauucaagcuuaccaugggccagaucgugaccuucuuccaggaggucccccacgugaucgaggaggugaugaacaucguccugaucgcccucagcauccuggccgugcugaaggggcucuacaacuucgcgaccugcggcaucguggggcuggucuccuuccugcuccugugcggccgcagcugcacgaccucccuguacaaggggguguacgagcuccagacccuggagcugaacauggagacccucaacaugugcaugccgcugagcugcacgaagaacaacucccaccacuacaucauggugggcaacgagaccggccuggagcucacccugaccaacacgagcaucaucaaccacaaguucugcaaccuguccgacgcccacaagaagaaccucuacgaccacgcccugaugagcaucaucuccaccuuccaccugagcauccccaacuucaaccaguacgaggccauguccugcgacuucaacgggggcaagaucagcguccaguacaaccucucccacagcuacgccggggacgcggccaaccacugcggcaccaucgccaacggggugcugcagaccuucaugcggauggccuggggcggcuccuacaucgcgcuggacagcgggcgcgaccggugggacugcaucaugacguccuaccaguaccucaucauccagaacaccaccugggaggaccacugccaguucagccgccccucccccaucggcuaccuggggcugcucagccagcggacccgcgacaucuacaucagccggcgccugcugggcacguucaccuggacccucuccgacagcgagggcaaggacacccccgggggcuacugccugacgcgguggaugcugaucgaggccgagcucaagugcuucgggaacaccgccguggccaagugcaacgagaagcacgacgaggaguucugcgacaugcugcgccuguucgacuucugcaagcaggccauccagcggcucaaggcgccggcccagauguccauccagcugaucaacaaggccgucaacgcccugaucaacgaccagcucaucaugaagaaccaccuccgcgacaucaugggcauccccuacugcaacuacagcaaguacugguaccugaaccacaccaccacggggaagaccucccugcccaagugcuggcuggugagcaacggcuccuaccugaacgagacccacuucagcgacgacaucgagcagcaggccgacaacaugaucaccgagaugcuccagaaggaguacauggagcggcagggcaagacgccgcuggggcugguggaccuguucgucuucuccaccagcuucuaccucaucuccaucuuccugcaccuggugaagauccccacccaccgccacguggucggcaagagcugccccaagccccaccggcucaaccacauggggaucugcuccugcggccuguacgggcagccgggcgugcccgugaaguggaagcgcugaggacuaguaauaaggaaacuguaugaaugucugugggcaggaagugaagagauccuucuguaaagguuuuuggaauuaugucugcugaauaauaaacuuuuuugaaauaauaaaucugguagaaaaaugagaucuaaaaaaaaaaaaaaaaaaaaaaaaaaaaaaaaaaaaaaaaaaaaaaaaaaaaaaaaaaaaaaaaaaaaaaaaaaaaaaaaaaaaaaaaaaaaaaaaaaaa

SEQ ID NO: 30976 - RNA, 1788 nt, Artificial Sequence
  mRNA product Design b-4 (A100) comprising derived and/or modified sequence from MOPV/LASV reassortant(IGS-1;Clade IV)__AFY05576__GPCmut6 (opt1)
aggagagucccgcagucggcguccagcggcucugcuuguucgugugugugucguugcaggccuuauucaagcuuaccaugggccagaucgugaccuucuuccaggaggucccccacgugaucgaggaggugaugaacaucguccugaucgcccucagcgugcuggccgugcugaaggggcucuacaacuucgcgaccugcggccuggucgggcuggugacguuccuccugcugugcggccgcuccugcaccaccagccucuacaaggggguguacgagcugcagacccuggagcucaacauggagacgcugaacaugugcaugccgcuguccugcaccaagaacaacagccaccacuacaucauggucggcaacgagaccggccucgagcugacccugacgaacaccuccaucaucaaccacaaguucugcaaccucagcgacgcccacaagaagaaccuguacgaccacgcccugauguccaucaucagcaccuuccaccucuccauccccaacuucaaccaguacgaggccaugagcugcgacuucaacgggggcaagaucuccgugcaguacaaccugagccacuccuacgccggggacgcggccaaccacugcggcaccguggccaacgggguccugcagacguucaugcggauggccuggggcggcagcuacaucgcgcucgacuccgggcgcggcaacugggacugcaucaugaccagcuaccaguaccugaucauccagaacaccaccugggaggaccacugccaguucucccggcccagccccaucggguaccugggccuccugucccagcgcacgcgggacaucuacaucagccgccggcugcucggcaccuucaccuggacccugagcgacuccgagggggaggacacgccgggcggguacugccugacccgcuggaugcucaucgaggccgagcugaagugcuucggcaacaccgccguggccaagugcaacgagaagcacgacgaggaguucugcgacaugcugcggcuguucgacuucugcaagcaggccauccagcgccugaaggcgcccgcccagaugagcauccagcugaucaacaaggccgugaacgcccucaucaacgaccagcugaucaugaagaaccaccuccgggacaucauggggauccccuacugcaacuacuccaaguacugguaccucaaccacaccacgaccggccgcaccagccugcccaagugcuggcuggucuccaacggcagcuaccucaacgagacccacuucuccgacgacaucgagcagcaggccgacaacaugaucacggagaugcugcagaaggaguacauggagcggcaggggaagaccccgcugggccugguggaccucuucguguucagcaccuccuucuaccugaucagcaucuuccugcaccucgucaagauccccacccaccgccacaucguggggaaguccugccccaagccccaccggcugaaccacaugggcaucugcagcugcgggcuguacaagcagccgggcgugcccgucaaguggaagcgcugaggacuaguaauaaggaaacuguaugaaugucugugggcaggaagugaagagauccuucuguaaagguuuuuggaauuaugucugcugaauaauaaacuuuuuugaaauaauaaaucugguagaaaaaugagaucuaaaaaaaaaaaaaaaaaaaaaaaaaaaaaaaaaaaaaaaaaaaaaaaaaaaaaaaaaaaaaaaaaaaaaaaaaaaaaaaaaaaaaaaaaaaaaaaaaaaa

SEQ ID NO: 30977 - RNA, 1788 nt, Artificial Sequence
  mRNA product Design b-4 (A100) comprising derived and/or modified sequence from LASV(LM765-SLE-2012;Clade IV)__AIT17814__GPCmut6 (opt1)
aggagagucccgcagucggcguccagcggcucugcuuguucgugugugugucguugcaggccuuauucaagcuuaccaugggccagaucgugaccuucuuccaggaggucccccacgugaucgaggaggugaugaacaucguccugaucgcccucagcauccuggccgugcugaaggggcucuacaacuucgcgaccugcggccugguggggcuggucacguuccuccugcugugcggccgcuccugcaccaccagccucuacaaggggguguacgagcugcagacccuggagcucaacauggagacgcugaacaugugcaugccgcuguccugcaccaagaacaacagccaccacuacaucauggugggcaacgagaccggccucgagcugacccugacgaacaccuccaucaucgaccacaaguucugcaaccucagcgacgcccaccggaagaaccuguacgaccacgcccugauguccaucaucagcaccuuccaccucuccauccccaacuucaaccaguacgaggccaugagcugcgacuucaacgggggcaagaucuccguccaguacaaccugagccacuccuacgccaaggacgcggccgaccacugcgggaccguggccaacggcgugcugcagacguucaugcgcauggccuggggcgggagcuacaucgcgcucgacuccggccgggggcgcugggacugcaucaugaccagcuaccaguaccugaucauccagaacaccaccugggaggaccacugccaguucucccggcccagccccaucggcuaccuggggcuccugucccagcgcacgcgggacaucuacaucagccgccggcugcucggcaccuucaccuggacccugagcgacuccgagggcaaggacacgcccgggggcuacugccugacccgcuggaugcucaucgaggccgagcugaagugcuucgggaacaccgccgucgccaagugcaacgagaagcacgacgaggaguucugcgacaugcugcggcuguucgacuucugcaagcaggccauccagcgccugaaggcgccggcccagaugagcauccagcugaucaacaaggccgugaacgcccucaucaacgaccagcugaucaugaagaaccaccuccgggacaucaugggcauccccuacugcaacuacuccaaguacugguaccucaaccacaccacgaccgggaagaccagccugcccaagugcuggcugguguccaacggcagcuaccucaacgagacccacuucuccgacgacaucgagcagcaggccgacaacaugaucacggagaugcugcagaaggaguacauggagcgccagggcaagaccccgcuggggcuggucgaccucuucguguucagcaccuccuucuaccugaucagcaucuuccugcaccucgugaagauccccacccaccggcacaucgucggcaagcccugccccaagccgcaccgccugaaccacauggggaucugcuccugcggccuguacaagcagcccggggugcccgugaaguggaagcggugaggacuaguaauaaggaaacuguaugaaugucugugggcaggaagugaagagauccuucuguaaagguuuuuggaauuaugucugcugaauaauaaacuuuuuugaaauaauaaaucugguagaaaaaugagaucuaaaaaaaaaaaaaaaaaaaaaaaaaaaaaaaaaaaaaaaaaaaaaaaaaaaaaaaaaaaaaaaaaaaaaaaaaaaaaaaaaaaaaaaaaaaaaaaaaaaa

SEQ ID NO: 30978 - RNA, 1788 nt, Artificial Sequence
  mRNA product Design b-4 (A100) comprising derived and/or modified sequence from LASV(LM776-SLE-2012;Clade IV)__AIT17824__GPCmut6 (opt1)
aggagagucccgcagucggcguccagcggcucugcuuguucgugugugugucguugcaggccuuauucaagcuuaccaugggccagaucgugaccuucuuccaggaggucccccacgugaucgaggaggugaugaacaucguccugaucgcccucagcauccuggccgugcugaaggggcucuacaacuucgcgaccugcggccugguggggcuggucacguuccuccugcugugcggccgcuccugcaccaccagcguguacaaggggguguacgagcuccagacccuggagcugaacauggagacgcucaacaugugcaugccgcuguccugcaccaagaacaacagccaccacuacaucauggucggcaacgagaccggccuggagcucacccugacgaacaccuccaucaucaaccacaaguucugcaaccugagcgacgcccacaagaagaaccucuacgaccacgcccugauguccaucaucagcaccuuccaccuguccauccccaacuucaaccaguacgaggccaugagcugcgacuucaacgggggcaagaucuccgugcaguacaaccucagccacuccuacgccggggacgcggccaaccacugcggcaccguggccaacgggguccugcagacguucaugcggauggccuggggcggcagcuacaucgcgcuggacuccgggcacggcaagugggacugcaucaugaccagcuaccaguaccucaucauccagaacaccaccugggaggaccacugccaguucucccgccccagccccaucggguaccugggccugcucucccagcggacgcgcgacaucuacaucagccggcgccugcugggcaccuucaccuggacccucagcgacuccgaggggaaggacacgccgggcggguacugccugacccgguggaugcugaucgaggccgagcucaagugcuucggcaacaccgccguggccaagugcaacgagaagcacgacgaggaguucugcgacaugcugcgccuguucgacuucugcaagcaggccauccagcggcucaaggcgcccgcccagaugagcauccagcugaucaacaaggccgugaacgcccugaucaacgaccagcucaucaugaagaaccaccuccgcgacaucauggggauccccuacugcaacuacuccaaguacugguaccugaaccacaccacgaccggcaagaccagccugcccaagugcuggcuggucuccaacggcagcuaccugaacgagacccacuucuccgacgacaucgagcagcaggccgacaacaugaucacggagaugcuccagaaggaguacauggagcggcaggggaagaccccgcugggccugguggaccuguucguguucagcaccuccuucuaccucaucagcaucuuccugcaccuggucaagauccccacccaccgccacaucguggggaaguccugccccaagccccaccggcucaaccacaugggcaucugcagcugcgggcuguacaagcagccgggcgugcccguccgcuggaagcggugaggacuaguaauaaggaaacuguaugaaugucugugggcaggaagugaagagauccuucuguaaagguuuuuggaauuaugucugcugaauaauaaacuuuuuugaaauaauaaaucugguagaaaaaugagaucuaaaaaaaaaaaaaaaaaaaaaaaaaaaaaaaaaaaaaaaaaaaaaaaaaaaaaaaaaaaaaaaaaaaaaaaaaaaaaaaaaaaaaaaaaaaaaaaaaaaa

SEQ ID NO: 30979 - RNA, 1788 nt, Artificial Sequence
  mRNA product Design b-4 (A100) comprising derived and/or modified sequence from LASV(Mad39;Clade IV)__ANH09722__GPCmut6 (opt1)
aggagagucccgcagucggcguccagcggcucugcuuguucgugugugugucguugcaggccuuauucaagcuuaccaugggccagaucgugaccuucuuccaggaggucccccacgugaucgaggaggugaugaacaucguccugaucgcccucagcauccuggccgugcugaaggggcucuacaacguggcgaccugcggccugaucgggcuggucacguuccuccugcugugcggccgcuccugcaccaccacccucuacaaggggguguacgagcugcaggcccuggagcucaacauggagacgcugaacaugugcaugccgcugagcugcaccaagaacaacucccaccacuacauccgggugggcaacgagaccggccucgagcugacccugacgaacaccagccucaucaaccacaaguucugcaaccuguccgacgcccacaagaagaaccuguacgaccacgcccucaugagcaucaucuccaccuuccaccugagcauccccaacuucaaccaguacgaggccauguccugcgacuucaacgacgggaagaucagcguccaguacaaccugucccacaccuacgcgggcgacacggccaaccacugcgggaccguggccaacggcgugcuccagaccuucaugcgcauggccuggggcgggagcuacaucgcgcuggacuccggccgcgggggcugggacugcaucaugaccagcuaccaguaccugaucauccagaacacgaccugggaggaccacugccaguucucccggcccagccccaucggguaccucggccugcugucccagcggacccgcgacaucuacaucagccggcgccuccugggcaccuucacguggacccuguccgacagcgaggggaaggacaccccgggcggguacugccucacccgguggaugcugaucgaggccgagcugaagugcuucggcaacacggccgucgccaagugcaacgagaagcacgacgaggaguucugcgacaugcuccgccuguucgacuucugcaagcaggccauccagcggcugaaggcgcccgcccagaugagcauccagcucaucaacaaggccgugaacgcccugaucaacgaccagcugaucaugaagaaccaccuccgcgacaucauggggauccccuacugcaacuacuccaaguacugguaccugaaccacaccgugaccggcaagaccagccugcccaagugcuggcucgucuccaacggcagcuaccugaacgagacgcacuucuccgacgacaucgagcagcaggccgacaacaugaucaccgagaugcugcagaaggaguacauggagcggcaggggaagaccccgcugggccucguggaccuguucguguucagcaccuccuucuaccugaucagcaucuuccuccaccuggucaagauccccacgcaccgccacgugguggggaagcccugccccaagccgcaccggcugaaccacaugggcaucugcuccugcggguucuacaagcagcccggcguccccgugcgcuggaagcggugaggacuaguaauaaggaaacuguaugaaugucugugggcaggaagugaagagauccuucuguaaagguuuuuggaauuaugucugcugaauaauaaacuuuuuugaaauaauaaaucugguagaaaaaugagaucuaaaaaaaaaaaaaaaaaaaaaaaaaaaaaaaaaaaaaaaaaaaaaaaaaaaaaaaaaaaaaaaaaaaaaaaaaaaaaaaaaaaaaaaaaaaaaaaaaaaa

SEQ ID NO: 30980 - RNA, 1788 nt, Artificial Sequence
  mRNA product Design b-4 (A100) comprising derived and/or modified sequence from LASV(Z0947-SLE-2011;Clade IV)__AIT17840__GPCmut6 (opt1)
aggagagucccgcagucggcguccagcggcucugcuuguucgugugugugucguugcaggccuuauucaagcuuaccaugggccagaucgugaccuucuuccaggaggucccccacgugaucgaggaggugaugaacaucguccugaucgcccucagcauccuggccgugcugaaggggcucuacaacuucgcgaccugcggccugguggggcuggucacguuccuccugcugugcggccgcuccugcaccaucagccucuacaaggggguguacgagcugcagacccuggagcucaacauggagacccugaacaugugcaugccgcuguccugcacgaagaacaacagccaccacuacaucauggugggcaacgagaccggccucgagcugacccugaccaacacguccaucaucaaccacaaguucugcaaccucagcgacgcccacaagaagaaccuguacgaccacgcccugauguccaucaucagcaccuuccaccucuccauccccaacuucaaccaguacgaggccaugagcugcgacuucaacgggggcaagaucuccguccaguacaaccugagccacuccuacgccggggacgcggccaaccacugcggcaccguggccaacggggugcugcagaccuucaugcggauggccuggggcggcagcuacaucgcgcucgacuccgggcgcgaccggugggacugcaucaugacgagcuaccaguaccugaucauccagaacaccaccugggaggaccacugccaguucucccgccccagccccaucggcuaccuggggcuccugucccagcggacccgcgacaucuacaucagccggcgccugcucggcacguucaccuggacccugagcgacuccgagggcaaggacacccccgggggcuacugccugacgcgguggaugcucaucgaggccgagcugaagugcuucgggaacaccgccgucgccaagugcaacgagaagcacgacgaggaguucugcgacaugcugcgccucuucgacuucugcaagcaggccauccagcggcugaaggcgccggcccagaugagcauccagcugaucaacaaggccgugaacgcccucaucaacgaccagcugaucaugaagaaccaccuccgcgacaucaugggcauccccuacugcaacuacuccaaguacugguaccugaaccacaccaccacggggaagaccagccugcccaagugcuggcugguguccaacggcagcuaccucaacgagacccacuucuccgacgacaucgagcagcaggccgacaacaugaucaccgagaugcugcagaaggaguacauggagcggcagggcaagacgccgcuggggcuggucgaccucuucguguucagcaccuccuucuaccugaucagcaucuuccugcaccucgugaagauccccacccaccgccacaucgucggcaagcccugccccaagccgcaccggcugaaccacauggggaucugcuccugcggccuguacaagcagcccggggugcccgugaaguggaagcgcugaggacuaguaauaaggaaacuguaugaaugucugugggcaggaagugaagagauccuucuguaaagguuuuuggaauuaugucugcugaauaauaaacuuuuuugaaauaauaaaucugguagaaaaaugagaucuaaaaaaaaaaaaaaaaaaaaaaaaaaaaaaaaaaaaaaaaaaaaaaaaaaaaaaaaaaaaaaaaaaaaaaaaaaaaaaaaaaaaaaaaaaaaaaaaaaaa

SEQ ID NO: 30981 - RNA, 1788 nt, Artificial Sequence
  mRNA product Design b-4 (A100) comprising derived and/or modified sequence from LASV(Josiah;Clade IV)__NP_694870__GPCmut6 (opt4)
aggagagucccgcagucggcguccagcggcucugcuuguucgugugugugucguugcaggccuuauucaagcuuaccaugggccagaucgugaccuucuuccaggaggugccccacgugaucgaggaggugaugaacaucgugcugaucgcccugagcgugcuggccgugcugaagggccuguacaacuucgccaccugcggccuggugggccuggugaccuuccugcugcugugcggcagaagcugcaccaccagccuguacaagggcguguacgagcugcagacccuggagcugaacauggagacccugaacaugugcaugccccugagcugcaccaagaacaacagccaccacuacaucauggugggcaacgagaccggccuggagcugacccugaccaacaccagcaucaucaaccacaaguucugcaaccugagcgacgcccacaagaagaaccuguacgaccacgcccugaugagcaucaucagcaccuuccaccugagcauccccaacuucaaccaguacgaggccaugagcugcgacuucaacggcggcaagaucagcgugcaguacaaccugagccacagcuacgccggcgacgccgccaaccacugcggcaccguggccaacggcgugcugcagaccuucaugagaauggccuggggcggcagcuacaucgcccuggacagcggcagaggcaacugggacugcaucaugaccagcuaccaguaccugaucauccagaacaccaccugggaggaccacugccaguucagcagacccagccccaucggcuaccugggccugcugagccagagaaccagagacaucuacaucagcagaagacugcugggcaccuucaccuggacccugagcgacagcgagggcaaggacacccccggcggcuacugccugaccagauggaugcugaucgaggccgagcugaagugcuucggcaacaccgccguggccaagugcaacgagaagcacgacgaggaguucugcgacaugcugagacuguucgacuucugcaagcaggccauccagagacugaaggcccccgcccagaugagcauccagcugaucaacaaggccgugaacgcccugaucaacgaccagcugaucaugaagaaccaccugagagacaucaugggcauccccuacugcaacuacagcaaguacugguaccugaaccacaccaccaccggcagaaccagccugcccaagugcuggcuggugagcaacggcagcuaccugaacgagacccacuucagcgacgacaucgagcagcaggccgacaacaugaucaccgagaugcugcagaaggaguacauggagagacagggcaagaccccccugggccugguggaccuguucguguucagcaccagcuucuaccugaucagcaucuuccugcaccuggugaagauccccacccacagacacaucgugggcaagagcugccccaagccccacagacugaaccacaugggcaucugcagcugcggccuguacaagcagcccggcgugcccgugaaguggaagagaugaggacuaguaauaaggaaacuguaugaaugucugugggcaggaagugaagagauccuucuguaaagguuuuuggaauuaugucugcugaauaauaaacuuuuuugaaauaauaaaucugguagaaaaaugagaucuaaaaaaaaaaaaaaaaaaaaaaaaaaaaaaaaaaaaaaaaaaaaaaaaaaaaaaaaaaaaaaaaaaaaaaaaaaaaaaaaaaaaaaaaaaaaaaaaaaaa

SEQ ID NO: 30982 - RNA, 1785 nt, Artificial Sequence
  mRNA product Design b-4 (A100) comprising derived and/or modified sequence from LASV(LP;Clade I)__AAF86701__GPCmut6 (opt4)
aggagagucccgcagucggcguccagcggcucugcuuguucgugugugugucguugcaggccuuauucaagcuuaccaugggccagaucaucaccuucuuccaggaggugccccacgugaucgaggaggugaugaacaucgugcugaucgcccugagccugcuggccauccugaagggccuguacaacaucgccaccugcggcaucaucggccugguggccuuccuguuccugugcggcaagagcugcagccugacccugaagggcggcuacgagcugcagacccuggagcugaacauggagacccugaacaugugcaugccccugagcugcaccaagaacagcagccaccacuacaucagagugggcaacgagaccggccuggagcugacccugaccaacaccagcaucaucaaccacaaguucugcaaccugagcgacgcccacaagaagaaccuguacgaccacgcccugaugagcaucaucagcaccuuccaccugagcauccccaacuucaaccaguacgaggccaugagcugcgacuucaacggcggcaagaucagcgugcaguacaaccugagccacagcuacgccggcgacgccgccgagcacugcggcaccguggccaacggcgugcugcagaccuucaugagaauggccuggggcggcagauacaucgcccuggacagcggcaagggcaacugggacugcaucaugaccagcuaccaguaccugaucauccagaacaccaccugggaggaccacugccaguucagcagacccagccccaucggcuaccugggccugcugagccagagaaccagagacaucuacaucagcagaagacugcugggcaccuucaccuggacccugagcgacagcgagggcaacgagacccccggcggcuacugccugaccagauggaugcugaucgaggccgagcugaagugcuucggcaacaccgccguggccaagugcaacgagaagcacgacgaggaguucugcgacaugcugagacuguucgacuucugcaagcaggccaucagaagacugaaggcccccgcccagaugagcauccagcugaucaacaaggccgugaacgcccugaucaacgaccagcugaucaugaagaaccaccugagagacaucaugggcauccccuacugcaacuacagcaaguacugguaccugaaccacaccagcagcggcagaaccagccugcccaagugcuggcugaucagcaacggcagcuaccugaacgagacccaguucagcgacgacaucgagcagcaggccgacaacaugaucaccgagaugcugcagaaggaguacaucgagagacagggcaagaccccccugggccugguggacaucuucaucuucagcaccagcuucuaccugaucagcaucuuccugcaccugaucaagauccccacccacagacacaucgugggcaagcccugccccaagccccacagacugaaccacaugggcgugugcagcugcggccuguacaagcaccccggcgugcccaccaaguggaagagaugaggacuaguaauaaggaaacuguaugaaugucugugggcaggaagugaagagauccuucuguaaagguuuuuggaauuaugucugcugaauaauaaacuuuuuugaaauaauaaaucugguagaaaaaugagaucuaaaaaaaaaaaaaaaaaaaaaaaaaaaaaaaaaaaaaaaaaaaaaaaaaaaaaaaaaaaaaaaaaaaaaaaaaaaaaaaaaaaaaaaaaaaaaaaaaaaa

SEQ ID NO: 30983 - RNA, 1785 nt, Artificial Sequence
  mRNA product Design b-4 (A100) comprising derived and/or modified sequence from LASV(803213;Clade II)__AAF86703__GPCmut6 (opt4)
aggagagucccgcagucggcguccagcggcucugcuuguucgugugugugucguugcaggccuuauucaagcuuaccaugggccagaucaucaccuucuuccaggaggugccccacgugaucgaggaggugaugaacaucgugcugaucgcccugagccugcuggccauccugaagggcaucuacaacguggccaccugcggccuguucggccugaucagcuuccugcugcugugcggcagaagcugcagcgugaccuacaagggcguguacgagcugcagacccuggagcugaacauggccaaccugaacaugugcaugccccugagcugcaccaagaacaacagccaccacuacaucauggugggcaacgagaccggccuggagcugacccugaccaacaccagcaucaucaaccacaaguucugcaaccugagcgacgcccacaagaagaaccuguacgaccacgcccugaugagcaucaucagcaccuuccaccugagcauccccaacuucaaccaguacgaggccaugagcugcgacuucaacggcggcaagaucagcgugcaguacaaccugagccacagcuucgccguggacgccgccaaccacugcggcaccaucgccaacggcgugcugcagaccuucaugagaauggccuggggcggcagcuacaucgcccuggacagcggcaagggcaacugggacugcaucaugaccagcuaccaguaccugaucauccagaacaccaccugggaggaccacugccaguucagcagacccagccccaucggcuaccugggccugcugagccagagaaccagagacaucuacaucagcagaagacugcugggcaccuucaccuggacccugagcgacagcgagggcaacgaggcccccggcggcuacugccugaccagauggaugcugaucgaggccgagcugaagugcuucggcaacaccgccguggccaagugcaacgagaagcacgacgaggaguucugcgacaugcugagacuguucgacuucugcaagcaggccaucaagagacugaagacccccgcccagaugagcauccagcugaucaacaaggccgugaacgcccugaucaacgaccagcugaucaugaagaaccaccugagagacaucaugggcauccccuacugcaacuacagcagauacugguaccugaaccacaccgugaccggcaagaccagccugcccagaugcuggcuggugagcaacggcagcuaccugaacgagacccacuucagcgacgacaucgagcagcaggccgacaacaugaucaccgagaugcugcagaaggaguacauggacagacagggcaagaccccccugggccugguggaccuguucguguucagcaccagcuucuaccugaucagcaucuuccugcaccuggugaagauccccacccacagacacaucgugggcaagcccugccccaagccccacagacugaaccacaugggcaucugcagcugcggccuguacaagcaccccggcgugcccgugaaguggaagagaugaggacuaguaauaaggaaacuguaugaaugucugugggcaggaagugaagagauccuucuguaaagguuuuuggaauuaugucugcugaauaauaaacuuuuuugaaauaauaaaucugguagaaaaaugagaucuaaaaaaaaaaaaaaaaaaaaaaaaaaaaaaaaaaaaaaaaaaaaaaaaaaaaaaaaaaaaaaaaaaaaaaaaaaaaaaaaaaaaaaaaaaaaaaaaaaaa

SEQ ID NO: 30984 - RNA, 1785 nt, Artificial Sequence
  mRNA product Design b-4 (A100) comprising derived and/or modified sequence from LASV(GA391;Clade III)__CAA36645__GPCmut6 (opt4)
aggagagucccgcagucggcguccagcggcucugcuuguucgugugugugucguugcaggccuuauucaagcuuaccaugggccagaucgugaccuucuuccaggaggugccccacgugaucgaggaggugaugaacaucgugcugaucgcccugagcauccuggccauccugaagggccuguacaacguggccaccugcggccugaucggccuggugaccuuccugcugcugagcggcagaagcugcagccugaucuacaagggcaccuacgagcugcagacccuggagcugaacauggagacccugaacaugugcaugccccugagcugcaccaagaacaacagccaccacuacaucagagugggcaacgagaccggccuggagcugacccugaccaacaccagcauccugaaccacaaguucugcaaccugagcgacgcccacaagagaaaccuguacgaccacagccugaugagcaucaucagcaccuuccaccugagcauccccaacuucaaccaguacgaggccaugagcugcgacuucaacggcggcaagaucaccgugcaguacaaccugagccacagcuucgccguggacgccgccggccacugcggcacccuggccaacggcgugcugcagaccuucaugagaauggccuggggcggcagcuacaucgcccuggacagcggcagaggcaacugggacugcaucaugaccagcuaccaguaccugaucauccagaacaccaccugggacgaccacugccaguucagcagacccagccccaucggcuaccugggccugcugagccagagaaccagagacaucuacaucagcagaagacugcugggcaccuucaccuggacccugagcgacagcgagggcaacgagacccccggcggcuacugccugaccagauggaugcugaucgaggccgagcugaagugcuucggcaacaccgccguggccaagugcaacgagaagcacgacgaggaguucugcgacaugcugagacuguucgacuucugcaagcaggccaucagaagacugaagacccccgcccagaugagcauccagcugaucaacaaggccgugaacgcccugaucaacgaccagcugaucaugaagaaccaccugagagacaucaugggcauccccuacugcaacuacagcagauacugguaccugaaccacaccagcaccggcaagaccagccugcccagaugcuggcugaucagcaacggcagcuaccugaacgagaccaaguucagcgacgacaucgagcagcaggccgacaacaugaucaccgagaugcugcagaaggaguacaucgacagacagggcaagaccccccugggccugguggaccuguucguguucagcaccagcuucuaccugaucagcaucuuccugcaccuggugaagauccccacccacagacacaucgugggcaagcccugccccaagccccacagacugaaccacaugggcaucugcagcugcggccuguacaagcagcccggcgugcccgugagauggaagagaugaggacuaguaauaaggaaacuguaugaaugucugugggcaggaagugaagagauccuucuguaaagguuuuuggaauuaugucugcugaauaauaaacuuuuuugaaauaauaaaucugguagaaaaaugagaucuaaaaaaaaaaaaaaaaaaaaaaaaaaaaaaaaaaaaaaaaaaaaaaaaaaaaaaaaaaaaaaaaaaaaaaaaaaaaaaaaaaaaaaaaaaaaaaaaaaaa

SEQ ID NO: 30985 - RNA, 1788 nt, Artificial Sequence
  mRNA product Design b-4 (A100) comprising derived and/or modified sequence from LASV(AV;Clade V)__CCA30314__GPCmut6 (opt4)
aggagagucccgcagucggcguccagcggcucugcuuguucgugugugugucguugcaggccuuauucaagcuuaccaugggccagaucgugaccuucuuccaggaggugccccacgugaucgaggaggugaugaacaucgugcugaucgcccugagcauccuggccgugcugaagggccuguacaacaucgccaccugcggccugaucggccugaucaccuuccugcugcugugcggcagaagcugcagcagcaaccuguacaagggcguguacgagcugcagagccuggaccugaacauggagacccugaacaugugcaugccccugagcugcaccaagaacaacagccaccacuacaucagagugggcaacgacaccggccuggagcugacccugaccaacaccagcauccugaaccacaaguucugcaaccugagcgacgcccacaagaaggaccuguacgaccacgcccugaugagcaucaucagcaccuuccaccugagcauccccaacuucaaccaguacgaggccaugagcugcgacuucaacggcggcaagaucagcgugcaguacaaccugagccacagcuacgccaucgacgccgccaaccacugcggcaccguggccaacggcauccugcagaccuucaugagaauggccuggggcggcagcuacaucgcccuggacagcggcagaggcaacugggacugcaucaugaccagcuaccaguaccugaucauccagaacaccaccugggagaaccacugccaguucagcagacccagccccaucggcuaccugggccugcugagccagagaaccagagacaucuacaucagcagaagacugcugggcaccuucaccuggacccugagcgacagcgagggcaacgccacccccggcggcuacugccugaccagauggaugcugaucgaggccgagcugaagugcuucggcaacaccgccguggccaagugcaacgagaagcacgacgaggaguucugcgacaugcugagacuguucgacuucugcaagcaggccaucagcagacugaagagccccgcccagaugagcauccagcugaucaacaaggccgugaacgcccugaucaacgaccagcugaucaugaagaaccaccugagagacaucaugggcauccccuacugcaacuacagcaaguacugguaccugaaccacaccaucaccggcaagaccagccugcccaagugcuggcuggugagcaacggcagcuaccugaacgagacccacuucagcgacgacaucgagcagcaggccgacaacaugaucaccgagaugcugcagaaggaguacauggagagacagggcaagaccccccugggccugguggaccuguucguguucagcaccagcuucuaccugaucagcaucuuccugagacuggugaagauccccacccacagacacaucgugggcaagcccugccccaagccccacagacugaaccacaugggcaucugcagcugcggccuguacaagcagcccggcgugcccgugagauggaagagaugaggacuaguaauaaggaaacuguaugaaugucugugggcaggaagugaagagauccuucuguaaagguuuuuggaauuaugucugcugaauaauaaacuuuuuugaaauaauaaaucugguagaaaaaugagaucuaaaaaaaaaaaaaaaaaaaaaaaaaaaaaaaaaaaaaaaaaaaaaaaaaaaaaaaaaaaaaaaaaaaaaaaaaaaaaaaaaaaaaaaaaaaaaaaaaaaa

SEQ ID NO: 30986 - RNA, 1785 nt, Artificial Sequence
  mRNA product Design b-4 (A100) comprising derived and/or modified sequence from LASV(Togo/2016/7082;Clade VI)__AMR44577__GPCmut6 (opt4)
aggagagucccgcagucggcguccagcggcucugcuuguucgugugugugucguugcaggccuuauucaagcuuaccaugggccagaucaucaccuucuuccaggaggugccccacgugaucgaggaggugaugaacaucgugcugaucgcccugagccugcuggccauccugaagggcguguacaacguggccaccugcggcaucaucggccuggugaccuuccuguuccugugcggcagaagcugcagccugaucuacaagggcagcuacgagcugcagacccuggagcugaacauggagacccugaacaugugcaugccccugagcugcaccaagaacagcagccaccacuacaucagagugggcaacgagaccggccuggagcugacccugaccaacaccagcaucaucaaccacaaguucugcaaccugagcgacgcccacaagagaaaccuguacgaccacgcccugaugagcauccugagcaccuuccaccugagcauccccaacuucaaccaguacgaggccaugagcugcgacuucaacggcggcaagaucagcgugcaguacaaccugagccacgccuacgccguggacgccgccgagcacugcggcaccguggccaacggcgugcugcagaccuucaugagaauggccuggggcggcagcuacaucgcccuggacagcggcagaggcaacugggacugcaucaugaccagcuaccaguaccugaucauccagaacaccaccugggaggaccacugccaguucagcagacccagccccaucggcuaccugggccugcugagccagagaaccagagacaucuacaucagcagaagacugcugggcaccuucaccuggacccugagcgacagcgagggcaacgagacccccggcggcuacugccugaccagauggaugcugaucgaggccgagcugaagugcuucggcaacaccgccguggccaagugcaacgagaagcacgacgaggaguucugcgacaugcugagacuguucgacuucugcaagcaggccauccagagacugaagagccccgcccagaugagcauccagcugaucaacaaggccgugaacgcccugaucaacgaccagcugaucaugaagaaccaccugagagacaugaugggcauccccuacugcaacuacagcaaguacugguaccugaaccacaccagcagcggcagaaccagccugcccaagugcuggcuggugagcaacggcagcuaccugaacgagacccacuucagcgacgacaucgagcagcaggccgacaacaugaucaccgagaugcugcagaaggaguacaucgacagacagggcaagaccccccugggccugguggaccuguucguguucagcaccagcuucuaccugaucagcaucuuccugcaccugaucaagauccccacccacagacacaucgugggcaagcccugccccaagccccacagacugaaccacaugggcaucugcagcugcggccuguacaagcagcccggcgugcccaccagauggaagagaugaggacuaguaauaaggaaacuguaugaaugucugugggcaggaagugaagagauccuucuguaaagguuuuuggaauuaugucugcugaauaauaaacuuuuuugaaauaauaaaucugguagaaaaaugagaucuaaaaaaaaaaaaaaaaaaaaaaaaaaaaaaaaaaaaaaaaaaaaaaaaaaaaaaaaaaaaaaaaaaaaaaaaaaaaaaaaaaaaaaaaaaaaaaaaaaaa

SEQ ID NO: 30987 - RNA, 1785 nt, Artificial Sequence
  mRNA product Design b-4 (A100) comprising derived and/or modified sequence from LASV(KAK-428;Clade n.d. (VII))__ANH09740__GPCmut6 (opt4)
aggagagucccgcagucggcguccagcggcucugcuuguucgugugugugucguugcaggccuuauucaagcuuaccaugggccagaucgugaccuucuuccaggaggugccccacgugaucgaggaggugaugaacaucgugcugaucgcccugagccugcuggccauccugaagggccuguacaacuucgccaccugcggcgugaucggccugaucaccuuccugcugcugugcggcagaagcugcagcgccaccuacaagggccaguacgagcugcagacccuggagcugaacauggagagccugaacaugugcaugccccugagcugcaccaagaacaacagccaccacuacaucagagccggcaacaacaccggccuggagcugacccugaccaacaccagcaucaucagccacaaguucugcaaccugagcgacgcccacaagaagaaccuguacgaccacacccugaugagcaucaucaccaccuuccaccugagcauccccaacuucaaccaguacgaggccaugagcugcgacuucaacggcggcaagaucagcauccaguacaaccugagccacagcuacgccggcgacgccgcccagcacugcggcaccguggccaacggcgugcugcagaccuucaugagaauggccuggggcggcagcuaccuggcccuggacagcggcagaagaggcugggacugcaucaucagcagcuaccaguaccugaucauccagaacaccaccugggacgaccacugccaguucagcagacccagccccaucggcuaccugggcuucgugagccagaagaccagagacaucuacaucagcagaagacugcugggcaccuucaccuggacccugagcgacagcgagggccacgacaugcccggcggcuacugccugaccagauggaugcugaucgaggccgaccugaagugcuucggcaacaccgccguggccaagugcaacgagaagcacgacgaggaguucugcgacauguggagacuguucgacuucugcaagcaggccauccagagacugaaggcccccgcccagaugaacauccagcugaucaacaaggccgugaacgcccugaucaacgaccagcugaugaugaagaaccaccugagagacaucaugggcauccccuacugcaacuacagcaaguucugguaccugaacaacaccaccaccggcagaaccagccugcccagaugcuggcugaucagcaacggcagcuaccugaacgagacccacuucagcgacgacaucgagcagcaggccgacaacaugaucaccgagaugcugcagaaggaguacauggacagacagggcaagaccccccugggccugguggaccuguucguguucagcaccagcuucuaccugaucaccaucuuccugcaccuggugaagauccccacccacagacacaucgugggcaagcccugccccaagccccacagacugaaccacaugggcaucugcagcugcggccuguacaagcagcccggcgugcccgugagauggaagagaugaggacuaguaauaaggaaacuguaugaaugucugugggcaggaagugaagagauccuucuguaaagguuuuuggaauuaugucugcugaauaauaaacuuuuuugaaauaauaaaucugguagaaaaaugagaucuaaaaaaaaaaaaaaaaaaaaaaaaaaaaaaaaaaaaaaaaaaaaaaaaaaaaaaaaaaaaaaaaaaaaaaaaaaaaaaaaaaaaaaaaaaaaaaaaaaaa

SEQ ID NO: 30988 - RNA, 1785 nt, Artificial Sequence; identical to SEQ ID NO: 30982
  mRNA product Design b-4 (A100) comprising derived and/or modified sequence from LASV(Pinneo-NIG-1969;Clade I)__AIT17836__GPCmut6 (opt4)

SEQ ID NO: 30989 - RNA, 1785 nt, Artificial Sequence
  mRNA product Design b-4 (A100) comprising derived and/or modified sequence from LASV(ISTH0009-NIG-2011;Clade II)__AIT17404__GPCmut6 (opt4)
aggagagucccgcagucggcguccagcggcucugcuuguucgugugugugucguugcaggccuuauucaagcuuaccaugggccagaucaucaccuucuuccaggaggugccccacgugaucgaggaggugaugaacaucgugcugaucgcccugagccugcuggccauccugaagggcaucuacaacguggccaccugcggccuguucggccuggugagcuuccugcugcugugcggcagaagcugcagcaccaccuacaagggcguguacgagcugcagacccuggagcuggacauggccagccugaacaugugcaugccccugagcugcaccaagaacaacagccaccacuacaucauggugggcaacgagaccggccuggagcugacccugaccaacaccagcaucaucaaccacaaguucugcaaccugagcgacgcccacaagaagaaccuguacgaccacgcccugaugagcaucaucagcaccuuccaccugagcauccccaacuucaaccaguacgaggccaugagcugcgacuucaacggcggcaagaucagcgugcaguacaaccugagccacgccuacgccguggacgccgccaaccacugcggcaccaucgccaacggcgugcugcagaccuucaugagaauggccuggggcggcagcuacaucgcccuggacagcggcaagggcagcugggacugcaucaugaccagcuaccaguaccugaucauccagaacaccaccugggaggaccacugccaguucagcagacccagccccaucggcuaccugggccugcugagccagagaaccagagacaucuacaucagcagaagacugcugggcaccuucaccuggacccugagcgacagcgagggcaacgagacccccggcggcuacugccugaccagauggaugcugaucgaggccgagcugaagugcuucggcaacaccgccguggccaagugcaacgagaagcacgacgaggaguucugcgacaugcugagacuguucgacuucugcaagcaggccaucagaagacugaagacccccgcccagaugagcauccagcugaucaacaaggccgugaacgcccugaucaacgaccagcugaucaugaagaaccaccugagagacaucaugggcauccccuacugcaacuacagcaaguacugguaccugaaccacaccgugaccggcaagaccagccugcccagaugcuggcuggugagcaacggcagcuaccugaacgagacccacuucagcgacgacaucgagcagcaggccgacaacaugaucaccgagcugcugcagaaggaguacauggacagacagggcaagaccccccugggccugguggaccuguucguguucagcaccagcuucuaccugaucagcaucuuccugcaccugaucaagauccccacccacagacacaucaccggcaagcccugccccaagccccacagacugaaccacaugggcaucugcagcugcggccuguacaagcaccccggcgugcccgugaaguggaagagaugaggacuaguaauaaggaaacuguaugaaugucugugggcaggaagugaagagauccuucuguaaagguuuuuggaauuaugucugcugaauaauaaacuuuuuugaaauaauaaaucugguagaaaaaugagaucuaaaaaaaaaaaaaaaaaaaaaaaaaaaaaaaaaaaaaaaaaaaaaaaaaaaaaaaaaaaaaaaaaaaaaaaaaaaaaaaaaaaaaaaaaaaaaaaaaaaa

SEQ ID NO: 30990 - RNA, 1785 nt, Artificial Sequence
  mRNA product Design b-4 (A100) comprising derived and/or modified sequence from LASV(ISTH2010-NIG-2012;Clade II)__AIT17482__GPCmut6 (opt4)
aggagagucccgcagucggcguccagcggcucugcuuguucgugugugugucguugcaggccuuauucaagcuuaccaugggccagaucaucaccuucuuccaggaggugccccacgugaucgaggaggugaugaacaucgugcugaucgcccugagccugcuggccauccugaagggcaucuacaacguggccaccugcggccuguucggccuggugagcuuccugcugcugugcggcagaagcugcagcaccaccuacaagggcguguacgagcugcagacccuggagcuggacauggccagccugaacaugugcaugccccugagcugcaccaagaacaacagccaccacuacaucauggugggcaacgagaccggccuggagcugacccugaccaacaccagcaucaucaaccacaaguucugcaaccugagcgacgcccacaagaagaaccuguacgaccacgcccugaugagcaucaucagcaccuuccaccugagcauccccaacuucaaccaguacgaggccaugagcugcgacuucaacggcggcaagaucagcgugcaguacaaccugagccacgccuacgccguggacgccgccaaccacugcggcaccaucgccaacggcgugcugcagaccuucaugagaauggccuggggcggcagcuacaucgcccuggacagcggcaagggcagcugggacugcaucaugaccagcuaccaguaccugaucauccagaacaucaccugggaggaccacugccaguucagcagacccagccccaucggcuaccugggccugcugagccagagaaccagagacaucuacaucagcagaagacugcugggcaccuucaccuggacccugagcgacagcgagggcaacgagacccccggcggcuacugccugaccagauggaugcugaucgaggccgagcugaagugcuucggcaacaccgccguggccaagugcaacgagaagcacgacgaggaguucugcgacaugcugagacuguucgacuucugcaagcaggccaucagaagacugaagacccccgcccagaugagcauccagcugaucaacaaggccgugaacgcccugaucaacgaccagcugaucaugaagaaccaccugagagacaucaugggcauccccuacugcaacuacagcaaguacugguaccugaaccacaccgugaccggcaagaccagccugcccagaugcuggcuggugagcaacggcagcuaccugaacgagacccacuucagcgacgacaucgagcagcaggccgacaacaugaucaccgagcugcugcagaaggaguacaucgacagacagggcaagaccccccugggccugguggaccuguucguguucagcaccagcuucuaccugaucagcaucuuccugcaccuggugaagauccccacccacagacacguggugggcaagcccugccccaagccccacagacugaaccacaugggcaucugcagcugcggccuguacaagcaccccggcgugcccgugaaguggaagagaugaggacuaguaauaaggaaacuguaugaaugucugugggcaggaagugaagagauccuucuguaaagguuuuuggaauuaugucugcugaauaauaaacuuuuuugaaauaauaaaucugguagaaaaaugagaucuaaaaaaaaaaaaaaaaaaaaaaaaaaaaaaaaaaaaaaaaaaaaaaaaaaaaaaaaaaaaaaaaaaaaaaaaaaaaaaaaaaaaaaaaaaaaaaaaaaaa

SEQ ID NO: 30991 - RNA, 1785 nt, Artificial Sequence
  mRNA product Design b-4 (A100) comprising derived and/or modified sequence from LASV(Lassa virus/H.sapiens-wt/NGA/2015/ISTH_0543;Clade II)__AVO03639__GPCmut6 (opt4)
aggagagucccgcagucggcguccagcggcucugcuuguucgugugugugucguugcaggccuuauucaagcuuaccaugggccagaucaucaccuucuuccaggaggugccccacgugaucgaggaggugaugaacaucgugcugaucgcccugagccugcuggccauccugaagggcaucuacaacguggccaccugcggccuguucggccuggugagcuuccugcugcugugcggcagaagcugcagcaccaccuacaagggcguguacgagcugcagacccuggagcuggacauggccaaccugaacaugugcaugccccugagcugcaccaagaacaacagccaccacuacaucauggugggcaacgagaccggccuggagcugacccugaccaacaccagcaucaucaaccacaaguucugcaaccugagcgacgcccacaagaagaaccuguacgaccacgcccugaugagcaucaucagcaccuuccaccugagcauccccaacuucaaccaguacgaggccaugagcugcgacuucaacggcggcaagaucagcgugcaguacaaccugagccacaccuacgccguggacgccgccaaccacugcggcaccaucgccaacggcgugcugcagaccuucaugagaauggccuggggcggcagcuacaucgcccuggacagcggcaagggcagcugggacugcaucaugaccagcuaccaguaccuggugauccagaacaccaccugggaggaccacugccaguucagcagacccagccccaucggcuaccugggccugcugagccagagaaccagagacaucuacaucagcagaagacugcugggcaccuucaccuggacccugagcgacagcgagggcaacgagacccccggcggcuacugccugaccagauggaugcugaucgaggccgagcugaagugcuucggcaacaccgccguggccaagugcaacgagaagcacgacgaggaguucugcgacaugcugagacuguucgacuucugcaagcaggccaucagaagacugaagacccccgcccagaugagcauccagcugaucaacaaggccgugaacgcccugaucaacgaccagcugaucaugaagaaccaccugagagacaucaugggcauccccuacugcaacuacagcaaguacugguaccugaaccacaccgugaccggcaagaccagccugcccagaugcuggcuggugagcaacggcagcuaccugaacgagacccacuucagcgacgacaucgagcagcaggccgacaacaugaucaccgagcugcugcagaaggaguacaucgacagacagggcaagaccccccugggccugguggaccuguucguguucagcaccagcuucuaccugaucagcaucuuccugcaccuggugaagauccccacccacagacacaucaccggcaagcccugccccaagccccacagacugaaccacaugggcaucugcagcugcggccuguacaagcaccccggcgugcccgugaaguggaagagaugaggacuaguaauaaggaaacuguaugaaugucugugggcaggaagugaagagauccuucuguaaagguuuuuggaauuaugucugcugaauaauaaacuuuuuugaaauaauaaaucugguagaaaaaugagaucuaaaaaaaaaaaaaaaaaaaaaaaaaaaaaaaaaaaaaaaaaaaaaaaaaaaaaaaaaaaaaaaaaaaaaaaaaaaaaaaaaaaaaaaaaaaaaaaaaaaa

SEQ ID NO: 30992 - RNA, 1785 nt, Artificial Sequence
  mRNA product Design b-4 (A100) comprising derived and/or modified sequence from LASV(Lassa virus/H.sapiens-wt/NGA/2016/ISTH_0009;Clade II)__AVO03571__GPCmut6 (opt4)
aggagagucccgcagucggcguccagcggcucugcuuguucgugugugugucguugcaggccuuauucaagcuuaccaugggccagaucaucaccuucuuccaggaggugccccacgugaucgaggaggugaugaacaucgugcugaucgcccugagccugcuggccauccugaagggcaucuacaacguggccaccugcggccugcugggccuggugagcuuccugcugcugugcggcagaagcugcagcaccaccuacaagggcguguacgagcugcagacccuggagcuggacauggccagccugaacaugugcaugccccugagcugcaccaagaacaacagccaccacuacaucauggugggcaacgagaccggccuggagcugacccugaccaacaccagcaucaucaaccacaaguucugcaaccugagcgacgcccacaagaagaaccuguacgaccacgcccugaugagcaucaucagcaccuuccaccugagcauccccaacuucaaccaguacgaggccaugagcugcgacuucaacggcggcagaaucagcgugcaguacaaccugagccacagcuacgccguggacgccgccaaccacugcggcaccaucgccaacggcgugcugcagaccuucaugagaauggccuggggcggcagcuacaucgcccuggacagcggcaagggcagcugggacugcaucaugaccagcuaccaguaccugaucauccagaacaccaccugggaggaccacugccaguucagcagacccagccccaucggcuaccugggccugcugagccagagaaccagagacaucuacaucagcagaagacugcugggcaccuucaccuggacccugagcgacagcgagggcaacgagacccccggcggcuacugccugaccagauggaugcugaucgaggccgagcugaagugcuucggcaacaccgccguggccaagugcaacgagaagcacgacgaggaguucugcgacaugcugagacuguucgacuucugcaagcaggccaucagaagacugaagacccccgcccagaugagcauccagcugaucaacaaggccgugaacgcccugaucaacgaccagcugaucaugaagaaccaccugagagacaucaugggcauccccuacugcaacuacagcaaguacugguaccugaaccacaccgugaccggcaagaccagccugcccagaugcuggcuggugagcaacggcagcuaccugaacgagacccacuucagcgacgacaucgagcagcaggccgacaacaugaucaccgagcugcugcagaaggaguacaucgacagacagggcaagaccccccugggccugguggaccuguucguguucagcaccagcuucuaccugaucagcaucuuccugcaccuggugaagauccccacccacagacacaucaccggcaagcccugccccaagccccacagacugaaccacaugggcaucugcagcugcggccuguacaaccaccccggcgugcccgugaaguggaagagaugaggacuaguaauaaggaaacuguaugaaugucugugggcaggaagugaagagauccuucuguaaagguuuuuggaauuaugucugcugaauaauaaacuuuuuugaaauaauaaaucugguagaaaaaugagaucuaaaaaaaaaaaaaaaaaaaaaaaaaaaaaaaaaaaaaaaaaaaaaaaaaaaaaaaaaaaaaaaaaaaaaaaaaaaaaaaaaaaaaaaaaaaaaaaaaaaa

SEQ ID NO: 30993 - RNA, 1785 nt, Artificial Sequence
  mRNA product Design b-4 (A100) comprising derived and/or modified sequence from LASV(Lassa virus/H.sapiens-wt/NGA/2016/ISTH_0017;Clade II)__AVO03567__GPCmut6 (opt4)
aggagagucccgcagucggcguccagcggcucugcuuguucgugugugugucguugcaggccuuauucaagcuuaccaugggccagaucaucaccuucuuccaggaggugccccacgugaucgaggaggugaugaacaucgugcugaucgcccugagccugcuggccauccugaagggcaucuacaacguggccaccugcggccuguucggccuggugagcuuccugcugcugugcggcagaagcugcagcaccaccuacaagggcguguacgagcugcagacccuggagcuggacauggccagccugaacaugugcaugccccugagcugcaccaagaacaacagccaccacuacaucauggugggcaacgagaccggccuggagcugacccugaccaacaccagcaucaucaaccacaaguucugcaaccugagcgacgcccacaagaagaaccuguacgaccacgcccugaugagcaucaucagcaccuuccaccugagcauccccaacuucaaccaguacgaggccaugagcugcgacuucaacggcggcaagaucagcgugcaguacaaccugagccacaccuacgccaucgacgccgccaaccacugcggcaccaucgccaacggcgugcugcagaccuucaugagaauggccuggggcggcagcuacaucgcccuggacagcggcaagggcagcugggacugcaucaugaccagcuaccaguaccugaucauccagaacaccaccugggaggaccacugccaguucagcagacccagccccaucggcuaccugggccugcugagccagagaaccagagacaucuacaucagcagaagacugcugggcaccuucaccuggacccugagcgacagcgagggcaacgagacccccggcggcuacugccugaccagauggaugcugaucgaggccgagcugaagugcuucggcaacaccgccguggccaagugcaacgagaagcacgacgaggaguucugcgacaugcugagacuguucgacuucugcaagcaggccaucagaagacugaagacccccgcccagaugagcauccagcugaucaacaaggccgugaacgcccugaucaacgaccagcugaucaugaagaaccaccugagagacaucaugggcauccccuacugcaacuacagcaaguacugguaccugaaccacaccgugaccggcaagaccagccugcccagaugcuggcuggugagcaacggcagcuaccugaacgagacccacuucagcgacgacaucgagcagcaggccgacaacaugaucaccgagcugcugcagaaggaguacauggacagacagggcaagaccccccugggccugguggaccuguucguguucagcaccagcuucuaccugaucagcaucuuccugcaccuggugagaauccccacccacagacacgugaucggcaagcccugccccaagccccacagacugaaccacaugggcaucugcagcugcggccuguacaagcaccccggcgugcccgugaaguggaagagaugaggacuaguaauaaggaaacuguaugaaugucugugggcaggaagugaagagauccuucuguaaagguuuuuggaauuaugucugcugaauaauaaacuuuuuugaaauaauaaaucugguagaaaaaugagaucuaaaaaaaaaaaaaaaaaaaaaaaaaaaaaaaaaaaaaaaaaaaaaaaaaaaaaaaaaaaaaaaaaaaaaaaaaaaaaaaaaaaaaaaaaaaaaaaaaaaa

SEQ ID NO: 30994 - RNA, 1785 nt, Artificial Sequence
  mRNA product Design b-4 (A100) comprising derived and/or modified sequence from LASV(Lassa virus/H.sapiens-wt/NGA/2018/ISTH_0959;Clade II)__AVV65099__GPCmut6 (opt4)
aggagagucccgcagucggcguccagcggcucugcuuguucgugugugugucguugcaggccuuauucaagcuuaccaugggccagaucaucaccuucuuccaggaggugccccacgugaucgaggaggugaugaacaucgugcugaucgcccugagccugcuggccauccugaagggcaucuacaacguggugaccugcggccuguucggccuggugagcuuccugcugcugugcggcagaagcugcagcaccaccuacaagggcguguacgagcugcagacccuggagcuggacauggccagccugaacaugugcaugccccugagcugcaccaagaacaacagccaccacuacaucauggugggcaacgagaccggccuggagcugacccugaccaacaccagcaucaucaaccacaaguucugcaaccugagcgacgcccacaagaagaaccuguacgaccacgcccugaugagcaucaucagcaccuuccaccugagcauccccaacuucaaccaguacgaggccaugagcugcgacuucaacggcggcaagaucagcgugcaguacaaccugagccacgccuacgccaucgacgccgccaaccacugcggcaccaucgccaacggcgugcugcagaccuucaugagaauggccuggggcggcagcuacaucgcccuggacagcggcaagggcagcugggacugcaucaugaccagcuaccaguaccugaucauccagaacaccaccugggaggaccacugccaguucagcagacccagccccaucggcuaccugggccugcugagccagagaaccagagacaucuacaucagcagaagacugcugggcaccuucaccuggacccugagcgacagcgagggcaacgagacccccggcggcuacugccugaccagauggaugcugaucgaggccgagcugaagugcuucggcaacaccgccguggccaagugcaacgagaagcacgacgaggaguucugcgacaugcugagacuguucgacuucugcaagcaggccaucagaagacugaagacccccgcccagaugagcauccagcugaucaacaaggccgugaacgcccugaucaacgaccagcugaucaugaagaaccaccugagagacaucaugggcauccccuacugcaacuacagcaaguacugguaccugaaccacaccgugaccggcaagaccagccugcccagaugcuggcuggugagcaacggcagcuaccugaacgagacccacuucagcgacgacaucgagcagcaggccgacaacaugaucaccgagcugcugcagaaggaguacaucgacagacagggcaagaccccccugggccugguggaccuguucguguucagcaccagcuucuaccugaucagcaucuuccugcaccuggugaagauccccacccacagacacgugaucggcaagcccugccccaagccccacagacugaaccacaugggcaucugcagcugcggccuguacaagcaccccggcgugcccgugaaguggaagagaugaggacuaguaauaaggaaacuguaugaaugucugugggcaggaagugaagagauccuucuguaaagguuuuuggaauuaugucugcugaauaauaaacuuuuuugaaauaauaaaucugguagaaaaaugagaucuaaaaaaaaaaaaaaaaaaaaaaaaaaaaaaaaaaaaaaaaaaaaaaaaaaaaaaaaaaaaaaaaaaaaaaaaaaaaaaaaaaaaaaaaaaaaaaaaaaaa

SEQ ID NO: 30995 - RNA, 1785 nt, Artificial Sequence
  mRNA product Design b-4 (A100) comprising derived and/or modified sequence from LASV(LASV003-NIG-2008;Clade II)__AIT17580__GPCmut6 (opt4)
aggagagucccgcagucggcguccagcggcucugcuuguucgugugugugucguugcaggccuuauucaagcuuaccaugggccagaucaucaccuucuuccaggaggugccccacgugaucgaggaggugaugaacaucgugcugaucgcccugagccugcuggccauccugaagggcaucuacaacguggccaccugcggccuguucggccuggugagcuuccugcugcugugcggcagaagcugcagcaccaccuacaagggcguguacgagcugcagacccuggagcuggacauggccagccugaacaugugcaugccccugagcugcaccaagaacaacagccaccacuacaucauggugggcaacgagaccggccuggagcugacccugaccaacaccagcaucaucaaccacaaguucugcaaccugagcgacgcccacaagaagaaccuguacgaccacgcccugaugagcaucaucagcaccuuccaccugagcauccccaacuucaaccaguacgaggccaugagcugcgacuucaacggcggcaagaucagcgugcaguacaaccugagccacaccuacgccguggacgccgccaaccacugcggcaccaucgccaacggcgugcugcagaccuucaugagaauggccuggggcggcagcuacaucgcccuggacagcggcaagggcagcugggacugcaucaugaccagcuaccaguaccugaucauccagaacaccaccugggaggaccacugccaguucagcagacccagccccaucggcuaccugggccugcugagccagagaaccagagacaucuacaucagcagaagacugcugggcaccuucaccuggacccugagcgacagcgagagcaacgagacccccggcggcuacugccugaccagauggaugcugaucgaggccgagcugaagugcuucggcaacaccgccguggccaagugcaacgagaagcacgacgaggaguucugcgacaugcugagacuguucgacuucugcaagcaggccaucagaagacugaaggcccccgcccagaugagcauccagcugaucaacaaggccgugaacgcccugaucaacgaccagcugaucaugaagaaccaccugagagacaucaugggcauccccuacugcaacuacagcaaguacugguaccugaaccacaccgugaccggcagaaccagccugcccagaugcuggcuggugagcaacggcagcuaccugaacgagacccacuucagcgacgacaucgagcagcaggccgacaacaugaucaccgagcugcugcagaaggaguacauggacagacagggcaagaccccccugggccugguggaccuguucguguucagcaccagcuucuaccugaucagcaucuuccugcaccuggugaagauccccacccacagacacgugaucggcaagcccugccccaagccccacagacugaaccacaugggcaucugcagcugcggccuguacaagcaccccggcgugcccgugaaguggaagagaugaggacuaguaauaaggaaacuguaugaaugucugugggcaggaagugaagagauccuucuguaaagguuuuuggaauuaugucugcugaauaauaaacuuuuuugaaauaauaaaucugguagaaaaaugagaucuaaaaaaaaaaaaaaaaaaaaaaaaaaaaaaaaaaaaaaaaaaaaaaaaaaaaaaaaaaaaaaaaaaaaaaaaaaaaaaaaaaaaaaaaaaaaaaaaaaaa

SEQ ID NO: 30996 - RNA, 1785 nt, Artificial Sequence
  mRNA product Design b-4 (A100) comprising derived and/or modified sequence from LASV(LASV035-NIG-2009;Clade II)__AIT17588__GPCmut6 (opt4)
aggagagucccgcagucggcguccagcggcucugcuuguucgugugugugucguugcaggccuuauucaagcuuaccaugggccagaucaucaccuucuuccaggaggugccccacgugaucgaggaggugaugaacaucgugcugaucgcccugagccugcuggccauccugaagggcaucuacaacguggccaccugcggccuguucggccuggugagcuuccugcugcugugcggcagaagcugcagcaccaccuacaagggcguguacgagcugcagacccuggagcuggacauggccagccugaacaugugcaugccccugagcugcaccaagaacaacagccaccacuacaucauggugggcaacgagaccggccuggagcugacccugaccaacaccagcaucaucaaccacaaguucugcaaccugagcgacgcccacaagaagaaccuguacgaccacgcccugaugagcaucaucagcaccuuccaccugagcauccccaacuucaaccaguacgaggccaugagcugcgacuucaacggcggcaagaucagcgugcaguacaaccugagccacgccuacgccguggacgccgccaaccacugcggcaccaucgccaacggcgugcugcagaccuucaugagaauggccuggggcggcagcuacaucgcccuggacagcggcaagggcagcugggacugcaucaugaccagcuaccaguaccugaucauccagaacaccaccugggaggaccacugccaguucagcagacccagccccaucggcuaccugggccugcugagccagagaaccagagacaucuacaucagcagaagacugcugggcaccuucaccuggacccugagcgacagcgagggcaacgagacccccggcggcuacugccugaccagauggaugcugaucgaggccgagcugaagugcuucggcaacaccgccguggccaagugcaacgagaagcacgacgaggaguucugcgacaugcugagacuguucgacuucugcaagcaggccaucagaagacugaaggcccccgcccagaugagcauccagcugaucaacaaggccgugaacgcccugaucaacgaccagcugaucaugaagaaccaccugagagacaucaugggcauccccuacugcaacuacagcaaguacugguaccugaaccacaccgugaccggcaagaccagccugcccagaugcuggcuggugagcaacggcagcuaccugaacgagacccacuucagcgacgacaucgagcagcaggccgacaacaugaucaccgagcugcugcagaaggaguacaucgacagacagggcaagaccccccugggccugguggaccuguucguguucagcaccagcuucuaccugaucagcaucuuccugcaccuggugaagauccccacccacagacacgugaucggcaagcccugccccaagccccacagacugaaccacaugggcaucugcagcugcggccuguacaagcaccccggcgugcccgugaaguggaagagaugaggacuaguaauaaggaaacuguaugaaugucugugggcaggaagugaagagauccuucuguaaagguuuuuggaauuaugucugcugaauaauaaacuuuuuugaaauaauaaaucugguagaaaaaugagaucuaaaaaaaaaaaaaaaaaaaaaaaaaaaaaaaaaaaaaaaaaaaaaaaaaaaaaaaaaaaaaaaaaaaaaaaaaaaaaaaaaaaaaaaaaaaaaaaaaaaa

SEQ ID NO: 30997 - RNA, 1785 nt, Artificial Sequence
  mRNA product Design b-4 (A100) comprising derived and/or modified sequence from LASV(LASV1000-NIG-2009;Clade II)__AIT17782__GPCmut6 (opt4)
aggagagucccgcagucggcguccagcggcucugcuuguucgugugugugucguugcaggccuuauucaagcuuaccaugggccagaucaucaccuucuuccaggaggugccccacgugaucgaggaggugaugaacaucgugcugaucgcccugagccugcuggccauccugaagggcaucuacaacguggccaccugcggccuguucggccuggugagcuuccugcugcugugcggcagaagcugcagcaccaccuacaagggcguguacgagcugcagacccuggagcuggacauggccagccugaacaugugcaugccccugagcugcaccaagaacaacagccaccacuacaucauggugggcaacgagaccggccuggagcugacccugaccaacaccagcaucaucaaccacaaguucugcaaccugagcgacgcccacaagaagaaccuguacgaccacgcccugaugagcaucaucagcaccuuccaccugagcauccccaacuucaaccaguacgaggccaugagcugcgacuucaacggcggcaagaucagcgugcaguacaaccugagccacaccuacgccguggacgccgccaaccacugcggcaccaucgccaacggcgugcugcagaccuucaugagaauggccuggggcggcagcuacaucgcccuggacagcggcaagggcagcugggacugcaucaugaccagcuaccaguaccugaucauccagaacaccaccugggaggaccacugccaguucagcagacccagccccaucggcuaccugggccugcugagccagagaaccagagacaucuacaucagcagaagacugcugggcaccuucaccuggacccugagcgacagcgagggcaacgagacccccggcggcuacugccugaccagauggaugcugaucgaggccgagcugaagugcuucggcaacaccgccguggccaagugcaacgagaagcacgacgaggaguucugcgacaugcugagacuguucgacuucugcaagcaggccaucaagagacugaagacccccgcccagaugagcauccagcugaucaacaaggccgugaacgcccugaucaacgaccagcugaucaugaagaaccaccugagagacaucaugggcauccccuacugcaacuacagcaaguacugguaccugaaccacaccgugaccggcaagaccagccugcccagaugcuggcuggugagcaacggcagcuaccugaacgagacccacuucagcgacgacaucgagcagcaggccgacaacaugaucaccgagcugcugcagaaggaguacaucgacagacagggcaagaccccccugggccugguggaccuguucguguucagcaccagcuucuaccugaucagcaucuuccugcaccuggugaagauccccacccacagacacguggugggcaagcccugccccaagccccacagacugaaccacaugggcaucugcagcugcggccuguacaagcaccccggcgugcccgugaaguggaagagaugaggacuaguaauaaggaaacuguaugaaugucugugggcaggaagugaagagauccuucuguaaagguuuuuggaauuaugucugcugaauaauaaacuuuuuugaaauaauaaaucugguagaaaaaugagaucuaaaaaaaaaaaaaaaaaaaaaaaaaaaaaaaaaaaaaaaaaaaaaaaaaaaaaaaaaaaaaaaaaaaaaaaaaaaaaaaaaaaaaaaaaaaaaaaaaaaa

SEQ ID NO: 30998 - RNA, 1785 nt, Artificial Sequence
  mRNA product Design b-4 (A100) comprising derived and/or modified sequence from LASV(LASV221-NIG-2010;Clade II)__AIT17624__GPCmut6 (opt4)
aggagagucccgcagucggcguccagcggcucugcuuguucgugugugugucguugcaggccuuauucaagcuuaccaugggccagaucaucaccuucuuccaggaggugccccacgugaucgaggaggugaugaacaucgugcugaucgcccugagccugcuggccauccugaagggcaucuacaacguggccaccugcggccuguucggccuggugagcuuccugcugcugugcggcagaagcugcagcaccaccuacaagggcguguacgagcugcagacccuggagcuggacauggccagccugaacaugugcaugccccugagcugcaccaagaacaacagccaccacuacaucauggugggcaacgagaccggccuggagcugacccugaccaacaccagcaucaucaaccacaaguucugcaaccugagcgacgcccacaagaagaaccuguacgaccacgcccugaugagcaucaucagcaccuuccaccugagcauccccaacuucaaccaguacgaggccaugagcugcgacuucaacggcggcaagaucagcgugcaguacaaccugagccacaccuacgccaucgacgccgccaaccacugcggcaccaucgccaacggcgugcugcagaccuucaugagaauggccuggggcggcagcuacaucgcccuggacagcggcaagggcagcugggacugcaucaugaccagcuaccaguaccugaucauccagaacaccaccugggaggaccacugccaguucagcagacccagccccaucggcuaccugggccugcugagccagagaaccagagacaucuacaucagcagaagacugcugggcaccuucaccuggacccugagcgacagcgagggcaacgagacccccggcggcuacugccugaccagauggaugcugaucgaggccgagcugaagugcuucggcaacaccgccguggccaagugcaacgagaagcacgacgaggaguucugcgacaugcugagacuguucgacuucugcaagcaggccaucagaagacugaagacccccgcccagaugagcauccagcugaucaacaaggccgugaacgcccugaucaacgaccagcugaucaugaagaaccaccugagagacaucaugggcauccccuacugcaacuacagcaaguacugguaccugaaccacaccgugaccggcaagaccagccugcccagaugcuggcuggugagcaacggcagcuaccugaacgagacccacuucagcgacgacaucgagcagcaggccgacaacaugaucaccgagaugcugcagaaggaguacauggacagacagggcaagaccccccugggccugguggaccuguucguguucagcaccagcuucuaccugaucagcaucuuccugcaccuggugaagauccccacccacagacacgugaucggcaagcccugccccaagccccacagacugaaccacaugggcaucugcagcugcggccuguacaagcaccccggcgugcccgugaaguggaagagaugaggacuaguaauaaggaaacuguaugaaugucugugggcaggaagugaagagauccuucuguaaagguuuuuggaauuaugucugcugaauaauaaacuuuuuugaaauaauaaaucugguagaaaaaugagaucuaaaaaaaaaaaaaaaaaaaaaaaaaaaaaaaaaaaaaaaaaaaaaaaaaaaaaaaaaaaaaaaaaaaaaaaaaaaaaaaaaaaaaaaaaaaaaaaaaaaa

SEQ ID NO: 30999 - RNA, 1785 nt, Artificial Sequence
  mRNA product Design b-4 (A100) comprising derived and/or modified sequence from LASV(LASV237-NIG-2010;Clade II)__AIT17638__GPCmut6 (opt4)
aggagagucccgcagucggcguccagcggcucugcuuguucgugugugugucguugcaggccuuauucaagcuuaccaugggccagaucaucaccuucuuccaggaggugccccacgugaucgaggaggugaugaacaucgugcugaucgcccugagccugcuggccauccugaagggcaucuacaacguggccaccugcggccuguucggccuggugagcuuccugcugcugugcggcagaagcugcagcaccaccuacaagggcguguacgagcugcagacccuggagcuggacauggccagccugaacaugugcaugccccugagcugcaccaagaacaacagccaccacuacaucauggugggcaacgagaccggccuggagcugacccugaccaacaccagcaucaucaaccacaaguucugcaaccugagcgacgcccacaagaaggaccuguacgaccacgcccugaugagcaucaucagcaccuuccaccugagcauccccaacuucaaccaguacgaggccaugagcugcgacuucaacggcggcaagaucagcgugcaguacaaccugagccacaccuacgccguggacgccgccaaccacugcggcaccaucgccaacggcgugcugcagaccuucaugagaauggccuggggcggcagcuacaucgcccuggacagcggcaagggcagcugggacugcaucaugaccagcuaccaguaccugaucauccagaacaccaccugggaggaccacugccaguucagcagacccagccccaucggcuaccugggccugcugagccagagaaccagagacaucuacaucagcagaagacugcugggcaccuucaccuggacccugagcgacagcgagggcaacgagacccccggcggcuacugccugaccagauggaugcugaucgaggccgagcugaagugcuucggcaacaccgccguggccaagugcaacgagaagcacgacgaggaguucugcgacaugcugagacuguucgacuucugcaagcaggccaucagaagacugaagacccccgcccagaugagcauccagcugaucaacaaggccgugaacgcccugaucaacgaccagcugaucaugaagaaccaccugagagacaucaugggcauccccuacugcaacuacagcaaguacugguaccugaaccacaccgugaccggcaagaccagccugcccagaugcuggcuggugagcaacggcagcuaccugaacgagacccacuucagcgacgacaucgagcagcaggccgacaacaugaucaccgagcugcugcagaaggaguacauggacagacagggcaagaccccccugggccugguggaccuguucguguucagcaccagcuucuaccugaucagcaucuuccugcaccugaucaagauccccacccacagacacaucaccggcaagcccugccccaagccccacagacugaaccacaugggcaucugcagcugcggccuguacaagcaccccggcgugcccgugaaguggaagagaugaggacuaguaauaaggaaacuguaugaaugucugugggcaggaagugaagagauccuucuguaaagguuuuuggaauuaugucugcugaauaauaaacuuuuuugaaauaauaaaucugguagaaaaaugagaucuaaaaaaaaaaaaaaaaaaaaaaaaaaaaaaaaaaaaaaaaaaaaaaaaaaaaaaaaaaaaaaaaaaaaaaaaaaaaaaaaaaaaaaaaaaaaaaaaaaaa

SEQ ID NO: 31000 - RNA, 1785 nt, Artificial Sequence
  mRNA product Design b-4 (A100) comprising derived and/or modified sequence from LASV(LASV253-NIG-2011;Clade II)__AIT17670__GPCmut6 (opt4)
aggagagucccgcagucggcguccagcggcucugcuuguucgugugugugucguugcaggccuuauucaagcuuaccaugggccagaucaucaccuucuuccaggaggugccccacgugaucgaggaggugaugaacaucgugcugaucgcccugagccugcuggccauccugaagggcaucuacaacguggccaccugcggccuguucggccuggugagcuuccugcugcugugcggcagaagcugcagcaccaccuacaagggcguguacgagcugcagacccuggagcuggacauggccagccugaacaugugcaugccccugagcugcaccaagaacaacagccaccacuacaucauggugggcaacgagaccggccuggagcugacccugaccaacaccagcaucaucaaccacaaguucugcaaccugagcgacgcccacaagaagaaccuguacgaccacgcccugaugagcaucaucagcaccuuccaccugagcauccccaacuucaaccaguacgaggccaugagcugcgacuucaacggcggcaagaucagcgugcaguacaaccugagccacaccuacgccguggacgccgccaaccacugcggcaccaucgccaacggcgugcugcagaccuucaugagaauggccuggggcggcagcuacaucgcccuggacagcggcaagggcagcugggacugcaucaugaccagcuaccaguaccugaucauccagaacaccaccugggaggaccacugccaguucagcagacccagccccaucggcuaccugggccugcugagccagagaaccagagacaucuacaucagcagaagacugcugggcaccuucaccuggacccugagcgacagcgagggcaacgagacccccggcggcuacugccugaccagauggaugcugaucgaggccgagcugaagugcuucggcaacaccgccguggccaagugcaacgagaagcacgacgaggaguucugcgacaugcugagacuguucgacuucugcaagcaggccaucagaagacugaaggcccccgcccagaugagcauccagcugaucaacaaggccgugaacgcccugaucaacgaccagcugaucaugaagaaccaccugagagacaucaugggcauccccuacugcaacuacagcaaguacugguaccugaaccacaccgugaccggcagaaccagccugcccagaugcuggcuggugagcaacggcagcuaccugaacgagacccacuucagcgacgacaucgagcagcaggccgacaacaugaucaccgagcugcugcagaaggaguacaucgacagacagggcaagaccccccugggccugguggaccuguucguguucagcaccagcuucuaccugaucagcaucuuccugcaccuggugaagauccccacccacagacacaucaucggcaagcccugccccaagccccacagacugaaccacaugggcaucugcagcugcggccuguacaagcaccccggcgugcccgugaaguggaagagaugaggacuaguaauaaggaaacuguaugaaugucugugggcaggaagugaagagauccuucuguaaagguuuuuggaauuaugucugcugaauaauaaacuuuuuugaaauaauaaaucugguagaaaaaugagaucuaaaaaaaaaaaaaaaaaaaaaaaaaaaaaaaaaaaaaaaaaaaaaaaaaaaaaaaaaaaaaaaaaaaaaaaaaaaaaaaaaaaaaaaaaaaaaaaaaaaa

SEQ ID NO: 31001 - RNA, 1785 nt, Artificial Sequence
  mRNA product Design b-4 (A100) comprising derived and/or modified sequence from LASV(LASV254-NIG-2011;Clade II)__AIT17674__GPCmut6 (opt4)
aggagagucccgcagucggcguccagcggcucugcuuguucgugugugugucguugcaggccuuauucaagcuuaccaugggccagaucaucaccuucuuccaggaggugccccacgugaucgaggaggugaugaacaucgugcugaucgcccugagccugcuggccauccugaagggcaucuacaacguggccaccugcggccuguucggccuggugagcuuccugcugcugugcggcagaagcugcagcaccaccuacaagggcguguacgagcugcagacccuggagcuggacaugaccaaccugaacaugugcaugccccugagcugcaccaagaacaacagccaccacuacaucauggugggcaacgagaccggccuggagcugacccugaccaacaccagcaucaucaaccacaaguucugcaaccugagcgacgcccacaagaagaaccuguacaaccacgcccugaugagcaucaucagcaccuuccaccugagcauccccaacuucaaccaguacgaggccaugagcugcgacuucaacggcggcaagaucagcgugcaguacaaccugagccacagcuacgccguggacgccgccaaccacugcggcaccaucgccaacggcgugcugcagaccuucaugagaauggccuggggcggcagcuacaucgcccuggacagcggcaagggcaacugggacugcaucaugaccagcuaccaguaccugaucauccagaacaccaccugggaggaccacugccaguucagcagacccagccccaucggcuaccugggccugcugagccagagaaccagagacaucuacaucagcagaagacugcugggcaccuucaccuggacccugagcgacagcgagggcaacgagacccccggcggcuacugccugaccagauggaugcugaucgaggccgagcugaagugcuucggcaacaccgccguggccaagugcaacgagaagcacgacgaggaguucugcgacaugcugagacuguucgacuucugcaagcaggccaucagaagacugaagacccccgcccaggccaacauccagcugaucaacaaggccgugaacgcccugaucaacgaccagcugaucaugaagaaccaccugagagacaucaugggcauccccuacugcaacuacagcaaguacugguaccugaaccacaccgugaccggcaagaccagccugcccagaugcuggcuggugagcaacggcagcuaccugaacgagacccacuucagcgacgacaucgagcagcaggccgacaacaugaucaccgagcugcugcagaaggaguacauggacagacagggcaagaccccccugggccugguggaccuguucguguucagcaccagcuucuaccugaucagcaucuuccugcaccuggugaagauccccacccacagacacgugaucggcaagcccugccccaagccccacagacugaaccacaugggcaucugcagcugcggccuguacaagcaccccggcgugcccgugaaguggaagagaugaggacuaguaauaaggaaacuguaugaaugucugugggcaggaagugaagagauccuucuguaaagguuuuuggaauuaugucugcugaauaauaaacuuuuuugaaauaauaaaucugguagaaaaaugagaucuaaaaaaaaaaaaaaaaaaaaaaaaaaaaaaaaaaaaaaaaaaaaaaaaaaaaaaaaaaaaaaaaaaaaaaaaaaaaaaaaaaaaaaaaaaaaaaaaaaaa

SEQ ID NO: 31002 - RNA, 1785 nt, Artificial Sequence
  mRNA product Design b-4 (A100) comprising derived and/or modified sequence from LASV(Nig08-A19;Clade III)__ADU56618__GPCmut6 (opt4)
aggagagucccgcagucggcguccagcggcucugcuuguucgugugugugucguugcaggccuuauucaagcuuaccaugggccagaucgugaccuucuuccaggaggugccccacgugaucgaggaggugaugaacaucgugcugaucgcccugagcauccuggccauccugaagggccuguacaacaucgccaccugcggccugaucggccuggugaccuuccugcugcugagcggcagaagcugcagcaugaccuacaagggcguguacgagcugcagacccuggagcugaacaugaacacccugaacaugugcaugccccugagcugcaccaagaacaacagccaccacuacaucauggugggcaacgagaccggccuggagcugacccugaccaacaccagccugcugcaccacaaguucugcaaccugagcgacgcccacaagaagaaccuguacgaccacacccugaugagcaucaucagcaccuuccaccugagcauccccaacuucaaccaguacgaggccaugagcugcgacuucaacggcggcaagaucaccgugcaguacaaccugagccacagcuacgccaucgacgccgccaaccacugcggcaccguggccaacggcgugcugcagaccuucaugagaauggccuggggcggcagcuacaucgcccuggacagcggcagaggcaagugggacugcaucaugaccagcuaccaguaccugaucauccagaacaccaccugggaggaccacugccaguucagcagacccagccccaucggcuaccugggccugcugagccagagaaccagagacaucuacaucagcagaagacugcugggcaccuucaccuggacccugagcgacagcgagggcaacgagacccccggcggcuacugccugaccagauggaugcugaucgaggccgagcugaagugcuucggcaacaccgccguggccaagugcaacgagaagcacgacgaggaguucugcgacaugcugagacuguucgacuucugcaagcaggccaucagaagacugaaggcccccgcccagaugagcauccagcugaucaacaaggccgugaacgcccugaucaacgaccagcugaucaugaagaaccaccugagagacaucaugggcauccccuacugcaacuacagcaaguacugguaccugaaccacaccagcaccggcagaaccagccugcccagaugcuggcuggugagcaacggcagcuaccugaacgagacccacuucagcgacgacaucgagcagcaggccgacaacaugaucaccgagaugcugcagaaggaguaccuggacagacagggcaagaccccccugggccugguggaccuguucguguucagcaccagcuucuaccugaucagcaucuuccugcaccuggugaagauccccacccacagacacaucgugggcaagcccugccccaagccccacagacugaaccacaugggcaucugcagcugcggccuguacaagcagcccggcgugcccgugagauggaagagaugaggacuaguaauaaggaaacuguaugaaugucugugggcaggaagugaagagauccuucuguaaagguuuuuggaauuaugucugcugaauaauaaacuuuuuugaaauaauaaaucugguagaaaaaugagaucuaaaaaaaaaaaaaaaaaaaaaaaaaaaaaaaaaaaaaaaaaaaaaaaaaaaaaaaaaaaaaaaaaaaaaaaaaaaaaaaaaaaaaaaaaaaaaaaaaaaa

SEQ ID NO: 31003 - RNA, 1788 nt, Artificial Sequence
  mRNA product Design b-4 (A100) comprising derived and/or modified sequence from LASV(G1180-SLE-2010;Clade IV)__AIT17168__GPCmut6 (opt4)
aggagagucccgcagucggcguccagcggcucugcuuguucgugugugugucguugcaggccuuauucaagcuuaccaugggccagaucgugaccuucuuccaggaggugccccacgugaucgaggaggugaugaacaucgugcugaucgcccugagcauccuggccgugcugaagggccuguacaacuucgccaccugcggccuggugggccugcugaccuuccugcugcugugcggcagaagcugcaccgccagcagauacaagggcguguacgagcugcagacccuggagcugaacauggagacccugaacaugugcaugccccugagcugcaccaagaacaacagccaccacuacaucauggugggcaacgagaccggccuggagcugacccugaccaacaccagcaucaucaaccacaaguucugcaaccugagcgacgcccacaagaagaaccuguacgaccacgcccugaugagcaucaucagcaccuuccaccugagcauccccaacuucaaccaguacgaggccaugagcugcgacuucaacggcggcaagaucagcgugcaguacaaccugagccacagcuacgccggcgacgccgccaaccacugcggcaccguggccaacggcgugcugcagaccuucaugagaauggccuggggcggcagcuacaucgcccuggacagcggccacggcagcugggacugcaucaugaccagcuaccaguaccugaucauccagaacaccaccugggaggaccacugccaguucagcagacccagccccaucggcuaccugggccugcugagccagagaaccagagacaucuacaucagcagaagacugcugggcaccuucaccuggacccugagcgacagcgagggcaaggacacccccggcggcuacugccugaccagauggaugcugaucgaggccgagcugaagugcuucggcaacaccgccguggccaagugcaacgagaagcacgacgaggaguucugcgacaugcugagacuguucgacuucugcaagcaggccauccagagacugaaggcccccgcccagaugagcauccagcugaucaacaaggccgugaacgcccugaucaacgaccagcugaucaugaagaaccaccugagagacaucaugggcauccccuacugcaacuacagcaaguacugguaccugaaccacaccaccaccggcaagaccagccugcccaagugcuggcuggugagcaacggcagcuaccugaacgagacccacuucagcgacgacaucgagcagcaggccgacaacaugaucaccgagaugcugcagaaggaguacauggagagacagggcaagaccccccugggccugguggaccuguucguguucagcaccagcuucuaccugaucagcaucuuccugcaccuggugaagauccccacccacagacacaucgugggcaagagcugccccaagccccacagacugaaccacaugggcaucugcagcugcggccuguacaagcagcccggcgugcccgugaaguggaagagaugaggacuaguaauaaggaaacuguaugaaugucugugggcaggaagugaagagauccuucuguaaagguuuuuggaauuaugucugcugaauaauaaacuuuuuugaaauaauaaaucugguagaaaaaugagaucuaaaaaaaaaaaaaaaaaaaaaaaaaaaaaaaaaaaaaaaaaaaaaaaaaaaaaaaaaaaaaaaaaaaaaaaaaaaaaaaaaaaaaaaaaaaaaaaaaaaa

SEQ ID NO: 31004 - RNA, 1788 nt, Artificial Sequence
  mRNA product Design b-4 (A100) comprising derived and/or modified sequence from LASV(G1442-SLE-2011;Clade IV)__AIT17180__GPCmut6 (opt4)
aggagagucccgcagucggcguccagcggcucugcuuguucgugugugugucguugcaggccuuauucaagcuuaccaugggccagaucgugaccuucuuccaggaggugccccacgugaucgaggaggugaugaacaucgugcugaucgcccugagcauccuggccgugcugaagggccuguacaacguggccaccugcggccugaucggccuggugaccuuccugcugcugugcggcagaagcugcaccaccacccuguacaagggcguguacgagcugcagacccuggagcugaacauggagacccugaacaugugcaugccccugagcugcaccaagaacaacagccaccacuacaucagagugggcaacgagaccggccuggagcugacccugaccaacaccagcaucaucaaccacaaguucugcaaccugagcgacgcccacaagaagaaccuguacgaccacgcccugaugagcaucaucagcaccuuccaccugagcauccccaacuucaaccaguacgaggccaugagcugcgacuucaacggcggcaagaucagcgugcaguacaaccugagccacagcuacgccggcgacgccgccaaccacugcggcaccguggccaacggcgugcugcagaccuucaugagaauggccuggggcggcagcuacaucgcccuggacagcggcagaggcaacugggacugcaucaugaccagcuaccaguaccugaucauccagaacaccaccugggacgaccacugccaguucagcagacccagccccaucggcuaccugggccugcugagccagagaaccagagacguguacaucagcagaagacugcugggcaccuucaccuggacccugagcgacagcgagggcaaggacacccccggcggcuacugccugaccagauggaugcugaucgaggccgagcugaagugcuucggcaacaccgccguggccaagugcaacgagaagcacgacgaggaguucugcgacaugcugagacuguucgacuucugcaagcaggccauccagagacugaaggcccccgcccagaugagcauccagcugaucaacaaggccgugaacgcccugaucaacgaccagcugaucaugaagaaccaccugagagacaucaugggcauccccuacugcaacuacagcaaguacugguaccugaacaacaccgccaccggcaagaccagccugcccaagugcuggcugaucagcaacggcagcuaccugaacgagacccacuucagcgacgacaucgagcaggaggccgacaacaugaucaccgagaugcugcagaaggaguacauggagagacagggcaagaccccccugggccugguggaccuguucguguucagcaccagcuucuaccugaucagcaucuuccugcaccuggugaagauccccacccacagacacaucgugggcaagagcugccccaagccccacagacugaaccacaugggcaucugcagcugcggccuguacaagcagcccggcgugcccgugagauggaagagaugaggacuaguaauaaggaaacuguaugaaugucugugggcaggaagugaagagauccuucuguaaagguuuuuggaauuaugucugcugaauaauaaacuuuuuugaaauaauaaaucugguagaaaaaugagaucuaaaaaaaaaaaaaaaaaaaaaaaaaaaaaaaaaaaaaaaaaaaaaaaaaaaaaaaaaaaaaaaaaaaaaaaaaaaaaaaaaaaaaaaaaaaaaaaaaaaa

SEQ ID NO: 31005 - RNA, 1788 nt, Artificial Sequence
  mRNA product Design b-4 (A100) comprising derived and/or modified sequence from LASV(G3010-SLE-2013;Clade IV)__AIT17344__GPCmut6 (opt4)
aggagagucccgcagucggcguccagcggcucugcuuguucgugugugugucguugcaggccuuauucaagcuuaccaugggccagaucgugaccuucuuccaggaggugccccacgugaucgaggaggugaugaacaucgugcugaucgcccugagcauccuggccgugcugaagggccuguacaacuucgccaccugcggccuggugggccuggugaccuuccugcugcugugcggcagaagcugcaccaccagccuguacaagggcguguacgagcugcagacccuggagcugaacauggagacccugaacaugugcaugccccugagcugcaccaagaacaacagccaccacuacaucauggugggcaacgagaccggccuggagcugacccugaccaacaccagcaucaucaaccacaaguucugcaaccugagcgacgcccacaagaagaaccuguacaaccacgcccugaugagcaucaucagcaccuuccaccugagcauccccaacuucaaccaguacgaggccaugagcugcgacuucaacggcggcaagaucagcgugcaguacaaccugagccacagcuacgccggcgacgccgccagccacugcggcaccguggccaacggcgugcugcagaccuucaugagaauggccuggggcggcagcuacaucgcccuggacagcggcuacggcaagugggacugcaucaugaccagcuaccaguaccugaucauccagaacaccaccugggaggaccacugccaguucagcagacccagccccaucggcuaccugggccugcugagccagagaaccagagacaucuacaucagcagaagacugcugggcaccuucaccuggacccugagcgacagcgagggcaaggacacccccggcggcuacugccugaccagauggaugcugaucgaggccgagcugaagugcuucggcaacaccgccguggccaagugcaacgagaagcacgacgaggaguucugcgacaugcugagacuguucgacuucugcaagcaggccauccagagacugaagacccccgcccagaugagcauccagcugaucaacaaggccgugaacgcccugaucaacgaccagcugaucaugaagaaccaccugagagacaucaugggcauccccuacugcaacuacagcaaguacugguaccugaaccacaccaccaccggcaagaccagccugcccaagugcuggcuggugagcaacggcagcuaccugaacgagacccacuucagcgacgacaucgagcagcaggccgacaacaugaucaccgagaugcugcagaaggaguacauggagagacagggcaagaccccccugggccugguggaccuguucguguucagcaccagcuucuaccugaucagcaucuuccugcaccuggugaagauccccacccacagacacaucgugggcaagagcugccccaagccccacagacugaaccacaugggcaucugcagcugcggccuguacaagcagcccggcgugcccgugagauggaagagaugaggacuaguaauaaggaaacuguaugaaugucugugggcaggaagugaagagauccuucuguaaagguuuuuggaauuaugucugcugaauaauaaacuuuuuugaaauaauaaaucugguagaaaaaugagaucuaaaaaaaaaaaaaaaaaaaaaaaaaaaaaaaaaaaaaaaaaaaaaaaaaaaaaaaaaaaaaaaaaaaaaaaaaaaaaaaaaaaaaaaaaaaaaaaaaaaa

SEQ ID NO: 31006 - RNA, 1788 nt, Artificial Sequence
  mRNA product Design b-4 (A100) comprising derived and/or modified sequence from LASV(G502-SLE-2009;Clade IV)__AIT17126__GPCmut6 (opt4)
aggagagucccgcagucggcguccagcggcucugcuuguucgugugugugucguugcaggccuuauucaagcuuaccaugggccagaucgugaccuucuuccaggaggugccccacgugaucgaggaggugaugaacaucgugcugaucgcccugagcauccuggccgugcugaagggccuguacaacuucgccaccugcggccuggugggccugcugaccuuccugcugcugugcggcagaagcugcaccaccggccuguacaagggcguguacgagcugcagacccuggagcugaacauggagacccugaacaugugcaugccccugagcugcaccaagaacaacagccaccacuacaucauggugggcaacgagaccggccuggagcugacccugaccaacaccagcaucaucaaccacaaguucugcaaccugagcgacgcccacaagaagaaccuguacgaccacgcccugaugagcaucaucagcaccuuccaccugagcauccccaacuucaaccaguacgaggccaugagcugcgacuucaacggcggcaagaucagcgugcaguacaaccugagccacagcuacgccggcgacgccgccgaccacugcggcaccguggccaacggcgugcugcagaccuucaugagaauggccuggggcggcagcuacaucgcccuggacagcggcagaggcagaugggacugcaucaugaccagcuaccaguaccugaucauccagaacaccaccugggaggaccacugccaguucagcagacccagccccaucggcuaccugggccugcugagccagagaaccagagacaucuacaucagcagaagacugcugggcaccuucaccuggacccugagcgacagcgagggcaaggacacccccggcggcuacugccugaccagauggaugcugaucgaggccgagcugaagugcuucggcaacaccgccguggccaagugcaacgagaagcacgacgaggaguucugcgacaugcugagacuguucgacuucugcaagcaggccauccagagacugaaggcccccgcccagaugagcauccagcugaucaacaaggccgugaacgcccugaucaacgaccagcuggugaugaagaaccaccugagagacaucaugggcauccccuacugcaacuacagcagauacugguaccugaaccacaccaccaccggcagaaccagccugcccaagugcuggcuggugagcaacggcagcuaccugaacgagacccacuucagcgacgacaucgagcagcaggccgacaacaugaucaccgagaugcugcagaaggaguacauggagagacagggcaagaccccccugggccugguggaccuguucguguucagcaccagcuucuaccugaucagcaucuuccugcaccuggugaagauccccacccacagacacaucgugggcaagagcugccccaagccccacagacugaaccacaugggcaucugcagcugcggccuguacaagcagcccggcgugcccgugaaguggaagagaugaggacuaguaauaaggaaacuguaugaaugucugugggcaggaagugaagagauccuucuguaaagguuuuuggaauuaugucugcugaauaauaaacuuuuuugaaauaauaaaucugguagaaaaaugagaucuaaaaaaaaaaaaaaaaaaaaaaaaaaaaaaaaaaaaaaaaaaaaaaaaaaaaaaaaaaaaaaaaaaaaaaaaaaaaaaaaaaaaaaaaaaaaaaaaaaaa

SEQ ID NO: 31007 - RNA, 1788 nt, Artificial Sequence
  mRNA product Design b-4 (A100) comprising derived and/or modified sequence from LASV(G733-SLE-2010;Clade IV)__AIT17154__GPCmut6 (opt4)
aggagagucccgcagucggcguccagcggcucugcuuguucgugugugugucguugcaggccuuauucaagcuuaccaugggccagaucgugaccuucuuccaggaggugccccacgugaucgaggaggugaugaacaucgugcugaucgcccugagcauccuggccgugcugaagggccuguacaacuucgccaccugcggcaucgugggccuggugagcuuccugcugcugugcggcagaagcugcaccaccagccuguacaagggcguguacgagcugcagacccuggagcugaacauggagacccugaacaugugcaugccccugagcugcaccaagaacaacagccaccacuacaucauggugggcaacgagaccggccuggagcugacccugaccaacaccagcaucaucaaccacaaguucugcaaccugagcgacgcccacaagaagaaccuguacgaccacgcccugaugagcaucaucagcaccuuccaccugagcauccccaacuucaaccaguacgaggccaugagcugcgacuucaacggcggcaagaucagcgugcaguacaaccugagccacagcuacgccggcgacgccgccaaccacugcggcaccaucgccaacggcgugcugcagaccuucaugagaauggccuggggcggcagcuacaucgcccuggacagcggcagagacagaugggacugcaucaugaccagcuaccaguaccugaucauccagaacaccaccugggaggaccacugccaguucagcagacccagccccaucggcuaccugggccugcugagccagagaaccagagacaucuacaucagcagaagacugcugggcaccuucaccuggacccugagcgacagcgagggcaaggacacccccggcggcuacugccugaccagauggaugcugaucgaggccgagcugaagugcuucggcaacaccgccguggccaagugcaacgagaagcacgacgaggaguucugcgacaugcugagacuguucgacuucugcaagcaggccauccagagacugaaggcccccgcccagaugagcauccagcugaucaacaaggccgugaacgcccugaucaacgaccagcugaucaugaagaaccaccugagagacaucaugggcauccccuacugcaacuacagcaaguacugguaccugaaccacaccaccaccggcaagaccagccugcccaagugcuggcuggugagcaacggcagcuaccugaacgagacccacuucagcgacgacaucgagcagcaggccgacaacaugaucaccgagaugcugcagaaggaguacauggagagacagggcaagaccccccugggccugguggaccuguucguguucagcaccagcuucuaccugaucagcaucuuccugcaccuggugaagauccccacccacagacacguggugggcaagagcugccccaagccccacagacugaaccacaugggcaucugcagcugcggccuguacggccagcccggcgugcccgugaaguggaagagaugaggacuaguaauaaggaaacuguaugaaugucugugggcaggaagugaagagauccuucuguaaagguuuuuggaauuaugucugcugaauaauaaacuuuuuugaaauaauaaaucugguagaaaaaugagaucuaaaaaaaaaaaaaaaaaaaaaaaaaaaaaaaaaaaaaaaaaaaaaaaaaaaaaaaaaaaaaaaaaaaaaaaaaaaaaaaaaaaaaaaaaaaaaaaaaaaa

SEQ ID NO: 31008 - RNA, 1788 nt, Artificial Sequence
  mRNA product Design b-4 (A100) comprising derived and/or modified sequence from MOPV/LASV reassortant(IGS-1;Clade IV)__AFY05576__GPCmut6 (opt4)
aggagagucccgcagucggcguccagcggcucugcuuguucgugugugugucguugcaggccuuauucaagcuuaccaugggccagaucgugaccuucuuccaggaggugccccacgugaucgaggaggugaugaacaucgugcugaucgcccugagcgugcuggccgugcugaagggccuguacaacuucgccaccugcggccuggugggccuggugaccuuccugcugcugugcggcagaagcugcaccaccagccuguacaagggcguguacgagcugcagacccuggagcugaacauggagacccugaacaugugcaugccccugagcugcaccaagaacaacagccaccacuacaucauggugggcaacgagaccggccuggagcugacccugaccaacaccagcaucaucaaccacaaguucugcaaccugagcgacgcccacaagaagaaccuguacgaccacgcccugaugagcaucaucagcaccuuccaccugagcauccccaacuucaaccaguacgaggccaugagcugcgacuucaacggcggcaagaucagcgugcaguacaaccugagccacagcuacgccggcgacgccgccaaccacugcggcaccguggccaacggcgugcugcagaccuucaugagaauggccuggggcggcagcuacaucgcccuggacagcggcagaggcaacugggacugcaucaugaccagcuaccaguaccugaucauccagaacaccaccugggaggaccacugccaguucagcagacccagccccaucggcuaccugggccugcugagccagagaaccagagacaucuacaucagcagaagacugcugggcaccuucaccuggacccugagcgacagcgagggcgaggacacccccggcggcuacugccugaccagauggaugcugaucgaggccgagcugaagugcuucggcaacaccgccguggccaagugcaacgagaagcacgacgaggaguucugcgacaugcugagacuguucgacuucugcaagcaggccauccagagacugaaggcccccgcccagaugagcauccagcugaucaacaaggccgugaacgcccugaucaacgaccagcugaucaugaagaaccaccugagagacaucaugggcauccccuacugcaacuacagcaaguacugguaccugaaccacaccaccaccggcagaaccagccugcccaagugcuggcuggugagcaacggcagcuaccugaacgagacccacuucagcgacgacaucgagcagcaggccgacaacaugaucaccgagaugcugcagaaggaguacauggagagacagggcaagaccccccugggccugguggaccuguucguguucagcaccagcuucuaccugaucagcaucuuccugcaccuggugaagauccccacccacagacacaucgugggcaagagcugccccaagccccacagacugaaccacaugggcaucugcagcugcggccuguacaagcagcccggcgugcccgugaaguggaagagaugaggacuaguaauaaggaaacuguaugaaugucugugggcaggaagugaagagauccuucuguaaagguuuuuggaauuaugucugcugaauaauaaacuuuuuugaaauaauaaaucugguagaaaaaugagaucuaaaaaaaaaaaaaaaaaaaaaaaaaaaaaaaaaaaaaaaaaaaaaaaaaaaaaaaaaaaaaaaaaaaaaaaaaaaaaaaaaaaaaaaaaaaaaaaaaaaa

SEQ ID NO: 31009 - RNA, 1788 nt, Artificial Sequence
  mRNA product Design b-4 (A100) comprising derived and/or modified sequence from LASV(LM765-SLE-2012;Clade IV)__AIT17814__GPCmut6 (opt4)
aggagagucccgcagucggcguccagcggcucugcuuguucgugugugugucguugcaggccuuauucaagcuuaccaugggccagaucgugaccuucuuccaggaggugccccacgugaucgaggaggugaugaacaucgugcugaucgcccugagcauccuggccgugcugaagggccuguacaacuucgccaccugcggccuggugggccuggugaccuuccugcugcugugcggcagaagcugcaccaccagccuguacaagggcguguacgagcugcagacccuggagcugaacauggagacccugaacaugugcaugccccugagcugcaccaagaacaacagccaccacuacaucauggugggcaacgagaccggccuggagcugacccugaccaacaccagcaucaucgaccacaaguucugcaaccugagcgacgcccacagaaagaaccuguacgaccacgcccugaugagcaucaucagcaccuuccaccugagcauccccaacuucaaccaguacgaggccaugagcugcgacuucaacggcggcaagaucagcgugcaguacaaccugagccacagcuacgccaaggacgccgccgaccacugcggcaccguggccaacggcgugcugcagaccuucaugagaauggccuggggcggcagcuacaucgcccuggacagcggcagaggcagaugggacugcaucaugaccagcuaccaguaccugaucauccagaacaccaccugggaggaccacugccaguucagcagacccagccccaucggcuaccugggccugcugagccagagaaccagagacaucuacaucagcagaagacugcugggcaccuucaccuggacccugagcgacagcgagggcaaggacacccccggcggcuacugccugaccagauggaugcugaucgaggccgagcugaagugcuucggcaacaccgccguggccaagugcaacgagaagcacgacgaggaguucugcgacaugcugagacuguucgacuucugcaagcaggccauccagagacugaaggcccccgcccagaugagcauccagcugaucaacaaggccgugaacgcccugaucaacgaccagcugaucaugaagaaccaccugagagacaucaugggcauccccuacugcaacuacagcaaguacugguaccugaaccacaccaccaccggcaagaccagccugcccaagugcuggcuggugagcaacggcagcuaccugaacgagacccacuucagcgacgacaucgagcagcaggccgacaacaugaucaccgagaugcugcagaaggaguacauggagagacagggcaagaccccccugggccugguggaccuguucguguucagcaccagcuucuaccugaucagcaucuuccugcaccuggugaagauccccacccacagacacaucgugggcaagcccugccccaagccccacagacugaaccacaugggcaucugcagcugcggccuguacaagcagcccggcgugcccgugaaguggaagagaugaggacuaguaauaaggaaacuguaugaaugucugugggcaggaagugaagagauccuucuguaaagguuuuuggaauuaugucugcugaauaauaaacuuuuuugaaauaauaaaucugguagaaaaaugagaucuaaaaaaaaaaaaaaaaaaaaaaaaaaaaaaaaaaaaaaaaaaaaaaaaaaaaaaaaaaaaaaaaaaaaaaaaaaaaaaaaaaaaaaaaaaaaaaaaaaaa

SEQ ID NO: 31010 - RNA, 1788 nt, Artificial Sequence
  mRNA product Design b-4 (A100) comprising derived and/or modified sequence from LASV(LM776-SLE-2012;Clade IV)__AIT17824__GPCmut6 (opt4)
aggagagucccgcagucggcguccagcggcucugcuuguucgugugugugucguugcaggccuuauucaagcuuaccaugggccagaucgugaccuucuuccaggaggugccccacgugaucgaggaggugaugaacaucgugcugaucgcccugagcauccuggccgugcugaagggccuguacaacuucgccaccugcggccuggugggccuggugaccuuccugcugcugugcggcagaagcugcaccaccagcguguacaagggcguguacgagcugcagacccuggagcugaacauggagacccugaacaugugcaugccccugagcugcaccaagaacaacagccaccacuacaucauggugggcaacgagaccggccuggagcugacccugaccaacaccagcaucaucaaccacaaguucugcaaccugagcgacgcccacaagaagaaccuguacgaccacgcccugaugagcaucaucagcaccuuccaccugagcauccccaacuucaaccaguacgaggccaugagcugcgacuucaacggcggcaagaucagcgugcaguacaaccugagccacagcuacgccggcgacgccgccaaccacugcggcaccguggccaacggcgugcugcagaccuucaugagaauggccuggggcggcagcuacaucgcccuggacagcggccacggcaagugggacugcaucaugaccagcuaccaguaccugaucauccagaacaccaccugggaggaccacugccaguucagcagacccagccccaucggcuaccugggccugcugagccagagaaccagagacaucuacaucagcagaagacugcugggcaccuucaccuggacccugagcgacagcgagggcaaggacacccccggcggcuacugccugaccagauggaugcugaucgaggccgagcugaagugcuucggcaacaccgccguggccaagugcaacgagaagcacgacgaggaguucugcgacaugcugagacuguucgacuucugcaagcaggccauccagagacugaaggcccccgcccagaugagcauccagcugaucaacaaggccgugaacgcccugaucaacgaccagcugaucaugaagaaccaccugagagacaucaugggcauccccuacugcaacuacagcaaguacugguaccugaaccacaccaccaccggcaagaccagccugcccaagugcuggcuggugagcaacggcagcuaccugaacgagacccacuucagcgacgacaucgagcagcaggccgacaacaugaucaccgagaugcugcagaaggaguacauggagagacagggcaagaccccccugggccugguggaccuguucguguucagcaccagcuucuaccugaucagcaucuuccugcaccuggugaagauccccacccacagacacaucgugggcaagagcugccccaagccccacagacugaaccacaugggcaucugcagcugcggccuguacaagcagcccggcgugcccgugagauggaagagaugaggacuaguaauaaggaaacuguaugaaugucugugggcaggaagugaagagauccuucuguaaagguuuuuggaauuaugucugcugaauaauaaacuuuuuugaaauaauaaaucugguagaaaaaugagaucuaaaaaaaaaaaaaaaaaaaaaaaaaaaaaaaaaaaaaaaaaaaaaaaaaaaaaaaaaaaaaaaaaaaaaaaaaaaaaaaaaaaaaaaaaaaaaaaaaaaa

SEQ ID NO: 31011 - RNA, 1788 nt, Artificial Sequence
  mRNA product Design b-4 (A100) comprising derived and/or modified sequence from LASV(Mad39;Clade IV)__ANH09722__GPCmut6 (opt4)
aggagagucccgcagucggcguccagcggcucugcuuguucgugugugugucguugcaggccuuauucaagcuuaccaugggccagaucgugaccuucuuccaggaggugccccacgugaucgaggaggugaugaacaucgugcugaucgcccugagcauccuggccgugcugaagggccuguacaacguggccaccugcggccugaucggccuggugaccuuccugcugcugugcggcagaagcugcaccaccacccuguacaagggcguguacgagcugcaggcccuggagcugaacauggagacccugaacaugugcaugccccugagcugcaccaagaacaacagccaccacuacaucagagugggcaacgagaccggccuggagcugacccugaccaacaccagccugaucaaccacaaguucugcaaccugagcgacgcccacaagaagaaccuguacgaccacgcccugaugagcaucaucagcaccuuccaccugagcauccccaacuucaaccaguacgaggccaugagcugcgacuucaacgacggcaagaucagcgugcaguacaaccugagccacaccuacgccggcgacaccgccaaccacugcggcaccguggccaacggcgugcugcagaccuucaugagaauggccuggggcggcagcuacaucgcccuggacagcggcagaggcggcugggacugcaucaugaccagcuaccaguaccugaucauccagaacaccaccugggaggaccacugccaguucagcagacccagccccaucggcuaccugggccugcugagccagagaaccagagacaucuacaucagcagaagacugcugggcaccuucaccuggacccugagcgacagcgagggcaaggacacccccggcggcuacugccugaccagauggaugcugaucgaggccgagcugaagugcuucggcaacaccgccguggccaagugcaacgagaagcacgacgaggaguucugcgacaugcugagacuguucgacuucugcaagcaggccauccagagacugaaggcccccgcccagaugagcauccagcugaucaacaaggccgugaacgcccugaucaacgaccagcugaucaugaagaaccaccugagagacaucaugggcauccccuacugcaacuacagcaaguacugguaccugaaccacaccgugaccggcaagaccagccugcccaagugcuggcuggugagcaacggcagcuaccugaacgagacccacuucagcgacgacaucgagcagcaggccgacaacaugaucaccgagaugcugcagaaggaguacauggagagacagggcaagaccccccugggccugguggaccuguucguguucagcaccagcuucuaccugaucagcaucuuccugcaccuggugaagauccccacccacagacacguggugggcaagcccugccccaagccccacagacugaaccacaugggcaucugcagcugcggcuucuacaagcagcccggcgugcccgugagauggaagagaugaggacuaguaauaaggaaacuguaugaaugucugugggcaggaagugaagagauccuucuguaaagguuuuuggaauuaugucugcugaauaauaaacuuuuuugaaauaauaaaucugguagaaaaaugagaucuaaaaaaaaaaaaaaaaaaaaaaaaaaaaaaaaaaaaaaaaaaaaaaaaaaaaaaaaaaaaaaaaaaaaaaaaaaaaaaaaaaaaaaaaaaaaaaaaaaaa

SEQ ID NO: 31012 - RNA, 1788 nt, Artificial Sequence
  mRNA product Design b-4 (A100) comprising derived and/or modified sequence from LASV(Z0947-SLE-2011;Clade IV)__AIT17840__GPCmut6 (opt4)
aggagagucccgcagucggcguccagcggcucugcuuguucgugugugugucguugcaggccuuauucaagcuuaccaugggccagaucgugaccuucuuccaggaggugccccacgugaucgaggaggugaugaacaucgugcugaucgcccugagcauccuggccgugcugaagggccuguacaacuucgccaccugcggccuggugggccuggugaccuuccugcugcugugcggcagaagcugcaccaucagccuguacaagggcguguacgagcugcagacccuggagcugaacauggagacccugaacaugugcaugccccugagcugcaccaagaacaacagccaccacuacaucauggugggcaacgagaccggccuggagcugacccugaccaacaccagcaucaucaaccacaaguucugcaaccugagcgacgcccacaagaagaaccuguacgaccacgcccugaugagcaucaucagcaccuuccaccugagcauccccaacuucaaccaguacgaggccaugagcugcgacuucaacggcggcaagaucagcgugcaguacaaccugagccacagcuacgccggcgacgccgccaaccacugcggcaccguggccaacggcgugcugcagaccuucaugagaauggccuggggcggcagcuacaucgcccuggacagcggcagagacagaugggacugcaucaugaccagcuaccaguaccugaucauccagaacaccaccugggaggaccacugccaguucagcagacccagccccaucggcuaccugggccugcugagccagagaaccagagacaucuacaucagcagaagacugcugggcaccuucaccuggacccugagcgacagcgagggcaaggacacccccggcggcuacugccugaccagauggaugcugaucgaggccgagcugaagugcuucggcaacaccgccguggccaagugcaacgagaagcacgacgaggaguucugcgacaugcugagacuguucgacuucugcaagcaggccauccagagacugaaggcccccgcccagaugagcauccagcugaucaacaaggccgugaacgcccugaucaacgaccagcugaucaugaagaaccaccugagagacaucaugggcauccccuacugcaacuacagcaaguacugguaccugaaccacaccaccaccggcaagaccagccugcccaagugcuggcuggugagcaacggcagcuaccugaacgagacccacuucagcgacgacaucgagcagcaggccgacaacaugaucaccgagaugcugcagaaggaguacauggagagacagggcaagaccccccugggccugguggaccuguucguguucagcaccagcuucuaccugaucagcaucuuccugcaccuggugaagauccccacccacagacacaucgugggcaagcccugccccaagccccacagacugaaccacaugggcaucugcagcugcggccuguacaagcagcccggcgugcccgugaaguggaagagaugaggacuaguaauaaggaaacuguaugaaugucugugggcaggaagugaagagauccuucuguaaagguuuuuggaauuaugucugcugaauaauaaacuuuuuugaaauaauaaaucugguagaaaaaugagaucuaaaaaaaaaaaaaaaaaaaaaaaaaaaaaaaaaaaaaaaaaaaaaaaaaaaaaaaaaaaaaaaaaaaaaaaaaaaaaaaaaaaaaaaaaaaaaaaaaaaa

SEQ ID NO: 31013 - RNA, 1788 nt, Artificial Sequence
  mRNA product Design b-4 (A100) comprising derived and/or modified sequence from LASV(Josiah;Clade IV)__NP_694870__GPCmut6 (opt5)
aggagagucccgcagucggcguccagcggcucugcuuguucgugugugugucguugcaggccuuauucaagcuuaccaugggccagaucgugaccuucuuucaagaggucccccacguuauugaagaggugaugaacaucgugcugauugcccucagcguccuggcugugcuuaaggggcuguacaauuucgccacaugcggacucguuggccuggugacguuucuucugcucugugggagauccugcaccacaucucuguauaaaggagucuacgaacugcagacccucgagcugaacauggaaacacuuaauauguguaugccucugagcugcaccaagaacaauucccaucacuauaucauggugggcaacgagacagggcucgagcugacccuuacgaauaccucuauuaucaaccauaaauucuguaaucugagcgacgcgcacaagaaaaaccucuacgaucaugcucugauguccaucauuucuacauuucaccugagcaucccgaauuucaaccaguaugaagccauguccugcgacuuuaauggaggcaagauuagcguucaguacaaccucucucacuccuaugccggcgaugcugccaaucauugugggaccguggcuaacggaguccugcaaacauucaugcggauggccuggggcgggagcuacaucgcgcuugacucuggacgcggcaacugggauugcauuaugaccuccuaccaguaucugaucauucagaauacgacaugggaggaccacugucaguuuagcagacccucuccuaucggguaccucggacugcuuucccaacggacccgcgauaucuauauuagcagacggcugcucggcacauucaccuggacccuguccgacucugaaggcaaggauacacccgggggauacugccugacgcgcuggaugcucaucgaggccgagcugaaauguuuuggcaacaccgcuguggccaagugcaaugaaaaacaugacgaggaguucugcgauaugcuuagacuguuugacuucuguaagcaggcuauucagcggcucaaagccccugcgcagaugagcauccaacugauuaacaaggccgugaaugcucuuaucaacgaucagcugaucaugaagaaucaccuccgcgacauuauggggauccccuauugcaacuacuccaaauauugguaccugaaucacacaaccacaggaagaaccagccugccuaaguguuggcucgucucuaacggcuccuaccugaaugaaacgcauuucagcgacgauauugaacagcaagccgacaacaugaucacagagaugcuucagaaagaguauauggaacggcaggggaagaccccgcugggacucguugaucuguuuguguucucuaccagcuuuuaccugauuuccaucuuccuucaccucgugaaaauccccacacaucgccacauugucggcaagucuugcccuaaaccccauagacugaaucacaugggcaucuguagcugcgggcuguauaagcagccuggagugcccguuaaguggaaacggugaggacuaguaauaaggaaacuguaugaaugucugugggcaggaagugaagagauccuucuguaaagguuuuuggaauuaugucugcugaauaauaaacuuuuuugaaauaauaaaucugguagaaaaaugagaucuaaaaaaaaaaaaaaaaaaaaaaaaaaaaaaaaaaaaaaaaaaaaaaaaaaaaaaaaaaaaaaaaaaaaaaaaaaaaaaaaaaaaaaaaaaaaaaaaaaaa

SEQ ID NO: 31014 - RNA, 1785 nt, Artificial Sequence
  mRNA product Design b-4 (A100) comprising derived and/or modified sequence from LASV(LP;Clade I)__AAF86701__GPCmut6 (opt5)
aggagagucccgcagucggcguccagcggcucugcuuguucgugugugugucguugcaggccuuauucaagcuuaccaugggccagaucauuaccuucuuucaagaggugccccacgucaucgaagagguuaugaacauugugcugaucgcccucagccugcuugcuauucugaaggggcucuacaauaucgccacaugcggaaucauuggccugguggcguuccuuuuucugugugggaaauccugcucucucacgcugaagggaggcuaugaacugcagacccucgagcugaacauggaaacacuuaauauguguaugccucugagcugcaccaaaaacuccucucaucacuacaucagagucgggaaugagacaggacucgagcugacccuuacaaacaccagcauuaucaaucauaaguucuguaaccuguccgacgcucacaaaaagaaucucuaugaucaugcccugaugucuauuaucagcacguuucaccuguccauuccgaacuucaaucaguacgaagccaugagcugcgacuuuaacggcggcaagaucucugugcaguauaaucucucccacagcuacgcuggggaugccgcugagcauuguggaaccguugccaacggcgugcugcaaacauucaugcggauggcguggggagggcgcuauaucgcccuugacucuggcaaagggaauugggauugcauuaugaccuccuaccaguaccugaucauucagaacacaaccugggaagaccacugucaguuuagcagacccucuccuaucggauaucucggccugcuuucccaacggacgcgcgauauuuacaucagcagacggcugcucggcacauucaccuggacacuguccgacucugaggggaacgagacccccggaggcuauugccugacccgcuggaugcucaucgaagcugagcugaaguguuuugggaauacagccgucgcuaaaugcaacgaaaagcaugaugaggaguucugcgacaugcuuagacuguuugauuucuguaaacaggccauucggcgccucaaggcgccugcccagaugagcauccagcugauuaauaaggcugugaacgcccuuaucaaugaccaacugauuaugaaaaaccaccucagagauaucaugggaauccccuacugcaauuauuccaaguacugguaucugaaccacacgagcucuggccggaccucccugccuaaauguuggcucauuagcaaugggucuuaccugaacgaaacacaguucagcgacgacaucgagcagcaagcugauaauaugauuaccgaaaugcuucagaaggaguacaucgaacgccagggaaaaacaccgcugggccucguugacauuuuuaucuucuccaccucuuuuuaucugauuagcaucuuccugcaucuuaucaagauucccacgcacagacauaucgugggcaaaccuugccccaagccucaccggcucaaccauaugggggucuguuccugcggacuguacaagcaccccggcgugccgacaaaauggaagcgcugaggacuaguaauaaggaaacuguaugaaugucugugggcaggaagugaagagauccuucuguaaagguuuuuggaauuaugucugcugaauaauaaacuuuuuugaaauaauaaaucugguagaaaaaugagaucuaaaaaaaaaaaaaaaaaaaaaaaaaaaaaaaaaaaaaaaaaaaaaaaaaaaaaaaaaaaaaaaaaaaaaaaaaaaaaaaaaaaaaaaaaaaaaaaaaaaa

SEQ ID NO: 31015 - RNA, 1785 nt, Artificial Sequence
  mRNA product Design b-4 (A100) comprising derived and/or modified sequence from LASV(803213;Clade II)__AAF86703__GPCmut6 (opt5)
aggagagucccgcagucggcguccagcggcucugcuuguucgugugugugucguugcaggccuuauucaagcuuaccaugggccagaucauuaccuucuuucaagaggugccccacgucaucgaagagguuaugaacauugugcugaucgcccucagccugcuugcuauucugaaggggaucuacaauguggccacaugcggacucuucggccugaucuccuuucuucugcucugugggagaucuugcagcgucacguauaaaggaguguacgaacugcagacccuggagcucaacauggcgaaucugaacauguguaugccucuuuccugcacaaagaauaacucucaucacuauauuaugguuggcaaugaaaccgggcuggagcucacacugaccaacacaagcaucauuaaucauaaauucuguaaccuuuccgacgcucacaagaaaaaucuguacgaucaugcccucaugucuaucauuagcaccuuucaccuguccaucccgaacuucaaucaguaugaggccaugagcugcgacuuuaacggaggcaagauuucugugcaguacaaucugucccacagcuucgcugucgaugccgcuaaccauuguggcacgaucgccaacggggugcuccaaaccuuuaugcggauggcguggggaggcucuuauaucgcccuggacuccgggaagggaaauugggauugcauuaugacaagcuaccaguaccuuaucauucagaacaccacaugggaagaccacugucaguucucucgccccuccccuaucggcuaucuggggcuccugagccaaagaacccgggauauuuacaucucccgcagacuucugggaacguuuacauggacccucucugacagcgagggcaaugaagcucccggcggguauugccugacacgguggaugcugaucgaggccgagcucaaauguuucggaaacaccgcuguugccaagugcaaugaaaaacaugaugaggaauuuugcgacaugcugcgccuuuucgauuucuguaagcaggcgauuaaaagacugaagaccccugcccagauguccauccagcucauuaacaaggcugugaaugcccugaucaacgaccaacuuauuaugaaaaaucaucugcgggauaucaugggcauccccuacugcaacuauagccgcuacugguaucucaaucacacagucacggggaagaccucucugccuagauguuggcugguguccaacggaagcuaccucaaugagacacacuuuucugacgacauugaacagcaggcugauaacaugaucaccgagaugcugcaaaaagaguacauggaccggcagggcaagacaccgcuugggcugguggaucucuucgucuuuagcaccuccuucuaucugauuucuaucuuucugcaccuuguuaaaauucccacgcaucgccacaucgugggaaagccuugccccaaaccucauagacucaaucacaugggcauuuguagcugcggccuguacaagcaccccggggugccggucaaguggaaacggugaggacuaguaauaaggaaacuguaugaaugucugugggcaggaagugaagagauccuucuguaaagguuuuuggaauuaugucugcugaauaauaaacuuuuuugaaauaauaaaucugguagaaaaaugagaucuaaaaaaaaaaaaaaaaaaaaaaaaaaaaaaaaaaaaaaaaaaaaaaaaaaaaaaaaaaaaaaaaaaaaaaaaaaaaaaaaaaaaaaaaaaaaaaaaaaaa

SEQ ID NO: 31016 - RNA, 1785 nt, Artificial Sequence
  mRNA product Design b-4 (A100) comprising derived and/or modified sequence from LASV(GA391;Clade III)__CAA36645__GPCmut6 (opt5)
aggagagucccgcagucggcguccagcggcucugcuuguucgugugugugucguugcaggccuuauucaagcuuaccaugggccagaucgugaccuucuuucaagaggucccccacguuauugaagaggugaugaacaucgugcugauugcccucagcauccuggcuauucuuaaggggcuguacaaugucgccacaugcggacucaucggccuggugacguuccuucugcucuccgggagaucuuguagccugaucuauaaaggaaccuacgaacugcagacacucgagcugaacauggaaacccuuaauaugugcaugccucuguccuguacaaagaacaauucucaucacuauauucggguuggcaacgagaccgggcucgagcugacacuuaccaauacgagcauccugaaccauaaauuuugcaaucucuccgacgcgcacaagcgcaaccuguacgaucauucucugaugagcauuaucuccaccuuccaccucagcauuccgaauuuuaaccaguaugaagcuaugucuugugacuucaauggaggcaaaaucacagugcaguacaaccugucccacagcuuugccgucgaugccgcuggccauugcgggacccuugccaauggagugcugcaaacauucaugagaauggcuuggggcgggucuuauauugcccucgacuccggacggggcaacugggauuguaucaugaccagcuaccaguaccugaucauucagaacacgacaugggacgaucacugccaguuuucucgccccuccccuaucggguaucuuggacugcucagccaaagaacccgggacauuuacaucucccgcagacugcugggcacauucaccuggacccucucugauagcgagggcaaugaaacacccgggggauauugucugacgcgguggaugcuuauugaggcggagcugaagugcuuuggcaacaccgccguugcuaaguguaaugaaaaacaugacgaggaguucugcgauaugcuccgccuguuugacuucugcaagcaggccaucagacggcuuaaaaccccugcucagauguccauccagcugauuaacaaggccgugaaugcgcucaucaacgaucaacugauuaugaaaaaucaucugcgcgacaucauggggauucccuacuguaacuauagcagauacugguaucucaaucacacaucuacaggaaagaccucccugccucggugcuggcuuaucagcaacggcucuuaccugaaugaaacgaaguucagcgacgauaucgaacagcaggccgacaacaugauuacagagaugcuccaaaaagaguacaucgaucgccaggggaagaccccgcugggacuggucgaccuuuuuguguucuccaccucuuuuuaucucauuagcaucuuccugcaccuggugaaaauucccacacacagacauaucgucggcaagccuugucccaaaccucaccggcucaaucauaugggcauuugcuccugugggcuguacaagcagcccggaguuccggugagauggaaacgcugaggacuaguaauaaggaaacuguaugaaugucugugggcaggaagugaagagauccuucuguaaagguuuuuggaauuaugucugcugaauaauaaacuuuuuugaaauaauaaaucugguagaaaaaugagaucuaaaaaaaaaaaaaaaaaaaaaaaaaaaaaaaaaaaaaaaaaaaaaaaaaaaaaaaaaaaaaaaaaaaaaaaaaaaaaaaaaaaaaaaaaaaaaaaaaaaa

SEQ ID NO: 31017 - RNA, 1788 nt, Artificial Sequence
  mRNA product Design b-4 (A100) comprising derived and/or modified sequence from LASV(AV;Clade V)__CCA30314__GPCmut6 (opt5)
aggagagucccgcagucggcguccagcggcucugcuuguucgugugugugucguugcaggccuuauucaagcuuaccaugggccagaucgugaccuucuuucaagaggucccccacguuauugaagaggugaugaacaucgugcugauugcccucagcauccuggcuguccuuaaggggcuguacaauauugccacaugcggacucaucggccugaucacguuccuucugcucugugggagauccugcucuagcaaccuguauaaaggaguguacgaacugcagucccucgaccugaauauggagacccuuaacauguguaugccucugucuugcacaaagaauaacagccaucacuauauucggguuggcaaugauaccgggcucgaacugacacuuaccaacacauccauccugaaucauaaauuuuguaaccucucugacgcgcacaagaaagaucuguacgaccaugcucugaugagcauuaucuccaccuuccaccucagcauuccgaauuuuaaccaguaugaggccaugucuugcgauuucaauggaggcaagaucuccgugcaguacaaccugagccacucuuaugccauugacgcugccaaucauuguggcacggucgcuaacgggauccuucaaaccuuuaugcgcauggccuggggaggcuccuacaucgcgcuggauagcgggagaggaaacugggacugcauuaugacaucuuaccaguaucucaucauucagaauaccacaugggagaaccacugucaguucucccggcccagcccuaucggcuaccuggggcuucugucccaacgcaccagagauauuuauaucucucggcgccuccugggaacguuuacauggacccugagcgacuccgaaggcaaugccacacccggcggguacugccucaccagauggaugcugaucgaggcugaacuuaaguguuucggaaacaccgccguggcuaaaugcaaugagaagcaugaugaggaauuuugcgacaugcugcgccucuucgauuuuuguaaacaggccauuagccggcugaagucuccugcgcagauguccauccagcuuauuaacaaagccguuaaugcucugaucaacgaccaacucauuaugaagaaucaccugagagacaucaugggcauccccuauugcaacuacagcaaguauugguaccugaaucacacaauuacggggaaaaccucucucccuaaguguuggcuggugagcaacggauccuaccuuaaugagacacauuucucugaugacaucgaacagcaggccgauaacaugauuaccgagaugcugcaaaaagaauauauggagcggcagggcaagacaccgcucgggcuggucgaccuguucguguuuagcaccuccuucuaccuuaucagcauuuuucuccgccuggugaaaauccccacgcacagacauauugucggaaagccuugccccaaaccucaccggcugaaucauaugggcaucuguucuugcggccucuauaagcagcccgggguuccggugcgcuggaagagaugaggacuaguaauaaggaaacuguaugaaugucugugggcaggaagugaagagauccuucuguaaagguuuuuggaauuaugucugcugaauaauaaacuuuuuugaaauaauaaaucugguagaaaaaugagaucuaaaaaaaaaaaaaaaaaaaaaaaaaaaaaaaaaaaaaaaaaaaaaaaaaaaaaaaaaaaaaaaaaaaaaaaaaaaaaaaaaaaaaaaaaaaaaaaaaaaa

SEQ ID NO: 31018 - RNA, 1785 nt, Artificial Sequence
  mRNA product Design b-4 (A100) comprising derived and/or modified sequence from LASV(Togo/2016/7082;Clade VI)__AMR44577__GPCmut6 (opt5)
aggagagucccgcagucggcguccagcggcucugcuuguucgugugugugucguugcaggccuuauucaagcuuaccaugggccagaucauuaccuucuuucaagaggugccccacgucaucgaagagguuaugaacauugugcugaucgcccucagccugcuugcuauucugaaggggguguacaaugucgccacaugcggaaucaucggccucgugacguuccuguuucuuugugggagauccugcucucugauuuauaaaggaagcuacgaacuccagacccuggagcugaacauggaaacacucaauauguguaugccucuguccugcaccaagaacucuagccaucacuauauccggguuggcaaugagacagggcuugagcugacccucacaaacaccuccauuaucaaucauaaauucuguaaccugucugacgcgcacaagcgcaaucuuuacgaucaugcucugaugagcauucucuccacguuucaccugagcaucccgaacuucaaucaguaugaagccaugucuugcgacuuuaacggaggcaaaauuuccgugcaguacaaucugagccacgccuaugcugucgaugccgcugagcauuguggcaccguggccaacgggguucuccaaacauucaugagaauggcguggggaggcucuuacaucgcccuggacuccgggcggggaaauugggauugcaucaugaccagcuaccaguaucuuauuauccagaacacaaccugggaagaccacugucaguuuucucgccccuccccuauuggcuaccuggggcuccugagccaaagaacgcgggauaucuauauuucccgcagacuucugggaacauucaccuggacacucucugacagcgagggcaacgagacccccggcggguacugccugacccgguggaugcugaucgaagcugagcucaaguguuuuggaaauacagccguggcuaagugcaacgaaaaacaugaugaggaguucugcgacaugcugcgccuuuuugauuucuguaagcaggccauccagagacugaaauccccugcgcagaugagcauucaacucaucaauaaggccgucaacgcucugauuaaugaccagcuuaucaugaaaaaccaucugcgggauaugaugggcauucccuauugcaauuacucuaaguauugguaccucaaccacacguccagcgggcgcaccucucugccuaaguguuggcuggugagcaauggauccuaccucaacgaaacacacuucucugacgacaucgagcagcaagccgauaauaugaucaccgaaaugcugcagaaagaguauauugacagacagggcaagacaccgcuugggcugguggaucucuuugucuucagcaccuccuuuuaccugaucagcauuuuccugcaccuuaucaaaauucccacgcaucggcacaucguuggaaagccuugccccaaaccucaucgccucaaccacaugggcauuuguucuugcggccuguauaagcagcccggggugccgacaagauggaaacggugaggacuaguaauaaggaaacuguaugaaugucugugggcaggaagugaagagauccuucuguaaagguuuuuggaauuaugucugcugaauaauaaacuuuuuugaaauaauaaaucugguagaaaaaugagaucuaaaaaaaaaaaaaaaaaaaaaaaaaaaaaaaaaaaaaaaaaaaaaaaaaaaaaaaaaaaaaaaaaaaaaaaaaaaaaaaaaaaaaaaaaaaaaaaaaaaa

SEQ ID NO: 31019 - RNA, 1785 nt, Artificial Sequence
  mRNA product Design b-4 (A100) comprising derived and/or modified sequence from LASV(KAK-428;Clade n.d. (VII))__ANH09740__GPCmut6 (opt5)
aggagagucccgcagucggcguccagcggcucugcuuguucgugugugugucguugcaggccuuauucaagcuuaccaugggccagaucgugaccuucuuucaagaggucccccacguuauugaagaggugaugaacaucgugcugauugcccucagccugcuugcuauccugaaggggcucuacaauuucgccacaugcggagucauuggccugaucacguuucuucugcucugugggagauccugcucugcgaccuauaaaggacaguacgaacugcagacacuggagcucaacauggaaagccugaauauguguaugccucuuuccugcaccaagaacaauucucaucacuauauccgggcuggcaacaauacagggcuggagcucacccugacaaacaccagcauuaucucccauaaauucuguaaucuuucugacgcccacaagaaaaaccuguacgaucauacgcucaugagcauuaucaccacauuucaccuguccauuccgaauuucaaccaguaugaggccaugagcugcgacuuuaauggaggcaagaucucuauucaauacaaccugucccacagcuaugcuggcgaugccgcucagcauugugggaccguggccaauggaguucuccagacauucaugcgcauggcguggggcgggucuuaccuggcccuugacuccggaagacggggcugggauugcaucaucagcucuuaccaguaucugauuauccaaaacaccacgugggacgaucacugucaguuuucccgccccagcccuauuggguaccucggauucgugucccagaagacaagagacaucuauauuucucggcgccugcuuggcaccuuuacauggacccugagcgauuccgaaggccaugacaugcccgggggauacugccucaccagauggaugcugaucgaggcugaucugaaauguuucggcaacacagccgucgcuaagugcaaugaaaaacacgacgaggaguuuugcgauauguggcgccucuucgacuucuguaagcaggccauccaacggcugaaagcgccugcccagaugaacauucagcuuaucaauaaggcugugaacgcccugauuaaugaccaacucaugaugaagaaccaccugagagauaucauggggauucccuauugcaauuacagcaaauuuugguaucuuaacaauacgaccacaggacggaccucucugccucgcuguuggcucaucuccaacggcagcuaccugaaugaaacacauuucucugacgauaucgagcagcaggcugacaacaugauuaccgaaaugcugcagaaggaguacauggauagacaagggaaaacgccgcucggacugguugaccuuuuuguguucagcacauccuuuuaucugaucaccauuuuccuccaccuggucaagauccccacccaucggcacauugugggcaaaccuugccccaagccucaucgccugaaucacaugggcaucuguucuugcgggcuuuacaaacagcccggagugccggucagauggaagcggugaggacuaguaauaaggaaacuguaugaaugucugugggcaggaagugaagagauccuucuguaaagguuuuuggaauuaugucugcugaauaauaaacuuuuuugaaauaauaaaucugguagaaaaaugagaucuaaaaaaaaaaaaaaaaaaaaaaaaaaaaaaaaaaaaaaaaaaaaaaaaaaaaaaaaaaaaaaaaaaaaaaaaaaaaaaaaaaaaaaaaaaaaaaaaaaaa

SEQ ID NO: 31020 - RNA, 1785 nt, Artificial Sequence; identical to SEQ ID NO: 31014
  mRNA product Design b-4 (A100) comprising derived and/or modified sequence from LASV(Pinneo-NIG-1969;Clade I)__AIT17836__GPCmut6 (opt5)

SEQ ID NO: 31021 - RNA, 1785 nt, Artificial Sequence
  mRNA product Design b-4 (A100) comprising derived and/or modified sequence from LASV(ISTH0009-NIG-2011;Clade II)__AIT17404__GPCmut6 (opt5)
aggagagucccgcagucggcguccagcggcucugcuuguucgugugugugucguugcaggccuuauucaagcuuaccaugggccagaucauuaccuucuuucaagaggugccccacgucaucgaagagguuaugaacauugugcugaucgcccucagccugcuugcuauucugaaggggaucuacaauguggccacaugcggacucuucggccuggucuccuuucuucugcucugugggagaucuugcagcacgaccuauaaaggaguguacgaacugcagacacuggagcucgacauggcgucccugaacauguguaugccucuuucuugcaccaagaauaacagccaucacuauaucaugguuggcaaugaaacagggcuggagcucacccugacaaacaccuccauuaucaaucauaaauucuguaaccuuucugaugcucacaagaaaaaucuguacgaccaugcccucaugagcauuaucuccacguuucaccugagcauuccgaacuucaaucaguaugaggccaugucuugcgauuuuaacggaggcaagaucuccgugcaguacaaucugagccacgcuuaugccgucgacgcugccaaccauuguggcaccauugcgaauggggugcuccaaacauucaugcggauggccuggggaggcucuuacaucgcucuggauuccgggaagggaagcugggacugcaucaugaccucuuaccaguaucuuauuauccagaacacaaccugggaagaucacugucaguuuucccgccccagcccuauuggcuaccuggggcuccugucccaaagaacgcgggacaucuauauuucucgcagacuucugggaacauucaccuggacacucagcgauuccgagggcaacgaaacccccggcggguacugccugacccgguggaugcugaucgaggccgagcucaaauguuuuggaaauacagcuguugccaagugcaacgaaaaacaugacgaggaguucugcgauaugcugcgccuuuuugacuucuguaagcaggcgaucagacggcugaaaacgccugcccagaugagcauucagcucaucaauaaggcugugaacgcccugauuaaugaucaacuuaucaugaagaaccaucugcgcgacauuaugggcauccccuauugcaauuacucuaaauauugguaccucaaccacaccgucacagggaagaccucccugccuagauguuggcuggugagcaauggaucuuaccucaacgaaacacacuucagcgacgauaucgaacagcaggcugacaauaugauuaccgagcugcuucaaaaagaguauauggaucggcagggcaagacgccgcuggggcucguggaccuguuugucuucuccacaucuuuuuaccugaucagcauuuuccuucaccucaucaaaauucccacccaucgccacaucaccggaaagccuugccccaaaccucauagacugaaccacaugggcauuuguuccugcggccuguauaagcaccccgggguuccggugaaguggaaacggugaggacuaguaauaaggaaacuguaugaaugucugugggcaggaagugaagagauccuucuguaaagguuuuuggaauuaugucugcugaauaauaaacuuuuuugaaauaauaaaucugguagaaaaaugagaucuaaaaaaaaaaaaaaaaaaaaaaaaaaaaaaaaaaaaaaaaaaaaaaaaaaaaaaaaaaaaaaaaaaaaaaaaaaaaaaaaaaaaaaaaaaaaaaaaaaaa

SEQ ID NO: 31022 - RNA, 1785 nt, Artificial Sequence
  mRNA product Design b-4 (A100) comprising derived and/or modified sequence from LASV(ISTH2010-NIG-2012;Clade II)__AIT17482__GPCmut6 (opt5)
aggagagucccgcagucggcguccagcggcucugcuuguucgugugugugucguugcaggccuuauucaagcuuaccaugggccagaucauuaccuucuuucaagaggugccccacgucaucgaagagguuaugaacauugugcugaucgcccucagccugcuugcuauucugaaggggaucuacaauguggccacaugcggacucuucggccuggucuccuuucuucugcucugugggagaucuugcagcacgaccuauaaaggaguguacgaacugcagacacuggagcucgacauggcgucccugaacauguguaugccucuuucuugcaccaagaauaacagccaucacuauaucaugguuggcaaugaaacagggcuggagcucacccugacaaacaccuccauuaucaaucauaaauucuguaaccuuucugaugcucacaagaaaaaucuguacgaccaugcccucaugagcauuaucuccacguuucaccugagcauuccgaacuucaaucaguaugaggccaugucuugcgauuuuaacggaggcaagaucuccgugcaguacaaucugagccacgcuuaugccgucgacgcugccaaccauuguggcaccauugcgaauggggugcuccaaacauucaugcggauggccuggggaggcucuuacaucgcucuggauuccgggaagggaagcugggacugcaucaugaccucuuaccaguaucuuauuauccagaacauuacaugggaagaucacugucaguuuucccgccccagcccuaucggcuaccuggggcuccugucccaaagaacccgggacauuuauaucucucgcagacuucugggaacguucacauggacccucagcgauuccgagggcaacgaaacacccggcggguacugccugacccgguggaugcugaucgaggccgagcucaaauguuuuggaaauaccgcuguugccaagugcaacgaaaaacaugacgaggaguucugcgauaugcugcgccuuuuugacuucuguaagcaggcgauuagacggcugaaaacgccugcccagaugagcauccagcucauuaauaaggcugugaacgcccugaucaaugaucaacuuauuaugaagaaccaucugcgcgacaucaugggcauccccuauugcaauuacucuaaauauugguaccucaaccacacagucaccgggaagacaucccugccuagauguuggcuggugagcaauggaucuuaccucaacgaaacccacuucagcgacgauauugaacagcaggcugacaauaugaucacagagcugcuucaaaaagaguauauugaucggcagggcaagaccccgcuggggcucguggaccuguuugucuucuccacgucuuuuuaccugaucagcauuuuccuucaccucguuaaaauccccacacaucgccacguggugggaaagccuugccccaaaccucauagacugaaccacaugggcauuuguuccugcggccuguauaagcaccccggggucccggugaaguggaaacggugaggacuaguaauaaggaaacuguaugaaugucugugggcaggaagugaagagauccuucuguaaagguuuuuggaauuaugucugcugaauaauaaacuuuuuugaaauaauaaaucugguagaaaaaugagaucuaaaaaaaaaaaaaaaaaaaaaaaaaaaaaaaaaaaaaaaaaaaaaaaaaaaaaaaaaaaaaaaaaaaaaaaaaaaaaaaaaaaaaaaaaaaaaaaaaaaa

SEQ ID NO: 31023 - RNA, 1785 nt, Artificial Sequence
  mRNA product Design b-4 (A100) comprising derived and/or modified sequence from LASV(Lassa virus/H.sapiens-wt/NGA/2015/ISTH_0543;Clade II)__AVO03639__GPCmut6 (opt5)
aggagagucccgcagucggcguccagcggcucugcuuguucgugugugugucguugcaggccuuauucaagcuuaccaugggccagaucauuaccuucuuucaagaggugccccacgucaucgaagagguuaugaacauugugcugaucgcccucagccugcuugcuauucugaaggggaucuacaauguggccacaugcggacucuucggccuggucuccuuucuucugcucugugggagaucuugcagcacgaccuauaaaggaguguacgaacugcagacacuggagcucgacauggcgaaccugaauauguguaugccucuuuccugcaccaagaacaauucucaucacuauaucaugguuggcaacgaaacagggcuggagcucacccugacaaauaccagcauuaucaaccauaaauucuguaaucuuuccgaugcucacaagaaaaaccuguacgaccaugcccucaugucuauuaucagcacguuucaccuguccauuccgaauuucaaccaguaugaggccaugagcugcgauuuuaauggaggcaagaucucugugcaguacaaccugucccacaccuaugcugucgacgccgcuaaucauuguggcacaauugccaacggggugcuccaaaccuucaugcggauggcguggggaggcagcuacaucgcccuggauucugggaagggauccugggacugcaucaugacaagcuaccaguaucuuguuauucagaacaccacgugggaagaucacugucaguuuucucgccccuccccuaucggcuaccuggggcuccugagccaaagaacacgggacauuuauaucucccgcagacuucugggaaccuucacauggacccucucugauagcgagggcaaugaaacccccggcggguacugccugacacgguggaugcugauugaggcugagcucaaauguuuuggaaacacggccguggcuaagugcaaugaaaaacaugacgaggaguucugcgauaugcugcgccuuuuugacuucuguaagcaggccaucagacggcugaaaaccccugcgcagauguccauccagcucauuaacaaggccgucaaugcucugaucaacgaucaacuuauuaugaagaaucaucugcgcgacaucaugggcauucccuauugcaacuacagcaaauauugguaccucaaucacacagugaccgggaagacaucucugccuagauguuggcugguguccaacggaagcuaccucaaugaaacccacuucucugacgauaucgaacagcaggccgacaacaugaucacggagcugcuucaaaaagaguauauugaucggcagggcaagacaccgcuggggcucgucgaccuguuuguuuucagcaccuccuuuuaccugaucucuauuuuccuucaccucgugaaaauccccacccaucgccacauuacaggaaagccuugccccaaaccucauagacugaaucacaugggcaucuguagcugcggccuguauaagcaccccggggugccggucaaguggaaacggugaggacuaguaauaaggaaacuguaugaaugucugugggcaggaagugaagagauccuucuguaaagguuuuuggaauuaugucugcugaauaauaaacuuuuuugaaauaauaaaucugguagaaaaaugagaucuaaaaaaaaaaaaaaaaaaaaaaaaaaaaaaaaaaaaaaaaaaaaaaaaaaaaaaaaaaaaaaaaaaaaaaaaaaaaaaaaaaaaaaaaaaaaaaaaaaaa

SEQ ID NO: 31024 - RNA, 1785 nt, Artificial Sequence
  mRNA product Design b-4 (A100) comprising derived and/or modified sequence from LASV(Lassa virus/H.sapiens-wt/NGA/2016/ISTH_0009;Clade II)__AVO03571__GPCmut6 (opt5)
aggagagucccgcagucggcguccagcggcucugcuuguucgugugugugucguugcaggccuuauucaagcuuaccaugggccagaucauuaccuucuuucaagaggugccccacgucaucgaagagguuaugaacauugugcugaucgcccucagccugcuugcuauucugaaggggaucuacaauguggccacaugcggacuccugggccuugucuccuuccugcuccugugugggagaucuugcagcacgaccuauaaaggaguguacgaacugcagacacucgagcuggacauggcgucccuuaacauguguaugccucugucuugcaccaagaauaacagccaucacuauaucaugguuggcaaugaaacagggcucgagcugacccuuacaaacaccuccauuaucaaucauaaauuuuguaaccugucugaugcucacaagaaaaaucucuacgaccaugcccugaugagcauuaucuccacguuccaccugagcauuccgaacuuuaaucaguaugaggccaugucuugcgauuucaacggaggccggaucuccgugcaguacaaucucagccacucuuaugcugucgacgccgcuaaccauuguggcaccauugccaauggggugcugcaaacauuuaugcgcauggcguggggaggcuccuacaucgcccuugauagcgggaagggaucuugggacugcaucaugaccuccuaccaguaucugauuauccagaacacaaccugggaagaucacugucaguucagcagacccuccccuauuggcuaccucgggcugcuuucucaacggacgcgcgacaucuauauuagcagacggcugcucggaacauuuaccuggacacuguccgauagcgagggcaacgaaacccccggcggguacugccugacccgcuggaugcucaucgaggcugagcugaaguguuucggaaauacagccguugcuaaaugcaacgaaaagcaugacgaggaauuuugcgauaugcuuagacuguucgacuuuuguaaacaggccauccggcgccucaagacgccugcgcagaugucuauucagcugaucaauaaagccgugaacgcucuuauuaaugaucaacugaucaugaagaaccaccucagagacauuaugggcauccccuauugcaauuacuccaaguauugguaccugaaccacaccgucacagggaaaaccagccugccucgguguuggcucgugucuaauggaagcuaccugaacgagacacauuucuccgacgauaucgaacagcaggccgacaauaugauuaccgagcuucugcaaaaggaguauaucgaucgccagggcaaaacgccgcucgggcugguggaccuguucgucuuuucuaccagcuucuaccuuauuuccaucuuucuccaccugguuaagauucccacacauagacacaucaccggaaaaccuugccccaagccucaucggcugaaccacaugggcauuuguagcugcggccucuauaaucaccccggggugccggugaaauggaagcgcugaggacuaguaauaaggaaacuguaugaaugucugugggcaggaagugaagagauccuucuguaaagguuuuuggaauuaugucugcugaauaauaaacuuuuuugaaauaauaaaucugguagaaaaaugagaucuaaaaaaaaaaaaaaaaaaaaaaaaaaaaaaaaaaaaaaaaaaaaaaaaaaaaaaaaaaaaaaaaaaaaaaaaaaaaaaaaaaaaaaaaaaaaaaaaaaaa

SEQ ID NO: 31025 - RNA, 1785 nt, Artificial Sequence
  mRNA product Design b-4 (A100) comprising derived and/or modified sequence from LASV(Lassa virus/H.sapiens-wt/NGA/2016/ISTH_0017;Clade II)__AVO03567__GPCmut6 (opt5)
aggagagucccgcagucggcguccagcggcucugcuuguucgugugugugucguugcaggccuuauucaagcuuaccaugggccagaucauuaccuucuuucaagaggugccccacgucaucgaagagguuaugaacauugugcugaucgcccucagccugcuugcuauucugaaggggaucuacaauguggccacaugcggacucuucggccuggucuccuuucuucugcucugugggagaucuugcagcacgaccuauaaaggaguguacgaacugcagacacuggagcucgacauggcgucccugaacauguguaugccucuuucuugcaccaagaauaacagccaucacuauaucaugguuggcaaugaaacagggcuggagcucacccugacaaacaccuccauuaucaaucauaaauucuguaaccuuucugaugcucacaagaaaaaucuguacgaccaugcccucaugagcauuaucuccacguuucaccugagcauuccgaacuucaaucaguaugaggccaugucuugcgauuuuaacggaggcaagaucuccgugcaguacaaucugagccacaccuaugcuauugacgccgcuaaccauuguggcacaaucgccaaugggguccuccaaaccuucaugcggauggcguggggaggcucuuacaucgcccuggauuccgggaagggaagcugggacugcauuaugacaucuuaccaguaucuuaucauucagaacaccacgugggaagaucacugucaguuuucccgccccagcccuaucggcuaccuggggcuccugucccaaagaacacgggacauuuauaucucucgcagacuucugggaaccuucacauggacccucagcgauuccgagggcaacgaaacccccggcggguacugccugacacgguggaugcugaucgaggcugagcucaaauguuuuggaaauacggccguggcuaagugcaacgaaaaacaugacgaggaguucugcgauaugcugcgccuuuuugacuucuguaagcaggccauuagacggcugaaaaccccugcgcagaugagcauccagcucauuaauaaggccguuaacgcucugaucaaugaucaacuuauuaugaagaaccaucugcgcgacaucaugggcauccccuauugcaauuacucuaaauauugguaccucaaccacacagugaccgggaagacaucccugccuagauguuggcuggucagcaauggaucuuaccucaacgaaacccacuucagcgacgauauugaacagcaggccgacaauaugaucacggagcugcuucaaaaagaguauauggaucggcagggcaagacaccgcuggggcucguggaccuguuuguguucuccaccucuuuuuaccugauuagcaucuuccuucaccucguccgcauucccacccauagacacguuaucggaaaaccuugccccaagccucaucggcugaaccacaugggcauuuguuccugcggccuguauaaacaccccggggugccggugaaguggaagcgcugaggacuaguaauaaggaaacuguaugaaugucugugggcaggaagugaagagauccuucuguaaagguuuuuggaauuaugucugcugaauaauaaacuuuuuugaaauaauaaaucugguagaaaaaugagaucuaaaaaaaaaaaaaaaaaaaaaaaaaaaaaaaaaaaaaaaaaaaaaaaaaaaaaaaaaaaaaaaaaaaaaaaaaaaaaaaaaaaaaaaaaaaaaaaaaaaa

SEQ ID NO: 31026 - RNA, 1785 nt, Artificial Sequence
  mRNA product Design b-4 (A100) comprising derived and/or modified sequence from LASV(Lassa virus/H.sapiens-wt/NGA/2018/ISTH_0959;Clade II)__AVV65099__GPCmut6 (opt5)
aggagagucccgcagucggcguccagcggcucugcuuguucgugugugugucguugcaggccuuauucaagcuuaccaugggccagaucauuaccuucuuucaagaggugccccacgucaucgaagagguuaugaacauugugcugaucgcccucagccugcuugcuauucugaaggggaucuacaauguggucacaugcggacucuucggccugguguccuuucuucugcucugugggagaucuugcagcacgaccuauaaaggaguuuacgaacugcagacacuggagcucgacauggccucccugaacauguguaugccucuuucuugcaccaagaauaacagccaucacuauaucauggugggcaaugaaacagggcuggagcucacccugacaaacaccuccauuaucaaucauaaauucuguaaccuuucugaugcgcacaagaaaaaucuguacgaccaugcucucaugagcauuaucuccacguuucaccugagcauuccgaacuucaaucaguaugaggccaugucuugcgauuuuaacggaggcaagaucuccguccaguacaaucugagccacgccuaugcuauugacgccgcuaaccauuguggcaccaucgccaauggggugcuccaaacauucaugcggauggcguggggaggcucuuacaucgcccuggauuccgggaagggaagcugggacugcauuaugaccucuuaccaguaucuuaucauucagaacacaaccugggaagaucacugucaguuuucccgccccagcccuaucggcuaccuggggcuccugucccaaagaacgcgggacauuuauaucucucgcagacuucugggaacauucaccuggacacucagcgauuccgagggcaacgaaacccccggcggguacugccugacccgguggaugcugaucgaggcugagcucaaauguuuuggaaauacagccguugcuaagugcaacgaaaaacaugacgaggaguucugcgauaugcugcgccuuuuugacuucuguaagcaggccauuagacggcugaaaacgccugcgcagaugagcauccagcucauuaauaaggccgugaacgcucugaucaaugaucaacuuauuaugaagaaccaucugcgcgacaucaugggcauccccuauugcaauuacucuaaauauugguaccucaaccacaccgucacagggaagaccucccugccuagauguuggcuggugagcaauggaucuuaccucaacgaaacacacuucagcgacgauauugaacagcaggccgacaauaugaucaccgagcugcuucaaaaagaguauauugaucggcagggcaagacgccgcuggggcucguggaccuguuugucuucuccacaucuuuuuaccugaucagcauuuuccuucaccucguuaaaauccccacccaucgccacgugauuggaaagccuugccccaaaccucauagacugaaccacaugggcaucuguuccugcggccuguauaagcaccccggggugccggucaaguggaaacggugaggacuaguaauaaggaaacuguaugaaugucugugggcaggaagugaagagauccuucuguaaagguuuuuggaauuaugucugcugaauaauaaacuuuuuugaaauaauaaaucugguagaaaaaugagaucuaaaaaaaaaaaaaaaaaaaaaaaaaaaaaaaaaaaaaaaaaaaaaaaaaaaaaaaaaaaaaaaaaaaaaaaaaaaaaaaaaaaaaaaaaaaaaaaaaaaa

SEQ ID NO: 31027 - RNA, 1785 nt, Artificial Sequence
  mRNA product Design b-4 (A100) comprising derived and/or modified sequence from LASV(LASV003-NIG-2008;Clade II)__AIT17580__GPCmut6 (opt5)
aggagagucccgcagucggcguccagcggcucugcuuguucgugugugugucguugcaggccuuauucaagcuuaccaugggccagaucauuaccuucuuucaagaggugccccacgucaucgaagagguuaugaacauugugcugaucgcccucagccugcuugcuauucugaaggggaucuacaauguggccacaugcggacucuucggccuggucuccuuucuucugcucugugggagaucuugcagcacgaccuauaaaggaguguacgaacugcagacacuggagcucgacauggcgucccugaacauguguaugccucuuucuugcaccaagaauaacagccaucacuauaucaugguuggcaaugaaacagggcuggagcucacccugacaaacaccuccauuaucaaucauaaauucuguaaccuuucugaugcucacaagaaaaaucuguacgaccaugcccucaugagcauuaucuccacguuucaccugagcauuccgaacuucaaucaguaugaggccaugucuugcgauuuuaacggaggcaagaucuccgugcaguacaaucugagccacaccuaugcugucgacgccgcuaaccauuguggcacaauugccaauggggugcuccaaaccuucaugcggauggcguggggaggcucuuacaucgcccuggauuccgggaagggaagcugggacugcaucaugacaucuuaccaguaucuuauuauccagaacaccacgugggaagaucacugucaguuuucccgccccagcccuauuggcuaccuggggcuccugucccaaagaacacgggacaucuauauuucucgcagacuucugggaaccuucacauggacccucagcgauuccgagagcaacgaaacccccggcggcuacugccugacacgguggaugcugaucgaggcugagcucaaauguuuugggaauacggccguugcuaagugcaacgaaaaacaugacgaggaguucugcgauaugcugcgccuuuuugacuucuguaagcaggccaucagacggcugaaagcgccugcccagaugucuauucagcucaucaauaaggcugugaacgcccugauuaaugaucaacuuaucaugaagaaccaucugcgcgacauuaugggaauccccuauugcaauuacuccaaauauugguaccucaaccacaccgucacaggcagaaccagccugccucgguguuggcuggugucuaaugggagcuaccucaacgaaacacacuucuccgacgauaucgaacagcaggcugacaauaugauuaccgagcugcuucaaaaggaguauauggaucgccagggaaaaacgccgcugggccucguggaccuguuugucuucucuaccagcuuuuaccugaucuccauuuuccuucaccucguuaagauccccacacauagacacgugauugggaaaccuugccccaagccucaucggcugaaccacaugggaaucuguagcugcggccuguauaaacaccccggcgugccggucaaguggaagcgcugaggacuaguaauaaggaaacuguaugaaugucugugggcaggaagugaagagauccuucuguaaagguuuuuggaauuaugucugcugaauaauaaacuuuuuugaaauaauaaaucugguagaaaaaugagaucuaaaaaaaaaaaaaaaaaaaaaaaaaaaaaaaaaaaaaaaaaaaaaaaaaaaaaaaaaaaaaaaaaaaaaaaaaaaaaaaaaaaaaaaaaaaaaaaaaaaa

SEQ ID NO: 31028 - RNA, 1785 nt, Artificial Sequence
  mRNA product Design b-4 (A100) comprising derived and/or modified sequence from LASV(LASV035-NIG-2009;Clade II)__AIT17588__GPCmut6 (opt5)
aggagagucccgcagucggcguccagcggcucugcuuguucgugugugugucguugcaggccuuauucaagcuuaccaugggccagaucauuaccuucuuucaagaggugccccacgucaucgaagagguuaugaacauugugcugaucgcccucagccugcuugcuauucugaaggggaucuacaauguggccacaugcggacucuucggccuggucuccuuucuucugcucugugggagaucuugcagcacgaccuauaaaggaguguacgaacugcagacacuggagcucgacauggcgucccugaacauguguaugccucuuucuugcaccaagaauaacagccaucacuauaucaugguuggcaaugaaacagggcuggagcucacccugacaaacaccuccauuaucaaucauaaauucuguaaccuuucugaugcucacaagaaaaaucuguacgaccaugcccucaugagcauuaucuccacguuucaccugagcauuccgaacuucaaucaguaugaggccaugucuugcgauuuuaacggaggcaagaucuccgugcaguacaaucugagccacgcuuaugccgucgacgcugccaaccauuguggcaccauugcgaauggggugcuccaaacauucaugcggauggccuggggaggcucuuacaucgcucuggauuccgggaagggaagcugggacugcaucaugaccucuuaccaguaucuuauuauccagaacacaaccugggaagaucacugucaguuuucccgccccagcccuauuggcuaccuggggcuccugucccaaagaacgcgggacaucuauauuucucgcagacuucugggaacauucaccuggacacucagcgauuccgagggcaacgaaacccccggcggguacugccugacccgguggaugcugaucgaggccgagcucaaauguuuuggaaauacagcuguugccaagugcaacgaaaaacaugacgaggaguucugcgauaugcugcgccuuuuugacuucuguaagcaggcgaucagacggcugaaagccccugcucagaugagcauucagcucaucaauaaggccgugaacgcucugauuaaugaucaacuuaucaugaagaaccaucugcgcgacauuaugggcauccccuauugcaauuacucuaaauauugguaccucaaccacacggucaccgggaagacaucccugccuagauguuggcuggugagcaauggaucuuaccucaacgaaacccacuucagcgacgauaucgaacagcaggccgacaauaugauuacagagcugcuucaaaaagaguauaucgaucggcagggcaagaccccgcuggggcucguggaccuguuugucuucuccacgucuuuuuaccugauuagcaucuuccuucaccucguuaaaauucccacacaucgccacgugaucggaaagccuugccccaaaccucauagacugaaccacaugggcauuuguuccugcggccuguauaagcaccccggggugccggucaaguggaaacggugaggacuaguaauaaggaaacuguaugaaugucugugggcaggaagugaagagauccuucuguaaagguuuuuggaauuaugucugcugaauaauaaacuuuuuugaaauaauaaaucugguagaaaaaugagaucuaaaaaaaaaaaaaaaaaaaaaaaaaaaaaaaaaaaaaaaaaaaaaaaaaaaaaaaaaaaaaaaaaaaaaaaaaaaaaaaaaaaaaaaaaaaaaaaaaaaa

SEQ ID NO: 31029 - RNA, 1785 nt, Artificial Sequence
  mRNA product Design b-4 (A100) comprising derived and/or modified sequence from LASV(LASV1000-NIG-2009;Clade II)__AIT17782__GPCmut6 (opt5)
aggagagucccgcagucggcguccagcggcucugcuuguucgugugugugucguugcaggccuuauucaagcuuaccaugggccagaucauuaccuucuuucaagaggugccccacgucaucgaagagguuaugaacauugugcugaucgcccucagccugcuugcuauucugaaggggaucuacaauguggccacaugcggacucuucggccuggucuccuuucuucugcucugugggagaucuugcagcacgaccuauaaaggaguguacgaacugcagacacuggagcucgacauggcgucccugaacauguguaugccucuuucuugcaccaagaauaacagccaucacuauaucaugguuggcaaugaaacagggcuggagcucacccugacaaacaccuccauuaucaaucauaaauucuguaaccuuucugaugcucacaagaaaaaucuguacgaccaugcccucaugagcauuaucuccacguuucaccugagcauuccgaacuucaaucaguaugaggccaugucuugcgauuuuaacggaggcaagaucuccgugcaguacaaucugagccacaccuaugcugucgacgccgcuaaccauuguggcacaauugccaauggggugcuccaaaccuucaugcggauggcguggggaggcucuuacaucgcccuggauuccgggaagggaagcugggacugcaucaugacaucuuaccaguaucuuauuauccagaacaccacgugggaagaucacugucaguuuucccgccccagcccuauuggcuaccuggggcuccugucccaaagaacacgggacaucuauauuucucgcagacuucugggaaccuucacauggacccucagcgauuccgagggcaacgaaacccccggcggguacugccugacacgguggaugcugaucgaggcugagcucaaauguuuuggaaauacggccguugcuaagugcaacgaaaaacaugacgaggaguucugcgauaugcugcgccuuuuugacuucuguaagcaggccaucaaaagacugaagaccccugcgcagaugagcauucagcucaucaauaaggccgugaacgcucugauuaaugaucaacuuaucaugaaaaaccaucugcgggacauuaugggcauccccuauugcaauuacucuaaguauugguaccucaaccacacagucaccgggaaaacaucccugccucgcuguuggcuggugagcaauggaucuuaccucaacgaaacccacuucagcgacgauaucgaacagcaggccgacaauaugauuacggagcugcuucaaaaggaguauaucgauagacagggcaaaacaccgcuggggcucguggaccuguuugucuucuccaccucuuuuuaccugauuagcaucuuccuucaccucguuaagauucccacccaucggcacguggugggaaaaccuugccccaagccucaucgccugaaccacaugggcaucuguuccugcggccuguauaagcaccccggggucccggugaaauggaagagaugaggacuaguaauaaggaaacuguaugaaugucugugggcaggaagugaagagauccuucuguaaagguuuuuggaauuaugucugcugaauaauaaacuuuuuugaaauaauaaaucugguagaaaaaugagaucuaaaaaaaaaaaaaaaaaaaaaaaaaaaaaaaaaaaaaaaaaaaaaaaaaaaaaaaaaaaaaaaaaaaaaaaaaaaaaaaaaaaaaaaaaaaaaaaaaaaa

SEQ ID NO: 31030 - RNA, 1785 nt, Artificial Sequence
  mRNA product Design b-4 (A100) comprising derived and/or modified sequence from LASV(LASV221-NIG-2010;Clade II)__AIT17624__GPCmut6 (opt5)
aggagagucccgcagucggcguccagcggcucugcuuguucgugugugugucguugcaggccuuauucaagcuuaccaugggccagaucauuaccuucuuucaagaggugccccacgucaucgaagagguuaugaacauugugcugaucgcccucagccugcuugcuauucugaaggggaucuacaauguggccacaugcggacucuucggccuggucuccuuucuucugcucugugggagaucuugcagcacgaccuauaaaggaguguacgaacugcagacacuggagcucgacauggcgucccugaacauguguaugccucuuucuugcaccaagaauaacagccaucacuauaucaugguuggcaaugaaacagggcuggagcucacccugacaaacaccuccauuaucaaucauaaauucuguaaccuuucugaugcucacaagaaaaaucuguacgaccaugcccucaugagcauuaucuccacguuucaccugagcauuccgaacuucaaucaguaugaggccaugucuugcgauuuuaacggaggcaagaucuccgugcaguacaaucugagccacaccuaugcuauugacgccgcuaaccauuguggcacaaucgccaaugggguccuccaaaccuucaugcggauggcguggggaggcucuuacaucgcccuggauuccgggaagggaagcugggacugcauuaugacaucuuaccaguaucuuaucauucagaacaccacgugggaagaucacugucaguuuucccgccccagcccuaucggcuaccuggggcuccugucccaaagaacacgggacauuuauaucucucgcagacuucugggaaccuucacauggacccucagcgauuccgagggcaacgaaacccccggcggguacugccugacacgguggaugcugaucgaggcugagcucaaauguuuuggaaauacggccguggcuaagugcaacgaaaaacaugacgaggaguucugcgauaugcugcgccuuuuugacuucuguaagcaggccauuagacggcugaaaaccccugcgcagaugagcauccagcucauuaauaaggccguuaacgcucugaucaaugaucaacuuauuaugaagaaccaucugcgcgacaucaugggcauccccuauugcaauuacucuaaauauugguaccucaaccacacagugaccgggaagacaucccugccuagauguuggcuggucagcaauggaucuuaccucaacgaaacccacuucagcgacgauauugaacagcaggccgacaauaugaucacggagaugcugcaaaaagaguauauggaucggcagggcaagacaccgcuugggcugguggaccucuuuguguucuccaccucuuuuuaccugauuagcaucuuccugcaccuugucaaaauucccacccaucgccacguuaucggaaagccuugccccaaaccucauagacucaaccacaugggcauuuguuccugcggccuguauaagcaccccggggugccggugaaguggaaacggugaggacuaguaauaaggaaacuguaugaaugucugugggcaggaagugaagagauccuucuguaaagguuuuuggaauuaugucugcugaauaauaaacuuuuuugaaauaauaaaucugguagaaaaaugagaucuaaaaaaaaaaaaaaaaaaaaaaaaaaaaaaaaaaaaaaaaaaaaaaaaaaaaaaaaaaaaaaaaaaaaaaaaaaaaaaaaaaaaaaaaaaaaaaaaaaaa

SEQ ID NO: 31031 - RNA, 1785 nt, Artificial Sequence
  mRNA product Design b-4 (A100) comprising derived and/or modified sequence from LASV(LASV237-NIG-2010;Clade II)__AIT17638__GPCmut6 (opt5)
aggagagucccgcagucggcguccagcggcucugcuuguucgugugugugucguugcaggccuuauucaagcuuaccaugggccagaucauuaccuucuuucaagaggugccccacgucaucgaagagguuaugaacauugugcugaucgcccucagccugcuugcuauucugaaggggaucuacaauguggccacaugcggacucuucggccuggucuccuuucuucugcucugugggagaucuugcagcacgaccuauaaaggaguguacgaacugcagacacuggagcucgacauggcgucccugaacauguguaugccucuuucuugcaccaagaauaacagccaucacuauaucaugguuggcaaugaaacagggcuggagcucacccugacaaacaccuccauuaucaaucauaaauucuguaaccuuucugaugcucacaagaaagaccuguacgaucaugcccucaugagcauuaucuccacguuucaccugagcauuccgaauuucaaccaguaugaggccaugucuugcgacuuuaauggaggcaagaucuccgugcaguacaaccugagccacaccuaugcugucgaugccgcuaaucauuguggcacaauugccaacggggugcuccaaaccuucaugcggauggcguggggaggcucuuacaucgcccuggacuccgggaagggaagcugggauugcaucaugacaucuuaccaguaucuuauuauccagaauaccacgugggaagaccacugucaguuuucccgccccagcccuauuggcuaccuggggcuccugucccaaagaacacgggauaucuauauuucucgcagacuucugggaaccuucacauggacccucagcgacuccgagggcaacgaaacccccggcggguacugccugacacgguggaugcugaucgaggcugagcucaaauguuuuggaaacacggccguugcuaagugcaaugaaaaacaugaugaggaguucugcgacaugcugcgccuuuuugauuucuguaagcaggccaucagacggcugaaaaccccugcgcagaugagcauucagcucaucaacaaggccgugaaugcucugauuaacgaccaacuuaucaugaagaaucaucugcgcgacauuaugggcauccccuauugcaacuacucuaaauauugguaccucaaucacacagucaccgggaagacaucccugccuagauguuggcuggugagcaacggaucuuaccucaaugaaacccacuucagcgaugacaucgaacagcaggccgauaacaugauuacggagcugcuucaaaaagaguauauggaccggcagggcaagacaccgcuggggcucguggaucuguuugucuucuccaccucuuuuuaccugaucagcauuuuccuucaccucaucaaaauucccacccaucgccacaucacaggaaagccuugccccaaaccucauagacugaaucacaugggcauuuguuccugcggccuguauaagcaccccgggguuccggugaaguggaaacggugaggacuaguaauaaggaaacuguaugaaugucugugggcaggaagugaagagauccuucuguaaagguuuuuggaauuaugucugcugaauaauaaacuuuuuugaaauaauaaaucugguagaaaaaugagaucuaaaaaaaaaaaaaaaaaaaaaaaaaaaaaaaaaaaaaaaaaaaaaaaaaaaaaaaaaaaaaaaaaaaaaaaaaaaaaaaaaaaaaaaaaaaaaaaaaaaa

SEQ ID NO: 31032 - RNA, 1785 nt, Artificial Sequence
  mRNA product Design b-4 (A100) comprising derived and/or modified sequence from LASV(LASV253-NIG-2011;Clade II)__AIT17670__GPCmut6 (opt5)
aggagagucccgcagucggcguccagcggcucugcuuguucgugugugugucguugcaggccuuauucaagcuuaccaugggccagaucauuaccuucuuucaagaggugccccacgucaucgaagagguuaugaacauugugcugaucgcccucagccugcuugcuauucugaaggggaucuacaauguggccacaugcggacucuucggccuggucuccuuucuucugcucugugggagaucuugcagcacgaccuauaaaggaguguacgaacugcagacacuggagcucgacauggcgucccugaacauguguaugccucuuucuugcaccaagaauaacagccaucacuauaucaugguuggcaaugaaacagggcuggagcucacccugacaaacaccuccauuaucaaucauaaauucuguaaccuuucugaugcucacaagaaaaaucuguacgaccaugcccucaugagcauuaucuccacguuucaccugagcauuccgaacuucaaucaguaugaggccaugucuugcgauuuuaacggaggcaagaucuccgugcaguacaaucugagccacaccuaugcugucgacgccgcuaaccauuguggcacaauugccaauggggugcuccaaaccuucaugcggauggcguggggaggcucuuacaucgcccuggauuccgggaagggaagcugggacugcaucaugacaucuuaccaguaucuuauuauccagaacaccacgugggaagaucacugucaguuuucccgccccagcccuauuggcuaccuggggcuccugucccaaagaacacgggacaucuauauuucucgcagacuucugggaaccuucacauggacccucagcgauuccgagggcaacgaaacccccggcggguacugccugacacgguggaugcugaucgaggcugagcucaaauguuuuggaaauacggccguugcuaagugcaacgaaaaacaugacgaggaguucugcgauaugcugcgccuuuuugacuucuguaagcaggccaucagacggcugaaagcgccugcccagaugagcauucagcucaucaauaaggcugugaacgcccugauuaaugaucaacuuaucaugaagaaccaucugcgcgacauuaugggcauccccuauugcaauuacucuaaauauugguaccucaaccacaccgucacagggagaaccucccugccucgguguuggcuggugagcaauggaucuuaccucaacgaaacacacuucagcgacgauaucgaacagcaggcugacaauaugauuaccgagcugcuucaaaaggaguauaucgaucgccagggcaaaacgccgcuggggcucguggaccuguuugucuucuccacaucuuuuuaccugauuagcaucuuccuucaccucguuaagauucccacccauagacacaucauuggaaaaccuugccccaagccucaucggcugaaccacaugggcaucuguuccugcggccuguauaaacaccccggggugccggugaaguggaagcgcugaggacuaguaauaaggaaacuguaugaaugucugugggcaggaagugaagagauccuucuguaaagguuuuuggaauuaugucugcugaauaauaaacuuuuuugaaauaauaaaucugguagaaaaaugagaucuaaaaaaaaaaaaaaaaaaaaaaaaaaaaaaaaaaaaaaaaaaaaaaaaaaaaaaaaaaaaaaaaaaaaaaaaaaaaaaaaaaaaaaaaaaaaaaaaaaaa

SEQ ID NO: 31033 - RNA, 1785 nt, Artificial Sequence
  mRNA product Design b-4 (A100) comprising derived and/or modified sequence from LASV(LASV254-NIG-2011;Clade II)__AIT17674__GPCmut6 (opt5)
aggagagucccgcagucggcguccagcggcucugcuuguucgugugugugucguugcaggccuuauucaagcuuaccaugggccagaucauuaccuucuuucaagaggugccccacgucaucgaagagguuaugaacauugugcugaucgcccucagccugcuugcuauucugaaggggaucuacaauguggccacaugcggacucuucggccuggucuccuuucuucugcucugugggagaucuugcagcacgaccuauaaaggaguguacgaacugcagacacuggagcucgacaugaccaaccugaauauguguaugccucuuuccugcacaaagaacaauucucaucacuauaucaugguuggcaacgaaaccgggcuggagcucacacugaccaauacgagcauuaucaaccauaaauucuguaaucuuuccgaugcgcacaagaaaaaccuguacaaucaugcucucaugucuauuaucagcaccuuucaccuguccauuccgaacuucaaucaguaugaggccaugagcugcgacuuuaacggaggcaagaucucugugcaguacaaucugucccacagcuaugccgucgaugcugccaaccauuguggcacaauugcuaacggggugcuccaaaccuucaugcggauggccuggggaggcucuuacaucgcgcuggacuccgggaagggaaauugggauugcaucaugacaagcuaccaguaucuuauuauccagaacaccacgugggaagaccacugucaguuuucucgccccuccccuauuggcuaccuggggcuccugagccaaagaacacgggauaucuauauuucccgcagacuucugggaaccuucacauggacccucucugacagcgagggcaaugaaacccccggcggguacugccugacacgguggaugcugaucgaggccgagcucaaauguuuuggaaacacggcuguugccaagugcaaugaaaaacaugaugaggaguucugcgacaugcugcgccuuuuugauuucuguaagcaggcuaucagacggcugaaaaccccugcccaggcgaacauucagcucaucaauaaggccgugaacgcucugauuaaugaccaacuuaucaugaagaaccaucugcgcgauauuaugggcauccccuauugcaauuacuccaaauauugguaccucaaccacacagucaccgggaagacaagccugccuagauguuggcuggugucuaauggauccuaccucaacgaaacccacuucagcgacgacaucgaacagcaggccgauaauaugauuacggagcugcuucaaaaagaguauauggaccggcagggcaagacaccgcuggggcucguggaucuguuugucuucucuaccagcuuuuaccugaucuccauuuuccuucaccucguuaaaauccccacccaucgccacgugauuggaaagccuugccccaaaccucauagacugaaccacaugggcaucuguucuugcggccuguauaagcaccccggggugccggucaaguggaaacggugaggacuaguaauaaggaaacuguaugaaugucugugggcaggaagugaagagauccuucuguaaagguuuuuggaauuaugucugcugaauaauaaacuuuuuugaaauaauaaaucugguagaaaaaugagaucuaaaaaaaaaaaaaaaaaaaaaaaaaaaaaaaaaaaaaaaaaaaaaaaaaaaaaaaaaaaaaaaaaaaaaaaaaaaaaaaaaaaaaaaaaaaaaaaaaaaa

SEQ ID NO: 31034 - RNA, 1785 nt, Artificial Sequence
  mRNA product Design b-4 (A100) comprising derived and/or modified sequence from LASV(Nig08-A19;Clade III)__ADU56618__GPCmut6 (opt5)
aggagagucccgcagucggcguccagcggcucugcuuguucgugugugugucguugcaggccuuauucaagcuuaccaugggccagaucgugaccuucuuucaagaggucccccacguuauugaagaggugaugaacaucgugcugauugcccucagcauccuggcuauucuuaaggggcuguacaauaucgccacaugcggacucaucggccuggucacguuccuucugcucuccgggagaucuuguagcaugaccuauaaaggaguguacgaacugcagacacuggagcucaacaugaauacccugaacaugugcaugccucuuuccuguacaaagaauaacucucaucacuauauuaugguuggcaaugaaaccgggcuggagcucacacugaccaacacgagccuucugcaucacaaauuuugcaaucucuccgacgcgcauaagaaaaaccuguacgaucacacccugaugucuaucauuagcacauuccaccucuccaucccgaauuuuaaccaguaugaggcuaugagcugugacuucaauggaggcaagauuaccgugcaguacaaccugucucauuccuaugccaucgaugccgcuaaucacugcggcacagucgccaacggggugcuucaaaccuuuaugcggauggcuuggggaggcagcuacauugcccuggacucugggcgcggaaagugggauuguaucaugacguccuaccaguaucucaucauucagaacacaaccugggaagaccauugccaguucagcagacccucuccuaucggcuaccuggggcuucugucccaacggacacgcgauauuuauaucagcagacggcuccugggaaccuuuaccuggacacuguccgacucugagggcaaugaaacgcccggcggguacugucucacccgcuggaugcugauugaggcggagcuuaaaugcuucggaaacacagccguugcuaaguguaaugaaaaacacgaugaggaauuuugcgacaugcugagacucuucgauuuuugcaagcaggccauccggcgccugaaagcuccugcccagaugagcauccagcuuauuaacaaggcggugaaugcccugaucaacgaccaacucauuaugaagaaucaccugagagauaucaugggcauucccuauuguaacuacuccaaauauugguaccugaaucauaccagcacagggcggaccucucucccucgcugcuggcuggucuccaacggaagcuaccuuaaugagacgcacuucucugacgacaucgaacagcaggcugauaacaugaucacagagaugcugcaaaaggaguaucucgacagacagggcaaaaccccgcuggggcugguggaucuuuucguguuuagcaccuccuucuaccucauuucuaucuuucugcaucuggucaagauucccacacaccggcauaucguuggaaaaccuugucccaagccucaccgccucaaucacaugggcauuugcagcuguggccuguauaaacagcccggggugccggugagauggaagcggugaggacuaguaauaaggaaacuguaugaaugucugugggcaggaagugaagagauccuucuguaaagguuuuuggaauuaugucugcugaauaauaaacuuuuuugaaauaauaaaucugguagaaaaaugagaucuaaaaaaaaaaaaaaaaaaaaaaaaaaaaaaaaaaaaaaaaaaaaaaaaaaaaaaaaaaaaaaaaaaaaaaaaaaaaaaaaaaaaaaaaaaaaaaaaaaaa

SEQ ID NO: 31035 - RNA, 1788 nt, Artificial Sequence
  mRNA product Design b-4 (A100) comprising derived and/or modified sequence from LASV(G1180-SLE-2010;Clade IV)__AIT17168__GPCmut6 (opt5)
aggagagucccgcagucggcguccagcggcucugcuuguucgugugugugucguugcaggccuuauucaagcuuaccaugggccagaucgugaccuucuuucaagaggucccccacguuauugaagaggugaugaacaucgugcugauugcccucagcauccuggcuguccuuaaggggcuguacaauuucgccacaugcggacucgugggccugcuuacguuucugcuccugugugggagauccugcaccgcgucucgguauaaaggaguuuacgaacugcagacacucgagcugaacauggaaacccuuaauauguguaugccucugagcugcacaaagaacaauucccaucacuauauuauggugggcaacgagaccgggcucgagcugacacuuaccaauacgucuaucaucaaccauaaauucuguaaucugagcgacgcucacaagaaaaaccucuacgaucaugcccugauguccauuaucucuaccuuucaccugagcauuccgaauuucaaccaguaugaagccauguccugcgacuuuaauggaggcaagaucagcguccaguacaaccucucucacuccuaugcuggcgaugccgcuaaucauugugggacaguggccaacggaguucugcaaaccuucaugcgcauggcguggggcgggagcuacauugcccuugacucuggacacggcuccugggauugcaucaugacaagcuaccaguaucugauuauccagaacaccacgugggaggaccauugucaguuuucuagacccuccccuaucggguaccucggacugcuuagccaacggacacgcgauauuuauaucuccagacggcugcucggcaccuucacauggacccugucugacagcgaaggcaaggauacccccgggggauacugccugacacgcuggaugcucauugaggcugagcugaaauguuuuggcaauacggccguggcuaagugcaacgaaaaacacgacgaggaguucugcgauaugcuuagacuguuugacuucuguaagcaggccauccagcggcucaaagcgccugcccagauguccauucaacugaucaauaaggcugucaacgcccuuaucaaugaucagcugauuaugaagaaccaccuccgcgacaucauggggauucccuauugcaauuacagcaaauauugguaccugaaccauaccacaaccggaaagacaucucugccuaaauguuggcucguguccaauggcagcuaccugaacgaaacccacuucucugacgauaucgaacagcaagcugacaauaugauuacggagaugcuucagaaggaguauauggaaagacaggggaaaacaccgcugggacucguggaucuguuugucuucagcaccuccuuuuaccugaucucuaucuuccuucaucucguuaagauucccacccaccggcauaucgugggcaaaagcugcccuaagccccaccgccugaaccacaugggcauuuguuccugcgggcuguauaagcagccuggagugcccgucaaauggaagagaugaggacuaguaauaaggaaacuguaugaaugucugugggcaggaagugaagagauccuucuguaaagguuuuuggaauuaugucugcugaauaauaaacuuuuuugaaauaauaaaucugguagaaaaaugagaucuaaaaaaaaaaaaaaaaaaaaaaaaaaaaaaaaaaaaaaaaaaaaaaaaaaaaaaaaaaaaaaaaaaaaaaaaaaaaaaaaaaaaaaaaaaaaaaaaaaaa

SEQ ID NO: 31036 - RNA, 1788 nt, Artificial Sequence
  mRNA product Design b-4 (A100) comprising derived and/or modified sequence from LASV(G1442-SLE-2011;Clade IV)__AIT17180__GPCmut6 (opt5)
aggagagucccgcagucggcguccagcggcucugcuuguucgugugugugucguugcaggccuuauucaagcuuaccaugggccagaucgugaccuucuuucaagaggucccccacguuauugaagaggugaugaacaucgugcugauugcccucagcauccuggcuguccuuaaggggcuguacaauguggccacaugcggacucauuggccugguuacguuccuucugcucugugggagauccugcaccacaacccuguauaaaggaguguacgaacugcagacacucgagcugaacauggaaacccuuaauauguguaugccucugucuugcacaaagaacaauagccaucacuauauccgggucggcaacgagaccgggcucgagcugacgcuuaccaauacauccaucauuaaccauaaauuuuguaaucugucugacgcgcacaagaaaaaccucuacgaucaugcucugaugagcaucauuuccaccuuccaccugucuaucccgaauuuuaaccaguaugaagccaugagcugcgacuucaauggaggcaagauuuccgugcaguacaaccucagccacucuuaugccggcgaugcugccaaucauugugggacaguugcuaacggagugcugcaaaccuuuaugcgcauggccuggggcggguccuacaucgcgcuugacagcggaagaggcaacugggauugcauuaugacgucuuaccaguaucugaucauccagaauacaaccugggacgaucacugucaguucucccggcccagcccuauuggguaccucggacugcuuucucaacgcacaagagacgucuauaucucccggcgccugcucggcaccuuuaccuggacacugagcgauuccgagggcaaggacacgcccgggggauacugccugaccagauggaugcucauugaagccgagcugaaauguuucggcaacacagcuguggccaagugcaaugagaaacaugaugaagaguuuugcgacaugcuucggcuguucgauuuuuguaagcaggcuauccagcgccucaaagccccugcgcagaugucuauucaacugaucaacaaggccgugaaugcucuuaucaacgaccagcugauuaugaagaaucaccucagagacaucauggggauucccuauugcaacuacagcaaauauugguaccugaauaacaccgccacaggaaagaccucccugccuaaauguuggcucaucagcaauggcucuuaccugaacgaaacgcacuucuccgaugacauugagcaggaagcugauaauaugaucacagagaugcuucaaaaggaguauauggaacggcaggggaaaaccccgcugggacucgucgaccuguucguuuuuagcaccucuuucuaccugaucagcauuuuucuucaucucgugaagauccccacacaccgccauauugugggcaaauccugcccuaagccccacagacugaaccauaugggcaucuguucuugcgggcuguauaagcagccuggaguccccgugcgguggaaacgcugaggacuaguaauaaggaaacuguaugaaugucugugggcaggaagugaagagauccuucuguaaagguuuuuggaauuaugucugcugaauaauaaacuuuuuugaaauaauaaaucugguagaaaaaugagaucuaaaaaaaaaaaaaaaaaaaaaaaaaaaaaaaaaaaaaaaaaaaaaaaaaaaaaaaaaaaaaaaaaaaaaaaaaaaaaaaaaaaaaaaaaaaaaaaaaaaa

SEQ ID NO: 31037 - RNA, 1788 nt, Artificial Sequence
  mRNA product Design b-4 (A100) comprising derived and/or modified sequence from LASV(G3010-SLE-2013;Clade IV)__AIT17344__GPCmut6 (opt5)
aggagagucccgcagucggcguccagcggcucugcuuguucgugugugugucguugcaggccuuauucaagcuuaccaugggccagaucgugaccuucuuucaagaggucccccacguuauugaagaggugaugaacaucgugcugauugcccucagcauccuggcuguccuuaaggggcuguacaauuucgccacaugcggacucgugggccugguuacguuucuucugcucugugggagauccugcaccacaucucuguauaaaggaguguacgaacugcagacccucgagcugaacauggaaacacuuaauauguguaugccucugagcugcaccaagaacaauucccaucacuauauuauggucggcaacgagacagggcucgagcugacccuuacgaauaccucuaucaucaaccauaaauucuguaaucugagcgacgcgcacaagaaaaaccucuacaaucaugcucugauguccauuaucucuacauuucaccugagcauuccgaacuucaaucaguaugaagccauguccugcgauuuuaacggaggcaagaucagcgugcaguacaaucucucucacuccuaugccggcgacgcugccagccauugugggaccguugcuaacggagugcugcaaacauucaugcggauggccuggggcgggucuuacauugcgcuugauuccggauacggcaagugggacugcaucaugaccagcuaucaguaccugauuauccagaacacgacaugggaggaucacugucaguuuucucgccccuccccuaucggguaucucggacugcuuagccaaagaacccgggacauuuacaucucccgcagacugcucggcacauucaccuggacccugucugauagcgaaggcaaagacacacccgggggauauugccugacgcgguggaugcucauugaggccgagcugaaguguuuuggcaauaccgcugucgccaaaugcaacgaaaagcaugaugaggaguucugcgacaugcuucgccuguuugauuucuguaaacaggcuauccagagacucaagaccccugcccagauguccauucaacugaucaauaaggcggugaacgcccuuaucaaugaccagcugauuaugaaaaaccaccuccgggauaucauggggauucccuacugcaauuauagcaaguacugguaccugaaccacacaacaaccggaaaaacgucucugccuaaguguuggcucguguccaauggcagcuaucugaacgaaacacauuucucugacgacaucgaacagcaagcugauaauaugauuaccgagaugcuucagaaagaguacauggaacgccaggggaagaccccgcugggacucgucgaccuguuuguuuucagcacauccuuuuaucugaucucuaucuuccuucaccucgugaaaauucccacccauagacacaucgugggcaagagcugcccuaagccccaucggcugaaccacaugggcauuuguuccugcgggcuguacaaacagccuggaguccccgugcgcuggaagagaugaggacuaguaauaaggaaacuguaugaaugucugugggcaggaagugaagagauccuucuguaaagguuuuuggaauuaugucugcugaauaauaaacuuuuuugaaauaauaaaucugguagaaaaaugagaucuaaaaaaaaaaaaaaaaaaaaaaaaaaaaaaaaaaaaaaaaaaaaaaaaaaaaaaaaaaaaaaaaaaaaaaaaaaaaaaaaaaaaaaaaaaaaaaaaaaaa

SEQ ID NO: 31038 - RNA, 1788 nt, Artificial Sequence
  mRNA product Design b-4 (A100) comprising derived and/or modified sequence from LASV(G502-SLE-2009;Clade IV)__AIT17126__GPCmut6 (opt5)
aggagagucccgcagucggcguccagcggcucugcuuguucgugugugugucguugcaggccuuauucaagcuuaccaugggccagaucgugaccuucuuucaagaggucccccacguuauugaagaggugaugaacaucgugcugauugcccucagcauccuggcuguccuuaaggggcuguacaauuucgccacaugcggacucgugggccugcuuacguuucugcuccugugugggagauccugcaccacaggacuguauaaaggcguuuacgaacuccagacccuggagcuuaacauggaaacacugaauauguguaugccucucucuugcaccaagaacaauagccaucacuauauuaugguggggaacgagacaggacuggagcuuacccugacgaauaccuccaucaucaaccauaaauucuguaaucucucugacgcgcacaagaaaaaccuguacgaucaugcucugaugagcauuaucuccacauuucaccucucuauuccgaauuucaaccaguaugaagccaugagcugcgacuuuaauggcggcaagaucuccguccaguacaaccugagccacucuuaugccggggaugcugccgaccauuguggaaccguggcuaauggcguucuucaaacauucaugcggauggccuggggaggguccuacauugcgcuggauagcggccgcgggagaugggacugcaucaugaccucuuaccaguaucucauuauccagaacacgacaugggaggaucacugucaguuuucccggcccagcccuaucggauaccugggccuucugucucaacgcaccagagacauuuauaucucccggcgccuccugggcacauucaccuggacccugagcgauuccgaagggaaggacacacccggaggcuacugccucacgagauggaugcugauugaggccgagcuuaaauguuuugggaacaccgcuguggccaagugcaaugaaaaacaugaugaggaguucugcgacaugcugcggcucuuugauuucuguaagcaggcuauccagcgccugaaagccccugcgcagaugucuauucaacuuaucaacaaggccgucaaugcucugaucaacgaccagcucgugaugaagaaucaccugagagacauuaugggaauccccuauugcaacuacagccgguauugguaccugaaucacacaaccacaggccgcaccucccucccuaaauguuggcuggugagcaacgggucuuaccuuaaugaaacgcauuucuccgaugacauugaacagcaagccgauaacaugaucacagagaugcugcagaaggaguauauggaaagacagggaaaaaccccgcucggccuggucgaccuguuuguuuucagcaccucuuuuuaccuuauuagcaucuuccuccaccuggugaagauccccacacaucggcacauugugggcaaauccugcccuaagccccaucgccugaaucacauggggaucuguucuugcggacucuauaaacagccuggcguccccgugaaguggaagagaugaggacuaguaauaaggaaacuguaugaaugucugugggcaggaagugaagagauccuucuguaaagguuuuuggaauuaugucugcugaauaauaaacuuuuuugaaauaauaaaucugguagaaaaaugagaucuaaaaaaaaaaaaaaaaaaaaaaaaaaaaaaaaaaaaaaaaaaaaaaaaaaaaaaaaaaaaaaaaaaaaaaaaaaaaaaaaaaaaaaaaaaaaaaaaaaaa

SEQ ID NO: 31039 - RNA, 1788 nt, Artificial Sequence
  mRNA product Design b-4 (A100) comprising derived and/or modified sequence from LASV(G733-SLE-2010;Clade IV)__AIT17154__GPCmut6 (opt5)
aggagagucccgcagucggcguccagcggcucugcuuguucgugugugugucguugcaggccuuauucaagcuuaccaugggccagaucgugaccuucuuucaagaggucccccacguuauugaagaggugaugaacaucgugcugauugcccucagcauccuggcuguccuuaaggggcuguacaauuucgccacaugcggaauugugggccucguuuccuuucugcuucugugugggagaucuugcacgaccagccucuauaaaggaguguacgaacugcagacacuggagcucaacauggaaacccugaauauguguaugccucuuuccugcacaaagaacaauucucaucacuauaucauggucggcaacgagaccgggcuggagcucacacugaccaauacgagcaucauuaaccauaaauucuguaaucuuuccgacgcgcacaagaaaaaccuguacgaucaugcucucaugucuaucauuagcaccuuucaccuguccaucccgaauuucaaccaguaugaagccaugagcugcgacuuuaauggaggcaagauuucugugcaguacaaccugucccacagcuaugccggcgaugcugccaaucauugugggacaaucgcuaacggaguucuccaaaccuucaugcggauggccuggggcgggucuuacauugcgcuggacuccggacgcgauagaugggacugcaucaugacaagcuaccaguaucuuaucauucagaacaccacgugggaggaucacugucaguuuucucggcccuccccuaucggcuaccuggggcuccugagccaacgcacaagagacauuuauaucucccggcgccuucugggaaccuucacauggacccucucugauagcgaaggcaaggacacccccggcggguacugccugacaagauggaugcugauugaggccgagcucaaauguuuuggaaauacggcuguggccaagugcaacgaaaaacaugaugaggaguucugcgacaugcugcggcuuuuugauuucuguaagcaggcuauccagcgccugaaagccccugcgcagauguccauccaacucauuaauaaggccgucaacgcucugaucaaugaccagcuuauuaugaagaaccaccugagagacaucaugggcauucccuauugcaauuacagcaaauauugguaccucaaccacaccacaaccgggaagacaucucugccuaaauguuggcugguguccaauggaagcuaccucaacgaaacccauuucucugaugacaucgaacagcaagccgauaauaugaucacggagaugcugcagaaggaguauauggaacggcagggcaaaacaccgcuugggcugguggaccucuuugucuucagcaccuccuuuuaccugauuucuaucuuccugcaccuuguuaagauucccacccaucgccacguggugggaaaaagcugcccuaagccccauagacucaaccacaugggcaucuguuccugcggccuguaugggcagccuggaguccccgugaaguggaaacggugaggacuaguaauaaggaaacuguaugaaugucugugggcaggaagugaagagauccuucuguaaagguuuuuggaauuaugucugcugaauaauaaacuuuuuugaaauaauaaaucugguagaaaaaugagaucuaaaaaaaaaaaaaaaaaaaaaaaaaaaaaaaaaaaaaaaaaaaaaaaaaaaaaaaaaaaaaaaaaaaaaaaaaaaaaaaaaaaaaaaaaaaaaaaaaaaa

SEQ ID NO: 31040 - RNA, 1788 nt, Artificial Sequence
  mRNA product Design b-4 (A100) comprising derived and/or modified sequence from MOPV/LASV reassortant(IGS-1;Clade IV)__AFY05576__GPCmut6 (opt5)
aggagagucccgcagucggcguccagcggcucugcuuguucgugugugugucguugcaggccuuauucaagcuuaccaugggccagaucgugaccuucuuucaagaggucccccacguuauugaagaggugaugaacaucgugcugauugcccucagcguccuggcugugcuuaaggggcuguacaauuucgccacaugcggacucguuggccuggugacguuucuucugcucugugggagauccugcaccacaucucuguauaaaggagucuacgaacugcagacccucgagcugaacauggaaacacuuaauauguguaugccucugagcugcaccaagaacaauucccaucacuauaucauggugggcaacgagacagggcucgagcugacccuuacgaauaccucuauuaucaaccauaaauucuguaaucugagcgacgcgcacaagaaaaaccucuacgaucaugcucugauguccaucauuucuacauuucaccugagcaucccgaauuucaaccaguaugaagccauguccugcgacuuuaauggaggcaagauuagcguucaguacaaccucucucacuccuaugccggcgaugcugccaaucauugugggaccguggcuaacggaguccugcaaacauucaugcggauggccuggggcgggagcuacaucgcgcuugacucuggacgcggcaacugggauugcauuaugaccuccuaccaguaucugaucauucagaauacgacaugggaggaccacugucaguuuagcagacccucuccuaucggguaccucggacugcuuucccaacggacccgcgauaucuauauuagcagacggcugcucggcacauucaccuggacccuguccgacucugaaggcgaggauacacccgggggauacugccugacgcgcuggaugcucaucgaggccgaacugaaguguuuuggcaacaccgcuguggccaaaugcaaugagaagcaugacgaagaguucugcgauaugcuuagacuguuugacuucuguaaacaggcuauucagcggcucaaggccccugcgcagaugagcauccaacugauuaacaaagccgugaaugcucuuaucaacgaucagcugaucaugaagaaucaccuccgcgacauuauggggauccccuauugcaacuacuccaaguauugguaccugaaucacacaaccacaggaagaaccagccugccuaaauguuggcucgucucuaacggcuccuaccugaaugaaacgcauuucagcgacgauauugagcagcaagccgacaacaugaucacagagaugcuucagaaggaauauauggagcggcaggggaaaaccccgcugggacucguugaucuguuuguguucucuaccagcuuuuaccugauuuccaucuuccuucaccucgugaagauccccacacaucgccacauugucggcaaaucuugcccuaagccccauagacugaaucacaugggcaucuguagcugcgggcuguauaaacagccuggagugcccguuaaguggaagcggugaggacuaguaauaaggaaacuguaugaaugucugugggcaggaagugaagagauccuucuguaaagguuuuuggaauuaugucugcugaauaauaaacuuuuuugaaauaauaaaucugguagaaaaaugagaucuaaaaaaaaaaaaaaaaaaaaaaaaaaaaaaaaaaaaaaaaaaaaaaaaaaaaaaaaaaaaaaaaaaaaaaaaaaaaaaaaaaaaaaaaaaaaaaaaaaaa

SEQ ID NO: 31041 - RNA, 1788 nt, Artificial Sequence
  mRNA product Design b-4 (A100) comprising derived and/or modified sequence from LASV(LM765-SLE-2012;Clade IV)__AIT17814__GPCmut6 (opt5)
aggagagucccgcagucggcguccagcggcucugcuuguucgugugugugucguugcaggccuuauucaagcuuaccaugggccagaucgugaccuucuuucaagaggucccccacguuauugaagaggugaugaacaucgugcugauugcccucagcauccuggcuguccuuaaggggcuguacaauuucgccacaugcggacucgugggccugguuacguuucuucugcucugugggagauccugcaccacaucucuguauaaaggaguguacgaacugcagacccucgagcugaacauggaaacacuuaauauguguaugccucugagcugcaccaagaacaauucccaucacuauauuauggucggcaacgagacagggcucgagcugacccuuacgaauaccucuaucaucgaccauaaauucuguaaccugagcgaugcgcaccggaagaaucucuacgaccaugcucugauguccauuaucucuacauuucaccugagcauuccgaacuucaaucaguaugaagccauguccugcgauuuuaacggaggcaaaaucagcgugcaguacaaucucucucacuccuaugccaaggacgcugccgaucauuguggcaccguugcuaacggggugcugcaaacauucaugcgcauggccuggggaggcagcuacauugcgcuugacucugggagaggacggugggauugcaucaugaccuccuaccaguaucugauuauccagaauacgacaugggaggaccacugucaguuuagccgccccucuccuaucggcuaccucgggcugcuuucccaaagaacccgggauauuuauaucagccgcagacugcucggaacauucaccuggacccuguccgacucugaaggcaaggauacacccggcggguacugccugacgcgguggaugcucauugaggccgagcugaaauguuuuggaaacaccgcugucgccaagugcaacgaaaaacaugacgaggaguucugcgauaugcuucgccuguuugacuucuguaagcaggcuauccagagacucaaagccccugcgcagaugagcauucaacugaucaauaaggccgugaacgcucuuaucaaugaccagcugauuaugaagaaccaccuccgggauaucaugggcauucccuauugcaauuacuccaaauauugguaccugaaccacacaaccacagggaagaccagccugccuaaauguuggcucgugucuaauggauccuaccugaacgaaacgcauuucagcgacgauaucgaacagcaagccgacaauaugauuacagagaugcuucagaaggaguauauggaacgccagggcaaaaccccgcuggggcucgucgaucuguuuguuuucucuaccagcuuuuaccugaucuccaucuuccuucaccucgugaagauucccacacauagacacaucgugggaaaaccuugccccaagccucaucggcugaaccacaugggcauuuguucuugcggccuguauaagcagcccggggucccggugaaauggaagcgcugaggacuaguaauaaggaaacuguaugaaugucugugggcaggaagugaagagauccuucuguaaagguuuuuggaauuaugucugcugaauaauaaacuuuuuugaaauaauaaaucugguagaaaaaugagaucuaaaaaaaaaaaaaaaaaaaaaaaaaaaaaaaaaaaaaaaaaaaaaaaaaaaaaaaaaaaaaaaaaaaaaaaaaaaaaaaaaaaaaaaaaaaaaaaaaaaa

SEQ ID NO: 31042 - RNA, 1788 nt, Artificial Sequence
  mRNA product Design b-4 (A100) comprising derived and/or modified sequence from LASV(LM776-SLE-2012;Clade IV)__AIT17824__GPCmut6 (opt5)
aggagagucccgcagucggcguccagcggcucugcuuguucgugugugugucguugcaggccuuauucaagcuuaccaugggccagaucgugaccuucuuucaagaggucccccacguuauugaagaggugaugaacaucgugcugauugcccucagcauccuggcuguccuuaaggggcuguacaauuucgccacaugcggacucgugggccugguuacguuucuucugcucugugggagauccugcaccacaucuguguauaaaggagucuacgaacugcagacccuggagcucaacauggaaacacugaauauguguaugccucuuagcugcaccaagaacaauucccaucacuauauuauggugggcaacgagacagggcuggagcucacccugacgaauaccucuaucaucaaccauaaauucuguaaucuuagcgacgcgcacaagaaaaaccuguacgaucaugcucucauguccauuaucucuacauuucaccugagcauuccgaauuucaaccaguaugaagccauguccugcgacuuuaauggaggcaagaucagcguucaguacaaccugucucacuccuaugccggcgaugcugccaaucauugugggaccguggcuaacggaguccuccaaacauucaugcggauggccuggggcgggagcuacauugcgcuggacucuggacacggcaagugggauugcaucaugaccuccuaccaguaucuuauuauccagaacacgacaugggaggaccauugucaguuuagccgccccucuccuaucggguaccugggacuccugucccaaagaacccgggauauuuauaucagccgcagacuucugggcacauucaccuggacccucuccgacucugaaggcaaagauacacccgggggauacugccugacgcgguggaugcugauugaggccgagcucaaguguuuuggcaauaccgcuguggccaaaugcaacgaaaagcacgacgaggaguucugcgauaugcugcgccuuuuugacuucuguaaacaggcuauccagagacugaaggccccugcgcagaugagcauucaacucaucaauaaggccgugaacgcucugaucaaugaucagcuuauuaugaaaaaccaucugcgggacaucauggggauucccuauugcaauuacuccaaguauugguaccucaaccacacaaccacaggaaaaaccagccugccuaaguguuggcuggucucuaauggcuccuaccucaacgaaacgcacuucagcgacgauaucgaacagcaagccgacaauaugauuacagagaugcugcagaaagaguauauggaacgccaggggaagaccccgcuuggacugguugaucucuuuguguucucuaccagcuuuuaccugaucuccaucuuccugcaucuugugaaaauucccacacacagacauaucgucggcaagucuugcccuaagccccaccggcucaaccacaugggcauuuguagcugcgggcuguauaaacagccuggagugcccguucgcuggaagagaugaggacuaguaauaaggaaacuguaugaaugucugugggcaggaagugaagagauccuucuguaaagguuuuuggaauuaugucugcugaauaauaaacuuuuuugaaauaauaaaucugguagaaaaaugagaucuaaaaaaaaaaaaaaaaaaaaaaaaaaaaaaaaaaaaaaaaaaaaaaaaaaaaaaaaaaaaaaaaaaaaaaaaaaaaaaaaaaaaaaaaaaaaaaaaaaaa

SEQ ID NO: 31043 - RNA, 1788 nt, Artificial Sequence
  mRNA product Design b-4 (A100) comprising derived and/or modified sequence from LASV(Mad39;Clade IV)__ANH09722__GPCmut6 (opt5)
aggagagucccgcagucggcguccagcggcucugcuuguucgugugugugucguugcaggccuuauucaagcuuaccaugggccagaucgugaccuucuuucaagaggucccccacguuauugaagaggugaugaacaucgugcugauugcccucagcauccuggcuguccuuaaggggcuguacaauguggccacaugcggacucauuggccugguuacguuccuucugcucugugggagauccugcaccacaacccuguauaaaggaguguacgaacugcaggcgcucgagcugaacauggaaacacuuaauauguguaugccucugucuugcaccaagaacaauagccaucacuauauccgggucggcaacgagacagggcucgagcugacccuuacgaauaccucccugaucaaccauaaauuuuguaaucucucugacgcucacaagaaaaaccuguacgaucaugcccugaugagcauuaucuccacauuccaccucucuauuccgaauuuuaaccaguaugaagccaugagcugcgacuucaaugauggaaagaucuccgugcaguacaaccugagccacaccuaugcuggcgacacagccaaucauuguggcaccguugcuaacggggugcuucaaacguuuaugcgcauggccuggggaggcucuuacauugcgcuggauuccgggagaggaggcugggacugcaucaugacaagcuaccaguaucucauuauccagaacaccacaugggaggaucacugucaguucucucggcccuccccuaucggguaccugggacuucugagccaacgcaccagagacauuuauaucucucggcgccuccugggcaccuuuacauggacgcuguccgauagcgaaggcaaggacacccccgggggauacugccucacaagauggaugcugauugaggccgagcuuaaauguuucggcaauaccgcugucgccaagugcaacgaaaaacaugaugaggaauuuugcgacaugcugcgccucuucgauuuuuguaagcaggcuauccagcggcugaaagccccugcgcagauguccauucaacuuaucaauaaggccgugaacgcucugaucaaugaccagcucauuaugaagaaccaccugagagacaucauggggauucccuauugcaauuacucuaaauauugguaccugaaccacacagugaccggaaagacgagccucccuaaauguuggcuggucuccaauggcagcuaccuuaacgagacacauuucucugaugacaucgaacagcaagccgauaauaugauuaccgagaugcugcagaaggaguauauggaacggcaggggaaaaccccgcucggacugguugaccuguucguguuuuccaccagcuucuaccuuaucucuaucuuucuccaccuggugaagauucccacacaucgccacgucgugggcaaaccuugccccaagccucauagacugaaccacaugggcaucuguagcugcggguucuauaagcagcccggaguuccggugcgguggaaacgcugaggacuaguaauaaggaaacuguaugaaugucugugggcaggaagugaagagauccuucuguaaagguuuuuggaauuaugucugcugaauaauaaacuuuuuugaaauaauaaaucugguagaaaaaugagaucuaaaaaaaaaaaaaaaaaaaaaaaaaaaaaaaaaaaaaaaaaaaaaaaaaaaaaaaaaaaaaaaaaaaaaaaaaaaaaaaaaaaaaaaaaaaaaaaaaaaa

SEQ ID NO: 31044 - RNA, 1788 nt, Artificial Sequence
  mRNA product Design b-4 (A100) comprising derived and/or modified sequence from LASV(Z0947-SLE-2011;Clade IV)__AIT17840__GPCmut6 (opt5)
aggagagucccgcagucggcguccagcggcucugcuuguucgugugugugucguugcaggccuuauucaagcuuaccaugggccagaucgugaccuucuuucaagaggucccccacguuauugaagaggugaugaacaucgugcugauugcccucagcauccuggcuguccuuaaggggcuguacaauuucgccacaugcggacucgugggccugguuacguuucuucugcucugugggagauccugcaccauuucucuguauaaaggaguguacgaacugcagacacucgagcugaacauggaaacccuuaauauguguaugccucugagcugcacaaagaacaauucccaucacuauaucauggucggcaacgagaccgggcucgagcugacacuuaccaauacgucuaucauuaaccauaaauucuguaaucugagcgacgcgcacaagaaaaaccucuacgaucaugcucugauguccaucauuucuaccuuucaccugagcaucccgaauuucaaccaguaugaagccauguccugcgacuuuaauggaggcaagauuagcgugcaguacaaccucucucacuccuaugccggcgaugcugccaaucauugugggacaguugcuaacggagugcugcaaaccuucaugcggauggccuggggcgggagcuacaucgcgcuugacucuggacgcgauagaugggacugcauuaugacauccuaccaguaucugaucauccagaacaccacgugggaggaucacugucaguuuagccggcccucuccuauuggcuaccucgggcugcuuucccaacgcacaagagacaucuauauuagccggcgccugcucggaaccuucacauggacccuguccgauucugaaggcaaggacacccccggcggguacugccugacaagauggaugcucaucgaggccgagcugaaauguuuuggaaauacggcugucgccaagugcaacgaaaaacaugaugaggaguucugcgacaugcuucggcuguuugauuucuguaagcaggcuauucagcgccucaaagccccugcgcagaugagcauccaacugaucaauaaggccgugaacgcucuuauuaaugaccagcugaucaugaagaaccaccucagagacauuaugggcauccccuauugcaauuacuccaaauauugguaccugaaccacaccacaaccgggaagacaagccugccuaaauguuggcucgugucuaauggauccuaccugaacgaaacccauuucagcgaugacauugaacagcaagccgauaauaugaucacggagaugcuucagaaggaguauauggaacggcagggcaaaacaccgcuggggcucgucgaccuguuuguuuucucuaccagcuuuuaccugaucuccauuuuccuucaccucgugaagauccccacccaucgccacauugugggaaaaccuugccccaagccucauagacugaaccacaugggcaucuguucuugcggccuguauaagcagcccggggucccggugaaauggaagcggugaggacuaguaauaaggaaacuguaugaaugucugugggcaggaagugaagagauccuucuguaaagguuuuuggaauuaugucugcugaauaauaaacuuuuuugaaauaauaaaucugguagaaaaaugagaucuaaaaaaaaaaaaaaaaaaaaaaaaaaaaaaaaaaaaaaaaaaaaaaaaaaaaaaaaaaaaaaaaaaaaaaaaaaaaaaaaaaaaaaaaaaaaaaaaaaaa

SEQ ID NO: 31045 - RNA, 1658 nt, Artificial Sequence
  mRNA product Design i-3 (hSL-A64-N5) comprising derived and/or modified sequence from LASV(Josiah;Clade IV)__NP_694870__GPCmut6 (opt1)
aggagaaagcuuaccaugggccagaucgugaccuucuuccaggaggucccccacgugaucgaggaggugaugaacaucguccugaucgcccucagcgugcuggccgugcugaaggggcucuacaacuucgcgaccugcggccuggucgggcuggugacguuccuccugcugugcggccgcuccugcaccaccagccucuacaaggggguguacgagcugcagacccuggagcucaacauggagacgcugaacaugugcaugccgcuguccugcaccaagaacaacagccaccacuacaucauggucggcaacgagaccggccucgagcugacgcugaccaacaccuccaucaucaaccacaaguucugcaaccucagcgacgcccacaagaagaaccuguacgaccacgcccugauguccaucaucagcaccuuccaccucuccauccccaacuucaaccaguacgaggccaugagcugcgacuucaacgggggcaagaucuccgugcaguacaaccugagccacuccuacgccggggacgcggccaaccacugcggcacgguggccaacgggguccugcagaccuucaugcggauggccuggggcggcagcuacaucgcgcucgacuccgggcgcggcaacugggacugcaucaugaccagcuaccaguaccugaucauccagaacaccacgugggaggaccacugccaguucucccggcccagccccaucggguaccugggccuccugucccagcgcacccgggacaucuacaucagccgccggcugcucggcaccuucaccuggacgcugagcgacuccgaggggaaggacaccccgggcggguacugccugacccgcuggaugcucaucgaggccgagcugaagugcuucggcaacaccgccguggccaagugcaacgagaagcacgacgaggaguucugcgacaugcugcggcuguucgacuucugcaagcaggccauccagcgccugaaggcgcccgcccagaugagcauccagcugaucaacaaggccgugaacgcccucaucaacgaccagcugaucaugaagaaccaccuccgggacaucauggggauccccuacugcaacuacuccaaguacugguaccucaaccacacgaccaccggccgcaccagccugcccaagugcuggcuggucuccaacggcagcuaccucaacgagacgcacuucuccgacgacaucgagcagcaggccgacaacaugaucaccgagaugcugcagaaggaguacauggagcggcaggggaagacgccccugggccucguggaccuguucguguucagcaccuccuucuaccugaucagcaucuuccugcaccucgucaagaucccgacccaccgccacaucguggggaaguccugccccaagccccaccggcugaaccacaugggcaucugcagcugcgggcuguacaagcagcccggcgugccggucaaguggaagcgcugaggacuaguuauaagacugacuagcccgaugggccucccaacgggcccuccuccccuccuugcaccgagauuaaucaaaggcucuuuucagagccaccaaaaaaaaaaaaaaaaaaaaaaaaaaaaaaaaaaaaaaaaaaaaaaaaaaaaaaaaaaaaaaaaagaauu

SEQ ID NO: 31046 - RNA, 1655 nt, Artificial Sequence
  mRNA product Design i-3 (hSL-A64-N5) comprising derived and/or modified sequence from LASV(LP;Clade I)__AAF86701__GPCmut6 (opt1)
aggagaaagcuuaccaugggccagaucaucaccuucuuccaggaggugccccacgucaucgaggaggugaugaacaucgugcugaucgcccucagccugcuggccauccucaaggggcuguacaacaucgcgaccugcggcaucaucgggcuggucgccuuccucuuccugugcggcaaguccugcagccugacgcucaagggcggguacgagcugcagacccuggagcucaacauggagacccugaacaugugcaugccgcuguccugcacgaagaacagcucccaccacuacauccgcgugggcaacgagaccgggcucgagcugacccugaccaacacgagcaucaucaaccacaaguucugcaaccucuccgacgcccacaagaagaaccuguacgaccacgcccugaugagcaucaucuccaccuuccaccucagcauccccaacuucaaccaguacgaggccauguccugcgacuucaacggcgggaagaucagcgugcaguacaaccugucccacagcuacgcgggcgacgccgccgagcacugcgggaccgucgccaacggcgugcugcagaccuucaugcggauggcguggggcgggcgcuacaucgcccucgacuccggcaaggggaacugggacugcaucaugacgagcuaccaguaccugaucauccagaacaccaccugggaggaccacugccaguucucccggcccagccccaucggcuaccugggccuccugucccagcgcacccgggacaucuacaucagccgccggcugcucgggacguucaccuggacccugagcgacuccgagggcaacgagacccccgggggcuacugccugacgcgcuggaugcucaucgaggccgagcugaagugcuucgggaacaccgccguggccaagugcaacgagaagcacgacgaggaguucugcgacaugcugcggcuguucgacuucugcaagcaggcgauccgccggcugaaggcccccgcccagaugagcauccagcugaucaacaaggccgucaacgcccucaucaacgaccagcugaucaugaagaaccaccuccgcgacaucaugggcauccccuacugcaacuacuccaaguacugguaccucaaccacaccagcuccggccggaccagccugcccaagugcuggcugaucuccaacgggagcuaccucaacgagacgcaguucuccgacgacaucgagcagcaggcggacaacaugaucaccgagaugcugcagaaggaguacaucgagcgccagggcaagaccccgcuggggcucguggacaucuucaucuucagcaccuccuucuaccugaucagcaucuuccugcaccugaucaagaucccgacgcaccggcacaucgugggcaagcccugccccaagccccaccgccucaaccacaugggggucugcuccugcggccuguacaagcacccgggcgugcccaccaaguggaagcggugaggacuaguuauaagacugacuagcccgaugggccucccaacgggcccuccuccccuccuugcaccgagauuaaucaaaggcucuuuucagagccaccaaaaaaaaaaaaaaaaaaaaaaaaaaaaaaaaaaaaaaaaaaaaaaaaaaaaaaaaaaaaaaaaagaauu

SEQ ID NO: 31047 - RNA, 1655 nt, Artificial Sequence
  mRNA product Design i-3 (hSL-A64-N5) comprising derived and/or modified sequence from LASV(803213;Clade II)__AAF86703__GPCmut6 (opt1)
aggagaaagcuuaccaugggccagaucaucaccuucuuccaggaggugccccacgucaucgaggaggugaugaacaucgugcugaucgcccucagccugcuggccauccucaaggggaucuacaacgucgcgaccugcggccuguucgggcugaucuccuuccuccugcugugcggccgcagcugcuccgugacguacaaggggguguacgagcuccagacccuggagcugaacauggccaaccucaacaugugcaugccgcugagcugcaccaagaacaacucccaccacuacaucauggucggcaacgagacgggccuggagcucacccugaccaacaccagcaucaucaaccacaaguucugcaaccuguccgacgcccacaagaagaaccucuacgaccacgcccugaugagcaucaucuccacguuccaccugagcauccccaacuucaaccaguacgaggccauguccugcgacuucaacgggggcaagaucagcgugcaguacaaccucucccacagcuucgcgguggacgccgccaaccacugcgggaccaucgccaacggcguccugcagaccuucaugcggauggcguggggcggguccuacaucgcccuggacagcggcaaggggaacugggacugcaucaugaccuccuaccaguaccucaucauccagaacacgaccugggaggaccacugccaguucagccgccccucccccaucggcuaccuggggcugcucagccagcggacccgcgacaucuacaucagccggcgccugcugggcaccuucacguggacccucuccgacagcgagggcaacgaggcccccgggggcuacugccugacccgguggaugcugaucgaggccgagcucaagugcuucgggaacaccgccguggcgaagugcaacgagaagcacgacgaggaguucugcgacaugcugcgccuguucgacuucugcaagcaggccaucaagcggcucaagacgcccgcccagauguccauccagcugaucaacaaggccgugaacgcccugaucaacgaccagcucaucaugaagaaccaccuccgcgacaucaugggcauccccuacugcaacuacagccgguacugguaccugaaccacaccgucaccgggaagaccucccugccccgcugcuggcuggugagcaacggcuccuaccugaacgagacgcacuucagcgacgacaucgagcagcaggcggacaacaugaucaccgagaugcuccagaaggaguacauggaccggcagggcaagaccccgcuggggcugguggaccucuucgucuucuccaccagcuucuaccugaucuccaucuuccugcaccuggugaagaucccgacgcaccgccacaucgugggcaagcccugccccaagccccaccggcucaaccacauggggaucugcagcugcggccuguacaagcacccggggguccccgugaaguggaagcgcugaggacuaguuauaagacugacuagcccgaugggccucccaacgggcccuccuccccuccuugcaccgagauuaaucaaaggcucuuuucagagccaccaaaaaaaaaaaaaaaaaaaaaaaaaaaaaaaaaaaaaaaaaaaaaaaaaaaaaaaaaaaaaaaaagaauu

SEQ ID NO: 31048 - RNA, 1655 nt, Artificial Sequence
  mRNA product Design i-3 (hSL-A64-N5) comprising derived and/or modified sequence from LASV(GA391;Clade III)__CAA36645__GPCmut6 (opt1)
aggagaaagcuuaccaugggccagaucgugaccuucuuccaggaggucccccacgugaucgaggaggugaugaacaucguccugaucgcccucagcauccuggccauccugaaggggcucuacaacguggcgaccugcggccugaucgggcuggugacguuccuccugcuguccggccgcagcugcucccucaucuacaaggggaccuacgagcugcagacccuggagcucaacauggagacccugaacaugugcaugccgcugagcugcaccaagaacaacucccaccacuacauccgggucggcaacgagaccggccucgagcugacccugacgaacaccagcauccucaaccacaaguucugcaaccuguccgacgcccacaagcgcaaccuguacgaccacagccucauguccaucaucagcaccuuccaccuguccauccccaacuucaaccaguacgaggccaugagcugcgacuucaacgggggcaagaucaccgugcaguacaaccugucccacagcuucgccguggacgccgcggggcacugcggcacgcucgccaacgggguccugcagaccuucaugcggauggccuggggcggcuccuacaucgcccuggacagcgggcgcggcaacugggacugcaucaugaccuccuaccaguaccucaucauccagaacaccacgugggacgaccacugccaguucagccggcccucccccaucggguaccugggccugcucagccagcgcacccgggacaucuacaucagccgccggcugcugggcaccuucaccuggacgcucuccgacagcgaggggaacgagaccccgggcggguacugccugacccgcuggaugcugaucgaggcggagcucaagugcuucggcaacaccgccguggccaagugcaacgagaagcacgacgaggaguucugcgacaugcugcggcuguucgacuucugcaagcaggccauccgccggcucaagacgcccgcccagauguccauccagcugaucaacaaggcggugaacgcccugaucaacgaccagcucaucaugaagaaccaccuccgcgacaucauggggauccccuacugcaacuacagccgguacugguaccugaaccacaccuccaccggcaagaccagccugccccgcugcuggcugaucuccaacggcagcuaccugaacgagacgaaguucuccgacgacaucgagcagcaggccgacaacaugaucaccgagaugcuccagaaggaguacaucgaccggcaggggaagacgccccugggccuggucgaccuguucguguucagcaccuccuucuaccucaucagcaucuuccugcaccuggugaagaucccgacccaccgccacaucgucgggaagcccugccccaagccccaccggcucaaccacaugggcaucugcuccugcgggcuguacaagcagccgggcgugcccgugcgcuggaagcggugaggacuaguuauaagacugacuagcccgaugggccucccaacgggcccuccuccccuccuugcaccgagauuaaucaaaggcucuuuucagagccaccaaaaaaaaaaaaaaaaaaaaaaaaaaaaaaaaaaaaaaaaaaaaaaaaaaaaaaaaaaaaaaaaagaauu

SEQ ID NO: 31049 - RNA, 1658 nt, Artificial Sequence
  mRNA product Design i-3 (hSL-A64-N5) comprising derived and/or modified sequence from LASV(AV;Clade V)__CCA30314__GPCmut6 (opt1)
aggagaaagcuuaccaugggccagaucgugaccuucuuccaggaggucccccacgugaucgaggaggugaugaacaucguccugaucgcccucagcauccuggccgugcugaaggggcucuacaacaucgcgaccugcggccugaucgggcugaucacguuccuccugcugugcggccgcuccugcagcuccaaccucuacaaggggguguacgagcugcagagccuggaccucaacauggagacccugaacaugugcaugccgcuguccugcaccaagaacaacagccaccacuacauccgggucggcaacgacacgggccucgagcugacccugaccaacaccuccauccucaaccacaaguucugcaaccugagcgacgcccacaagaaggaccuguacgaccacgcccucauguccaucaucagcacguuccaccuguccauccccaacuucaaccaguacgaggccaugagcugcgacuucaacgggggcaagaucuccgugcaguacaaccugagccacuccuacgccaucgacgcggccaaccacugcgggaccguggccaacggcauccuccagaccuucaugcgcauggccuggggcgggagcuacaucgcgcuggacuccggccgggggaacugggacugcaucaugaccagcuaccaguaccugaucauccagaacacgaccugggagaaccacugccaguucucccgccccagccccaucggcuaccucgggcugcugagccagcggacccgcgacaucuacaucucccggcgccuccugggcaccuucacguggacccugagcgacuccgagggcaacgccacccccgggggcuacugccucacccgguggaugcugaucgaggccgagcugaagugcuucgggaacacggccgucgccaagugcaacgagaagcacgacgaggaguucugcgacaugcuccgccuguucgacuucugcaagcaggcgaucagccggcugaagucccccgcccagaugagcauccagcucaucaacaaggccgugaacgcccugaucaacgaccagcugaucaugaagaaccaccuccgcgacaucaugggcauccccuacugcaacuacuccaaguacugguaccugaaccacaccaucaccgggaagaccagccugcccaagugcuggcucguguccaacggcagcuaccugaacgagacgcacuucuccgacgacaucgagcagcaggccgacaacaugaucaccgagaugcugcagaaggaguacauggagcggcagggcaagaccccgcucgggcuggucgaccuguucguguucagcaccuccuucuaccugaucagcaucuuccuccgccuggugaagaucccgacgcaccggcacaucgucggcaagcccugccccaagccccaccgccugaaccacauggggaucugcuccugcggccucuacaagcagccgggggugcccgugcgguggaagcgcugaggacuaguuauaagacugacuagcccgaugggccucccaacgggcccuccuccccuccuugcaccgagauuaaucaaaggcucuuuucagagccaccaaaaaaaaaaaaaaaaaaaaaaaaaaaaaaaaaaaaaaaaaaaaaaaaaaaaaaaaaaaaaaaaagaauu

SEQ ID NO: 31050 - RNA, 1655 nt, Artificial Sequence
  mRNA product Design i-3 (hSL-A64-N5) comprising derived and/or modified sequence from LASV(Togo/2016/7082;Clade VI)__AMR44577__GPCmut6 (opt1)
aggagaaagcuuaccaugggccagaucaucaccuucuuccaggaggugccccacgucaucgaggaggugaugaacaucgugcugaucgcccucagccugcuggccauccucaagggggucuacaacguggcgaccugcggcaucaucgggcuggugacguuccuguuccucugcggccgcuccugcagccugaucuacaagggguccuacgagcugcagacccucgagcugaacauggagacccugaacaugugcaugccgcucagcugcacgaagaacuccagccaccacuacauccgggucggcaacgagaccggccuggagcugacccucaccaacacguccaucaucaaccacaaguucugcaaccugagcgacgcccacaagcgcaaccuguacgaccacgcccucauguccauccugagcaccuuccaccuguccauccccaacuucaaccaguacgaggccaugagcugcgacuucaacgggggcaagaucuccgugcaguacaaccucagccacgccuacgcgguggacgccgccgagcacugcgggaccgucgccaacggcgugcugcagaccuucaugcggauggcguggggcggguccuacaucgcccuggacagcggccgcgggaacugggacugcaucaugacguccuaccaguaccucaucauccagaacaccaccugggaggaccacugccaguucagccggcccucccccaucggcuaccuggggcugcucagccagcgcacccgggacaucuacaucagccgccggcugcugggcacguucaccuggacccucuccgacagcgagggcaacgagacccccgggggcuacugccugacgcgcuggaugcugaucgaggccgagcucaagugcuucgggaacaccgccguggccaagugcaacgagaagcacgacgaggaguucugcgacaugcugcggcuguucgacuucugcaagcaggcgauccagcgccucaagucccccgcccagaugagcauccagcugaucaacaaggccgucaacgcccugaucaacgaccagcucaucaugaagaaccaccuccgggacaugaugggcauccccuacugcaacuacuccaaguacugguaccugaaccacaccagcuccgggcgcaccagccugcccaagugcuggcugguguccaacggcagcuaccugaacgagacgcacuucuccgacgacaucgagcagcaggccgacaacaugaucaccgagaugcuccagaaggaguacaucgaccggcagggcaagaccccgcuggggcugguggaccucuucgucuucagcaccuccuucuaccugaucagcaucuuccugcaccugaucaagaucccgacgcaccgccacaucgugggcaagcccugccccaagccccaccggcucaaccacauggggaucugcuccugcggccuguacaagcagccgggggugcccacccgcuggaagcggugaggacuaguuauaagacugacuagcccgaugggccucccaacgggcccuccuccccuccuugcaccgagauuaaucaaaggcucuuuucagagccaccaaaaaaaaaaaaaaaaaaaaaaaaaaaaaaaaaaaaaaaaaaaaaaaaaaaaaaaaaaaaaaaaagaauu

SEQ ID NO: 31051 - RNA, 1655 nt, Artificial Sequence
  mRNA product Design i-3 (hSL-A64-N5) comprising derived and/or modified sequence from LASV(KAK-428;Clade n.d. (VII))__ANH09740__GPCmut6 (opt1)
aggagaaagcuuaccaugggccagaucgugaccuucuuccaggaggucccccacgugaucgaggaggugaugaacaucguccugaucgcccucagccugcuggccauccucaaggggcuguacaacuucgcgaccugcggcgugaucgggcugaucacguuccuccugcugugcggccgcuccugcagcgccaccuacaaggggcaguacgagcuccagacccuggagcugaacauggagucccucaacaugugcaugccgcugagcugcacgaagaacaacucccaccacuacauccgggccggcaacaacaccggccuggagcucacccugaccaacacgagcaucaucucccacaaguucugcaaccugagcgacgcccacaagaagaaccucuacgaccacacccugauguccaucaucaccaccuuccaccugagcauccccaacuucaaccaguacgaggccauguccugcgacuucaacgggggcaagaucagcauccaguacaaccucucccacagcuacgcgggggacgccgcccagcacugcggcacgguggccaacgggguccugcagaccuucaugcgcauggcguggggcggcuccuaccuggcccucgacagcgggcggcgcggcugggacugcaucaucuccagcuaccaguaccugaucauccagaacaccaccugggacgaccacugccaguucucccggcccagccccaucggguaccugggcuucgugagccagaagacgcgcgacaucuacaucucccggcgccuccugggcaccuucaccuggacccugagcgacuccgaggggcacgacaugccgggcggguacugccucacgcgguggaugcugaucgaggccgaccugaagugcuucggcaacaccgccguggccaagugcaacgagaagcacgacgaggaguucugcgacauguggcgccucuucgacuucugcaagcaggcgauccagcggcugaaggcccccgcccagaugaacauccagcugaucaacaaggccgucaacgcccucaucaacgaccagcugaugaugaagaaccaccuccgcgacaucauggggauccccuacugcaacuacagcaaguucugguaccugaacaacaccaccacgggccggaccucccugccccgcugcuggcugaucagcaacggcuccuaccucaacgagacccacuucagcgacgacaucgagcagcaggcggacaacaugaucaccgagaugcugcagaaggaguacauggaccggcaggggaagacgccccugggccucguggaccuguucguguucuccaccagcuucuaccugaucaccaucuuccuccaccuggucaagaucccgacccaccgccacaucguggggaagcccugccccaagccccaccggcugaaccacaugggcaucugcuccugcgggcuguacaagcagccgggcgugcccguccgcuggaagcggugaggacuaguuauaagacugacuagcccgaugggccucccaacgggcccuccuccccuccuugcaccgagauuaaucaaaggcucuuuucagagccaccaaaaaaaaaaaaaaaaaaaaaaaaaaaaaaaaaaaaaaaaaaaaaaaaaaaaaaaaaaaaaaaaagaauu

SEQ ID NO: 31052 - RNA, 1655 nt, Artificial Sequence; identical to SEQ ID NO: 31046
  mRNA product Design i-3 (hSL-A64-N5) comprising derived and/or modified sequence from LASV(Pinneo-NIG-1969;Clade I)__AIT17836__GPCmut6 (opt1)

SEQ ID NO: 31053 - RNA, 1655 nt, Artificial Sequence
  mRNA product Design i-3 (hSL-A64-N5) comprising derived and/or modified sequence from LASV(ISTH0009-NIG-2011;Clade II)__AIT17404__GPCmut6 (opt1)
aggagaaagcuuaccaugggccagaucaucaccuucuuccaggaggugccccacgucaucgaggaggugaugaacaucgugcugaucgcccucagccugcuggccauccucaaggggaucuacaacgucgcgaccugcggccuguucgggcugguguccuuccuccugcugugcggccgcagcugcuccacgaccuacaaggggguguacgagcuccagacccuggagcuggacauggccagccucaacaugugcaugccgcuguccugcacgaagaacaacagccaccacuacaucauggucggcaacgagaccggccuggagcucacccugaccaacacguccaucaucaaccacaaguucugcaaccugagcgacgcccacaagaagaaccucuacgaccacgcccugauguccaucaucagcaccuuccaccuguccauccccaacuucaaccaguacgaggccaugagcugcgacuucaacgggggcaagaucuccgugcaguacaaccucagccacgcguacgccguggacgccgccaaccacugcgggaccaucgcgaacggcguccugcagaccuucaugcggauggccuggggcggguccuacaucgcccuggacagcggcaagggguccugggacugcaucaugacgagcuaccaguaccucaucauccagaacaccaccugggaggaccacugccaguucucccgccccagccccaucggcuaccuggggcugcucagccagcggacccgcgacaucuacaucucccggcgccugcugggcacguucaccuggacccucagcgacuccgagggcaacgagacccccgggggcuacugccugacgcgguggaugcugaucgaggccgagcucaagugcuucgggaacaccgccguggcgaagugcaacgagaagcacgacgaggaguucugcgacaugcugcgccuguucgacuucugcaagcaggccauccggcgccucaagacccccgcccagaugagcauccagcugaucaacaaggccgugaacgcccugaucaacgaccagcucaucaugaagaaccaccuccgggacaucaugggcaucccguacugcaacuacuccaaguacugguaccugaaccacaccgucacggggaagaccagccugccccgcugcuggcugguguccaacggcagcuaccugaacgagacccacuucuccgacgacaucgagcagcaggcggacaacaugaucaccgagcuccugcagaaggaguacauggaccggcagggcaagacgccccuggggcucguggaccuguucgucuucagcaccuccuucuaccugaucagcaucuuccugcaccucaucaagaucccgacccaccgccacaucaccggcaagcccugccccaagccccaccggcugaaccacauggggaucugcuccugcggccuguacaagcacccgggggugcccgugaaguggaagcgcugaggacuaguuauaagacugacuagcccgaugggccucccaacgggcccuccuccccuccuugcaccgagauuaaucaaaggcucuuuucagagccaccaaaaaaaaaaaaaaaaaaaaaaaaaaaaaaaaaaaaaaaaaaaaaaaaaaaaaaaaaaaaaaaaagaauu

SEQ ID NO: 31054 - RNA, 1655 nt, Artificial Sequence
  mRNA product Design i-3 (hSL-A64-N5) comprising derived and/or modified sequence from LASV(ISTH2010-NIG-2012;Clade II)__AIT17482__GPCmut6 (opt1)
aggagaaagcuuaccaugggccagaucaucaccuucuuccaggaggugccccacgucaucgaggaggugaugaacaucgugcugaucgcccucagccugcuggccauccucaaggggaucuacaacgucgcgaccugcggccuguucgggcugguguccuuccuccugcugugcggccgcagcugcuccacgaccuacaaggggguguacgagcuccagacccuggagcuggacauggccagccucaacaugugcaugccgcuguccugcacgaagaacaacagccaccacuacaucauggucggcaacgagaccggccuggagcucacccugaccaacacguccaucaucaaccacaaguucugcaaccugagcgacgcccacaagaagaaccucuacgaccacgcccugauguccaucaucagcaccuuccaccuguccauccccaacuucaaccaguacgaggccaugagcugcgacuucaacgggggcaagaucuccgugcaguacaaccucagccacgcguacgccguggacgccgccaaccacugcgggaccaucgcgaacggcguccugcagaccuucaugcggauggccuggggcggguccuacaucgcccuggacagcggcaagggguccugggacugcaucaugacgagcuaccaguaccucaucauccagaacaucaccugggaggaccacugccaguucucccgccccagccccaucggcuaccuggggcugcucagccagcggacccgcgacaucuacaucucccggcgccugcugggcaccuucacguggacccucagcgacuccgagggcaacgagacccccgggggcuacugccugacccgguggaugcugaucgaggccgagcucaagugcuucgggaacacggccguggcgaagugcaacgagaagcacgacgaggaguucugcgacaugcugcgccuguucgacuucugcaagcaggccauccggcgccucaagacccccgcccagaugagcauccagcugaucaacaaggccgugaacgcccugaucaacgaccagcucaucaugaagaaccaccuccgggacaucaugggcauccccuacugcaacuacuccaaguacugguaccugaaccacaccgucaccgggaagacgagccugccccgcugcuggcugguguccaacggcagcuaccugaacgagacccacuucuccgacgacaucgagcagcaggcggacaacaugaucaccgagcuccugcagaaggaguacaucgaccggcagggcaagaccccgcuggggcucguggaccuguucgucuucagcacguccuucuaccugaucagcaucuuccugcaccucgugaagaucccgacccaccgccacguggucggcaagcccugccccaagccccaccggcugaaccacauggggaucugcuccugcggccuguacaagcacccgggggugcccgugaaguggaagcgcugaggacuaguuauaagacugacuagcccgaugggccucccaacgggcccuccuccccuccuugcaccgagauuaaucaaaggcucuuuucagagccaccaaaaaaaaaaaaaaaaaaaaaaaaaaaaaaaaaaaaaaaaaaaaaaaaaaaaaaaaaaaaaaaaagaauu

SEQ ID NO: 31055 - RNA, 1655 nt, Artificial Sequence
  mRNA product Design i-3 (hSL-A64-N5) comprising derived and/or modified sequence from LASV(Lassa virus/H.sapiens-wt/NGA/2015/ISTH_0543;Clade II)__AVO03639__GPCmut6 (opt1)
aggagaaagcuuaccaugggccagaucaucaccuucuuccaggaggugccccacgucaucgaggaggugaugaacaucgugcugaucgcccucagccugcuggccauccucaaggggaucuacaacgucgcgaccugcggccuguucgggcugguguccuuccuccugcugugcggccgcagcugcuccacgaccuacaaggggguguacgagcuccagacccuggagcuggacauggccaaccucaacaugugcaugccgcugagcugcacgaagaacaacucccaccacuacaucauggucggcaacgagaccggccuggagcucacccugaccaacacgagcaucaucaaccacaaguucugcaaccuguccgacgcccacaagaagaaccucuacgaccacgcccugaugagcaucaucuccaccuuccaccugagcauccccaacuucaaccaguacgaggccauguccugcgacuucaacgggggcaagaucagcgugcaguacaaccucucccacaccuacgcgguggacgccgccaaccacugcgggaccaucgccaacggcguccugcagacguucaugcggauggcguggggcgggagcuacaucgcccuggacuccggcaaggggagcugggacugcaucaugaccuccuaccaguaccucgugauccagaacaccaccugggaggaccacugccaguucagccgccccucccccaucggcuaccuggggcugcucagccagcggacgcgcgacaucuacaucagccggcgccugcugggcaccuucaccuggacccucuccgacagcgagggcaacgagacgcccgggggcuacugccugacccgguggaugcugaucgaggccgagcucaagugcuucgggaacaccgccguggccaagugcaacgagaagcacgacgaggaguucugcgacaugcugcgccuguucgacuucugcaagcaggcgauccggcgccucaagacccccgcccagauguccauccagcugaucaacaaggccgucaacgcccugaucaacgaccagcucaucaugaagaaccaccuccgggacaucaugggcauccccuacugcaacuacagcaaguacugguaccugaaccacacggugaccgggaagaccucccugccccgcugcuggcuggugagcaacggcuccuaccugaacgagacccacuucagcgacgacaucgagcagcaggccgacaacaugaucacggagcuccugcagaaggaguacaucgaccggcagggcaagaccccgcuggggcucgucgaccuguucguguucuccaccagcuucuaccugaucuccaucuuccugcaccucgugaagaucccgacccaccgccacaucacgggcaagcccugccccaagccccaccggcugaaccacauggggaucugcagcugcggccuguacaagcacccggggguccccgugaaguggaagcgcugaggacuaguuauaagacugacuagcccgaugggccucccaacgggcccuccuccccuccuugcaccgagauuaaucaaaggcucuuuucagagccaccaaaaaaaaaaaaaaaaaaaaaaaaaaaaaaaaaaaaaaaaaaaaaaaaaaaaaaaaaaaaaaaaagaauu

SEQ ID NO: 31056 - RNA, 1655 nt, Artificial Sequence
  mRNA product Design i-3 (hSL-A64-N5) comprising derived and/or modified sequence from LASV(Lassa virus/H.sapiens-wt/NGA/2016/ISTH_0009;Clade II)__AVO03571__GPCmut6 (opt1)
aggagaaagcuuaccaugggccagaucaucaccuucuuccaggaggugccccacgucaucgaggaggugaugaacaucgugcugaucgcccucagccugcuggccauccucaaggggaucuacaacgucgcgaccugcggccugcuggggcucguguccuuccugcugcucugcggccgcagcugcuccacgaccuacaaggggguguacgagcugcagacccuggagcucgacauggccagccugaacaugugcaugccgcuguccugcacgaagaacaacagccaccacuacaucauggucggcaacgagaccggccucgagcugacccugaccaacacguccaucaucaaccacaaguucugcaaccucagcgacgcccacaagaagaaccuguacgaccacgcccugauguccaucaucagcaccuuccaccucuccauccccaacuucaaccaguacgaggccaugagcugcgacuucaacgggggccggaucuccgugcaguacaaccugagccacuccuacgcgguggacgccgccaaccacugcgggaccaucgccaacggcguccugcagaccuucaugcgcauggcguggggcgggagcuacaucgcccucgacuccggcaaggggagcugggacugcaucaugacguccuaccaguaccugaucauccagaacaccaccugggaggaccacugccaguucagccggcccagccccaucggcuaccuggggcuccugucccagcgcacccgggacaucuacaucagccgccggcugcucggcacguucaccuggacccuguccgacagcgagggcaacgagacccccgggggcuacugccugacgcgcuggaugcucaucgaggccgagcugaagugcuucgggaacaccgccguggccaagugcaacgagaagcacgacgaggaguucugcgacaugcugcggcuguucgacuucugcaagcaggcgauccgccggcugaagacccccgcccagauguccauccagcugaucaacaaggccgugaacgcccucaucaacgaccagcugaucaugaagaaccaccuccgcgacaucaugggcaucccguacugcaacuacagcaaguacugguaccucaaccacaccgucacggggaagaccucccugccccggugcuggcuggugagcaacggcuccuaccucaacgagacccacuucagcgacgacaucgagcagcaggccgacaacaugaucaccgagcugcugcagaaggaguacaucgaccgccagggcaagacgccccucgggcugguggaccuguucgucuucuccaccagcuucuaccugaucuccaucuuccuccaccuggugaagaucccgacccaccggcacaucaccggcaagcccugccccaagccccaccgccugaaccacauggggaucugcagcugcggccucuacaaccacccgggggugcccgucaaguggaagcggugaggacuaguuauaagacugacuagcccgaugggccucccaacgggcccuccuccccuccuugcaccgagauuaaucaaaggcucuuuucagagccaccaaaaaaaaaaaaaaaaaaaaaaaaaaaaaaaaaaaaaaaaaaaaaaaaaaaaaaaaaaaaaaaaagaauu

SEQ ID NO: 31057 - RNA, 1655 nt, Artificial Sequence
  mRNA product Design i-3 (hSL-A64-N5) comprising derived and/or modified sequence from LASV(Lassa virus/H.sapiens-wt/NGA/2016/ISTH_0017;Clade II)__AVO03567__GPCmut6 (opt1)
aggagaaagcuuaccaugggccagaucaucaccuucuuccaggaggugccccacgucaucgaggaggugaugaacaucgugcugaucgcccucagccugcuggccauccucaaggggaucuacaacgucgcgaccugcggccuguucgggcugguguccuuccuccugcugugcggccgcagcugcuccacgaccuacaaggggguguacgagcuccagacccuggagcuggacauggccagccucaacaugugcaugccgcuguccugcacgaagaacaacagccaccacuacaucauggucggcaacgagaccggccuggagcucacccugaccaacacguccaucaucaaccacaaguucugcaaccugagcgacgcccacaagaagaaccucuacgaccacgcccugauguccaucaucagcaccuuccaccuguccauccccaacuucaaccaguacgaggccaugagcugcgacuucaacgggggcaagaucuccgugcaguacaaccucagccacaccuacgcgaucgacgccgccaaccacugcgggaccaucgccaacggcgugcugcagacguucaugcggauggcguggggcggguccuacaucgcccuggacagcggcaagggguccugggacugcaucaugaccagcuaccaguaccucaucauccagaacaccaccugggaggaccacugccaguucucccgccccagccccaucggcuaccuggggcugcucagccagcggacgcgcgacaucuacaucucccggcgccugcugggcaccuucaccuggacccucagcgacuccgagggcaacgagacgcccgggggcuacugccugacccgguggaugcugaucgaggccgagcucaagugcuucgggaacaccgccgucgccaagugcaacgagaagcacgacgaggaguucugcgacaugcugcgccuguucgacuucugcaagcaggcgauccggcgccucaagacccccgcccagaugagcauccagcugaucaacaaggccgugaacgcccugaucaacgaccagcucaucaugaagaaccaccuccgggacaucaugggcauccccuacugcaacuacuccaaguacugguaccugaaccacacggugaccgggaagaccagccugccccgcugcuggcuggucuccaacggcagcuaccugaacgagacccacuucuccgacgacaucgagcagcaggccgacaacaugaucacggagcuccugcagaaggaguacauggaccggcagggcaagaccccgcuggggcucguggaccuguucguguucagcaccuccuucuaccugaucagcaucuuccugcaccucguccgcaucccgacccaccggcacgugaucggcaagcccugccccaagccccaccgccugaaccacauggggaucugcuccugcggccuguacaagcacccgggggugcccgucaaguggaagcggugaggacuaguuauaagacugacuagcccgaugggccucccaacgggcccuccuccccuccuugcaccgagauuaaucaaaggcucuuuucagagccaccaaaaaaaaaaaaaaaaaaaaaaaaaaaaaaaaaaaaaaaaaaaaaaaaaaaaaaaaaaaaaaaaagaauu

SEQ ID NO: 31058 - RNA, 1655 nt, Artificial Sequence
  mRNA product Design i-3 (hSL-A64-N5) comprising derived and/or modified sequence from LASV(Lassa virus/H.sapiens-wt/NGA/2018/ISTH_0959;Clade II)__AVV65099__GPCmut6 (opt1)
aggagaaagcuuaccaugggccagaucaucaccuucuuccaggaggugccccacgucaucgaggaggugaugaacaucgugcugaucgcccucagccugcuggccauccucaaggggaucuacaacgucgugaccugcggccuguucgggcugguguccuuccuccugcugugcggccgcagcugcuccacgaccuacaagggggucuacgagcuccagacccuggagcuggacauggcgagccucaacaugugcaugccgcuguccugcacgaagaacaacagccaccacuacaucauggugggcaacgagaccggccuggagcucacccugaccaacacguccaucaucaaccacaaguucugcaaccugagcgacgcccacaagaagaaccucuacgaccacgcccugauguccaucaucagcaccuuccaccuguccauccccaacuucaaccaguacgaggccaugagcugcgacuucaacgggggcaagaucuccgugcaguacaaccucagccacgccuacgcgaucgacgccgccaaccacugcgggaccaucgccaacggcguccugcagaccuucaugcggauggcguggggcggguccuacaucgcccuggacagcggcaagggguccugggacugcaucaugacgagcuaccaguaccucaucauccagaacaccaccugggaggaccacugccaguucucccgccccagccccaucggcuaccuggggcugcucagccagcggacccgcgacaucuacaucucccggcgccugcugggcacguucaccuggacccucagcgacuccgagggcaacgagacccccgggggcuacugccugacgcgguggaugcugaucgaggccgagcucaagugcuucgggaacaccgccguggccaagugcaacgagaagcacgacgaggaguucugcgacaugcugcgccuguucgacuucugcaagcaggcgauccggcgccucaagacccccgcccagaugagcauccagcugaucaacaaggccgugaacgcccugaucaacgaccagcucaucaugaagaaccaccuccgggacaucaugggcaucccguacugcaacuacuccaaguacugguaccugaaccacaccgucacggggaagaccagccugccccgcugcuggcugguguccaacggcagcuaccugaacgagacccacuucuccgacgacaucgagcagcaggccgacaacaugaucaccgagcuccugcagaaggaguacaucgaccggcagggcaagacgccccuggggcucguggaccuguucgucuucagcaccuccuucuaccugaucagcaucuuccugcaccucgugaagaucccgacccaccgccacgugaucggcaagcccugccccaagccccaccggcugaaccacauggggaucugcuccugcggccuguacaagcacccggggguccccgugaaguggaagcgcugaggacuaguuauaagacugacuagcccgaugggccucccaacgggcccuccuccccuccuugcaccgagauuaaucaaaggcucuuuucagagccaccaaaaaaaaaaaaaaaaaaaaaaaaaaaaaaaaaaaaaaaaaaaaaaaaaaaaaaaaaaaaaaaaagaauu

SEQ ID NO: 31059 - RNA, 1655 nt, Artificial Sequence
  mRNA product Design i-3 (hSL-A64-N5) comprising derived and/or modified sequence from LASV(LASV003-NIG-2008;Clade II)__AIT17580__GPCmut6 (opt1)
aggagaaagcuuaccaugggccagaucaucaccuucuuccaggaggugccccacgucaucgaggaggugaugaacaucgugcugaucgcccucagccugcuggccauccucaaggggaucuacaacgucgcgaccugcggccuguucgggcugguguccuuccuccugcugugcggccgcagcugcuccacgaccuacaaggggguguacgagcuccagacccuggagcuggacauggccagccucaacaugugcaugccgcuguccugcacgaagaacaacagccaccacuacaucauggucggcaacgagaccggccuggagcucacccugaccaacacguccaucaucaaccacaaguucugcaaccugagcgacgcccacaagaagaaccucuacgaccacgcccugauguccaucaucagcaccuuccaccuguccauccccaacuucaaccaguacgaggccaugagcugcgacuucaacgggggcaagaucuccgugcaguacaaccucagccacaccuacgcgguggacgccgccaaccacugcgggaccaucgccaacggcguccugcagacguucaugcggauggcguggggcggguccuacaucgcccuggacagcggcaagggguccugggacugcaucaugaccagcuaccaguaccucaucauccagaacaccaccugggaggaccacugccaguucucccgccccagccccaucggcuaccuggggcugcucagccagcggacgcgcgacaucuacaucucccggcgccugcugggcaccuucaccuggacccucagcgacuccgagagcaacgagacgccgggcggguacugccugacccgguggaugcugaucgaggccgagcucaagugcuucggcaacaccgccguggccaagugcaacgagaagcacgacgaggaguucugcgacaugcugcgccuguucgacuucugcaagcaggcgauccggcgccucaaggcccccgcccagauguccauccagcugaucaacaaggccgugaacgcccugaucaacgaccagcucaucaugaagaaccaccuccgggacaucauggggauccccuacugcaacuacagcaaguacugguaccugaaccacaccgucacgggccgcaccucccugccccggugcuggcuggugagcaacggguccuaccugaacgagacccacuucagcgacgacaucgagcagcaggcggacaacaugaucaccgagcuccugcagaaggaguacauggaccgccagggcaagacgccccugggccucguggaccuguucgucuucuccaccagcuucuaccugaucuccaucuuccugcaccucgugaagaucccgacccaccggcacgugaucgggaagcccugccccaagccccaccgccugaaccacaugggcaucugcagcugcgggcuguacaagcacccgggcguccccgugaaguggaagcggugaggacuaguuauaagacugacuagcccgaugggccucccaacgggcccuccuccccuccuugcaccgagauuaaucaaaggcucuuuucagagccaccaaaaaaaaaaaaaaaaaaaaaaaaaaaaaaaaaaaaaaaaaaaaaaaaaaaaaaaaaaaaaaaaagaauu

SEQ ID NO: 31060 - RNA, 1655 nt, Artificial Sequence
  mRNA product Design i-3 (hSL-A64-N5) comprising derived and/or modified sequence from LASV(LASV035-NIG-2009;Clade II)__AIT17588__GPCmut6 (opt1)
aggagaaagcuuaccaugggccagaucaucaccuucuuccaggaggugccccacgucaucgaggaggugaugaacaucgugcugaucgcccucagccugcuggccauccucaaggggaucuacaacgucgcgaccugcggccuguucgggcugguguccuuccuccugcugugcggccgcagcugcuccacgaccuacaaggggguguacgagcuccagacccuggagcuggacauggccagccucaacaugugcaugccgcuguccugcacgaagaacaacagccaccacuacaucauggucggcaacgagaccggccuggagcucacccugaccaacacguccaucaucaaccacaaguucugcaaccugagcgacgcccacaagaagaaccucuacgaccacgcccugauguccaucaucagcaccuuccaccuguccauccccaacuucaaccaguacgaggccaugagcugcgacuucaacgggggcaagaucuccgugcaguacaaccucagccacgcguacgccguggacgccgccaaccacugcgggaccaucgcgaacggcguccugcagaccuucaugcggauggccuggggcggguccuacaucgcccuggacagcggcaagggguccugggacugcaucaugacgagcuaccaguaccucaucauccagaacaccaccugggaggaccacugccaguucucccgccccagccccaucggcuaccuggggcugcucagccagcggacccgcgacaucuacaucucccggcgccugcugggcacguucaccuggacccucagcgacuccgagggcaacgagacccccgggggcuacugccugacgcgguggaugcugaucgaggccgagcucaagugcuucgggaacaccgccguggcgaagugcaacgagaagcacgacgaggaguucugcgacaugcugcgccuguucgacuucugcaagcaggccauccggcgccucaaggcccccgcccagaugagcauccagcugaucaacaaggccgugaacgcgcugaucaacgaccagcucaucaugaagaaccaccuccgggacaucaugggcauccccuacugcaacuacuccaaguacugguaccugaaccacaccgucaccgggaagacgagccugccccgcugcuggcugguguccaacggcagcuaccugaacgagacccacuucuccgacgacaucgagcagcaggccgacaacaugaucaccgagcuccugcagaaggaguacaucgaccggcagggcaagaccccgcuggggcucguggaccuguucgucuucagcacguccuucuaccugaucagcaucuuccugcaccucgugaagaucccgacccaccgccacgugaucggcaagcccugccccaagccccaccggcugaaccacauggggaucugcuccugcggccuguacaagcacccggggguccccgugaaguggaagcgcugaggacuaguuauaagacugacuagcccgaugggccucccaacgggcccuccuccccuccuugcaccgagauuaaucaaaggcucuuuucagagccaccaaaaaaaaaaaaaaaaaaaaaaaaaaaaaaaaaaaaaaaaaaaaaaaaaaaaaaaaaaaaaaaaagaauu

SEQ ID NO: 31061 - RNA, 1655 nt, Artificial Sequence
  mRNA product Design i-3 (hSL-A64-N5) comprising derived and/or modified sequence from LASV(LASV1000-NIG-2009;Clade II)__AIT17782__GPCmut6 (opt1)
aggagaaagcuuaccaugggccagaucaucaccuucuuccaggaggugccccacgucaucgaggaggugaugaacaucgugcugaucgcccucagccugcuggccauccucaaggggaucuacaacgucgcgaccugcggccuguucgggcugguguccuuccuccugcugugcggccgcagcugcuccacgaccuacaaggggguguacgagcuccagacccuggagcuggacauggccagccucaacaugugcaugccgcuguccugcacgaagaacaacagccaccacuacaucauggucggcaacgagaccggccuggagcucacccugaccaacacguccaucaucaaccacaaguucugcaaccugagcgacgcccacaagaagaaccucuacgaccacgcccugauguccaucaucagcaccuuccaccuguccauccccaacuucaaccaguacgaggccaugagcugcgacuucaacgggggcaagaucuccgugcaguacaaccucagccacaccuacgcgguggacgccgccaaccacugcgggaccaucgccaacggcguccugcagacguucaugcggauggcguggggcggguccuacaucgcccuggacagcggcaagggguccugggacugcaucaugaccagcuaccaguaccucaucauccagaacaccaccugggaggaccacugccaguucucccgccccagccccaucggcuaccuggggcugcucagccagcggacgcgcgacaucuacaucucccggcgccugcugggcaccuucaccuggacccucagcgacuccgagggcaacgagacgcccgggggcuacugccugacccgguggaugcugaucgaggccgagcucaagugcuucgggaacaccgccguggccaagugcaacgagaagcacgacgaggaguucugcgacaugcugcgccuguucgacuucugcaagcaggcgaucaagcggcucaagacccccgcccagaugagcauccagcugaucaacaaggccgugaacgcccugaucaacgaccagcucaucaugaagaaccaccuccgcgacaucaugggcauccccuacugcaacuacuccaaguacugguaccugaaccacacggucaccgggaagaccagccugccccggugcuggcugguguccaacggcagcuaccugaacgagacccacuucuccgacgacaucgagcagcaggccgacaacaugaucacggagcuccugcagaaggaguacaucgaccgccagggcaagaccccgcuggggcucguggaccuguucgucuucagcaccuccuucuaccugaucagcaucuuccugcaccucgugaagaucccgacccaccggcacguggucggcaagcccugccccaagccccaccgccugaaccacauggggaucugcuccugcggccuguacaagcacccgggggugcccgugaaguggaagcggugaggacuaguuauaagacugacuagcccgaugggccucccaacgggcccuccuccccuccuugcaccgagauuaaucaaaggcucuuuucagagccaccaaaaaaaaaaaaaaaaaaaaaaaaaaaaaaaaaaaaaaaaaaaaaaaaaaaaaaaaaaaaaaaaagaauu

SEQ ID NO: 31062 - RNA, 1655 nt, Artificial Sequence
  mRNA product Design i-3 (hSL-A64-N5) comprising derived and/or modified sequence from LASV(LASV221-NIG-2010;Clade II)__AIT17624__GPCmut6 (opt1)
aggagaaagcuuaccaugggccagaucaucaccuucuuccaggaggugccccacgucaucgaggaggugaugaacaucgugcugaucgcccucagccugcuggccauccucaaggggaucuacaacgucgcgaccugcggccuguucgggcugguguccuuccuccugcugugcggccgcagcugcuccacgaccuacaaggggguguacgagcuccagacccuggagcuggacauggccagccucaacaugugcaugccgcuguccugcacgaagaacaacagccaccacuacaucauggucggcaacgagaccggccuggagcucacccugaccaacacguccaucaucaaccacaaguucugcaaccugagcgacgcccacaagaagaaccucuacgaccacgcccugauguccaucaucagcaccuuccaccuguccauccccaacuucaaccaguacgaggccaugagcugcgacuucaacgggggcaagaucuccgugcaguacaaccucagccacaccuacgcgaucgacgccgccaaccacugcgggaccaucgccaacggcgugcugcagacguucaugcggauggcguggggcggguccuacaucgcccuggacagcggcaagggguccugggacugcaucaugaccagcuaccaguaccucaucauccagaacaccaccugggaggaccacugccaguucucccgccccagccccaucggcuaccuggggcugcucagccagcggacgcgcgacaucuacaucucccggcgccugcugggcaccuucaccuggacccucagcgacuccgagggcaacgagacgcccgggggcuacugccugacccgguggaugcugaucgaggccgagcucaagugcuucgggaacaccgccgucgccaagugcaacgagaagcacgacgaggaguucugcgacaugcugcgccuguucgacuucugcaagcaggcgauccggcgccucaagacccccgcccagaugagcauccagcugaucaacaaggccgugaacgcccugaucaacgaccagcucaucaugaagaaccaccuccgggacaucaugggcauccccuacugcaacuacuccaaguacugguaccugaaccacacggugaccgggaagaccagccugccccgcugcuggcuggucuccaacggcagcuaccugaacgagacccacuucuccgacgacaucgagcagcaggccgacaacaugaucacggagaugcuccagaaggaguacauggaccggcagggcaagaccccgcuggggcugguggaccucuucguguucagcaccuccuucuaccugaucagcaucuuccugcaccuggucaagaucccgacccaccgccacgugaucggcaagcccugccccaagccccaccggcucaaccacauggggaucugcuccugcggccuguacaagcacccgggggugcccgucaaguggaagcgcugaggacuaguuauaagacugacuagcccgaugggccucccaacgggcccuccuccccuccuugcaccgagauuaaucaaaggcucuuuucagagccaccaaaaaaaaaaaaaaaaaaaaaaaaaaaaaaaaaaaaaaaaaaaaaaaaaaaaaaaaaaaaaaaaagaauu

SEQ ID NO: 31063 - RNA, 1655 nt, Artificial Sequence
  mRNA product Design i-3 (hSL-A64-N5) comprising derived and/or modified sequence from LASV(LASV237-NIG-2010;Clade II)__AIT17638__GPCmut6 (opt1)
aggagaaagcuuaccaugggccagaucaucaccuucuuccaggaggugccccacgucaucgaggaggugaugaacaucgugcugaucgcccucagccugcuggccauccucaaggggaucuacaacgucgcgaccugcggccuguucgggcugguguccuuccuccugcugugcggccgcagcugcuccacgaccuacaaggggguguacgagcuccagacccuggagcuggacauggccagccucaacaugugcaugccgcuguccugcacgaagaacaacagccaccacuacaucauggucggcaacgagaccggccuggagcucacccugaccaacacguccaucaucaaccacaaguucugcaaccugagcgacgcccacaagaaggaccucuacgaccacgcccugauguccaucaucagcaccuuccaccuguccauccccaacuucaaccaguacgaggccaugagcugcgacuucaacgggggcaagaucuccgugcaguacaaccucagccacaccuacgcgguggacgccgccaaccacugcgggaccaucgccaacggcguccugcagacguucaugcggauggcguggggcggguccuacaucgcccuggacagcggcaagggguccugggacugcaucaugaccagcuaccaguaccucaucauccagaacaccaccugggaggaccacugccaguucucccgccccagccccaucggcuaccuggggcugcucagccagcggacgcgcgacaucuacaucucccggcgccugcugggcaccuucaccuggacccucagcgacuccgagggcaacgagacgcccgggggcuacugccugacccgguggaugcugaucgaggccgagcucaagugcuucgggaacaccgccguggccaagugcaacgagaagcacgacgaggaguucugcgacaugcugcgccuguucgacuucugcaagcaggcgauccggcgccucaagacccccgcccagaugagcauccagcugaucaacaaggccgugaacgcccugaucaacgaccagcucaucaugaagaaccaccuccgggacaucaugggcauccccuacugcaacuacuccaaguacugguaccugaaccacacggucaccgggaagaccagccugccccgcugcuggcugguguccaacggcagcuaccugaacgagacccacuucuccgacgacaucgagcagcaggccgacaacaugaucacggagcuccugcagaaggaguacauggaccggcagggcaagaccccgcuggggcucguggaccuguucgucuucagcaccuccuucuaccugaucagcaucuuccugcaccucaucaagaucccgacccaccgccacaucacgggcaagcccugccccaagccccaccggcugaaccacauggggaucugcuccugcggccuguacaagcacccgggggugcccgugaaguggaagcgcugaggacuaguuauaagacugacuagcccgaugggccucccaacgggcccuccuccccuccuugcaccgagauuaaucaaaggcucuuuucagagccaccaaaaaaaaaaaaaaaaaaaaaaaaaaaaaaaaaaaaaaaaaaaaaaaaaaaaaaaaaaaaaaaaagaauu

SEQ ID NO: 31064 - RNA, 1655 nt, Artificial Sequence
  mRNA product Design i-3 (hSL-A64-N5) comprising derived and/or modified sequence from LASV(LASV253-NIG-2011;Clade II)__AIT17670__GPCmut6 (opt1)
aggagaaagcuuaccaugggccagaucaucaccuucuuccaggaggugccccacgucaucgaggaggugaugaacaucgugcugaucgcccucagccugcuggccauccucaaggggaucuacaacgucgcgaccugcggccuguucgggcugguguccuuccuccugcugugcggccgcagcugcuccacgaccuacaaggggguguacgagcuccagacccuggagcuggacauggccagccucaacaugugcaugccgcuguccugcacgaagaacaacagccaccacuacaucauggucggcaacgagaccggccuggagcucacccugaccaacacguccaucaucaaccacaaguucugcaaccugagcgacgcccacaagaagaaccucuacgaccacgcccugauguccaucaucagcaccuuccaccuguccauccccaacuucaaccaguacgaggccaugagcugcgacuucaacgggggcaagaucuccgugcaguacaaccucagccacaccuacgcgguggacgccgccaaccacugcgggaccaucgccaacggcguccugcagacguucaugcggauggcguggggcggguccuacaucgcccuggacagcggcaagggguccugggacugcaucaugaccagcuaccaguaccucaucauccagaacaccaccugggaggaccacugccaguucucccgccccagccccaucggcuaccuggggcugcucagccagcggacgcgcgacaucuacaucucccggcgccugcugggcaccuucaccuggacccucagcgacuccgagggcaacgagacgcccgggggcuacugccugacccgguggaugcugaucgaggccgagcucaagugcuucgggaacaccgccguggccaagugcaacgagaagcacgacgaggaguucugcgacaugcugcgccuguucgacuucugcaagcaggcgauccggcgccucaaggcccccgcccagaugagcauccagcugaucaacaaggccgugaacgcccugaucaacgaccagcucaucaugaagaaccaccuccgggacaucaugggcaucccguacugcaacuacuccaaguacugguaccugaaccacaccgucacggggcgcaccagccugccccggugcuggcugguguccaacggcagcuaccugaacgagacccacuucuccgacgacaucgagcagcaggcggacaacaugaucaccgagcuccugcagaaggaguacaucgaccgccagggcaagacgccccuggggcucguggaccuguucgucuucagcaccuccuucuaccugaucagcaucuuccugcaccucgugaagaucccgacccaccggcacaucaucggcaagcccugccccaagccccaccgccugaaccacauggggaucugcuccugcggccuguacaagcacccgggggugcccgucaaguggaagcggugaggacuaguuauaagacugacuagcccgaugggccucccaacgggcccuccuccccuccuugcaccgagauuaaucaaaggcucuuuucagagccaccaaaaaaaaaaaaaaaaaaaaaaaaaaaaaaaaaaaaaaaaaaaaaaaaaaaaaaaaaaaaaaaaagaauu

SEQ ID NO: 31065 - RNA, 1655 nt, Artificial Sequence
  mRNA product Design i-3 (hSL-A64-N5) comprising derived and/or modified sequence from LASV(LASV254-NIG-2011;Clade II)__AIT17674__GPCmut6 (opt1)
aggagaaagcuuaccaugggccagaucaucaccuucuuccaggaggugccccacgucaucgaggaggugaugaacaucgugcugaucgcccucagccugcuggccauccucaaggggaucuacaacgucgcgaccugcggccuguucgggcugguguccuuccuccugcugugcggccgcagcugcuccacgaccuacaaggggguguacgagcuccagacccuggagcuggacaugaccaaccucaacaugugcaugccgcugagcugcaccaagaacaacucccaccacuacaucauggucggcaacgagaccggccuggagcucacccugacgaacaccagcaucaucaaccacaaguucugcaaccuguccgacgcccacaagaagaaccucuacaaccacgcccugaugagcaucaucuccaccuuccaccugagcauccccaacuucaaccaguacgaggccauguccugcgacuucaacgggggcaagaucagcgugcaguacaaccucucccacagcuacgccguggacgcggccaaccacugcgggaccaucgccaacggcguccugcagacguucaugcggauggccuggggcggguccuacaucgcgcuggacagcggcaaggggaacugggacugcaucaugaccuccuaccaguaccucaucauccagaacaccaccugggaggaccacugccaguucagccgccccucccccaucggcuaccuggggcugcucagccagcggacgcgcgacaucuacaucagccggcgccugcugggcaccuucaccuggacccucuccgacagcgagggcaacgagacgcccgggggcuacugccugacccgguggaugcugaucgaggccgagcucaagugcuucgggaacaccgccguggccaagugcaacgagaagcacgacgaggaguucugcgacaugcugcgccuguucgacuucugcaagcaggccauccggcgccucaagacccccgcgcaggccaacauccagcugaucaacaaggccgugaacgcccugaucaacgaccagcucaucaugaagaaccaccuccgggacaucaugggcauccccuacugcaacuacuccaaguacugguaccugaaccacacggucaccgggaagaccagccugccccgcugcuggcugguguccaacggcagcuaccugaacgagacccacuucuccgacgacaucgagcagcaggccgacaacaugaucacggagcuccugcagaaggaguacauggaccggcagggcaagaccccgcuggggcucguggaccuguucgucuucagcaccuccuucuaccugaucagcaucuuccugcaccucgugaagaucccgacccaccgccacgugaucggcaagcccugccccaagccccaccggcugaaccacauggggaucugcuccugcggccuguacaagcacccggggguccccgugaaguggaagcgcugaggacuaguuauaagacugacuagcccgaugggccucccaacgggcccuccuccccuccuugcaccgagauuaaucaaaggcucuuuucagagccaccaaaaaaaaaaaaaaaaaaaaaaaaaaaaaaaaaaaaaaaaaaaaaaaaaaaaaaaaaaaaaaaaagaauu

SEQ ID NO: 31066 - RNA, 1655 nt, Artificial Sequence
  mRNA product Design i-3 (hSL-A64-N5) comprising derived and/or modified sequence from LASV(Nig08-A19;Clade III)__ADU56618__GPCmut6 (opt1)
aggagaaagcuuaccaugggccagaucgugaccuucuuccaggaggucccccacgugaucgaggaggugaugaacaucguccugaucgcccucagcauccuggccauccugaaggggcucuacaacaucgcgaccugcggccugaucgggcuggugacguuccuccugcuguccggccgcagcugcuccaugaccuacaaggggguguacgagcuccagacccuggagcugaacaugaacacccucaacaugugcaugccgcugagcugcaccaagaacaacucccaccacuacaucauggucggcaacgagaccggccuggagcucacccugacgaacaccagccugcuccaccacaaguucugcaaccuguccgacgcccacaagaagaaccuguacgaccacacccucaugagcaucaucuccaccuuccaccugagcauccccaacuucaaccaguacgaggccauguccugcgacuucaacgggggcaagaucacggugcaguacaaccugagccacuccuacgccaucgacgccgcgaaccacugcgggaccguggccaacggcguccuccagaccuucaugcggauggccuggggcgggagcuacaucgcccuggacuccggccgcgggaagugggacugcaucaugaccagcuaccaguaccugaucauccagaacacgaccugggaggaccacugccaguucucccggcccagccccaucggcuaccucgggcugcugucccagcgcacccgggacaucuacaucagccgccggcuccugggcaccuucacguggacccugagcgacuccgagggcaacgagacccccgggggcuacugccucacccgcuggaugcugaucgaggcggagcugaagugcuucgggaacacggccguggccaagugcaacgagaagcacgacgaggaguucugcgacaugcuccggcuguucgacuucugcaagcaggccauccgccggcugaaggcccccgcgcagaugagcauccagcucaucaacaaggccgugaacgcccugaucaacgaccagcugaucaugaagaaccaccuccgcgacaucaugggcauccccuacugcaacuacuccaaguacugguaccugaaccacaccagcaccgggcggaccucccugccccgcugcuggcucgucagcaacggcuccuaccugaacgagacgcacuucagcgacgacaucgagcagcaggccgacaacaugaucaccgagaugcugcagaaggaguaccucgaccggcagggcaagaccccgcuggggcugguggaccuguucguguucuccaccagcuucuaccucaucuccaucuuccugcaccuggucaagaucccgacgcaccgccacaucgugggcaagcccugccccaagccccaccggcucaaccacauggggaucugcagcugcggccuguacaagcagccgggggugcccguccgcuggaagcggugaggacuaguuauaagacugacuagcccgaugggccucccaacgggcccuccuccccuccuugcaccgagauuaaucaaaggcucuuuucagagccaccaaaaaaaaaaaaaaaaaaaaaaaaaaaaaaaaaaaaaaaaaaaaaaaaaaaaaaaaaaaaaaaaagaauu

SEQ ID NO: 31067 - RNA, 1658 nt, Artificial Sequence
  mRNA product Design i-3 (hSL-A64-N5) comprising derived and/or modified sequence from LASV(G1180-SLE-2010;Clade IV)__AIT17168__GPCmut6 (opt1)
aggagaaagcuuaccaugggccagaucgugaccuucuuccaggaggucccccacgugaucgaggaggugaugaacaucguccugaucgcccucagcauccuggccgugcugaaggggcucuacaacuucgcgaccugcggccugguggggcugcucaccuuccugcugcucugcggccgcuccugcaccgccagccgguacaagggggucuacgagcugcagacccuggagcucaacauggagacccugaacaugugcaugccgcuguccugcaccaagaacaacagccaccacuacaucauggugggcaacgagaccggccucgagcugacccugacgaacaccuccaucaucaaccacaaguucugcaaccucagcgacgcccacaagaagaaccuguacgaccacgcccugauguccaucaucagcaccuuccaccucuccauccccaacuucaaccaguacgaggccaugagcugcgacuucaacgggggcaagaucuccgugcaguacaaccugagccacuccuacgcgggggacgccgccaaccacugcggcaccgucgccaacggggugcugcagacguucaugcgcauggcguggggcggcagcuacaucgcccucgacuccgggcacggcagcugggacugcaucaugaccuccuaccaguaccugaucauccagaacaccaccugggaggaccacugccaguucagccggcccucccccaucggguaccugggccuccugagccagcgcacgcgggacaucuacaucagccgccggcugcucggcaccuucaccuggacccuguccgacagcgaggggaaggacacgccgggcggguacugccugacccgcuggaugcucaucgaggccgagcugaagugcuucggcaacaccgccguggccaagugcaacgagaagcacgacgaggaguucugcgacaugcugcggcuguucgacuucugcaagcaggcgauccagcgccugaaggcccccgcccagauguccauccagcugaucaacaaggccgucaacgcccucaucaacgaccagcugaucaugaagaaccaccuccgggacaucauggggauccccuacugcaacuacagcaaguacugguaccucaaccacaccacgaccggcaagaccucccugcccaagugcuggcuggugagcaacggcuccuaccucaacgagacccacuucagcgacgacaucgagcagcaggcggacaacaugaucacggagaugcugcagaaggaguacauggagcgccaggggaagacgccccugggccucguggaccuguucgucuucuccaccagcuucuaccugaucuccaucuuccugcaccucgugaagaucccgacccaccggcacaucgugggcaagagcugccccaagccccaccgccugaaccacauggggaucugcuccugcgggcuguacaagcagcccggcgucccggugaaguggaagcggugaggacuaguuauaagacugacuagcccgaugggccucccaacgggcccuccuccccuccuugcaccgagauuaaucaaaggcucuuuucagagccaccaaaaaaaaaaaaaaaaaaaaaaaaaaaaaaaaaaaaaaaaaaaaaaaaaaaaaaaaaaaaaaaaagaauu

SEQ ID NO: 31068 - RNA, 1658 nt, Artificial Sequence
  mRNA product Design i-3 (hSL-A64-N5) comprising derived and/or modified sequence from LASV(G1442-SLE-2011;Clade IV)__AIT17180__GPCmut6 (opt1)
aggagaaagcuuaccaugggccagaucgugaccuucuuccaggaggucccccacgugaucgaggaggugaugaacaucguccugaucgcccucagcauccuggccgugcugaaggggcucuacaacguggcgaccugcggccugaucgggcuggucacguuccuccugcugugcggccgcuccugcaccaccacccucuacaaggggguguacgagcugcagacgcuggagcucaacauggagacccugaacaugugcaugccgcugagcugcaccaagaacaacucccaccacuacauccgggugggcaacgagacgggccucgagcugacccugaccaacaccagcaucaucaaccacaaguucugcaaccucuccgacgcccacaagaagaaccuguacgaccacgcccugaugagcaucaucuccacguuccaccucagcauccccaacuucaaccaguacgaggccauguccugcgacuucaacgggggcaagaucagcguccaguacaaccugucccacagcuacgccggggacgcggccaaccacugcggcaccguggccaacggggugcugcagaccuucaugcgcauggccuggggcggcuccuacaucgcgcucgacagcgggcggggcaacugggacugcaucaugaccuccuaccaguaccugaucauccagaacacgaccugggacgaccacugccaguucagccgccccucccccaucggguaccugggccuccugagccagcggacccgcgacgucuacaucucccggcgccugcucggcaccuucacguggacccugagcgacagcgaggggaaggacaccccgggcggguacugccugacccgguggaugcucaucgaggccgagcugaagugcuucggcaacacggccguggccaagugcaacgagaagcacgacgaggaguucugcgacaugcugcgccucuucgacuucugcaagcaggccauccagcggcugaaggcgcccgcccagauguccauccagcugaucaacaaggccgugaacgcccucaucaacgaccagcugaucaugaagaaccaccuccgcgacaucauggggauccccuacugcaacuacagcaaguacugguaccugaacaacaccgccaccggcaagaccucccugcccaagugcuggcugaucagcaacggcuccuaccucaacgagacgcacuucagcgacgacaucgagcaggaggcggacaacaugaucaccgagaugcugcagaaggaguacauggagcggcaggggaagacgccccugggccucgucgaccuguucguguucuccaccagcuucuaccugaucuccaucuuccugcaccucgugaagaucccgacccaccgccacaucgucggcaagagcugccccaagccccaccggcugaaccacauggggaucugcuccugcgggcuguacaagcagcccggcgugccggugcgcuggaagcggugaggacuaguuauaagacugacuagcccgaugggccucccaacgggcccuccuccccuccuugcaccgagauuaaucaaaggcucuuuucagagccaccaaaaaaaaaaaaaaaaaaaaaaaaaaaaaaaaaaaaaaaaaaaaaaaaaaaaaaaaaaaaaaaaagaauu

SEQ ID NO: 31069 - RNA, 1658 nt, Artificial Sequence
  mRNA product Design i-3 (hSL-A64-N5) comprising derived and/or modified sequence from LASV(G3010-SLE-2013;Clade IV)__AIT17344__GPCmut6 (opt1)
aggagaaagcuuaccaugggccagaucgugaccuucuuccaggaggucccccacgugaucgaggaggugaugaacaucguccugaucgcccucagcauccuggccgugcugaaggggcucuacaacuucgcgaccugcggccugguggggcuggucacguuccuccugcugugcggccgcuccugcaccaccagccucuacaaggggguguacgagcugcagacccuggagcucaacauggagacgcugaacaugugcaugccgcuguccugcaccaagaacaacagccaccacuacaucauggugggcaacgagaccggccucgagcugacgcugaccaacaccuccaucaucaaccacaaguucugcaaccucagcgacgcccacaagaagaaccuguacaaccacgcccugauguccaucaucagcaccuuccaccucuccauccccaacuucaaccaguacgaggccaugagcugcgacuucaacgggggcaagaucuccguccaguacaaccugagccacuccuacgccggggacgcggccagccacugcggcacgguggccaacggggugcugcagaccuucaugcggauggccuggggcggcuccuacaucgcgcucgacagcggguacggcaagugggacugcaucaugaccuccuaccaguaccugaucauccagaacaccacgugggaggaccacugccaguucagccgccccucccccaucggguaccugggccuccugagccagcggacccgcgacaucuacaucagccggcgccugcucggcaccuucaccuggacgcuguccgacagcgaggggaaggacaccccgggcggguacugccugacccgguggaugcucaucgaggccgagcugaagugcuucggcaacaccgccgucgccaagugcaacgagaagcacgacgaggaguucugcgacaugcugcgccucuucgacuucugcaagcaggccauccagcggcugaagacgcccgcgcagauguccauccagcugaucaacaaggccgugaacgcccucaucaacgaccagcugaucaugaagaaccaccuccgcgacaucauggggauccccuacugcaacuacagcaaguacugguaccugaaccacaccaccaccggcaagacgucccugcccaagugcuggcuggugagcaacggcuccuaccucaacgagacccacuucagcgacgacaucgagcagcaggccgacaacaugaucaccgagaugcugcagaaggaguacauggagcggcaggggaagacgccccugggccucgucgaccuguucguguucuccaccagcuucuaccugaucuccaucuuccugcaccucgugaagaucccgacccaccgccacaucgucggcaagagcugccccaagccccaccggcugaaccacauggggaucugcuccugcgggcuguacaagcagcccggcgugccggugcgcuggaagcggugaggacuaguuauaagacugacuagcccgaugggccucccaacgggcccuccuccccuccuugcaccgagauuaaucaaaggcucuuuucagagccaccaaaaaaaaaaaaaaaaaaaaaaaaaaaaaaaaaaaaaaaaaaaaaaaaaaaaaaaaaaaaaaaaagaauu

SEQ ID NO: 31070 - RNA, 1658 nt, Artificial Sequence
  mRNA product Design i-3 (hSL-A64-N5) comprising derived and/or modified sequence from LASV(G502-SLE-2009;Clade IV)__AIT17126__GPCmut6 (opt1)
aggagaaagcuuaccaugggccagaucgugaccuucuuccaggaggucccccacgugaucgaggaggugaugaacaucguccugaucgcccucagcauccuggccgugcugaaggggcucuacaacuucgcgaccugcggccugguggggcugcucacguuccugcugcucugcggccgcuccugcaccaccgggcuguacaagggcgucuacgagcugcagacccucgagcugaacauggagacgcugaacaugugcaugccgcucagcugcaccaagaacaacucccaccacuacaucauggugggcaacgagaccgggcuggagcugacgcucaccaacaccagcaucaucaaccacaaguucugcaaccuguccgacgcccacaagaagaaccuguacgaccacgcccucaugagcaucaucuccaccuuccaccugagcauccccaacuucaaccaguacgaggccauguccugcgacuucaacggcgggaagaucagcgugcaguacaaccugucccacagcuacgccggcgacgcggccgaccacugcgggacggucgccaacggcgugcuccagaccuucaugcggauggccuggggcggguccuacaucgcgcuggacagcggccgcgggcggugggacugcaucaugaccuccuaccaguaccugaucauccagaacaccacgugggaggaccacugccaguucagccgccccucccccaucggcuaccucggccugcugagccagcggacccgcgacaucuacaucucccggcgccuccuggggaccuucaccuggacgcugagcgacagcgagggcaaggacacccccgggggcuacugccucacccgguggaugcugaucgaggccgagcugaagugcuucgggaacaccgccguggccaagugcaacgagaagcacgacgaggaguucugcgacaugcuccgccuguucgacuucugcaagcaggccauccagcggcugaaggcgcccgcccagauguccauccagcucaucaacaaggccgucaacgcccugaucaacgaccagcuggugaugaagaaccaccuccgcgacaucaugggcauccccuacugcaacuacagccgguacugguaccugaaccacacgaccaccggccgcaccucccugcccaagugcuggcucgugagcaacggguccuaccugaacgagacgcacuucagcgacgacaucgagcagcaggccgacaacaugaucaccgagaugcugcagaaggaguacauggagcggcagggcaagaccccgcucgggcuggucgaccuguucguguucuccaccagcuucuaccugaucuccaucuuccuccaccuggugaagaucccgacgcaccgccacaucgucggcaagagcugccccaagccccaccggcugaaccacauggggaucugcuccugcggccucuacaagcagcccggcgugccggugaaguggaagcgcugaggacuaguuauaagacugacuagcccgaugggccucccaacgggcccuccuccccuccuugcaccgagauuaaucaaaggcucuuuucagagccaccaaaaaaaaaaaaaaaaaaaaaaaaaaaaaaaaaaaaaaaaaaaaaaaaaaaaaaaaaaaaaaaaagaauu

SEQ ID NO: 31071 - RNA, 1658 nt, Artificial Sequence
  mRNA product Design i-3 (hSL-A64-N5) comprising derived and/or modified sequence from LASV(G733-SLE-2010;Clade IV)__AIT17154__GPCmut6 (opt1)
aggagaaagcuuaccaugggccagaucgugaccuucuuccaggaggucccccacgugaucgaggaggugaugaacaucguccugaucgcccucagcauccuggccgugcugaaggggcucuacaacuucgcgaccugcggcaucguggggcuggucuccuuccugcuccugugcggccgcagcugcacgaccucccuguacaaggggguguacgagcuccagacccuggagcugaacauggagacccucaacaugugcaugccgcugagcugcaccaagaacaacucccaccacuacaucauggugggcaacgagaccggccuggagcucacccugacgaacaccagcaucaucaaccacaaguucugcaaccuguccgacgcccacaagaagaaccucuacgaccacgcccugaugagcaucaucuccaccuuccaccugagcauccccaacuucaaccaguacgaggccauguccugcgacuucaacgggggcaagaucagcguccaguacaaccucucccacagcuacgccggggacgcggccaaccacugcggcaccaucgccaacggggugcugcagacguucaugcggauggccuggggcggcuccuacaucgcgcuggacagcgggcgcgaccggugggacugcaucaugaccuccuaccaguaccucaucauccagaacaccaccugggaggaccacugccaguucagccgccccucccccaucggcuaccuggggcugcucagccagcggacgcgcgacaucuacaucagccggcgccugcugggcaccuucaccuggacccucuccgacagcgagggcaaggacacgcccgggggcuacugccugacccgguggaugcugaucgaggccgagcucaagugcuucgggaacaccgccguggccaagugcaacgagaagcacgacgaggaguucugcgacaugcugcgccuguucgacuucugcaagcaggccauccagcggcucaaggcgcccgcccagauguccauccagcugaucaacaaggccgucaacgcccugaucaacgaccagcucaucaugaagaaccaccuccgcgacaucaugggcauccccuacugcaacuacagcaaguacugguaccugaaccacaccacgaccgggaagaccucccugcccaagugcuggcuggugagcaacggcuccuaccugaacgagacccacuucagcgacgacaucgagcagcaggccgacaacaugaucacggagaugcuccagaaggaguacauggagcggcagggcaagaccccgcuggggcugguggaccucuucgucuucuccaccagcuucuaccugaucuccaucuuccugcaccuggugaagaucccgacccaccgccacguggucggcaagagcugccccaagccccaccggcucaaccacauggggaucugcuccugcggccuguacgggcagcccggcgugccggugaaguggaagcgcugaggacuaguuauaagacugacuagcccgaugggccucccaacgggcccuccuccccuccuugcaccgagauuaaucaaaggcucuuuucagagccaccaaaaaaaaaaaaaaaaaaaaaaaaaaaaaaaaaaaaaaaaaaaaaaaaaaaaaaaaaaaaaaaaagaauu

SEQ ID NO: 31072 - RNA, 1658 nt, Artificial Sequence
  mRNA product Design i-3 (hSL-A64-N5) comprising derived and/or modified sequence from MOPV/LASV reassortant(IGS-1;Clade IV)__AFY05576__GPCmut6 (opt1)
aggagaaagcuuaccaugggccagaucgugaccuucuuccaggaggucccccacgugaucgaggaggugaugaacaucguccugaucgcccucagcgugcuggccgugcugaaggggcucuacaacuucgcgaccugcggccuggucgggcuggugacguuccuccugcugugcggccgcuccugcaccaccagccucuacaaggggguguacgagcugcagacccuggagcucaacauggagacgcugaacaugugcaugccgcuguccugcaccaagaacaacagccaccacuacaucauggucggcaacgagaccggccucgagcugacgcugaccaacaccuccaucaucaaccacaaguucugcaaccucagcgacgcccacaagaagaaccuguacgaccacgcccugauguccaucaucagcaccuuccaccucuccauccccaacuucaaccaguacgaggccaugagcugcgacuucaacgggggcaagaucuccgugcaguacaaccugagccacuccuacgccggggacgcggccaaccacugcggcacgguggccaacgggguccugcagaccuucaugcggauggccuggggcggcagcuacaucgcgcucgacuccgggcgcggcaacugggacugcaucaugaccagcuaccaguaccugaucauccagaacaccacgugggaggaccacugccaguucucccggcccagccccaucggguaccugggccuccugucccagcgcacccgggacaucuacaucagccgccggcugcucggcaccuucaccuggacgcugagcgacuccgagggggaggacaccccgggcggguacugccugacccgcuggaugcucaucgaggccgagcugaagugcuucggcaacaccgccguggccaagugcaacgagaagcacgacgaggaguucugcgacaugcugcggcuguucgacuucugcaagcaggccauccagcgccugaaggcgcccgcccagaugagcauccagcugaucaacaaggccgugaacgcccucaucaacgaccagcugaucaugaagaaccaccuccgggacaucauggggauccccuacugcaacuacuccaaguacugguaccucaaccacacgaccaccggccgcaccagccugcccaagugcuggcuggucuccaacggcagcuaccucaacgagacgcacuucuccgacgacaucgagcagcaggccgacaacaugaucaccgagaugcugcagaaggaguacauggagcggcaggggaagacgccccugggccucguggaccuguucguguucagcaccuccuucuaccugaucagcaucuuccugcaccucgucaagaucccgacccaccgccacaucguggggaaguccugccccaagccccaccggcugaaccacaugggcaucugcagcugcgggcuguacaagcagcccggcgugccggucaaguggaagcgcugaggacuaguuauaagacugacuagcccgaugggccucccaacgggcccuccuccccuccuugcaccgagauuaaucaaaggcucuuuucagagccaccaaaaaaaaaaaaaaaaaaaaaaaaaaaaaaaaaaaaaaaaaaaaaaaaaaaaaaaaaaaaaaaaagaauu

SEQ ID NO: 31073 - RNA, 1658 nt, Artificial Sequence
  mRNA product Design i-3 (hSL-A64-N5) comprising derived and/or modified sequence from LASV(LM765-SLE-2012;Clade IV)__AIT17814__GPCmut6 (opt1)
aggagaaagcuuaccaugggccagaucgugaccuucuuccaggaggucccccacgugaucgaggaggugaugaacaucguccugaucgcccucagcauccuggccgugcugaaggggcucuacaacuucgcgaccugcggccugguggggcuggucacguuccuccugcugugcggccgcuccugcaccaccagccucuacaaggggguguacgagcugcagacccuggagcucaacauggagacgcugaacaugugcaugccgcuguccugcaccaagaacaacagccaccacuacaucauggugggcaacgagaccggccucgagcugacgcugaccaacaccuccaucaucgaccacaaguucugcaaccucagcgacgcccaccggaagaaccuguacgaccacgcccugauguccaucaucagcaccuuccaccucuccauccccaacuucaaccaguacgaggccaugagcugcgacuucaacgggggcaagaucuccguccaguacaaccugagccacuccuacgccaaggacgcggccgaccacugcgggacgguggccaacggcgugcugcagaccuucaugcgcauggccuggggcgggagcuacaucgcgcucgacuccggccgggggcgcugggacugcaucaugaccagcuaccaguaccugaucauccagaacaccacgugggaggaccacugccaguucucccggcccagccccaucggcuaccuggggcuccugucccagcgcacccgggacaucuacaucagccgccggcugcucggcaccuucaccuggacgcugagcgacuccgagggcaaggacacccccgggggcuacugccugacccgcuggaugcucaucgaggccgagcugaagugcuucgggaacaccgccgucgccaagugcaacgagaagcacgacgaggaguucugcgacaugcugcggcuguucgacuucugcaagcaggccauccagcgccugaaggcgcccgcccagaugagcauccagcugaucaacaaggccgugaacgcccucaucaacgaccagcugaucaugaagaaccaccuccgggacaucaugggcauccccuacugcaacuacuccaaguacugguaccucaaccacacgaccaccgggaagaccagccugcccaagugcuggcugguguccaacggcagcuaccucaacgagacgcacuucuccgacgacaucgagcagcaggccgacaacaugaucaccgagaugcugcagaaggaguacauggagcgccagggcaagaccccgcuggggcucgucgaccuguucguguucagcaccuccuucuaccugaucagcaucuuccugcaccucgugaagaucccgacgcaccggcacaucgucggcaagcccugccccaagccccaccgccugaaccacauggggaucugcuccugcggccuguacaagcagccgggggugcccgugaaguggaagcggugaggacuaguuauaagacugacuagcccgaugggccucccaacgggcccuccuccccuccuugcaccgagauuaaucaaaggcucuuuucagagccaccaaaaaaaaaaaaaaaaaaaaaaaaaaaaaaaaaaaaaaaaaaaaaaaaaaaaaaaaaaaaaaaaagaauu

SEQ ID NO: 31074 - RNA, 1658 nt, Artificial Sequence
  mRNA product Design i-3 (hSL-A64-N5) comprising derived and/or modified sequence from LASV(LM776-SLE-2012;Clade IV)__AIT17824__GPCmut6 (opt1)
aggagaaagcuuaccaugggccagaucgugaccuucuuccaggaggucccccacgugaucgaggaggugaugaacaucguccugaucgcccucagcauccuggccgugcugaaggggcucuacaacuucgcgaccugcggccugguggggcuggucacguuccuccugcugugcggccgcuccugcaccaccagcguguacaaggggguguacgagcuccagacccuggagcugaacauggagacgcucaacaugugcaugccgcuguccugcaccaagaacaacagccaccacuacaucauggucggcaacgagaccggccuggagcucacgcugaccaacaccuccaucaucaaccacaaguucugcaaccugagcgacgcccacaagaagaaccucuacgaccacgcccugauguccaucaucagcaccuuccaccuguccauccccaacuucaaccaguacgaggccaugagcugcgacuucaacgggggcaagaucuccgugcaguacaaccucagccacuccuacgccggggacgcggccaaccacugcggcacgguggccaacgggguccugcagaccuucaugcggauggccuggggcggcagcuacaucgcgcuggacuccgggcacggcaagugggacugcaucaugaccagcuaccaguaccucaucauccagaacaccacgugggaggaccacugccaguucucccgccccagccccaucggguaccugggccugcucucccagcggacccgcgacaucuacaucagccggcgccugcugggcaccuucaccuggacgcucagcgacuccgaggggaaggacaccccgggcggguacugccugacccgguggaugcugaucgaggccgagcucaagugcuucggcaacaccgccguggccaagugcaacgagaagcacgacgaggaguucugcgacaugcugcgccuguucgacuucugcaagcaggccauccagcggcucaaggcgcccgcccagaugagcauccagcugaucaacaaggccgugaacgcccugaucaacgaccagcucaucaugaagaaccaccuccgcgacaucauggggauccccuacugcaacuacuccaaguacugguaccugaaccacacgaccaccggcaagaccagccugcccaagugcuggcuggucuccaacggcagcuaccugaacgagacgcacuucuccgacgacaucgagcagcaggccgacaacaugaucaccgagaugcuccagaaggaguacauggagcggcaggggaagacgccccugggccugguggaccucuucguguucagcaccuccuucuaccugaucagcaucuuccugcaccuggucaagaucccgacccaccgccacaucguggggaaguccugccccaagccccaccggcucaaccacaugggcaucugcagcugcgggcuguacaagcagcccggcgugccgguccgcuggaagcggugaggacuaguuauaagacugacuagcccgaugggccucccaacgggcccuccuccccuccuugcaccgagauuaaucaaaggcucuuuucagagccaccaaaaaaaaaaaaaaaaaaaaaaaaaaaaaaaaaaaaaaaaaaaaaaaaaaaaaaaaaaaaaaaaagaauu

SEQ ID NO: 31075 - RNA, 1658 nt, Artificial Sequence
  mRNA product Design i-3 (hSL-A64-N5) comprising derived and/or modified sequence from LASV(Mad39;Clade IV)__ANH09722__GPCmut6 (opt1)
aggagaaagcuuaccaugggccagaucgugaccuucuuccaggaggucccccacgugaucgaggaggugaugaacaucguccugaucgcccucagcauccuggccgugcugaaggggcucuacaacguggcgaccugcggccugaucgggcuggucacguuccuccugcugugcggccgcuccugcaccaccacccucuacaaggggguguacgagcugcaggcccuggagcucaacauggagacgcugaacaugugcaugccgcugagcugcaccaagaacaacucccaccacuacauccgggugggcaacgagaccggccucgagcugacgcugaccaacaccagccucaucaaccacaaguucugcaaccuguccgacgcccacaagaagaaccuguacgaccacgcccucaugagcaucaucuccaccuuccaccugagcauccccaacuucaaccaguacgaggccauguccugcgacuucaacgacgggaagaucagcguccaguacaaccugucccacacguacgcgggcgacaccgccaaccacugcgggaccguggccaacggcgugcuccagaccuucaugcgcauggccuggggcgggagcuacaucgcgcuggacuccggccgcgggggcugggacugcaucaugacgagcuaccaguaccugaucauccagaacaccaccugggaggaccacugccaguucucccggcccagccccaucggguaccucggccugcugucccagcggacccgcgacaucuacaucagccggcgccuccugggcacguucaccuggacccuguccgacagcgaggggaaggacaccccgggcggguacugccucacgcgguggaugcugaucgaggccgagcugaagugcuucggcaacaccgccgucgccaagugcaacgagaagcacgacgaggaguucugcgacaugcuccgccuguucgacuucugcaagcaggccauccagcggcugaaggcgcccgcccagaugagcauccagcucaucaacaaggccgugaacgcccugaucaacgaccagcugaucaugaagaaccaccuccgcgacaucauggggauccccuacugcaacuacuccaaguacugguaccugaaccacaccgugaccggcaagacgagccugcccaagugcuggcucgucuccaacggcagcuaccugaacgagacccacuucuccgacgacaucgagcagcaggccgacaacaugaucaccgagaugcugcagaaggaguacauggagcggcaggggaagacgccccucggccugguggaccuguucguguucagcaccuccuucuaccugaucagcaucuuccuccaccuggucaagaucccgacccaccgccacgugguggggaagcccugccccaagccccaccggcugaaccacaugggcaucugcuccugcggguucuacaagcagccgggcguccccgugcgcuggaagcggugaggacuaguuauaagacugacuagcccgaugggccucccaacgggcccuccuccccuccuugcaccgagauuaaucaaaggcucuuuucagagccaccaaaaaaaaaaaaaaaaaaaaaaaaaaaaaaaaaaaaaaaaaaaaaaaaaaaaaaaaaaaaaaaaagaauu

SEQ ID NO: 31076 - RNA, 1658 nt, Artificial Sequence
  mRNA product Design i-3 (hSL-A64-N5) comprising derived and/or modified sequence from LASV(Z0947-SLE-2011;Clade IV)__AIT17840__GPCmut6 (opt1)
aggagaaagcuuaccaugggccagaucgugaccuucuuccaggaggucccccacgugaucgaggaggugaugaacaucguccugaucgcccucagcauccuggccgugcugaaggggcucuacaacuucgcgaccugcggccugguggggcuggucacguuccuccugcugugcggccgcuccugcaccaucagccucuacaaggggguguacgagcugcagacccuggagcucaacauggagacccugaacaugugcaugccgcuguccugcaccaagaacaacagccaccacuacaucauggugggcaacgagaccggccucgagcugacccugacgaacaccuccaucaucaaccacaaguucugcaaccucagcgacgcccacaagaagaaccuguacgaccacgcccugauguccaucaucagcaccuuccaccucuccauccccaacuucaaccaguacgaggccaugagcugcgacuucaacgggggcaagaucuccguccaguacaaccugagccacuccuacgccggggacgcggccaaccacugcggcaccguggccaacggggugcugcagacguucaugcggauggccuggggcggcagcuacaucgcgcucgacuccgggcgcgaccggugggacugcaucaugaccagcuaccaguaccugaucauccagaacaccaccugggaggaccacugccaguucucccgccccagccccaucggcuaccuggggcuccugucccagcggacgcgcgacaucuacaucagccggcgccugcucggcaccuucaccuggacccugagcgacuccgagggcaaggacacgcccgggggcuacugccugacccgguggaugcucaucgaggccgagcugaagugcuucgggaacaccgccgucgccaagugcaacgagaagcacgacgaggaguucugcgacaugcugcgccucuucgacuucugcaagcaggccauccagcggcugaaggcgcccgcccagaugagcauccagcugaucaacaaggccgugaacgcccucaucaacgaccagcugaucaugaagaaccaccuccgcgacaucaugggcauccccuacugcaacuacuccaaguacugguaccugaaccacaccacgaccgggaagaccagccugcccaagugcuggcugguguccaacggcagcuaccucaacgagacccacuucuccgacgacaucgagcagcaggccgacaacaugaucacggagaugcugcagaaggaguacauggagcggcagggcaagaccccgcuggggcucgucgaccuguucguguucagcaccuccuucuaccugaucagcaucuuccugcaccucgugaagaucccgacccaccgccacaucgucggcaagcccugccccaagccccaccggcugaaccacauggggaucugcuccugcggccuguacaagcagccgggggugcccgugaaguggaagcgcugaggacuaguuauaagacugacuagcccgaugggccucccaacgggcccuccuccccuccuugcaccgagauuaaucaaaggcucuuuucagagccaccaaaaaaaaaaaaaaaaaaaaaaaaaaaaaaaaaaaaaaaaaaaaaaaaaaaaaaaaaaaaaaaaagaauu

SEQ ID NO: 31077 - RNA, 1658 nt, Artificial Sequence
  mRNA product Design i-3 (hSL-A64-N5) comprising derived and/or modified sequence from LASV(Josiah;Clade IV)__NP_694870__GPCmut6 (opt1)
aggagaaagcuuaccaugggccagaucgugaccuucuuccaggaggucccccacgugaucgaggaggugaugaacaucguccugaucgcccucagcgugcuggccgugcugaaggggcucuacaacuucgcgaccugcggccuggucgggcuggugacguuccuccugcugugcggccgcuccugcaccaccagccucuacaaggggguguacgagcugcagacccuggagcucaacauggagacgcugaacaugugcaugccgcuguccugcaccaagaacaacagccaccacuacaucauggucggcaacgagaccggccucgagcugacccugacgaacaccuccaucaucaaccacaaguucugcaaccucagcgacgcccacaagaagaaccuguacgaccacgcccugauguccaucaucagcaccuuccaccucuccauccccaacuucaaccaguacgaggccaugagcugcgacuucaacgggggcaagaucuccgugcaguacaaccugagccacuccuacgccggggacgcggccaaccacugcggcaccguggccaacgggguccugcagacguucaugcggauggccuggggcggcagcuacaucgcgcucgacuccgggcgcggcaacugggacugcaucaugaccagcuaccaguaccugaucauccagaacaccaccugggaggaccacugccaguucucccggcccagccccaucggguaccugggccuccugucccagcgcacgcgggacaucuacaucagccgccggcugcucggcaccuucaccuggacccugagcgacuccgaggggaaggacacgccgggcggguacugccugacccgcuggaugcucaucgaggccgagcugaagugcuucggcaacaccgccguggccaagugcaacgagaagcacgacgaggaguucugcgacaugcugcggcuguucgacuucugcaagcaggccauccagcgccugaaggcgcccgcccagaugagcauccagcugaucaacaaggccgugaacgcccucaucaacgaccagcugaucaugaagaaccaccuccgggacaucauggggauccccuacugcaacuacuccaaguacugguaccucaaccacaccacgaccggccgcaccagccugcccaagugcuggcuggucuccaacggcagcuaccucaacgagacccacuucuccgacgacaucgagcagcaggccgacaacaugaucacggagaugcugcagaaggaguacauggagcggcaggggaagaccccgcugggccugguggaccucuucguguucagcaccuccuucuaccugaucagcaucuuccugcaccucgucaagauccccacccaccgccacaucguggggaaguccugccccaagccccaccggcugaaccacaugggcaucugcagcugcgggcuguacaagcagccgggcgugcccgucaaguggaagcgcugaggacuaguuauaagacugacuagcccgaugggccucccaacgggcccuccuccccuccuugcaccgagauuaaucaaaggcucuuuucagagccaccaaaaaaaaaaaaaaaaaaaaaaaaaaaaaaaaaaaaaaaaaaaaaaaaaaaaaaaaaaaaaaaaagaauu

SEQ ID NO: 31078 - RNA, 1655 nt, Artificial Sequence
  mRNA product Design i-3 (hSL-A64-N5) comprising derived and/or modified sequence from LASV(LP;Clade I)__AAF86701__GPCmut6 (opt1)
aggagaaagcuuaccaugggccagaucaucaccuucuuccaggaggugccccacgucaucgaggaggugaugaacaucgugcugaucgcccucagccugcuggccauccucaaggggcuguacaacaucgcgaccugcggcaucaucgggcuggucgccuuccucuuccugugcggcaaguccugcagccugacgcucaagggcggguacgagcugcagacccuggagcucaacauggagacccugaacaugugcaugccgcuguccugcaccaagaacagcucccaccacuacauccgcgugggcaacgagacggggcucgagcugacccugaccaacaccagcaucaucaaccacaaguucugcaaccucuccgacgcccacaagaagaaccuguacgaccacgcccugaugagcaucaucuccacguuccaccucagcauccccaacuucaaccaguacgaggccauguccugcgacuucaacggcgggaagaucagcgugcaguacaaccugucccacagcuacgcgggcgacgccgccgagcacugcgggaccgucgccaacggcgugcugcagaccuucaugcggauggcguggggcgggcgcuacaucgcccucgacuccggcaaggggaacugggacugcaucaugaccagcuaccaguaccugaucauccagaacacgaccugggaggaccacugccaguucucccggcccagccccaucggcuaccugggccuccugucccagcgcacccgggacaucuacaucagccgccggcugcucgggaccuucacguggacccugagcgacuccgagggcaacgagacccccgggggcuacugccugacccgcuggaugcucaucgaggccgagcugaagugcuucgggaacacggccguggccaagugcaacgagaagcacgacgaggaguucugcgacaugcugcggcuguucgacuucugcaagcaggcgauccgccggcugaaggccccggcccagaugagcauccagcugaucaacaaggccgucaacgcccucaucaacgaccagcugaucaugaagaaccaccuccgcgacaucaugggcauccccuacugcaacuacuccaaguacugguaccucaaccacaccagcuccggccggaccagccugcccaagugcuggcugaucuccaacgggagcuaccucaacgagacccaguucuccgacgacaucgagcagcaggcggacaacaugaucacggagaugcugcagaaggaguacaucgagcgccagggcaagaccccgcuggggcugguggacaucuucaucuucagcaccuccuucuaccucaucagcaucuuccugcaccugaucaagauccccacccaccggcacaucgugggcaagcccugccccaagccgcaccgccucaaccacaugggggucugcuccugcggccuguacaagcaccccggcgugcccacgaaguggaagcggugaggacuaguuauaagacugacuagcccgaugggccucccaacgggcccuccuccccuccuugcaccgagauuaaucaaaggcucuuuucagagccaccaaaaaaaaaaaaaaaaaaaaaaaaaaaaaaaaaaaaaaaaaaaaaaaaaaaaaaaaaaaaaaaaagaauu

SEQ ID NO: 31079 - RNA, 1655 nt, Artificial Sequence
  mRNA product Design i-3 (hSL-A64-N5) comprising derived and/or modified sequence from LASV(803213;Clade II)__AAF86703__GPCmut6 (opt1)
aggagaaagcuuaccaugggccagaucaucaccuucuuccaggaggugccccacgucaucgaggaggugaugaacaucgugcugaucgcccucagccugcuggccauccucaaggggaucuacaacgucgcgaccugcggccuguucgggcugaucuccuuccuccugcugugcggccgcagcugcuccgugacguacaaggggguguacgagcuccagacccuggagcugaacauggccaaccucaacaugugcaugccgcugagcugcaccaagaacaacucccaccacuacaucauggucggcaacgagaccggccuggagcucacgcugaccaacaccagcaucaucaaccacaaguucugcaaccuguccgacgcccacaagaagaaccucuacgaccacgcccugaugagcaucaucuccaccuuccaccugagcauccccaacuucaaccaguacgaggccauguccugcgacuucaacgggggcaagaucagcgugcaguacaaccucucccacagcuucgcgguggacgccgccaaccacugcgggacgaucgccaacggcguccugcagaccuucaugcggauggcguggggcggguccuacaucgcccuggacagcggcaaggggaacugggacugcaucaugaccuccuaccaguaccucaucauccagaacaccacgugggaggaccacugccaguucagccgccccucccccaucggcuaccuggggcugcucagccagcggacccgcgacaucuacaucagccggcgccugcugggcaccuucaccuggacgcucuccgacagcgagggcaacgaggcccccgggggcuacugccugacccgguggaugcugaucgaggccgagcucaagugcuucgggaacaccgccguggcgaagugcaacgagaagcacgacgaggaguucugcgacaugcugcgccuguucgacuucugcaagcaggccaucaagcggcucaagaccccggcccagauguccauccagcugaucaacaaggccgugaacgcccugaucaacgaccagcucaucaugaagaaccaccuccgcgacaucaugggcauccccuacugcaacuacagccgguacugguaccugaaccacacggucaccgggaagaccucccugccccgcugcuggcuggugagcaacggcuccuaccugaacgagacccacuucagcgacgacaucgagcagcaggcggacaacaugaucacggagaugcuccagaaggaguacauggaccggcagggcaagaccccgcuggggcugguggaccuguucgucuucuccaccagcuucuaccucaucuccaucuuccugcaccuggugaagauccccacccaccgccacaucgugggcaagcccugccccaagccgcaccggcucaaccacauggggaucugcagcugcggccuguacaagcaccccgggguccccgugaaguggaagcgcugaggacuaguuauaagacugacuagcccgaugggccucccaacgggcccuccuccccuccuugcaccgagauuaaucaaaggcucuuuucagagccaccaaaaaaaaaaaaaaaaaaaaaaaaaaaaaaaaaaaaaaaaaaaaaaaaaaaaaaaaaaaaaaaaagaauu

SEQ ID NO: 31080 - RNA, 1655 nt, Artificial Sequence
  mRNA product Design i-3 (hSL-A64-N5) comprising derived and/or modified sequence from LASV(GA391;Clade III)__CAA36645__GPCmut6 (opt1)
aggagaaagcuuaccaugggccagaucgugaccuucuuccaggaggucccccacgugaucgaggaggugaugaacaucguccugaucgcccucagcauccuggccauccugaaggggcucuacaacguggcgaccugcggccugaucgggcuggugacguuccuccugcuguccggccgcagcugcucccucaucuacaaggggaccuacgagcugcagacccuggagcucaacauggagacccugaacaugugcaugccgcugagcugcacgaagaacaacucccaccacuacauccgggucggcaacgagaccggccucgagcugacccugaccaacacgagcauccucaaccacaaguucugcaaccuguccgacgcccacaagcgcaaccuguacgaccacagccucauguccaucaucagcaccuuccaccuguccauccccaacuucaaccaguacgaggccaugagcugcgacuucaacgggggcaagaucaccgugcaguacaaccugucccacagcuucgccguggacgccgcggggcacugcggcacccucgccaacgggguccugcagacguucaugcggauggccuggggcggcuccuacaucgcccuggacagcgggcgcggcaacugggacugcaucaugaccuccuaccaguaccucaucauccagaacaccaccugggacgaccacugccaguucagccggcccucccccaucggguaccugggccugcucagccagcgcacgcgggacaucuacaucagccgccggcugcugggcaccuucaccuggacccucuccgacagcgaggggaacgagacgccgggcggguacugccugacccgcuggaugcugaucgaggcggagcucaagugcuucggcaacaccgccguggccaagugcaacgagaagcacgacgaggaguucugcgacaugcugcggcuguucgacuucugcaagcaggccauccgccggcucaagacccccgcccagauguccauccagcugaucaacaaggcggugaacgcccugaucaacgaccagcucaucaugaagaaccaccuccgcgacaucauggggauccccuacugcaacuacagccgguacugguaccugaaccacacguccaccggcaagaccagccugccccgcugcuggcugaucuccaacggcagcuaccugaacgagaccaaguucuccgacgacaucgagcagcaggccgacaacaugaucacggagaugcugcagaaggaguacaucgaccggcaggggaagaccccgcucggccuggucgaccuguucguguucagcaccuccuucuaccucaucagcaucuuccugcaccuggugaagauccccacccaccgccacaucgucgggaagcccugccccaagccgcaccggcucaaccacaugggcaucugcuccugcgggcuguacaagcagcccggcgugcccgugcgcuggaagcggugaggacuaguuauaagacugacuagcccgaugggccucccaacgggcccuccuccccuccuugcaccgagauuaaucaaaggcucuuuucagagccaccaaaaaaaaaaaaaaaaaaaaaaaaaaaaaaaaaaaaaaaaaaaaaaaaaaaaaaaaaaaaaaaaagaauu

SEQ ID NO: 31081 - RNA, 1658 nt, Artificial Sequence
  mRNA product Design i-3 (hSL-A64-N5) comprising derived and/or modified sequence from LASV(AV;Clade V)__CCA30314__GPCmut6 (opt1)
aggagaaagcuuaccaugggccagaucgugaccuucuuccaggaggucccccacgugaucgaggaggugaugaacaucguccugaucgcccucagcauccuggccgugcugaaggggcucuacaacaucgcgaccugcggccugaucgggcugaucacguuccuccugcugugcggccgcuccugcagcuccaaccucuacaaggggguguacgagcugcagagccuggaccucaacauggagacccugaacaugugcaugccgcuguccugcaccaagaacaacagccaccacuacauccgggucggcaacgacaccggccucgagcugacgcugaccaacaccuccauccucaaccacaaguucugcaaccugagcgacgcccacaagaaggaccuguacgaccacgcccucauguccaucaucagcaccuuccaccuguccauccccaacuucaaccaguacgaggccaugagcugcgacuucaacgggggcaagaucuccgugcaguacaaccugagccacuccuacgccaucgacgcggccaaccacugcgggacgguggccaacggcauccuccagaccuucaugcgcauggccuggggcgggagcuacaucgcgcuggacuccggccgggggaacugggacugcaucaugaccagcuaccaguaccugaucauccagaacaccacgugggagaaccacugccaguucucccgccccagccccaucggcuaccucgggcugcugagccagcggacccgcgacaucuacaucucccggcgccuccugggcaccuucaccuggacgcugagcgacuccgagggcaacgccacccccgggggcuacugccucacccgguggaugcugaucgaggccgagcugaagugcuucgggaacaccgccgucgccaagugcaacgagaagcacgacgaggaguucugcgacaugcuccgccuguucgacuucugcaagcaggcgaucagccggcugaaguccccggcccagaugagcauccagcucaucaacaaggccgugaacgcccugaucaacgaccagcugaucaugaagaaccaccuccgcgacaucaugggcauccccuacugcaacuacuccaaguacugguaccugaaccacacgaucaccgggaagaccagccugcccaagugcuggcucguguccaacggcagcuaccugaacgagacccacuucuccgacgacaucgagcagcaggccgacaacaugaucacggagaugcugcagaaggaguacauggagcggcagggcaagaccccgcuggggcucgucgaccuguucguguucagcaccuccuucuaccugaucagcaucuuccuccgccuggugaagauccccacccaccggcacaucgucggcaagcccugccccaagccgcaccgccugaaccacauggggaucugcuccugcggccucuacaagcagcccggggugcccgugcgguggaagcgcugaggacuaguuauaagacugacuagcccgaugggccucccaacgggcccuccuccccuccuugcaccgagauuaaucaaaggcucuuuucagagccaccaaaaaaaaaaaaaaaaaaaaaaaaaaaaaaaaaaaaaaaaaaaaaaaaaaaaaaaaaaaaaaaaagaauu

SEQ ID NO: 31082 - RNA, 1655 nt, Artificial Sequence
  mRNA product Design i-3 (hSL-A64-N5) comprising derived and/or modified sequence from LASV(Togo/2016/7082;Clade VI)__AMR44577__GPCmut6 (opt1)
aggagaaagcuuaccaugggccagaucaucaccuucuuccaggaggugccccacgucaucgaggaggugaugaacaucgugcugaucgcccucagccugcuggccauccucaagggggucuacaacguggcgaccugcggcaucaucgggcuggugacguuccuguuccucugcggccgcuccugcagccugaucuacaagggguccuacgagcugcagacccucgagcugaacauggagacccugaacaugugcaugccgcucagcugcaccaagaacuccagccaccacuacauccgggucggcaacgagacgggccuggagcugacccucaccaacaccuccaucaucaaccacaaguucugcaaccugagcgacgcccacaagcgcaaccuguacgaccacgcccucauguccauccugagcacguuccaccuguccauccccaacuucaaccaguacgaggccaugagcugcgacuucaacgggggcaagaucuccgugcaguacaaccucagccacgccuacgcgguggacgccgccgagcacugcgggaccgucgccaacggcgugcugcagaccuucaugcggauggcguggggcggguccuacaucgcccuggacagcggccgcgggaacugggacugcaucaugaccuccuaccaguaccucaucauccagaacacgaccugggaggaccacugccaguucagccggcccucccccaucggcuaccuggggcugcucagccagcgcacccgggacaucuacaucagccgccggcugcugggcaccuucacguggacccucuccgacagcgagggcaacgagacccccgggggcuacugccugacccgcuggaugcugaucgaggccgagcucaagugcuucgggaacacggccguggccaagugcaacgagaagcacgacgaggaguucugcgacaugcugcggcuguucgacuucugcaagcaggcgauccagcgccucaaguccccggcccagaugagcauccagcugaucaacaaggccgucaacgcccugaucaacgaccagcucaucaugaagaaccaccuccgggacaugaugggcauccccuacugcaacuacuccaaguacugguaccugaaccacaccagcuccgggcgcaccagccugcccaagugcuggcugguguccaacggcagcuaccugaacgagacccacuucuccgacgacaucgagcagcaggccgacaacaugaucacggagaugcuccagaaggaguacaucgaccggcagggcaagaccccgcuggggcugguggaccuguucgucuucagcaccuccuucuaccucaucagcaucuuccugcaccugaucaagauccccacccaccgccacaucgugggcaagcccugccccaagccgcaccggcucaaccacauggggaucugcuccugcggccuguacaagcagcccggggugcccacgcgcuggaagcggugaggacuaguuauaagacugacuagcccgaugggccucccaacgggcccuccuccccuccuugcaccgagauuaaucaaaggcucuuuucagagccaccaaaaaaaaaaaaaaaaaaaaaaaaaaaaaaaaaaaaaaaaaaaaaaaaaaaaaaaaaaaaaaaaagaauu

SEQ ID NO: 31083 - RNA, 1655 nt, Artificial Sequence
  mRNA product Design i-3 (hSL-A64-N5) comprising derived and/or modified sequence from LASV(KAK-428;Clade n.d. (VII))__ANH09740__GPCmut6 (opt1)
aggagaaagcuuaccaugggccagaucgugaccuucuuccaggaggucccccacgugaucgaggaggugaugaacaucguccugaucgcccucagccugcuggccauccucaaggggcuguacaacuucgcgaccugcggcgugaucgggcugaucacguuccuccugcugugcggccgcuccugcagcgccaccuacaaggggcaguacgagcuccagacccuggagcugaacauggagucccucaacaugugcaugccgcugagcugcaccaagaacaacucccaccacuacauccgggccggcaacaacacgggccuggagcucacccugaccaacaccagcaucaucucccacaaguucugcaaccugagcgacgcccacaagaagaaccucuacgaccacacgcugauguccaucaucaccaccuuccaccugagcauccccaacuucaaccaguacgaggccauguccugcgacuucaacgggggcaagaucagcauccaguacaaccucucccacagcuacgcgggggacgccgcccagcacugcggcaccguggccaacgggguccugcagacguucaugcgcauggcguggggcggcuccuaccuggcccucgacagcgggcggcgcggcugggacugcaucaucuccagcuaccaguaccugaucauccagaacaccaccugggacgaccacugccaguucucccggcccagccccaucggguaccugggcuucgugagccagaagacccgcgacaucuacaucucccggcgccuccugggcacguucaccuggacccugagcgacuccgaggggcacgacaugccgggcggguacugccucacccgguggaugcugaucgaggccgaccugaagugcuucggcaacacggccguggccaagugcaacgagaagcacgacgaggaguucugcgacauguggcgccucuucgacuucugcaagcaggcgauccagcggcugaaggcccccgcccagaugaacauccagcugaucaacaaggccgucaacgcccucaucaacgaccagcugaugaugaagaaccaccuccgcgacaucauggggauccccuacugcaacuacagcaaguucugguaccugaacaacaccaccaccggccggacgucccugccccgcugcuggcugaucagcaacggcuccuaccucaacgagacccacuucagcgacgacaucgagcagcaggcggacaacaugaucaccgagaugcugcagaaggaguacauggaccggcaggggaagaccccgcugggccucguggaccuguucguguucuccacgagcuucuaccugaucaccaucuuccugcaccucgucaagauccccacccaccgccacaucguggggaagcccugccccaagccgcaccggcugaaccacaugggcaucugcuccugcgggcuguacaagcagcccggcgugcccguccgcuggaagcggugaggacuaguuauaagacugacuagcccgaugggccucccaacgggcccuccuccccuccuugcaccgagauuaaucaaaggcucuuuucagagccaccaaaaaaaaaaaaaaaaaaaaaaaaaaaaaaaaaaaaaaaaaaaaaaaaaaaaaaaaaaaaaaaaagaauu

SEQ ID NO: 31084 - RNA, 1655 nt, Artificial Sequence; identical to SEQ ID NO: 31078
  mRNA product Design i-3 (hSL-A64-N5) comprising derived and/or modified sequence from LASV(Pinneo-NIG-1969;Clade I)__AIT17836__GPCmut6 (opt1)

SEQ ID NO: 31085 - RNA, 1655 nt, Artificial Sequence
  mRNA product Design i-3 (hSL-A64-N5) comprising derived and/or modified sequence from LASV(ISTH0009-NIG-2011;Clade II)__AIT17404__GPCmut6 (opt1)
aggagaaagcuuaccaugggccagaucaucaccuucuuccaggaggugccccacgucaucgaggaggugaugaacaucgugcugaucgcccucagccugcuggccauccucaaggggaucuacaacgucgcgaccugcggccuguucgggcugguguccuuccuccugcugugcggccgcagcugcuccacgaccuacaaggggguguacgagcuccagacccuggagcuggacauggccagccucaacaugugcaugccgcuguccugcaccaagaacaacagccaccacuacaucauggucggcaacgagacgggccuggagcucacccugaccaacaccuccaucaucaaccacaaguucugcaaccugagcgacgcccacaagaagaaccucuacgaccacgcccugauguccaucaucagcacguuccaccuguccauccccaacuucaaccaguacgaggccaugagcugcgacuucaacgggggcaagaucuccgugcaguacaaccucagccacgcguacgccguggacgccgccaaccacugcgggaccaucgcgaacggcguccugcagaccuucaugcggauggccuggggcggguccuacaucgcccuggacagcggcaagggguccugggacugcaucaugaccagcuaccaguaccucaucauccagaacacgaccugggaggaccacugccaguucucccgccccagccccaucggcuaccuggggcugcucagccagcggacccgcgacaucuacaucucccggcgccugcugggcaccuucacguggacccucagcgacuccgagggcaacgagacccccgggggcuacugccugacccgguggaugcugaucgaggccgagcucaagugcuucgggaacacggccguggcgaagugcaacgagaagcacgacgaggaguucugcgacaugcugcgccuguucgacuucugcaagcaggccauccggcgccucaagaccccggcccagaugagcauccagcugaucaacaaggccgugaacgcccugaucaacgaccagcucaucaugaagaaccaccuccgggacaucaugggcauccccuacugcaacuacuccaaguacugguaccugaaccacaccgucaccgggaagacgagccugccccgcugcuggcugguguccaacggcagcuaccugaacgagacccacuucuccgacgacaucgagcagcaggcggacaacaugaucaccgagcuccugcagaaggaguacauggaccggcagggcaagaccccgcuggggcugguggaccucuucgucuucagcacguccuucuaccugaucagcaucuuccugcaccucaucaagauccccacccaccgccacaucaccggcaagcccugccccaagccgcaccggcugaaccacauggggaucugcuccugcggccuguacaagcaccccggggugcccgugaaguggaagcgcugaggacuaguuauaagacugacuagcccgaugggccucccaacgggcccuccuccccuccuugcaccgagauuaaucaaaggcucuuuucagagccaccaaaaaaaaaaaaaaaaaaaaaaaaaaaaaaaaaaaaaaaaaaaaaaaaaaaaaaaaaaaaaaaaagaauu

SEQ ID NO: 31086 - RNA, 1655 nt, Artificial Sequence
  mRNA product Design i-3 (hSL-A64-N5) comprising derived and/or modified sequence from LASV(ISTH2010-NIG-2012;Clade II)__AIT17482__GPCmut6 (opt1)
aggagaaagcuuaccaugggccagaucaucaccuucuuccaggaggugccccacgucaucgaggaggugaugaacaucgugcugaucgcccucagccugcuggccauccucaaggggaucuacaacgucgcgaccugcggccuguucgggcugguguccuuccuccugcugugcggccgcagcugcuccacgaccuacaaggggguguacgagcuccagacccuggagcuggacauggccagccucaacaugugcaugccgcuguccugcaccaagaacaacagccaccacuacaucauggucggcaacgagacgggccuggagcucacccugaccaacaccuccaucaucaaccacaaguucugcaaccugagcgacgcccacaagaagaaccucuacgaccacgcccugauguccaucaucagcacguuccaccuguccauccccaacuucaaccaguacgaggccaugagcugcgacuucaacgggggcaagaucuccgugcaguacaaccucagccacgcguacgccguggacgccgccaaccacugcgggaccaucgcgaacggcguccugcagaccuucaugcggauggccuggggcggguccuacaucgcccuggacagcggcaagggguccugggacugcaucaugaccagcuaccaguaccucaucauccagaacaucacgugggaggaccacugccaguucucccgccccagccccaucggcuaccuggggcugcucagccagcggacccgcgacaucuacaucucccggcgccugcugggcaccuucaccuggacgcucagcgacuccgagggcaacgagacccccgggggcuacugccugacccgguggaugcugaucgaggccgagcucaagugcuucgggaacaccgccguggcgaagugcaacgagaagcacgacgaggaguucugcgacaugcugcgccuguucgacuucugcaagcaggccauccggcgccucaagacgccggcccagaugagcauccagcugaucaacaaggccgugaacgcccugaucaacgaccagcucaucaugaagaaccaccuccgggacaucaugggcauccccuacugcaacuacuccaaguacugguaccugaaccacaccgucaccgggaagaccagccugccccgcugcuggcugguguccaacggcagcuaccugaacgagacgcacuucuccgacgacaucgagcagcaggcggacaacaugaucaccgagcuccugcagaaggaguacaucgaccggcagggcaagaccccgcuggggcugguggaccucuucgucuucagcaccuccuucuaccugaucagcaucuuccugcaccucgugaagauccccacgcaccgccacguggucggcaagcccugccccaagccgcaccggcugaaccacauggggaucugcuccugcggccuguacaagcaccccggggugcccgugaaguggaagcgcugaggacuaguuauaagacugacuagcccgaugggccucccaacgggcccuccuccccuccuugcaccgagauuaaucaaaggcucuuuucagagccaccaaaaaaaaaaaaaaaaaaaaaaaaaaaaaaaaaaaaaaaaaaaaaaaaaaaaaaaaaaaaaaaaagaauu

SEQ ID NO: 31087 - RNA, 1655 nt, Artificial Sequence
  mRNA product Design i-3 (hSL-A64-N5) comprising derived and/or modified sequence from LASV(Lassa virus/H.sapiens-wt/NGA/2015/ISTH_0543;Clade II)__AVO03639__GPCmut6 (opt1)
aggagaaagcuuaccaugggccagaucaucaccuucuuccaggaggugccccacgucaucgaggaggugaugaacaucgugcugaucgcccucagccugcuggccauccucaaggggaucuacaacgucgcgaccugcggccuguucgggcugguguccuuccuccugcugugcggccgcagcugcuccacgaccuacaaggggguguacgagcuccagacccuggagcuggacauggccaaccucaacaugugcaugccgcugagcugcaccaagaacaacucccaccacuacaucauggucggcaacgagacgggccuggagcucacccugaccaacaccagcaucaucaaccacaaguucugcaaccuguccgacgcccacaagaagaaccucuacgaccacgcccugaugagcaucaucuccacguuccaccugagcauccccaacuucaaccaguacgaggccauguccugcgacuucaacgggggcaagaucagcgugcaguacaaccucucccacaccuacgcgguggacgccgccaaccacugcgggaccaucgccaacggcguccugcagaccuucaugcggauggcguggggcgggagcuacaucgcccuggacuccggcaaggggagcugggacugcaucaugacguccuaccaguaccucgugauccagaacaccaccugggaggaccacugccaguucagccgccccucccccaucggcuaccuggggcugcucagccagcggacccgcgacaucuacaucagccggcgccugcugggcacguucaccuggacccucuccgacagcgagggcaacgagacccccgggggcuacugccugacgcgguggaugcugaucgaggccgagcucaagugcuucgggaacaccgccguggccaagugcaacgagaagcacgacgaggaguucugcgacaugcugcgccuguucgacuucugcaagcaggcgauccggcgccucaagaccccggcccagauguccauccagcugaucaacaaggccgucaacgcccugaucaacgaccagcucaucaugaagaaccaccuccgggacaucaugggcauccccuacugcaacuacagcaaguacugguaccugaaccacaccgugacggggaagaccucccugccccgcugcuggcuggugagcaacggcuccuaccugaacgagacccacuucagcgacgacaucgagcagcaggccgacaacaugaucaccgagcuccugcagaaggaguacaucgaccggcagggcaagacgccgcuggggcuggucgaccucuucguguucuccaccagcuucuaccugaucuccaucuuccugcaccucgugaagauccccacccaccgccacaucaccggcaagcccugccccaagccgcaccggcugaaccacauggggaucugcagcugcggccuguacaagcaccccgggguccccgugaaguggaagcgcugaggacuaguuauaagacugacuagcccgaugggccucccaacgggcccuccuccccuccuugcaccgagauuaaucaaaggcucuuuucagagccaccaaaaaaaaaaaaaaaaaaaaaaaaaaaaaaaaaaaaaaaaaaaaaaaaaaaaaaaaaaaaaaaaagaauu

SEQ ID NO: 31088 - RNA, 1655 nt, Artificial Sequence
  mRNA product Design i-3 (hSL-A64-N5) comprising derived and/or modified sequence from LASV(Lassa virus/H.sapiens-wt/NGA/2016/ISTH_0009;Clade II)__AVO03571__GPCmut6 (opt1)
aggagaaagcuuaccaugggccagaucaucaccuucuuccaggaggugccccacgucaucgaggaggugaugaacaucgugcugaucgcccucagccugcuggccauccucaaggggaucuacaacgucgcgaccugcggccugcuggggcucguguccuuccugcugcucugcggccgcagcugcuccacgaccuacaaggggguguacgagcugcagacccuggagcucgacauggccagccugaacaugugcaugccgcuguccugcaccaagaacaacagccaccacuacaucauggucggcaacgagacgggccucgagcugacccugaccaacaccuccaucaucaaccacaaguucugcaaccucagcgacgcccacaagaagaaccuguacgaccacgcccugauguccaucaucagcacguuccaccucuccauccccaacuucaaccaguacgaggccaugagcugcgacuucaacgggggccggaucuccgugcaguacaaccugagccacuccuacgcgguggacgccgccaaccacugcgggaccaucgccaacggcguccugcagaccuucaugcgcauggcguggggcgggagcuacaucgcccucgacuccggcaaggggagcugggacugcaucaugaccuccuaccaguaccugaucauccagaacacgaccugggaggaccacugccaguucagccggcccagccccaucggcuaccuggggcuccugucccagcgcacccgggacaucuacaucagccgccggcugcucggcaccuucacguggacccuguccgacagcgagggcaacgagacccccgggggcuacugccugacccgcuggaugcucaucgaggccgagcugaagugcuucgggaacacggccguggccaagugcaacgagaagcacgacgaggaguucugcgacaugcugcggcuguucgacuucugcaagcaggcgauccgccggcugaagaccccggcccagauguccauccagcugaucaacaaggccgugaacgcccucaucaacgaccagcugaucaugaagaaccaccuccgcgacaucaugggcauccccuacugcaacuacagcaaguacugguaccucaaccacaccgucaccgggaagacgucccugccccggugcuggcuggugagcaacggcuccuaccucaacgagacccacuucagcgacgacaucgagcagcaggccgacaacaugaucaccgagcugcugcagaaggaguacaucgaccgccagggcaagaccccgcuggggcucguggaccuguucgucuucuccacgagcuucuaccugaucuccaucuuccuccaccuggugaagauccccacccaccggcacaucaccggcaagcccugccccaagccgcaccgccugaaccacauggggaucugcagcugcggccucuacaaccaccccggggugcccgucaaguggaagcggugaggacuaguuauaagacugacuagcccgaugggccucccaacgggcccuccuccccuccuugcaccgagauuaaucaaaggcucuuuucagagccaccaaaaaaaaaaaaaaaaaaaaaaaaaaaaaaaaaaaaaaaaaaaaaaaaaaaaaaaaaaaaaaaaagaauu

SEQ ID NO: 31089 - RNA, 1655 nt, Artificial Sequence
  mRNA product Design i-3 (hSL-A64-N5) comprising derived and/or modified sequence from LASV(Lassa virus/H.sapiens-wt/NGA/2016/ISTH_0017;Clade II)__AVO03567__GPCmut6 (opt1)
aggagaaagcuuaccaugggccagaucaucaccuucuuccaggaggugccccacgucaucgaggaggugaugaacaucgugcugaucgcccucagccugcuggccauccucaaggggaucuacaacgucgcgaccugcggccuguucgggcugguguccuuccuccugcugugcggccgcagcugcuccacgaccuacaaggggguguacgagcuccagacccuggagcuggacauggccagccucaacaugugcaugccgcuguccugcaccaagaacaacagccaccacuacaucauggucggcaacgagacgggccuggagcucacccugaccaacaccuccaucaucaaccacaaguucugcaaccugagcgacgcccacaagaagaaccucuacgaccacgcccugauguccaucaucagcacguuccaccuguccauccccaacuucaaccaguacgaggccaugagcugcgacuucaacgggggcaagaucuccgugcaguacaaccucagccacaccuacgcgaucgacgccgccaaccacugcgggaccaucgccaacggcgugcugcagaccuucaugcggauggcguggggcggguccuacaucgcccuggacagcggcaagggguccugggacugcaucaugacgagcuaccaguaccucaucauccagaacaccaccugggaggaccacugccaguucucccgccccagccccaucggcuaccuggggcugcucagccagcggacccgcgacaucuacaucucccggcgccugcugggcacguucaccuggacccucagcgacuccgagggcaacgagacccccgggggcuacugccugacgcgguggaugcugaucgaggccgagcucaagugcuucgggaacaccgccgucgccaagugcaacgagaagcacgacgaggaguucugcgacaugcugcgccuguucgacuucugcaagcaggcgauccggcgccucaagaccccggcccagaugagcauccagcugaucaacaaggccgugaacgcccugaucaacgaccagcucaucaugaagaaccaccuccgggacaucaugggcauccccuacugcaacuacuccaaguacugguaccugaaccacaccgugacggggaagaccagccugccccgcugcuggcuggucuccaacggcagcuaccugaacgagacccacuucuccgacgacaucgagcagcaggccgacaacaugaucaccgagcuccugcagaaggaguacauggaccggcagggcaagacgccgcuggggcugguggaccucuucguguucagcaccuccuucuaccugaucagcaucuuccugcaccucguccgcauccccacccaccggcacgugaucggcaagcccugccccaagccgcaccgccugaaccacauggggaucugcuccugcggccuguacaagcaccccggggugcccgucaaguggaagcggugaggacuaguuauaagacugacuagcccgaugggccucccaacgggcccuccuccccuccuugcaccgagauuaaucaaaggcucuuuucagagccaccaaaaaaaaaaaaaaaaaaaaaaaaaaaaaaaaaaaaaaaaaaaaaaaaaaaaaaaaaaaaaaaaagaauu

SEQ ID NO: 31090 - RNA, 1655 nt, Artificial Sequence
  mRNA product Design i-3 (hSL-A64-N5) comprising derived and/or modified sequence from LASV(Lassa virus/H.sapiens-wt/NGA/2018/ISTH_0959;Clade II)__AVV65099__GPCmut6 (opt1)
aggagaaagcuuaccaugggccagaucaucaccuucuuccaggaggugccccacgucaucgaggaggugaugaacaucgugcugaucgcccucagccugcuggccauccucaaggggaucuacaacgucgugaccugcggccuguucgggcugguguccuuccuccugcugugcggccgcagcugcuccacgaccuacaagggggucuacgagcuccagacccuggagcuggacauggcgagccucaacaugugcaugccgcuguccugcaccaagaacaacagccaccacuacaucauggugggcaacgagacgggccuggagcucacccugaccaacaccuccaucaucaaccacaaguucugcaaccugagcgacgcccacaagaagaaccucuacgaccacgcccugauguccaucaucagcacguuccaccuguccauccccaacuucaaccaguacgaggccaugagcugcgacuucaacgggggcaagaucuccgugcaguacaaccucagccacgccuacgcgaucgacgccgccaaccacugcgggaccaucgccaacggcguccugcagaccuucaugcggauggcguggggcggguccuacaucgcccuggacagcggcaagggguccugggacugcaucaugaccagcuaccaguaccucaucauccagaacacgaccugggaggaccacugccaguucucccgccccagccccaucggcuaccuggggcugcucagccagcggacccgcgacaucuacaucucccggcgccugcugggcaccuucacguggacccucagcgacuccgagggcaacgagacccccgggggcuacugccugacccgguggaugcugaucgaggccgagcucaagugcuucgggaacacggccguggccaagugcaacgagaagcacgacgaggaguucugcgacaugcugcgccuguucgacuucugcaagcaggcgauccggcgccucaagaccccggcccagaugagcauccagcugaucaacaaggccgugaacgcccugaucaacgaccagcucaucaugaagaaccaccuccgggacaucaugggcauccccuacugcaacuacuccaaguacugguaccugaaccacaccgucaccgggaagacgagccugccccgcugcuggcugguguccaacggcagcuaccugaacgagacccacuucuccgacgacaucgagcagcaggccgacaacaugaucaccgagcuccugcagaaggaguacaucgaccggcagggcaagaccccgcuggggcugguggaccucuucgucuucagcacguccuucuaccugaucagcaucuuccugcaccucgugaagauccccacccaccgccacgugaucggcaagcccugccccaagccgcaccggcugaaccacauggggaucugcuccugcggccuguacaagcaccccgggguccccgugaaguggaagcgcugaggacuaguuauaagacugacuagcccgaugggccucccaacgggcccuccuccccuccuugcaccgagauuaaucaaaggcucuuuucagagccaccaaaaaaaaaaaaaaaaaaaaaaaaaaaaaaaaaaaaaaaaaaaaaaaaaaaaaaaaaaaaaaaaagaauu

SEQ ID NO: 31091 - RNA, 1655 nt, Artificial Sequence
  mRNA product Design i-3 (hSL-A64-N5) comprising derived and/or modified sequence from LASV(LASV003-NIG-2008;Clade II)__AIT17580__GPCmut6 (opt1)
aggagaaagcuuaccaugggccagaucaucaccuucuuccaggaggugccccacgucaucgaggaggugaugaacaucgugcugaucgcccucagccugcuggccauccucaaggggaucuacaacgucgcgaccugcggccuguucgggcugguguccuuccuccugcugugcggccgcagcugcuccacgaccuacaaggggguguacgagcuccagacccuggagcuggacauggccagccucaacaugugcaugccgcuguccugcaccaagaacaacagccaccacuacaucauggucggcaacgagacgggccuggagcucacccugaccaacaccuccaucaucaaccacaaguucugcaaccugagcgacgcccacaagaagaaccucuacgaccacgcccugauguccaucaucagcacguuccaccuguccauccccaacuucaaccaguacgaggccaugagcugcgacuucaacgggggcaagaucuccgugcaguacaaccucagccacaccuacgcgguggacgccgccaaccacugcgggaccaucgccaacggcguccugcagaccuucaugcggauggcguggggcggguccuacaucgcccuggacagcggcaagggguccugggacugcaucaugacgagcuaccaguaccucaucauccagaacaccaccugggaggaccacugccaguucucccgccccagccccaucggcuaccuggggcugcucagccagcggacccgcgacaucuacaucucccggcgccugcugggcacguucaccuggacccucagcgacuccgagagcaacgagaccccgggcggguacugccugacgcgguggaugcugaucgaggccgagcucaagugcuucggcaacaccgccguggccaagugcaacgagaagcacgacgaggaguucugcgacaugcugcgccuguucgacuucugcaagcaggcgauccggcgccucaaggcccccgcccagauguccauccagcugaucaacaaggccgugaacgcccugaucaacgaccagcucaucaugaagaaccaccuccgggacaucauggggauccccuacugcaacuacagcaaguacugguaccugaaccacaccgucaccggccgcacgucccugccccggugcuggcuggugagcaacggguccuaccugaacgagacccacuucagcgacgacaucgagcagcaggcggacaacaugaucaccgagcuccugcagaaggaguacauggaccgccagggcaagaccccgcugggccugguggaccucuucgucuucuccacgagcuucuaccugaucuccaucuuccugcaccucgugaagauccccacccaccggcacgugaucgggaagcccugccccaagccgcaccgccugaaccacaugggcaucugcagcugcgggcuguacaagcaccccggcguccccgugaaguggaagcggugaggacuaguuauaagacugacuagcccgaugggccucccaacgggcccuccuccccuccuugcaccgagauuaaucaaaggcucuuuucagagccaccaaaaaaaaaaaaaaaaaaaaaaaaaaaaaaaaaaaaaaaaaaaaaaaaaaaaaaaaaaaaaaaaagaauu

SEQ ID NO: 31092 - RNA, 1655 nt, Artificial Sequence
  mRNA product Design i-3 (hSL-A64-N5) comprising derived and/or modified sequence from LASV(LASV035-NIG-2009;Clade II)__AIT17588__GPCmut6 (opt1)
aggagaaagcuuaccaugggccagaucaucaccuucuuccaggaggugccccacgucaucgaggaggugaugaacaucgugcugaucgcccucagccugcuggccauccucaaggggaucuacaacgucgcgaccugcggccuguucgggcugguguccuuccuccugcugugcggccgcagcugcuccacgaccuacaaggggguguacgagcuccagacccuggagcuggacauggccagccucaacaugugcaugccgcuguccugcaccaagaacaacagccaccacuacaucauggucggcaacgagacgggccuggagcucacccugaccaacaccuccaucaucaaccacaaguucugcaaccugagcgacgcccacaagaagaaccucuacgaccacgcccugauguccaucaucagcacguuccaccuguccauccccaacuucaaccaguacgaggccaugagcugcgacuucaacgggggcaagaucuccgugcaguacaaccucagccacgcguacgccguggacgccgccaaccacugcgggaccaucgcgaacggcguccugcagaccuucaugcggauggccuggggcggguccuacaucgcccuggacagcggcaagggguccugggacugcaucaugaccagcuaccaguaccucaucauccagaacacgaccugggaggaccacugccaguucucccgccccagccccaucggcuaccuggggcugcucagccagcggacccgcgacaucuacaucucccggcgccugcugggcaccuucacguggacccucagcgacuccgagggcaacgagacccccgggggcuacugccugacccgguggaugcugaucgaggccgagcucaagugcuucgggaacacggccguggcgaagugcaacgagaagcacgacgaggaguucugcgacaugcugcgccuguucgacuucugcaagcaggccauccggcgccucaaggccccggcccagaugagcauccagcugaucaacaaggccgugaacgcgcugaucaacgaccagcucaucaugaagaaccaccuccgggacaucaugggcauccccuacugcaacuacuccaaguacugguaccugaaccacaccgucaccgggaagaccagccugccccgcugcuggcugguguccaacggcagcuaccugaacgagacgcacuucuccgacgacaucgagcagcaggccgacaacaugaucaccgagcuccugcagaaggaguacaucgaccggcagggcaagaccccgcuggggcugguggaccucuucgucuucagcaccuccuucuaccugaucagcaucuuccugcaccucgugaagauccccacgcaccgccacgugaucggcaagcccugccccaagccgcaccggcugaaccacauggggaucugcuccugcggccuguacaagcaccccgggguccccgugaaguggaagcgcugaggacuaguuauaagacugacuagcccgaugggccucccaacgggcccuccuccccuccuugcaccgagauuaaucaaaggcucuuuucagagccaccaaaaaaaaaaaaaaaaaaaaaaaaaaaaaaaaaaaaaaaaaaaaaaaaaaaaaaaaaaaaaaaaagaauu

SEQ ID NO: 31093 - RNA, 1655 nt, Artificial Sequence
  mRNA product Design i-3 (hSL-A64-N5) comprising derived and/or modified sequence from LASV(LASV1000-NIG-2009;Clade II)__AIT17782__GPCmut6 (opt1)
aggagaaagcuuaccaugggccagaucaucaccuucuuccaggaggugccccacgucaucgaggaggugaugaacaucgugcugaucgcccucagccugcuggccauccucaaggggaucuacaacgucgcgaccugcggccuguucgggcugguguccuuccuccugcugugcggccgcagcugcuccacgaccuacaaggggguguacgagcuccagacccuggagcuggacauggccagccucaacaugugcaugccgcuguccugcaccaagaacaacagccaccacuacaucauggucggcaacgagacgggccuggagcucacccugaccaacaccuccaucaucaaccacaaguucugcaaccugagcgacgcccacaagaagaaccucuacgaccacgcccugauguccaucaucagcacguuccaccuguccauccccaacuucaaccaguacgaggccaugagcugcgacuucaacgggggcaagaucuccgugcaguacaaccucagccacaccuacgcgguggacgccgccaaccacugcgggaccaucgccaacggcguccugcagaccuucaugcggauggcguggggcggguccuacaucgcccuggacagcggcaagggguccugggacugcaucaugacgagcuaccaguaccucaucauccagaacaccaccugggaggaccacugccaguucucccgccccagccccaucggcuaccuggggcugcucagccagcggacccgcgacaucuacaucucccggcgccugcugggcacguucaccuggacccucagcgacuccgagggcaacgagacccccgggggcuacugccugacgcgguggaugcugaucgaggccgagcucaagugcuucgggaacaccgccguggccaagugcaacgagaagcacgacgaggaguucugcgacaugcugcgccuguucgacuucugcaagcaggcgaucaagcggcucaagaccccggcccagaugagcauccagcugaucaacaaggccgugaacgcccugaucaacgaccagcucaucaugaagaaccaccuccgcgacaucaugggcauccccuacugcaacuacuccaaguacugguaccugaaccacaccgucacggggaagaccagccugccccggugcuggcugguguccaacggcagcuaccugaacgagacccacuucuccgacgacaucgagcagcaggccgacaacaugaucaccgagcuccugcagaaggaguacaucgaccgccagggcaagacgccgcuggggcugguggaccucuucgucuucagcaccuccuucuaccugaucagcaucuuccugcaccucgugaagauccccacccaccggcacguggucggcaagcccugccccaagccgcaccgccugaaccacauggggaucugcuccugcggccuguacaagcaccccggggugcccgugaaguggaagcggugaggacuaguuauaagacugacuagcccgaugggccucccaacgggcccuccuccccuccuugcaccgagauuaaucaaaggcucuuuucagagccaccaaaaaaaaaaaaaaaaaaaaaaaaaaaaaaaaaaaaaaaaaaaaaaaaaaaaaaaaaaaaaaaaagaauu

SEQ ID NO: 31094 - RNA, 1655 nt, Artificial Sequence
  mRNA product Design i-3 (hSL-A64-N5) comprising derived and/or modified sequence from LASV(LASV221-NIG-2010;Clade II)__AIT17624__GPCmut6 (opt1)
aggagaaagcuuaccaugggccagaucaucaccuucuuccaggaggugccccacgucaucgaggaggugaugaacaucgugcugaucgcccucagccugcuggccauccucaaggggaucuacaacgucgcgaccugcggccuguucgggcugguguccuuccuccugcugugcggccgcagcugcuccacgaccuacaaggggguguacgagcuccagacccuggagcuggacauggccagccucaacaugugcaugccgcuguccugcaccaagaacaacagccaccacuacaucauggucggcaacgagacgggccuggagcucacccugaccaacaccuccaucaucaaccacaaguucugcaaccugagcgacgcccacaagaagaaccucuacgaccacgcccugauguccaucaucagcacguuccaccuguccauccccaacuucaaccaguacgaggccaugagcugcgacuucaacgggggcaagaucuccgugcaguacaaccucagccacaccuacgcgaucgacgccgccaaccacugcgggaccaucgccaacggcgugcugcagaccuucaugcggauggcguggggcggguccuacaucgcccuggacagcggcaagggguccugggacugcaucaugacgagcuaccaguaccucaucauccagaacaccaccugggaggaccacugccaguucucccgccccagccccaucggcuaccuggggcugcucagccagcggacccgcgacaucuacaucucccggcgccugcugggcacguucaccuggacccucagcgacuccgagggcaacgagacccccgggggcuacugccugacgcgguggaugcugaucgaggccgagcucaagugcuucgggaacaccgccgucgccaagugcaacgagaagcacgacgaggaguucugcgacaugcugcgccuguucgacuucugcaagcaggcgauccggcgccucaagaccccggcccagaugagcauccagcugaucaacaaggccgugaacgcccugaucaacgaccagcucaucaugaagaaccaccuccgggacaucaugggcauccccuacugcaacuacuccaaguacugguaccugaaccacaccgugacggggaagaccagccugccccgcugcuggcuggucuccaacggcagcuaccugaacgagacccacuucuccgacgacaucgagcagcaggccgacaacaugaucaccgagaugcuccagaaggaguacauggaccggcagggcaagacgccgcuggggcugguggaccuguucguguucagcaccuccuucuaccucaucagcaucuuccugcaccuggucaagauccccacccaccgccacgugaucggcaagcccugccccaagccgcaccggcucaaccacauggggaucugcuccugcggccuguacaagcaccccggggugcccgucaaguggaagcgcugaggacuaguuauaagacugacuagcccgaugggccucccaacgggcccuccuccccuccuugcaccgagauuaaucaaaggcucuuuucagagccaccaaaaaaaaaaaaaaaaaaaaaaaaaaaaaaaaaaaaaaaaaaaaaaaaaaaaaaaaaaaaaaaaagaauu

SEQ ID NO: 31095 - RNA, 1655 nt, Artificial Sequence
  mRNA product Design i-3 (hSL-A64-N5) comprising derived and/or modified sequence from LASV(LASV237-NIG-2010;Clade II)__AIT17638__GPCmut6 (opt1)
aggagaaagcuuaccaugggccagaucaucaccuucuuccaggaggugccccacgucaucgaggaggugaugaacaucgugcugaucgcccucagccugcuggccauccucaaggggaucuacaacgucgcgaccugcggccuguucgggcugguguccuuccuccugcugugcggccgcagcugcuccacgaccuacaaggggguguacgagcuccagacccuggagcuggacauggccagccucaacaugugcaugccgcuguccugcaccaagaacaacagccaccacuacaucauggucggcaacgagacgggccuggagcucacccugaccaacaccuccaucaucaaccacaaguucugcaaccugagcgacgcccacaagaaggaccucuacgaccacgcccugauguccaucaucagcacguuccaccuguccauccccaacuucaaccaguacgaggccaugagcugcgacuucaacgggggcaagaucuccgugcaguacaaccucagccacaccuacgcgguggacgccgccaaccacugcgggaccaucgccaacggcguccugcagaccuucaugcggauggcguggggcggguccuacaucgcccuggacagcggcaagggguccugggacugcaucaugacgagcuaccaguaccucaucauccagaacaccaccugggaggaccacugccaguucucccgccccagccccaucggcuaccuggggcugcucagccagcggacccgcgacaucuacaucucccggcgccugcugggcacguucaccuggacccucagcgacuccgagggcaacgagacccccgggggcuacugccugacgcgguggaugcugaucgaggccgagcucaagugcuucgggaacaccgccguggccaagugcaacgagaagcacgacgaggaguucugcgacaugcugcgccuguucgacuucugcaagcaggcgauccggcgccucaagaccccggcccagaugagcauccagcugaucaacaaggccgugaacgcccugaucaacgaccagcucaucaugaagaaccaccuccgggacaucaugggcauccccuacugcaacuacuccaaguacugguaccugaaccacaccgucacggggaagaccagccugccccgcugcuggcugguguccaacggcagcuaccugaacgagacccacuucuccgacgacaucgagcagcaggccgacaacaugaucaccgagcuccugcagaaggaguacauggaccggcagggcaagacgccgcuggggcugguggaccucuucgucuucagcaccuccuucuaccugaucagcaucuuccugcaccucaucaagauccccacccaccgccacaucaccggcaagcccugccccaagccgcaccggcugaaccacauggggaucugcuccugcggccuguacaagcaccccggggugcccgugaaguggaagcgcugaggacuaguuauaagacugacuagcccgaugggccucccaacgggcccuccuccccuccuugcaccgagauuaaucaaaggcucuuuucagagccaccaaaaaaaaaaaaaaaaaaaaaaaaaaaaaaaaaaaaaaaaaaaaaaaaaaaaaaaaaaaaaaaaagaauu

SEQ ID NO: 31096 - RNA, 1655 nt, Artificial Sequence
  mRNA product Design i-3 (hSL-A64-N5) comprising derived and/or modified sequence from LASV(LASV253-NIG-2011;Clade II)__AIT17670__GPCmut6 (opt1)
aggagaaagcuuaccaugggccagaucaucaccuucuuccaggaggugccccacgucaucgaggaggugaugaacaucgugcugaucgcccucagccugcuggccauccucaaggggaucuacaacgucgcgaccugcggccuguucgggcugguguccuuccuccugcugugcggccgcagcugcuccacgaccuacaaggggguguacgagcuccagacccuggagcuggacauggccagccucaacaugugcaugccgcuguccugcaccaagaacaacagccaccacuacaucauggucggcaacgagacgggccuggagcucacccugaccaacaccuccaucaucaaccacaaguucugcaaccugagcgacgcccacaagaagaaccucuacgaccacgcccugauguccaucaucagcacguuccaccuguccauccccaacuucaaccaguacgaggccaugagcugcgacuucaacgggggcaagaucuccgugcaguacaaccucagccacaccuacgcgguggacgccgccaaccacugcgggaccaucgccaacggcguccugcagaccuucaugcggauggcguggggcggguccuacaucgcccuggacagcggcaagggguccugggacugcaucaugacgagcuaccaguaccucaucauccagaacaccaccugggaggaccacugccaguucucccgccccagccccaucggcuaccuggggcugcucagccagcggacccgcgacaucuacaucucccggcgccugcugggcacguucaccuggacccucagcgacuccgagggcaacgagacccccgggggcuacugccugacgcgguggaugcugaucgaggccgagcucaagugcuucgggaacaccgccguggccaagugcaacgagaagcacgacgaggaguucugcgacaugcugcgccuguucgacuucugcaagcaggcgauccggcgccucaaggccccggcccagaugagcauccagcugaucaacaaggccgugaacgcccugaucaacgaccagcucaucaugaagaaccaccuccgggacaucaugggcauccccuacugcaacuacuccaaguacugguaccugaaccacaccgucaccgggcgcacgagccugccccggugcuggcugguguccaacggcagcuaccugaacgagacccacuucuccgacgacaucgagcagcaggcggacaacaugaucaccgagcuccugcagaaggaguacaucgaccgccagggcaagaccccgcuggggcugguggaccucuucgucuucagcacguccuucuaccugaucagcaucuuccugcaccucgugaagauccccacccaccggcacaucaucggcaagcccugccccaagccgcaccgccugaaccacauggggaucugcuccugcggccuguacaagcaccccggggugcccgucaaguggaagcggugaggacuaguuauaagacugacuagcccgaugggccucccaacgggcccuccuccccuccuugcaccgagauuaaucaaaggcucuuuucagagccaccaaaaaaaaaaaaaaaaaaaaaaaaaaaaaaaaaaaaaaaaaaaaaaaaaaaaaaaaaaaaaaaaagaauu

SEQ ID NO: 31097 - RNA, 1655 nt, Artificial Sequence
  mRNA product Design i-3 (hSL-A64-N5) comprising derived and/or modified sequence from LASV(LASV254-NIG-2011;Clade II)__AIT17674__GPCmut6 (opt1)
aggagaaagcuuaccaugggccagaucaucaccuucuuccaggaggugccccacgucaucgaggaggugaugaacaucgugcugaucgcccucagccugcuggccauccucaaggggaucuacaacgucgcgaccugcggccuguucgggcugguguccuuccuccugcugugcggccgcagcugcuccacgaccuacaaggggguguacgagcuccagacccuggagcuggacaugaccaaccucaacaugugcaugccgcugagcugcacgaagaacaacucccaccacuacaucauggucggcaacgagaccggccuggagcucacccugaccaacacgagcaucaucaaccacaaguucugcaaccuguccgacgcccacaagaagaaccucuacaaccacgcccugaugagcaucaucuccaccuuccaccugagcauccccaacuucaaccaguacgaggccauguccugcgacuucaacgggggcaagaucagcgugcaguacaaccucucccacagcuacgccguggacgcggccaaccacugcgggaccaucgccaacggcguccugcagaccuucaugcggauggccuggggcggguccuacaucgcgcuggacagcggcaaggggaacugggacugcaucaugacguccuaccaguaccucaucauccagaacaccaccugggaggaccacugccaguucagccgccccucccccaucggcuaccuggggcugcucagccagcggacccgcgacaucuacaucagccggcgccugcugggcacguucaccuggacccucuccgacagcgagggcaacgagacccccgggggcuacugccugacgcgguggaugcugaucgaggccgagcucaagugcuucgggaacaccgccguggccaagugcaacgagaagcacgacgaggaguucugcgacaugcugcgccuguucgacuucugcaagcaggccauccggcgccucaagaccccggcgcaggccaacauccagcugaucaacaaggccgugaacgcccugaucaacgaccagcucaucaugaagaaccaccuccgggacaucaugggcauccccuacugcaacuacuccaaguacugguaccugaaccacaccgucacggggaagaccagccugccccgcugcuggcugguguccaacggcagcuaccugaacgagacccacuucuccgacgacaucgagcagcaggccgacaacaugaucaccgagcuccugcagaaggaguacauggaccggcagggcaagacgccgcuggggcugguggaccucuucgucuucagcaccuccuucuaccugaucagcaucuuccugcaccucgugaagauccccacccaccgccacgugaucggcaagcccugccccaagccgcaccggcugaaccacauggggaucugcuccugcggccuguacaagcaccccgggguccccgugaaguggaagcgcugaggacuaguuauaagacugacuagcccgaugggccucccaacgggcccuccuccccuccuugcaccgagauuaaucaaaggcucuuuucagagccaccaaaaaaaaaaaaaaaaaaaaaaaaaaaaaaaaaaaaaaaaaaaaaaaaaaaaaaaaaaaaaaaaagaauu

SEQ ID NO: 31098 - RNA, 1655 nt, Artificial Sequence
  mRNA product Design i-3 (hSL-A64-N5) comprising derived and/or modified sequence from LASV(Nig08-A19;Clade III)__ADU56618__GPCmut6 (opt1)
aggagaaagcuuaccaugggccagaucgugaccuucuuccaggaggucccccacgugaucgaggaggugaugaacaucguccugaucgcccucagcauccuggccauccugaaggggcucuacaacaucgcgaccugcggccugaucgggcuggugacguuccuccugcuguccggccgcagcugcuccaugaccuacaaggggguguacgagcuccagacccuggagcugaacaugaacacccucaacaugugcaugccgcugagcugcacgaagaacaacucccaccacuacaucauggucggcaacgagaccggccuggagcucacccugaccaacacgagccugcuccaccacaaguucugcaaccuguccgacgcccacaagaagaaccuguacgaccacacccucaugagcaucaucuccaccuuccaccugagcauccccaacuucaaccaguacgaggccauguccugcgacuucaacgggggcaagaucaccgugcaguacaaccugagccacuccuacgccaucgacgccgcgaaccacugcgggacgguggccaacggcguccuccagaccuucaugcggauggccuggggcgggagcuacaucgcccuggacuccggccgcgggaagugggacugcaucaugaccagcuaccaguaccugaucauccagaacaccacgugggaggaccacugccaguucucccggcccagccccaucggcuaccucgggcugcugucccagcgcacccgggacaucuacaucagccgccggcuccugggcaccuucaccuggacgcugagcgacuccgagggcaacgagacccccgggggcuacugccucacccgcuggaugcugaucgaggcggagcugaagugcuucgggaacaccgccguggccaagugcaacgagaagcacgacgaggaguucugcgacaugcuccggcuguucgacuucugcaagcaggccauccgccggcugaaggccccggcgcagaugagcauccagcucaucaacaaggccgugaacgcccugaucaacgaccagcugaucaugaagaaccaccuccgcgacaucaugggcauccccuacugcaacuacuccaaguacugguaccugaaccacacgagcaccgggcggaccucccugccccgcugcuggcucgucagcaacggcuccuaccugaacgagacccacuucagcgacgacaucgagcagcaggccgacaacaugaucacggagaugcugcagaaggaguaccuggaccggcagggcaagaccccgcucgggcugguggaccuguucguguucuccaccagcuucuaccucaucuccaucuuccugcaccuggucaagauccccacccaccgccacaucgugggcaagcccugccccaagccgcaccggcucaaccacauggggaucugcagcugcggccuguacaagcagcccggggugcccguccgcuggaagcggugaggacuaguuauaagacugacuagcccgaugggccucccaacgggcccuccuccccuccuugcaccgagauuaaucaaaggcucuuuucagagccaccaaaaaaaaaaaaaaaaaaaaaaaaaaaaaaaaaaaaaaaaaaaaaaaaaaaaaaaaaaaaaaaaagaauu

SEQ ID NO: 31099 - RNA, 1658 nt, Artificial Sequence
  mRNA product Design i-3 (hSL-A64-N5) comprising derived and/or modified sequence from LASV(G1180-SLE-2010;Clade IV)__AIT17168__GPCmut6 (opt1)
aggagaaagcuuaccaugggccagaucgugaccuucuuccaggaggucccccacgugaucgaggaggugaugaacaucguccugaucgcccucagcauccuggccgugcugaaggggcucuacaacuucgcgaccugcggccugguggggcugcucacguuccugcugcucugcggccgcuccugcaccgccagccgguacaagggggucuacgagcugcagacccuggagcucaacauggagacccugaacaugugcaugccgcuguccugcacgaagaacaacagccaccacuacaucauggugggcaacgagaccggccucgagcugacccugaccaacacguccaucaucaaccacaaguucugcaaccucagcgacgcccacaagaagaaccuguacgaccacgcccugauguccaucaucagcaccuuccaccucuccauccccaacuucaaccaguacgaggccaugagcugcgacuucaacgggggcaagaucuccgugcaguacaaccugagccacuccuacgcgggggacgccgccaaccacugcggcaccgucgccaacggggugcugcagaccuucaugcgcauggcguggggcggcagcuacaucgcccucgacuccgggcacggcagcugggacugcaucaugacguccuaccaguaccugaucauccagaacaccaccugggaggaccacugccaguucagccggcccucccccaucggguaccugggccuccugagccagcgcacccgggacaucuacaucagccgccggcugcucggcacguucaccuggacccuguccgacagcgaggggaaggacaccccgggcggguacugccugacgcgcuggaugcucaucgaggccgagcugaagugcuucggcaacaccgccguggccaagugcaacgagaagcacgacgaggaguucugcgacaugcugcggcuguucgacuucugcaagcaggcgauccagcgccugaaggcccccgcccagauguccauccagcugaucaacaaggccgucaacgcccucaucaacgaccagcugaucaugaagaaccaccuccgggacaucauggggauccccuacugcaacuacagcaaguacugguaccucaaccacaccaccacgggcaagaccucccugcccaagugcuggcuggugagcaacggcuccuaccucaacgagacccacuucagcgacgacaucgagcagcaggcggacaacaugaucaccgagaugcugcagaaggaguacauggagcgccaggggaagacgccgcugggccugguggaccucuucgucuucuccaccagcuucuaccugaucuccaucuuccugcaccucgugaagauccccacccaccggcacaucgugggcaagagcugccccaagccccaccgccugaaccacauggggaucugcuccugcgggcuguacaagcagccgggcguccccgugaaguggaagcggugaggacuaguuauaagacugacuagcccgaugggccucccaacgggcccuccuccccuccuugcaccgagauuaaucaaaggcucuuuucagagccaccaaaaaaaaaaaaaaaaaaaaaaaaaaaaaaaaaaaaaaaaaaaaaaaaaaaaaaaaaaaaaaaaagaauu

SEQ ID NO: 31100 - RNA, 1658 nt, Artificial Sequence
  mRNA product Design i-3 (hSL-A64-N5) comprising derived and/or modified sequence from LASV(G1442-SLE-2011;Clade IV)__AIT17180__GPCmut6 (opt1)
aggagaaagcuuaccaugggccagaucgugaccuucuuccaggaggucccccacgugaucgaggaggugaugaacaucguccugaucgcccucagcauccuggccgugcugaaggggcucuacaacguggcgaccugcggccugaucgggcuggucacguuccuccugcugugcggccgcuccugcaccaccacccucuacaaggggguguacgagcugcagacgcuggagcucaacauggagacccugaacaugugcaugccgcugagcugcaccaagaacaacucccaccacuacauccgggugggcaacgagaccggccucgagcugacgcugaccaacaccagcaucaucaaccacaaguucugcaaccucuccgacgcccacaagaagaaccuguacgaccacgcccugaugagcaucaucuccaccuuccaccucagcauccccaacuucaaccaguacgaggccauguccugcgacuucaacgggggcaagaucagcguccaguacaaccugucccacagcuacgccggggacgcggccaaccacugcggcacgguggccaacggggugcugcagaccuucaugcgcauggccuggggcggcuccuacaucgcgcucgacagcgggcggggcaacugggacugcaucaugaccuccuaccaguaccugaucauccagaacaccacgugggacgaccacugccaguucagccgccccucccccaucggguaccugggccuccugagccagcggacccgcgacgucuacaucucccggcgccugcucggcaccuucaccuggacgcugagcgacagcgaggggaaggacaccccgggcggguacugccugacccgguggaugcucaucgaggccgagcugaagugcuucggcaacaccgccguggccaagugcaacgagaagcacgacgaggaguucugcgacaugcugcgccucuucgacuucugcaagcaggccauccagcggcugaaggcgcccgcccagauguccauccagcugaucaacaaggccgugaacgcccucaucaacgaccagcugaucaugaagaaccaccuccgcgacaucauggggauccccuacugcaacuacagcaaguacugguaccugaacaacacggccaccggcaagaccucccugcccaagugcuggcugaucagcaacggcuccuaccucaacgagacccacuucagcgacgacaucgagcaggaggcggacaacaugaucacggagaugcugcagaaggaguacauggagcggcaggggaagaccccgcugggccuggucgaccucuucguguucuccaccagcuucuaccugaucuccaucuuccugcaccucgugaagauccccacccaccgccacaucgucggcaagagcugccccaagccccaccggcugaaccacauggggaucugcuccugcgggcuguacaagcagccgggcgugcccgugcgcuggaagcggugaggacuaguuauaagacugacuagcccgaugggccucccaacgggcccuccuccccuccuugcaccgagauuaaucaaaggcucuuuucagagccaccaaaaaaaaaaaaaaaaaaaaaaaaaaaaaaaaaaaaaaaaaaaaaaaaaaaaaaaaaaaaaaaaagaauu

SEQ ID NO: 31101 - RNA, 1658 nt, Artificial Sequence
  mRNA product Design i-3 (hSL-A64-N5) comprising derived and/or modified sequence from LASV(G3010-SLE-2013;Clade IV)__AIT17344__GPCmut6 (opt1)
aggagaaagcuuaccaugggccagaucgugaccuucuuccaggaggucccccacgugaucgaggaggugaugaacaucguccugaucgcccucagcauccuggccgugcugaaggggcucuacaacuucgcgaccugcggccugguggggcuggucacguuccuccugcugugcggccgcuccugcaccaccagccucuacaaggggguguacgagcugcagacccuggagcucaacauggagacgcugaacaugugcaugccgcuguccugcaccaagaacaacagccaccacuacaucauggugggcaacgagaccggccucgagcugacccugacgaacaccuccaucaucaaccacaaguucugcaaccucagcgacgcccacaagaagaaccuguacaaccacgcccugauguccaucaucagcaccuuccaccucuccauccccaacuucaaccaguacgaggccaugagcugcgacuucaacgggggcaagaucuccguccaguacaaccugagccacuccuacgccggggacgcggccagccacugcggcaccguggccaacggggugcugcagacguucaugcggauggccuggggcggcuccuacaucgcgcucgacagcggguacggcaagugggacugcaucaugaccuccuaccaguaccugaucauccagaacaccaccugggaggaccacugccaguucagccgccccucccccaucggguaccugggccuccugagccagcggacgcgcgacaucuacaucagccggcgccugcucggcaccuucaccuggacccuguccgacagcgaggggaaggacacgccgggcggguacugccugacccgguggaugcucaucgaggccgagcugaagugcuucggcaacaccgccgucgccaagugcaacgagaagcacgacgaggaguucugcgacaugcugcgccucuucgacuucugcaagcaggccauccagcggcugaagacccccgcgcagauguccauccagcugaucaacaaggccgugaacgcccucaucaacgaccagcugaucaugaagaaccaccuccgcgacaucauggggauccccuacugcaacuacagcaaguacugguaccugaaccacacgaccaccggcaagaccucccugcccaagugcuggcuggugagcaacggcuccuaccucaacgagacgcacuucagcgacgacaucgagcagcaggccgacaacaugaucaccgagaugcugcagaaggaguacauggagcggcaggggaagaccccgcugggccuggucgaccucuucguguucuccaccagcuucuaccugaucuccaucuuccugcaccucgugaagauccccacgcaccgccacaucgucggcaagagcugccccaagccccaccggcugaaccacauggggaucugcuccugcgggcuguacaagcagccgggcgugcccgugcgcuggaagcggugaggacuaguuauaagacugacuagcccgaugggccucccaacgggcccuccuccccuccuugcaccgagauuaaucaaaggcucuuuucagagccaccaaaaaaaaaaaaaaaaaaaaaaaaaaaaaaaaaaaaaaaaaaaaaaaaaaaaaaaaaaaaaaaaagaauu

SEQ ID NO: 31102 - RNA, 1658 nt, Artificial Sequence
  mRNA product Design i-3 (hSL-A64-N5) comprising derived and/or modified sequence from LASV(G502-SLE-2009;Clade IV)__AIT17126__GPCmut6 (opt1)
aggagaaagcuuaccaugggccagaucgugaccuucuuccaggaggucccccacgugaucgaggaggugaugaacaucguccugaucgcccucagcauccuggccgugcugaaggggcucuacaacuucgcgaccugcggccugguggggcugcucacguuccugcugcucugcggccgcuccugcaccaccgggcuguacaagggcgucuacgagcugcagacccucgagcugaacauggagacgcugaacaugugcaugccgcucagcugcaccaagaacaacucccaccacuacaucauggugggcaacgagaccgggcuggagcugacccucacgaacaccagcaucaucaaccacaaguucugcaaccuguccgacgcccacaagaagaaccuguacgaccacgcccucaugagcaucaucuccaccuuccaccugagcauccccaacuucaaccaguacgaggccauguccugcgacuucaacggcgggaagaucagcgugcaguacaaccugucccacagcuacgccggcgacgcggccgaccacugcgggaccgucgccaacggcgugcuccagacguucaugcggauggccuggggcggguccuacaucgcgcuggacagcggccgcgggcggugggacugcaucaugaccuccuaccaguaccugaucauccagaacaccaccugggaggaccacugccaguucagccgccccucccccaucggcuaccucggccugcugagccagcggacgcgcgacaucuacaucucccggcgccuccuggggaccuucaccuggacccugagcgacagcgagggcaaggacacgcccgggggcuacugccucacccgguggaugcugaucgaggccgagcugaagugcuucgggaacaccgccguggccaagugcaacgagaagcacgacgaggaguucugcgacaugcuccgccuguucgacuucugcaagcaggccauccagcggcugaaggcgccggcccagauguccauccagcucaucaacaaggccgucaacgcccugaucaacgaccagcuggugaugaagaaccaccuccgcgacaucaugggcauccccuacugcaacuacagccgguacugguaccugaaccacaccacgaccggccgcaccucccugcccaagugcuggcucgugagcaacggguccuaccugaacgagacccacuucagcgacgacaucgagcagcaggccgacaacaugaucacggagaugcugcagaaggaguacauggagcggcagggcaagaccccgcuggggcucgucgaccuguucguguucuccaccagcuucuaccugaucuccaucuuccuccaccuggugaagauccccacccaccgccacaucgucggcaagagcugccccaagccccaccggcugaaccacauggggaucugcuccugcggccucuacaagcagccgggcgugcccgugaaguggaagcgcugaggacuaguuauaagacugacuagcccgaugggccucccaacgggcccuccuccccuccuugcaccgagauuaaucaaaggcucuuuucagagccaccaaaaaaaaaaaaaaaaaaaaaaaaaaaaaaaaaaaaaaaaaaaaaaaaaaaaaaaaaaaaaaaaagaauu

SEQ ID NO: 31103 - RNA, 1658 nt, Artificial Sequence
  mRNA product Design i-3 (hSL-A64-N5) comprising derived and/or modified sequence from LASV(G733-SLE-2010;Clade IV)__AIT17154__GPCmut6 (opt1)
aggagaaagcuuaccaugggccagaucgugaccuucuuccaggaggucccccacgugaucgaggaggugaugaacaucguccugaucgcccucagcauccuggccgugcugaaggggcucuacaacuucgcgaccugcggcaucguggggcuggucuccuuccugcuccugugcggccgcagcugcacgaccucccuguacaaggggguguacgagcuccagacccuggagcugaacauggagacccucaacaugugcaugccgcugagcugcacgaagaacaacucccaccacuacaucauggugggcaacgagaccggccuggagcucacccugaccaacacgagcaucaucaaccacaaguucugcaaccuguccgacgcccacaagaagaaccucuacgaccacgcccugaugagcaucaucuccaccuuccaccugagcauccccaacuucaaccaguacgaggccauguccugcgacuucaacgggggcaagaucagcguccaguacaaccucucccacagcuacgccggggacgcggccaaccacugcggcaccaucgccaacggggugcugcagaccuucaugcggauggccuggggcggcuccuacaucgcgcuggacagcgggcgcgaccggugggacugcaucaugacguccuaccaguaccucaucauccagaacaccaccugggaggaccacugccaguucagccgccccucccccaucggcuaccuggggcugcucagccagcggacccgcgacaucuacaucagccggcgccugcugggcacguucaccuggacccucuccgacagcgagggcaaggacacccccgggggcuacugccugacgcgguggaugcugaucgaggccgagcucaagugcuucgggaacaccgccguggccaagugcaacgagaagcacgacgaggaguucugcgacaugcugcgccuguucgacuucugcaagcaggccauccagcggcucaaggcgccggcccagauguccauccagcugaucaacaaggccgucaacgcccugaucaacgaccagcucaucaugaagaaccaccuccgcgacaucaugggcauccccuacugcaacuacagcaaguacugguaccugaaccacaccaccacggggaagaccucccugcccaagugcuggcuggugagcaacggcuccuaccugaacgagacccacuucagcgacgacaucgagcagcaggccgacaacaugaucaccgagaugcuccagaaggaguacauggagcggcagggcaagacgccgcuggggcugguggaccuguucgucuucuccaccagcuucuaccucaucuccaucuuccugcaccuggugaagauccccacccaccgccacguggucggcaagagcugccccaagccccaccggcucaaccacauggggaucugcuccugcggccuguacgggcagccgggcgugcccgugaaguggaagcgcugaggacuaguuauaagacugacuagcccgaugggccucccaacgggcccuccuccccuccuugcaccgagauuaaucaaaggcucuuuucagagccaccaaaaaaaaaaaaaaaaaaaaaaaaaaaaaaaaaaaaaaaaaaaaaaaaaaaaaaaaaaaaaaaaagaauu

SEQ ID NO: 31104 - RNA, 1658 nt, Artificial Sequence
  mRNA product Design i-3 (hSL-A64-N5) comprising derived and/or modified sequence from MOPV/LASV reassortant(IGS-1;Clade IV)__AFY05576__GPCmut6 (opt1)
aggagaaagcuuaccaugggccagaucgugaccuucuuccaggaggucccccacgugaucgaggaggugaugaacaucguccugaucgcccucagcgugcuggccgugcugaaggggcucuacaacuucgcgaccugcggccuggucgggcuggugacguuccuccugcugugcggccgcuccugcaccaccagccucuacaaggggguguacgagcugcagacccuggagcucaacauggagacgcugaacaugugcaugccgcuguccugcaccaagaacaacagccaccacuacaucauggucggcaacgagaccggccucgagcugacccugacgaacaccuccaucaucaaccacaaguucugcaaccucagcgacgcccacaagaagaaccuguacgaccacgcccugauguccaucaucagcaccuuccaccucuccauccccaacuucaaccaguacgaggccaugagcugcgacuucaacgggggcaagaucuccgugcaguacaaccugagccacuccuacgccggggacgcggccaaccacugcggcaccguggccaacgggguccugcagacguucaugcggauggccuggggcggcagcuacaucgcgcucgacuccgggcgcggcaacugggacugcaucaugaccagcuaccaguaccugaucauccagaacaccaccugggaggaccacugccaguucucccggcccagccccaucggguaccugggccuccugucccagcgcacgcgggacaucuacaucagccgccggcugcucggcaccuucaccuggacccugagcgacuccgagggggaggacacgccgggcggguacugccugacccgcuggaugcucaucgaggccgagcugaagugcuucggcaacaccgccguggccaagugcaacgagaagcacgacgaggaguucugcgacaugcugcggcuguucgacuucugcaagcaggccauccagcgccugaaggcgcccgcccagaugagcauccagcugaucaacaaggccgugaacgcccucaucaacgaccagcugaucaugaagaaccaccuccgggacaucauggggauccccuacugcaacuacuccaaguacugguaccucaaccacaccacgaccggccgcaccagccugcccaagugcuggcuggucuccaacggcagcuaccucaacgagacccacuucuccgacgacaucgagcagcaggccgacaacaugaucacggagaugcugcagaaggaguacauggagcggcaggggaagaccccgcugggccugguggaccucuucguguucagcaccuccuucuaccugaucagcaucuuccugcaccucgucaagauccccacccaccgccacaucguggggaaguccugccccaagccccaccggcugaaccacaugggcaucugcagcugcgggcuguacaagcagccgggcgugcccgucaaguggaagcgcugaggacuaguuauaagacugacuagcccgaugggccucccaacgggcccuccuccccuccuugcaccgagauuaaucaaaggcucuuuucagagccaccaaaaaaaaaaaaaaaaaaaaaaaaaaaaaaaaaaaaaaaaaaaaaaaaaaaaaaaaaaaaaaaaagaauu

SEQ ID NO: 31105 - RNA, 1658 nt, Artificial Sequence
  mRNA product Design i-3 (hSL-A64-N5) comprising derived and/or modified sequence from LASV(LM765-SLE-2012;Clade IV)__AIT17814__GPCmut6 (opt1)
aggagaaagcuuaccaugggccagaucgugaccuucuuccaggaggucccccacgugaucgaggaggugaugaacaucguccugaucgcccucagcauccuggccgugcugaaggggcucuacaacuucgcgaccugcggccugguggggcuggucacguuccuccugcugugcggccgcuccugcaccaccagccucuacaaggggguguacgagcugcagacccuggagcucaacauggagacgcugaacaugugcaugccgcuguccugcaccaagaacaacagccaccacuacaucauggugggcaacgagaccggccucgagcugacccugacgaacaccuccaucaucgaccacaaguucugcaaccucagcgacgcccaccggaagaaccuguacgaccacgcccugauguccaucaucagcaccuuccaccucuccauccccaacuucaaccaguacgaggccaugagcugcgacuucaacgggggcaagaucuccguccaguacaaccugagccacuccuacgccaaggacgcggccgaccacugcgggaccguggccaacggcgugcugcagacguucaugcgcauggccuggggcgggagcuacaucgcgcucgacuccggccgggggcgcugggacugcaucaugaccagcuaccaguaccugaucauccagaacaccaccugggaggaccacugccaguucucccggcccagccccaucggcuaccuggggcuccugucccagcgcacgcgggacaucuacaucagccgccggcugcucggcaccuucaccuggacccugagcgacuccgagggcaaggacacgcccgggggcuacugccugacccgcuggaugcucaucgaggccgagcugaagugcuucgggaacaccgccgucgccaagugcaacgagaagcacgacgaggaguucugcgacaugcugcggcuguucgacuucugcaagcaggccauccagcgccugaaggcgccggcccagaugagcauccagcugaucaacaaggccgugaacgcccucaucaacgaccagcugaucaugaagaaccaccuccgggacaucaugggcauccccuacugcaacuacuccaaguacugguaccucaaccacaccacgaccgggaagaccagccugcccaagugcuggcugguguccaacggcagcuaccucaacgagacccacuucuccgacgacaucgagcagcaggccgacaacaugaucacggagaugcugcagaaggaguacauggagcgccagggcaagaccccgcuggggcuggucgaccucuucguguucagcaccuccuucuaccugaucagcaucuuccugcaccucgugaagauccccacccaccggcacaucgucggcaagcccugccccaagccgcaccgccugaaccacauggggaucugcuccugcggccuguacaagcagcccggggugcccgugaaguggaagcggugaggacuaguuauaagacugacuagcccgaugggccucccaacgggcccuccuccccuccuugcaccgagauuaaucaaaggcucuuuucagagccaccaaaaaaaaaaaaaaaaaaaaaaaaaaaaaaaaaaaaaaaaaaaaaaaaaaaaaaaaaaaaaaaaagaauu

SEQ ID NO: 31106 - RNA, 1658 nt, Artificial Sequence
  mRNA product Design i-3 (hSL-A64-N5) comprising derived and/or modified sequence from LASV(LM776-SLE-2012;Clade IV)__AIT17824__GPCmut6 (opt1)
aggagaaagcuuaccaugggccagaucgugaccuucuuccaggaggucccccacgugaucgaggaggugaugaacaucguccugaucgcccucagcauccuggccgugcugaaggggcucuacaacuucgcgaccugcggccugguggggcuggucacguuccuccugcugugcggccgcuccugcaccaccagcguguacaaggggguguacgagcuccagacccuggagcugaacauggagacgcucaacaugugcaugccgcuguccugcaccaagaacaacagccaccacuacaucauggucggcaacgagaccggccuggagcucacccugacgaacaccuccaucaucaaccacaaguucugcaaccugagcgacgcccacaagaagaaccucuacgaccacgcccugauguccaucaucagcaccuuccaccuguccauccccaacuucaaccaguacgaggccaugagcugcgacuucaacgggggcaagaucuccgugcaguacaaccucagccacuccuacgccggggacgcggccaaccacugcggcaccguggccaacgggguccugcagacguucaugcggauggccuggggcggcagcuacaucgcgcuggacuccgggcacggcaagugggacugcaucaugaccagcuaccaguaccucaucauccagaacaccaccugggaggaccacugccaguucucccgccccagccccaucggguaccugggccugcucucccagcggacgcgcgacaucuacaucagccggcgccugcugggcaccuucaccuggacccucagcgacuccgaggggaaggacacgccgggcggguacugccugacccgguggaugcugaucgaggccgagcucaagugcuucggcaacaccgccguggccaagugcaacgagaagcacgacgaggaguucugcgacaugcugcgccuguucgacuucugcaagcaggccauccagcggcucaaggcgcccgcccagaugagcauccagcugaucaacaaggccgugaacgcccugaucaacgaccagcucaucaugaagaaccaccuccgcgacaucauggggauccccuacugcaacuacuccaaguacugguaccugaaccacaccacgaccggcaagaccagccugcccaagugcuggcuggucuccaacggcagcuaccugaacgagacccacuucuccgacgacaucgagcagcaggccgacaacaugaucacggagaugcuccagaaggaguacauggagcggcaggggaagaccccgcugggccugguggaccuguucguguucagcaccuccuucuaccucaucagcaucuuccugcaccuggucaagauccccacccaccgccacaucguggggaaguccugccccaagccccaccggcucaaccacaugggcaucugcagcugcgggcuguacaagcagccgggcgugcccguccgcuggaagcggugaggacuaguuauaagacugacuagcccgaugggccucccaacgggcccuccuccccuccuugcaccgagauuaaucaaaggcucuuuucagagccaccaaaaaaaaaaaaaaaaaaaaaaaaaaaaaaaaaaaaaaaaaaaaaaaaaaaaaaaaaaaaaaaaagaauu

SEQ ID NO: 31107 - RNA, 1658 nt, Artificial Sequence
  mRNA product Design i-3 (hSL-A64-N5) comprising derived and/or modified sequence from LASV(Mad39;Clade IV)__ANH09722__GPCmut6 (opt1)
aggagaaagcuuaccaugggccagaucgugaccuucuuccaggaggucccccacgugaucgaggaggugaugaacaucguccugaucgcccucagcauccuggccgugcugaaggggcucuacaacguggcgaccugcggccugaucgggcuggucacguuccuccugcugugcggccgcuccugcaccaccacccucuacaaggggguguacgagcugcaggcccuggagcucaacauggagacgcugaacaugugcaugccgcugagcugcaccaagaacaacucccaccacuacauccgggugggcaacgagaccggccucgagcugacccugacgaacaccagccucaucaaccacaaguucugcaaccuguccgacgcccacaagaagaaccuguacgaccacgcccucaugagcaucaucuccaccuuccaccugagcauccccaacuucaaccaguacgaggccauguccugcgacuucaacgacgggaagaucagcguccaguacaaccugucccacaccuacgcgggcgacacggccaaccacugcgggaccguggccaacggcgugcuccagaccuucaugcgcauggccuggggcgggagcuacaucgcgcuggacuccggccgcgggggcugggacugcaucaugaccagcuaccaguaccugaucauccagaacacgaccugggaggaccacugccaguucucccggcccagccccaucggguaccucggccugcugucccagcggacccgcgacaucuacaucagccggcgccuccugggcaccuucacguggacccuguccgacagcgaggggaaggacaccccgggcggguacugccucacccgguggaugcugaucgaggccgagcugaagugcuucggcaacacggccgucgccaagugcaacgagaagcacgacgaggaguucugcgacaugcuccgccuguucgacuucugcaagcaggccauccagcggcugaaggcgcccgcccagaugagcauccagcucaucaacaaggccgugaacgcccugaucaacgaccagcugaucaugaagaaccaccuccgcgacaucauggggauccccuacugcaacuacuccaaguacugguaccugaaccacaccgugaccggcaagaccagccugcccaagugcuggcucgucuccaacggcagcuaccugaacgagacgcacuucuccgacgacaucgagcagcaggccgacaacaugaucaccgagaugcugcagaaggaguacauggagcggcaggggaagaccccgcugggccucguggaccuguucguguucagcaccuccuucuaccugaucagcaucuuccuccaccuggucaagauccccacgcaccgccacgugguggggaagcccugccccaagccgcaccggcugaaccacaugggcaucugcuccugcggguucuacaagcagcccggcguccccgugcgcuggaagcggugaggacuaguuauaagacugacuagcccgaugggccucccaacgggcccuccuccccuccuugcaccgagauuaaucaaaggcucuuuucagagccaccaaaaaaaaaaaaaaaaaaaaaaaaaaaaaaaaaaaaaaaaaaaaaaaaaaaaaaaaaaaaaaaaagaauu

SEQ ID NO: 31108 - RNA, 1658 nt, Artificial Sequence
  mRNA product Design i-3 (hSL-A64-N5) comprising derived and/or modified sequence from LASV(Z0947-SLE-2011;Clade IV)__AIT17840__GPCmut6 (opt1)
aggagaaagcuuaccaugggccagaucgugaccuucuuccaggaggucccccacgugaucgaggaggugaugaacaucguccugaucgcccucagcauccuggccgugcugaaggggcucuacaacuucgcgaccugcggccugguggggcuggucacguuccuccugcugugcggccgcuccugcaccaucagccucuacaaggggguguacgagcugcagacccuggagcucaacauggagacccugaacaugugcaugccgcuguccugcacgaagaacaacagccaccacuacaucauggugggcaacgagaccggccucgagcugacccugaccaacacguccaucaucaaccacaaguucugcaaccucagcgacgcccacaagaagaaccuguacgaccacgcccugauguccaucaucagcaccuuccaccucuccauccccaacuucaaccaguacgaggccaugagcugcgacuucaacgggggcaagaucuccguccaguacaaccugagccacuccuacgccggggacgcggccaaccacugcggcaccguggccaacggggugcugcagaccuucaugcggauggccuggggcggcagcuacaucgcgcucgacuccgggcgcgaccggugggacugcaucaugacgagcuaccaguaccugaucauccagaacaccaccugggaggaccacugccaguucucccgccccagccccaucggcuaccuggggcuccugucccagcggacccgcgacaucuacaucagccggcgccugcucggcacguucaccuggacccugagcgacuccgagggcaaggacacccccgggggcuacugccugacgcgguggaugcucaucgaggccgagcugaagugcuucgggaacaccgccgucgccaagugcaacgagaagcacgacgaggaguucugcgacaugcugcgccucuucgacuucugcaagcaggccauccagcggcugaaggcgccggcccagaugagcauccagcugaucaacaaggccgugaacgcccucaucaacgaccagcugaucaugaagaaccaccuccgcgacaucaugggcauccccuacugcaacuacuccaaguacugguaccugaaccacaccaccacggggaagaccagccugcccaagugcuggcugguguccaacggcagcuaccucaacgagacccacuucuccgacgacaucgagcagcaggccgacaacaugaucaccgagaugcugcagaaggaguacauggagcggcagggcaagacgccgcuggggcuggucgaccucuucguguucagcaccuccuucuaccugaucagcaucuuccugcaccucgugaagauccccacccaccgccacaucgucggcaagcccugccccaagccgcaccggcugaaccacauggggaucugcuccugcggccuguacaagcagcccggggugcccgugaaguggaagcgcugaggacuaguuauaagacugacuagcccgaugggccucccaacgggcccuccuccccuccuugcaccgagauuaaucaaaggcucuuuucagagccaccaaaaaaaaaaaaaaaaaaaaaaaaaaaaaaaaaaaaaaaaaaaaaaaaaaaaaaaaaaaaaaaaagaauu

SEQ ID NO: 31109 - RNA, 1658 nt, Artificial Sequence
  mRNA product Design i-3 (hSL-A64-N5) comprising derived and/or modified sequence from LASV(Josiah;Clade IV)__NP_694870__GPCmut6 (opt4)
aggagaaagcuuaccaugggccagaucgugaccuucuuccaggaggugccccacgugaucgaggaggugaugaacaucgugcugaucgcccugagcgugcuggccgugcugaagggccuguacaacuucgccaccugcggccuggugggccuggugaccuuccugcugcugugcggcagaagcugcaccaccagccuguacaagggcguguacgagcugcagacccuggagcugaacauggagacccugaacaugugcaugccccugagcugcaccaagaacaacagccaccacuacaucauggugggcaacgagaccggccuggagcugacccugaccaacaccagcaucaucaaccacaaguucugcaaccugagcgacgcccacaagaagaaccuguacgaccacgcccugaugagcaucaucagcaccuuccaccugagcauccccaacuucaaccaguacgaggccaugagcugcgacuucaacggcggcaagaucagcgugcaguacaaccugagccacagcuacgccggcgacgccgccaaccacugcggcaccguggccaacggcgugcugcagaccuucaugagaauggccuggggcggcagcuacaucgcccuggacagcggcagaggcaacugggacugcaucaugaccagcuaccaguaccugaucauccagaacaccaccugggaggaccacugccaguucagcagacccagccccaucggcuaccugggccugcugagccagagaaccagagacaucuacaucagcagaagacugcugggcaccuucaccuggacccugagcgacagcgagggcaaggacacccccggcggcuacugccugaccagauggaugcugaucgaggccgagcugaagugcuucggcaacaccgccguggccaagugcaacgagaagcacgacgaggaguucugcgacaugcugagacuguucgacuucugcaagcaggccauccagagacugaaggcccccgcccagaugagcauccagcugaucaacaaggccgugaacgcccugaucaacgaccagcugaucaugaagaaccaccugagagacaucaugggcauccccuacugcaacuacagcaaguacugguaccugaaccacaccaccaccggcagaaccagccugcccaagugcuggcuggugagcaacggcagcuaccugaacgagacccacuucagcgacgacaucgagcagcaggccgacaacaugaucaccgagaugcugcagaaggaguacauggagagacagggcaagaccccccugggccugguggaccuguucguguucagcaccagcuucuaccugaucagcaucuuccugcaccuggugaagauccccacccacagacacaucgugggcaagagcugccccaagccccacagacugaaccacaugggcaucugcagcugcggccuguacaagcagcccggcgugcccgugaaguggaagagaugaggacuaguuauaagacugacuagcccgaugggccucccaacgggcccuccuccccuccuugcaccgagauuaaucaaaggcucuuuucagagccaccaaaaaaaaaaaaaaaaaaaaaaaaaaaaaaaaaaaaaaaaaaaaaaaaaaaaaaaaaaaaaaaaagaauu

SEQ ID NO: 31110 - RNA, 1655 nt, Artificial Sequence
  mRNA product Design i-3 (hSL-A64-N5) comprising derived and/or modified sequence from LASV(LP;Clade I)__AAF86701__GPCmut6 (opt4)
aggagaaagcuuaccaugggccagaucaucaccuucuuccaggaggugccccacgugaucgaggaggugaugaacaucgugcugaucgcccugagccugcuggccauccugaagggccuguacaacaucgccaccugcggcaucaucggccugguggccuuccuguuccugugcggcaagagcugcagccugacccugaagggcggcuacgagcugcagacccuggagcugaacauggagacccugaacaugugcaugccccugagcugcaccaagaacagcagccaccacuacaucagagugggcaacgagaccggccuggagcugacccugaccaacaccagcaucaucaaccacaaguucugcaaccugagcgacgcccacaagaagaaccuguacgaccacgcccugaugagcaucaucagcaccuuccaccugagcauccccaacuucaaccaguacgaggccaugagcugcgacuucaacggcggcaagaucagcgugcaguacaaccugagccacagcuacgccggcgacgccgccgagcacugcggcaccguggccaacggcgugcugcagaccuucaugagaauggccuggggcggcagauacaucgcccuggacagcggcaagggcaacugggacugcaucaugaccagcuaccaguaccugaucauccagaacaccaccugggaggaccacugccaguucagcagacccagccccaucggcuaccugggccugcugagccagagaaccagagacaucuacaucagcagaagacugcugggcaccuucaccuggacccugagcgacagcgagggcaacgagacccccggcggcuacugccugaccagauggaugcugaucgaggccgagcugaagugcuucggcaacaccgccguggccaagugcaacgagaagcacgacgaggaguucugcgacaugcugagacuguucgacuucugcaagcaggccaucagaagacugaaggcccccgcccagaugagcauccagcugaucaacaaggccgugaacgcccugaucaacgaccagcugaucaugaagaaccaccugagagacaucaugggcauccccuacugcaacuacagcaaguacugguaccugaaccacaccagcagcggcagaaccagccugcccaagugcuggcugaucagcaacggcagcuaccugaacgagacccaguucagcgacgacaucgagcagcaggccgacaacaugaucaccgagaugcugcagaaggaguacaucgagagacagggcaagaccccccugggccugguggacaucuucaucuucagcaccagcuucuaccugaucagcaucuuccugcaccugaucaagauccccacccacagacacaucgugggcaagcccugccccaagccccacagacugaaccacaugggcgugugcagcugcggccuguacaagcaccccggcgugcccaccaaguggaagagaugaggacuaguuauaagacugacuagcccgaugggccucccaacgggcccuccuccccuccuugcaccgagauuaaucaaaggcucuuuucagagccaccaaaaaaaaaaaaaaaaaaaaaaaaaaaaaaaaaaaaaaaaaaaaaaaaaaaaaaaaaaaaaaaaagaauu

SEQ ID NO: 31111 - RNA, 1655 nt, Artificial Sequence
  mRNA product Design i-3 (hSL-A64-N5) comprising derived and/or modified sequence from LASV(803213;Clade II)__AAF86703__GPCmut6 (opt4)
aggagaaagcuuaccaugggccagaucaucaccuucuuccaggaggugccccacgugaucgaggaggugaugaacaucgugcugaucgcccugagccugcuggccauccugaagggcaucuacaacguggccaccugcggccuguucggccugaucagcuuccugcugcugugcggcagaagcugcagcgugaccuacaagggcguguacgagcugcagacccuggagcugaacauggccaaccugaacaugugcaugccccugagcugcaccaagaacaacagccaccacuacaucauggugggcaacgagaccggccuggagcugacccugaccaacaccagcaucaucaaccacaaguucugcaaccugagcgacgcccacaagaagaaccuguacgaccacgcccugaugagcaucaucagcaccuuccaccugagcauccccaacuucaaccaguacgaggccaugagcugcgacuucaacggcggcaagaucagcgugcaguacaaccugagccacagcuucgccguggacgccgccaaccacugcggcaccaucgccaacggcgugcugcagaccuucaugagaauggccuggggcggcagcuacaucgcccuggacagcggcaagggcaacugggacugcaucaugaccagcuaccaguaccugaucauccagaacaccaccugggaggaccacugccaguucagcagacccagccccaucggcuaccugggccugcugagccagagaaccagagacaucuacaucagcagaagacugcugggcaccuucaccuggacccugagcgacagcgagggcaacgaggcccccggcggcuacugccugaccagauggaugcugaucgaggccgagcugaagugcuucggcaacaccgccguggccaagugcaacgagaagcacgacgaggaguucugcgacaugcugagacuguucgacuucugcaagcaggccaucaagagacugaagacccccgcccagaugagcauccagcugaucaacaaggccgugaacgcccugaucaacgaccagcugaucaugaagaaccaccugagagacaucaugggcauccccuacugcaacuacagcagauacugguaccugaaccacaccgugaccggcaagaccagccugcccagaugcuggcuggugagcaacggcagcuaccugaacgagacccacuucagcgacgacaucgagcagcaggccgacaacaugaucaccgagaugcugcagaaggaguacauggacagacagggcaagaccccccugggccugguggaccuguucguguucagcaccagcuucuaccugaucagcaucuuccugcaccuggugaagauccccacccacagacacaucgugggcaagcccugccccaagccccacagacugaaccacaugggcaucugcagcugcggccuguacaagcaccccggcgugcccgugaaguggaagagaugaggacuaguuauaagacugacuagcccgaugggccucccaacgggcccuccuccccuccuugcaccgagauuaaucaaaggcucuuuucagagccaccaaaaaaaaaaaaaaaaaaaaaaaaaaaaaaaaaaaaaaaaaaaaaaaaaaaaaaaaaaaaaaaaagaauu

SEQ ID NO: 31112 - RNA, 1655 nt, Artificial Sequence
  mRNA product Design i-3 (hSL-A64-N5) comprising derived and/or modified sequence from LASV(GA391;Clade III)__CAA36645__GPCmut6 (opt4)
aggagaaagcuuaccaugggccagaucgugaccuucuuccaggaggugccccacgugaucgaggaggugaugaacaucgugcugaucgcccugagcauccuggccauccugaagggccuguacaacguggccaccugcggccugaucggccuggugaccuuccugcugcugagcggcagaagcugcagccugaucuacaagggcaccuacgagcugcagacccuggagcugaacauggagacccugaacaugugcaugccccugagcugcaccaagaacaacagccaccacuacaucagagugggcaacgagaccggccuggagcugacccugaccaacaccagcauccugaaccacaaguucugcaaccugagcgacgcccacaagagaaaccuguacgaccacagccugaugagcaucaucagcaccuuccaccugagcauccccaacuucaaccaguacgaggccaugagcugcgacuucaacggcggcaagaucaccgugcaguacaaccugagccacagcuucgccguggacgccgccggccacugcggcacccuggccaacggcgugcugcagaccuucaugagaauggccuggggcggcagcuacaucgcccuggacagcggcagaggcaacugggacugcaucaugaccagcuaccaguaccugaucauccagaacaccaccugggacgaccacugccaguucagcagacccagccccaucggcuaccugggccugcugagccagagaaccagagacaucuacaucagcagaagacugcugggcaccuucaccuggacccugagcgacagcgagggcaacgagacccccggcggcuacugccugaccagauggaugcugaucgaggccgagcugaagugcuucggcaacaccgccguggccaagugcaacgagaagcacgacgaggaguucugcgacaugcugagacuguucgacuucugcaagcaggccaucagaagacugaagacccccgcccagaugagcauccagcugaucaacaaggccgugaacgcccugaucaacgaccagcugaucaugaagaaccaccugagagacaucaugggcauccccuacugcaacuacagcagauacugguaccugaaccacaccagcaccggcaagaccagccugcccagaugcuggcugaucagcaacggcagcuaccugaacgagaccaaguucagcgacgacaucgagcagcaggccgacaacaugaucaccgagaugcugcagaaggaguacaucgacagacagggcaagaccccccugggccugguggaccuguucguguucagcaccagcuucuaccugaucagcaucuuccugcaccuggugaagauccccacccacagacacaucgugggcaagcccugccccaagccccacagacugaaccacaugggcaucugcagcugcggccuguacaagcagcccggcgugcccgugagauggaagagaugaggacuaguuauaagacugacuagcccgaugggccucccaacgggcccuccuccccuccuugcaccgagauuaaucaaaggcucuuuucagagccaccaaaaaaaaaaaaaaaaaaaaaaaaaaaaaaaaaaaaaaaaaaaaaaaaaaaaaaaaaaaaaaaaagaauu

SEQ ID NO: 31113 - RNA, 1658 nt, Artificial Sequence
  mRNA product Design i-3 (hSL-A64-N5) comprising derived and/or modified sequence from LASV(AV;Clade V)__CCA30314__GPCmut6 (opt4)
aggagaaagcuuaccaugggccagaucgugaccuucuuccaggaggugccccacgugaucgaggaggugaugaacaucgugcugaucgcccugagcauccuggccgugcugaagggccuguacaacaucgccaccugcggccugaucggccugaucaccuuccugcugcugugcggcagaagcugcagcagcaaccuguacaagggcguguacgagcugcagagccuggaccugaacauggagacccugaacaugugcaugccccugagcugcaccaagaacaacagccaccacuacaucagagugggcaacgacaccggccuggagcugacccugaccaacaccagcauccugaaccacaaguucugcaaccugagcgacgcccacaagaaggaccuguacgaccacgcccugaugagcaucaucagcaccuuccaccugagcauccccaacuucaaccaguacgaggccaugagcugcgacuucaacggcggcaagaucagcgugcaguacaaccugagccacagcuacgccaucgacgccgccaaccacugcggcaccguggccaacggcauccugcagaccuucaugagaauggccuggggcggcagcuacaucgcccuggacagcggcagaggcaacugggacugcaucaugaccagcuaccaguaccugaucauccagaacaccaccugggagaaccacugccaguucagcagacccagccccaucggcuaccugggccugcugagccagagaaccagagacaucuacaucagcagaagacugcugggcaccuucaccuggacccugagcgacagcgagggcaacgccacccccggcggcuacugccugaccagauggaugcugaucgaggccgagcugaagugcuucggcaacaccgccguggccaagugcaacgagaagcacgacgaggaguucugcgacaugcugagacuguucgacuucugcaagcaggccaucagcagacugaagagccccgcccagaugagcauccagcugaucaacaaggccgugaacgcccugaucaacgaccagcugaucaugaagaaccaccugagagacaucaugggcauccccuacugcaacuacagcaaguacugguaccugaaccacaccaucaccggcaagaccagccugcccaagugcuggcuggugagcaacggcagcuaccugaacgagacccacuucagcgacgacaucgagcagcaggccgacaacaugaucaccgagaugcugcagaaggaguacauggagagacagggcaagaccccccugggccugguggaccuguucguguucagcaccagcuucuaccugaucagcaucuuccugagacuggugaagauccccacccacagacacaucgugggcaagcccugccccaagccccacagacugaaccacaugggcaucugcagcugcggccuguacaagcagcccggcgugcccgugagauggaagagaugaggacuaguuauaagacugacuagcccgaugggccucccaacgggcccuccuccccuccuugcaccgagauuaaucaaaggcucuuuucagagccaccaaaaaaaaaaaaaaaaaaaaaaaaaaaaaaaaaaaaaaaaaaaaaaaaaaaaaaaaaaaaaaaaagaauu

SEQ ID NO: 31114 - RNA, 1655 nt, Artificial Sequence
  mRNA product Design i-3 (hSL-A64-N5) comprising derived and/or modified sequence from LASV(Togo/2016/7082;Clade VI)__AMR44577__GPCmut6 (opt4)
aggagaaagcuuaccaugggccagaucaucaccuucuuccaggaggugccccacgugaucgaggaggugaugaacaucgugcugaucgcccugagccugcuggccauccugaagggcguguacaacguggccaccugcggcaucaucggccuggugaccuuccuguuccugugcggcagaagcugcagccugaucuacaagggcagcuacgagcugcagacccuggagcugaacauggagacccugaacaugugcaugccccugagcugcaccaagaacagcagccaccacuacaucagagugggcaacgagaccggccuggagcugacccugaccaacaccagcaucaucaaccacaaguucugcaaccugagcgacgcccacaagagaaaccuguacgaccacgcccugaugagcauccugagcaccuuccaccugagcauccccaacuucaaccaguacgaggccaugagcugcgacuucaacggcggcaagaucagcgugcaguacaaccugagccacgccuacgccguggacgccgccgagcacugcggcaccguggccaacggcgugcugcagaccuucaugagaauggccuggggcggcagcuacaucgcccuggacagcggcagaggcaacugggacugcaucaugaccagcuaccaguaccugaucauccagaacaccaccugggaggaccacugccaguucagcagacccagccccaucggcuaccugggccugcugagccagagaaccagagacaucuacaucagcagaagacugcugggcaccuucaccuggacccugagcgacagcgagggcaacgagacccccggcggcuacugccugaccagauggaugcugaucgaggccgagcugaagugcuucggcaacaccgccguggccaagugcaacgagaagcacgacgaggaguucugcgacaugcugagacuguucgacuucugcaagcaggccauccagagacugaagagccccgcccagaugagcauccagcugaucaacaaggccgugaacgcccugaucaacgaccagcugaucaugaagaaccaccugagagacaugaugggcauccccuacugcaacuacagcaaguacugguaccugaaccacaccagcagcggcagaaccagccugcccaagugcuggcuggugagcaacggcagcuaccugaacgagacccacuucagcgacgacaucgagcagcaggccgacaacaugaucaccgagaugcugcagaaggaguacaucgacagacagggcaagaccccccugggccugguggaccuguucguguucagcaccagcuucuaccugaucagcaucuuccugcaccugaucaagauccccacccacagacacaucgugggcaagcccugccccaagccccacagacugaaccacaugggcaucugcagcugcggccuguacaagcagcccggcgugcccaccagauggaagagaugaggacuaguuauaagacugacuagcccgaugggccucccaacgggcccuccuccccuccuugcaccgagauuaaucaaaggcucuuuucagagccaccaaaaaaaaaaaaaaaaaaaaaaaaaaaaaaaaaaaaaaaaaaaaaaaaaaaaaaaaaaaaaaaaagaauu

SEQ ID NO: 31115 - RNA, 1655 nt, Artificial Sequence
  mRNA product Design i-3 (hSL-A64-N5) comprising derived and/or modified sequence from LASV(KAK-428;Clade n.d. (VII))__ANH09740__GPCmut6 (opt4)
aggagaaagcuuaccaugggccagaucgugaccuucuuccaggaggugccccacgugaucgaggaggugaugaacaucgugcugaucgcccugagccugcuggccauccugaagggccuguacaacuucgccaccugcggcgugaucggccugaucaccuuccugcugcugugcggcagaagcugcagcgccaccuacaagggccaguacgagcugcagacccuggagcugaacauggagagccugaacaugugcaugccccugagcugcaccaagaacaacagccaccacuacaucagagccggcaacaacaccggccuggagcugacccugaccaacaccagcaucaucagccacaaguucugcaaccugagcgacgcccacaagaagaaccuguacgaccacacccugaugagcaucaucaccaccuuccaccugagcauccccaacuucaaccaguacgaggccaugagcugcgacuucaacggcggcaagaucagcauccaguacaaccugagccacagcuacgccggcgacgccgcccagcacugcggcaccguggccaacggcgugcugcagaccuucaugagaauggccuggggcggcagcuaccuggcccuggacagcggcagaagaggcugggacugcaucaucagcagcuaccaguaccugaucauccagaacaccaccugggacgaccacugccaguucagcagacccagccccaucggcuaccugggcuucgugagccagaagaccagagacaucuacaucagcagaagacugcugggcaccuucaccuggacccugagcgacagcgagggccacgacaugcccggcggcuacugccugaccagauggaugcugaucgaggccgaccugaagugcuucggcaacaccgccguggccaagugcaacgagaagcacgacgaggaguucugcgacauguggagacuguucgacuucugcaagcaggccauccagagacugaaggcccccgcccagaugaacauccagcugaucaacaaggccgugaacgcccugaucaacgaccagcugaugaugaagaaccaccugagagacaucaugggcauccccuacugcaacuacagcaaguucugguaccugaacaacaccaccaccggcagaaccagccugcccagaugcuggcugaucagcaacggcagcuaccugaacgagacccacuucagcgacgacaucgagcagcaggccgacaacaugaucaccgagaugcugcagaaggaguacauggacagacagggcaagaccccccugggccugguggaccuguucguguucagcaccagcuucuaccugaucaccaucuuccugcaccuggugaagauccccacccacagacacaucgugggcaagcccugccccaagccccacagacugaaccacaugggcaucugcagcugcggccuguacaagcagcccggcgugcccgugagauggaagagaugaggacuaguuauaagacugacuagcccgaugggccucccaacgggcccuccuccccuccuugcaccgagauuaaucaaaggcucuuuucagagccaccaaaaaaaaaaaaaaaaaaaaaaaaaaaaaaaaaaaaaaaaaaaaaaaaaaaaaaaaaaaaaaaaagaauu

SEQ ID NO: 31116 - RNA, 1655 nt, Artificial Sequence; identical to SEQ ID NO: 31110
  mRNA product Design i-3 (hSL-A64-N5) comprising derived and/or modified sequence from LASV(Pinneo-NIG-1969;Clade I)__AIT17836__GPCmut6 (opt4)

SEQ ID NO: 31117 - RNA, 1655 nt, Artificial Sequence
  mRNA product Design i-3 (hSL-A64-N5) comprising derived and/or modified sequence from LASV(ISTH0009-NIG-2011;Clade II)__AIT17404__GPCmut6 (opt4)
aggagaaagcuuaccaugggccagaucaucaccuucuuccaggaggugccccacgugaucgaggaggugaugaacaucgugcugaucgcccugagccugcuggccauccugaagggcaucuacaacguggccaccugcggccuguucggccuggugagcuuccugcugcugugcggcagaagcugcagcaccaccuacaagggcguguacgagcugcagacccuggagcuggacauggccagccugaacaugugcaugccccugagcugcaccaagaacaacagccaccacuacaucauggugggcaacgagaccggccuggagcugacccugaccaacaccagcaucaucaaccacaaguucugcaaccugagcgacgcccacaagaagaaccuguacgaccacgcccugaugagcaucaucagcaccuuccaccugagcauccccaacuucaaccaguacgaggccaugagcugcgacuucaacggcggcaagaucagcgugcaguacaaccugagccacgccuacgccguggacgccgccaaccacugcggcaccaucgccaacggcgugcugcagaccuucaugagaauggccuggggcggcagcuacaucgcccuggacagcggcaagggcagcugggacugcaucaugaccagcuaccaguaccugaucauccagaacaccaccugggaggaccacugccaguucagcagacccagccccaucggcuaccugggccugcugagccagagaaccagagacaucuacaucagcagaagacugcugggcaccuucaccuggacccugagcgacagcgagggcaacgagacccccggcggcuacugccugaccagauggaugcugaucgaggccgagcugaagugcuucggcaacaccgccguggccaagugcaacgagaagcacgacgaggaguucugcgacaugcugagacuguucgacuucugcaagcaggccaucagaagacugaagacccccgcccagaugagcauccagcugaucaacaaggccgugaacgcccugaucaacgaccagcugaucaugaagaaccaccugagagacaucaugggcauccccuacugcaacuacagcaaguacugguaccugaaccacaccgugaccggcaagaccagccugcccagaugcuggcuggugagcaacggcagcuaccugaacgagacccacuucagcgacgacaucgagcagcaggccgacaacaugaucaccgagcugcugcagaaggaguacauggacagacagggcaagaccccccugggccugguggaccuguucguguucagcaccagcuucuaccugaucagcaucuuccugcaccugaucaagauccccacccacagacacaucaccggcaagcccugccccaagccccacagacugaaccacaugggcaucugcagcugcggccuguacaagcaccccggcgugcccgugaaguggaagagaugaggacuaguuauaagacugacuagcccgaugggccucccaacgggcccuccuccccuccuugcaccgagauuaaucaaaggcucuuuucagagccaccaaaaaaaaaaaaaaaaaaaaaaaaaaaaaaaaaaaaaaaaaaaaaaaaaaaaaaaaaaaaaaaaagaauu

SEQ ID NO: 31118 - RNA, 1655 nt, Artificial Sequence
  mRNA product Design i-3 (hSL-A64-N5) comprising derived and/or modified sequence from LASV(ISTH2010-NIG-2012;Clade II)__AIT17482__GPCmut6 (opt4)
aggagaaagcuuaccaugggccagaucaucaccuucuuccaggaggugccccacgugaucgaggaggugaugaacaucgugcugaucgcccugagccugcuggccauccugaagggcaucuacaacguggccaccugcggccuguucggccuggugagcuuccugcugcugugcggcagaagcugcagcaccaccuacaagggcguguacgagcugcagacccuggagcuggacauggccagccugaacaugugcaugccccugagcugcaccaagaacaacagccaccacuacaucauggugggcaacgagaccggccuggagcugacccugaccaacaccagcaucaucaaccacaaguucugcaaccugagcgacgcccacaagaagaaccuguacgaccacgcccugaugagcaucaucagcaccuuccaccugagcauccccaacuucaaccaguacgaggccaugagcugcgacuucaacggcggcaagaucagcgugcaguacaaccugagccacgccuacgccguggacgccgccaaccacugcggcaccaucgccaacggcgugcugcagaccuucaugagaauggccuggggcggcagcuacaucgcccuggacagcggcaagggcagcugggacugcaucaugaccagcuaccaguaccugaucauccagaacaucaccugggaggaccacugccaguucagcagacccagccccaucggcuaccugggccugcugagccagagaaccagagacaucuacaucagcagaagacugcugggcaccuucaccuggacccugagcgacagcgagggcaacgagacccccggcggcuacugccugaccagauggaugcugaucgaggccgagcugaagugcuucggcaacaccgccguggccaagugcaacgagaagcacgacgaggaguucugcgacaugcugagacuguucgacuucugcaagcaggccaucagaagacugaagacccccgcccagaugagcauccagcugaucaacaaggccgugaacgcccugaucaacgaccagcugaucaugaagaaccaccugagagacaucaugggcauccccuacugcaacuacagcaaguacugguaccugaaccacaccgugaccggcaagaccagccugcccagaugcuggcuggugagcaacggcagcuaccugaacgagacccacuucagcgacgacaucgagcagcaggccgacaacaugaucaccgagcugcugcagaaggaguacaucgacagacagggcaagaccccccugggccugguggaccuguucguguucagcaccagcuucuaccugaucagcaucuuccugcaccuggugaagauccccacccacagacacguggugggcaagcccugccccaagccccacagacugaaccacaugggcaucugcagcugcggccuguacaagcaccccggcgugcccgugaaguggaagagaugaggacuaguuauaagacugacuagcccgaugggccucccaacgggcccuccuccccuccuugcaccgagauuaaucaaaggcucuuuucagagccaccaaaaaaaaaaaaaaaaaaaaaaaaaaaaaaaaaaaaaaaaaaaaaaaaaaaaaaaaaaaaaaaaagaauu

SEQ ID NO: 31119 - RNA, 1655 nt, Artificial Sequence
  mRNA product Design i-3 (hSL-A64-N5) comprising derived and/or modified sequence from LASV(Lassa virus/H.sapiens-wt/NGA/2015/ISTH_0543;Clade II)__AVO03639__GPCmut6 (opt4)
aggagaaagcuuaccaugggccagaucaucaccuucuuccaggaggugccccacgugaucgaggaggugaugaacaucgugcugaucgcccugagccugcuggccauccugaagggcaucuacaacguggccaccugcggccuguucggccuggugagcuuccugcugcugugcggcagaagcugcagcaccaccuacaagggcguguacgagcugcagacccuggagcuggacauggccaaccugaacaugugcaugccccugagcugcaccaagaacaacagccaccacuacaucauggugggcaacgagaccggccuggagcugacccugaccaacaccagcaucaucaaccacaaguucugcaaccugagcgacgcccacaagaagaaccuguacgaccacgcccugaugagcaucaucagcaccuuccaccugagcauccccaacuucaaccaguacgaggccaugagcugcgacuucaacggcggcaagaucagcgugcaguacaaccugagccacaccuacgccguggacgccgccaaccacugcggcaccaucgccaacggcgugcugcagaccuucaugagaauggccuggggcggcagcuacaucgcccuggacagcggcaagggcagcugggacugcaucaugaccagcuaccaguaccuggugauccagaacaccaccugggaggaccacugccaguucagcagacccagccccaucggcuaccugggccugcugagccagagaaccagagacaucuacaucagcagaagacugcugggcaccuucaccuggacccugagcgacagcgagggcaacgagacccccggcggcuacugccugaccagauggaugcugaucgaggccgagcugaagugcuucggcaacaccgccguggccaagugcaacgagaagcacgacgaggaguucugcgacaugcugagacuguucgacuucugcaagcaggccaucagaagacugaagacccccgcccagaugagcauccagcugaucaacaaggccgugaacgcccugaucaacgaccagcugaucaugaagaaccaccugagagacaucaugggcauccccuacugcaacuacagcaaguacugguaccugaaccacaccgugaccggcaagaccagccugcccagaugcuggcuggugagcaacggcagcuaccugaacgagacccacuucagcgacgacaucgagcagcaggccgacaacaugaucaccgagcugcugcagaaggaguacaucgacagacagggcaagaccccccugggccugguggaccuguucguguucagcaccagcuucuaccugaucagcaucuuccugcaccuggugaagauccccacccacagacacaucaccggcaagcccugccccaagccccacagacugaaccacaugggcaucugcagcugcggccuguacaagcaccccggcgugcccgugaaguggaagagaugaggacuaguuauaagacugacuagcccgaugggccucccaacgggcccuccuccccuccuugcaccgagauuaaucaaaggcucuuuucagagccaccaaaaaaaaaaaaaaaaaaaaaaaaaaaaaaaaaaaaaaaaaaaaaaaaaaaaaaaaaaaaaaaaagaauu

SEQ ID NO: 31120 - RNA, 1655 nt, Artificial Sequence
  mRNA product Design i-3 (hSL-A64-N5) comprising derived and/or modified sequence from LASV(Lassa virus/H.sapiens-wt/NGA/2016/ISTH_0009;Clade II)__AVO03571__GPCmut6 (opt4)
aggagaaagcuuaccaugggccagaucaucaccuucuuccaggaggugccccacgugaucgaggaggugaugaacaucgugcugaucgcccugagccugcuggccauccugaagggcaucuacaacguggccaccugcggccugcugggccuggugagcuuccugcugcugugcggcagaagcugcagcaccaccuacaagggcguguacgagcugcagacccuggagcuggacauggccagccugaacaugugcaugccccugagcugcaccaagaacaacagccaccacuacaucauggugggcaacgagaccggccuggagcugacccugaccaacaccagcaucaucaaccacaaguucugcaaccugagcgacgcccacaagaagaaccuguacgaccacgcccugaugagcaucaucagcaccuuccaccugagcauccccaacuucaaccaguacgaggccaugagcugcgacuucaacggcggcagaaucagcgugcaguacaaccugagccacagcuacgccguggacgccgccaaccacugcggcaccaucgccaacggcgugcugcagaccuucaugagaauggccuggggcggcagcuacaucgcccuggacagcggcaagggcagcugggacugcaucaugaccagcuaccaguaccugaucauccagaacaccaccugggaggaccacugccaguucagcagacccagccccaucggcuaccugggccugcugagccagagaaccagagacaucuacaucagcagaagacugcugggcaccuucaccuggacccugagcgacagcgagggcaacgagacccccggcggcuacugccugaccagauggaugcugaucgaggccgagcugaagugcuucggcaacaccgccguggccaagugcaacgagaagcacgacgaggaguucugcgacaugcugagacuguucgacuucugcaagcaggccaucagaagacugaagacccccgcccagaugagcauccagcugaucaacaaggccgugaacgcccugaucaacgaccagcugaucaugaagaaccaccugagagacaucaugggcauccccuacugcaacuacagcaaguacugguaccugaaccacaccgugaccggcaagaccagccugcccagaugcuggcuggugagcaacggcagcuaccugaacgagacccacuucagcgacgacaucgagcagcaggccgacaacaugaucaccgagcugcugcagaaggaguacaucgacagacagggcaagaccccccugggccugguggaccuguucguguucagcaccagcuucuaccugaucagcaucuuccugcaccuggugaagauccccacccacagacacaucaccggcaagcccugccccaagccccacagacugaaccacaugggcaucugcagcugcggccuguacaaccaccccggcgugcccgugaaguggaagagaugaggacuaguuauaagacugacuagcccgaugggccucccaacgggcccuccuccccuccuugcaccgagauuaaucaaaggcucuuuucagagccaccaaaaaaaaaaaaaaaaaaaaaaaaaaaaaaaaaaaaaaaaaaaaaaaaaaaaaaaaaaaaaaaaagaauu

SEQ ID NO: 31121 - RNA, 1655 nt, Artificial Sequence
  mRNA product Design i-3 (hSL-A64-N5) comprising derived and/or modified sequence from LASV(Lassa virus/H.sapiens-wt/NGA/2016/ISTH_0017;Clade II)__AVO03567__GPCmut6 (opt4)
aggagaaagcuuaccaugggccagaucaucaccuucuuccaggaggugccccacgugaucgaggaggugaugaacaucgugcugaucgcccugagccugcuggccauccugaagggcaucuacaacguggccaccugcggccuguucggccuggugagcuuccugcugcugugcggcagaagcugcagcaccaccuacaagggcguguacgagcugcagacccuggagcuggacauggccagccugaacaugugcaugccccugagcugcaccaagaacaacagccaccacuacaucauggugggcaacgagaccggccuggagcugacccugaccaacaccagcaucaucaaccacaaguucugcaaccugagcgacgcccacaagaagaaccuguacgaccacgcccugaugagcaucaucagcaccuuccaccugagcauccccaacuucaaccaguacgaggccaugagcugcgacuucaacggcggcaagaucagcgugcaguacaaccugagccacaccuacgccaucgacgccgccaaccacugcggcaccaucgccaacggcgugcugcagaccuucaugagaauggccuggggcggcagcuacaucgcccuggacagcggcaagggcagcugggacugcaucaugaccagcuaccaguaccugaucauccagaacaccaccugggaggaccacugccaguucagcagacccagccccaucggcuaccugggccugcugagccagagaaccagagacaucuacaucagcagaagacugcugggcaccuucaccuggacccugagcgacagcgagggcaacgagacccccggcggcuacugccugaccagauggaugcugaucgaggccgagcugaagugcuucggcaacaccgccguggccaagugcaacgagaagcacgacgaggaguucugcgacaugcugagacuguucgacuucugcaagcaggccaucagaagacugaagacccccgcccagaugagcauccagcugaucaacaaggccgugaacgcccugaucaacgaccagcugaucaugaagaaccaccugagagacaucaugggcauccccuacugcaacuacagcaaguacugguaccugaaccacaccgugaccggcaagaccagccugcccagaugcuggcuggugagcaacggcagcuaccugaacgagacccacuucagcgacgacaucgagcagcaggccgacaacaugaucaccgagcugcugcagaaggaguacauggacagacagggcaagaccccccugggccugguggaccuguucguguucagcaccagcuucuaccugaucagcaucuuccugcaccuggugagaauccccacccacagacacgugaucggcaagcccugccccaagccccacagacugaaccacaugggcaucugcagcugcggccuguacaagcaccccggcgugcccgugaaguggaagagaugaggacuaguuauaagacugacuagcccgaugggccucccaacgggcccuccuccccuccuugcaccgagauuaaucaaaggcucuuuucagagccaccaaaaaaaaaaaaaaaaaaaaaaaaaaaaaaaaaaaaaaaaaaaaaaaaaaaaaaaaaaaaaaaaagaauu

SEQ ID NO: 31122 - RNA, 1655 nt, Artificial Sequence
  mRNA product Design i-3 (hSL-A64-N5) comprising derived and/or modified sequence from LASV(Lassa virus/H.sapiens-wt/NGA/2018/ISTH_0959;Clade II)__AVV65099__GPCmut6 (opt4)
aggagaaagcuuaccaugggccagaucaucaccuucuuccaggaggugccccacgugaucgaggaggugaugaacaucgugcugaucgcccugagccugcuggccauccugaagggcaucuacaacguggugaccugcggccuguucggccuggugagcuuccugcugcugugcggcagaagcugcagcaccaccuacaagggcguguacgagcugcagacccuggagcuggacauggccagccugaacaugugcaugccccugagcugcaccaagaacaacagccaccacuacaucauggugggcaacgagaccggccuggagcugacccugaccaacaccagcaucaucaaccacaaguucugcaaccugagcgacgcccacaagaagaaccuguacgaccacgcccugaugagcaucaucagcaccuuccaccugagcauccccaacuucaaccaguacgaggccaugagcugcgacuucaacggcggcaagaucagcgugcaguacaaccugagccacgccuacgccaucgacgccgccaaccacugcggcaccaucgccaacggcgugcugcagaccuucaugagaauggccuggggcggcagcuacaucgcccuggacagcggcaagggcagcugggacugcaucaugaccagcuaccaguaccugaucauccagaacaccaccugggaggaccacugccaguucagcagacccagccccaucggcuaccugggccugcugagccagagaaccagagacaucuacaucagcagaagacugcugggcaccuucaccuggacccugagcgacagcgagggcaacgagacccccggcggcuacugccugaccagauggaugcugaucgaggccgagcugaagugcuucggcaacaccgccguggccaagugcaacgagaagcacgacgaggaguucugcgacaugcugagacuguucgacuucugcaagcaggccaucagaagacugaagacccccgcccagaugagcauccagcugaucaacaaggccgugaacgcccugaucaacgaccagcugaucaugaagaaccaccugagagacaucaugggcauccccuacugcaacuacagcaaguacugguaccugaaccacaccgugaccggcaagaccagccugcccagaugcuggcuggugagcaacggcagcuaccugaacgagacccacuucagcgacgacaucgagcagcaggccgacaacaugaucaccgagcugcugcagaaggaguacaucgacagacagggcaagaccccccugggccugguggaccuguucguguucagcaccagcuucuaccugaucagcaucuuccugcaccuggugaagauccccacccacagacacgugaucggcaagcccugccccaagccccacagacugaaccacaugggcaucugcagcugcggccuguacaagcaccccggcgugcccgugaaguggaagagaugaggacuaguuauaagacugacuagcccgaugggccucccaacgggcccuccuccccuccuugcaccgagauuaaucaaaggcucuuuucagagccaccaaaaaaaaaaaaaaaaaaaaaaaaaaaaaaaaaaaaaaaaaaaaaaaaaaaaaaaaaaaaaaaaagaauu

SEQ ID NO: 31123 - RNA, 1655 nt, Artificial Sequence
  mRNA product Design i-3 (hSL-A64-N5) comprising derived and/or modified sequence from LASV(LASV003-NIG-2008;Clade II)__AIT17580__GPCmut6 (opt4)
aggagaaagcuuaccaugggccagaucaucaccuucuuccaggaggugccccacgugaucgaggaggugaugaacaucgugcugaucgcccugagccugcuggccauccugaagggcaucuacaacguggccaccugcggccuguucggccuggugagcuuccugcugcugugcggcagaagcugcagcaccaccuacaagggcguguacgagcugcagacccuggagcuggacauggccagccugaacaugugcaugccccugagcugcaccaagaacaacagccaccacuacaucauggugggcaacgagaccggccuggagcugacccugaccaacaccagcaucaucaaccacaaguucugcaaccugagcgacgcccacaagaagaaccuguacgaccacgcccugaugagcaucaucagcaccuuccaccugagcauccccaacuucaaccaguacgaggccaugagcugcgacuucaacggcggcaagaucagcgugcaguacaaccugagccacaccuacgccguggacgccgccaaccacugcggcaccaucgccaacggcgugcugcagaccuucaugagaauggccuggggcggcagcuacaucgcccuggacagcggcaagggcagcugggacugcaucaugaccagcuaccaguaccugaucauccagaacaccaccugggaggaccacugccaguucagcagacccagccccaucggcuaccugggccugcugagccagagaaccagagacaucuacaucagcagaagacugcugggcaccuucaccuggacccugagcgacagcgagagcaacgagacccccggcggcuacugccugaccagauggaugcugaucgaggccgagcugaagugcuucggcaacaccgccguggccaagugcaacgagaagcacgacgaggaguucugcgacaugcugagacuguucgacuucugcaagcaggccaucagaagacugaaggcccccgcccagaugagcauccagcugaucaacaaggccgugaacgcccugaucaacgaccagcugaucaugaagaaccaccugagagacaucaugggcauccccuacugcaacuacagcaaguacugguaccugaaccacaccgugaccggcagaaccagccugcccagaugcuggcuggugagcaacggcagcuaccugaacgagacccacuucagcgacgacaucgagcagcaggccgacaacaugaucaccgagcugcugcagaaggaguacauggacagacagggcaagaccccccugggccugguggaccuguucguguucagcaccagcuucuaccugaucagcaucuuccugcaccuggugaagauccccacccacagacacgugaucggcaagcccugccccaagccccacagacugaaccacaugggcaucugcagcugcggccuguacaagcaccccggcgugcccgugaaguggaagagaugaggacuaguuauaagacugacuagcccgaugggccucccaacgggcccuccuccccuccuugcaccgagauuaaucaaaggcucuuuucagagccaccaaaaaaaaaaaaaaaaaaaaaaaaaaaaaaaaaaaaaaaaaaaaaaaaaaaaaaaaaaaaaaaaagaauu

SEQ ID NO: 31124 - RNA, 1655 nt, Artificial Sequence
  mRNA product Design i-3 (hSL-A64-N5) comprising derived and/or modified sequence from LASV(LASV035-NIG-2009;Clade II)__AIT17588__GPCmut6 (opt4)
aggagaaagcuuaccaugggccagaucaucaccuucuuccaggaggugccccacgugaucgaggaggugaugaacaucgugcugaucgcccugagccugcuggccauccugaagggcaucuacaacguggccaccugcggccuguucggccuggugagcuuccugcugcugugcggcagaagcugcagcaccaccuacaagggcguguacgagcugcagacccuggagcuggacauggccagccugaacaugugcaugccccugagcugcaccaagaacaacagccaccacuacaucauggugggcaacgagaccggccuggagcugacccugaccaacaccagcaucaucaaccacaaguucugcaaccugagcgacgcccacaagaagaaccuguacgaccacgcccugaugagcaucaucagcaccuuccaccugagcauccccaacuucaaccaguacgaggccaugagcugcgacuucaacggcggcaagaucagcgugcaguacaaccugagccacgccuacgccguggacgccgccaaccacugcggcaccaucgccaacggcgugcugcagaccuucaugagaauggccuggggcggcagcuacaucgcccuggacagcggcaagggcagcugggacugcaucaugaccagcuaccaguaccugaucauccagaacaccaccugggaggaccacugccaguucagcagacccagccccaucggcuaccugggccugcugagccagagaaccagagacaucuacaucagcagaagacugcugggcaccuucaccuggacccugagcgacagcgagggcaacgagacccccggcggcuacugccugaccagauggaugcugaucgaggccgagcugaagugcuucggcaacaccgccguggccaagugcaacgagaagcacgacgaggaguucugcgacaugcugagacuguucgacuucugcaagcaggccaucagaagacugaaggcccccgcccagaugagcauccagcugaucaacaaggccgugaacgcccugaucaacgaccagcugaucaugaagaaccaccugagagacaucaugggcauccccuacugcaacuacagcaaguacugguaccugaaccacaccgugaccggcaagaccagccugcccagaugcuggcuggugagcaacggcagcuaccugaacgagacccacuucagcgacgacaucgagcagcaggccgacaacaugaucaccgagcugcugcagaaggaguacaucgacagacagggcaagaccccccugggccugguggaccuguucguguucagcaccagcuucuaccugaucagcaucuuccugcaccuggugaagauccccacccacagacacgugaucggcaagcccugccccaagccccacagacugaaccacaugggcaucugcagcugcggccuguacaagcaccccggcgugcccgugaaguggaagagaugaggacuaguuauaagacugacuagcccgaugggccucccaacgggcccuccuccccuccuugcaccgagauuaaucaaaggcucuuuucagagccaccaaaaaaaaaaaaaaaaaaaaaaaaaaaaaaaaaaaaaaaaaaaaaaaaaaaaaaaaaaaaaaaaagaauu

SEQ ID NO: 31125 - RNA, 1655 nt, Artificial Sequence
  mRNA product Design i-3 (hSL-A64-N5) comprising derived and/or modified sequence from LASV(LASV1000-NIG-2009;Clade II)__AIT17782__GPCmut6 (opt4)
aggagaaagcuuaccaugggccagaucaucaccuucuuccaggaggugccccacgugaucgaggaggugaugaacaucgugcugaucgcccugagccugcuggccauccugaagggcaucuacaacguggccaccugcggccuguucggccuggugagcuuccugcugcugugcggcagaagcugcagcaccaccuacaagggcguguacgagcugcagacccuggagcuggacauggccagccugaacaugugcaugccccugagcugcaccaagaacaacagccaccacuacaucauggugggcaacgagaccggccuggagcugacccugaccaacaccagcaucaucaaccacaaguucugcaaccugagcgacgcccacaagaagaaccuguacgaccacgcccugaugagcaucaucagcaccuuccaccugagcauccccaacuucaaccaguacgaggccaugagcugcgacuucaacggcggcaagaucagcgugcaguacaaccugagccacaccuacgccguggacgccgccaaccacugcggcaccaucgccaacggcgugcugcagaccuucaugagaauggccuggggcggcagcuacaucgcccuggacagcggcaagggcagcugggacugcaucaugaccagcuaccaguaccugaucauccagaacaccaccugggaggaccacugccaguucagcagacccagccccaucggcuaccugggccugcugagccagagaaccagagacaucuacaucagcagaagacugcugggcaccuucaccuggacccugagcgacagcgagggcaacgagacccccggcggcuacugccugaccagauggaugcugaucgaggccgagcugaagugcuucggcaacaccgccguggccaagugcaacgagaagcacgacgaggaguucugcgacaugcugagacuguucgacuucugcaagcaggccaucaagagacugaagacccccgcccagaugagcauccagcugaucaacaaggccgugaacgcccugaucaacgaccagcugaucaugaagaaccaccugagagacaucaugggcauccccuacugcaacuacagcaaguacugguaccugaaccacaccgugaccggcaagaccagccugcccagaugcuggcuggugagcaacggcagcuaccugaacgagacccacuucagcgacgacaucgagcagcaggccgacaacaugaucaccgagcugcugcagaaggaguacaucgacagacagggcaagaccccccugggccugguggaccuguucguguucagcaccagcuucuaccugaucagcaucuuccugcaccuggugaagauccccacccacagacacguggugggcaagcccugccccaagccccacagacugaaccacaugggcaucugcagcugcggccuguacaagcaccccggcgugcccgugaaguggaagagaugaggacuaguuauaagacugacuagcccgaugggccucccaacgggcccuccuccccuccuugcaccgagauuaaucaaaggcucuuuucagagccaccaaaaaaaaaaaaaaaaaaaaaaaaaaaaaaaaaaaaaaaaaaaaaaaaaaaaaaaaaaaaaaaaagaauu

SEQ ID NO: 31126 - RNA, 1655 nt, Artificial Sequence
  mRNA product Design i-3 (hSL-A64-N5) comprising derived and/or modified sequence from LASV(LASV221-NIG-2010;Clade II)__AIT17624__GPCmut6 (opt4)
aggagaaagcuuaccaugggccagaucaucaccuucuuccaggaggugccccacgugaucgaggaggugaugaacaucgugcugaucgcccugagccugcuggccauccugaagggcaucuacaacguggccaccugcggccuguucggccuggugagcuuccugcugcugugcggcagaagcugcagcaccaccuacaagggcguguacgagcugcagacccuggagcuggacauggccagccugaacaugugcaugccccugagcugcaccaagaacaacagccaccacuacaucauggugggcaacgagaccggccuggagcugacccugaccaacaccagcaucaucaaccacaaguucugcaaccugagcgacgcccacaagaagaaccuguacgaccacgcccugaugagcaucaucagcaccuuccaccugagcauccccaacuucaaccaguacgaggccaugagcugcgacuucaacggcggcaagaucagcgugcaguacaaccugagccacaccuacgccaucgacgccgccaaccacugcggcaccaucgccaacggcgugcugcagaccuucaugagaauggccuggggcggcagcuacaucgcccuggacagcggcaagggcagcugggacugcaucaugaccagcuaccaguaccugaucauccagaacaccaccugggaggaccacugccaguucagcagacccagccccaucggcuaccugggccugcugagccagagaaccagagacaucuacaucagcagaagacugcugggcaccuucaccuggacccugagcgacagcgagggcaacgagacccccggcggcuacugccugaccagauggaugcugaucgaggccgagcugaagugcuucggcaacaccgccguggccaagugcaacgagaagcacgacgaggaguucugcgacaugcugagacuguucgacuucugcaagcaggccaucagaagacugaagacccccgcccagaugagcauccagcugaucaacaaggccgugaacgcccugaucaacgaccagcugaucaugaagaaccaccugagagacaucaugggcauccccuacugcaacuacagcaaguacugguaccugaaccacaccgugaccggcaagaccagccugcccagaugcuggcuggugagcaacggcagcuaccugaacgagacccacuucagcgacgacaucgagcagcaggccgacaacaugaucaccgagaugcugcagaaggaguacauggacagacagggcaagaccccccugggccugguggaccuguucguguucagcaccagcuucuaccugaucagcaucuuccugcaccuggugaagauccccacccacagacacgugaucggcaagcccugccccaagccccacagacugaaccacaugggcaucugcagcugcggccuguacaagcaccccggcgugcccgugaaguggaagagaugaggacuaguuauaagacugacuagcccgaugggccucccaacgggcccuccuccccuccuugcaccgagauuaaucaaaggcucuuuucagagccaccaaaaaaaaaaaaaaaaaaaaaaaaaaaaaaaaaaaaaaaaaaaaaaaaaaaaaaaaaaaaaaaaagaauu

SEQ ID NO: 31127 - RNA, 1655 nt, Artificial Sequence
  mRNA product Design i-3 (hSL-A64-N5) comprising derived and/or modified sequence from LASV(LASV237-NIG-2010;Clade II)__AIT17638__GPCmut6 (opt4)
aggagaaagcuuaccaugggccagaucaucaccuucuuccaggaggugccccacgugaucgaggaggugaugaacaucgugcugaucgcccugagccugcuggccauccugaagggcaucuacaacguggccaccugcggccuguucggccuggugagcuuccugcugcugugcggcagaagcugcagcaccaccuacaagggcguguacgagcugcagacccuggagcuggacauggccagccugaacaugugcaugccccugagcugcaccaagaacaacagccaccacuacaucauggugggcaacgagaccggccuggagcugacccugaccaacaccagcaucaucaaccacaaguucugcaaccugagcgacgcccacaagaaggaccuguacgaccacgcccugaugagcaucaucagcaccuuccaccugagcauccccaacuucaaccaguacgaggccaugagcugcgacuucaacggcggcaagaucagcgugcaguacaaccugagccacaccuacgccguggacgccgccaaccacugcggcaccaucgccaacggcgugcugcagaccuucaugagaauggccuggggcggcagcuacaucgcccuggacagcggcaagggcagcugggacugcaucaugaccagcuaccaguaccugaucauccagaacaccaccugggaggaccacugccaguucagcagacccagccccaucggcuaccugggccugcugagccagagaaccagagacaucuacaucagcagaagacugcugggcaccuucaccuggacccugagcgacagcgagggcaacgagacccccggcggcuacugccugaccagauggaugcugaucgaggccgagcugaagugcuucggcaacaccgccguggccaagugcaacgagaagcacgacgaggaguucugcgacaugcugagacuguucgacuucugcaagcaggccaucagaagacugaagacccccgcccagaugagcauccagcugaucaacaaggccgugaacgcccugaucaacgaccagcugaucaugaagaaccaccugagagacaucaugggcauccccuacugcaacuacagcaaguacugguaccugaaccacaccgugaccggcaagaccagccugcccagaugcuggcuggugagcaacggcagcuaccugaacgagacccacuucagcgacgacaucgagcagcaggccgacaacaugaucaccgagcugcugcagaaggaguacauggacagacagggcaagaccccccugggccugguggaccuguucguguucagcaccagcuucuaccugaucagcaucuuccugcaccugaucaagauccccacccacagacacaucaccggcaagcccugccccaagccccacagacugaaccacaugggcaucugcagcugcggccuguacaagcaccccggcgugcccgugaaguggaagagaugaggacuaguuauaagacugacuagcccgaugggccucccaacgggcccuccuccccuccuugcaccgagauuaaucaaaggcucuuuucagagccaccaaaaaaaaaaaaaaaaaaaaaaaaaaaaaaaaaaaaaaaaaaaaaaaaaaaaaaaaaaaaaaaaagaauu

SEQ ID NO: 31128 - RNA, 1655 nt, Artificial Sequence
  mRNA product Design i-3 (hSL-A64-N5) comprising derived and/or modified sequence from LASV(LASV253-NIG-2011;Clade II)__AIT17670__GPCmut6 (opt4)
aggagaaagcuuaccaugggccagaucaucaccuucuuccaggaggugccccacgugaucgaggaggugaugaacaucgugcugaucgcccugagccugcuggccauccugaagggcaucuacaacguggccaccugcggccuguucggccuggugagcuuccugcugcugugcggcagaagcugcagcaccaccuacaagggcguguacgagcugcagacccuggagcuggacauggccagccugaacaugugcaugccccugagcugcaccaagaacaacagccaccacuacaucauggugggcaacgagaccggccuggagcugacccugaccaacaccagcaucaucaaccacaaguucugcaaccugagcgacgcccacaagaagaaccuguacgaccacgcccugaugagcaucaucagcaccuuccaccugagcauccccaacuucaaccaguacgaggccaugagcugcgacuucaacggcggcaagaucagcgugcaguacaaccugagccacaccuacgccguggacgccgccaaccacugcggcaccaucgccaacggcgugcugcagaccuucaugagaauggccuggggcggcagcuacaucgcccuggacagcggcaagggcagcugggacugcaucaugaccagcuaccaguaccugaucauccagaacaccaccugggaggaccacugccaguucagcagacccagccccaucggcuaccugggccugcugagccagagaaccagagacaucuacaucagcagaagacugcugggcaccuucaccuggacccugagcgacagcgagggcaacgagacccccggcggcuacugccugaccagauggaugcugaucgaggccgagcugaagugcuucggcaacaccgccguggccaagugcaacgagaagcacgacgaggaguucugcgacaugcugagacuguucgacuucugcaagcaggccaucagaagacugaaggcccccgcccagaugagcauccagcugaucaacaaggccgugaacgcccugaucaacgaccagcugaucaugaagaaccaccugagagacaucaugggcauccccuacugcaacuacagcaaguacugguaccugaaccacaccgugaccggcagaaccagccugcccagaugcuggcuggugagcaacggcagcuaccugaacgagacccacuucagcgacgacaucgagcagcaggccgacaacaugaucaccgagcugcugcagaaggaguacaucgacagacagggcaagaccccccugggccugguggaccuguucguguucagcaccagcuucuaccugaucagcaucuuccugcaccuggugaagauccccacccacagacacaucaucggcaagcccugccccaagccccacagacugaaccacaugggcaucugcagcugcggccuguacaagcaccccggcgugcccgugaaguggaagagaugaggacuaguuauaagacugacuagcccgaugggccucccaacgggcccuccuccccuccuugcaccgagauuaaucaaaggcucuuuucagagccaccaaaaaaaaaaaaaaaaaaaaaaaaaaaaaaaaaaaaaaaaaaaaaaaaaaaaaaaaaaaaaaaaagaauu

SEQ ID NO: 31129 - RNA, 1655 nt, Artificial Sequence
  mRNA product Design i-3 (hSL-A64-N5) comprising derived and/or modified sequence from LASV(LASV254-NIG-2011;Clade II)__AIT17674__GPCmut6 (opt4)
aggagaaagcuuaccaugggccagaucaucaccuucuuccaggaggugccccacgugaucgaggaggugaugaacaucgugcugaucgcccugagccugcuggccauccugaagggcaucuacaacguggccaccugcggccuguucggccuggugagcuuccugcugcugugcggcagaagcugcagcaccaccuacaagggcguguacgagcugcagacccuggagcuggacaugaccaaccugaacaugugcaugccccugagcugcaccaagaacaacagccaccacuacaucauggugggcaacgagaccggccuggagcugacccugaccaacaccagcaucaucaaccacaaguucugcaaccugagcgacgcccacaagaagaaccuguacaaccacgcccugaugagcaucaucagcaccuuccaccugagcauccccaacuucaaccaguacgaggccaugagcugcgacuucaacggcggcaagaucagcgugcaguacaaccugagccacagcuacgccguggacgccgccaaccacugcggcaccaucgccaacggcgugcugcagaccuucaugagaauggccuggggcggcagcuacaucgcccuggacagcggcaagggcaacugggacugcaucaugaccagcuaccaguaccugaucauccagaacaccaccugggaggaccacugccaguucagcagacccagccccaucggcuaccugggccugcugagccagagaaccagagacaucuacaucagcagaagacugcugggcaccuucaccuggacccugagcgacagcgagggcaacgagacccccggcggcuacugccugaccagauggaugcugaucgaggccgagcugaagugcuucggcaacaccgccguggccaagugcaacgagaagcacgacgaggaguucugcgacaugcugagacuguucgacuucugcaagcaggccaucagaagacugaagacccccgcccaggccaacauccagcugaucaacaaggccgugaacgcccugaucaacgaccagcugaucaugaagaaccaccugagagacaucaugggcauccccuacugcaacuacagcaaguacugguaccugaaccacaccgugaccggcaagaccagccugcccagaugcuggcuggugagcaacggcagcuaccugaacgagacccacuucagcgacgacaucgagcagcaggccgacaacaugaucaccgagcugcugcagaaggaguacauggacagacagggcaagaccccccugggccugguggaccuguucguguucagcaccagcuucuaccugaucagcaucuuccugcaccuggugaagauccccacccacagacacgugaucggcaagcccugccccaagccccacagacugaaccacaugggcaucugcagcugcggccuguacaagcaccccggcgugcccgugaaguggaagagaugaggacuaguuauaagacugacuagcccgaugggccucccaacgggcccuccuccccuccuugcaccgagauuaaucaaaggcucuuuucagagccaccaaaaaaaaaaaaaaaaaaaaaaaaaaaaaaaaaaaaaaaaaaaaaaaaaaaaaaaaaaaaaaaaagaauu

SEQ ID NO: 31130 - RNA, 1655 nt, Artificial Sequence
  mRNA product Design i-3 (hSL-A64-N5) comprising derived and/or modified sequence from LASV(Nig08-A19;Clade III)__ADU56618__GPCmut6 (opt4)
aggagaaagcuuaccaugggccagaucgugaccuucuuccaggaggugccccacgugaucgaggaggugaugaacaucgugcugaucgcccugagcauccuggccauccugaagggccuguacaacaucgccaccugcggccugaucggccuggugaccuuccugcugcugagcggcagaagcugcagcaugaccuacaagggcguguacgagcugcagacccuggagcugaacaugaacacccugaacaugugcaugccccugagcugcaccaagaacaacagccaccacuacaucauggugggcaacgagaccggccuggagcugacccugaccaacaccagccugcugcaccacaaguucugcaaccugagcgacgcccacaagaagaaccuguacgaccacacccugaugagcaucaucagcaccuuccaccugagcauccccaacuucaaccaguacgaggccaugagcugcgacuucaacggcggcaagaucaccgugcaguacaaccugagccacagcuacgccaucgacgccgccaaccacugcggcaccguggccaacggcgugcugcagaccuucaugagaauggccuggggcggcagcuacaucgcccuggacagcggcagaggcaagugggacugcaucaugaccagcuaccaguaccugaucauccagaacaccaccugggaggaccacugccaguucagcagacccagccccaucggcuaccugggccugcugagccagagaaccagagacaucuacaucagcagaagacugcugggcaccuucaccuggacccugagcgacagcgagggcaacgagacccccggcggcuacugccugaccagauggaugcugaucgaggccgagcugaagugcuucggcaacaccgccguggccaagugcaacgagaagcacgacgaggaguucugcgacaugcugagacuguucgacuucugcaagcaggccaucagaagacugaaggcccccgcccagaugagcauccagcugaucaacaaggccgugaacgcccugaucaacgaccagcugaucaugaagaaccaccugagagacaucaugggcauccccuacugcaacuacagcaaguacugguaccugaaccacaccagcaccggcagaaccagccugcccagaugcuggcuggugagcaacggcagcuaccugaacgagacccacuucagcgacgacaucgagcagcaggccgacaacaugaucaccgagaugcugcagaaggaguaccuggacagacagggcaagaccccccugggccugguggaccuguucguguucagcaccagcuucuaccugaucagcaucuuccugcaccuggugaagauccccacccacagacacaucgugggcaagcccugccccaagccccacagacugaaccacaugggcaucugcagcugcggccuguacaagcagcccggcgugcccgugagauggaagagaugaggacuaguuauaagacugacuagcccgaugggccucccaacgggcccuccuccccuccuugcaccgagauuaaucaaaggcucuuuucagagccaccaaaaaaaaaaaaaaaaaaaaaaaaaaaaaaaaaaaaaaaaaaaaaaaaaaaaaaaaaaaaaaaaagaauu

SEQ ID NO: 31131 - RNA, 1658 nt, Artificial Sequence
  mRNA product Design i-3 (hSL-A64-N5) comprising derived and/or modified sequence from LASV(G1180-SLE-2010;Clade IV)__AIT17168__GPCmut6 (opt4)
aggagaaagcuuaccaugggccagaucgugaccuucuuccaggaggugccccacgugaucgaggaggugaugaacaucgugcugaucgcccugagcauccuggccgugcugaagggccuguacaacuucgccaccugcggccuggugggccugcugaccuuccugcugcugugcggcagaagcugcaccgccagcagauacaagggcguguacgagcugcagacccuggagcugaacauggagacccugaacaugugcaugccccugagcugcaccaagaacaacagccaccacuacaucauggugggcaacgagaccggccuggagcugacccugaccaacaccagcaucaucaaccacaaguucugcaaccugagcgacgcccacaagaagaaccuguacgaccacgcccugaugagcaucaucagcaccuuccaccugagcauccccaacuucaaccaguacgaggccaugagcugcgacuucaacggcggcaagaucagcgugcaguacaaccugagccacagcuacgccggcgacgccgccaaccacugcggcaccguggccaacggcgugcugcagaccuucaugagaauggccuggggcggcagcuacaucgcccuggacagcggccacggcagcugggacugcaucaugaccagcuaccaguaccugaucauccagaacaccaccugggaggaccacugccaguucagcagacccagccccaucggcuaccugggccugcugagccagagaaccagagacaucuacaucagcagaagacugcugggcaccuucaccuggacccugagcgacagcgagggcaaggacacccccggcggcuacugccugaccagauggaugcugaucgaggccgagcugaagugcuucggcaacaccgccguggccaagugcaacgagaagcacgacgaggaguucugcgacaugcugagacuguucgacuucugcaagcaggccauccagagacugaaggcccccgcccagaugagcauccagcugaucaacaaggccgugaacgcccugaucaacgaccagcugaucaugaagaaccaccugagagacaucaugggcauccccuacugcaacuacagcaaguacugguaccugaaccacaccaccaccggcaagaccagccugcccaagugcuggcuggugagcaacggcagcuaccugaacgagacccacuucagcgacgacaucgagcagcaggccgacaacaugaucaccgagaugcugcagaaggaguacauggagagacagggcaagaccccccugggccugguggaccuguucguguucagcaccagcuucuaccugaucagcaucuuccugcaccuggugaagauccccacccacagacacaucgugggcaagagcugccccaagccccacagacugaaccacaugggcaucugcagcugcggccuguacaagcagcccggcgugcccgugaaguggaagagaugaggacuaguuauaagacugacuagcccgaugggccucccaacgggcccuccuccccuccuugcaccgagauuaaucaaaggcucuuuucagagccaccaaaaaaaaaaaaaaaaaaaaaaaaaaaaaaaaaaaaaaaaaaaaaaaaaaaaaaaaaaaaaaaaagaauu

SEQ ID NO: 31132 - RNA, 1658 nt, Artificial Sequence
  mRNA product Design i-3 (hSL-A64-N5) comprising derived and/or modified sequence from LASV(G1442-SLE-2011;Clade IV)__AIT17180__GPCmut6 (opt4)
aggagaaagcuuaccaugggccagaucgugaccuucuuccaggaggugccccacgugaucgaggaggugaugaacaucgugcugaucgcccugagcauccuggccgugcugaagggccuguacaacguggccaccugcggccugaucggccuggugaccuuccugcugcugugcggcagaagcugcaccaccacccuguacaagggcguguacgagcugcagacccuggagcugaacauggagacccugaacaugugcaugccccugagcugcaccaagaacaacagccaccacuacaucagagugggcaacgagaccggccuggagcugacccugaccaacaccagcaucaucaaccacaaguucugcaaccugagcgacgcccacaagaagaaccuguacgaccacgcccugaugagcaucaucagcaccuuccaccugagcauccccaacuucaaccaguacgaggccaugagcugcgacuucaacggcggcaagaucagcgugcaguacaaccugagccacagcuacgccggcgacgccgccaaccacugcggcaccguggccaacggcgugcugcagaccuucaugagaauggccuggggcggcagcuacaucgcccuggacagcggcagaggcaacugggacugcaucaugaccagcuaccaguaccugaucauccagaacaccaccugggacgaccacugccaguucagcagacccagccccaucggcuaccugggccugcugagccagagaaccagagacguguacaucagcagaagacugcugggcaccuucaccuggacccugagcgacagcgagggcaaggacacccccggcggcuacugccugaccagauggaugcugaucgaggccgagcugaagugcuucggcaacaccgccguggccaagugcaacgagaagcacgacgaggaguucugcgacaugcugagacuguucgacuucugcaagcaggccauccagagacugaaggcccccgcccagaugagcauccagcugaucaacaaggccgugaacgcccugaucaacgaccagcugaucaugaagaaccaccugagagacaucaugggcauccccuacugcaacuacagcaaguacugguaccugaacaacaccgccaccggcaagaccagccugcccaagugcuggcugaucagcaacggcagcuaccugaacgagacccacuucagcgacgacaucgagcaggaggccgacaacaugaucaccgagaugcugcagaaggaguacauggagagacagggcaagaccccccugggccugguggaccuguucguguucagcaccagcuucuaccugaucagcaucuuccugcaccuggugaagauccccacccacagacacaucgugggcaagagcugccccaagccccacagacugaaccacaugggcaucugcagcugcggccuguacaagcagcccggcgugcccgugagauggaagagaugaggacuaguuauaagacugacuagcccgaugggccucccaacgggcccuccuccccuccuugcaccgagauuaaucaaaggcucuuuucagagccaccaaaaaaaaaaaaaaaaaaaaaaaaaaaaaaaaaaaaaaaaaaaaaaaaaaaaaaaaaaaaaaaaagaauu

SEQ ID NO: 31133 - RNA, 1658 nt, Artificial Sequence
  mRNA product Design i-3 (hSL-A64-N5) comprising derived and/or modified sequence from LASV(G3010-SLE-2013;Clade IV)__AIT17344__GPCmut6 (opt4)
aggagaaagcuuaccaugggccagaucgugaccuucuuccaggaggugccccacgugaucgaggaggugaugaacaucgugcugaucgcccugagcauccuggccgugcugaagggccuguacaacuucgccaccugcggccuggugggccuggugaccuuccugcugcugugcggcagaagcugcaccaccagccuguacaagggcguguacgagcugcagacccuggagcugaacauggagacccugaacaugugcaugccccugagcugcaccaagaacaacagccaccacuacaucauggugggcaacgagaccggccuggagcugacccugaccaacaccagcaucaucaaccacaaguucugcaaccugagcgacgcccacaagaagaaccuguacaaccacgcccugaugagcaucaucagcaccuuccaccugagcauccccaacuucaaccaguacgaggccaugagcugcgacuucaacggcggcaagaucagcgugcaguacaaccugagccacagcuacgccggcgacgccgccagccacugcggcaccguggccaacggcgugcugcagaccuucaugagaauggccuggggcggcagcuacaucgcccuggacagcggcuacggcaagugggacugcaucaugaccagcuaccaguaccugaucauccagaacaccaccugggaggaccacugccaguucagcagacccagccccaucggcuaccugggccugcugagccagagaaccagagacaucuacaucagcagaagacugcugggcaccuucaccuggacccugagcgacagcgagggcaaggacacccccggcggcuacugccugaccagauggaugcugaucgaggccgagcugaagugcuucggcaacaccgccguggccaagugcaacgagaagcacgacgaggaguucugcgacaugcugagacuguucgacuucugcaagcaggccauccagagacugaagacccccgcccagaugagcauccagcugaucaacaaggccgugaacgcccugaucaacgaccagcugaucaugaagaaccaccugagagacaucaugggcauccccuacugcaacuacagcaaguacugguaccugaaccacaccaccaccggcaagaccagccugcccaagugcuggcuggugagcaacggcagcuaccugaacgagacccacuucagcgacgacaucgagcagcaggccgacaacaugaucaccgagaugcugcagaaggaguacauggagagacagggcaagaccccccugggccugguggaccuguucguguucagcaccagcuucuaccugaucagcaucuuccugcaccuggugaagauccccacccacagacacaucgugggcaagagcugccccaagccccacagacugaaccacaugggcaucugcagcugcggccuguacaagcagcccggcgugcccgugagauggaagagaugaggacuaguuauaagacugacuagcccgaugggccucccaacgggcccuccuccccuccuugcaccgagauuaaucaaaggcucuuuucagagccaccaaaaaaaaaaaaaaaaaaaaaaaaaaaaaaaaaaaaaaaaaaaaaaaaaaaaaaaaaaaaaaaaagaauu

SEQ ID NO: 31134 - RNA, 1658 nt, Artificial Sequence
  mRNA product Design i-3 (hSL-A64-N5) comprising derived and/or modified sequence from LASV(G502-SLE-2009;Clade IV)__AIT17126__GPCmut6 (opt4)
aggagaaagcuuaccaugggccagaucgugaccuucuuccaggaggugccccacgugaucgaggaggugaugaacaucgugcugaucgcccugagcauccuggccgugcugaagggccuguacaacuucgccaccugcggccuggugggccugcugaccuuccugcugcugugcggcagaagcugcaccaccggccuguacaagggcguguacgagcugcagacccuggagcugaacauggagacccugaacaugugcaugccccugagcugcaccaagaacaacagccaccacuacaucauggugggcaacgagaccggccuggagcugacccugaccaacaccagcaucaucaaccacaaguucugcaaccugagcgacgcccacaagaagaaccuguacgaccacgcccugaugagcaucaucagcaccuuccaccugagcauccccaacuucaaccaguacgaggccaugagcugcgacuucaacggcggcaagaucagcgugcaguacaaccugagccacagcuacgccggcgacgccgccgaccacugcggcaccguggccaacggcgugcugcagaccuucaugagaauggccuggggcggcagcuacaucgcccuggacagcggcagaggcagaugggacugcaucaugaccagcuaccaguaccugaucauccagaacaccaccugggaggaccacugccaguucagcagacccagccccaucggcuaccugggccugcugagccagagaaccagagacaucuacaucagcagaagacugcugggcaccuucaccuggacccugagcgacagcgagggcaaggacacccccggcggcuacugccugaccagauggaugcugaucgaggccgagcugaagugcuucggcaacaccgccguggccaagugcaacgagaagcacgacgaggaguucugcgacaugcugagacuguucgacuucugcaagcaggccauccagagacugaaggcccccgcccagaugagcauccagcugaucaacaaggccgugaacgcccugaucaacgaccagcuggugaugaagaaccaccugagagacaucaugggcauccccuacugcaacuacagcagauacugguaccugaaccacaccaccaccggcagaaccagccugcccaagugcuggcuggugagcaacggcagcuaccugaacgagacccacuucagcgacgacaucgagcagcaggccgacaacaugaucaccgagaugcugcagaaggaguacauggagagacagggcaagaccccccugggccugguggaccuguucguguucagcaccagcuucuaccugaucagcaucuuccugcaccuggugaagauccccacccacagacacaucgugggcaagagcugccccaagccccacagacugaaccacaugggcaucugcagcugcggccuguacaagcagcccggcgugcccgugaaguggaagagaugaggacuaguuauaagacugacuagcccgaugggccucccaacgggcccuccuccccuccuugcaccgagauuaaucaaaggcucuuuucagagccaccaaaaaaaaaaaaaaaaaaaaaaaaaaaaaaaaaaaaaaaaaaaaaaaaaaaaaaaaaaaaaaaaagaauu

SEQ ID NO: 31135 - RNA, 1658 nt, Artificial Sequence
  mRNA product Design i-3 (hSL-A64-N5) comprising derived and/or modified sequence from LASV(G733-SLE-2010;Clade IV)__AIT17154__GPCmut6 (opt4)
aggagaaagcuuaccaugggccagaucgugaccuucuuccaggaggugccccacgugaucgaggaggugaugaacaucgugcugaucgcccugagcauccuggccgugcugaagggccuguacaacuucgccaccugcggcaucgugggccuggugagcuuccugcugcugugcggcagaagcugcaccaccagccuguacaagggcguguacgagcugcagacccuggagcugaacauggagacccugaacaugugcaugccccugagcugcaccaagaacaacagccaccacuacaucauggugggcaacgagaccggccuggagcugacccugaccaacaccagcaucaucaaccacaaguucugcaaccugagcgacgcccacaagaagaaccuguacgaccacgcccugaugagcaucaucagcaccuuccaccugagcauccccaacuucaaccaguacgaggccaugagcugcgacuucaacggcggcaagaucagcgugcaguacaaccugagccacagcuacgccggcgacgccgccaaccacugcggcaccaucgccaacggcgugcugcagaccuucaugagaauggccuggggcggcagcuacaucgcccuggacagcggcagagacagaugggacugcaucaugaccagcuaccaguaccugaucauccagaacaccaccugggaggaccacugccaguucagcagacccagccccaucggcuaccugggccugcugagccagagaaccagagacaucuacaucagcagaagacugcugggcaccuucaccuggacccugagcgacagcgagggcaaggacacccccggcggcuacugccugaccagauggaugcugaucgaggccgagcugaagugcuucggcaacaccgccguggccaagugcaacgagaagcacgacgaggaguucugcgacaugcugagacuguucgacuucugcaagcaggccauccagagacugaaggcccccgcccagaugagcauccagcugaucaacaaggccgugaacgcccugaucaacgaccagcugaucaugaagaaccaccugagagacaucaugggcauccccuacugcaacuacagcaaguacugguaccugaaccacaccaccaccggcaagaccagccugcccaagugcuggcuggugagcaacggcagcuaccugaacgagacccacuucagcgacgacaucgagcagcaggccgacaacaugaucaccgagaugcugcagaaggaguacauggagagacagggcaagaccccccugggccugguggaccuguucguguucagcaccagcuucuaccugaucagcaucuuccugcaccuggugaagauccccacccacagacacguggugggcaagagcugccccaagccccacagacugaaccacaugggcaucugcagcugcggccuguacggccagcccggcgugcccgugaaguggaagagaugaggacuaguuauaagacugacuagcccgaugggccucccaacgggcccuccuccccuccuugcaccgagauuaaucaaaggcucuuuucagagccaccaaaaaaaaaaaaaaaaaaaaaaaaaaaaaaaaaaaaaaaaaaaaaaaaaaaaaaaaaaaaaaaaagaauu

SEQ ID NO: 31136 - RNA, 1658 nt, Artificial Sequence
  mRNA product Design i-3 (hSL-A64-N5) comprising derived and/or modified sequence from MOPV/LASV reassortant(IGS-1;Clade IV)__AFY05576__GPCmut6 (opt4)
aggagaaagcuuaccaugggccagaucgugaccuucuuccaggaggugccccacgugaucgaggaggugaugaacaucgugcugaucgcccugagcgugcuggccgugcugaagggccuguacaacuucgccaccugcggccuggugggccuggugaccuuccugcugcugugcggcagaagcugcaccaccagccuguacaagggcguguacgagcugcagacccuggagcugaacauggagacccugaacaugugcaugccccugagcugcaccaagaacaacagccaccacuacaucauggugggcaacgagaccggccuggagcugacccugaccaacaccagcaucaucaaccacaaguucugcaaccugagcgacgcccacaagaagaaccuguacgaccacgcccugaugagcaucaucagcaccuuccaccugagcauccccaacuucaaccaguacgaggccaugagcugcgacuucaacggcggcaagaucagcgugcaguacaaccugagccacagcuacgccggcgacgccgccaaccacugcggcaccguggccaacggcgugcugcagaccuucaugagaauggccuggggcggcagcuacaucgcccuggacagcggcagaggcaacugggacugcaucaugaccagcuaccaguaccugaucauccagaacaccaccugggaggaccacugccaguucagcagacccagccccaucggcuaccugggccugcugagccagagaaccagagacaucuacaucagcagaagacugcugggcaccuucaccuggacccugagcgacagcgagggcgaggacacccccggcggcuacugccugaccagauggaugcugaucgaggccgagcugaagugcuucggcaacaccgccguggccaagugcaacgagaagcacgacgaggaguucugcgacaugcugagacuguucgacuucugcaagcaggccauccagagacugaaggcccccgcccagaugagcauccagcugaucaacaaggccgugaacgcccugaucaacgaccagcugaucaugaagaaccaccugagagacaucaugggcauccccuacugcaacuacagcaaguacugguaccugaaccacaccaccaccggcagaaccagccugcccaagugcuggcuggugagcaacggcagcuaccugaacgagacccacuucagcgacgacaucgagcagcaggccgacaacaugaucaccgagaugcugcagaaggaguacauggagagacagggcaagaccccccugggccugguggaccuguucguguucagcaccagcuucuaccugaucagcaucuuccugcaccuggugaagauccccacccacagacacaucgugggcaagagcugccccaagccccacagacugaaccacaugggcaucugcagcugcggccuguacaagcagcccggcgugcccgugaaguggaagagaugaggacuaguuauaagacugacuagcccgaugggccucccaacgggcccuccuccccuccuugcaccgagauuaaucaaaggcucuuuucagagccaccaaaaaaaaaaaaaaaaaaaaaaaaaaaaaaaaaaaaaaaaaaaaaaaaaaaaaaaaaaaaaaaaagaauu

SEQ ID NO: 31137 - RNA, 1658 nt, Artificial Sequence
  mRNA product Design i-3 (hSL-A64-N5) comprising derived and/or modified sequence from LASV(LM765-SLE-2012;Clade IV)__AIT17814__GPCmut6 (opt4)
aggagaaagcuuaccaugggccagaucgugaccuucuuccaggaggugccccacgugaucgaggaggugaugaacaucgugcugaucgcccugagcauccuggccgugcugaagggccuguacaacuucgccaccugcggccuggugggccuggugaccuuccugcugcugugcggcagaagcugcaccaccagccuguacaagggcguguacgagcugcagacccuggagcugaacauggagacccugaacaugugcaugccccugagcugcaccaagaacaacagccaccacuacaucauggugggcaacgagaccggccuggagcugacccugaccaacaccagcaucaucgaccacaaguucugcaaccugagcgacgcccacagaaagaaccuguacgaccacgcccugaugagcaucaucagcaccuuccaccugagcauccccaacuucaaccaguacgaggccaugagcugcgacuucaacggcggcaagaucagcgugcaguacaaccugagccacagcuacgccaaggacgccgccgaccacugcggcaccguggccaacggcgugcugcagaccuucaugagaauggccuggggcggcagcuacaucgcccuggacagcggcagaggcagaugggacugcaucaugaccagcuaccaguaccugaucauccagaacaccaccugggaggaccacugccaguucagcagacccagccccaucggcuaccugggccugcugagccagagaaccagagacaucuacaucagcagaagacugcugggcaccuucaccuggacccugagcgacagcgagggcaaggacacccccggcggcuacugccugaccagauggaugcugaucgaggccgagcugaagugcuucggcaacaccgccguggccaagugcaacgagaagcacgacgaggaguucugcgacaugcugagacuguucgacuucugcaagcaggccauccagagacugaaggcccccgcccagaugagcauccagcugaucaacaaggccgugaacgcccugaucaacgaccagcugaucaugaagaaccaccugagagacaucaugggcauccccuacugcaacuacagcaaguacugguaccugaaccacaccaccaccggcaagaccagccugcccaagugcuggcuggugagcaacggcagcuaccugaacgagacccacuucagcgacgacaucgagcagcaggccgacaacaugaucaccgagaugcugcagaaggaguacauggagagacagggcaagaccccccugggccugguggaccuguucguguucagcaccagcuucuaccugaucagcaucuuccugcaccuggugaagauccccacccacagacacaucgugggcaagcccugccccaagccccacagacugaaccacaugggcaucugcagcugcggccuguacaagcagcccggcgugcccgugaaguggaagagaugaggacuaguuauaagacugacuagcccgaugggccucccaacgggcccuccuccccuccuugcaccgagauuaaucaaaggcucuuuucagagccaccaaaaaaaaaaaaaaaaaaaaaaaaaaaaaaaaaaaaaaaaaaaaaaaaaaaaaaaaaaaaaaaaagaauu

SEQ ID NO: 31138 - RNA, 1658 nt, Artificial Sequence
  mRNA product Design i-3 (hSL-A64-N5) comprising derived and/or modified sequence from LASV(LM776-SLE-2012;Clade IV)__AIT17824__GPCmut6 (opt4)
aggagaaagcuuaccaugggccagaucgugaccuucuuccaggaggugccccacgugaucgaggaggugaugaacaucgugcugaucgcccugagcauccuggccgugcugaagggccuguacaacuucgccaccugcggccuggugggccuggugaccuuccugcugcugugcggcagaagcugcaccaccagcguguacaagggcguguacgagcugcagacccuggagcugaacauggagacccugaacaugugcaugccccugagcugcaccaagaacaacagccaccacuacaucauggugggcaacgagaccggccuggagcugacccugaccaacaccagcaucaucaaccacaaguucugcaaccugagcgacgcccacaagaagaaccuguacgaccacgcccugaugagcaucaucagcaccuuccaccugagcauccccaacuucaaccaguacgaggccaugagcugcgacuucaacggcggcaagaucagcgugcaguacaaccugagccacagcuacgccggcgacgccgccaaccacugcggcaccguggccaacggcgugcugcagaccuucaugagaauggccuggggcggcagcuacaucgcccuggacagcggccacggcaagugggacugcaucaugaccagcuaccaguaccugaucauccagaacaccaccugggaggaccacugccaguucagcagacccagccccaucggcuaccugggccugcugagccagagaaccagagacaucuacaucagcagaagacugcugggcaccuucaccuggacccugagcgacagcgagggcaaggacacccccggcggcuacugccugaccagauggaugcugaucgaggccgagcugaagugcuucggcaacaccgccguggccaagugcaacgagaagcacgacgaggaguucugcgacaugcugagacuguucgacuucugcaagcaggccauccagagacugaaggcccccgcccagaugagcauccagcugaucaacaaggccgugaacgcccugaucaacgaccagcugaucaugaagaaccaccugagagacaucaugggcauccccuacugcaacuacagcaaguacugguaccugaaccacaccaccaccggcaagaccagccugcccaagugcuggcuggugagcaacggcagcuaccugaacgagacccacuucagcgacgacaucgagcagcaggccgacaacaugaucaccgagaugcugcagaaggaguacauggagagacagggcaagaccccccugggccugguggaccuguucguguucagcaccagcuucuaccugaucagcaucuuccugcaccuggugaagauccccacccacagacacaucgugggcaagagcugccccaagccccacagacugaaccacaugggcaucugcagcugcggccuguacaagcagcccggcgugcccgugagauggaagagaugaggacuaguuauaagacugacuagcccgaugggccucccaacgggcccuccuccccuccuugcaccgagauuaaucaaaggcucuuuucagagccaccaaaaaaaaaaaaaaaaaaaaaaaaaaaaaaaaaaaaaaaaaaaaaaaaaaaaaaaaaaaaaaaaagaauu

SEQ ID NO: 31139 - RNA, 1658 nt, Artificial Sequence
  mRNA product Design i-3 (hSL-A64-N5) comprising derived and/or modified sequence from LASV(Mad39;Clade IV)__ANH09722__GPCmut6 (opt4)
aggagaaagcuuaccaugggccagaucgugaccuucuuccaggaggugccccacgugaucgaggaggugaugaacaucgugcugaucgcccugagcauccuggccgugcugaagggccuguacaacguggccaccugcggccugaucggccuggugaccuuccugcugcugugcggcagaagcugcaccaccacccuguacaagggcguguacgagcugcaggcccuggagcugaacauggagacccugaacaugugcaugccccugagcugcaccaagaacaacagccaccacuacaucagagugggcaacgagaccggccuggagcugacccugaccaacaccagccugaucaaccacaaguucugcaaccugagcgacgcccacaagaagaaccuguacgaccacgcccugaugagcaucaucagcaccuuccaccugagcauccccaacuucaaccaguacgaggccaugagcugcgacuucaacgacggcaagaucagcgugcaguacaaccugagccacaccuacgccggcgacaccgccaaccacugcggcaccguggccaacggcgugcugcagaccuucaugagaauggccuggggcggcagcuacaucgcccuggacagcggcagaggcggcugggacugcaucaugaccagcuaccaguaccugaucauccagaacaccaccugggaggaccacugccaguucagcagacccagccccaucggcuaccugggccugcugagccagagaaccagagacaucuacaucagcagaagacugcugggcaccuucaccuggacccugagcgacagcgagggcaaggacacccccggcggcuacugccugaccagauggaugcugaucgaggccgagcugaagugcuucggcaacaccgccguggccaagugcaacgagaagcacgacgaggaguucugcgacaugcugagacuguucgacuucugcaagcaggccauccagagacugaaggcccccgcccagaugagcauccagcugaucaacaaggccgugaacgcccugaucaacgaccagcugaucaugaagaaccaccugagagacaucaugggcauccccuacugcaacuacagcaaguacugguaccugaaccacaccgugaccggcaagaccagccugcccaagugcuggcuggugagcaacggcagcuaccugaacgagacccacuucagcgacgacaucgagcagcaggccgacaacaugaucaccgagaugcugcagaaggaguacauggagagacagggcaagaccccccugggccugguggaccuguucguguucagcaccagcuucuaccugaucagcaucuuccugcaccuggugaagauccccacccacagacacguggugggcaagcccugccccaagccccacagacugaaccacaugggcaucugcagcugcggcuucuacaagcagcccggcgugcccgugagauggaagagaugaggacuaguuauaagacugacuagcccgaugggccucccaacgggcccuccuccccuccuugcaccgagauuaaucaaaggcucuuuucagagccaccaaaaaaaaaaaaaaaaaaaaaaaaaaaaaaaaaaaaaaaaaaaaaaaaaaaaaaaaaaaaaaaaagaauu

SEQ ID NO: 31140 - RNA, 1658 nt, Artificial Sequence
  mRNA product Design i-3 (hSL-A64-N5) comprising derived and/or modified sequence from LASV(Z0947-SLE-2011;Clade IV)__AIT17840__GPCmut6 (opt4)
aggagaaagcuuaccaugggccagaucgugaccuucuuccaggaggugccccacgugaucgaggaggugaugaacaucgugcugaucgcccugagcauccuggccgugcugaagggccuguacaacuucgccaccugcggccuggugggccuggugaccuuccugcugcugugcggcagaagcugcaccaucagccuguacaagggcguguacgagcugcagacccuggagcugaacauggagacccugaacaugugcaugccccugagcugcaccaagaacaacagccaccacuacaucauggugggcaacgagaccggccuggagcugacccugaccaacaccagcaucaucaaccacaaguucugcaaccugagcgacgcccacaagaagaaccuguacgaccacgcccugaugagcaucaucagcaccuuccaccugagcauccccaacuucaaccaguacgaggccaugagcugcgacuucaacggcggcaagaucagcgugcaguacaaccugagccacagcuacgccggcgacgccgccaaccacugcggcaccguggccaacggcgugcugcagaccuucaugagaauggccuggggcggcagcuacaucgcccuggacagcggcagagacagaugggacugcaucaugaccagcuaccaguaccugaucauccagaacaccaccugggaggaccacugccaguucagcagacccagccccaucggcuaccugggccugcugagccagagaaccagagacaucuacaucagcagaagacugcugggcaccuucaccuggacccugagcgacagcgagggcaaggacacccccggcggcuacugccugaccagauggaugcugaucgaggccgagcugaagugcuucggcaacaccgccguggccaagugcaacgagaagcacgacgaggaguucugcgacaugcugagacuguucgacuucugcaagcaggccauccagagacugaaggcccccgcccagaugagcauccagcugaucaacaaggccgugaacgcccugaucaacgaccagcugaucaugaagaaccaccugagagacaucaugggcauccccuacugcaacuacagcaaguacugguaccugaaccacaccaccaccggcaagaccagccugcccaagugcuggcuggugagcaacggcagcuaccugaacgagacccacuucagcgacgacaucgagcagcaggccgacaacaugaucaccgagaugcugcagaaggaguacauggagagacagggcaagaccccccugggccugguggaccuguucguguucagcaccagcuucuaccugaucagcaucuuccugcaccuggugaagauccccacccacagacacaucgugggcaagcccugccccaagccccacagacugaaccacaugggcaucugcagcugcggccuguacaagcagcccggcgugcccgugaaguggaagagaugaggacuaguuauaagacugacuagcccgaugggccucccaacgggcccuccuccccuccuugcaccgagauuaaucaaaggcucuuuucagagccaccaaaaaaaaaaaaaaaaaaaaaaaaaaaaaaaaaaaaaaaaaaaaaaaaaaaaaaaaaaaaaaaaagaauu

SEQ ID NO: 31141 - RNA, 1658 nt, Artificial Sequence
  mRNA product Design i-3 (hSL-A64-N5) comprising derived and/or modified sequence from LASV(Josiah;Clade IV)__NP_694870__GPCmut6 (opt5)
aggagaaagcuuaccaugggccagaucgugaccuucuuucaagaggucccccacguuauugaagaggugaugaacaucgugcugauugcccucagcguccuggcugugcuuaaggggcuguacaauuucgccacaugcggacucguuggccuggugacguuucuucugcucugugggagauccugcaccacaucucuguauaaaggagucuacgaacugcagacccucgagcugaacauggaaacacuuaauauguguaugccucugagcugcaccaagaacaauucccaucacuauaucauggugggcaacgagacagggcucgagcugacccuuacgaauaccucuauuaucaaccauaaauucuguaaucugagcgacgcgcacaagaaaaaccucuacgaucaugcucugauguccaucauuucuacauuucaccugagcaucccgaauuucaaccaguaugaagccauguccugcgacuuuaauggaggcaagauuagcguucaguacaaccucucucacuccuaugccggcgaugcugccaaucauugugggaccguggcuaacggaguccugcaaacauucaugcggauggccuggggcgggagcuacaucgcgcuugacucuggacgcggcaacugggauugcauuaugaccuccuaccaguaucugaucauucagaauacgacaugggaggaccacugucaguuuagcagacccucuccuaucggguaccucggacugcuuucccaacggacccgcgauaucuauauuagcagacggcugcucggcacauucaccuggacccuguccgacucugaaggcaaggauacacccgggggauacugccugacgcgcuggaugcucaucgaggccgagcugaaauguuuuggcaacaccgcuguggccaagugcaaugaaaaacaugacgaggaguucugcgauaugcuuagacuguuugacuucuguaagcaggcuauucagcggcucaaagccccugcgcagaugagcauccaacugauuaacaaggccgugaaugcucuuaucaacgaucagcugaucaugaagaaucaccuccgcgacauuauggggauccccuauugcaacuacuccaaauauugguaccugaaucacacaaccacaggaagaaccagccugccuaaguguuggcucgucucuaacggcuccuaccugaaugaaacgcauuucagcgacgauauugaacagcaagccgacaacaugaucacagagaugcuucagaaagaguauauggaacggcaggggaagaccccgcugggacucguugaucuguuuguguucucuaccagcuuuuaccugauuuccaucuuccuucaccucgugaaaauccccacacaucgccacauugucggcaagucuugcccuaaaccccauagacugaaucacaugggcaucuguagcugcgggcuguauaagcagccuggagugcccguuaaguggaaacggugaggacuaguuauaagacugacuagcccgaugggccucccaacgggcccuccuccccuccuugcaccgagauuaaucaaaggcucuuuucagagccaccaaaaaaaaaaaaaaaaaaaaaaaaaaaaaaaaaaaaaaaaaaaaaaaaaaaaaaaaaaaaaaaaagaauu

SEQ ID NO: 31142 - RNA, 1655 nt, Artificial Sequence
  mRNA product Design i-3 (hSL-A64-N5) comprising derived and/or modified sequence from LASV(LP;Clade I)__AAF86701__GPCmut6 (opt5)
aggagaaagcuuaccaugggccagaucauuaccuucuuucaagaggugccccacgucaucgaagagguuaugaacauugugcugaucgcccucagccugcuugcuauucugaaggggcucuacaauaucgccacaugcggaaucauuggccugguggcguuccuuuuucugugugggaaauccugcucucucacgcugaagggaggcuaugaacugcagacccucgagcugaacauggaaacacuuaauauguguaugccucugagcugcaccaaaaacuccucucaucacuacaucagagucgggaaugagacaggacucgagcugacccuuacaaacaccagcauuaucaaucauaaguucuguaaccuguccgacgcucacaaaaagaaucucuaugaucaugcccugaugucuauuaucagcacguuucaccuguccauuccgaacuucaaucaguacgaagccaugagcugcgacuuuaacggcggcaagaucucugugcaguauaaucucucccacagcuacgcuggggaugccgcugagcauuguggaaccguugccaacggcgugcugcaaacauucaugcggauggcguggggagggcgcuauaucgcccuugacucuggcaaagggaauugggauugcauuaugaccuccuaccaguaccugaucauucagaacacaaccugggaagaccacugucaguuuagcagacccucuccuaucggauaucucggccugcuuucccaacggacgcgcgauauuuacaucagcagacggcugcucggcacauucaccuggacacuguccgacucugaggggaacgagacccccggaggcuauugccugacccgcuggaugcucaucgaagcugagcugaaguguuuugggaauacagccgucgcuaaaugcaacgaaaagcaugaugaggaguucugcgacaugcuuagacuguuugauuucuguaaacaggccauucggcgccucaaggcgccugcccagaugagcauccagcugauuaauaaggcugugaacgcccuuaucaaugaccaacugauuaugaaaaaccaccucagagauaucaugggaauccccuacugcaauuauuccaaguacugguaucugaaccacacgagcucuggccggaccucccugccuaaauguuggcucauuagcaaugggucuuaccugaacgaaacacaguucagcgacgacaucgagcagcaagcugauaauaugauuaccgaaaugcuucagaaggaguacaucgaacgccagggaaaaacaccgcugggccucguugacauuuuuaucuucuccaccucuuuuuaucugauuagcaucuuccugcaucuuaucaagauucccacgcacagacauaucgugggcaaaccuugccccaagccucaccggcucaaccauaugggggucuguuccugcggacuguacaagcaccccggcgugccgacaaaauggaagcgcugaggacuaguuauaagacugacuagcccgaugggccucccaacgggcccuccuccccuccuugcaccgagauuaaucaaaggcucuuuucagagccaccaaaaaaaaaaaaaaaaaaaaaaaaaaaaaaaaaaaaaaaaaaaaaaaaaaaaaaaaaaaaaaaaagaauu

SEQ ID NO: 31143 - RNA, 1655 nt, Artificial Sequence
  mRNA product Design i-3 (hSL-A64-N5) comprising derived and/or modified sequence from LASV(803213;Clade II)__AAF86703__GPCmut6 (opt5)
aggagaaagcuuaccaugggccagaucauuaccuucuuucaagaggugccccacgucaucgaagagguuaugaacauugugcugaucgcccucagccugcuugcuauucugaaggggaucuacaauguggccacaugcggacucuucggccugaucuccuuucuucugcucugugggagaucuugcagcgucacguauaaaggaguguacgaacugcagacccuggagcucaacauggcgaaucugaacauguguaugccucuuuccugcacaaagaauaacucucaucacuauauuaugguuggcaaugaaaccgggcuggagcucacacugaccaacacaagcaucauuaaucauaaauucuguaaccuuuccgacgcucacaagaaaaaucuguacgaucaugcccucaugucuaucauuagcaccuuucaccuguccaucccgaacuucaaucaguaugaggccaugagcugcgacuuuaacggaggcaagauuucugugcaguacaaucugucccacagcuucgcugucgaugccgcuaaccauuguggcacgaucgccaacggggugcuccaaaccuuuaugcggauggcguggggaggcucuuauaucgcccuggacuccgggaagggaaauugggauugcauuaugacaagcuaccaguaccuuaucauucagaacaccacaugggaagaccacugucaguucucucgccccuccccuaucggcuaucuggggcuccugagccaaagaacccgggauauuuacaucucccgcagacuucugggaacguuuacauggacccucucugacagcgagggcaaugaagcucccggcggguauugccugacacgguggaugcugaucgaggccgagcucaaauguuucggaaacaccgcuguugccaagugcaaugaaaaacaugaugaggaauuuugcgacaugcugcgccuuuucgauuucuguaagcaggcgauuaaaagacugaagaccccugcccagauguccauccagcucauuaacaaggcugugaaugcccugaucaacgaccaacuuauuaugaaaaaucaucugcgggauaucaugggcauccccuacugcaacuauagccgcuacugguaucucaaucacacagucacggggaagaccucucugccuagauguuggcugguguccaacggaagcuaccucaaugagacacacuuuucugacgacauugaacagcaggcugauaacaugaucaccgagaugcugcaaaaagaguacauggaccggcagggcaagacaccgcuugggcugguggaucucuucgucuuuagcaccuccuucuaucugauuucuaucuuucugcaccuuguuaaaauucccacgcaucgccacaucgugggaaagccuugccccaaaccucauagacucaaucacaugggcauuuguagcugcggccuguacaagcaccccggggugccggucaaguggaaacggugaggacuaguuauaagacugacuagcccgaugggccucccaacgggcccuccuccccuccuugcaccgagauuaaucaaaggcucuuuucagagccaccaaaaaaaaaaaaaaaaaaaaaaaaaaaaaaaaaaaaaaaaaaaaaaaaaaaaaaaaaaaaaaaaagaauu

SEQ ID NO: 31144 - RNA, 1655 nt, Artificial Sequence
  mRNA product Design i-3 (hSL-A64-N5) comprising derived and/or modified sequence from LASV(GA391;Clade III)__CAA36645__GPCmut6 (opt5)
aggagaaagcuuaccaugggccagaucgugaccuucuuucaagaggucccccacguuauugaagaggugaugaacaucgugcugauugcccucagcauccuggcuauucuuaaggggcuguacaaugucgccacaugcggacucaucggccuggugacguuccuucugcucuccgggagaucuuguagccugaucuauaaaggaaccuacgaacugcagacacucgagcugaacauggaaacccuuaauaugugcaugccucuguccuguacaaagaacaauucucaucacuauauucggguuggcaacgagaccgggcucgagcugacacuuaccaauacgagcauccugaaccauaaauuuugcaaucucuccgacgcgcacaagcgcaaccuguacgaucauucucugaugagcauuaucuccaccuuccaccucagcauuccgaauuuuaaccaguaugaagcuaugucuugugacuucaauggaggcaaaaucacagugcaguacaaccugucccacagcuuugccgucgaugccgcuggccauugcgggacccuugccaauggagugcugcaaacauucaugagaauggcuuggggcgggucuuauauugcccucgacuccggacggggcaacugggauuguaucaugaccagcuaccaguaccugaucauucagaacacgacaugggacgaucacugccaguuuucucgccccuccccuaucggguaucuuggacugcucagccaaagaacccgggacauuuacaucucccgcagacugcugggcacauucaccuggacccucucugauagcgagggcaaugaaacacccgggggauauugucugacgcgguggaugcuuauugaggcggagcugaagugcuuuggcaacaccgccguugcuaaguguaaugaaaaacaugacgaggaguucugcgauaugcuccgccuguuugacuucugcaagcaggccaucagacggcuuaaaaccccugcucagauguccauccagcugauuaacaaggccgugaaugcgcucaucaacgaucaacugauuaugaaaaaucaucugcgcgacaucauggggauucccuacuguaacuauagcagauacugguaucucaaucacacaucuacaggaaagaccucccugccucggugcuggcuuaucagcaacggcucuuaccugaaugaaacgaaguucagcgacgauaucgaacagcaggccgacaacaugauuacagagaugcuccaaaaagaguacaucgaucgccaggggaagaccccgcugggacuggucgaccuuuuuguguucuccaccucuuuuuaucucauuagcaucuuccugcaccuggugaaaauucccacacacagacauaucgucggcaagccuugucccaaaccucaccggcucaaucauaugggcauuugcuccugugggcuguacaagcagcccggaguuccggugagauggaaacgcugaggacuaguuauaagacugacuagcccgaugggccucccaacgggcccuccuccccuccuugcaccgagauuaaucaaaggcucuuuucagagccaccaaaaaaaaaaaaaaaaaaaaaaaaaaaaaaaaaaaaaaaaaaaaaaaaaaaaaaaaaaaaaaaaagaauu

SEQ ID NO: 31145 - RNA, 1658 nt, Artificial Sequence
  mRNA product Design i-3 (hSL-A64-N5) comprising derived and/or modified sequence from LASV(AV;Clade V)__CCA30314__GPCmut6 (opt5)
aggagaaagcuuaccaugggccagaucgugaccuucuuucaagaggucccccacguuauugaagaggugaugaacaucgugcugauugcccucagcauccuggcuguccuuaaggggcuguacaauauugccacaugcggacucaucggccugaucacguuccuucugcucugugggagauccugcucuagcaaccuguauaaaggaguguacgaacugcagucccucgaccugaauauggagacccuuaacauguguaugccucugucuugcacaaagaauaacagccaucacuauauucggguuggcaaugauaccgggcucgaacugacacuuaccaacacauccauccugaaucauaaauuuuguaaccucucugacgcgcacaagaaagaucuguacgaccaugcucugaugagcauuaucuccaccuuccaccucagcauuccgaauuuuaaccaguaugaggccaugucuugcgauuucaauggaggcaagaucuccgugcaguacaaccugagccacucuuaugccauugacgcugccaaucauuguggcacggucgcuaacgggauccuucaaaccuuuaugcgcauggccuggggaggcuccuacaucgcgcuggauagcgggagaggaaacugggacugcauuaugacaucuuaccaguaucucaucauucagaauaccacaugggagaaccacugucaguucucccggcccagcccuaucggcuaccuggggcuucugucccaacgcaccagagauauuuauaucucucggcgccuccugggaacguuuacauggacccugagcgacuccgaaggcaaugccacacccggcggguacugccucaccagauggaugcugaucgaggcugaacuuaaguguuucggaaacaccgccguggcuaaaugcaaugagaagcaugaugaggaauuuugcgacaugcugcgccucuucgauuuuuguaaacaggccauuagccggcugaagucuccugcgcagauguccauccagcuuauuaacaaagccguuaaugcucugaucaacgaccaacucauuaugaagaaucaccugagagacaucaugggcauccccuauugcaacuacagcaaguauugguaccugaaucacacaauuacggggaaaaccucucucccuaaguguuggcuggugagcaacggauccuaccuuaaugagacacauuucucugaugacaucgaacagcaggccgauaacaugauuaccgagaugcugcaaaaagaauauauggagcggcagggcaagacaccgcucgggcuggucgaccuguucguguuuagcaccuccuucuaccuuaucagcauuuuucuccgccuggugaaaauccccacgcacagacauauugucggaaagccuugccccaaaccucaccggcugaaucauaugggcaucuguucuugcggccucuauaagcagcccgggguuccggugcgcuggaagagaugaggacuaguuauaagacugacuagcccgaugggccucccaacgggcccuccuccccuccuugcaccgagauuaaucaaaggcucuuuucagagccaccaaaaaaaaaaaaaaaaaaaaaaaaaaaaaaaaaaaaaaaaaaaaaaaaaaaaaaaaaaaaaaaaagaauu

SEQ ID NO: 31146 - RNA, 1655 nt, Artificial Sequence
  mRNA product Design i-3 (hSL-A64-N5) comprising derived and/or modified sequence from LASV(Togo/2016/7082;Clade VI)__AMR44577__GPCmut6 (opt5)
aggagaaagcuuaccaugggccagaucauuaccuucuuucaagaggugccccacgucaucgaagagguuaugaacauugugcugaucgcccucagccugcuugcuauucugaaggggguguacaaugucgccacaugcggaaucaucggccucgugacguuccuguuucuuugugggagauccugcucucugauuuauaaaggaagcuacgaacuccagacccuggagcugaacauggaaacacucaauauguguaugccucuguccugcaccaagaacucuagccaucacuauauccggguuggcaaugagacagggcuugagcugacccucacaaacaccuccauuaucaaucauaaauucuguaaccugucugacgcgcacaagcgcaaucuuuacgaucaugcucugaugagcauucucuccacguuucaccugagcaucccgaacuucaaucaguaugaagccaugucuugcgacuuuaacggaggcaaaauuuccgugcaguacaaucugagccacgccuaugcugucgaugccgcugagcauuguggcaccguggccaacgggguucuccaaacauucaugagaauggcguggggaggcucuuacaucgcccuggacuccgggcggggaaauugggauugcaucaugaccagcuaccaguaucuuauuauccagaacacaaccugggaagaccacugucaguuuucucgccccuccccuauuggcuaccuggggcuccugagccaaagaacgcgggauaucuauauuucccgcagacuucugggaacauucaccuggacacucucugacagcgagggcaacgagacccccggcggguacugccugacccgguggaugcugaucgaagcugagcucaaguguuuuggaaauacagccguggcuaagugcaacgaaaaacaugaugaggaguucugcgacaugcugcgccuuuuugauuucuguaagcaggccauccagagacugaaauccccugcgcagaugagcauucaacucaucaauaaggccgucaacgcucugauuaaugaccagcuuaucaugaaaaaccaucugcgggauaugaugggcauucccuauugcaauuacucuaaguauugguaccucaaccacacguccagcgggcgcaccucucugccuaaguguuggcuggugagcaauggauccuaccucaacgaaacacacuucucugacgacaucgagcagcaagccgauaauaugaucaccgaaaugcugcagaaagaguauauugacagacagggcaagacaccgcuugggcugguggaucucuuugucuucagcaccuccuuuuaccugaucagcauuuuccugcaccuuaucaaaauucccacgcaucggcacaucguuggaaagccuugccccaaaccucaucgccucaaccacaugggcauuuguucuugcggccuguauaagcagcccggggugccgacaagauggaaacggugaggacuaguuauaagacugacuagcccgaugggccucccaacgggcccuccuccccuccuugcaccgagauuaaucaaaggcucuuuucagagccaccaaaaaaaaaaaaaaaaaaaaaaaaaaaaaaaaaaaaaaaaaaaaaaaaaaaaaaaaaaaaaaaaagaauu

SEQ ID NO: 31147 - RNA, 1655 nt, Artificial Sequence
  mRNA product Design i-3 (hSL-A64-N5) comprising derived and/or modified sequence from LASV(KAK-428;Clade n.d. (VII))__ANH09740__GPCmut6 (opt5)
aggagaaagcuuaccaugggccagaucgugaccuucuuucaagaggucccccacguuauugaagaggugaugaacaucgugcugauugcccucagccugcuugcuauccugaaggggcucuacaauuucgccacaugcggagucauuggccugaucacguuucuucugcucugugggagauccugcucugcgaccuauaaaggacaguacgaacugcagacacuggagcucaacauggaaagccugaauauguguaugccucuuuccugcaccaagaacaauucucaucacuauauccgggcuggcaacaauacagggcuggagcucacccugacaaacaccagcauuaucucccauaaauucuguaaucuuucugacgcccacaagaaaaaccuguacgaucauacgcucaugagcauuaucaccacauuucaccuguccauuccgaauuucaaccaguaugaggccaugagcugcgacuuuaauggaggcaagaucucuauucaauacaaccugucccacagcuaugcuggcgaugccgcucagcauugugggaccguggccaauggaguucuccagacauucaugcgcauggcguggggcgggucuuaccuggcccuugacuccggaagacggggcugggauugcaucaucagcucuuaccaguaucugauuauccaaaacaccacgugggacgaucacugucaguuuucccgccccagcccuauuggguaccucggauucgugucccagaagacaagagacaucuauauuucucggcgccugcuuggcaccuuuacauggacccugagcgauuccgaaggccaugacaugcccgggggauacugccucaccagauggaugcugaucgaggcugaucugaaauguuucggcaacacagccgucgcuaagugcaaugaaaaacacgacgaggaguuuugcgauauguggcgccucuucgacuucuguaagcaggccauccaacggcugaaagcgccugcccagaugaacauucagcuuaucaauaaggcugugaacgcccugauuaaugaccaacucaugaugaagaaccaccugagagauaucauggggauucccuauugcaauuacagcaaauuuugguaucuuaacaauacgaccacaggacggaccucucugccucgcuguuggcucaucuccaacggcagcuaccugaaugaaacacauuucucugacgauaucgagcagcaggcugacaacaugauuaccgaaaugcugcagaaggaguacauggauagacaagggaaaacgccgcucggacugguugaccuuuuuguguucagcacauccuuuuaucugaucaccauuuuccuccaccuggucaagauccccacccaucggcacauugugggcaaaccuugccccaagccucaucgccugaaucacaugggcaucuguucuugcgggcuuuacaaacagcccggagugccggucagauggaagcggugaggacuaguuauaagacugacuagcccgaugggccucccaacgggcccuccuccccuccuugcaccgagauuaaucaaaggcucuuuucagagccaccaaaaaaaaaaaaaaaaaaaaaaaaaaaaaaaaaaaaaaaaaaaaaaaaaaaaaaaaaaaaaaaaagaauu

SEQ ID NO: 31148 - RNA, 1655 nt, Artificial Sequence; identical to SEQ ID NO: 31142
  mRNA product Design i-3 (hSL-A64-N5) comprising derived and/or modified sequence from LASV(Pinneo-NIG-1969;Clade I)__AIT17836__GPCmut6 (opt5)

SEQ ID NO: 31149 - RNA, 1655 nt, Artificial Sequence
  mRNA product Design i-3 (hSL-A64-N5) comprising derived and/or modified sequence from LASV(ISTH0009-NIG-2011;Clade II)__AIT17404__GPCmut6 (opt5)
aggagaaagcuuaccaugggccagaucauuaccuucuuucaagaggugccccacgucaucgaagagguuaugaacauugugcugaucgcccucagccugcuugcuauucugaaggggaucuacaauguggccacaugcggacucuucggccuggucuccuuucuucugcucugugggagaucuugcagcacgaccuauaaaggaguguacgaacugcagacacuggagcucgacauggcgucccugaacauguguaugccucuuucuugcaccaagaauaacagccaucacuauaucaugguuggcaaugaaacagggcuggagcucacccugacaaacaccuccauuaucaaucauaaauucuguaaccuuucugaugcucacaagaaaaaucuguacgaccaugcccucaugagcauuaucuccacguuucaccugagcauuccgaacuucaaucaguaugaggccaugucuugcgauuuuaacggaggcaagaucuccgugcaguacaaucugagccacgcuuaugccgucgacgcugccaaccauuguggcaccauugcgaauggggugcuccaaacauucaugcggauggccuggggaggcucuuacaucgcucuggauuccgggaagggaagcugggacugcaucaugaccucuuaccaguaucuuauuauccagaacacaaccugggaagaucacugucaguuuucccgccccagcccuauuggcuaccuggggcuccugucccaaagaacgcgggacaucuauauuucucgcagacuucugggaacauucaccuggacacucagcgauuccgagggcaacgaaacccccggcggguacugccugacccgguggaugcugaucgaggccgagcucaaauguuuuggaaauacagcuguugccaagugcaacgaaaaacaugacgaggaguucugcgauaugcugcgccuuuuugacuucuguaagcaggcgaucagacggcugaaaacgccugcccagaugagcauucagcucaucaauaaggcugugaacgcccugauuaaugaucaacuuaucaugaagaaccaucugcgcgacauuaugggcauccccuauugcaauuacucuaaauauugguaccucaaccacaccgucacagggaagaccucccugccuagauguuggcuggugagcaauggaucuuaccucaacgaaacacacuucagcgacgauaucgaacagcaggcugacaauaugauuaccgagcugcuucaaaaagaguauauggaucggcagggcaagacgccgcuggggcucguggaccuguuugucuucuccacaucuuuuuaccugaucagcauuuuccuucaccucaucaaaauucccacccaucgccacaucaccggaaagccuugccccaaaccucauagacugaaccacaugggcauuuguuccugcggccuguauaagcaccccgggguuccggugaaguggaaacggugaggacuaguuauaagacugacuagcccgaugggccucccaacgggcccuccuccccuccuugcaccgagauuaaucaaaggcucuuuucagagccaccaaaaaaaaaaaaaaaaaaaaaaaaaaaaaaaaaaaaaaaaaaaaaaaaaaaaaaaaaaaaaaaaagaauu

SEQ ID NO: 31150 - RNA, 1655 nt, Artificial Sequence
  mRNA product Design i-3 (hSL-A64-N5) comprising derived and/or modified sequence from LASV(ISTH2010-NIG-2012;Clade II)__AIT17482__GPCmut6 (opt5)
aggagaaagcuuaccaugggccagaucauuaccuucuuucaagaggugccccacgucaucgaagagguuaugaacauugugcugaucgcccucagccugcuugcuauucugaaggggaucuacaauguggccacaugcggacucuucggccuggucuccuuucuucugcucugugggagaucuugcagcacgaccuauaaaggaguguacgaacugcagacacuggagcucgacauggcgucccugaacauguguaugccucuuucuugcaccaagaauaacagccaucacuauaucaugguuggcaaugaaacagggcuggagcucacccugacaaacaccuccauuaucaaucauaaauucuguaaccuuucugaugcucacaagaaaaaucuguacgaccaugcccucaugagcauuaucuccacguuucaccugagcauuccgaacuucaaucaguaugaggccaugucuugcgauuuuaacggaggcaagaucuccgugcaguacaaucugagccacgcuuaugccgucgacgcugccaaccauuguggcaccauugcgaauggggugcuccaaacauucaugcggauggccuggggaggcucuuacaucgcucuggauuccgggaagggaagcugggacugcaucaugaccucuuaccaguaucuuauuauccagaacauuacaugggaagaucacugucaguuuucccgccccagcccuaucggcuaccuggggcuccugucccaaagaacccgggacauuuauaucucucgcagacuucugggaacguucacauggacccucagcgauuccgagggcaacgaaacacccggcggguacugccugacccgguggaugcugaucgaggccgagcucaaauguuuuggaaauaccgcuguugccaagugcaacgaaaaacaugacgaggaguucugcgauaugcugcgccuuuuugacuucuguaagcaggcgauuagacggcugaaaacgccugcccagaugagcauccagcucauuaauaaggcugugaacgcccugaucaaugaucaacuuauuaugaagaaccaucugcgcgacaucaugggcauccccuauugcaauuacucuaaauauugguaccucaaccacacagucaccgggaagacaucccugccuagauguuggcuggugagcaauggaucuuaccucaacgaaacccacuucagcgacgauauugaacagcaggcugacaauaugaucacagagcugcuucaaaaagaguauauugaucggcagggcaagaccccgcuggggcucguggaccuguuugucuucuccacgucuuuuuaccugaucagcauuuuccuucaccucguuaaaauccccacacaucgccacguggugggaaagccuugccccaaaccucauagacugaaccacaugggcauuuguuccugcggccuguauaagcaccccggggucccggugaaguggaaacggugaggacuaguuauaagacugacuagcccgaugggccucccaacgggcccuccuccccuccuugcaccgagauuaaucaaaggcucuuuucagagccaccaaaaaaaaaaaaaaaaaaaaaaaaaaaaaaaaaaaaaaaaaaaaaaaaaaaaaaaaaaaaaaaaagaauu

SEQ ID NO: 31151 - RNA, 1655 nt, Artificial Sequence
  mRNA product Design i-3 (hSL-A64-N5) comprising derived and/or modified sequence from LASV(Lassa virus/H.sapiens-wt/NGA/2015/ISTH_0543;Clade II)__AVO03639__GPCmut6 (opt5)
aggagaaagcuuaccaugggccagaucauuaccuucuuucaagaggugccccacgucaucgaagagguuaugaacauugugcugaucgcccucagccugcuugcuauucugaaggggaucuacaauguggccacaugcggacucuucggccuggucuccuuucuucugcucugugggagaucuugcagcacgaccuauaaaggaguguacgaacugcagacacuggagcucgacauggcgaaccugaauauguguaugccucuuuccugcaccaagaacaauucucaucacuauaucaugguuggcaacgaaacagggcuggagcucacccugacaaauaccagcauuaucaaccauaaauucuguaaucuuuccgaugcucacaagaaaaaccuguacgaccaugcccucaugucuauuaucagcacguuucaccuguccauuccgaauuucaaccaguaugaggccaugagcugcgauuuuaauggaggcaagaucucugugcaguacaaccugucccacaccuaugcugucgacgccgcuaaucauuguggcacaauugccaacggggugcuccaaaccuucaugcggauggcguggggaggcagcuacaucgcccuggauucugggaagggauccugggacugcaucaugacaagcuaccaguaucuuguuauucagaacaccacgugggaagaucacugucaguuuucucgccccuccccuaucggcuaccuggggcuccugagccaaagaacacgggacauuuauaucucccgcagacuucugggaaccuucacauggacccucucugauagcgagggcaaugaaacccccggcggguacugccugacacgguggaugcugauugaggcugagcucaaauguuuuggaaacacggccguggcuaagugcaaugaaaaacaugacgaggaguucugcgauaugcugcgccuuuuugacuucuguaagcaggccaucagacggcugaaaaccccugcgcagauguccauccagcucauuaacaaggccgucaaugcucugaucaacgaucaacuuauuaugaagaaucaucugcgcgacaucaugggcauucccuauugcaacuacagcaaauauugguaccucaaucacacagugaccgggaagacaucucugccuagauguuggcugguguccaacggaagcuaccucaaugaaacccacuucucugacgauaucgaacagcaggccgacaacaugaucacggagcugcuucaaaaagaguauauugaucggcagggcaagacaccgcuggggcucgucgaccuguuuguuuucagcaccuccuuuuaccugaucucuauuuuccuucaccucgugaaaauccccacccaucgccacauuacaggaaagccuugccccaaaccucauagacugaaucacaugggcaucuguagcugcggccuguauaagcaccccggggugccggucaaguggaaacggugaggacuaguuauaagacugacuagcccgaugggccucccaacgggcccuccuccccuccuugcaccgagauuaaucaaaggcucuuuucagagccaccaaaaaaaaaaaaaaaaaaaaaaaaaaaaaaaaaaaaaaaaaaaaaaaaaaaaaaaaaaaaaaaaagaauu

SEQ ID NO: 31152 - RNA, 1655 nt, Artificial Sequence
  mRNA product Design i-3 (hSL-A64-N5) comprising derived and/or modified sequence from LASV(Lassa virus/H.sapiens-wt/NGA/2016/ISTH_0009;Clade II)__AVO03571__GPCmut6 (opt5)
aggagaaagcuuaccaugggccagaucauuaccuucuuucaagaggugccccacgucaucgaagagguuaugaacauugugcugaucgcccucagccugcuugcuauucugaaggggaucuacaauguggccacaugcggacuccugggccuugucuccuuccugcuccugugugggagaucuugcagcacgaccuauaaaggaguguacgaacugcagacacucgagcuggacauggcgucccuuaacauguguaugccucugucuugcaccaagaauaacagccaucacuauaucaugguuggcaaugaaacagggcucgagcugacccuuacaaacaccuccauuaucaaucauaaauuuuguaaccugucugaugcucacaagaaaaaucucuacgaccaugcccugaugagcauuaucuccacguuccaccugagcauuccgaacuuuaaucaguaugaggccaugucuugcgauuucaacggaggccggaucuccgugcaguacaaucucagccacucuuaugcugucgacgccgcuaaccauuguggcaccauugccaauggggugcugcaaacauuuaugcgcauggcguggggaggcuccuacaucgcccuugauagcgggaagggaucuugggacugcaucaugaccuccuaccaguaucugauuauccagaacacaaccugggaagaucacugucaguucagcagacccuccccuauuggcuaccucgggcugcuuucucaacggacgcgcgacaucuauauuagcagacggcugcucggaacauuuaccuggacacuguccgauagcgagggcaacgaaacccccggcggguacugccugacccgcuggaugcucaucgaggcugagcugaaguguuucggaaauacagccguugcuaaaugcaacgaaaagcaugacgaggaauuuugcgauaugcuuagacuguucgacuuuuguaaacaggccauccggcgccucaagacgccugcgcagaugucuauucagcugaucaauaaagccgugaacgcucuuauuaaugaucaacugaucaugaagaaccaccucagagacauuaugggcauccccuauugcaauuacuccaaguauugguaccugaaccacaccgucacagggaaaaccagccugccucgguguuggcucgugucuaauggaagcuaccugaacgagacacauuucuccgacgauaucgaacagcaggccgacaauaugauuaccgagcuucugcaaaaggaguauaucgaucgccagggcaaaacgccgcucgggcugguggaccuguucgucuuuucuaccagcuucuaccuuauuuccaucuuucuccaccugguuaagauucccacacauagacacaucaccggaaaaccuugccccaagccucaucggcugaaccacaugggcauuuguagcugcggccucuauaaucaccccggggugccggugaaauggaagcgcugaggacuaguuauaagacugacuagcccgaugggccucccaacgggcccuccuccccuccuugcaccgagauuaaucaaaggcucuuuucagagccaccaaaaaaaaaaaaaaaaaaaaaaaaaaaaaaaaaaaaaaaaaaaaaaaaaaaaaaaaaaaaaaaaagaauu

SEQ ID NO: 31153 - RNA, 1655 nt, Artificial Sequence
  mRNA product Design i-3 (hSL-A64-N5) comprising derived and/or modified sequence from LASV(Lassa virus/H.sapiens-wt/NGA/2016/ISTH_0017;Clade II)__AVO03567__GPCmut6 (opt5)
aggagaaagcuuaccaugggccagaucauuaccuucuuucaagaggugccccacgucaucgaagagguuaugaacauugugcugaucgcccucagccugcuugcuauucugaaggggaucuacaauguggccacaugcggacucuucggccuggucuccuuucuucugcucugugggagaucuugcagcacgaccuauaaaggaguguacgaacugcagacacuggagcucgacauggcgucccugaacauguguaugccucuuucuugcaccaagaauaacagccaucacuauaucaugguuggcaaugaaacagggcuggagcucacccugacaaacaccuccauuaucaaucauaaauucuguaaccuuucugaugcucacaagaaaaaucuguacgaccaugcccucaugagcauuaucuccacguuucaccugagcauuccgaacuucaaucaguaugaggccaugucuugcgauuuuaacggaggcaagaucuccgugcaguacaaucugagccacaccuaugcuauugacgccgcuaaccauuguggcacaaucgccaaugggguccuccaaaccuucaugcggauggcguggggaggcucuuacaucgcccuggauuccgggaagggaagcugggacugcauuaugacaucuuaccaguaucuuaucauucagaacaccacgugggaagaucacugucaguuuucccgccccagcccuaucggcuaccuggggcuccugucccaaagaacacgggacauuuauaucucucgcagacuucugggaaccuucacauggacccucagcgauuccgagggcaacgaaacccccggcggguacugccugacacgguggaugcugaucgaggcugagcucaaauguuuuggaaauacggccguggcuaagugcaacgaaaaacaugacgaggaguucugcgauaugcugcgccuuuuugacuucuguaagcaggccauuagacggcugaaaaccccugcgcagaugagcauccagcucauuaauaaggccguuaacgcucugaucaaugaucaacuuauuaugaagaaccaucugcgcgacaucaugggcauccccuauugcaauuacucuaaauauugguaccucaaccacacagugaccgggaagacaucccugccuagauguuggcuggucagcaauggaucuuaccucaacgaaacccacuucagcgacgauauugaacagcaggccgacaauaugaucacggagcugcuucaaaaagaguauauggaucggcagggcaagacaccgcuggggcucguggaccuguuuguguucuccaccucuuuuuaccugauuagcaucuuccuucaccucguccgcauucccacccauagacacguuaucggaaaaccuugccccaagccucaucggcugaaccacaugggcauuuguuccugcggccuguauaaacaccccggggugccggugaaguggaagcgcugaggacuaguuauaagacugacuagcccgaugggccucccaacgggcccuccuccccuccuugcaccgagauuaaucaaaggcucuuuucagagccaccaaaaaaaaaaaaaaaaaaaaaaaaaaaaaaaaaaaaaaaaaaaaaaaaaaaaaaaaaaaaaaaaagaauu

SEQ ID NO: 31154 - RNA, 1655 nt, Artificial Sequence
  mRNA product Design i-3 (hSL-A64-N5) comprising derived and/or modified sequence from LASV(Lassa virus/H.sapiens-wt/NGA/2018/ISTH_0959;Clade II)__AVV65099__GPCmut6 (opt5)
aggagaaagcuuaccaugggccagaucauuaccuucuuucaagaggugccccacgucaucgaagagguuaugaacauugugcugaucgcccucagccugcuugcuauucugaaggggaucuacaauguggucacaugcggacucuucggccugguguccuuucuucugcucugugggagaucuugcagcacgaccuauaaaggaguuuacgaacugcagacacuggagcucgacauggccucccugaacauguguaugccucuuucuugcaccaagaauaacagccaucacuauaucauggugggcaaugaaacagggcuggagcucacccugacaaacaccuccauuaucaaucauaaauucuguaaccuuucugaugcgcacaagaaaaaucuguacgaccaugcucucaugagcauuaucuccacguuucaccugagcauuccgaacuucaaucaguaugaggccaugucuugcgauuuuaacggaggcaagaucuccguccaguacaaucugagccacgccuaugcuauugacgccgcuaaccauuguggcaccaucgccaauggggugcuccaaacauucaugcggauggcguggggaggcucuuacaucgcccuggauuccgggaagggaagcugggacugcauuaugaccucuuaccaguaucuuaucauucagaacacaaccugggaagaucacugucaguuuucccgccccagcccuaucggcuaccuggggcuccugucccaaagaacgcgggacauuuauaucucucgcagacuucugggaacauucaccuggacacucagcgauuccgagggcaacgaaacccccggcggguacugccugacccgguggaugcugaucgaggcugagcucaaauguuuuggaaauacagccguugcuaagugcaacgaaaaacaugacgaggaguucugcgauaugcugcgccuuuuugacuucuguaagcaggccauuagacggcugaaaacgccugcgcagaugagcauccagcucauuaauaaggccgugaacgcucugaucaaugaucaacuuauuaugaagaaccaucugcgcgacaucaugggcauccccuauugcaauuacucuaaauauugguaccucaaccacaccgucacagggaagaccucccugccuagauguuggcuggugagcaauggaucuuaccucaacgaaacacacuucagcgacgauauugaacagcaggccgacaauaugaucaccgagcugcuucaaaaagaguauauugaucggcagggcaagacgccgcuggggcucguggaccuguuugucuucuccacaucuuuuuaccugaucagcauuuuccuucaccucguuaaaauccccacccaucgccacgugauuggaaagccuugccccaaaccucauagacugaaccacaugggcaucuguuccugcggccuguauaagcaccccggggugccggucaaguggaaacggugaggacuaguuauaagacugacuagcccgaugggccucccaacgggcccuccuccccuccuugcaccgagauuaaucaaaggcucuuuucagagccaccaaaaaaaaaaaaaaaaaaaaaaaaaaaaaaaaaaaaaaaaaaaaaaaaaaaaaaaaaaaaaaaaagaauu

SEQ ID NO: 31155 - RNA, 1655 nt, Artificial Sequence
  mRNA product Design i-3 (hSL-A64-N5) comprising derived and/or modified sequence from LASV(LASV003-NIG-2008;Clade II)__AIT17580__GPCmut6 (opt5)
aggagaaagcuuaccaugggccagaucauuaccuucuuucaagaggugccccacgucaucgaagagguuaugaacauugugcugaucgcccucagccugcuugcuauucugaaggggaucuacaauguggccacaugcggacucuucggccuggucuccuuucuucugcucugugggagaucuugcagcacgaccuauaaaggaguguacgaacugcagacacuggagcucgacauggcgucccugaacauguguaugccucuuucuugcaccaagaauaacagccaucacuauaucaugguuggcaaugaaacagggcuggagcucacccugacaaacaccuccauuaucaaucauaaauucuguaaccuuucugaugcucacaagaaaaaucuguacgaccaugcccucaugagcauuaucuccacguuucaccugagcauuccgaacuucaaucaguaugaggccaugucuugcgauuuuaacggaggcaagaucuccgugcaguacaaucugagccacaccuaugcugucgacgccgcuaaccauuguggcacaauugccaauggggugcuccaaaccuucaugcggauggcguggggaggcucuuacaucgcccuggauuccgggaagggaagcugggacugcaucaugacaucuuaccaguaucuuauuauccagaacaccacgugggaagaucacugucaguuuucccgccccagcccuauuggcuaccuggggcuccugucccaaagaacacgggacaucuauauuucucgcagacuucugggaaccuucacauggacccucagcgauuccgagagcaacgaaacccccggcggcuacugccugacacgguggaugcugaucgaggcugagcucaaauguuuugggaauacggccguugcuaagugcaacgaaaaacaugacgaggaguucugcgauaugcugcgccuuuuugacuucuguaagcaggccaucagacggcugaaagcgccugcccagaugucuauucagcucaucaauaaggcugugaacgcccugauuaaugaucaacuuaucaugaagaaccaucugcgcgacauuaugggaauccccuauugcaauuacuccaaauauugguaccucaaccacaccgucacaggcagaaccagccugccucgguguuggcuggugucuaaugggagcuaccucaacgaaacacacuucuccgacgauaucgaacagcaggcugacaauaugauuaccgagcugcuucaaaaggaguauauggaucgccagggaaaaacgccgcugggccucguggaccuguuugucuucucuaccagcuuuuaccugaucuccauuuuccuucaccucguuaagauccccacacauagacacgugauugggaaaccuugccccaagccucaucggcugaaccacaugggaaucuguagcugcggccuguauaaacaccccggcgugccggucaaguggaagcgcugaggacuaguuauaagacugacuagcccgaugggccucccaacgggcccuccuccccuccuugcaccgagauuaaucaaaggcucuuuucagagccaccaaaaaaaaaaaaaaaaaaaaaaaaaaaaaaaaaaaaaaaaaaaaaaaaaaaaaaaaaaaaaaaaagaauu

SEQ ID NO: 31156 - RNA, 1655 nt, Artificial Sequence
  mRNA product Design i-3 (hSL-A64-N5) comprising derived and/or modified sequence from LASV(LASV035-NIG-2009;Clade II)__AIT17588__GPCmut6 (opt5)
aggagaaagcuuaccaugggccagaucauuaccuucuuucaagaggugccccacgucaucgaagagguuaugaacauugugcugaucgcccucagccugcuugcuauucugaaggggaucuacaauguggccacaugcggacucuucggccuggucuccuuucuucugcucugugggagaucuugcagcacgaccuauaaaggaguguacgaacugcagacacuggagcucgacauggcgucccugaacauguguaugccucuuucuugcaccaagaauaacagccaucacuauaucaugguuggcaaugaaacagggcuggagcucacccugacaaacaccuccauuaucaaucauaaauucuguaaccuuucugaugcucacaagaaaaaucuguacgaccaugcccucaugagcauuaucuccacguuucaccugagcauuccgaacuucaaucaguaugaggccaugucuugcgauuuuaacggaggcaagaucuccgugcaguacaaucugagccacgcuuaugccgucgacgcugccaaccauuguggcaccauugcgaauggggugcuccaaacauucaugcggauggccuggggaggcucuuacaucgcucuggauuccgggaagggaagcugggacugcaucaugaccucuuaccaguaucuuauuauccagaacacaaccugggaagaucacugucaguuuucccgccccagcccuauuggcuaccuggggcuccugucccaaagaacgcgggacaucuauauuucucgcagacuucugggaacauucaccuggacacucagcgauuccgagggcaacgaaacccccggcggguacugccugacccgguggaugcugaucgaggccgagcucaaauguuuuggaaauacagcuguugccaagugcaacgaaaaacaugacgaggaguucugcgauaugcugcgccuuuuugacuucuguaagcaggcgaucagacggcugaaagccccugcucagaugagcauucagcucaucaauaaggccgugaacgcucugauuaaugaucaacuuaucaugaagaaccaucugcgcgacauuaugggcauccccuauugcaauuacucuaaauauugguaccucaaccacacggucaccgggaagacaucccugccuagauguuggcuggugagcaauggaucuuaccucaacgaaacccacuucagcgacgauaucgaacagcaggccgacaauaugauuacagagcugcuucaaaaagaguauaucgaucggcagggcaagaccccgcuggggcucguggaccuguuugucuucuccacgucuuuuuaccugauuagcaucuuccuucaccucguuaaaauucccacacaucgccacgugaucggaaagccuugccccaaaccucauagacugaaccacaugggcauuuguuccugcggccuguauaagcaccccggggugccggucaaguggaaacggugaggacuaguuauaagacugacuagcccgaugggccucccaacgggcccuccuccccuccuugcaccgagauuaaucaaaggcucuuuucagagccaccaaaaaaaaaaaaaaaaaaaaaaaaaaaaaaaaaaaaaaaaaaaaaaaaaaaaaaaaaaaaaaaaagaauu

SEQ ID NO: 31157 - RNA, 1655 nt, Artificial Sequence
  mRNA product Design i-3 (hSL-A64-N5) comprising derived and/or modified sequence from LASV(LASV1000-NIG-2009;Clade II)__AIT17782__GPCmut6 (opt5)
aggagaaagcuuaccaugggccagaucauuaccuucuuucaagaggugccccacgucaucgaagagguuaugaacauugugcugaucgcccucagccugcuugcuauucugaaggggaucuacaauguggccacaugcggacucuucggccuggucuccuuucuucugcucugugggagaucuugcagcacgaccuauaaaggaguguacgaacugcagacacuggagcucgacauggcgucccugaacauguguaugccucuuucuugcaccaagaauaacagccaucacuauaucaugguuggcaaugaaacagggcuggagcucacccugacaaacaccuccauuaucaaucauaaauucuguaaccuuucugaugcucacaagaaaaaucuguacgaccaugcccucaugagcauuaucuccacguuucaccugagcauuccgaacuucaaucaguaugaggccaugucuugcgauuuuaacggaggcaagaucuccgugcaguacaaucugagccacaccuaugcugucgacgccgcuaaccauuguggcacaauugccaauggggugcuccaaaccuucaugcggauggcguggggaggcucuuacaucgcccuggauuccgggaagggaagcugggacugcaucaugacaucuuaccaguaucuuauuauccagaacaccacgugggaagaucacugucaguuuucccgccccagcccuauuggcuaccuggggcuccugucccaaagaacacgggacaucuauauuucucgcagacuucugggaaccuucacauggacccucagcgauuccgagggcaacgaaacccccggcggguacugccugacacgguggaugcugaucgaggcugagcucaaauguuuuggaaauacggccguugcuaagugcaacgaaaaacaugacgaggaguucugcgauaugcugcgccuuuuugacuucuguaagcaggccaucaaaagacugaagaccccugcgcagaugagcauucagcucaucaauaaggccgugaacgcucugauuaaugaucaacuuaucaugaaaaaccaucugcgggacauuaugggcauccccuauugcaauuacucuaaguauugguaccucaaccacacagucaccgggaaaacaucccugccucgcuguuggcuggugagcaauggaucuuaccucaacgaaacccacuucagcgacgauaucgaacagcaggccgacaauaugauuacggagcugcuucaaaaggaguauaucgauagacagggcaaaacaccgcuggggcucguggaccuguuugucuucuccaccucuuuuuaccugauuagcaucuuccuucaccucguuaagauucccacccaucggcacguggugggaaaaccuugccccaagccucaucgccugaaccacaugggcaucuguuccugcggccuguauaagcaccccggggucccggugaaauggaagagaugaggacuaguuauaagacugacuagcccgaugggccucccaacgggcccuccuccccuccuugcaccgagauuaaucaaaggcucuuuucagagccaccaaaaaaaaaaaaaaaaaaaaaaaaaaaaaaaaaaaaaaaaaaaaaaaaaaaaaaaaaaaaaaaaagaauu

SEQ ID NO: 31158 - RNA, 1655 nt, Artificial Sequence
  mRNA product Design i-3 (hSL-A64-N5) comprising derived and/or modified sequence from LASV(LASV221-NIG-2010;Clade II)__AIT17624__GPCmut6 (opt5)
aggagaaagcuuaccaugggccagaucauuaccuucuuucaagaggugccccacgucaucgaagagguuaugaacauugugcugaucgcccucagccugcuugcuauucugaaggggaucuacaauguggccacaugcggacucuucggccuggucuccuuucuucugcucugugggagaucuugcagcacgaccuauaaaggaguguacgaacugcagacacuggagcucgacauggcgucccugaacauguguaugccucuuucuugcaccaagaauaacagccaucacuauaucaugguuggcaaugaaacagggcuggagcucacccugacaaacaccuccauuaucaaucauaaauucuguaaccuuucugaugcucacaagaaaaaucuguacgaccaugcccucaugagcauuaucuccacguuucaccugagcauuccgaacuucaaucaguaugaggccaugucuugcgauuuuaacggaggcaagaucuccgugcaguacaaucugagccacaccuaugcuauugacgccgcuaaccauuguggcacaaucgccaaugggguccuccaaaccuucaugcggauggcguggggaggcucuuacaucgcccuggauuccgggaagggaagcugggacugcauuaugacaucuuaccaguaucuuaucauucagaacaccacgugggaagaucacugucaguuuucccgccccagcccuaucggcuaccuggggcuccugucccaaagaacacgggacauuuauaucucucgcagacuucugggaaccuucacauggacccucagcgauuccgagggcaacgaaacccccggcggguacugccugacacgguggaugcugaucgaggcugagcucaaauguuuuggaaauacggccguggcuaagugcaacgaaaaacaugacgaggaguucugcgauaugcugcgccuuuuugacuucuguaagcaggccauuagacggcugaaaaccccugcgcagaugagcauccagcucauuaauaaggccguuaacgcucugaucaaugaucaacuuauuaugaagaaccaucugcgcgacaucaugggcauccccuauugcaauuacucuaaauauugguaccucaaccacacagugaccgggaagacaucccugccuagauguuggcuggucagcaauggaucuuaccucaacgaaacccacuucagcgacgauauugaacagcaggccgacaauaugaucacggagaugcugcaaaaagaguauauggaucggcagggcaagacaccgcuugggcugguggaccucuuuguguucuccaccucuuuuuaccugauuagcaucuuccugcaccuugucaaaauucccacccaucgccacguuaucggaaagccuugccccaaaccucauagacucaaccacaugggcauuuguuccugcggccuguauaagcaccccggggugccggugaaguggaaacggugaggacuaguuauaagacugacuagcccgaugggccucccaacgggcccuccuccccuccuugcaccgagauuaaucaaaggcucuuuucagagccaccaaaaaaaaaaaaaaaaaaaaaaaaaaaaaaaaaaaaaaaaaaaaaaaaaaaaaaaaaaaaaaaaagaauu

SEQ ID NO: 31159 - RNA, 1655 nt, Artificial Sequence
  mRNA product Design i-3 (hSL-A64-N5) comprising derived and/or modified sequence from LASV(LASV237-NIG-2010;Clade II)__AIT17638__GPCmut6 (opt5)
aggagaaagcuuaccaugggccagaucauuaccuucuuucaagaggugccccacgucaucgaagagguuaugaacauugugcugaucgcccucagccugcuugcuauucugaaggggaucuacaauguggccacaugcggacucuucggccuggucuccuuucuucugcucugugggagaucuugcagcacgaccuauaaaggaguguacgaacugcagacacuggagcucgacauggcgucccugaacauguguaugccucuuucuugcaccaagaauaacagccaucacuauaucaugguuggcaaugaaacagggcuggagcucacccugacaaacaccuccauuaucaaucauaaauucuguaaccuuucugaugcucacaagaaagaccuguacgaucaugcccucaugagcauuaucuccacguuucaccugagcauuccgaauuucaaccaguaugaggccaugucuugcgacuuuaauggaggcaagaucuccgugcaguacaaccugagccacaccuaugcugucgaugccgcuaaucauuguggcacaauugccaacggggugcuccaaaccuucaugcggauggcguggggaggcucuuacaucgcccuggacuccgggaagggaagcugggauugcaucaugacaucuuaccaguaucuuauuauccagaauaccacgugggaagaccacugucaguuuucccgccccagcccuauuggcuaccuggggcuccugucccaaagaacacgggauaucuauauuucucgcagacuucugggaaccuucacauggacccucagcgacuccgagggcaacgaaacccccggcggguacugccugacacgguggaugcugaucgaggcugagcucaaauguuuuggaaacacggccguugcuaagugcaaugaaaaacaugaugaggaguucugcgacaugcugcgccuuuuugauuucuguaagcaggccaucagacggcugaaaaccccugcgcagaugagcauucagcucaucaacaaggccgugaaugcucugauuaacgaccaacuuaucaugaagaaucaucugcgcgacauuaugggcauccccuauugcaacuacucuaaauauugguaccucaaucacacagucaccgggaagacaucccugccuagauguuggcuggugagcaacggaucuuaccucaaugaaacccacuucagcgaugacaucgaacagcaggccgauaacaugauuacggagcugcuucaaaaagaguauauggaccggcagggcaagacaccgcuggggcucguggaucuguuugucuucuccaccucuuuuuaccugaucagcauuuuccuucaccucaucaaaauucccacccaucgccacaucacaggaaagccuugccccaaaccucauagacugaaucacaugggcauuuguuccugcggccuguauaagcaccccgggguuccggugaaguggaaacggugaggacuaguuauaagacugacuagcccgaugggccucccaacgggcccuccuccccuccuugcaccgagauuaaucaaaggcucuuuucagagccaccaaaaaaaaaaaaaaaaaaaaaaaaaaaaaaaaaaaaaaaaaaaaaaaaaaaaaaaaaaaaaaaaagaauu

SEQ ID NO: 31160 - RNA, 1655 nt, Artificial Sequence
  mRNA product Design i-3 (hSL-A64-N5) comprising derived and/or modified sequence from LASV(LASV253-NIG-2011;Clade II)__AIT17670__GPCmut6 (opt5)
aggagaaagcuuaccaugggccagaucauuaccuucuuucaagaggugccccacgucaucgaagagguuaugaacauugugcugaucgcccucagccugcuugcuauucugaaggggaucuacaauguggccacaugcggacucuucggccuggucuccuuucuucugcucugugggagaucuugcagcacgaccuauaaaggaguguacgaacugcagacacuggagcucgacauggcgucccugaacauguguaugccucuuucuugcaccaagaauaacagccaucacuauaucaugguuggcaaugaaacagggcuggagcucacccugacaaacaccuccauuaucaaucauaaauucuguaaccuuucugaugcucacaagaaaaaucuguacgaccaugcccucaugagcauuaucuccacguuucaccugagcauuccgaacuucaaucaguaugaggccaugucuugcgauuuuaacggaggcaagaucuccgugcaguacaaucugagccacaccuaugcugucgacgccgcuaaccauuguggcacaauugccaauggggugcuccaaaccuucaugcggauggcguggggaggcucuuacaucgcccuggauuccgggaagggaagcugggacugcaucaugacaucuuaccaguaucuuauuauccagaacaccacgugggaagaucacugucaguuuucccgccccagcccuauuggcuaccuggggcuccugucccaaagaacacgggacaucuauauuucucgcagacuucugggaaccuucacauggacccucagcgauuccgagggcaacgaaacccccggcggguacugccugacacgguggaugcugaucgaggcugagcucaaauguuuuggaaauacggccguugcuaagugcaacgaaaaacaugacgaggaguucugcgauaugcugcgccuuuuugacuucuguaagcaggccaucagacggcugaaagcgccugcccagaugagcauucagcucaucaauaaggcugugaacgcccugauuaaugaucaacuuaucaugaagaaccaucugcgcgacauuaugggcauccccuauugcaauuacucuaaauauugguaccucaaccacaccgucacagggagaaccucccugccucgguguuggcuggugagcaauggaucuuaccucaacgaaacacacuucagcgacgauaucgaacagcaggcugacaauaugauuaccgagcugcuucaaaaggaguauaucgaucgccagggcaaaacgccgcuggggcucguggaccuguuugucuucuccacaucuuuuuaccugauuagcaucuuccuucaccucguuaagauucccacccauagacacaucauuggaaaaccuugccccaagccucaucggcugaaccacaugggcaucuguuccugcggccuguauaaacaccccggggugccggugaaguggaagcgcugaggacuaguuauaagacugacuagcccgaugggccucccaacgggcccuccuccccuccuugcaccgagauuaaucaaaggcucuuuucagagccaccaaaaaaaaaaaaaaaaaaaaaaaaaaaaaaaaaaaaaaaaaaaaaaaaaaaaaaaaaaaaaaaaagaauu

SEQ ID NO: 31161 - RNA, 1655 nt, Artificial Sequence
  mRNA product Design i-3 (hSL-A64-N5) comprising derived and/or modified sequence from LASV(LASV254-NIG-2011;Clade II)__AIT17674__GPCmut6 (opt5)
aggagaaagcuuaccaugggccagaucauuaccuucuuucaagaggugccccacgucaucgaagagguuaugaacauugugcugaucgcccucagccugcuugcuauucugaaggggaucuacaauguggccacaugcggacucuucggccuggucuccuuucuucugcucugugggagaucuugcagcacgaccuauaaaggaguguacgaacugcagacacuggagcucgacaugaccaaccugaauauguguaugccucuuuccugcacaaagaacaauucucaucacuauaucaugguuggcaacgaaaccgggcuggagcucacacugaccaauacgagcauuaucaaccauaaauucuguaaucuuuccgaugcgcacaagaaaaaccuguacaaucaugcucucaugucuauuaucagcaccuuucaccuguccauuccgaacuucaaucaguaugaggccaugagcugcgacuuuaacggaggcaagaucucugugcaguacaaucugucccacagcuaugccgucgaugcugccaaccauuguggcacaauugcuaacggggugcuccaaaccuucaugcggauggccuggggaggcucuuacaucgcgcuggacuccgggaagggaaauugggauugcaucaugacaagcuaccaguaucuuauuauccagaacaccacgugggaagaccacugucaguuuucucgccccuccccuauuggcuaccuggggcuccugagccaaagaacacgggauaucuauauuucccgcagacuucugggaaccuucacauggacccucucugacagcgagggcaaugaaacccccggcggguacugccugacacgguggaugcugaucgaggccgagcucaaauguuuuggaaacacggcuguugccaagugcaaugaaaaacaugaugaggaguucugcgacaugcugcgccuuuuugauuucuguaagcaggcuaucagacggcugaaaaccccugcccaggcgaacauucagcucaucaauaaggccgugaacgcucugauuaaugaccaacuuaucaugaagaaccaucugcgcgauauuaugggcauccccuauugcaauuacuccaaauauugguaccucaaccacacagucaccgggaagacaagccugccuagauguuggcuggugucuaauggauccuaccucaacgaaacccacuucagcgacgacaucgaacagcaggccgauaauaugauuacggagcugcuucaaaaagaguauauggaccggcagggcaagacaccgcuggggcucguggaucuguuugucuucucuaccagcuuuuaccugaucuccauuuuccuucaccucguuaaaauccccacccaucgccacgugauuggaaagccuugccccaaaccucauagacugaaccacaugggcaucuguucuugcggccuguauaagcaccccggggugccggucaaguggaaacggugaggacuaguuauaagacugacuagcccgaugggccucccaacgggcccuccuccccuccuugcaccgagauuaaucaaaggcucuuuucagagccaccaaaaaaaaaaaaaaaaaaaaaaaaaaaaaaaaaaaaaaaaaaaaaaaaaaaaaaaaaaaaaaaaagaauu

SEQ ID NO: 31162 - RNA, 1655 nt, Artificial Sequence
  mRNA product Design i-3 (hSL-A64-N5) comprising derived and/or modified sequence from LASV(Nig08-A19;Clade III)__ADU56618__GPCmut6 (opt5)
aggagaaagcuuaccaugggccagaucgugaccuucuuucaagaggucccccacguuauugaagaggugaugaacaucgugcugauugcccucagcauccuggcuauucuuaaggggcuguacaauaucgccacaugcggacucaucggccuggucacguuccuucugcucuccgggagaucuuguagcaugaccuauaaaggaguguacgaacugcagacacuggagcucaacaugaauacccugaacaugugcaugccucuuuccuguacaaagaauaacucucaucacuauauuaugguuggcaaugaaaccgggcuggagcucacacugaccaacacgagccuucugcaucacaaauuuugcaaucucuccgacgcgcauaagaaaaaccuguacgaucacacccugaugucuaucauuagcacauuccaccucuccaucccgaauuuuaaccaguaugaggcuaugagcugugacuucaauggaggcaagauuaccgugcaguacaaccugucucauuccuaugccaucgaugccgcuaaucacugcggcacagucgccaacggggugcuucaaaccuuuaugcggauggcuuggggaggcagcuacauugcccuggacucugggcgcggaaagugggauuguaucaugacguccuaccaguaucucaucauucagaacacaaccugggaagaccauugccaguucagcagacccucuccuaucggcuaccuggggcuucugucccaacggacacgcgauauuuauaucagcagacggcuccugggaaccuuuaccuggacacuguccgacucugagggcaaugaaacgcccggcggguacugucucacccgcuggaugcugauugaggcggagcuuaaaugcuucggaaacacagccguugcuaaguguaaugaaaaacacgaugaggaauuuugcgacaugcugagacucuucgauuuuugcaagcaggccauccggcgccugaaagcuccugcccagaugagcauccagcuuauuaacaaggcggugaaugcccugaucaacgaccaacucauuaugaagaaucaccugagagauaucaugggcauucccuauuguaacuacuccaaauauugguaccugaaucauaccagcacagggcggaccucucucccucgcugcuggcuggucuccaacggaagcuaccuuaaugagacgcacuucucugacgacaucgaacagcaggcugauaacaugaucacagagaugcugcaaaaggaguaucucgacagacagggcaaaaccccgcuggggcugguggaucuuuucguguuuagcaccuccuucuaccucauuucuaucuuucugcaucuggucaagauucccacacaccggcauaucguuggaaaaccuugucccaagccucaccgccucaaucacaugggcauuugcagcuguggccuguauaaacagcccggggugccggugagauggaagcggugaggacuaguuauaagacugacuagcccgaugggccucccaacgggcccuccuccccuccuugcaccgagauuaaucaaaggcucuuuucagagccaccaaaaaaaaaaaaaaaaaaaaaaaaaaaaaaaaaaaaaaaaaaaaaaaaaaaaaaaaaaaaaaaaagaauu

SEQ ID NO: 31163 - RNA, 1658 nt, Artificial Sequence
  mRNA product Design i-3 (hSL-A64-N5) comprising derived and/or modified sequence from LASV(G1180-SLE-2010;Clade IV)__AIT17168__GPCmut6 (opt5)
aggagaaagcuuaccaugggccagaucgugaccuucuuucaagaggucccccacguuauugaagaggugaugaacaucgugcugauugcccucagcauccuggcuguccuuaaggggcuguacaauuucgccacaugcggacucgugggccugcuuacguuucugcuccugugugggagauccugcaccgcgucucgguauaaaggaguuuacgaacugcagacacucgagcugaacauggaaacccuuaauauguguaugccucugagcugcacaaagaacaauucccaucacuauauuauggugggcaacgagaccgggcucgagcugacacuuaccaauacgucuaucaucaaccauaaauucuguaaucugagcgacgcucacaagaaaaaccucuacgaucaugcccugauguccauuaucucuaccuuucaccugagcauuccgaauuucaaccaguaugaagccauguccugcgacuuuaauggaggcaagaucagcguccaguacaaccucucucacuccuaugcuggcgaugccgcuaaucauugugggacaguggccaacggaguucugcaaaccuucaugcgcauggcguggggcgggagcuacauugcccuugacucuggacacggcuccugggauugcaucaugacaagcuaccaguaucugauuauccagaacaccacgugggaggaccauugucaguuuucuagacccuccccuaucggguaccucggacugcuuagccaacggacacgcgauauuuauaucuccagacggcugcucggcaccuucacauggacccugucugacagcgaaggcaaggauacccccgggggauacugccugacacgcuggaugcucauugaggcugagcugaaauguuuuggcaauacggccguggcuaagugcaacgaaaaacacgacgaggaguucugcgauaugcuuagacuguuugacuucuguaagcaggccauccagcggcucaaagcgccugcccagauguccauucaacugaucaauaaggcugucaacgcccuuaucaaugaucagcugauuaugaagaaccaccuccgcgacaucauggggauucccuauugcaauuacagcaaauauugguaccugaaccauaccacaaccggaaagacaucucugccuaaauguuggcucguguccaauggcagcuaccugaacgaaacccacuucucugacgauaucgaacagcaagcugacaauaugauuacggagaugcuucagaaggaguauauggaaagacaggggaaaacaccgcugggacucguggaucuguuugucuucagcaccuccuuuuaccugaucucuaucuuccuucaucucguuaagauucccacccaccggcauaucgugggcaaaagcugcccuaagccccaccgccugaaccacaugggcauuuguuccugcgggcuguauaagcagccuggagugcccgucaaauggaagagaugaggacuaguuauaagacugacuagcccgaugggccucccaacgggcccuccuccccuccuugcaccgagauuaaucaaaggcucuuuucagagccaccaaaaaaaaaaaaaaaaaaaaaaaaaaaaaaaaaaaaaaaaaaaaaaaaaaaaaaaaaaaaaaaaagaauu

SEQ ID NO: 31164 - RNA, 1658 nt, Artificial Sequence
  mRNA product Design i-3 (hSL-A64-N5) comprising derived and/or modified sequence from LASV(G1442-SLE-2011;Clade IV)__AIT17180__GPCmut6 (opt5)
aggagaaagcuuaccaugggccagaucgugaccuucuuucaagaggucccccacguuauugaagaggugaugaacaucgugcugauugcccucagcauccuggcuguccuuaaggggcuguacaauguggccacaugcggacucauuggccugguuacguuccuucugcucugugggagauccugcaccacaacccuguauaaaggaguguacgaacugcagacacucgagcugaacauggaaacccuuaauauguguaugccucugucuugcacaaagaacaauagccaucacuauauccgggucggcaacgagaccgggcucgagcugacgcuuaccaauacauccaucauuaaccauaaauuuuguaaucugucugacgcgcacaagaaaaaccucuacgaucaugcucugaugagcaucauuuccaccuuccaccugucuaucccgaauuuuaaccaguaugaagccaugagcugcgacuucaauggaggcaagauuuccgugcaguacaaccucagccacucuuaugccggcgaugcugccaaucauugugggacaguugcuaacggagugcugcaaaccuuuaugcgcauggccuggggcggguccuacaucgcgcuugacagcggaagaggcaacugggauugcauuaugacgucuuaccaguaucugaucauccagaauacaaccugggacgaucacugucaguucucccggcccagcccuauuggguaccucggacugcuuucucaacgcacaagagacgucuauaucucccggcgccugcucggcaccuuuaccuggacacugagcgauuccgagggcaaggacacgcccgggggauacugccugaccagauggaugcucauugaagccgagcugaaauguuucggcaacacagcuguggccaagugcaaugagaaacaugaugaagaguuuugcgacaugcuucggcuguucgauuuuuguaagcaggcuauccagcgccucaaagccccugcgcagaugucuauucaacugaucaacaaggccgugaaugcucuuaucaacgaccagcugauuaugaagaaucaccucagagacaucauggggauucccuauugcaacuacagcaaauauugguaccugaauaacaccgccacaggaaagaccucccugccuaaauguuggcucaucagcaauggcucuuaccugaacgaaacgcacuucuccgaugacauugagcaggaagcugauaauaugaucacagagaugcuucaaaaggaguauauggaacggcaggggaaaaccccgcugggacucgucgaccuguucguuuuuagcaccucuuucuaccugaucagcauuuuucuucaucucgugaagauccccacacaccgccauauugugggcaaauccugcccuaagccccacagacugaaccauaugggcaucuguucuugcgggcuguauaagcagccuggaguccccgugcgguggaaacgcugaggacuaguuauaagacugacuagcccgaugggccucccaacgggcccuccuccccuccuugcaccgagauuaaucaaaggcucuuuucagagccaccaaaaaaaaaaaaaaaaaaaaaaaaaaaaaaaaaaaaaaaaaaaaaaaaaaaaaaaaaaaaaaaaagaauu

SEQ ID NO: 31165 - RNA, 1658 nt, Artificial Sequence
  mRNA product Design i-3 (hSL-A64-N5) comprising derived and/or modified sequence from LASV(G3010-SLE-2013;Clade IV)__AIT17344__GPCmut6 (opt5)
aggagaaagcuuaccaugggccagaucgugaccuucuuucaagaggucccccacguuauugaagaggugaugaacaucgugcugauugcccucagcauccuggcuguccuuaaggggcuguacaauuucgccacaugcggacucgugggccugguuacguuucuucugcucugugggagauccugcaccacaucucuguauaaaggaguguacgaacugcagacccucgagcugaacauggaaacacuuaauauguguaugccucugagcugcaccaagaacaauucccaucacuauauuauggucggcaacgagacagggcucgagcugacccuuacgaauaccucuaucaucaaccauaaauucuguaaucugagcgacgcgcacaagaaaaaccucuacaaucaugcucugauguccauuaucucuacauuucaccugagcauuccgaacuucaaucaguaugaagccauguccugcgauuuuaacggaggcaagaucagcgugcaguacaaucucucucacuccuaugccggcgacgcugccagccauugugggaccguugcuaacggagugcugcaaacauucaugcggauggccuggggcgggucuuacauugcgcuugauuccggauacggcaagugggacugcaucaugaccagcuaucaguaccugauuauccagaacacgacaugggaggaucacugucaguuuucucgccccuccccuaucggguaucucggacugcuuagccaaagaacccgggacauuuacaucucccgcagacugcucggcacauucaccuggacccugucugauagcgaaggcaaagacacacccgggggauauugccugacgcgguggaugcucauugaggccgagcugaaguguuuuggcaauaccgcugucgccaaaugcaacgaaaagcaugaugaggaguucugcgacaugcuucgccuguuugauuucuguaaacaggcuauccagagacucaagaccccugcccagauguccauucaacugaucaauaaggcggugaacgcccuuaucaaugaccagcugauuaugaaaaaccaccuccgggauaucauggggauucccuacugcaauuauagcaaguacugguaccugaaccacacaacaaccggaaaaacgucucugccuaaguguuggcucguguccaauggcagcuaucugaacgaaacacauuucucugacgacaucgaacagcaagcugauaauaugauuaccgagaugcuucagaaagaguacauggaacgccaggggaagaccccgcugggacucgucgaccuguuuguuuucagcacauccuuuuaucugaucucuaucuuccuucaccucgugaaaauucccacccauagacacaucgugggcaagagcugcccuaagccccaucggcugaaccacaugggcauuuguuccugcgggcuguacaaacagccuggaguccccgugcgcuggaagagaugaggacuaguuauaagacugacuagcccgaugggccucccaacgggcccuccuccccuccuugcaccgagauuaaucaaaggcucuuuucagagccaccaaaaaaaaaaaaaaaaaaaaaaaaaaaaaaaaaaaaaaaaaaaaaaaaaaaaaaaaaaaaaaaaagaauu

SEQ ID NO: 31166 - RNA, 1658 nt, Artificial Sequence
  mRNA product Design i-3 (hSL-A64-N5) comprising derived and/or modified sequence from LASV(G502-SLE-2009;Clade IV)__AIT17126__GPCmut6 (opt5)
aggagaaagcuuaccaugggccagaucgugaccuucuuucaagaggucccccacguuauugaagaggugaugaacaucgugcugauugcccucagcauccuggcuguccuuaaggggcuguacaauuucgccacaugcggacucgugggccugcuuacguuucugcuccugugugggagauccugcaccacaggacuguauaaaggcguuuacgaacuccagacccuggagcuuaacauggaaacacugaauauguguaugccucucucuugcaccaagaacaauagccaucacuauauuaugguggggaacgagacaggacuggagcuuacccugacgaauaccuccaucaucaaccauaaauucuguaaucucucugacgcgcacaagaaaaaccuguacgaucaugcucugaugagcauuaucuccacauuucaccucucuauuccgaauuucaaccaguaugaagccaugagcugcgacuuuaauggcggcaagaucuccguccaguacaaccugagccacucuuaugccggggaugcugccgaccauuguggaaccguggcuaauggcguucuucaaacauucaugcggauggccuggggaggguccuacauugcgcuggauagcggccgcgggagaugggacugcaucaugaccucuuaccaguaucucauuauccagaacacgacaugggaggaucacugucaguuuucccggcccagcccuaucggauaccugggccuucugucucaacgcaccagagacauuuauaucucccggcgccuccugggcacauucaccuggacccugagcgauuccgaagggaaggacacacccggaggcuacugccucacgagauggaugcugauugaggccgagcuuaaauguuuugggaacaccgcuguggccaagugcaaugaaaaacaugaugaggaguucugcgacaugcugcggcucuuugauuucuguaagcaggcuauccagcgccugaaagccccugcgcagaugucuauucaacuuaucaacaaggccgucaaugcucugaucaacgaccagcucgugaugaagaaucaccugagagacauuaugggaauccccuauugcaacuacagccgguauugguaccugaaucacacaaccacaggccgcaccucccucccuaaauguuggcuggugagcaacgggucuuaccuuaaugaaacgcauuucuccgaugacauugaacagcaagccgauaacaugaucacagagaugcugcagaaggaguauauggaaagacagggaaaaaccccgcucggccuggucgaccuguuuguuuucagcaccucuuuuuaccuuauuagcaucuuccuccaccuggugaagauccccacacaucggcacauugugggcaaauccugcccuaagccccaucgccugaaucacauggggaucuguucuugcggacucuauaaacagccuggcguccccgugaaguggaagagaugaggacuaguuauaagacugacuagcccgaugggccucccaacgggcccuccuccccuccuugcaccgagauuaaucaaaggcucuuuucagagccaccaaaaaaaaaaaaaaaaaaaaaaaaaaaaaaaaaaaaaaaaaaaaaaaaaaaaaaaaaaaaaaaaagaauu

SEQ ID NO: 31167 - RNA, 1658 nt, Artificial Sequence
  mRNA product Design i-3 (hSL-A64-N5) comprising derived and/or modified sequence from LASV(G733-SLE-2010;Clade IV)__AIT17154__GPCmut6 (opt5)
aggagaaagcuuaccaugggccagaucgugaccuucuuucaagaggucccccacguuauugaagaggugaugaacaucgugcugauugcccucagcauccuggcuguccuuaaggggcuguacaauuucgccacaugcggaauugugggccucguuuccuuucugcuucugugugggagaucuugcacgaccagccucuauaaaggaguguacgaacugcagacacuggagcucaacauggaaacccugaauauguguaugccucuuuccugcacaaagaacaauucucaucacuauaucauggucggcaacgagaccgggcuggagcucacacugaccaauacgagcaucauuaaccauaaauucuguaaucuuuccgacgcgcacaagaaaaaccuguacgaucaugcucucaugucuaucauuagcaccuuucaccuguccaucccgaauuucaaccaguaugaagccaugagcugcgacuuuaauggaggcaagauuucugugcaguacaaccugucccacagcuaugccggcgaugcugccaaucauugugggacaaucgcuaacggaguucuccaaaccuucaugcggauggccuggggcgggucuuacauugcgcuggacuccggacgcgauagaugggacugcaucaugacaagcuaccaguaucuuaucauucagaacaccacgugggaggaucacugucaguuuucucggcccuccccuaucggcuaccuggggcuccugagccaacgcacaagagacauuuauaucucccggcgccuucugggaaccuucacauggacccucucugauagcgaaggcaaggacacccccggcggguacugccugacaagauggaugcugauugaggccgagcucaaauguuuuggaaauacggcuguggccaagugcaacgaaaaacaugaugaggaguucugcgacaugcugcggcuuuuugauuucuguaagcaggcuauccagcgccugaaagccccugcgcagauguccauccaacucauuaauaaggccgucaacgcucugaucaaugaccagcuuauuaugaagaaccaccugagagacaucaugggcauucccuauugcaauuacagcaaauauugguaccucaaccacaccacaaccgggaagacaucucugccuaaauguuggcugguguccaauggaagcuaccucaacgaaacccauuucucugaugacaucgaacagcaagccgauaauaugaucacggagaugcugcagaaggaguauauggaacggcagggcaaaacaccgcuugggcugguggaccucuuugucuucagcaccuccuuuuaccugauuucuaucuuccugcaccuuguuaagauucccacccaucgccacguggugggaaaaagcugcccuaagccccauagacucaaccacaugggcaucuguuccugcggccuguaugggcagccuggaguccccgugaaguggaaacggugaggacuaguuauaagacugacuagcccgaugggccucccaacgggcccuccuccccuccuugcaccgagauuaaucaaaggcucuuuucagagccaccaaaaaaaaaaaaaaaaaaaaaaaaaaaaaaaaaaaaaaaaaaaaaaaaaaaaaaaaaaaaaaaaagaauu

SEQ ID NO: 31168 - RNA, 1658 nt, Artificial Sequence
  mRNA product Design i-3 (hSL-A64-N5) comprising derived and/or modified sequence from MOPV/LASV reassortant(IGS-1;Clade IV)__AFY05576__GPCmut6 (opt5)
aggagaaagcuuaccaugggccagaucgugaccuucuuucaagaggucccccacguuauugaagaggugaugaacaucgugcugauugcccucagcguccuggcugugcuuaaggggcuguacaauuucgccacaugcggacucguuggccuggugacguuucuucugcucugugggagauccugcaccacaucucuguauaaaggagucuacgaacugcagacccucgagcugaacauggaaacacuuaauauguguaugccucugagcugcaccaagaacaauucccaucacuauaucauggugggcaacgagacagggcucgagcugacccuuacgaauaccucuauuaucaaccauaaauucuguaaucugagcgacgcgcacaagaaaaaccucuacgaucaugcucugauguccaucauuucuacauuucaccugagcaucccgaauuucaaccaguaugaagccauguccugcgacuuuaauggaggcaagauuagcguucaguacaaccucucucacuccuaugccggcgaugcugccaaucauugugggaccguggcuaacggaguccugcaaacauucaugcggauggccuggggcgggagcuacaucgcgcuugacucuggacgcggcaacugggauugcauuaugaccuccuaccaguaucugaucauucagaauacgacaugggaggaccacugucaguuuagcagacccucuccuaucggguaccucggacugcuuucccaacggacccgcgauaucuauauuagcagacggcugcucggcacauucaccuggacccuguccgacucugaaggcgaggauacacccgggggauacugccugacgcgcuggaugcucaucgaggccgaacugaaguguuuuggcaacaccgcuguggccaaaugcaaugagaagcaugacgaagaguucugcgauaugcuuagacuguuugacuucuguaaacaggcuauucagcggcucaaggccccugcgcagaugagcauccaacugauuaacaaagccgugaaugcucuuaucaacgaucagcugaucaugaagaaucaccuccgcgacauuauggggauccccuauugcaacuacuccaaguauugguaccugaaucacacaaccacaggaagaaccagccugccuaaauguuggcucgucucuaacggcuccuaccugaaugaaacgcauuucagcgacgauauugagcagcaagccgacaacaugaucacagagaugcuucagaaggaauauauggagcggcaggggaaaaccccgcugggacucguugaucuguuuguguucucuaccagcuuuuaccugauuuccaucuuccuucaccucgugaagauccccacacaucgccacauugucggcaaaucuugcccuaagccccauagacugaaucacaugggcaucuguagcugcgggcuguauaaacagccuggagugcccguuaaguggaagcggugaggacuaguuauaagacugacuagcccgaugggccucccaacgggcccuccuccccuccuugcaccgagauuaaucaaaggcucuuuucagagccaccaaaaaaaaaaaaaaaaaaaaaaaaaaaaaaaaaaaaaaaaaaaaaaaaaaaaaaaaaaaaaaaaagaauu

SEQ ID NO: 31169 - RNA, 1658 nt, Artificial Sequence
  mRNA product Design i-3 (hSL-A64-N5) comprising derived and/or modified sequence from LASV(LM765-SLE-2012;Clade IV)__AIT17814__GPCmut6 (opt5)
aggagaaagcuuaccaugggccagaucgugaccuucuuucaagaggucccccacguuauugaagaggugaugaacaucgugcugauugcccucagcauccuggcuguccuuaaggggcuguacaauuucgccacaugcggacucgugggccugguuacguuucuucugcucugugggagauccugcaccacaucucuguauaaaggaguguacgaacugcagacccucgagcugaacauggaaacacuuaauauguguaugccucugagcugcaccaagaacaauucccaucacuauauuauggucggcaacgagacagggcucgagcugacccuuacgaauaccucuaucaucgaccauaaauucuguaaccugagcgaugcgcaccggaagaaucucuacgaccaugcucugauguccauuaucucuacauuucaccugagcauuccgaacuucaaucaguaugaagccauguccugcgauuuuaacggaggcaaaaucagcgugcaguacaaucucucucacuccuaugccaaggacgcugccgaucauuguggcaccguugcuaacggggugcugcaaacauucaugcgcauggccuggggaggcagcuacauugcgcuugacucugggagaggacggugggauugcaucaugaccuccuaccaguaucugauuauccagaauacgacaugggaggaccacugucaguuuagccgccccucuccuaucggcuaccucgggcugcuuucccaaagaacccgggauauuuauaucagccgcagacugcucggaacauucaccuggacccuguccgacucugaaggcaaggauacacccggcggguacugccugacgcgguggaugcucauugaggccgagcugaaauguuuuggaaacaccgcugucgccaagugcaacgaaaaacaugacgaggaguucugcgauaugcuucgccuguuugacuucuguaagcaggcuauccagagacucaaagccccugcgcagaugagcauucaacugaucaauaaggccgugaacgcucuuaucaaugaccagcugauuaugaagaaccaccuccgggauaucaugggcauucccuauugcaauuacuccaaauauugguaccugaaccacacaaccacagggaagaccagccugccuaaauguuggcucgugucuaauggauccuaccugaacgaaacgcauuucagcgacgauaucgaacagcaagccgacaauaugauuacagagaugcuucagaaggaguauauggaacgccagggcaaaaccccgcuggggcucgucgaucuguuuguuuucucuaccagcuuuuaccugaucuccaucuuccuucaccucgugaagauucccacacauagacacaucgugggaaaaccuugccccaagccucaucggcugaaccacaugggcauuuguucuugcggccuguauaagcagcccggggucccggugaaauggaagcgcugaggacuaguuauaagacugacuagcccgaugggccucccaacgggcccuccuccccuccuugcaccgagauuaaucaaaggcucuuuucagagccaccaaaaaaaaaaaaaaaaaaaaaaaaaaaaaaaaaaaaaaaaaaaaaaaaaaaaaaaaaaaaaaaaagaauu

SEQ ID NO: 31170 - RNA, 1658 nt, Artificial Sequence
  mRNA product Design i-3 (hSL-A64-N5) comprising derived and/or modified sequence from LASV(LM776-SLE-2012;Clade IV)__AIT17824__GPCmut6 (opt5)
aggagaaagcuuaccaugggccagaucgugaccuucuuucaagaggucccccacguuauugaagaggugaugaacaucgugcugauugcccucagcauccuggcuguccuuaaggggcuguacaauuucgccacaugcggacucgugggccugguuacguuucuucugcucugugggagauccugcaccacaucuguguauaaaggagucuacgaacugcagacccuggagcucaacauggaaacacugaauauguguaugccucuuagcugcaccaagaacaauucccaucacuauauuauggugggcaacgagacagggcuggagcucacccugacgaauaccucuaucaucaaccauaaauucuguaaucuuagcgacgcgcacaagaaaaaccuguacgaucaugcucucauguccauuaucucuacauuucaccugagcauuccgaauuucaaccaguaugaagccauguccugcgacuuuaauggaggcaagaucagcguucaguacaaccugucucacuccuaugccggcgaugcugccaaucauugugggaccguggcuaacggaguccuccaaacauucaugcggauggccuggggcgggagcuacauugcgcuggacucuggacacggcaagugggauugcaucaugaccuccuaccaguaucuuauuauccagaacacgacaugggaggaccauugucaguuuagccgccccucuccuaucggguaccugggacuccugucccaaagaacccgggauauuuauaucagccgcagacuucugggcacauucaccuggacccucuccgacucugaaggcaaagauacacccgggggauacugccugacgcgguggaugcugauugaggccgagcucaaguguuuuggcaauaccgcuguggccaaaugcaacgaaaagcacgacgaggaguucugcgauaugcugcgccuuuuugacuucuguaaacaggcuauccagagacugaaggccccugcgcagaugagcauucaacucaucaauaaggccgugaacgcucugaucaaugaucagcuuauuaugaaaaaccaucugcgggacaucauggggauucccuauugcaauuacuccaaguauugguaccucaaccacacaaccacaggaaaaaccagccugccuaaguguuggcuggucucuaauggcuccuaccucaacgaaacgcacuucagcgacgauaucgaacagcaagccgacaauaugauuacagagaugcugcagaaagaguauauggaacgccaggggaagaccccgcuuggacugguugaucucuuuguguucucuaccagcuuuuaccugaucuccaucuuccugcaucuugugaaaauucccacacacagacauaucgucggcaagucuugcccuaagccccaccggcucaaccacaugggcauuuguagcugcgggcuguauaaacagccuggagugcccguucgcuggaagagaugaggacuaguuauaagacugacuagcccgaugggccucccaacgggcccuccuccccuccuugcaccgagauuaaucaaaggcucuuuucagagccaccaaaaaaaaaaaaaaaaaaaaaaaaaaaaaaaaaaaaaaaaaaaaaaaaaaaaaaaaaaaaaaaaagaauu

SEQ ID NO: 31171 - RNA, 1658 nt, Artificial Sequence
  mRNA product Design i-3 (hSL-A64-N5) comprising derived and/or modified sequence from LASV(Mad39;Clade IV)__ANH09722__GPCmut6 (opt5)
aggagaaagcuuaccaugggccagaucgugaccuucuuucaagaggucccccacguuauugaagaggugaugaacaucgugcugauugcccucagcauccuggcuguccuuaaggggcuguacaauguggccacaugcggacucauuggccugguuacguuccuucugcucugugggagauccugcaccacaacccuguauaaaggaguguacgaacugcaggcgcucgagcugaacauggaaacacuuaauauguguaugccucugucuugcaccaagaacaauagccaucacuauauccgggucggcaacgagacagggcucgagcugacccuuacgaauaccucccugaucaaccauaaauuuuguaaucucucugacgcucacaagaaaaaccuguacgaucaugcccugaugagcauuaucuccacauuccaccucucuauuccgaauuuuaaccaguaugaagccaugagcugcgacuucaaugauggaaagaucuccgugcaguacaaccugagccacaccuaugcuggcgacacagccaaucauuguggcaccguugcuaacggggugcuucaaacguuuaugcgcauggccuggggaggcucuuacauugcgcuggauuccgggagaggaggcugggacugcaucaugacaagcuaccaguaucucauuauccagaacaccacaugggaggaucacugucaguucucucggcccuccccuaucggguaccugggacuucugagccaacgcaccagagacauuuauaucucucggcgccuccugggcaccuuuacauggacgcuguccgauagcgaaggcaaggacacccccgggggauacugccucacaagauggaugcugauugaggccgagcuuaaauguuucggcaauaccgcugucgccaagugcaacgaaaaacaugaugaggaauuuugcgacaugcugcgccucuucgauuuuuguaagcaggcuauccagcggcugaaagccccugcgcagauguccauucaacuuaucaauaaggccgugaacgcucugaucaaugaccagcucauuaugaagaaccaccugagagacaucauggggauucccuauugcaauuacucuaaauauugguaccugaaccacacagugaccggaaagacgagccucccuaaauguuggcuggucuccaauggcagcuaccuuaacgagacacauuucucugaugacaucgaacagcaagccgauaauaugauuaccgagaugcugcagaaggaguauauggaacggcaggggaaaaccccgcucggacugguugaccuguucguguuuuccaccagcuucuaccuuaucucuaucuuucuccaccuggugaagauucccacacaucgccacgucgugggcaaaccuugccccaagccucauagacugaaccacaugggcaucuguagcugcggguucuauaagcagcccggaguuccggugcgguggaaacgcugaggacuaguuauaagacugacuagcccgaugggccucccaacgggcccuccuccccuccuugcaccgagauuaaucaaaggcucuuuucagagccaccaaaaaaaaaaaaaaaaaaaaaaaaaaaaaaaaaaaaaaaaaaaaaaaaaaaaaaaaaaaaaaaaagaauu

SEQ ID NO: 31172 - RNA, 1658 nt, Artificial Sequence
  mRNA product Design i-3 (hSL-A64-N5) comprising derived and/or modified sequence from LASV(Z0947-SLE-2011;Clade IV)__AIT17840__GPCmut6 (opt5)
aggagaaagcuuaccaugggccagaucgugaccuucuuucaagaggucccccacguuauugaagaggugaugaacaucgugcugauugcccucagcauccuggcuguccuuaaggggcuguacaauuucgccacaugcggacucgugggccugguuacguuucuucugcucugugggagauccugcaccauuucucuguauaaaggaguguacgaacugcagacacucgagcugaacauggaaacccuuaauauguguaugccucugagcugcacaaagaacaauucccaucacuauaucauggucggcaacgagaccgggcucgagcugacacuuaccaauacgucuaucauuaaccauaaauucuguaaucugagcgacgcgcacaagaaaaaccucuacgaucaugcucugauguccaucauuucuaccuuucaccugagcaucccgaauuucaaccaguaugaagccauguccugcgacuuuaauggaggcaagauuagcgugcaguacaaccucucucacuccuaugccggcgaugcugccaaucauugugggacaguugcuaacggagugcugcaaaccuucaugcggauggccuggggcgggagcuacaucgcgcuugacucuggacgcgauagaugggacugcauuaugacauccuaccaguaucugaucauccagaacaccacgugggaggaucacugucaguuuagccggcccucuccuauuggcuaccucgggcugcuuucccaacgcacaagagacaucuauauuagccggcgccugcucggaaccuucacauggacccuguccgauucugaaggcaaggacacccccggcggguacugccugacaagauggaugcucaucgaggccgagcugaaauguuuuggaaauacggcugucgccaagugcaacgaaaaacaugaugaggaguucugcgacaugcuucggcuguuugauuucuguaagcaggcuauucagcgccucaaagccccugcgcagaugagcauccaacugaucaauaaggccgugaacgcucuuauuaaugaccagcugaucaugaagaaccaccucagagacauuaugggcauccccuauugcaauuacuccaaauauugguaccugaaccacaccacaaccgggaagacaagccugccuaaauguuggcucgugucuaauggauccuaccugaacgaaacccauuucagcgaugacauugaacagcaagccgauaauaugaucacggagaugcuucagaaggaguauauggaacggcagggcaaaacaccgcuggggcucgucgaccuguuuguuuucucuaccagcuuuuaccugaucuccauuuuccuucaccucgugaagauccccacccaucgccacauugugggaaaaccuugccccaagccucauagacugaaccacaugggcaucuguucuugcggccuguauaagcagcccggggucccggugaaauggaagcggugaggacuaguuauaagacugacuagcccgaugggccucccaacgggcccuccuccccuccuugcaccgagauuaaucaaaggcucuuuucagagccaccaaaaaaaaaaaaaaaaaaaaaaaaaaaaaaaaaaaaaaaaaaaaaaaaaaaaaaaaaaaaaaaaagaauu

SEQ ID NO: 31173 - RNA, 1689 nt, Artificial Sequence
  mRNA product Design i-3 (hSL-A100) comprising derived and/or modified sequence from LASV(Josiah;Clade IV)__NP_694870__GPCmut6 (opt1)
aggagaaagcuuaccaugggccagaucgugaccuucuuccaggaggucccccacgugaucgaggaggugaugaacaucguccugaucgcccucagcgugcuggccgugcugaaggggcucuacaacuucgcgaccugcggccuggucgggcuggugacguuccuccugcugugcggccgcuccugcaccaccagccucuacaaggggguguacgagcugcagacccuggagcucaacauggagacgcugaacaugugcaugccgcuguccugcaccaagaacaacagccaccacuacaucauggucggcaacgagaccggccucgagcugacgcugaccaacaccuccaucaucaaccacaaguucugcaaccucagcgacgcccacaagaagaaccuguacgaccacgcccugauguccaucaucagcaccuuccaccucuccauccccaacuucaaccaguacgaggccaugagcugcgacuucaacgggggcaagaucuccgugcaguacaaccugagccacuccuacgccggggacgcggccaaccacugcggcacgguggccaacgggguccugcagaccuucaugcggauggccuggggcggcagcuacaucgcgcucgacuccgggcgcggcaacugggacugcaucaugaccagcuaccaguaccugaucauccagaacaccacgugggaggaccacugccaguucucccggcccagccccaucggguaccugggccuccugucccagcgcacccgggacaucuacaucagccgccggcugcucggcaccuucaccuggacgcugagcgacuccgaggggaaggacaccccgggcggguacugccugacccgcuggaugcucaucgaggccgagcugaagugcuucggcaacaccgccguggccaagugcaacgagaagcacgacgaggaguucugcgacaugcugcggcuguucgacuucugcaagcaggccauccagcgccugaaggcgcccgcccagaugagcauccagcugaucaacaaggccgugaacgcccucaucaacgaccagcugaucaugaagaaccaccuccgggacaucauggggauccccuacugcaacuacuccaaguacugguaccucaaccacacgaccaccggccgcaccagccugcccaagugcuggcuggucuccaacggcagcuaccucaacgagacgcacuucuccgacgacaucgagcagcaggccgacaacaugaucaccgagaugcugcagaaggaguacauggagcggcaggggaagacgccccugggccucguggaccuguucguguucagcaccuccuucuaccugaucagcaucuuccugcaccucgucaagaucccgacccaccgccacaucguggggaaguccugccccaagccccaccggcugaaccacaugggcaucugcagcugcgggcuguacaagcagcccggcgugccggucaaguggaagcgcugaggacuaguuauaagacugacuagcccgaugggccucccaacgggcccuccuccccuccuugcaccgagauuaaucaaaggcucuuuucagagccaccaaaaaaaaaaaaaaaaaaaaaaaaaaaaaaaaaaaaaaaaaaaaaaaaaaaaaaaaaaaaaaaaaaaaaaaaaaaaaaaaaaaaaaaaaaaaaaaaaaaaa

SEQ ID NO: 31174 - RNA, 1686 nt, Artificial Sequence
  mRNA product Design i-3 (hSL-A100) comprising derived and/or modified sequence from LASV(LP;Clade I)__AAF86701__GPCmut6 (opt1)
aggagaaagcuuaccaugggccagaucaucaccuucuuccaggaggugccccacgucaucgaggaggugaugaacaucgugcugaucgcccucagccugcuggccauccucaaggggcuguacaacaucgcgaccugcggcaucaucgggcuggucgccuuccucuuccugugcggcaaguccugcagccugacgcucaagggcggguacgagcugcagacccuggagcucaacauggagacccugaacaugugcaugccgcuguccugcacgaagaacagcucccaccacuacauccgcgugggcaacgagaccgggcucgagcugacccugaccaacacgagcaucaucaaccacaaguucugcaaccucuccgacgcccacaagaagaaccuguacgaccacgcccugaugagcaucaucuccaccuuccaccucagcauccccaacuucaaccaguacgaggccauguccugcgacuucaacggcgggaagaucagcgugcaguacaaccugucccacagcuacgcgggcgacgccgccgagcacugcgggaccgucgccaacggcgugcugcagaccuucaugcggauggcguggggcgggcgcuacaucgcccucgacuccggcaaggggaacugggacugcaucaugacgagcuaccaguaccugaucauccagaacaccaccugggaggaccacugccaguucucccggcccagccccaucggcuaccugggccuccugucccagcgcacccgggacaucuacaucagccgccggcugcucgggacguucaccuggacccugagcgacuccgagggcaacgagacccccgggggcuacugccugacgcgcuggaugcucaucgaggccgagcugaagugcuucgggaacaccgccguggccaagugcaacgagaagcacgacgaggaguucugcgacaugcugcggcuguucgacuucugcaagcaggcgauccgccggcugaaggcccccgcccagaugagcauccagcugaucaacaaggccgucaacgcccucaucaacgaccagcugaucaugaagaaccaccuccgcgacaucaugggcauccccuacugcaacuacuccaaguacugguaccucaaccacaccagcuccggccggaccagccugcccaagugcuggcugaucuccaacgggagcuaccucaacgagacgcaguucuccgacgacaucgagcagcaggcggacaacaugaucaccgagaugcugcagaaggaguacaucgagcgccagggcaagaccccgcuggggcucguggacaucuucaucuucagcaccuccuucuaccugaucagcaucuuccugcaccugaucaagaucccgacgcaccggcacaucgugggcaagcccugccccaagccccaccgccucaaccacaugggggucugcuccugcggccuguacaagcacccgggcgugcccaccaaguggaagcggugaggacuaguuauaagacugacuagcccgaugggccucccaacgggcccuccuccccuccuugcaccgagauuaaucaaaggcucuuuucagagccaccaaaaaaaaaaaaaaaaaaaaaaaaaaaaaaaaaaaaaaaaaaaaaaaaaaaaaaaaaaaaaaaaaaaaaaaaaaaaaaaaaaaaaaaaaaaaaaaaaaaaa

SEQ ID NO: 31175 - RNA, 1686 nt, Artificial Sequence
  mRNA product Design i-3 (hSL-A100) comprising derived and/or modified sequence from LASV(803213;Clade II)__AAF86703__GPCmut6 (opt1)
aggagaaagcuuaccaugggccagaucaucaccuucuuccaggaggugccccacgucaucgaggaggugaugaacaucgugcugaucgcccucagccugcuggccauccucaaggggaucuacaacgucgcgaccugcggccuguucgggcugaucuccuuccuccugcugugcggccgcagcugcuccgugacguacaaggggguguacgagcuccagacccuggagcugaacauggccaaccucaacaugugcaugccgcugagcugcaccaagaacaacucccaccacuacaucauggucggcaacgagacgggccuggagcucacccugaccaacaccagcaucaucaaccacaaguucugcaaccuguccgacgcccacaagaagaaccucuacgaccacgcccugaugagcaucaucuccacguuccaccugagcauccccaacuucaaccaguacgaggccauguccugcgacuucaacgggggcaagaucagcgugcaguacaaccucucccacagcuucgcgguggacgccgccaaccacugcgggaccaucgccaacggcguccugcagaccuucaugcggauggcguggggcggguccuacaucgcccuggacagcggcaaggggaacugggacugcaucaugaccuccuaccaguaccucaucauccagaacacgaccugggaggaccacugccaguucagccgccccucccccaucggcuaccuggggcugcucagccagcggacccgcgacaucuacaucagccggcgccugcugggcaccuucacguggacccucuccgacagcgagggcaacgaggcccccgggggcuacugccugacccgguggaugcugaucgaggccgagcucaagugcuucgggaacaccgccguggcgaagugcaacgagaagcacgacgaggaguucugcgacaugcugcgccuguucgacuucugcaagcaggccaucaagcggcucaagacgcccgcccagauguccauccagcugaucaacaaggccgugaacgcccugaucaacgaccagcucaucaugaagaaccaccuccgcgacaucaugggcauccccuacugcaacuacagccgguacugguaccugaaccacaccgucaccgggaagaccucccugccccgcugcuggcuggugagcaacggcuccuaccugaacgagacgcacuucagcgacgacaucgagcagcaggcggacaacaugaucaccgagaugcuccagaaggaguacauggaccggcagggcaagaccccgcuggggcugguggaccucuucgucuucuccaccagcuucuaccugaucuccaucuuccugcaccuggugaagaucccgacgcaccgccacaucgugggcaagcccugccccaagccccaccggcucaaccacauggggaucugcagcugcggccuguacaagcacccggggguccccgugaaguggaagcgcugaggacuaguuauaagacugacuagcccgaugggccucccaacgggcccuccuccccuccuugcaccgagauuaaucaaaggcucuuuucagagccaccaaaaaaaaaaaaaaaaaaaaaaaaaaaaaaaaaaaaaaaaaaaaaaaaaaaaaaaaaaaaaaaaaaaaaaaaaaaaaaaaaaaaaaaaaaaaaaaaaaaaa

SEQ ID NO: 31176 - RNA, 1686 nt, Artificial Sequence
  mRNA product Design i-3 (hSL-A100) comprising derived and/or modified sequence from LASV(GA391;Clade III)__CAA36645__GPCmut6 (opt1)
aggagaaagcuuaccaugggccagaucgugaccuucuuccaggaggucccccacgugaucgaggaggugaugaacaucguccugaucgcccucagcauccuggccauccugaaggggcucuacaacguggcgaccugcggccugaucgggcuggugacguuccuccugcuguccggccgcagcugcucccucaucuacaaggggaccuacgagcugcagacccuggagcucaacauggagacccugaacaugugcaugccgcugagcugcaccaagaacaacucccaccacuacauccgggucggcaacgagaccggccucgagcugacccugacgaacaccagcauccucaaccacaaguucugcaaccuguccgacgcccacaagcgcaaccuguacgaccacagccucauguccaucaucagcaccuuccaccuguccauccccaacuucaaccaguacgaggccaugagcugcgacuucaacgggggcaagaucaccgugcaguacaaccugucccacagcuucgccguggacgccgcggggcacugcggcacgcucgccaacgggguccugcagaccuucaugcggauggccuggggcggcuccuacaucgcccuggacagcgggcgcggcaacugggacugcaucaugaccuccuaccaguaccucaucauccagaacaccacgugggacgaccacugccaguucagccggcccucccccaucggguaccugggccugcucagccagcgcacccgggacaucuacaucagccgccggcugcugggcaccuucaccuggacgcucuccgacagcgaggggaacgagaccccgggcggguacugccugacccgcuggaugcugaucgaggcggagcucaagugcuucggcaacaccgccguggccaagugcaacgagaagcacgacgaggaguucugcgacaugcugcggcuguucgacuucugcaagcaggccauccgccggcucaagacgcccgcccagauguccauccagcugaucaacaaggcggugaacgcccugaucaacgaccagcucaucaugaagaaccaccuccgcgacaucauggggauccccuacugcaacuacagccgguacugguaccugaaccacaccuccaccggcaagaccagccugccccgcugcuggcugaucuccaacggcagcuaccugaacgagacgaaguucuccgacgacaucgagcagcaggccgacaacaugaucaccgagaugcuccagaaggaguacaucgaccggcaggggaagacgccccugggccuggucgaccuguucguguucagcaccuccuucuaccucaucagcaucuuccugcaccuggugaagaucccgacccaccgccacaucgucgggaagcccugccccaagccccaccggcucaaccacaugggcaucugcuccugcgggcuguacaagcagccgggcgugcccgugcgcuggaagcggugaggacuaguuauaagacugacuagcccgaugggccucccaacgggcccuccuccccuccuugcaccgagauuaaucaaaggcucuuuucagagccaccaaaaaaaaaaaaaaaaaaaaaaaaaaaaaaaaaaaaaaaaaaaaaaaaaaaaaaaaaaaaaaaaaaaaaaaaaaaaaaaaaaaaaaaaaaaaaaaaaaaaa

SEQ ID NO: 31177 - RNA, 1689 nt, Artificial Sequence
  mRNA product Design i-3 (hSL-A100) comprising derived and/or modified sequence from LASV(AV;Clade V)__CCA30314__GPCmut6 (opt1)
aggagaaagcuuaccaugggccagaucgugaccuucuuccaggaggucccccacgugaucgaggaggugaugaacaucguccugaucgcccucagcauccuggccgugcugaaggggcucuacaacaucgcgaccugcggccugaucgggcugaucacguuccuccugcugugcggccgcuccugcagcuccaaccucuacaaggggguguacgagcugcagagccuggaccucaacauggagacccugaacaugugcaugccgcuguccugcaccaagaacaacagccaccacuacauccgggucggcaacgacacgggccucgagcugacccugaccaacaccuccauccucaaccacaaguucugcaaccugagcgacgcccacaagaaggaccuguacgaccacgcccucauguccaucaucagcacguuccaccuguccauccccaacuucaaccaguacgaggccaugagcugcgacuucaacgggggcaagaucuccgugcaguacaaccugagccacuccuacgccaucgacgcggccaaccacugcgggaccguggccaacggcauccuccagaccuucaugcgcauggccuggggcgggagcuacaucgcgcuggacuccggccgggggaacugggacugcaucaugaccagcuaccaguaccugaucauccagaacacgaccugggagaaccacugccaguucucccgccccagccccaucggcuaccucgggcugcugagccagcggacccgcgacaucuacaucucccggcgccuccugggcaccuucacguggacccugagcgacuccgagggcaacgccacccccgggggcuacugccucacccgguggaugcugaucgaggccgagcugaagugcuucgggaacacggccgucgccaagugcaacgagaagcacgacgaggaguucugcgacaugcuccgccuguucgacuucugcaagcaggcgaucagccggcugaagucccccgcccagaugagcauccagcucaucaacaaggccgugaacgcccugaucaacgaccagcugaucaugaagaaccaccuccgcgacaucaugggcauccccuacugcaacuacuccaaguacugguaccugaaccacaccaucaccgggaagaccagccugcccaagugcuggcucguguccaacggcagcuaccugaacgagacgcacuucuccgacgacaucgagcagcaggccgacaacaugaucaccgagaugcugcagaaggaguacauggagcggcagggcaagaccccgcucgggcuggucgaccuguucguguucagcaccuccuucuaccugaucagcaucuuccuccgccuggugaagaucccgacgcaccggcacaucgucggcaagcccugccccaagccccaccgccugaaccacauggggaucugcuccugcggccucuacaagcagccgggggugcccgugcgguggaagcgcugaggacuaguuauaagacugacuagcccgaugggccucccaacgggcccuccuccccuccuugcaccgagauuaaucaaaggcucuuuucagagccaccaaaaaaaaaaaaaaaaaaaaaaaaaaaaaaaaaaaaaaaaaaaaaaaaaaaaaaaaaaaaaaaaaaaaaaaaaaaaaaaaaaaaaaaaaaaaaaaaaaaaa

SEQ ID NO: 31178 - RNA, 1686 nt, Artificial Sequence
  mRNA product Design i-3 (hSL-A100) comprising derived and/or modified sequence from LASV(Togo/2016/7082;Clade VI)__AMR44577__GPCmut6 (opt1)
aggagaaagcuuaccaugggccagaucaucaccuucuuccaggaggugccccacgucaucgaggaggugaugaacaucgugcugaucgcccucagccugcuggccauccucaagggggucuacaacguggcgaccugcggcaucaucgggcuggugacguuccuguuccucugcggccgcuccugcagccugaucuacaagggguccuacgagcugcagacccucgagcugaacauggagacccugaacaugugcaugccgcucagcugcacgaagaacuccagccaccacuacauccgggucggcaacgagaccggccuggagcugacccucaccaacacguccaucaucaaccacaaguucugcaaccugagcgacgcccacaagcgcaaccuguacgaccacgcccucauguccauccugagcaccuuccaccuguccauccccaacuucaaccaguacgaggccaugagcugcgacuucaacgggggcaagaucuccgugcaguacaaccucagccacgccuacgcgguggacgccgccgagcacugcgggaccgucgccaacggcgugcugcagaccuucaugcggauggcguggggcggguccuacaucgcccuggacagcggccgcgggaacugggacugcaucaugacguccuaccaguaccucaucauccagaacaccaccugggaggaccacugccaguucagccggcccucccccaucggcuaccuggggcugcucagccagcgcacccgggacaucuacaucagccgccggcugcugggcacguucaccuggacccucuccgacagcgagggcaacgagacccccgggggcuacugccugacgcgcuggaugcugaucgaggccgagcucaagugcuucgggaacaccgccguggccaagugcaacgagaagcacgacgaggaguucugcgacaugcugcggcuguucgacuucugcaagcaggcgauccagcgccucaagucccccgcccagaugagcauccagcugaucaacaaggccgucaacgcccugaucaacgaccagcucaucaugaagaaccaccuccgggacaugaugggcauccccuacugcaacuacuccaaguacugguaccugaaccacaccagcuccgggcgcaccagccugcccaagugcuggcugguguccaacggcagcuaccugaacgagacgcacuucuccgacgacaucgagcagcaggccgacaacaugaucaccgagaugcuccagaaggaguacaucgaccggcagggcaagaccccgcuggggcugguggaccucuucgucuucagcaccuccuucuaccugaucagcaucuuccugcaccugaucaagaucccgacgcaccgccacaucgugggcaagcccugccccaagccccaccggcucaaccacauggggaucugcuccugcggccuguacaagcagccgggggugcccacccgcuggaagcggugaggacuaguuauaagacugacuagcccgaugggccucccaacgggcccuccuccccuccuugcaccgagauuaaucaaaggcucuuuucagagccaccaaaaaaaaaaaaaaaaaaaaaaaaaaaaaaaaaaaaaaaaaaaaaaaaaaaaaaaaaaaaaaaaaaaaaaaaaaaaaaaaaaaaaaaaaaaaaaaaaaaaa

SEQ ID NO: 31179 - RNA, 1686 nt, Artificial Sequence
  mRNA product Design i-3 (hSL-A100) comprising derived and/or modified sequence from LASV(KAK-428;Clade n.d. (VII))__ANH09740__GPCmut6 (opt1)
aggagaaagcuuaccaugggccagaucgugaccuucuuccaggaggucccccacgugaucgaggaggugaugaacaucguccugaucgcccucagccugcuggccauccucaaggggcuguacaacuucgcgaccugcggcgugaucgggcugaucacguuccuccugcugugcggccgcuccugcagcgccaccuacaaggggcaguacgagcuccagacccuggagcugaacauggagucccucaacaugugcaugccgcugagcugcacgaagaacaacucccaccacuacauccgggccggcaacaacaccggccuggagcucacccugaccaacacgagcaucaucucccacaaguucugcaaccugagcgacgcccacaagaagaaccucuacgaccacacccugauguccaucaucaccaccuuccaccugagcauccccaacuucaaccaguacgaggccauguccugcgacuucaacgggggcaagaucagcauccaguacaaccucucccacagcuacgcgggggacgccgcccagcacugcggcacgguggccaacgggguccugcagaccuucaugcgcauggcguggggcggcuccuaccuggcccucgacagcgggcggcgcggcugggacugcaucaucuccagcuaccaguaccugaucauccagaacaccaccugggacgaccacugccaguucucccggcccagccccaucggguaccugggcuucgugagccagaagacgcgcgacaucuacaucucccggcgccuccugggcaccuucaccuggacccugagcgacuccgaggggcacgacaugccgggcggguacugccucacgcgguggaugcugaucgaggccgaccugaagugcuucggcaacaccgccguggccaagugcaacgagaagcacgacgaggaguucugcgacauguggcgccucuucgacuucugcaagcaggcgauccagcggcugaaggcccccgcccagaugaacauccagcugaucaacaaggccgucaacgcccucaucaacgaccagcugaugaugaagaaccaccuccgcgacaucauggggauccccuacugcaacuacagcaaguucugguaccugaacaacaccaccacgggccggaccucccugccccgcugcuggcugaucagcaacggcuccuaccucaacgagacccacuucagcgacgacaucgagcagcaggcggacaacaugaucaccgagaugcugcagaaggaguacauggaccggcaggggaagacgccccugggccucguggaccuguucguguucuccaccagcuucuaccugaucaccaucuuccuccaccuggucaagaucccgacccaccgccacaucguggggaagcccugccccaagccccaccggcugaaccacaugggcaucugcuccugcgggcuguacaagcagccgggcgugcccguccgcuggaagcggugaggacuaguuauaagacugacuagcccgaugggccucccaacgggcccuccuccccuccuugcaccgagauuaaucaaaggcucuuuucagagccaccaaaaaaaaaaaaaaaaaaaaaaaaaaaaaaaaaaaaaaaaaaaaaaaaaaaaaaaaaaaaaaaaaaaaaaaaaaaaaaaaaaaaaaaaaaaaaaaaaaaaa

SEQ ID NO: 31180 - RNA, 1686 nt, Artificial Sequence; identical to SEQ ID NO: 31174
  mRNA product Design i-3 (hSL-A100) comprising derived and/or modified sequence from LASV(Pinneo-NIG-1969;Clade I)__AIT17836__GPCmut6 (opt1)

SEQ ID NO: 31181 - RNA, 1686 nt, Artificial Sequence
  mRNA product Design i-3 (hSL-A100) comprising derived and/or modified sequence from LASV(ISTH0009-NIG-2011;Clade II)__AIT17404__GPCmut6 (opt1)
aggagaaagcuuaccaugggccagaucaucaccuucuuccaggaggugccccacgucaucgaggaggugaugaacaucgugcugaucgcccucagccugcuggccauccucaaggggaucuacaacgucgcgaccugcggccuguucgggcugguguccuuccuccugcugugcggccgcagcugcuccacgaccuacaaggggguguacgagcuccagacccuggagcuggacauggccagccucaacaugugcaugccgcuguccugcacgaagaacaacagccaccacuacaucauggucggcaacgagaccggccuggagcucacccugaccaacacguccaucaucaaccacaaguucugcaaccugagcgacgcccacaagaagaaccucuacgaccacgcccugauguccaucaucagcaccuuccaccuguccauccccaacuucaaccaguacgaggccaugagcugcgacuucaacgggggcaagaucuccgugcaguacaaccucagccacgcguacgccguggacgccgccaaccacugcgggaccaucgcgaacggcguccugcagaccuucaugcggauggccuggggcggguccuacaucgcccuggacagcggcaagggguccugggacugcaucaugacgagcuaccaguaccucaucauccagaacaccaccugggaggaccacugccaguucucccgccccagccccaucggcuaccuggggcugcucagccagcggacccgcgacaucuacaucucccggcgccugcugggcacguucaccuggacccucagcgacuccgagggcaacgagacccccgggggcuacugccugacgcgguggaugcugaucgaggccgagcucaagugcuucgggaacaccgccguggcgaagugcaacgagaagcacgacgaggaguucugcgacaugcugcgccuguucgacuucugcaagcaggccauccggcgccucaagacccccgcccagaugagcauccagcugaucaacaaggccgugaacgcccugaucaacgaccagcucaucaugaagaaccaccuccgggacaucaugggcaucccguacugcaacuacuccaaguacugguaccugaaccacaccgucacggggaagaccagccugccccgcugcuggcugguguccaacggcagcuaccugaacgagacccacuucuccgacgacaucgagcagcaggcggacaacaugaucaccgagcuccugcagaaggaguacauggaccggcagggcaagacgccccuggggcucguggaccuguucgucuucagcaccuccuucuaccugaucagcaucuuccugcaccucaucaagaucccgacccaccgccacaucaccggcaagcccugccccaagccccaccggcugaaccacauggggaucugcuccugcggccuguacaagcacccgggggugcccgugaaguggaagcgcugaggacuaguuauaagacugacuagcccgaugggccucccaacgggcccuccuccccuccuugcaccgagauuaaucaaaggcucuuuucagagccaccaaaaaaaaaaaaaaaaaaaaaaaaaaaaaaaaaaaaaaaaaaaaaaaaaaaaaaaaaaaaaaaaaaaaaaaaaaaaaaaaaaaaaaaaaaaaaaaaaaaaa

SEQ ID NO: 31182 - RNA, 1686 nt, Artificial Sequence
  mRNA product Design i-3 (hSL-A100) comprising derived and/or modified sequence from LASV(ISTH2010-NIG-2012;Clade II)__AIT17482__GPCmut6 (opt1)
aggagaaagcuuaccaugggccagaucaucaccuucuuccaggaggugccccacgucaucgaggaggugaugaacaucgugcugaucgcccucagccugcuggccauccucaaggggaucuacaacgucgcgaccugcggccuguucgggcugguguccuuccuccugcugugcggccgcagcugcuccacgaccuacaaggggguguacgagcuccagacccuggagcuggacauggccagccucaacaugugcaugccgcuguccugcacgaagaacaacagccaccacuacaucauggucggcaacgagaccggccuggagcucacccugaccaacacguccaucaucaaccacaaguucugcaaccugagcgacgcccacaagaagaaccucuacgaccacgcccugauguccaucaucagcaccuuccaccuguccauccccaacuucaaccaguacgaggccaugagcugcgacuucaacgggggcaagaucuccgugcaguacaaccucagccacgcguacgccguggacgccgccaaccacugcgggaccaucgcgaacggcguccugcagaccuucaugcggauggccuggggcggguccuacaucgcccuggacagcggcaagggguccugggacugcaucaugacgagcuaccaguaccucaucauccagaacaucaccugggaggaccacugccaguucucccgccccagccccaucggcuaccuggggcugcucagccagcggacccgcgacaucuacaucucccggcgccugcugggcaccuucacguggacccucagcgacuccgagggcaacgagacccccgggggcuacugccugacccgguggaugcugaucgaggccgagcucaagugcuucgggaacacggccguggcgaagugcaacgagaagcacgacgaggaguucugcgacaugcugcgccuguucgacuucugcaagcaggccauccggcgccucaagacccccgcccagaugagcauccagcugaucaacaaggccgugaacgcccugaucaacgaccagcucaucaugaagaaccaccuccgggacaucaugggcauccccuacugcaacuacuccaaguacugguaccugaaccacaccgucaccgggaagacgagccugccccgcugcuggcugguguccaacggcagcuaccugaacgagacccacuucuccgacgacaucgagcagcaggcggacaacaugaucaccgagcuccugcagaaggaguacaucgaccggcagggcaagaccccgcuggggcucguggaccuguucgucuucagcacguccuucuaccugaucagcaucuuccugcaccucgugaagaucccgacccaccgccacguggucggcaagcccugccccaagccccaccggcugaaccacauggggaucugcuccugcggccuguacaagcacccgggggugcccgugaaguggaagcgcugaggacuaguuauaagacugacuagcccgaugggccucccaacgggcccuccuccccuccuugcaccgagauuaaucaaaggcucuuuucagagccaccaaaaaaaaaaaaaaaaaaaaaaaaaaaaaaaaaaaaaaaaaaaaaaaaaaaaaaaaaaaaaaaaaaaaaaaaaaaaaaaaaaaaaaaaaaaaaaaaaaaaa

SEQ ID NO: 31183 - RNA, 1686 nt, Artificial Sequence
  mRNA product Design i-3 (hSL-A100) comprising derived and/or modified sequence from LASV(Lassa virus/H.sapiens-wt/NGA/2015/ISTH_0543;Clade II)__AVO03639__GPCmut6 (opt1)
aggagaaagcuuaccaugggccagaucaucaccuucuuccaggaggugccccacgucaucgaggaggugaugaacaucgugcugaucgcccucagccugcuggccauccucaaggggaucuacaacgucgcgaccugcggccuguucgggcugguguccuuccuccugcugugcggccgcagcugcuccacgaccuacaaggggguguacgagcuccagacccuggagcuggacauggccaaccucaacaugugcaugccgcugagcugcacgaagaacaacucccaccacuacaucauggucggcaacgagaccggccuggagcucacccugaccaacacgagcaucaucaaccacaaguucugcaaccuguccgacgcccacaagaagaaccucuacgaccacgcccugaugagcaucaucuccaccuuccaccugagcauccccaacuucaaccaguacgaggccauguccugcgacuucaacgggggcaagaucagcgugcaguacaaccucucccacaccuacgcgguggacgccgccaaccacugcgggaccaucgccaacggcguccugcagacguucaugcggauggcguggggcgggagcuacaucgcccuggacuccggcaaggggagcugggacugcaucaugaccuccuaccaguaccucgugauccagaacaccaccugggaggaccacugccaguucagccgccccucccccaucggcuaccuggggcugcucagccagcggacgcgcgacaucuacaucagccggcgccugcugggcaccuucaccuggacccucuccgacagcgagggcaacgagacgcccgggggcuacugccugacccgguggaugcugaucgaggccgagcucaagugcuucgggaacaccgccguggccaagugcaacgagaagcacgacgaggaguucugcgacaugcugcgccuguucgacuucugcaagcaggcgauccggcgccucaagacccccgcccagauguccauccagcugaucaacaaggccgucaacgcccugaucaacgaccagcucaucaugaagaaccaccuccgggacaucaugggcauccccuacugcaacuacagcaaguacugguaccugaaccacacggugaccgggaagaccucccugccccgcugcuggcuggugagcaacggcuccuaccugaacgagacccacuucagcgacgacaucgagcagcaggccgacaacaugaucacggagcuccugcagaaggaguacaucgaccggcagggcaagaccccgcuggggcucgucgaccuguucguguucuccaccagcuucuaccugaucuccaucuuccugcaccucgugaagaucccgacccaccgccacaucacgggcaagcccugccccaagccccaccggcugaaccacauggggaucugcagcugcggccuguacaagcacccggggguccccgugaaguggaagcgcugaggacuaguuauaagacugacuagcccgaugggccucccaacgggcccuccuccccuccuugcaccgagauuaaucaaaggcucuuuucagagccaccaaaaaaaaaaaaaaaaaaaaaaaaaaaaaaaaaaaaaaaaaaaaaaaaaaaaaaaaaaaaaaaaaaaaaaaaaaaaaaaaaaaaaaaaaaaaaaaaaaaaa

SEQ ID NO: 31184 - RNA, 1686 nt, Artificial Sequence
  mRNA product Design i-3 (hSL-A100) comprising derived and/or modified sequence from LASV(Lassa virus/H.sapiens-wt/NGA/2016/ISTH_0009;Clade II)__AVO03571__GPCmut6 (opt1)
aggagaaagcuuaccaugggccagaucaucaccuucuuccaggaggugccccacgucaucgaggaggugaugaacaucgugcugaucgcccucagccugcuggccauccucaaggggaucuacaacgucgcgaccugcggccugcuggggcucguguccuuccugcugcucugcggccgcagcugcuccacgaccuacaaggggguguacgagcugcagacccuggagcucgacauggccagccugaacaugugcaugccgcuguccugcacgaagaacaacagccaccacuacaucauggucggcaacgagaccggccucgagcugacccugaccaacacguccaucaucaaccacaaguucugcaaccucagcgacgcccacaagaagaaccuguacgaccacgcccugauguccaucaucagcaccuuccaccucuccauccccaacuucaaccaguacgaggccaugagcugcgacuucaacgggggccggaucuccgugcaguacaaccugagccacuccuacgcgguggacgccgccaaccacugcgggaccaucgccaacggcguccugcagaccuucaugcgcauggcguggggcgggagcuacaucgcccucgacuccggcaaggggagcugggacugcaucaugacguccuaccaguaccugaucauccagaacaccaccugggaggaccacugccaguucagccggcccagccccaucggcuaccuggggcuccugucccagcgcacccgggacaucuacaucagccgccggcugcucggcacguucaccuggacccuguccgacagcgagggcaacgagacccccgggggcuacugccugacgcgcuggaugcucaucgaggccgagcugaagugcuucgggaacaccgccguggccaagugcaacgagaagcacgacgaggaguucugcgacaugcugcggcuguucgacuucugcaagcaggcgauccgccggcugaagacccccgcccagauguccauccagcugaucaacaaggccgugaacgcccucaucaacgaccagcugaucaugaagaaccaccuccgcgacaucaugggcaucccguacugcaacuacagcaaguacugguaccucaaccacaccgucacggggaagaccucccugccccggugcuggcuggugagcaacggcuccuaccucaacgagacccacuucagcgacgacaucgagcagcaggccgacaacaugaucaccgagcugcugcagaaggaguacaucgaccgccagggcaagacgccccucgggcugguggaccuguucgucuucuccaccagcuucuaccugaucuccaucuuccuccaccuggugaagaucccgacccaccggcacaucaccggcaagcccugccccaagccccaccgccugaaccacauggggaucugcagcugcggccucuacaaccacccgggggugcccgucaaguggaagcggugaggacuaguuauaagacugacuagcccgaugggccucccaacgggcccuccuccccuccuugcaccgagauuaaucaaaggcucuuuucagagccaccaaaaaaaaaaaaaaaaaaaaaaaaaaaaaaaaaaaaaaaaaaaaaaaaaaaaaaaaaaaaaaaaaaaaaaaaaaaaaaaaaaaaaaaaaaaaaaaaaaaaa

SEQ ID NO: 31185 - RNA, 1686 nt, Artificial Sequence
  mRNA product Design i-3 (hSL-A100) comprising derived and/or modified sequence from LASV(Lassa virus/H.sapiens-wt/NGA/2016/ISTH_0017;Clade II)__AVO03567__GPCmut6 (opt1)
aggagaaagcuuaccaugggccagaucaucaccuucuuccaggaggugccccacgucaucgaggaggugaugaacaucgugcugaucgcccucagccugcuggccauccucaaggggaucuacaacgucgcgaccugcggccuguucgggcugguguccuuccuccugcugugcggccgcagcugcuccacgaccuacaaggggguguacgagcuccagacccuggagcuggacauggccagccucaacaugugcaugccgcuguccugcacgaagaacaacagccaccacuacaucauggucggcaacgagaccggccuggagcucacccugaccaacacguccaucaucaaccacaaguucugcaaccugagcgacgcccacaagaagaaccucuacgaccacgcccugauguccaucaucagcaccuuccaccuguccauccccaacuucaaccaguacgaggccaugagcugcgacuucaacgggggcaagaucuccgugcaguacaaccucagccacaccuacgcgaucgacgccgccaaccacugcgggaccaucgccaacggcgugcugcagacguucaugcggauggcguggggcggguccuacaucgcccuggacagcggcaagggguccugggacugcaucaugaccagcuaccaguaccucaucauccagaacaccaccugggaggaccacugccaguucucccgccccagccccaucggcuaccuggggcugcucagccagcggacgcgcgacaucuacaucucccggcgccugcugggcaccuucaccuggacccucagcgacuccgagggcaacgagacgcccgggggcuacugccugacccgguggaugcugaucgaggccgagcucaagugcuucgggaacaccgccgucgccaagugcaacgagaagcacgacgaggaguucugcgacaugcugcgccuguucgacuucugcaagcaggcgauccggcgccucaagacccccgcccagaugagcauccagcugaucaacaaggccgugaacgcccugaucaacgaccagcucaucaugaagaaccaccuccgggacaucaugggcauccccuacugcaacuacuccaaguacugguaccugaaccacacggugaccgggaagaccagccugccccgcugcuggcuggucuccaacggcagcuaccugaacgagacccacuucuccgacgacaucgagcagcaggccgacaacaugaucacggagcuccugcagaaggaguacauggaccggcagggcaagaccccgcuggggcucguggaccuguucguguucagcaccuccuucuaccugaucagcaucuuccugcaccucguccgcaucccgacccaccggcacgugaucggcaagcccugccccaagccccaccgccugaaccacauggggaucugcuccugcggccuguacaagcacccgggggugcccgucaaguggaagcggugaggacuaguuauaagacugacuagcccgaugggccucccaacgggcccuccuccccuccuugcaccgagauuaaucaaaggcucuuuucagagccaccaaaaaaaaaaaaaaaaaaaaaaaaaaaaaaaaaaaaaaaaaaaaaaaaaaaaaaaaaaaaaaaaaaaaaaaaaaaaaaaaaaaaaaaaaaaaaaaaaaaaa

SEQ ID NO: 31186 - RNA, 1686 nt, Artificial Sequence
  mRNA product Design i-3 (hSL-A100) comprising derived and/or modified sequence from LASV(Lassa virus/H.sapiens-wt/NGA/2018/ISTH_0959;Clade II)__AVV65099__GPCmut6 (opt1)
aggagaaagcuuaccaugggccagaucaucaccuucuuccaggaggugccccacgucaucgaggaggugaugaacaucgugcugaucgcccucagccugcuggccauccucaaggggaucuacaacgucgugaccugcggccuguucgggcugguguccuuccuccugcugugcggccgcagcugcuccacgaccuacaagggggucuacgagcuccagacccuggagcuggacauggcgagccucaacaugugcaugccgcuguccugcacgaagaacaacagccaccacuacaucauggugggcaacgagaccggccuggagcucacccugaccaacacguccaucaucaaccacaaguucugcaaccugagcgacgcccacaagaagaaccucuacgaccacgcccugauguccaucaucagcaccuuccaccuguccauccccaacuucaaccaguacgaggccaugagcugcgacuucaacgggggcaagaucuccgugcaguacaaccucagccacgccuacgcgaucgacgccgccaaccacugcgggaccaucgccaacggcguccugcagaccuucaugcggauggcguggggcggguccuacaucgcccuggacagcggcaagggguccugggacugcaucaugacgagcuaccaguaccucaucauccagaacaccaccugggaggaccacugccaguucucccgccccagccccaucggcuaccuggggcugcucagccagcggacccgcgacaucuacaucucccggcgccugcugggcacguucaccuggacccucagcgacuccgagggcaacgagacccccgggggcuacugccugacgcgguggaugcugaucgaggccgagcucaagugcuucgggaacaccgccguggccaagugcaacgagaagcacgacgaggaguucugcgacaugcugcgccuguucgacuucugcaagcaggcgauccggcgccucaagacccccgcccagaugagcauccagcugaucaacaaggccgugaacgcccugaucaacgaccagcucaucaugaagaaccaccuccgggacaucaugggcaucccguacugcaacuacuccaaguacugguaccugaaccacaccgucacggggaagaccagccugccccgcugcuggcugguguccaacggcagcuaccugaacgagacccacuucuccgacgacaucgagcagcaggccgacaacaugaucaccgagcuccugcagaaggaguacaucgaccggcagggcaagacgccccuggggcucguggaccuguucgucuucagcaccuccuucuaccugaucagcaucuuccugcaccucgugaagaucccgacccaccgccacgugaucggcaagcccugccccaagccccaccggcugaaccacauggggaucugcuccugcggccuguacaagcacccggggguccccgugaaguggaagcgcugaggacuaguuauaagacugacuagcccgaugggccucccaacgggcccuccuccccuccuugcaccgagauuaaucaaaggcucuuuucagagccaccaaaaaaaaaaaaaaaaaaaaaaaaaaaaaaaaaaaaaaaaaaaaaaaaaaaaaaaaaaaaaaaaaaaaaaaaaaaaaaaaaaaaaaaaaaaaaaaaaaaaa

SEQ ID NO: 31187 - RNA, 1686 nt, Artificial Sequence
  mRNA product Design i-3 (hSL-A100) comprising derived and/or modified sequence from LASV(LASV003-NIG-2008;Clade II)__AIT17580__GPCmut6 (opt1)
aggagaaagcuuaccaugggccagaucaucaccuucuuccaggaggugccccacgucaucgaggaggugaugaacaucgugcugaucgcccucagccugcuggccauccucaaggggaucuacaacgucgcgaccugcggccuguucgggcugguguccuuccuccugcugugcggccgcagcugcuccacgaccuacaaggggguguacgagcuccagacccuggagcuggacauggccagccucaacaugugcaugccgcuguccugcacgaagaacaacagccaccacuacaucauggucggcaacgagaccggccuggagcucacccugaccaacacguccaucaucaaccacaaguucugcaaccugagcgacgcccacaagaagaaccucuacgaccacgcccugauguccaucaucagcaccuuccaccuguccauccccaacuucaaccaguacgaggccaugagcugcgacuucaacgggggcaagaucuccgugcaguacaaccucagccacaccuacgcgguggacgccgccaaccacugcgggaccaucgccaacggcguccugcagacguucaugcggauggcguggggcggguccuacaucgcccuggacagcggcaagggguccugggacugcaucaugaccagcuaccaguaccucaucauccagaacaccaccugggaggaccacugccaguucucccgccccagccccaucggcuaccuggggcugcucagccagcggacgcgcgacaucuacaucucccggcgccugcugggcaccuucaccuggacccucagcgacuccgagagcaacgagacgccgggcggguacugccugacccgguggaugcugaucgaggccgagcucaagugcuucggcaacaccgccguggccaagugcaacgagaagcacgacgaggaguucugcgacaugcugcgccuguucgacuucugcaagcaggcgauccggcgccucaaggcccccgcccagauguccauccagcugaucaacaaggccgugaacgcccugaucaacgaccagcucaucaugaagaaccaccuccgggacaucauggggauccccuacugcaacuacagcaaguacugguaccugaaccacaccgucacgggccgcaccucccugccccggugcuggcuggugagcaacggguccuaccugaacgagacccacuucagcgacgacaucgagcagcaggcggacaacaugaucaccgagcuccugcagaaggaguacauggaccgccagggcaagacgccccugggccucguggaccuguucgucuucuccaccagcuucuaccugaucuccaucuuccugcaccucgugaagaucccgacccaccggcacgugaucgggaagcccugccccaagccccaccgccugaaccacaugggcaucugcagcugcgggcuguacaagcacccgggcguccccgugaaguggaagcggugaggacuaguuauaagacugacuagcccgaugggccucccaacgggcccuccuccccuccuugcaccgagauuaaucaaaggcucuuuucagagccaccaaaaaaaaaaaaaaaaaaaaaaaaaaaaaaaaaaaaaaaaaaaaaaaaaaaaaaaaaaaaaaaaaaaaaaaaaaaaaaaaaaaaaaaaaaaaaaaaaaaaa

SEQ ID NO: 31188 - RNA, 1686 nt, Artificial Sequence
  mRNA product Design i-3 (hSL-A100) comprising derived and/or modified sequence from LASV(LASV035-NIG-2009;Clade II)__AIT17588__GPCmut6 (opt1)
aggagaaagcuuaccaugggccagaucaucaccuucuuccaggaggugccccacgucaucgaggaggugaugaacaucgugcugaucgcccucagccugcuggccauccucaaggggaucuacaacgucgcgaccugcggccuguucgggcugguguccuuccuccugcugugcggccgcagcugcuccacgaccuacaaggggguguacgagcuccagacccuggagcuggacauggccagccucaacaugugcaugccgcuguccugcacgaagaacaacagccaccacuacaucauggucggcaacgagaccggccuggagcucacccugaccaacacguccaucaucaaccacaaguucugcaaccugagcgacgcccacaagaagaaccucuacgaccacgcccugauguccaucaucagcaccuuccaccuguccauccccaacuucaaccaguacgaggccaugagcugcgacuucaacgggggcaagaucuccgugcaguacaaccucagccacgcguacgccguggacgccgccaaccacugcgggaccaucgcgaacggcguccugcagaccuucaugcggauggccuggggcggguccuacaucgcccuggacagcggcaagggguccugggacugcaucaugacgagcuaccaguaccucaucauccagaacaccaccugggaggaccacugccaguucucccgccccagccccaucggcuaccuggggcugcucagccagcggacccgcgacaucuacaucucccggcgccugcugggcacguucaccuggacccucagcgacuccgagggcaacgagacccccgggggcuacugccugacgcgguggaugcugaucgaggccgagcucaagugcuucgggaacaccgccguggcgaagugcaacgagaagcacgacgaggaguucugcgacaugcugcgccuguucgacuucugcaagcaggccauccggcgccucaaggcccccgcccagaugagcauccagcugaucaacaaggccgugaacgcgcugaucaacgaccagcucaucaugaagaaccaccuccgggacaucaugggcauccccuacugcaacuacuccaaguacugguaccugaaccacaccgucaccgggaagacgagccugccccgcugcuggcugguguccaacggcagcuaccugaacgagacccacuucuccgacgacaucgagcagcaggccgacaacaugaucaccgagcuccugcagaaggaguacaucgaccggcagggcaagaccccgcuggggcucguggaccuguucgucuucagcacguccuucuaccugaucagcaucuuccugcaccucgugaagaucccgacccaccgccacgugaucggcaagcccugccccaagccccaccggcugaaccacauggggaucugcuccugcggccuguacaagcacccggggguccccgugaaguggaagcgcugaggacuaguuauaagacugacuagcccgaugggccucccaacgggcccuccuccccuccuugcaccgagauuaaucaaaggcucuuuucagagccaccaaaaaaaaaaaaaaaaaaaaaaaaaaaaaaaaaaaaaaaaaaaaaaaaaaaaaaaaaaaaaaaaaaaaaaaaaaaaaaaaaaaaaaaaaaaaaaaaaaaaa

SEQ ID NO: 31189 - RNA, 1686 nt, Artificial Sequence
  mRNA product Design i-3 (hSL-A100) comprising derived and/or modified sequence from LASV(LASV1000-NIG-2009;Clade II)__AIT17782__GPCmut6 (opt1)
aggagaaagcuuaccaugggccagaucaucaccuucuuccaggaggugccccacgucaucgaggaggugaugaacaucgugcugaucgcccucagccugcuggccauccucaaggggaucuacaacgucgcgaccugcggccuguucgggcugguguccuuccuccugcugugcggccgcagcugcuccacgaccuacaaggggguguacgagcuccagacccuggagcuggacauggccagccucaacaugugcaugccgcuguccugcacgaagaacaacagccaccacuacaucauggucggcaacgagaccggccuggagcucacccugaccaacacguccaucaucaaccacaaguucugcaaccugagcgacgcccacaagaagaaccucuacgaccacgcccugauguccaucaucagcaccuuccaccuguccauccccaacuucaaccaguacgaggccaugagcugcgacuucaacgggggcaagaucuccgugcaguacaaccucagccacaccuacgcgguggacgccgccaaccacugcgggaccaucgccaacggcguccugcagacguucaugcggauggcguggggcggguccuacaucgcccuggacagcggcaagggguccugggacugcaucaugaccagcuaccaguaccucaucauccagaacaccaccugggaggaccacugccaguucucccgccccagccccaucggcuaccuggggcugcucagccagcggacgcgcgacaucuacaucucccggcgccugcugggcaccuucaccuggacccucagcgacuccgagggcaacgagacgcccgggggcuacugccugacccgguggaugcugaucgaggccgagcucaagugcuucgggaacaccgccguggccaagugcaacgagaagcacgacgaggaguucugcgacaugcugcgccuguucgacuucugcaagcaggcgaucaagcggcucaagacccccgcccagaugagcauccagcugaucaacaaggccgugaacgcccugaucaacgaccagcucaucaugaagaaccaccuccgcgacaucaugggcauccccuacugcaacuacuccaaguacugguaccugaaccacacggucaccgggaagaccagccugccccggugcuggcugguguccaacggcagcuaccugaacgagacccacuucuccgacgacaucgagcagcaggccgacaacaugaucacggagcuccugcagaaggaguacaucgaccgccagggcaagaccccgcuggggcucguggaccuguucgucuucagcaccuccuucuaccugaucagcaucuuccugcaccucgugaagaucccgacccaccggcacguggucggcaagcccugccccaagccccaccgccugaaccacauggggaucugcuccugcggccuguacaagcacccgggggugcccgugaaguggaagcggugaggacuaguuauaagacugacuagcccgaugggccucccaacgggcccuccuccccuccuugcaccgagauuaaucaaaggcucuuuucagagccaccaaaaaaaaaaaaaaaaaaaaaaaaaaaaaaaaaaaaaaaaaaaaaaaaaaaaaaaaaaaaaaaaaaaaaaaaaaaaaaaaaaaaaaaaaaaaaaaaaaaaa

SEQ ID NO: 31190 - RNA, 1686 nt, Artificial Sequence
  mRNA product Design i-3 (hSL-A100) comprising derived and/or modified sequence from LASV(LASV221-NIG-2010;Clade II)__AIT17624__GPCmut6 (opt1)
aggagaaagcuuaccaugggccagaucaucaccuucuuccaggaggugccccacgucaucgaggaggugaugaacaucgugcugaucgcccucagccugcuggccauccucaaggggaucuacaacgucgcgaccugcggccuguucgggcugguguccuuccuccugcugugcggccgcagcugcuccacgaccuacaaggggguguacgagcuccagacccuggagcuggacauggccagccucaacaugugcaugccgcuguccugcacgaagaacaacagccaccacuacaucauggucggcaacgagaccggccuggagcucacccugaccaacacguccaucaucaaccacaaguucugcaaccugagcgacgcccacaagaagaaccucuacgaccacgcccugauguccaucaucagcaccuuccaccuguccauccccaacuucaaccaguacgaggccaugagcugcgacuucaacgggggcaagaucuccgugcaguacaaccucagccacaccuacgcgaucgacgccgccaaccacugcgggaccaucgccaacggcgugcugcagacguucaugcggauggcguggggcggguccuacaucgcccuggacagcggcaagggguccugggacugcaucaugaccagcuaccaguaccucaucauccagaacaccaccugggaggaccacugccaguucucccgccccagccccaucggcuaccuggggcugcucagccagcggacgcgcgacaucuacaucucccggcgccugcugggcaccuucaccuggacccucagcgacuccgagggcaacgagacgcccgggggcuacugccugacccgguggaugcugaucgaggccgagcucaagugcuucgggaacaccgccgucgccaagugcaacgagaagcacgacgaggaguucugcgacaugcugcgccuguucgacuucugcaagcaggcgauccggcgccucaagacccccgcccagaugagcauccagcugaucaacaaggccgugaacgcccugaucaacgaccagcucaucaugaagaaccaccuccgggacaucaugggcauccccuacugcaacuacuccaaguacugguaccugaaccacacggugaccgggaagaccagccugccccgcugcuggcuggucuccaacggcagcuaccugaacgagacccacuucuccgacgacaucgagcagcaggccgacaacaugaucacggagaugcuccagaaggaguacauggaccggcagggcaagaccccgcuggggcugguggaccucuucguguucagcaccuccuucuaccugaucagcaucuuccugcaccuggucaagaucccgacccaccgccacgugaucggcaagcccugccccaagccccaccggcucaaccacauggggaucugcuccugcggccuguacaagcacccgggggugcccgucaaguggaagcgcugaggacuaguuauaagacugacuagcccgaugggccucccaacgggcccuccuccccuccuugcaccgagauuaaucaaaggcucuuuucagagccaccaaaaaaaaaaaaaaaaaaaaaaaaaaaaaaaaaaaaaaaaaaaaaaaaaaaaaaaaaaaaaaaaaaaaaaaaaaaaaaaaaaaaaaaaaaaaaaaaaaaaa

SEQ ID NO: 31191 - RNA, 1686 nt, Artificial Sequence
  mRNA product Design i-3 (hSL-A100) comprising derived and/or modified sequence from LASV(LASV237-NIG-2010;Clade II)__AIT17638__GPCmut6 (opt1)
aggagaaagcuuaccaugggccagaucaucaccuucuuccaggaggugccccacgucaucgaggaggugaugaacaucgugcugaucgcccucagccugcuggccauccucaaggggaucuacaacgucgcgaccugcggccuguucgggcugguguccuuccuccugcugugcggccgcagcugcuccacgaccuacaaggggguguacgagcuccagacccuggagcuggacauggccagccucaacaugugcaugccgcuguccugcacgaagaacaacagccaccacuacaucauggucggcaacgagaccggccuggagcucacccugaccaacacguccaucaucaaccacaaguucugcaaccugagcgacgcccacaagaaggaccucuacgaccacgcccugauguccaucaucagcaccuuccaccuguccauccccaacuucaaccaguacgaggccaugagcugcgacuucaacgggggcaagaucuccgugcaguacaaccucagccacaccuacgcgguggacgccgccaaccacugcgggaccaucgccaacggcguccugcagacguucaugcggauggcguggggcggguccuacaucgcccuggacagcggcaagggguccugggacugcaucaugaccagcuaccaguaccucaucauccagaacaccaccugggaggaccacugccaguucucccgccccagccccaucggcuaccuggggcugcucagccagcggacgcgcgacaucuacaucucccggcgccugcugggcaccuucaccuggacccucagcgacuccgagggcaacgagacgcccgggggcuacugccugacccgguggaugcugaucgaggccgagcucaagugcuucgggaacaccgccguggccaagugcaacgagaagcacgacgaggaguucugcgacaugcugcgccuguucgacuucugcaagcaggcgauccggcgccucaagacccccgcccagaugagcauccagcugaucaacaaggccgugaacgcccugaucaacgaccagcucaucaugaagaaccaccuccgggacaucaugggcauccccuacugcaacuacuccaaguacugguaccugaaccacacggucaccgggaagaccagccugccccgcugcuggcugguguccaacggcagcuaccugaacgagacccacuucuccgacgacaucgagcagcaggccgacaacaugaucacggagcuccugcagaaggaguacauggaccggcagggcaagaccccgcuggggcucguggaccuguucgucuucagcaccuccuucuaccugaucagcaucuuccugcaccucaucaagaucccgacccaccgccacaucacgggcaagcccugccccaagccccaccggcugaaccacauggggaucugcuccugcggccuguacaagcacccgggggugcccgugaaguggaagcgcugaggacuaguuauaagacugacuagcccgaugggccucccaacgggcccuccuccccuccuugcaccgagauuaaucaaaggcucuuuucagagccaccaaaaaaaaaaaaaaaaaaaaaaaaaaaaaaaaaaaaaaaaaaaaaaaaaaaaaaaaaaaaaaaaaaaaaaaaaaaaaaaaaaaaaaaaaaaaaaaaaaaaa

SEQ ID NO: 31192 - RNA, 1686 nt, Artificial Sequence
  mRNA product Design i-3 (hSL-A100) comprising derived and/or modified sequence from LASV(LASV253-NIG-2011;Clade II)__AIT17670__GPCmut6 (opt1)
aggagaaagcuuaccaugggccagaucaucaccuucuuccaggaggugccccacgucaucgaggaggugaugaacaucgugcugaucgcccucagccugcuggccauccucaaggggaucuacaacgucgcgaccugcggccuguucgggcugguguccuuccuccugcugugcggccgcagcugcuccacgaccuacaaggggguguacgagcuccagacccuggagcuggacauggccagccucaacaugugcaugccgcuguccugcacgaagaacaacagccaccacuacaucauggucggcaacgagaccggccuggagcucacccugaccaacacguccaucaucaaccacaaguucugcaaccugagcgacgcccacaagaagaaccucuacgaccacgcccugauguccaucaucagcaccuuccaccuguccauccccaacuucaaccaguacgaggccaugagcugcgacuucaacgggggcaagaucuccgugcaguacaaccucagccacaccuacgcgguggacgccgccaaccacugcgggaccaucgccaacggcguccugcagacguucaugcggauggcguggggcggguccuacaucgcccuggacagcggcaagggguccugggacugcaucaugaccagcuaccaguaccucaucauccagaacaccaccugggaggaccacugccaguucucccgccccagccccaucggcuaccuggggcugcucagccagcggacgcgcgacaucuacaucucccggcgccugcugggcaccuucaccuggacccucagcgacuccgagggcaacgagacgcccgggggcuacugccugacccgguggaugcugaucgaggccgagcucaagugcuucgggaacaccgccguggccaagugcaacgagaagcacgacgaggaguucugcgacaugcugcgccuguucgacuucugcaagcaggcgauccggcgccucaaggcccccgcccagaugagcauccagcugaucaacaaggccgugaacgcccugaucaacgaccagcucaucaugaagaaccaccuccgggacaucaugggcaucccguacugcaacuacuccaaguacugguaccugaaccacaccgucacggggcgcaccagccugccccggugcuggcugguguccaacggcagcuaccugaacgagacccacuucuccgacgacaucgagcagcaggcggacaacaugaucaccgagcuccugcagaaggaguacaucgaccgccagggcaagacgccccuggggcucguggaccuguucgucuucagcaccuccuucuaccugaucagcaucuuccugcaccucgugaagaucccgacccaccggcacaucaucggcaagcccugccccaagccccaccgccugaaccacauggggaucugcuccugcggccuguacaagcacccgggggugcccgucaaguggaagcggugaggacuaguuauaagacugacuagcccgaugggccucccaacgggcccuccuccccuccuugcaccgagauuaaucaaaggcucuuuucagagccaccaaaaaaaaaaaaaaaaaaaaaaaaaaaaaaaaaaaaaaaaaaaaaaaaaaaaaaaaaaaaaaaaaaaaaaaaaaaaaaaaaaaaaaaaaaaaaaaaaaaaa

SEQ ID NO: 31193 - RNA, 1686 nt, Artificial Sequence
  mRNA product Design i-3 (hSL-A100) comprising derived and/or modified sequence from LASV(LASV254-NIG-2011;Clade II)__AIT17674__GPCmut6 (opt1)
aggagaaagcuuaccaugggccagaucaucaccuucuuccaggaggugccccacgucaucgaggaggugaugaacaucgugcugaucgcccucagccugcuggccauccucaaggggaucuacaacgucgcgaccugcggccuguucgggcugguguccuuccuccugcugugcggccgcagcugcuccacgaccuacaaggggguguacgagcuccagacccuggagcuggacaugaccaaccucaacaugugcaugccgcugagcugcaccaagaacaacucccaccacuacaucauggucggcaacgagaccggccuggagcucacccugacgaacaccagcaucaucaaccacaaguucugcaaccuguccgacgcccacaagaagaaccucuacaaccacgcccugaugagcaucaucuccaccuuccaccugagcauccccaacuucaaccaguacgaggccauguccugcgacuucaacgggggcaagaucagcgugcaguacaaccucucccacagcuacgccguggacgcggccaaccacugcgggaccaucgccaacggcguccugcagacguucaugcggauggccuggggcggguccuacaucgcgcuggacagcggcaaggggaacugggacugcaucaugaccuccuaccaguaccucaucauccagaacaccaccugggaggaccacugccaguucagccgccccucccccaucggcuaccuggggcugcucagccagcggacgcgcgacaucuacaucagccggcgccugcugggcaccuucaccuggacccucuccgacagcgagggcaacgagacgcccgggggcuacugccugacccgguggaugcugaucgaggccgagcucaagugcuucgggaacaccgccguggccaagugcaacgagaagcacgacgaggaguucugcgacaugcugcgccuguucgacuucugcaagcaggccauccggcgccucaagacccccgcgcaggccaacauccagcugaucaacaaggccgugaacgcccugaucaacgaccagcucaucaugaagaaccaccuccgggacaucaugggcauccccuacugcaacuacuccaaguacugguaccugaaccacacggucaccgggaagaccagccugccccgcugcuggcugguguccaacggcagcuaccugaacgagacccacuucuccgacgacaucgagcagcaggccgacaacaugaucacggagcuccugcagaaggaguacauggaccggcagggcaagaccccgcuggggcucguggaccuguucgucuucagcaccuccuucuaccugaucagcaucuuccugcaccucgugaagaucccgacccaccgccacgugaucggcaagcccugccccaagccccaccggcugaaccacauggggaucugcuccugcggccuguacaagcacccggggguccccgugaaguggaagcgcugaggacuaguuauaagacugacuagcccgaugggccucccaacgggcccuccuccccuccuugcaccgagauuaaucaaaggcucuuuucagagccaccaaaaaaaaaaaaaaaaaaaaaaaaaaaaaaaaaaaaaaaaaaaaaaaaaaaaaaaaaaaaaaaaaaaaaaaaaaaaaaaaaaaaaaaaaaaaaaaaaaaaa

SEQ ID NO: 31194 - RNA, 1686 nt, Artificial Sequence
  mRNA product Design i-3 (hSL-A100) comprising derived and/or modified sequence from LASV(Nig08-A19;Clade III)__ADU56618__GPCmut6 (opt1)
aggagaaagcuuaccaugggccagaucgugaccuucuuccaggaggucccccacgugaucgaggaggugaugaacaucguccugaucgcccucagcauccuggccauccugaaggggcucuacaacaucgcgaccugcggccugaucgggcuggugacguuccuccugcuguccggccgcagcugcuccaugaccuacaaggggguguacgagcuccagacccuggagcugaacaugaacacccucaacaugugcaugccgcugagcugcaccaagaacaacucccaccacuacaucauggucggcaacgagaccggccuggagcucacccugacgaacaccagccugcuccaccacaaguucugcaaccuguccgacgcccacaagaagaaccuguacgaccacacccucaugagcaucaucuccaccuuccaccugagcauccccaacuucaaccaguacgaggccauguccugcgacuucaacgggggcaagaucacggugcaguacaaccugagccacuccuacgccaucgacgccgcgaaccacugcgggaccguggccaacggcguccuccagaccuucaugcggauggccuggggcgggagcuacaucgcccuggacuccggccgcgggaagugggacugcaucaugaccagcuaccaguaccugaucauccagaacacgaccugggaggaccacugccaguucucccggcccagccccaucggcuaccucgggcugcugucccagcgcacccgggacaucuacaucagccgccggcuccugggcaccuucacguggacccugagcgacuccgagggcaacgagacccccgggggcuacugccucacccgcuggaugcugaucgaggcggagcugaagugcuucgggaacacggccguggccaagugcaacgagaagcacgacgaggaguucugcgacaugcuccggcuguucgacuucugcaagcaggccauccgccggcugaaggcccccgcgcagaugagcauccagcucaucaacaaggccgugaacgcccugaucaacgaccagcugaucaugaagaaccaccuccgcgacaucaugggcauccccuacugcaacuacuccaaguacugguaccugaaccacaccagcaccgggcggaccucccugccccgcugcuggcucgucagcaacggcuccuaccugaacgagacgcacuucagcgacgacaucgagcagcaggccgacaacaugaucaccgagaugcugcagaaggaguaccucgaccggcagggcaagaccccgcuggggcugguggaccuguucguguucuccaccagcuucuaccucaucuccaucuuccugcaccuggucaagaucccgacgcaccgccacaucgugggcaagcccugccccaagccccaccggcucaaccacauggggaucugcagcugcggccuguacaagcagccgggggugcccguccgcuggaagcggugaggacuaguuauaagacugacuagcccgaugggccucccaacgggcccuccuccccuccuugcaccgagauuaaucaaaggcucuuuucagagccaccaaaaaaaaaaaaaaaaaaaaaaaaaaaaaaaaaaaaaaaaaaaaaaaaaaaaaaaaaaaaaaaaaaaaaaaaaaaaaaaaaaaaaaaaaaaaaaaaaaaaa

SEQ ID NO: 31195 - RNA, 1689 nt, Artificial Sequence
  mRNA product Design i-3 (hSL-A100) comprising derived and/or modified sequence from LASV(G1180-SLE-2010;Clade IV)__AIT17168__GPCmut6 (opt1)
aggagaaagcuuaccaugggccagaucgugaccuucuuccaggaggucccccacgugaucgaggaggugaugaacaucguccugaucgcccucagcauccuggccgugcugaaggggcucuacaacuucgcgaccugcggccugguggggcugcucaccuuccugcugcucugcggccgcuccugcaccgccagccgguacaagggggucuacgagcugcagacccuggagcucaacauggagacccugaacaugugcaugccgcuguccugcaccaagaacaacagccaccacuacaucauggugggcaacgagaccggccucgagcugacccugacgaacaccuccaucaucaaccacaaguucugcaaccucagcgacgcccacaagaagaaccuguacgaccacgcccugauguccaucaucagcaccuuccaccucuccauccccaacuucaaccaguacgaggccaugagcugcgacuucaacgggggcaagaucuccgugcaguacaaccugagccacuccuacgcgggggacgccgccaaccacugcggcaccgucgccaacggggugcugcagacguucaugcgcauggcguggggcggcagcuacaucgcccucgacuccgggcacggcagcugggacugcaucaugaccuccuaccaguaccugaucauccagaacaccaccugggaggaccacugccaguucagccggcccucccccaucggguaccugggccuccugagccagcgcacgcgggacaucuacaucagccgccggcugcucggcaccuucaccuggacccuguccgacagcgaggggaaggacacgccgggcggguacugccugacccgcuggaugcucaucgaggccgagcugaagugcuucggcaacaccgccguggccaagugcaacgagaagcacgacgaggaguucugcgacaugcugcggcuguucgacuucugcaagcaggcgauccagcgccugaaggcccccgcccagauguccauccagcugaucaacaaggccgucaacgcccucaucaacgaccagcugaucaugaagaaccaccuccgggacaucauggggauccccuacugcaacuacagcaaguacugguaccucaaccacaccacgaccggcaagaccucccugcccaagugcuggcuggugagcaacggcuccuaccucaacgagacccacuucagcgacgacaucgagcagcaggcggacaacaugaucacggagaugcugcagaaggaguacauggagcgccaggggaagacgccccugggccucguggaccuguucgucuucuccaccagcuucuaccugaucuccaucuuccugcaccucgugaagaucccgacccaccggcacaucgugggcaagagcugccccaagccccaccgccugaaccacauggggaucugcuccugcgggcuguacaagcagcccggcgucccggugaaguggaagcggugaggacuaguuauaagacugacuagcccgaugggccucccaacgggcccuccuccccuccuugcaccgagauuaaucaaaggcucuuuucagagccaccaaaaaaaaaaaaaaaaaaaaaaaaaaaaaaaaaaaaaaaaaaaaaaaaaaaaaaaaaaaaaaaaaaaaaaaaaaaaaaaaaaaaaaaaaaaaaaaaaaaaa

SEQ ID NO: 31196 - RNA, 1689 nt, Artificial Sequence
  mRNA product Design i-3 (hSL-A100) comprising derived and/or modified sequence from LASV(G1442-SLE-2011;Clade IV)__AIT17180__GPCmut6 (opt1)
aggagaaagcuuaccaugggccagaucgugaccuucuuccaggaggucccccacgugaucgaggaggugaugaacaucguccugaucgcccucagcauccuggccgugcugaaggggcucuacaacguggcgaccugcggccugaucgggcuggucacguuccuccugcugugcggccgcuccugcaccaccacccucuacaaggggguguacgagcugcagacgcuggagcucaacauggagacccugaacaugugcaugccgcugagcugcaccaagaacaacucccaccacuacauccgggugggcaacgagacgggccucgagcugacccugaccaacaccagcaucaucaaccacaaguucugcaaccucuccgacgcccacaagaagaaccuguacgaccacgcccugaugagcaucaucuccacguuccaccucagcauccccaacuucaaccaguacgaggccauguccugcgacuucaacgggggcaagaucagcguccaguacaaccugucccacagcuacgccggggacgcggccaaccacugcggcaccguggccaacggggugcugcagaccuucaugcgcauggccuggggcggcuccuacaucgcgcucgacagcgggcggggcaacugggacugcaucaugaccuccuaccaguaccugaucauccagaacacgaccugggacgaccacugccaguucagccgccccucccccaucggguaccugggccuccugagccagcggacccgcgacgucuacaucucccggcgccugcucggcaccuucacguggacccugagcgacagcgaggggaaggacaccccgggcggguacugccugacccgguggaugcucaucgaggccgagcugaagugcuucggcaacacggccguggccaagugcaacgagaagcacgacgaggaguucugcgacaugcugcgccucuucgacuucugcaagcaggccauccagcggcugaaggcgcccgcccagauguccauccagcugaucaacaaggccgugaacgcccucaucaacgaccagcugaucaugaagaaccaccuccgcgacaucauggggauccccuacugcaacuacagcaaguacugguaccugaacaacaccgccaccggcaagaccucccugcccaagugcuggcugaucagcaacggcuccuaccucaacgagacgcacuucagcgacgacaucgagcaggaggcggacaacaugaucaccgagaugcugcagaaggaguacauggagcggcaggggaagacgccccugggccucgucgaccuguucguguucuccaccagcuucuaccugaucuccaucuuccugcaccucgugaagaucccgacccaccgccacaucgucggcaagagcugccccaagccccaccggcugaaccacauggggaucugcuccugcgggcuguacaagcagcccggcgugccggugcgcuggaagcggugaggacuaguuauaagacugacuagcccgaugggccucccaacgggcccuccuccccuccuugcaccgagauuaaucaaaggcucuuuucagagccaccaaaaaaaaaaaaaaaaaaaaaaaaaaaaaaaaaaaaaaaaaaaaaaaaaaaaaaaaaaaaaaaaaaaaaaaaaaaaaaaaaaaaaaaaaaaaaaaaaaaaa

SEQ ID NO: 31197 - RNA, 1689 nt, Artificial Sequence
  mRNA product Design i-3 (hSL-A100) comprising derived and/or modified sequence from LASV(G3010-SLE-2013;Clade IV)__AIT17344__GPCmut6 (opt1)
aggagaaagcuuaccaugggccagaucgugaccuucuuccaggaggucccccacgugaucgaggaggugaugaacaucguccugaucgcccucagcauccuggccgugcugaaggggcucuacaacuucgcgaccugcggccugguggggcuggucacguuccuccugcugugcggccgcuccugcaccaccagccucuacaaggggguguacgagcugcagacccuggagcucaacauggagacgcugaacaugugcaugccgcuguccugcaccaagaacaacagccaccacuacaucauggugggcaacgagaccggccucgagcugacgcugaccaacaccuccaucaucaaccacaaguucugcaaccucagcgacgcccacaagaagaaccuguacaaccacgcccugauguccaucaucagcaccuuccaccucuccauccccaacuucaaccaguacgaggccaugagcugcgacuucaacgggggcaagaucuccguccaguacaaccugagccacuccuacgccggggacgcggccagccacugcggcacgguggccaacggggugcugcagaccuucaugcggauggccuggggcggcuccuacaucgcgcucgacagcggguacggcaagugggacugcaucaugaccuccuaccaguaccugaucauccagaacaccacgugggaggaccacugccaguucagccgccccucccccaucggguaccugggccuccugagccagcggacccgcgacaucuacaucagccggcgccugcucggcaccuucaccuggacgcuguccgacagcgaggggaaggacaccccgggcggguacugccugacccgguggaugcucaucgaggccgagcugaagugcuucggcaacaccgccgucgccaagugcaacgagaagcacgacgaggaguucugcgacaugcugcgccucuucgacuucugcaagcaggccauccagcggcugaagacgcccgcgcagauguccauccagcugaucaacaaggccgugaacgcccucaucaacgaccagcugaucaugaagaaccaccuccgcgacaucauggggauccccuacugcaacuacagcaaguacugguaccugaaccacaccaccaccggcaagacgucccugcccaagugcuggcuggugagcaacggcuccuaccucaacgagacccacuucagcgacgacaucgagcagcaggccgacaacaugaucaccgagaugcugcagaaggaguacauggagcggcaggggaagacgccccugggccucgucgaccuguucguguucuccaccagcuucuaccugaucuccaucuuccugcaccucgugaagaucccgacccaccgccacaucgucggcaagagcugccccaagccccaccggcugaaccacauggggaucugcuccugcgggcuguacaagcagcccggcgugccggugcgcuggaagcggugaggacuaguuauaagacugacuagcccgaugggccucccaacgggcccuccuccccuccuugcaccgagauuaaucaaaggcucuuuucagagccaccaaaaaaaaaaaaaaaaaaaaaaaaaaaaaaaaaaaaaaaaaaaaaaaaaaaaaaaaaaaaaaaaaaaaaaaaaaaaaaaaaaaaaaaaaaaaaaaaaaaaa

SEQ ID NO: 31198 - RNA, 1689 nt, Artificial Sequence
  mRNA product Design i-3 (hSL-A100) comprising derived and/or modified sequence from LASV(G502-SLE-2009;Clade IV)__AIT17126__GPCmut6 (opt1)
aggagaaagcuuaccaugggccagaucgugaccuucuuccaggaggucccccacgugaucgaggaggugaugaacaucguccugaucgcccucagcauccuggccgugcugaaggggcucuacaacuucgcgaccugcggccugguggggcugcucacguuccugcugcucugcggccgcuccugcaccaccgggcuguacaagggcgucuacgagcugcagacccucgagcugaacauggagacgcugaacaugugcaugccgcucagcugcaccaagaacaacucccaccacuacaucauggugggcaacgagaccgggcuggagcugacgcucaccaacaccagcaucaucaaccacaaguucugcaaccuguccgacgcccacaagaagaaccuguacgaccacgcccucaugagcaucaucuccaccuuccaccugagcauccccaacuucaaccaguacgaggccauguccugcgacuucaacggcgggaagaucagcgugcaguacaaccugucccacagcuacgccggcgacgcggccgaccacugcgggacggucgccaacggcgugcuccagaccuucaugcggauggccuggggcggguccuacaucgcgcuggacagcggccgcgggcggugggacugcaucaugaccuccuaccaguaccugaucauccagaacaccacgugggaggaccacugccaguucagccgccccucccccaucggcuaccucggccugcugagccagcggacccgcgacaucuacaucucccggcgccuccuggggaccuucaccuggacgcugagcgacagcgagggcaaggacacccccgggggcuacugccucacccgguggaugcugaucgaggccgagcugaagugcuucgggaacaccgccguggccaagugcaacgagaagcacgacgaggaguucugcgacaugcuccgccuguucgacuucugcaagcaggccauccagcggcugaaggcgcccgcccagauguccauccagcucaucaacaaggccgucaacgcccugaucaacgaccagcuggugaugaagaaccaccuccgcgacaucaugggcauccccuacugcaacuacagccgguacugguaccugaaccacacgaccaccggccgcaccucccugcccaagugcuggcucgugagcaacggguccuaccugaacgagacgcacuucagcgacgacaucgagcagcaggccgacaacaugaucaccgagaugcugcagaaggaguacauggagcggcagggcaagaccccgcucgggcuggucgaccuguucguguucuccaccagcuucuaccugaucuccaucuuccuccaccuggugaagaucccgacgcaccgccacaucgucggcaagagcugccccaagccccaccggcugaaccacauggggaucugcuccugcggccucuacaagcagcccggcgugccggugaaguggaagcgcugaggacuaguuauaagacugacuagcccgaugggccucccaacgggcccuccuccccuccuugcaccgagauuaaucaaaggcucuuuucagagccaccaaaaaaaaaaaaaaaaaaaaaaaaaaaaaaaaaaaaaaaaaaaaaaaaaaaaaaaaaaaaaaaaaaaaaaaaaaaaaaaaaaaaaaaaaaaaaaaaaaaaa

SEQ ID NO: 31199 - RNA, 1689 nt, Artificial Sequence
  mRNA product Design i-3 (hSL-A100) comprising derived and/or modified sequence from LASV(G733-SLE-2010;Clade IV)__AIT17154__GPCmut6 (opt1)
aggagaaagcuuaccaugggccagaucgugaccuucuuccaggaggucccccacgugaucgaggaggugaugaacaucguccugaucgcccucagcauccuggccgugcugaaggggcucuacaacuucgcgaccugcggcaucguggggcuggucuccuuccugcuccugugcggccgcagcugcacgaccucccuguacaaggggguguacgagcuccagacccuggagcugaacauggagacccucaacaugugcaugccgcugagcugcaccaagaacaacucccaccacuacaucauggugggcaacgagaccggccuggagcucacccugacgaacaccagcaucaucaaccacaaguucugcaaccuguccgacgcccacaagaagaaccucuacgaccacgcccugaugagcaucaucuccaccuuccaccugagcauccccaacuucaaccaguacgaggccauguccugcgacuucaacgggggcaagaucagcguccaguacaaccucucccacagcuacgccggggacgcggccaaccacugcggcaccaucgccaacggggugcugcagacguucaugcggauggccuggggcggcuccuacaucgcgcuggacagcgggcgcgaccggugggacugcaucaugaccuccuaccaguaccucaucauccagaacaccaccugggaggaccacugccaguucagccgccccucccccaucggcuaccuggggcugcucagccagcggacgcgcgacaucuacaucagccggcgccugcugggcaccuucaccuggacccucuccgacagcgagggcaaggacacgcccgggggcuacugccugacccgguggaugcugaucgaggccgagcucaagugcuucgggaacaccgccguggccaagugcaacgagaagcacgacgaggaguucugcgacaugcugcgccuguucgacuucugcaagcaggccauccagcggcucaaggcgcccgcccagauguccauccagcugaucaacaaggccgucaacgcccugaucaacgaccagcucaucaugaagaaccaccuccgcgacaucaugggcauccccuacugcaacuacagcaaguacugguaccugaaccacaccacgaccgggaagaccucccugcccaagugcuggcuggugagcaacggcuccuaccugaacgagacccacuucagcgacgacaucgagcagcaggccgacaacaugaucacggagaugcuccagaaggaguacauggagcggcagggcaagaccccgcuggggcugguggaccucuucgucuucuccaccagcuucuaccugaucuccaucuuccugcaccuggugaagaucccgacccaccgccacguggucggcaagagcugccccaagccccaccggcucaaccacauggggaucugcuccugcggccuguacgggcagcccggcgugccggugaaguggaagcgcugaggacuaguuauaagacugacuagcccgaugggccucccaacgggcccuccuccccuccuugcaccgagauuaaucaaaggcucuuuucagagccaccaaaaaaaaaaaaaaaaaaaaaaaaaaaaaaaaaaaaaaaaaaaaaaaaaaaaaaaaaaaaaaaaaaaaaaaaaaaaaaaaaaaaaaaaaaaaaaaaaaaaa

SEQ ID NO: 31200 - RNA, 1689 nt, Artificial Sequence
  mRNA product Design i-3 (hSL-A100) comprising derived and/or modified sequence from MOPV/LASV reassortant(IGS-1;Clade IV)__AFY05576__GPCmut6 (opt1)
aggagaaagcuuaccaugggccagaucgugaccuucuuccaggaggucccccacgugaucgaggaggugaugaacaucguccugaucgcccucagcgugcuggccgugcugaaggggcucuacaacuucgcgaccugcggccuggucgggcuggugacguuccuccugcugugcggccgcuccugcaccaccagccucuacaaggggguguacgagcugcagacccuggagcucaacauggagacgcugaacaugugcaugccgcuguccugcaccaagaacaacagccaccacuacaucauggucggcaacgagaccggccucgagcugacgcugaccaacaccuccaucaucaaccacaaguucugcaaccucagcgacgcccacaagaagaaccuguacgaccacgcccugauguccaucaucagcaccuuccaccucuccauccccaacuucaaccaguacgaggccaugagcugcgacuucaacgggggcaagaucuccgugcaguacaaccugagccacuccuacgccggggacgcggccaaccacugcggcacgguggccaacgggguccugcagaccuucaugcggauggccuggggcggcagcuacaucgcgcucgacuccgggcgcggcaacugggacugcaucaugaccagcuaccaguaccugaucauccagaacaccacgugggaggaccacugccaguucucccggcccagccccaucggguaccugggccuccugucccagcgcacccgggacaucuacaucagccgccggcugcucggcaccuucaccuggacgcugagcgacuccgagggggaggacaccccgggcggguacugccugacccgcuggaugcucaucgaggccgagcugaagugcuucggcaacaccgccguggccaagugcaacgagaagcacgacgaggaguucugcgacaugcugcggcuguucgacuucugcaagcaggccauccagcgccugaaggcgcccgcccagaugagcauccagcugaucaacaaggccgugaacgcccucaucaacgaccagcugaucaugaagaaccaccuccgggacaucauggggauccccuacugcaacuacuccaaguacugguaccucaaccacacgaccaccggccgcaccagccugcccaagugcuggcuggucuccaacggcagcuaccucaacgagacgcacuucuccgacgacaucgagcagcaggccgacaacaugaucaccgagaugcugcagaaggaguacauggagcggcaggggaagacgccccugggccucguggaccuguucguguucagcaccuccuucuaccugaucagcaucuuccugcaccucgucaagaucccgacccaccgccacaucguggggaaguccugccccaagccccaccggcugaaccacaugggcaucugcagcugcgggcuguacaagcagcccggcgugccggucaaguggaagcgcugaggacuaguuauaagacugacuagcccgaugggccucccaacgggcccuccuccccuccuugcaccgagauuaaucaaaggcucuuuucagagccaccaaaaaaaaaaaaaaaaaaaaaaaaaaaaaaaaaaaaaaaaaaaaaaaaaaaaaaaaaaaaaaaaaaaaaaaaaaaaaaaaaaaaaaaaaaaaaaaaaaaaa

SEQ ID NO: 31201 - RNA, 1689 nt, Artificial Sequence
  mRNA product Design i-3 (hSL-A100) comprising derived and/or modified sequence from LASV(LM765-SLE-2012;Clade IV)__AIT17814__GPCmut6 (opt1)
aggagaaagcuuaccaugggccagaucgugaccuucuuccaggaggucccccacgugaucgaggaggugaugaacaucguccugaucgcccucagcauccuggccgugcugaaggggcucuacaacuucgcgaccugcggccugguggggcuggucacguuccuccugcugugcggccgcuccugcaccaccagccucuacaaggggguguacgagcugcagacccuggagcucaacauggagacgcugaacaugugcaugccgcuguccugcaccaagaacaacagccaccacuacaucauggugggcaacgagaccggccucgagcugacgcugaccaacaccuccaucaucgaccacaaguucugcaaccucagcgacgcccaccggaagaaccuguacgaccacgcccugauguccaucaucagcaccuuccaccucuccauccccaacuucaaccaguacgaggccaugagcugcgacuucaacgggggcaagaucuccguccaguacaaccugagccacuccuacgccaaggacgcggccgaccacugcgggacgguggccaacggcgugcugcagaccuucaugcgcauggccuggggcgggagcuacaucgcgcucgacuccggccgggggcgcugggacugcaucaugaccagcuaccaguaccugaucauccagaacaccacgugggaggaccacugccaguucucccggcccagccccaucggcuaccuggggcuccugucccagcgcacccgggacaucuacaucagccgccggcugcucggcaccuucaccuggacgcugagcgacuccgagggcaaggacacccccgggggcuacugccugacccgcuggaugcucaucgaggccgagcugaagugcuucgggaacaccgccgucgccaagugcaacgagaagcacgacgaggaguucugcgacaugcugcggcuguucgacuucugcaagcaggccauccagcgccugaaggcgcccgcccagaugagcauccagcugaucaacaaggccgugaacgcccucaucaacgaccagcugaucaugaagaaccaccuccgggacaucaugggcauccccuacugcaacuacuccaaguacugguaccucaaccacacgaccaccgggaagaccagccugcccaagugcuggcugguguccaacggcagcuaccucaacgagacgcacuucuccgacgacaucgagcagcaggccgacaacaugaucaccgagaugcugcagaaggaguacauggagcgccagggcaagaccccgcuggggcucgucgaccuguucguguucagcaccuccuucuaccugaucagcaucuuccugcaccucgugaagaucccgacgcaccggcacaucgucggcaagcccugccccaagccccaccgccugaaccacauggggaucugcuccugcggccuguacaagcagccgggggugcccgugaaguggaagcggugaggacuaguuauaagacugacuagcccgaugggccucccaacgggcccuccuccccuccuugcaccgagauuaaucaaaggcucuuuucagagccaccaaaaaaaaaaaaaaaaaaaaaaaaaaaaaaaaaaaaaaaaaaaaaaaaaaaaaaaaaaaaaaaaaaaaaaaaaaaaaaaaaaaaaaaaaaaaaaaaaaaaa

SEQ ID NO: 31202 - RNA, 1689 nt, Artificial Sequence
  mRNA product Design i-3 (hSL-A100) comprising derived and/or modified sequence from LASV(LM776-SLE-2012;Clade IV)__AIT17824__GPCmut6 (opt1)
aggagaaagcuuaccaugggccagaucgugaccuucuuccaggaggucccccacgugaucgaggaggugaugaacaucguccugaucgcccucagcauccuggccgugcugaaggggcucuacaacuucgcgaccugcggccugguggggcuggucacguuccuccugcugugcggccgcuccugcaccaccagcguguacaaggggguguacgagcuccagacccuggagcugaacauggagacgcucaacaugugcaugccgcuguccugcaccaagaacaacagccaccacuacaucauggucggcaacgagaccggccuggagcucacgcugaccaacaccuccaucaucaaccacaaguucugcaaccugagcgacgcccacaagaagaaccucuacgaccacgcccugauguccaucaucagcaccuuccaccuguccauccccaacuucaaccaguacgaggccaugagcugcgacuucaacgggggcaagaucuccgugcaguacaaccucagccacuccuacgccggggacgcggccaaccacugcggcacgguggccaacgggguccugcagaccuucaugcggauggccuggggcggcagcuacaucgcgcuggacuccgggcacggcaagugggacugcaucaugaccagcuaccaguaccucaucauccagaacaccacgugggaggaccacugccaguucucccgccccagccccaucggguaccugggccugcucucccagcggacccgcgacaucuacaucagccggcgccugcugggcaccuucaccuggacgcucagcgacuccgaggggaaggacaccccgggcggguacugccugacccgguggaugcugaucgaggccgagcucaagugcuucggcaacaccgccguggccaagugcaacgagaagcacgacgaggaguucugcgacaugcugcgccuguucgacuucugcaagcaggccauccagcggcucaaggcgcccgcccagaugagcauccagcugaucaacaaggccgugaacgcccugaucaacgaccagcucaucaugaagaaccaccuccgcgacaucauggggauccccuacugcaacuacuccaaguacugguaccugaaccacacgaccaccggcaagaccagccugcccaagugcuggcuggucuccaacggcagcuaccugaacgagacgcacuucuccgacgacaucgagcagcaggccgacaacaugaucaccgagaugcuccagaaggaguacauggagcggcaggggaagacgccccugggccugguggaccucuucguguucagcaccuccuucuaccugaucagcaucuuccugcaccuggucaagaucccgacccaccgccacaucguggggaaguccugccccaagccccaccggcucaaccacaugggcaucugcagcugcgggcuguacaagcagcccggcgugccgguccgcuggaagcggugaggacuaguuauaagacugacuagcccgaugggccucccaacgggcccuccuccccuccuugcaccgagauuaaucaaaggcucuuuucagagccaccaaaaaaaaaaaaaaaaaaaaaaaaaaaaaaaaaaaaaaaaaaaaaaaaaaaaaaaaaaaaaaaaaaaaaaaaaaaaaaaaaaaaaaaaaaaaaaaaaaaaa

SEQ ID NO: 31203 - RNA, 1689 nt, Artificial Sequence
  mRNA product Design i-3 (hSL-A100) comprising derived and/or modified sequence from LASV(Mad39;Clade IV)__ANH09722__GPCmut6 (opt1)
aggagaaagcuuaccaugggccagaucgugaccuucuuccaggaggucccccacgugaucgaggaggugaugaacaucguccugaucgcccucagcauccuggccgugcugaaggggcucuacaacguggcgaccugcggccugaucgggcuggucacguuccuccugcugugcggccgcuccugcaccaccacccucuacaaggggguguacgagcugcaggcccuggagcucaacauggagacgcugaacaugugcaugccgcugagcugcaccaagaacaacucccaccacuacauccgggugggcaacgagaccggccucgagcugacgcugaccaacaccagccucaucaaccacaaguucugcaaccuguccgacgcccacaagaagaaccuguacgaccacgcccucaugagcaucaucuccaccuuccaccugagcauccccaacuucaaccaguacgaggccauguccugcgacuucaacgacgggaagaucagcguccaguacaaccugucccacacguacgcgggcgacaccgccaaccacugcgggaccguggccaacggcgugcuccagaccuucaugcgcauggccuggggcgggagcuacaucgcgcuggacuccggccgcgggggcugggacugcaucaugacgagcuaccaguaccugaucauccagaacaccaccugggaggaccacugccaguucucccggcccagccccaucggguaccucggccugcugucccagcggacccgcgacaucuacaucagccggcgccuccugggcacguucaccuggacccuguccgacagcgaggggaaggacaccccgggcggguacugccucacgcgguggaugcugaucgaggccgagcugaagugcuucggcaacaccgccgucgccaagugcaacgagaagcacgacgaggaguucugcgacaugcuccgccuguucgacuucugcaagcaggccauccagcggcugaaggcgcccgcccagaugagcauccagcucaucaacaaggccgugaacgcccugaucaacgaccagcugaucaugaagaaccaccuccgcgacaucauggggauccccuacugcaacuacuccaaguacugguaccugaaccacaccgugaccggcaagacgagccugcccaagugcuggcucgucuccaacggcagcuaccugaacgagacccacuucuccgacgacaucgagcagcaggccgacaacaugaucaccgagaugcugcagaaggaguacauggagcggcaggggaagacgccccucggccugguggaccuguucguguucagcaccuccuucuaccugaucagcaucuuccuccaccuggucaagaucccgacccaccgccacgugguggggaagcccugccccaagccccaccggcugaaccacaugggcaucugcuccugcggguucuacaagcagccgggcguccccgugcgcuggaagcggugaggacuaguuauaagacugacuagcccgaugggccucccaacgggcccuccuccccuccuugcaccgagauuaaucaaaggcucuuuucagagccaccaaaaaaaaaaaaaaaaaaaaaaaaaaaaaaaaaaaaaaaaaaaaaaaaaaaaaaaaaaaaaaaaaaaaaaaaaaaaaaaaaaaaaaaaaaaaaaaaaaaaa

SEQ ID NO: 31204 - RNA, 1689 nt, Artificial Sequence
  mRNA product Design i-3 (hSL-A100) comprising derived and/or modified sequence from LASV(Z0947-SLE-2011;Clade IV)__AIT17840__GPCmut6 (opt1)
aggagaaagcuuaccaugggccagaucgugaccuucuuccaggaggucccccacgugaucgaggaggugaugaacaucguccugaucgcccucagcauccuggccgugcugaaggggcucuacaacuucgcgaccugcggccugguggggcuggucacguuccuccugcugugcggccgcuccugcaccaucagccucuacaaggggguguacgagcugcagacccuggagcucaacauggagacccugaacaugugcaugccgcuguccugcaccaagaacaacagccaccacuacaucauggugggcaacgagaccggccucgagcugacccugacgaacaccuccaucaucaaccacaaguucugcaaccucagcgacgcccacaagaagaaccuguacgaccacgcccugauguccaucaucagcaccuuccaccucuccauccccaacuucaaccaguacgaggccaugagcugcgacuucaacgggggcaagaucuccguccaguacaaccugagccacuccuacgccggggacgcggccaaccacugcggcaccguggccaacggggugcugcagacguucaugcggauggccuggggcggcagcuacaucgcgcucgacuccgggcgcgaccggugggacugcaucaugaccagcuaccaguaccugaucauccagaacaccaccugggaggaccacugccaguucucccgccccagccccaucggcuaccuggggcuccugucccagcggacgcgcgacaucuacaucagccggcgccugcucggcaccuucaccuggacccugagcgacuccgagggcaaggacacgcccgggggcuacugccugacccgguggaugcucaucgaggccgagcugaagugcuucgggaacaccgccgucgccaagugcaacgagaagcacgacgaggaguucugcgacaugcugcgccucuucgacuucugcaagcaggccauccagcggcugaaggcgcccgcccagaugagcauccagcugaucaacaaggccgugaacgcccucaucaacgaccagcugaucaugaagaaccaccuccgcgacaucaugggcauccccuacugcaacuacuccaaguacugguaccugaaccacaccacgaccgggaagaccagccugcccaagugcuggcugguguccaacggcagcuaccucaacgagacccacuucuccgacgacaucgagcagcaggccgacaacaugaucacggagaugcugcagaaggaguacauggagcggcagggcaagaccccgcuggggcucgucgaccuguucguguucagcaccuccuucuaccugaucagcaucuuccugcaccucgugaagaucccgacccaccgccacaucgucggcaagcccugccccaagccccaccggcugaaccacauggggaucugcuccugcggccuguacaagcagccgggggugcccgugaaguggaagcgcugaggacuaguuauaagacugacuagcccgaugggccucccaacgggcccuccuccccuccuugcaccgagauuaaucaaaggcucuuuucagagccaccaaaaaaaaaaaaaaaaaaaaaaaaaaaaaaaaaaaaaaaaaaaaaaaaaaaaaaaaaaaaaaaaaaaaaaaaaaaaaaaaaaaaaaaaaaaaaaaaaaaaa

SEQ ID NO: 31205 - RNA, 1689 nt, Artificial Sequence
  mRNA product Design i-3 (hSL-A100) comprising derived and/or modified sequence from LASV(Josiah;Clade IV)__NP_694870__GPCmut6 (opt1)
aggagaaagcuuaccaugggccagaucgugaccuucuuccaggaggucccccacgugaucgaggaggugaugaacaucguccugaucgcccucagcgugcuggccgugcugaaggggcucuacaacuucgcgaccugcggccuggucgggcuggugacguuccuccugcugugcggccgcuccugcaccaccagccucuacaaggggguguacgagcugcagacccuggagcucaacauggagacgcugaacaugugcaugccgcuguccugcaccaagaacaacagccaccacuacaucauggucggcaacgagaccggccucgagcugacccugacgaacaccuccaucaucaaccacaaguucugcaaccucagcgacgcccacaagaagaaccuguacgaccacgcccugauguccaucaucagcaccuuccaccucuccauccccaacuucaaccaguacgaggccaugagcugcgacuucaacgggggcaagaucuccgugcaguacaaccugagccacuccuacgccggggacgcggccaaccacugcggcaccguggccaacgggguccugcagacguucaugcggauggccuggggcggcagcuacaucgcgcucgacuccgggcgcggcaacugggacugcaucaugaccagcuaccaguaccugaucauccagaacaccaccugggaggaccacugccaguucucccggcccagccccaucggguaccugggccuccugucccagcgcacgcgggacaucuacaucagccgccggcugcucggcaccuucaccuggacccugagcgacuccgaggggaaggacacgccgggcggguacugccugacccgcuggaugcucaucgaggccgagcugaagugcuucggcaacaccgccguggccaagugcaacgagaagcacgacgaggaguucugcgacaugcugcggcuguucgacuucugcaagcaggccauccagcgccugaaggcgcccgcccagaugagcauccagcugaucaacaaggccgugaacgcccucaucaacgaccagcugaucaugaagaaccaccuccgggacaucauggggauccccuacugcaacuacuccaaguacugguaccucaaccacaccacgaccggccgcaccagccugcccaagugcuggcuggucuccaacggcagcuaccucaacgagacccacuucuccgacgacaucgagcagcaggccgacaacaugaucacggagaugcugcagaaggaguacauggagcggcaggggaagaccccgcugggccugguggaccucuucguguucagcaccuccuucuaccugaucagcaucuuccugcaccucgucaagauccccacccaccgccacaucguggggaaguccugccccaagccccaccggcugaaccacaugggcaucugcagcugcgggcuguacaagcagccgggcgugcccgucaaguggaagcgcugaggacuaguuauaagacugacuagcccgaugggccucccaacgggcccuccuccccuccuugcaccgagauuaaucaaaggcucuuuucagagccaccaaaaaaaaaaaaaaaaaaaaaaaaaaaaaaaaaaaaaaaaaaaaaaaaaaaaaaaaaaaaaaaaaaaaaaaaaaaaaaaaaaaaaaaaaaaaaaaaaaaaa

SEQ ID NO: 31206 - RNA, 1686 nt, Artificial Sequence
  mRNA product Design i-3 (hSL-A100) comprising derived and/or modified sequence from LASV(LP;Clade I)__AAF86701__GPCmut6 (opt1)
aggagaaagcuuaccaugggccagaucaucaccuucuuccaggaggugccccacgucaucgaggaggugaugaacaucgugcugaucgcccucagccugcuggccauccucaaggggcuguacaacaucgcgaccugcggcaucaucgggcuggucgccuuccucuuccugugcggcaaguccugcagccugacgcucaagggcggguacgagcugcagacccuggagcucaacauggagacccugaacaugugcaugccgcuguccugcaccaagaacagcucccaccacuacauccgcgugggcaacgagacggggcucgagcugacccugaccaacaccagcaucaucaaccacaaguucugcaaccucuccgacgcccacaagaagaaccuguacgaccacgcccugaugagcaucaucuccacguuccaccucagcauccccaacuucaaccaguacgaggccauguccugcgacuucaacggcgggaagaucagcgugcaguacaaccugucccacagcuacgcgggcgacgccgccgagcacugcgggaccgucgccaacggcgugcugcagaccuucaugcggauggcguggggcgggcgcuacaucgcccucgacuccggcaaggggaacugggacugcaucaugaccagcuaccaguaccugaucauccagaacacgaccugggaggaccacugccaguucucccggcccagccccaucggcuaccugggccuccugucccagcgcacccgggacaucuacaucagccgccggcugcucgggaccuucacguggacccugagcgacuccgagggcaacgagacccccgggggcuacugccugacccgcuggaugcucaucgaggccgagcugaagugcuucgggaacacggccguggccaagugcaacgagaagcacgacgaggaguucugcgacaugcugcggcuguucgacuucugcaagcaggcgauccgccggcugaaggccccggcccagaugagcauccagcugaucaacaaggccgucaacgcccucaucaacgaccagcugaucaugaagaaccaccuccgcgacaucaugggcauccccuacugcaacuacuccaaguacugguaccucaaccacaccagcuccggccggaccagccugcccaagugcuggcugaucuccaacgggagcuaccucaacgagacccaguucuccgacgacaucgagcagcaggcggacaacaugaucacggagaugcugcagaaggaguacaucgagcgccagggcaagaccccgcuggggcugguggacaucuucaucuucagcaccuccuucuaccucaucagcaucuuccugcaccugaucaagauccccacccaccggcacaucgugggcaagcccugccccaagccgcaccgccucaaccacaugggggucugcuccugcggccuguacaagcaccccggcgugcccacgaaguggaagcggugaggacuaguuauaagacugacuagcccgaugggccucccaacgggcccuccuccccuccuugcaccgagauuaaucaaaggcucuuuucagagccaccaaaaaaaaaaaaaaaaaaaaaaaaaaaaaaaaaaaaaaaaaaaaaaaaaaaaaaaaaaaaaaaaaaaaaaaaaaaaaaaaaaaaaaaaaaaaaaaaaaaaa

SEQ ID NO: 31207 - RNA, 1686 nt, Artificial Sequence
  mRNA product Design i-3 (hSL-A100) comprising derived and/or modified sequence from LASV(803213;Clade II)__AAF86703__GPCmut6 (opt1)
aggagaaagcuuaccaugggccagaucaucaccuucuuccaggaggugccccacgucaucgaggaggugaugaacaucgugcugaucgcccucagccugcuggccauccucaaggggaucuacaacgucgcgaccugcggccuguucgggcugaucuccuuccuccugcugugcggccgcagcugcuccgugacguacaaggggguguacgagcuccagacccuggagcugaacauggccaaccucaacaugugcaugccgcugagcugcaccaagaacaacucccaccacuacaucauggucggcaacgagaccggccuggagcucacgcugaccaacaccagcaucaucaaccacaaguucugcaaccuguccgacgcccacaagaagaaccucuacgaccacgcccugaugagcaucaucuccaccuuccaccugagcauccccaacuucaaccaguacgaggccauguccugcgacuucaacgggggcaagaucagcgugcaguacaaccucucccacagcuucgcgguggacgccgccaaccacugcgggacgaucgccaacggcguccugcagaccuucaugcggauggcguggggcggguccuacaucgcccuggacagcggcaaggggaacugggacugcaucaugaccuccuaccaguaccucaucauccagaacaccacgugggaggaccacugccaguucagccgccccucccccaucggcuaccuggggcugcucagccagcggacccgcgacaucuacaucagccggcgccugcugggcaccuucaccuggacgcucuccgacagcgagggcaacgaggcccccgggggcuacugccugacccgguggaugcugaucgaggccgagcucaagugcuucgggaacaccgccguggcgaagugcaacgagaagcacgacgaggaguucugcgacaugcugcgccuguucgacuucugcaagcaggccaucaagcggcucaagaccccggcccagauguccauccagcugaucaacaaggccgugaacgcccugaucaacgaccagcucaucaugaagaaccaccuccgcgacaucaugggcauccccuacugcaacuacagccgguacugguaccugaaccacacggucaccgggaagaccucccugccccgcugcuggcuggugagcaacggcuccuaccugaacgagacccacuucagcgacgacaucgagcagcaggcggacaacaugaucacggagaugcuccagaaggaguacauggaccggcagggcaagaccccgcuggggcugguggaccuguucgucuucuccaccagcuucuaccucaucuccaucuuccugcaccuggugaagauccccacccaccgccacaucgugggcaagcccugccccaagccgcaccggcucaaccacauggggaucugcagcugcggccuguacaagcaccccgggguccccgugaaguggaagcgcugaggacuaguuauaagacugacuagcccgaugggccucccaacgggcccuccuccccuccuugcaccgagauuaaucaaaggcucuuuucagagccaccaaaaaaaaaaaaaaaaaaaaaaaaaaaaaaaaaaaaaaaaaaaaaaaaaaaaaaaaaaaaaaaaaaaaaaaaaaaaaaaaaaaaaaaaaaaaaaaaaaaaa

SEQ ID NO: 31208 - RNA, 1686 nt, Artificial Sequence
  mRNA product Design i-3 (hSL-A100) comprising derived and/or modified sequence from LASV(GA391;Clade III)__CAA36645__GPCmut6 (opt1)
aggagaaagcuuaccaugggccagaucgugaccuucuuccaggaggucccccacgugaucgaggaggugaugaacaucguccugaucgcccucagcauccuggccauccugaaggggcucuacaacguggcgaccugcggccugaucgggcuggugacguuccuccugcuguccggccgcagcugcucccucaucuacaaggggaccuacgagcugcagacccuggagcucaacauggagacccugaacaugugcaugccgcugagcugcacgaagaacaacucccaccacuacauccgggucggcaacgagaccggccucgagcugacccugaccaacacgagcauccucaaccacaaguucugcaaccuguccgacgcccacaagcgcaaccuguacgaccacagccucauguccaucaucagcaccuuccaccuguccauccccaacuucaaccaguacgaggccaugagcugcgacuucaacgggggcaagaucaccgugcaguacaaccugucccacagcuucgccguggacgccgcggggcacugcggcacccucgccaacgggguccugcagacguucaugcggauggccuggggcggcuccuacaucgcccuggacagcgggcgcggcaacugggacugcaucaugaccuccuaccaguaccucaucauccagaacaccaccugggacgaccacugccaguucagccggcccucccccaucggguaccugggccugcucagccagcgcacgcgggacaucuacaucagccgccggcugcugggcaccuucaccuggacccucuccgacagcgaggggaacgagacgccgggcggguacugccugacccgcuggaugcugaucgaggcggagcucaagugcuucggcaacaccgccguggccaagugcaacgagaagcacgacgaggaguucugcgacaugcugcggcuguucgacuucugcaagcaggccauccgccggcucaagacccccgcccagauguccauccagcugaucaacaaggcggugaacgcccugaucaacgaccagcucaucaugaagaaccaccuccgcgacaucauggggauccccuacugcaacuacagccgguacugguaccugaaccacacguccaccggcaagaccagccugccccgcugcuggcugaucuccaacggcagcuaccugaacgagaccaaguucuccgacgacaucgagcagcaggccgacaacaugaucacggagaugcugcagaaggaguacaucgaccggcaggggaagaccccgcucggccuggucgaccuguucguguucagcaccuccuucuaccucaucagcaucuuccugcaccuggugaagauccccacccaccgccacaucgucgggaagcccugccccaagccgcaccggcucaaccacaugggcaucugcuccugcgggcuguacaagcagcccggcgugcccgugcgcuggaagcggugaggacuaguuauaagacugacuagcccgaugggccucccaacgggcccuccuccccuccuugcaccgagauuaaucaaaggcucuuuucagagccaccaaaaaaaaaaaaaaaaaaaaaaaaaaaaaaaaaaaaaaaaaaaaaaaaaaaaaaaaaaaaaaaaaaaaaaaaaaaaaaaaaaaaaaaaaaaaaaaaaaaaa

SEQ ID NO: 31209 - RNA, 1689 nt, Artificial Sequence
  mRNA product Design i-3 (hSL-A100) comprising derived and/or modified sequence from LASV(AV;Clade V)__CCA30314__GPCmut6 (opt1)
aggagaaagcuuaccaugggccagaucgugaccuucuuccaggaggucccccacgugaucgaggaggugaugaacaucguccugaucgcccucagcauccuggccgugcugaaggggcucuacaacaucgcgaccugcggccugaucgggcugaucacguuccuccugcugugcggccgcuccugcagcuccaaccucuacaaggggguguacgagcugcagagccuggaccucaacauggagacccugaacaugugcaugccgcuguccugcaccaagaacaacagccaccacuacauccgggucggcaacgacaccggccucgagcugacgcugaccaacaccuccauccucaaccacaaguucugcaaccugagcgacgcccacaagaaggaccuguacgaccacgcccucauguccaucaucagcaccuuccaccuguccauccccaacuucaaccaguacgaggccaugagcugcgacuucaacgggggcaagaucuccgugcaguacaaccugagccacuccuacgccaucgacgcggccaaccacugcgggacgguggccaacggcauccuccagaccuucaugcgcauggccuggggcgggagcuacaucgcgcuggacuccggccgggggaacugggacugcaucaugaccagcuaccaguaccugaucauccagaacaccacgugggagaaccacugccaguucucccgccccagccccaucggcuaccucgggcugcugagccagcggacccgcgacaucuacaucucccggcgccuccugggcaccuucaccuggacgcugagcgacuccgagggcaacgccacccccgggggcuacugccucacccgguggaugcugaucgaggccgagcugaagugcuucgggaacaccgccgucgccaagugcaacgagaagcacgacgaggaguucugcgacaugcuccgccuguucgacuucugcaagcaggcgaucagccggcugaaguccccggcccagaugagcauccagcucaucaacaaggccgugaacgcccugaucaacgaccagcugaucaugaagaaccaccuccgcgacaucaugggcauccccuacugcaacuacuccaaguacugguaccugaaccacacgaucaccgggaagaccagccugcccaagugcuggcucguguccaacggcagcuaccugaacgagacccacuucuccgacgacaucgagcagcaggccgacaacaugaucacggagaugcugcagaaggaguacauggagcggcagggcaagaccccgcuggggcucgucgaccuguucguguucagcaccuccuucuaccugaucagcaucuuccuccgccuggugaagauccccacccaccggcacaucgucggcaagcccugccccaagccgcaccgccugaaccacauggggaucugcuccugcggccucuacaagcagcccggggugcccgugcgguggaagcgcugaggacuaguuauaagacugacuagcccgaugggccucccaacgggcccuccuccccuccuugcaccgagauuaaucaaaggcucuuuucagagccaccaaaaaaaaaaaaaaaaaaaaaaaaaaaaaaaaaaaaaaaaaaaaaaaaaaaaaaaaaaaaaaaaaaaaaaaaaaaaaaaaaaaaaaaaaaaaaaaaaaaaa

SEQ ID NO: 31210 - RNA, 1686 nt, Artificial Sequence
  mRNA product Design i-3 (hSL-A100) comprising derived and/or modified sequence from LASV(Togo/2016/7082;Clade VI)__AMR44577__GPCmut6 (opt1)
aggagaaagcuuaccaugggccagaucaucaccuucuuccaggaggugccccacgucaucgaggaggugaugaacaucgugcugaucgcccucagccugcuggccauccucaagggggucuacaacguggcgaccugcggcaucaucgggcuggugacguuccuguuccucugcggccgcuccugcagccugaucuacaagggguccuacgagcugcagacccucgagcugaacauggagacccugaacaugugcaugccgcucagcugcaccaagaacuccagccaccacuacauccgggucggcaacgagacgggccuggagcugacccucaccaacaccuccaucaucaaccacaaguucugcaaccugagcgacgcccacaagcgcaaccuguacgaccacgcccucauguccauccugagcacguuccaccuguccauccccaacuucaaccaguacgaggccaugagcugcgacuucaacgggggcaagaucuccgugcaguacaaccucagccacgccuacgcgguggacgccgccgagcacugcgggaccgucgccaacggcgugcugcagaccuucaugcggauggcguggggcggguccuacaucgcccuggacagcggccgcgggaacugggacugcaucaugaccuccuaccaguaccucaucauccagaacacgaccugggaggaccacugccaguucagccggcccucccccaucggcuaccuggggcugcucagccagcgcacccgggacaucuacaucagccgccggcugcugggcaccuucacguggacccucuccgacagcgagggcaacgagacccccgggggcuacugccugacccgcuggaugcugaucgaggccgagcucaagugcuucgggaacacggccguggccaagugcaacgagaagcacgacgaggaguucugcgacaugcugcggcuguucgacuucugcaagcaggcgauccagcgccucaaguccccggcccagaugagcauccagcugaucaacaaggccgucaacgcccugaucaacgaccagcucaucaugaagaaccaccuccgggacaugaugggcauccccuacugcaacuacuccaaguacugguaccugaaccacaccagcuccgggcgcaccagccugcccaagugcuggcugguguccaacggcagcuaccugaacgagacccacuucuccgacgacaucgagcagcaggccgacaacaugaucacggagaugcuccagaaggaguacaucgaccggcagggcaagaccccgcuggggcugguggaccuguucgucuucagcaccuccuucuaccucaucagcaucuuccugcaccugaucaagauccccacccaccgccacaucgugggcaagcccugccccaagccgcaccggcucaaccacauggggaucugcuccugcggccuguacaagcagcccggggugcccacgcgcuggaagcggugaggacuaguuauaagacugacuagcccgaugggccucccaacgggcccuccuccccuccuugcaccgagauuaaucaaaggcucuuuucagagccaccaaaaaaaaaaaaaaaaaaaaaaaaaaaaaaaaaaaaaaaaaaaaaaaaaaaaaaaaaaaaaaaaaaaaaaaaaaaaaaaaaaaaaaaaaaaaaaaaaaaaa

SEQ ID NO: 31211 - RNA, 1686 nt, Artificial Sequence
  mRNA product Design i-3 (hSL-A100) comprising derived and/or modified sequence from LASV(KAK-428;Clade n.d. (VII))__ANH09740__GPCmut6 (opt1)
aggagaaagcuuaccaugggccagaucgugaccuucuuccaggaggucccccacgugaucgaggaggugaugaacaucguccugaucgcccucagccugcuggccauccucaaggggcuguacaacuucgcgaccugcggcgugaucgggcugaucacguuccuccugcugugcggccgcuccugcagcgccaccuacaaggggcaguacgagcuccagacccuggagcugaacauggagucccucaacaugugcaugccgcugagcugcaccaagaacaacucccaccacuacauccgggccggcaacaacacgggccuggagcucacccugaccaacaccagcaucaucucccacaaguucugcaaccugagcgacgcccacaagaagaaccucuacgaccacacgcugauguccaucaucaccaccuuccaccugagcauccccaacuucaaccaguacgaggccauguccugcgacuucaacgggggcaagaucagcauccaguacaaccucucccacagcuacgcgggggacgccgcccagcacugcggcaccguggccaacgggguccugcagacguucaugcgcauggcguggggcggcuccuaccuggcccucgacagcgggcggcgcggcugggacugcaucaucuccagcuaccaguaccugaucauccagaacaccaccugggacgaccacugccaguucucccggcccagccccaucggguaccugggcuucgugagccagaagacccgcgacaucuacaucucccggcgccuccugggcacguucaccuggacccugagcgacuccgaggggcacgacaugccgggcggguacugccucacccgguggaugcugaucgaggccgaccugaagugcuucggcaacacggccguggccaagugcaacgagaagcacgacgaggaguucugcgacauguggcgccucuucgacuucugcaagcaggcgauccagcggcugaaggcccccgcccagaugaacauccagcugaucaacaaggccgucaacgcccucaucaacgaccagcugaugaugaagaaccaccuccgcgacaucauggggauccccuacugcaacuacagcaaguucugguaccugaacaacaccaccaccggccggacgucccugccccgcugcuggcugaucagcaacggcuccuaccucaacgagacccacuucagcgacgacaucgagcagcaggcggacaacaugaucaccgagaugcugcagaaggaguacauggaccggcaggggaagaccccgcugggccucguggaccuguucguguucuccacgagcuucuaccugaucaccaucuuccugcaccucgucaagauccccacccaccgccacaucguggggaagcccugccccaagccgcaccggcugaaccacaugggcaucugcuccugcgggcuguacaagcagcccggcgugcccguccgcuggaagcggugaggacuaguuauaagacugacuagcccgaugggccucccaacgggcccuccuccccuccuugcaccgagauuaaucaaaggcucuuuucagagccaccaaaaaaaaaaaaaaaaaaaaaaaaaaaaaaaaaaaaaaaaaaaaaaaaaaaaaaaaaaaaaaaaaaaaaaaaaaaaaaaaaaaaaaaaaaaaaaaaaaaaa

SEQ ID NO: 31212 - RNA, 1686 nt, Artificial Sequence; identical to SEQ ID NO: 31206
  mRNA product Design i-3 (hSL-A100) comprising derived and/or modified sequence from LASV(Pinneo-NIG-1969;Clade I)__AIT17836__GPCmut6 (opt1)

SEQ ID NO: 31213 - RNA, 1686 nt, Artificial Sequence
  mRNA product Design i-3 (hSL-A100) comprising derived and/or modified sequence from LASV(ISTH0009-NIG-2011;Clade II)__AIT17404__GPCmut6 (opt1)
aggagaaagcuuaccaugggccagaucaucaccuucuuccaggaggugccccacgucaucgaggaggugaugaacaucgugcugaucgcccucagccugcuggccauccucaaggggaucuacaacgucgcgaccugcggccuguucgggcugguguccuuccuccugcugugcggccgcagcugcuccacgaccuacaaggggguguacgagcuccagacccuggagcuggacauggccagccucaacaugugcaugccgcuguccugcaccaagaacaacagccaccacuacaucauggucggcaacgagacgggccuggagcucacccugaccaacaccuccaucaucaaccacaaguucugcaaccugagcgacgcccacaagaagaaccucuacgaccacgcccugauguccaucaucagcacguuccaccuguccauccccaacuucaaccaguacgaggccaugagcugcgacuucaacgggggcaagaucuccgugcaguacaaccucagccacgcguacgccguggacgccgccaaccacugcgggaccaucgcgaacggcguccugcagaccuucaugcggauggccuggggcggguccuacaucgcccuggacagcggcaagggguccugggacugcaucaugaccagcuaccaguaccucaucauccagaacacgaccugggaggaccacugccaguucucccgccccagccccaucggcuaccuggggcugcucagccagcggacccgcgacaucuacaucucccggcgccugcugggcaccuucacguggacccucagcgacuccgagggcaacgagacccccgggggcuacugccugacccgguggaugcugaucgaggccgagcucaagugcuucgggaacacggccguggcgaagugcaacgagaagcacgacgaggaguucugcgacaugcugcgccuguucgacuucugcaagcaggccauccggcgccucaagaccccggcccagaugagcauccagcugaucaacaaggccgugaacgcccugaucaacgaccagcucaucaugaagaaccaccuccgggacaucaugggcauccccuacugcaacuacuccaaguacugguaccugaaccacaccgucaccgggaagacgagccugccccgcugcuggcugguguccaacggcagcuaccugaacgagacccacuucuccgacgacaucgagcagcaggcggacaacaugaucaccgagcuccugcagaaggaguacauggaccggcagggcaagaccccgcuggggcugguggaccucuucgucuucagcacguccuucuaccugaucagcaucuuccugcaccucaucaagauccccacccaccgccacaucaccggcaagcccugccccaagccgcaccggcugaaccacauggggaucugcuccugcggccuguacaagcaccccggggugcccgugaaguggaagcgcugaggacuaguuauaagacugacuagcccgaugggccucccaacgggcccuccuccccuccuugcaccgagauuaaucaaaggcucuuuucagagccaccaaaaaaaaaaaaaaaaaaaaaaaaaaaaaaaaaaaaaaaaaaaaaaaaaaaaaaaaaaaaaaaaaaaaaaaaaaaaaaaaaaaaaaaaaaaaaaaaaaaaa

SEQ ID NO: 31214 - RNA, 1686 nt, Artificial Sequence
  mRNA product Design i-3 (hSL-A100) comprising derived and/or modified sequence from LASV(ISTH2010-NIG-2012;Clade II)__AIT17482__GPCmut6 (opt1)
aggagaaagcuuaccaugggccagaucaucaccuucuuccaggaggugccccacgucaucgaggaggugaugaacaucgugcugaucgcccucagccugcuggccauccucaaggggaucuacaacgucgcgaccugcggccuguucgggcugguguccuuccuccugcugugcggccgcagcugcuccacgaccuacaaggggguguacgagcuccagacccuggagcuggacauggccagccucaacaugugcaugccgcuguccugcaccaagaacaacagccaccacuacaucauggucggcaacgagacgggccuggagcucacccugaccaacaccuccaucaucaaccacaaguucugcaaccugagcgacgcccacaagaagaaccucuacgaccacgcccugauguccaucaucagcacguuccaccuguccauccccaacuucaaccaguacgaggccaugagcugcgacuucaacgggggcaagaucuccgugcaguacaaccucagccacgcguacgccguggacgccgccaaccacugcgggaccaucgcgaacggcguccugcagaccuucaugcggauggccuggggcggguccuacaucgcccuggacagcggcaagggguccugggacugcaucaugaccagcuaccaguaccucaucauccagaacaucacgugggaggaccacugccaguucucccgccccagccccaucggcuaccuggggcugcucagccagcggacccgcgacaucuacaucucccggcgccugcugggcaccuucaccuggacgcucagcgacuccgagggcaacgagacccccgggggcuacugccugacccgguggaugcugaucgaggccgagcucaagugcuucgggaacaccgccguggcgaagugcaacgagaagcacgacgaggaguucugcgacaugcugcgccuguucgacuucugcaagcaggccauccggcgccucaagacgccggcccagaugagcauccagcugaucaacaaggccgugaacgcccugaucaacgaccagcucaucaugaagaaccaccuccgggacaucaugggcauccccuacugcaacuacuccaaguacugguaccugaaccacaccgucaccgggaagaccagccugccccgcugcuggcugguguccaacggcagcuaccugaacgagacgcacuucuccgacgacaucgagcagcaggcggacaacaugaucaccgagcuccugcagaaggaguacaucgaccggcagggcaagaccccgcuggggcugguggaccucuucgucuucagcaccuccuucuaccugaucagcaucuuccugcaccucgugaagauccccacgcaccgccacguggucggcaagcccugccccaagccgcaccggcugaaccacauggggaucugcuccugcggccuguacaagcaccccggggugcccgugaaguggaagcgcugaggacuaguuauaagacugacuagcccgaugggccucccaacgggcccuccuccccuccuugcaccgagauuaaucaaaggcucuuuucagagccaccaaaaaaaaaaaaaaaaaaaaaaaaaaaaaaaaaaaaaaaaaaaaaaaaaaaaaaaaaaaaaaaaaaaaaaaaaaaaaaaaaaaaaaaaaaaaaaaaaaaaa

SEQ ID NO: 31215 - RNA, 1686 nt, Artificial Sequence
  mRNA product Design i-3 (hSL-A100) comprising derived and/or modified sequence from LASV(Lassa virus/H.sapiens-wt/NGA/2015/ISTH_0543;Clade II)__AVO03639__GPCmut6 (opt1)
aggagaaagcuuaccaugggccagaucaucaccuucuuccaggaggugccccacgucaucgaggaggugaugaacaucgugcugaucgcccucagccugcuggccauccucaaggggaucuacaacgucgcgaccugcggccuguucgggcugguguccuuccuccugcugugcggccgcagcugcuccacgaccuacaaggggguguacgagcuccagacccuggagcuggacauggccaaccucaacaugugcaugccgcugagcugcaccaagaacaacucccaccacuacaucauggucggcaacgagacgggccuggagcucacccugaccaacaccagcaucaucaaccacaaguucugcaaccuguccgacgcccacaagaagaaccucuacgaccacgcccugaugagcaucaucuccacguuccaccugagcauccccaacuucaaccaguacgaggccauguccugcgacuucaacgggggcaagaucagcgugcaguacaaccucucccacaccuacgcgguggacgccgccaaccacugcgggaccaucgccaacggcguccugcagaccuucaugcggauggcguggggcgggagcuacaucgcccuggacuccggcaaggggagcugggacugcaucaugacguccuaccaguaccucgugauccagaacaccaccugggaggaccacugccaguucagccgccccucccccaucggcuaccuggggcugcucagccagcggacccgcgacaucuacaucagccggcgccugcugggcacguucaccuggacccucuccgacagcgagggcaacgagacccccgggggcuacugccugacgcgguggaugcugaucgaggccgagcucaagugcuucgggaacaccgccguggccaagugcaacgagaagcacgacgaggaguucugcgacaugcugcgccuguucgacuucugcaagcaggcgauccggcgccucaagaccccggcccagauguccauccagcugaucaacaaggccgucaacgcccugaucaacgaccagcucaucaugaagaaccaccuccgggacaucaugggcauccccuacugcaacuacagcaaguacugguaccugaaccacaccgugacggggaagaccucccugccccgcugcuggcuggugagcaacggcuccuaccugaacgagacccacuucagcgacgacaucgagcagcaggccgacaacaugaucaccgagcuccugcagaaggaguacaucgaccggcagggcaagacgccgcuggggcuggucgaccucuucguguucuccaccagcuucuaccugaucuccaucuuccugcaccucgugaagauccccacccaccgccacaucaccggcaagcccugccccaagccgcaccggcugaaccacauggggaucugcagcugcggccuguacaagcaccccgggguccccgugaaguggaagcgcugaggacuaguuauaagacugacuagcccgaugggccucccaacgggcccuccuccccuccuugcaccgagauuaaucaaaggcucuuuucagagccaccaaaaaaaaaaaaaaaaaaaaaaaaaaaaaaaaaaaaaaaaaaaaaaaaaaaaaaaaaaaaaaaaaaaaaaaaaaaaaaaaaaaaaaaaaaaaaaaaaaaaa

SEQ ID NO: 31216 - RNA, 1686 nt, Artificial Sequence
  mRNA product Design i-3 (hSL-A100) comprising derived and/or modified sequence from LASV(Lassa virus/H.sapiens-wt/NGA/2016/ISTH_0009;Clade II)__AVO03571__GPCmut6 (opt1)
aggagaaagcuuaccaugggccagaucaucaccuucuuccaggaggugccccacgucaucgaggaggugaugaacaucgugcugaucgcccucagccugcuggccauccucaaggggaucuacaacgucgcgaccugcggccugcuggggcucguguccuuccugcugcucugcggccgcagcugcuccacgaccuacaaggggguguacgagcugcagacccuggagcucgacauggccagccugaacaugugcaugccgcuguccugcaccaagaacaacagccaccacuacaucauggucggcaacgagacgggccucgagcugacccugaccaacaccuccaucaucaaccacaaguucugcaaccucagcgacgcccacaagaagaaccuguacgaccacgcccugauguccaucaucagcacguuccaccucuccauccccaacuucaaccaguacgaggccaugagcugcgacuucaacgggggccggaucuccgugcaguacaaccugagccacuccuacgcgguggacgccgccaaccacugcgggaccaucgccaacggcguccugcagaccuucaugcgcauggcguggggcgggagcuacaucgcccucgacuccggcaaggggagcugggacugcaucaugaccuccuaccaguaccugaucauccagaacacgaccugggaggaccacugccaguucagccggcccagccccaucggcuaccuggggcuccugucccagcgcacccgggacaucuacaucagccgccggcugcucggcaccuucacguggacccuguccgacagcgagggcaacgagacccccgggggcuacugccugacccgcuggaugcucaucgaggccgagcugaagugcuucgggaacacggccguggccaagugcaacgagaagcacgacgaggaguucugcgacaugcugcggcuguucgacuucugcaagcaggcgauccgccggcugaagaccccggcccagauguccauccagcugaucaacaaggccgugaacgcccucaucaacgaccagcugaucaugaagaaccaccuccgcgacaucaugggcauccccuacugcaacuacagcaaguacugguaccucaaccacaccgucaccgggaagacgucccugccccggugcuggcuggugagcaacggcuccuaccucaacgagacccacuucagcgacgacaucgagcagcaggccgacaacaugaucaccgagcugcugcagaaggaguacaucgaccgccagggcaagaccccgcuggggcucguggaccuguucgucuucuccacgagcuucuaccugaucuccaucuuccuccaccuggugaagauccccacccaccggcacaucaccggcaagcccugccccaagccgcaccgccugaaccacauggggaucugcagcugcggccucuacaaccaccccggggugcccgucaaguggaagcggugaggacuaguuauaagacugacuagcccgaugggccucccaacgggcccuccuccccuccuugcaccgagauuaaucaaaggcucuuuucagagccaccaaaaaaaaaaaaaaaaaaaaaaaaaaaaaaaaaaaaaaaaaaaaaaaaaaaaaaaaaaaaaaaaaaaaaaaaaaaaaaaaaaaaaaaaaaaaaaaaaaaaa

SEQ ID NO: 31217 - RNA, 1686 nt, Artificial Sequence
  mRNA product Design i-3 (hSL-A100) comprising derived and/or modified sequence from LASV(Lassa virus/H.sapiens-wt/NGA/2016/ISTH_0017;Clade II)__AVO03567__GPCmut6 (opt1)
aggagaaagcuuaccaugggccagaucaucaccuucuuccaggaggugccccacgucaucgaggaggugaugaacaucgugcugaucgcccucagccugcuggccauccucaaggggaucuacaacgucgcgaccugcggccuguucgggcugguguccuuccuccugcugugcggccgcagcugcuccacgaccuacaaggggguguacgagcuccagacccuggagcuggacauggccagccucaacaugugcaugccgcuguccugcaccaagaacaacagccaccacuacaucauggucggcaacgagacgggccuggagcucacccugaccaacaccuccaucaucaaccacaaguucugcaaccugagcgacgcccacaagaagaaccucuacgaccacgcccugauguccaucaucagcacguuccaccuguccauccccaacuucaaccaguacgaggccaugagcugcgacuucaacgggggcaagaucuccgugcaguacaaccucagccacaccuacgcgaucgacgccgccaaccacugcgggaccaucgccaacggcgugcugcagaccuucaugcggauggcguggggcggguccuacaucgcccuggacagcggcaagggguccugggacugcaucaugacgagcuaccaguaccucaucauccagaacaccaccugggaggaccacugccaguucucccgccccagccccaucggcuaccuggggcugcucagccagcggacccgcgacaucuacaucucccggcgccugcugggcacguucaccuggacccucagcgacuccgagggcaacgagacccccgggggcuacugccugacgcgguggaugcugaucgaggccgagcucaagugcuucgggaacaccgccgucgccaagugcaacgagaagcacgacgaggaguucugcgacaugcugcgccuguucgacuucugcaagcaggcgauccggcgccucaagaccccggcccagaugagcauccagcugaucaacaaggccgugaacgcccugaucaacgaccagcucaucaugaagaaccaccuccgggacaucaugggcauccccuacugcaacuacuccaaguacugguaccugaaccacaccgugacggggaagaccagccugccccgcugcuggcuggucuccaacggcagcuaccugaacgagacccacuucuccgacgacaucgagcagcaggccgacaacaugaucaccgagcuccugcagaaggaguacauggaccggcagggcaagacgccgcuggggcugguggaccucuucguguucagcaccuccuucuaccugaucagcaucuuccugcaccucguccgcauccccacccaccggcacgugaucggcaagcccugccccaagccgcaccgccugaaccacauggggaucugcuccugcggccuguacaagcaccccggggugcccgucaaguggaagcggugaggacuaguuauaagacugacuagcccgaugggccucccaacgggcccuccuccccuccuugcaccgagauuaaucaaaggcucuuuucagagccaccaaaaaaaaaaaaaaaaaaaaaaaaaaaaaaaaaaaaaaaaaaaaaaaaaaaaaaaaaaaaaaaaaaaaaaaaaaaaaaaaaaaaaaaaaaaaaaaaaaaaa

SEQ ID NO: 31218 - RNA, 1686 nt, Artificial Sequence
  mRNA product Design i-3 (hSL-A100) comprising derived and/or modified sequence from LASV(Lassa virus/H.sapiens-wt/NGA/2018/ISTH_0959;Clade II)__AVV65099__GPCmut6 (opt1)
aggagaaagcuuaccaugggccagaucaucaccuucuuccaggaggugccccacgucaucgaggaggugaugaacaucgugcugaucgcccucagccugcuggccauccucaaggggaucuacaacgucgugaccugcggccuguucgggcugguguccuuccuccugcugugcggccgcagcugcuccacgaccuacaagggggucuacgagcuccagacccuggagcuggacauggcgagccucaacaugugcaugccgcuguccugcaccaagaacaacagccaccacuacaucauggugggcaacgagacgggccuggagcucacccugaccaacaccuccaucaucaaccacaaguucugcaaccugagcgacgcccacaagaagaaccucuacgaccacgcccugauguccaucaucagcacguuccaccuguccauccccaacuucaaccaguacgaggccaugagcugcgacuucaacgggggcaagaucuccgugcaguacaaccucagccacgccuacgcgaucgacgccgccaaccacugcgggaccaucgccaacggcguccugcagaccuucaugcggauggcguggggcggguccuacaucgcccuggacagcggcaagggguccugggacugcaucaugaccagcuaccaguaccucaucauccagaacacgaccugggaggaccacugccaguucucccgccccagccccaucggcuaccuggggcugcucagccagcggacccgcgacaucuacaucucccggcgccugcugggcaccuucacguggacccucagcgacuccgagggcaacgagacccccgggggcuacugccugacccgguggaugcugaucgaggccgagcucaagugcuucgggaacacggccguggccaagugcaacgagaagcacgacgaggaguucugcgacaugcugcgccuguucgacuucugcaagcaggcgauccggcgccucaagaccccggcccagaugagcauccagcugaucaacaaggccgugaacgcccugaucaacgaccagcucaucaugaagaaccaccuccgggacaucaugggcauccccuacugcaacuacuccaaguacugguaccugaaccacaccgucaccgggaagacgagccugccccgcugcuggcugguguccaacggcagcuaccugaacgagacccacuucuccgacgacaucgagcagcaggccgacaacaugaucaccgagcuccugcagaaggaguacaucgaccggcagggcaagaccccgcuggggcugguggaccucuucgucuucagcacguccuucuaccugaucagcaucuuccugcaccucgugaagauccccacccaccgccacgugaucggcaagcccugccccaagccgcaccggcugaaccacauggggaucugcuccugcggccuguacaagcaccccgggguccccgugaaguggaagcgcugaggacuaguuauaagacugacuagcccgaugggccucccaacgggcccuccuccccuccuugcaccgagauuaaucaaaggcucuuuucagagccaccaaaaaaaaaaaaaaaaaaaaaaaaaaaaaaaaaaaaaaaaaaaaaaaaaaaaaaaaaaaaaaaaaaaaaaaaaaaaaaaaaaaaaaaaaaaaaaaaaaaaa

SEQ ID NO: 31219 - RNA, 1686 nt, Artificial Sequence
  mRNA product Design i-3 (hSL-A100) comprising derived and/or modified sequence from LASV(LASV003-NIG-2008;Clade II)__AIT17580__GPCmut6 (opt1)
aggagaaagcuuaccaugggccagaucaucaccuucuuccaggaggugccccacgucaucgaggaggugaugaacaucgugcugaucgcccucagccugcuggccauccucaaggggaucuacaacgucgcgaccugcggccuguucgggcugguguccuuccuccugcugugcggccgcagcugcuccacgaccuacaaggggguguacgagcuccagacccuggagcuggacauggccagccucaacaugugcaugccgcuguccugcaccaagaacaacagccaccacuacaucauggucggcaacgagacgggccuggagcucacccugaccaacaccuccaucaucaaccacaaguucugcaaccugagcgacgcccacaagaagaaccucuacgaccacgcccugauguccaucaucagcacguuccaccuguccauccccaacuucaaccaguacgaggccaugagcugcgacuucaacgggggcaagaucuccgugcaguacaaccucagccacaccuacgcgguggacgccgccaaccacugcgggaccaucgccaacggcguccugcagaccuucaugcggauggcguggggcggguccuacaucgcccuggacagcggcaagggguccugggacugcaucaugacgagcuaccaguaccucaucauccagaacaccaccugggaggaccacugccaguucucccgccccagccccaucggcuaccuggggcugcucagccagcggacccgcgacaucuacaucucccggcgccugcugggcacguucaccuggacccucagcgacuccgagagcaacgagaccccgggcggguacugccugacgcgguggaugcugaucgaggccgagcucaagugcuucggcaacaccgccguggccaagugcaacgagaagcacgacgaggaguucugcgacaugcugcgccuguucgacuucugcaagcaggcgauccggcgccucaaggcccccgcccagauguccauccagcugaucaacaaggccgugaacgcccugaucaacgaccagcucaucaugaagaaccaccuccgggacaucauggggauccccuacugcaacuacagcaaguacugguaccugaaccacaccgucaccggccgcacgucccugccccggugcuggcuggugagcaacggguccuaccugaacgagacccacuucagcgacgacaucgagcagcaggcggacaacaugaucaccgagcuccugcagaaggaguacauggaccgccagggcaagaccccgcugggccugguggaccucuucgucuucuccacgagcuucuaccugaucuccaucuuccugcaccucgugaagauccccacccaccggcacgugaucgggaagcccugccccaagccgcaccgccugaaccacaugggcaucugcagcugcgggcuguacaagcaccccggcguccccgugaaguggaagcggugaggacuaguuauaagacugacuagcccgaugggccucccaacgggcccuccuccccuccuugcaccgagauuaaucaaaggcucuuuucagagccaccaaaaaaaaaaaaaaaaaaaaaaaaaaaaaaaaaaaaaaaaaaaaaaaaaaaaaaaaaaaaaaaaaaaaaaaaaaaaaaaaaaaaaaaaaaaaaaaaaaaaa

SEQ ID NO: 31220 - RNA, 1686 nt, Artificial Sequence
  mRNA product Design i-3 (hSL-A100) comprising derived and/or modified sequence from LASV(LASV035-NIG-2009;Clade II)__AIT17588__GPCmut6 (opt1)
aggagaaagcuuaccaugggccagaucaucaccuucuuccaggaggugccccacgucaucgaggaggugaugaacaucgugcugaucgcccucagccugcuggccauccucaaggggaucuacaacgucgcgaccugcggccuguucgggcugguguccuuccuccugcugugcggccgcagcugcuccacgaccuacaaggggguguacgagcuccagacccuggagcuggacauggccagccucaacaugugcaugccgcuguccugcaccaagaacaacagccaccacuacaucauggucggcaacgagacgggccuggagcucacccugaccaacaccuccaucaucaaccacaaguucugcaaccugagcgacgcccacaagaagaaccucuacgaccacgcccugauguccaucaucagcacguuccaccuguccauccccaacuucaaccaguacgaggccaugagcugcgacuucaacgggggcaagaucuccgugcaguacaaccucagccacgcguacgccguggacgccgccaaccacugcgggaccaucgcgaacggcguccugcagaccuucaugcggauggccuggggcggguccuacaucgcccuggacagcggcaagggguccugggacugcaucaugaccagcuaccaguaccucaucauccagaacacgaccugggaggaccacugccaguucucccgccccagccccaucggcuaccuggggcugcucagccagcggacccgcgacaucuacaucucccggcgccugcugggcaccuucacguggacccucagcgacuccgagggcaacgagacccccgggggcuacugccugacccgguggaugcugaucgaggccgagcucaagugcuucgggaacacggccguggcgaagugcaacgagaagcacgacgaggaguucugcgacaugcugcgccuguucgacuucugcaagcaggccauccggcgccucaaggccccggcccagaugagcauccagcugaucaacaaggccgugaacgcgcugaucaacgaccagcucaucaugaagaaccaccuccgggacaucaugggcauccccuacugcaacuacuccaaguacugguaccugaaccacaccgucaccgggaagaccagccugccccgcugcuggcugguguccaacggcagcuaccugaacgagacgcacuucuccgacgacaucgagcagcaggccgacaacaugaucaccgagcuccugcagaaggaguacaucgaccggcagggcaagaccccgcuggggcugguggaccucuucgucuucagcaccuccuucuaccugaucagcaucuuccugcaccucgugaagauccccacgcaccgccacgugaucggcaagcccugccccaagccgcaccggcugaaccacauggggaucugcuccugcggccuguacaagcaccccgggguccccgugaaguggaagcgcugaggacuaguuauaagacugacuagcccgaugggccucccaacgggcccuccuccccuccuugcaccgagauuaaucaaaggcucuuuucagagccaccaaaaaaaaaaaaaaaaaaaaaaaaaaaaaaaaaaaaaaaaaaaaaaaaaaaaaaaaaaaaaaaaaaaaaaaaaaaaaaaaaaaaaaaaaaaaaaaaaaaaa

SEQ ID NO: 31221 - RNA, 1686 nt, Artificial Sequence
  mRNA product Design i-3 (hSL-A100) comprising derived and/or modified sequence from LASV(LASV1000-NIG-2009;Clade II)__AIT17782__GPCmut6 (opt1)
aggagaaagcuuaccaugggccagaucaucaccuucuuccaggaggugccccacgucaucgaggaggugaugaacaucgugcugaucgcccucagccugcuggccauccucaaggggaucuacaacgucgcgaccugcggccuguucgggcugguguccuuccuccugcugugcggccgcagcugcuccacgaccuacaaggggguguacgagcuccagacccuggagcuggacauggccagccucaacaugugcaugccgcuguccugcaccaagaacaacagccaccacuacaucauggucggcaacgagacgggccuggagcucacccugaccaacaccuccaucaucaaccacaaguucugcaaccugagcgacgcccacaagaagaaccucuacgaccacgcccugauguccaucaucagcacguuccaccuguccauccccaacuucaaccaguacgaggccaugagcugcgacuucaacgggggcaagaucuccgugcaguacaaccucagccacaccuacgcgguggacgccgccaaccacugcgggaccaucgccaacggcguccugcagaccuucaugcggauggcguggggcggguccuacaucgcccuggacagcggcaagggguccugggacugcaucaugacgagcuaccaguaccucaucauccagaacaccaccugggaggaccacugccaguucucccgccccagccccaucggcuaccuggggcugcucagccagcggacccgcgacaucuacaucucccggcgccugcugggcacguucaccuggacccucagcgacuccgagggcaacgagacccccgggggcuacugccugacgcgguggaugcugaucgaggccgagcucaagugcuucgggaacaccgccguggccaagugcaacgagaagcacgacgaggaguucugcgacaugcugcgccuguucgacuucugcaagcaggcgaucaagcggcucaagaccccggcccagaugagcauccagcugaucaacaaggccgugaacgcccugaucaacgaccagcucaucaugaagaaccaccuccgcgacaucaugggcauccccuacugcaacuacuccaaguacugguaccugaaccacaccgucacggggaagaccagccugccccggugcuggcugguguccaacggcagcuaccugaacgagacccacuucuccgacgacaucgagcagcaggccgacaacaugaucaccgagcuccugcagaaggaguacaucgaccgccagggcaagacgccgcuggggcugguggaccucuucgucuucagcaccuccuucuaccugaucagcaucuuccugcaccucgugaagauccccacccaccggcacguggucggcaagcccugccccaagccgcaccgccugaaccacauggggaucugcuccugcggccuguacaagcaccccggggugcccgugaaguggaagcggugaggacuaguuauaagacugacuagcccgaugggccucccaacgggcccuccuccccuccuugcaccgagauuaaucaaaggcucuuuucagagccaccaaaaaaaaaaaaaaaaaaaaaaaaaaaaaaaaaaaaaaaaaaaaaaaaaaaaaaaaaaaaaaaaaaaaaaaaaaaaaaaaaaaaaaaaaaaaaaaaaaaaa

SEQ ID NO: 31222 - RNA, 1686 nt, Artificial Sequence
  mRNA product Design i-3 (hSL-A100) comprising derived and/or modified sequence from LASV(LASV221-NIG-2010;Clade II)__AIT17624__GPCmut6 (opt1)
aggagaaagcuuaccaugggccagaucaucaccuucuuccaggaggugccccacgucaucgaggaggugaugaacaucgugcugaucgcccucagccugcuggccauccucaaggggaucuacaacgucgcgaccugcggccuguucgggcugguguccuuccuccugcugugcggccgcagcugcuccacgaccuacaaggggguguacgagcuccagacccuggagcuggacauggccagccucaacaugugcaugccgcuguccugcaccaagaacaacagccaccacuacaucauggucggcaacgagacgggccuggagcucacccugaccaacaccuccaucaucaaccacaaguucugcaaccugagcgacgcccacaagaagaaccucuacgaccacgcccugauguccaucaucagcacguuccaccuguccauccccaacuucaaccaguacgaggccaugagcugcgacuucaacgggggcaagaucuccgugcaguacaaccucagccacaccuacgcgaucgacgccgccaaccacugcgggaccaucgccaacggcgugcugcagaccuucaugcggauggcguggggcggguccuacaucgcccuggacagcggcaagggguccugggacugcaucaugacgagcuaccaguaccucaucauccagaacaccaccugggaggaccacugccaguucucccgccccagccccaucggcuaccuggggcugcucagccagcggacccgcgacaucuacaucucccggcgccugcugggcacguucaccuggacccucagcgacuccgagggcaacgagacccccgggggcuacugccugacgcgguggaugcugaucgaggccgagcucaagugcuucgggaacaccgccgucgccaagugcaacgagaagcacgacgaggaguucugcgacaugcugcgccuguucgacuucugcaagcaggcgauccggcgccucaagaccccggcccagaugagcauccagcugaucaacaaggccgugaacgcccugaucaacgaccagcucaucaugaagaaccaccuccgggacaucaugggcauccccuacugcaacuacuccaaguacugguaccugaaccacaccgugacggggaagaccagccugccccgcugcuggcuggucuccaacggcagcuaccugaacgagacccacuucuccgacgacaucgagcagcaggccgacaacaugaucaccgagaugcuccagaaggaguacauggaccggcagggcaagacgccgcuggggcugguggaccuguucguguucagcaccuccuucuaccucaucagcaucuuccugcaccuggucaagauccccacccaccgccacgugaucggcaagcccugccccaagccgcaccggcucaaccacauggggaucugcuccugcggccuguacaagcaccccggggugcccgucaaguggaagcgcugaggacuaguuauaagacugacuagcccgaugggccucccaacgggcccuccuccccuccuugcaccgagauuaaucaaaggcucuuuucagagccaccaaaaaaaaaaaaaaaaaaaaaaaaaaaaaaaaaaaaaaaaaaaaaaaaaaaaaaaaaaaaaaaaaaaaaaaaaaaaaaaaaaaaaaaaaaaaaaaaaaaaa

SEQ ID NO: 31223 - RNA, 1686 nt, Artificial Sequence
  mRNA product Design i-3 (hSL-A100) comprising derived and/or modified sequence from LASV(LASV237-NIG-2010;Clade II)__AIT17638__GPCmut6 (opt1)
aggagaaagcuuaccaugggccagaucaucaccuucuuccaggaggugccccacgucaucgaggaggugaugaacaucgugcugaucgcccucagccugcuggccauccucaaggggaucuacaacgucgcgaccugcggccuguucgggcugguguccuuccuccugcugugcggccgcagcugcuccacgaccuacaaggggguguacgagcuccagacccuggagcuggacauggccagccucaacaugugcaugccgcuguccugcaccaagaacaacagccaccacuacaucauggucggcaacgagacgggccuggagcucacccugaccaacaccuccaucaucaaccacaaguucugcaaccugagcgacgcccacaagaaggaccucuacgaccacgcccugauguccaucaucagcacguuccaccuguccauccccaacuucaaccaguacgaggccaugagcugcgacuucaacgggggcaagaucuccgugcaguacaaccucagccacaccuacgcgguggacgccgccaaccacugcgggaccaucgccaacggcguccugcagaccuucaugcggauggcguggggcggguccuacaucgcccuggacagcggcaagggguccugggacugcaucaugacgagcuaccaguaccucaucauccagaacaccaccugggaggaccacugccaguucucccgccccagccccaucggcuaccuggggcugcucagccagcggacccgcgacaucuacaucucccggcgccugcugggcacguucaccuggacccucagcgacuccgagggcaacgagacccccgggggcuacugccugacgcgguggaugcugaucgaggccgagcucaagugcuucgggaacaccgccguggccaagugcaacgagaagcacgacgaggaguucugcgacaugcugcgccuguucgacuucugcaagcaggcgauccggcgccucaagaccccggcccagaugagcauccagcugaucaacaaggccgugaacgcccugaucaacgaccagcucaucaugaagaaccaccuccgggacaucaugggcauccccuacugcaacuacuccaaguacugguaccugaaccacaccgucacggggaagaccagccugccccgcugcuggcugguguccaacggcagcuaccugaacgagacccacuucuccgacgacaucgagcagcaggccgacaacaugaucaccgagcuccugcagaaggaguacauggaccggcagggcaagacgccgcuggggcugguggaccucuucgucuucagcaccuccuucuaccugaucagcaucuuccugcaccucaucaagauccccacccaccgccacaucaccggcaagcccugccccaagccgcaccggcugaaccacauggggaucugcuccugcggccuguacaagcaccccggggugcccgugaaguggaagcgcugaggacuaguuauaagacugacuagcccgaugggccucccaacgggcccuccuccccuccuugcaccgagauuaaucaaaggcucuuuucagagccaccaaaaaaaaaaaaaaaaaaaaaaaaaaaaaaaaaaaaaaaaaaaaaaaaaaaaaaaaaaaaaaaaaaaaaaaaaaaaaaaaaaaaaaaaaaaaaaaaaaaaa

SEQ ID NO: 31224 - RNA, 1686 nt, Artificial Sequence
  mRNA product Design i-3 (hSL-A100) comprising derived and/or modified sequence from LASV(LASV253-NIG-2011;Clade II)__AIT17670__GPCmut6 (opt1)
aggagaaagcuuaccaugggccagaucaucaccuucuuccaggaggugccccacgucaucgaggaggugaugaacaucgugcugaucgcccucagccugcuggccauccucaaggggaucuacaacgucgcgaccugcggccuguucgggcugguguccuuccuccugcugugcggccgcagcugcuccacgaccuacaaggggguguacgagcuccagacccuggagcuggacauggccagccucaacaugugcaugccgcuguccugcaccaagaacaacagccaccacuacaucauggucggcaacgagacgggccuggagcucacccugaccaacaccuccaucaucaaccacaaguucugcaaccugagcgacgcccacaagaagaaccucuacgaccacgcccugauguccaucaucagcacguuccaccuguccauccccaacuucaaccaguacgaggccaugagcugcgacuucaacgggggcaagaucuccgugcaguacaaccucagccacaccuacgcgguggacgccgccaaccacugcgggaccaucgccaacggcguccugcagaccuucaugcggauggcguggggcggguccuacaucgcccuggacagcggcaagggguccugggacugcaucaugacgagcuaccaguaccucaucauccagaacaccaccugggaggaccacugccaguucucccgccccagccccaucggcuaccuggggcugcucagccagcggacccgcgacaucuacaucucccggcgccugcugggcacguucaccuggacccucagcgacuccgagggcaacgagacccccgggggcuacugccugacgcgguggaugcugaucgaggccgagcucaagugcuucgggaacaccgccguggccaagugcaacgagaagcacgacgaggaguucugcgacaugcugcgccuguucgacuucugcaagcaggcgauccggcgccucaaggccccggcccagaugagcauccagcugaucaacaaggccgugaacgcccugaucaacgaccagcucaucaugaagaaccaccuccgggacaucaugggcauccccuacugcaacuacuccaaguacugguaccugaaccacaccgucaccgggcgcacgagccugccccggugcuggcugguguccaacggcagcuaccugaacgagacccacuucuccgacgacaucgagcagcaggcggacaacaugaucaccgagcuccugcagaaggaguacaucgaccgccagggcaagaccccgcuggggcugguggaccucuucgucuucagcacguccuucuaccugaucagcaucuuccugcaccucgugaagauccccacccaccggcacaucaucggcaagcccugccccaagccgcaccgccugaaccacauggggaucugcuccugcggccuguacaagcaccccggggugcccgucaaguggaagcggugaggacuaguuauaagacugacuagcccgaugggccucccaacgggcccuccuccccuccuugcaccgagauuaaucaaaggcucuuuucagagccaccaaaaaaaaaaaaaaaaaaaaaaaaaaaaaaaaaaaaaaaaaaaaaaaaaaaaaaaaaaaaaaaaaaaaaaaaaaaaaaaaaaaaaaaaaaaaaaaaaaaaa

SEQ ID NO: 31225 - RNA, 1686 nt, Artificial Sequence
  mRNA product Design i-3 (hSL-A100) comprising derived and/or modified sequence from LASV(LASV254-NIG-2011;Clade II)__AIT17674__GPCmut6 (opt1)
aggagaaagcuuaccaugggccagaucaucaccuucuuccaggaggugccccacgucaucgaggaggugaugaacaucgugcugaucgcccucagccugcuggccauccucaaggggaucuacaacgucgcgaccugcggccuguucgggcugguguccuuccuccugcugugcggccgcagcugcuccacgaccuacaaggggguguacgagcuccagacccuggagcuggacaugaccaaccucaacaugugcaugccgcugagcugcacgaagaacaacucccaccacuacaucauggucggcaacgagaccggccuggagcucacccugaccaacacgagcaucaucaaccacaaguucugcaaccuguccgacgcccacaagaagaaccucuacaaccacgcccugaugagcaucaucuccaccuuccaccugagcauccccaacuucaaccaguacgaggccauguccugcgacuucaacgggggcaagaucagcgugcaguacaaccucucccacagcuacgccguggacgcggccaaccacugcgggaccaucgccaacggcguccugcagaccuucaugcggauggccuggggcggguccuacaucgcgcuggacagcggcaaggggaacugggacugcaucaugacguccuaccaguaccucaucauccagaacaccaccugggaggaccacugccaguucagccgccccucccccaucggcuaccuggggcugcucagccagcggacccgcgacaucuacaucagccggcgccugcugggcacguucaccuggacccucuccgacagcgagggcaacgagacccccgggggcuacugccugacgcgguggaugcugaucgaggccgagcucaagugcuucgggaacaccgccguggccaagugcaacgagaagcacgacgaggaguucugcgacaugcugcgccuguucgacuucugcaagcaggccauccggcgccucaagaccccggcgcaggccaacauccagcugaucaacaaggccgugaacgcccugaucaacgaccagcucaucaugaagaaccaccuccgggacaucaugggcauccccuacugcaacuacuccaaguacugguaccugaaccacaccgucacggggaagaccagccugccccgcugcuggcugguguccaacggcagcuaccugaacgagacccacuucuccgacgacaucgagcagcaggccgacaacaugaucaccgagcuccugcagaaggaguacauggaccggcagggcaagacgccgcuggggcugguggaccucuucgucuucagcaccuccuucuaccugaucagcaucuuccugcaccucgugaagauccccacccaccgccacgugaucggcaagcccugccccaagccgcaccggcugaaccacauggggaucugcuccugcggccuguacaagcaccccgggguccccgugaaguggaagcgcugaggacuaguuauaagacugacuagcccgaugggccucccaacgggcccuccuccccuccuugcaccgagauuaaucaaaggcucuuuucagagccaccaaaaaaaaaaaaaaaaaaaaaaaaaaaaaaaaaaaaaaaaaaaaaaaaaaaaaaaaaaaaaaaaaaaaaaaaaaaaaaaaaaaaaaaaaaaaaaaaaaaaa

SEQ ID NO: 31226 - RNA, 1686 nt, Artificial Sequence
  mRNA product Design i-3 (hSL-A100) comprising derived and/or modified sequence from LASV(Nig08-A19;Clade III)__ADU56618__GPCmut6 (opt1)
aggagaaagcuuaccaugggccagaucgugaccuucuuccaggaggucccccacgugaucgaggaggugaugaacaucguccugaucgcccucagcauccuggccauccugaaggggcucuacaacaucgcgaccugcggccugaucgggcuggugacguuccuccugcuguccggccgcagcugcuccaugaccuacaaggggguguacgagcuccagacccuggagcugaacaugaacacccucaacaugugcaugccgcugagcugcacgaagaacaacucccaccacuacaucauggucggcaacgagaccggccuggagcucacccugaccaacacgagccugcuccaccacaaguucugcaaccuguccgacgcccacaagaagaaccuguacgaccacacccucaugagcaucaucuccaccuuccaccugagcauccccaacuucaaccaguacgaggccauguccugcgacuucaacgggggcaagaucaccgugcaguacaaccugagccacuccuacgccaucgacgccgcgaaccacugcgggacgguggccaacggcguccuccagaccuucaugcggauggccuggggcgggagcuacaucgcccuggacuccggccgcgggaagugggacugcaucaugaccagcuaccaguaccugaucauccagaacaccacgugggaggaccacugccaguucucccggcccagccccaucggcuaccucgggcugcugucccagcgcacccgggacaucuacaucagccgccggcuccugggcaccuucaccuggacgcugagcgacuccgagggcaacgagacccccgggggcuacugccucacccgcuggaugcugaucgaggcggagcugaagugcuucgggaacaccgccguggccaagugcaacgagaagcacgacgaggaguucugcgacaugcuccggcuguucgacuucugcaagcaggccauccgccggcugaaggccccggcgcagaugagcauccagcucaucaacaaggccgugaacgcccugaucaacgaccagcugaucaugaagaaccaccuccgcgacaucaugggcauccccuacugcaacuacuccaaguacugguaccugaaccacacgagcaccgggcggaccucccugccccgcugcuggcucgucagcaacggcuccuaccugaacgagacccacuucagcgacgacaucgagcagcaggccgacaacaugaucacggagaugcugcagaaggaguaccuggaccggcagggcaagaccccgcucgggcugguggaccuguucguguucuccaccagcuucuaccucaucuccaucuuccugcaccuggucaagauccccacccaccgccacaucgugggcaagcccugccccaagccgcaccggcucaaccacauggggaucugcagcugcggccuguacaagcagcccggggugcccguccgcuggaagcggugaggacuaguuauaagacugacuagcccgaugggccucccaacgggcccuccuccccuccuugcaccgagauuaaucaaaggcucuuuucagagccaccaaaaaaaaaaaaaaaaaaaaaaaaaaaaaaaaaaaaaaaaaaaaaaaaaaaaaaaaaaaaaaaaaaaaaaaaaaaaaaaaaaaaaaaaaaaaaaaaaaaaa

SEQ ID NO: 31227 - RNA, 1689 nt, Artificial Sequence
  mRNA product Design i-3 (hSL-A100) comprising derived and/or modified sequence from LASV(G1180-SLE-2010;Clade IV)__AIT17168__GPCmut6 (opt1)
aggagaaagcuuaccaugggccagaucgugaccuucuuccaggaggucccccacgugaucgaggaggugaugaacaucguccugaucgcccucagcauccuggccgugcugaaggggcucuacaacuucgcgaccugcggccugguggggcugcucacguuccugcugcucugcggccgcuccugcaccgccagccgguacaagggggucuacgagcugcagacccuggagcucaacauggagacccugaacaugugcaugccgcuguccugcacgaagaacaacagccaccacuacaucauggugggcaacgagaccggccucgagcugacccugaccaacacguccaucaucaaccacaaguucugcaaccucagcgacgcccacaagaagaaccuguacgaccacgcccugauguccaucaucagcaccuuccaccucuccauccccaacuucaaccaguacgaggccaugagcugcgacuucaacgggggcaagaucuccgugcaguacaaccugagccacuccuacgcgggggacgccgccaaccacugcggcaccgucgccaacggggugcugcagaccuucaugcgcauggcguggggcggcagcuacaucgcccucgacuccgggcacggcagcugggacugcaucaugacguccuaccaguaccugaucauccagaacaccaccugggaggaccacugccaguucagccggcccucccccaucggguaccugggccuccugagccagcgcacccgggacaucuacaucagccgccggcugcucggcacguucaccuggacccuguccgacagcgaggggaaggacaccccgggcggguacugccugacgcgcuggaugcucaucgaggccgagcugaagugcuucggcaacaccgccguggccaagugcaacgagaagcacgacgaggaguucugcgacaugcugcggcuguucgacuucugcaagcaggcgauccagcgccugaaggcccccgcccagauguccauccagcugaucaacaaggccgucaacgcccucaucaacgaccagcugaucaugaagaaccaccuccgggacaucauggggauccccuacugcaacuacagcaaguacugguaccucaaccacaccaccacgggcaagaccucccugcccaagugcuggcuggugagcaacggcuccuaccucaacgagacccacuucagcgacgacaucgagcagcaggcggacaacaugaucaccgagaugcugcagaaggaguacauggagcgccaggggaagacgccgcugggccugguggaccucuucgucuucuccaccagcuucuaccugaucuccaucuuccugcaccucgugaagauccccacccaccggcacaucgugggcaagagcugccccaagccccaccgccugaaccacauggggaucugcuccugcgggcuguacaagcagccgggcguccccgugaaguggaagcggugaggacuaguuauaagacugacuagcccgaugggccucccaacgggcccuccuccccuccuugcaccgagauuaaucaaaggcucuuuucagagccaccaaaaaaaaaaaaaaaaaaaaaaaaaaaaaaaaaaaaaaaaaaaaaaaaaaaaaaaaaaaaaaaaaaaaaaaaaaaaaaaaaaaaaaaaaaaaaaaaaaaaa

SEQ ID NO: 31228 - RNA, 1689 nt, Artificial Sequence
  mRNA product Design i-3 (hSL-A100) comprising derived and/or modified sequence from LASV(G1442-SLE-2011;Clade IV)__AIT17180__GPCmut6 (opt1)
aggagaaagcuuaccaugggccagaucgugaccuucuuccaggaggucccccacgugaucgaggaggugaugaacaucguccugaucgcccucagcauccuggccgugcugaaggggcucuacaacguggcgaccugcggccugaucgggcuggucacguuccuccugcugugcggccgcuccugcaccaccacccucuacaaggggguguacgagcugcagacgcuggagcucaacauggagacccugaacaugugcaugccgcugagcugcaccaagaacaacucccaccacuacauccgggugggcaacgagaccggccucgagcugacgcugaccaacaccagcaucaucaaccacaaguucugcaaccucuccgacgcccacaagaagaaccuguacgaccacgcccugaugagcaucaucuccaccuuccaccucagcauccccaacuucaaccaguacgaggccauguccugcgacuucaacgggggcaagaucagcguccaguacaaccugucccacagcuacgccggggacgcggccaaccacugcggcacgguggccaacggggugcugcagaccuucaugcgcauggccuggggcggcuccuacaucgcgcucgacagcgggcggggcaacugggacugcaucaugaccuccuaccaguaccugaucauccagaacaccacgugggacgaccacugccaguucagccgccccucccccaucggguaccugggccuccugagccagcggacccgcgacgucuacaucucccggcgccugcucggcaccuucaccuggacgcugagcgacagcgaggggaaggacaccccgggcggguacugccugacccgguggaugcucaucgaggccgagcugaagugcuucggcaacaccgccguggccaagugcaacgagaagcacgacgaggaguucugcgacaugcugcgccucuucgacuucugcaagcaggccauccagcggcugaaggcgcccgcccagauguccauccagcugaucaacaaggccgugaacgcccucaucaacgaccagcugaucaugaagaaccaccuccgcgacaucauggggauccccuacugcaacuacagcaaguacugguaccugaacaacacggccaccggcaagaccucccugcccaagugcuggcugaucagcaacggcuccuaccucaacgagacccacuucagcgacgacaucgagcaggaggcggacaacaugaucacggagaugcugcagaaggaguacauggagcggcaggggaagaccccgcugggccuggucgaccucuucguguucuccaccagcuucuaccugaucuccaucuuccugcaccucgugaagauccccacccaccgccacaucgucggcaagagcugccccaagccccaccggcugaaccacauggggaucugcuccugcgggcuguacaagcagccgggcgugcccgugcgcuggaagcggugaggacuaguuauaagacugacuagcccgaugggccucccaacgggcccuccuccccuccuugcaccgagauuaaucaaaggcucuuuucagagccaccaaaaaaaaaaaaaaaaaaaaaaaaaaaaaaaaaaaaaaaaaaaaaaaaaaaaaaaaaaaaaaaaaaaaaaaaaaaaaaaaaaaaaaaaaaaaaaaaaaaaa

SEQ ID NO: 31229 - RNA, 1689 nt, Artificial Sequence
  mRNA product Design i-3 (hSL-A100) comprising derived and/or modified sequence from LASV(G3010-SLE-2013;Clade IV)__AIT17344__GPCmut6 (opt1)
aggagaaagcuuaccaugggccagaucgugaccuucuuccaggaggucccccacgugaucgaggaggugaugaacaucguccugaucgcccucagcauccuggccgugcugaaggggcucuacaacuucgcgaccugcggccugguggggcuggucacguuccuccugcugugcggccgcuccugcaccaccagccucuacaaggggguguacgagcugcagacccuggagcucaacauggagacgcugaacaugugcaugccgcuguccugcaccaagaacaacagccaccacuacaucauggugggcaacgagaccggccucgagcugacccugacgaacaccuccaucaucaaccacaaguucugcaaccucagcgacgcccacaagaagaaccuguacaaccacgcccugauguccaucaucagcaccuuccaccucuccauccccaacuucaaccaguacgaggccaugagcugcgacuucaacgggggcaagaucuccguccaguacaaccugagccacuccuacgccggggacgcggccagccacugcggcaccguggccaacggggugcugcagacguucaugcggauggccuggggcggcuccuacaucgcgcucgacagcggguacggcaagugggacugcaucaugaccuccuaccaguaccugaucauccagaacaccaccugggaggaccacugccaguucagccgccccucccccaucggguaccugggccuccugagccagcggacgcgcgacaucuacaucagccggcgccugcucggcaccuucaccuggacccuguccgacagcgaggggaaggacacgccgggcggguacugccugacccgguggaugcucaucgaggccgagcugaagugcuucggcaacaccgccgucgccaagugcaacgagaagcacgacgaggaguucugcgacaugcugcgccucuucgacuucugcaagcaggccauccagcggcugaagacccccgcgcagauguccauccagcugaucaacaaggccgugaacgcccucaucaacgaccagcugaucaugaagaaccaccuccgcgacaucauggggauccccuacugcaacuacagcaaguacugguaccugaaccacacgaccaccggcaagaccucccugcccaagugcuggcuggugagcaacggcuccuaccucaacgagacgcacuucagcgacgacaucgagcagcaggccgacaacaugaucaccgagaugcugcagaaggaguacauggagcggcaggggaagaccccgcugggccuggucgaccucuucguguucuccaccagcuucuaccugaucuccaucuuccugcaccucgugaagauccccacgcaccgccacaucgucggcaagagcugccccaagccccaccggcugaaccacauggggaucugcuccugcgggcuguacaagcagccgggcgugcccgugcgcuggaagcggugaggacuaguuauaagacugacuagcccgaugggccucccaacgggcccuccuccccuccuugcaccgagauuaaucaaaggcucuuuucagagccaccaaaaaaaaaaaaaaaaaaaaaaaaaaaaaaaaaaaaaaaaaaaaaaaaaaaaaaaaaaaaaaaaaaaaaaaaaaaaaaaaaaaaaaaaaaaaaaaaaaaaa

SEQ ID NO: 31230 - RNA, 1689 nt, Artificial Sequence
  mRNA product Design i-3 (hSL-A100) comprising derived and/or modified sequence from LASV(G502-SLE-2009;Clade IV)__AIT17126__GPCmut6 (opt1)
aggagaaagcuuaccaugggccagaucgugaccuucuuccaggaggucccccacgugaucgaggaggugaugaacaucguccugaucgcccucagcauccuggccgugcugaaggggcucuacaacuucgcgaccugcggccugguggggcugcucacguuccugcugcucugcggccgcuccugcaccaccgggcuguacaagggcgucuacgagcugcagacccucgagcugaacauggagacgcugaacaugugcaugccgcucagcugcaccaagaacaacucccaccacuacaucauggugggcaacgagaccgggcuggagcugacccucacgaacaccagcaucaucaaccacaaguucugcaaccuguccgacgcccacaagaagaaccuguacgaccacgcccucaugagcaucaucuccaccuuccaccugagcauccccaacuucaaccaguacgaggccauguccugcgacuucaacggcgggaagaucagcgugcaguacaaccugucccacagcuacgccggcgacgcggccgaccacugcgggaccgucgccaacggcgugcuccagacguucaugcggauggccuggggcggguccuacaucgcgcuggacagcggccgcgggcggugggacugcaucaugaccuccuaccaguaccugaucauccagaacaccaccugggaggaccacugccaguucagccgccccucccccaucggcuaccucggccugcugagccagcggacgcgcgacaucuacaucucccggcgccuccuggggaccuucaccuggacccugagcgacagcgagggcaaggacacgcccgggggcuacugccucacccgguggaugcugaucgaggccgagcugaagugcuucgggaacaccgccguggccaagugcaacgagaagcacgacgaggaguucugcgacaugcuccgccuguucgacuucugcaagcaggccauccagcggcugaaggcgccggcccagauguccauccagcucaucaacaaggccgucaacgcccugaucaacgaccagcuggugaugaagaaccaccuccgcgacaucaugggcauccccuacugcaacuacagccgguacugguaccugaaccacaccacgaccggccgcaccucccugcccaagugcuggcucgugagcaacggguccuaccugaacgagacccacuucagcgacgacaucgagcagcaggccgacaacaugaucacggagaugcugcagaaggaguacauggagcggcagggcaagaccccgcuggggcucgucgaccuguucguguucuccaccagcuucuaccugaucuccaucuuccuccaccuggugaagauccccacccaccgccacaucgucggcaagagcugccccaagccccaccggcugaaccacauggggaucugcuccugcggccucuacaagcagccgggcgugcccgugaaguggaagcgcugaggacuaguuauaagacugacuagcccgaugggccucccaacgggcccuccuccccuccuugcaccgagauuaaucaaaggcucuuuucagagccaccaaaaaaaaaaaaaaaaaaaaaaaaaaaaaaaaaaaaaaaaaaaaaaaaaaaaaaaaaaaaaaaaaaaaaaaaaaaaaaaaaaaaaaaaaaaaaaaaaaaaa

SEQ ID NO: 31231 - RNA, 1689 nt, Artificial Sequence
  mRNA product Design i-3 (hSL-A100) comprising derived and/or modified sequence from LASV(G733-SLE-2010;Clade IV)__AIT17154__GPCmut6 (opt1)
aggagaaagcuuaccaugggccagaucgugaccuucuuccaggaggucccccacgugaucgaggaggugaugaacaucguccugaucgcccucagcauccuggccgugcugaaggggcucuacaacuucgcgaccugcggcaucguggggcuggucuccuuccugcuccugugcggccgcagcugcacgaccucccuguacaaggggguguacgagcuccagacccuggagcugaacauggagacccucaacaugugcaugccgcugagcugcacgaagaacaacucccaccacuacaucauggugggcaacgagaccggccuggagcucacccugaccaacacgagcaucaucaaccacaaguucugcaaccuguccgacgcccacaagaagaaccucuacgaccacgcccugaugagcaucaucuccaccuuccaccugagcauccccaacuucaaccaguacgaggccauguccugcgacuucaacgggggcaagaucagcguccaguacaaccucucccacagcuacgccggggacgcggccaaccacugcggcaccaucgccaacggggugcugcagaccuucaugcggauggccuggggcggcuccuacaucgcgcuggacagcgggcgcgaccggugggacugcaucaugacguccuaccaguaccucaucauccagaacaccaccugggaggaccacugccaguucagccgccccucccccaucggcuaccuggggcugcucagccagcggacccgcgacaucuacaucagccggcgccugcugggcacguucaccuggacccucuccgacagcgagggcaaggacacccccgggggcuacugccugacgcgguggaugcugaucgaggccgagcucaagugcuucgggaacaccgccguggccaagugcaacgagaagcacgacgaggaguucugcgacaugcugcgccuguucgacuucugcaagcaggccauccagcggcucaaggcgccggcccagauguccauccagcugaucaacaaggccgucaacgcccugaucaacgaccagcucaucaugaagaaccaccuccgcgacaucaugggcauccccuacugcaacuacagcaaguacugguaccugaaccacaccaccacggggaagaccucccugcccaagugcuggcuggugagcaacggcuccuaccugaacgagacccacuucagcgacgacaucgagcagcaggccgacaacaugaucaccgagaugcuccagaaggaguacauggagcggcagggcaagacgccgcuggggcugguggaccuguucgucuucuccaccagcuucuaccucaucuccaucuuccugcaccuggugaagauccccacccaccgccacguggucggcaagagcugccccaagccccaccggcucaaccacauggggaucugcuccugcggccuguacgggcagccgggcgugcccgugaaguggaagcgcugaggacuaguuauaagacugacuagcccgaugggccucccaacgggcccuccuccccuccuugcaccgagauuaaucaaaggcucuuuucagagccaccaaaaaaaaaaaaaaaaaaaaaaaaaaaaaaaaaaaaaaaaaaaaaaaaaaaaaaaaaaaaaaaaaaaaaaaaaaaaaaaaaaaaaaaaaaaaaaaaaaaaa

SEQ ID NO: 31232 - RNA, 1689 nt, Artificial Sequence
  mRNA product Design i-3 (hSL-A100) comprising derived and/or modified sequence from MOPV/LASV reassortant(IGS-1;Clade IV)__AFY05576__GPCmut6 (opt1)
aggagaaagcuuaccaugggccagaucgugaccuucuuccaggaggucccccacgugaucgaggaggugaugaacaucguccugaucgcccucagcgugcuggccgugcugaaggggcucuacaacuucgcgaccugcggccuggucgggcuggugacguuccuccugcugugcggccgcuccugcaccaccagccucuacaaggggguguacgagcugcagacccuggagcucaacauggagacgcugaacaugugcaugccgcuguccugcaccaagaacaacagccaccacuacaucauggucggcaacgagaccggccucgagcugacccugacgaacaccuccaucaucaaccacaaguucugcaaccucagcgacgcccacaagaagaaccuguacgaccacgcccugauguccaucaucagcaccuuccaccucuccauccccaacuucaaccaguacgaggccaugagcugcgacuucaacgggggcaagaucuccgugcaguacaaccugagccacuccuacgccggggacgcggccaaccacugcggcaccguggccaacgggguccugcagacguucaugcggauggccuggggcggcagcuacaucgcgcucgacuccgggcgcggcaacugggacugcaucaugaccagcuaccaguaccugaucauccagaacaccaccugggaggaccacugccaguucucccggcccagccccaucggguaccugggccuccugucccagcgcacgcgggacaucuacaucagccgccggcugcucggcaccuucaccuggacccugagcgacuccgagggggaggacacgccgggcggguacugccugacccgcuggaugcucaucgaggccgagcugaagugcuucggcaacaccgccguggccaagugcaacgagaagcacgacgaggaguucugcgacaugcugcggcuguucgacuucugcaagcaggccauccagcgccugaaggcgcccgcccagaugagcauccagcugaucaacaaggccgugaacgcccucaucaacgaccagcugaucaugaagaaccaccuccgggacaucauggggauccccuacugcaacuacuccaaguacugguaccucaaccacaccacgaccggccgcaccagccugcccaagugcuggcuggucuccaacggcagcuaccucaacgagacccacuucuccgacgacaucgagcagcaggccgacaacaugaucacggagaugcugcagaaggaguacauggagcggcaggggaagaccccgcugggccugguggaccucuucguguucagcaccuccuucuaccugaucagcaucuuccugcaccucgucaagauccccacccaccgccacaucguggggaaguccugccccaagccccaccggcugaaccacaugggcaucugcagcugcgggcuguacaagcagccgggcgugcccgucaaguggaagcgcugaggacuaguuauaagacugacuagcccgaugggccucccaacgggcccuccuccccuccuugcaccgagauuaaucaaaggcucuuuucagagccaccaaaaaaaaaaaaaaaaaaaaaaaaaaaaaaaaaaaaaaaaaaaaaaaaaaaaaaaaaaaaaaaaaaaaaaaaaaaaaaaaaaaaaaaaaaaaaaaaaaaaa

SEQ ID NO: 31233 - RNA, 1689 nt, Artificial Sequence
  mRNA product Design i-3 (hSL-A100) comprising derived and/or modified sequence from LASV(LM765-SLE-2012;Clade IV)__AIT17814__GPCmut6 (opt1)
aggagaaagcuuaccaugggccagaucgugaccuucuuccaggaggucccccacgugaucgaggaggugaugaacaucguccugaucgcccucagcauccuggccgugcugaaggggcucuacaacuucgcgaccugcggccugguggggcuggucacguuccuccugcugugcggccgcuccugcaccaccagccucuacaaggggguguacgagcugcagacccuggagcucaacauggagacgcugaacaugugcaugccgcuguccugcaccaagaacaacagccaccacuacaucauggugggcaacgagaccggccucgagcugacccugacgaacaccuccaucaucgaccacaaguucugcaaccucagcgacgcccaccggaagaaccuguacgaccacgcccugauguccaucaucagcaccuuccaccucuccauccccaacuucaaccaguacgaggccaugagcugcgacuucaacgggggcaagaucuccguccaguacaaccugagccacuccuacgccaaggacgcggccgaccacugcgggaccguggccaacggcgugcugcagacguucaugcgcauggccuggggcgggagcuacaucgcgcucgacuccggccgggggcgcugggacugcaucaugaccagcuaccaguaccugaucauccagaacaccaccugggaggaccacugccaguucucccggcccagccccaucggcuaccuggggcuccugucccagcgcacgcgggacaucuacaucagccgccggcugcucggcaccuucaccuggacccugagcgacuccgagggcaaggacacgcccgggggcuacugccugacccgcuggaugcucaucgaggccgagcugaagugcuucgggaacaccgccgucgccaagugcaacgagaagcacgacgaggaguucugcgacaugcugcggcuguucgacuucugcaagcaggccauccagcgccugaaggcgccggcccagaugagcauccagcugaucaacaaggccgugaacgcccucaucaacgaccagcugaucaugaagaaccaccuccgggacaucaugggcauccccuacugcaacuacuccaaguacugguaccucaaccacaccacgaccgggaagaccagccugcccaagugcuggcugguguccaacggcagcuaccucaacgagacccacuucuccgacgacaucgagcagcaggccgacaacaugaucacggagaugcugcagaaggaguacauggagcgccagggcaagaccccgcuggggcuggucgaccucuucguguucagcaccuccuucuaccugaucagcaucuuccugcaccucgugaagauccccacccaccggcacaucgucggcaagcccugccccaagccgcaccgccugaaccacauggggaucugcuccugcggccuguacaagcagcccggggugcccgugaaguggaagcggugaggacuaguuauaagacugacuagcccgaugggccucccaacgggcccuccuccccuccuugcaccgagauuaaucaaaggcucuuuucagagccaccaaaaaaaaaaaaaaaaaaaaaaaaaaaaaaaaaaaaaaaaaaaaaaaaaaaaaaaaaaaaaaaaaaaaaaaaaaaaaaaaaaaaaaaaaaaaaaaaaaaaa

SEQ ID NO: 31234 - RNA, 1689 nt, Artificial Sequence
  mRNA product Design i-3 (hSL-A100) comprising derived and/or modified sequence from LASV(LM776-SLE-2012;Clade IV)__AIT17824__GPCmut6 (opt1)
aggagaaagcuuaccaugggccagaucgugaccuucuuccaggaggucccccacgugaucgaggaggugaugaacaucguccugaucgcccucagcauccuggccgugcugaaggggcucuacaacuucgcgaccugcggccugguggggcuggucacguuccuccugcugugcggccgcuccugcaccaccagcguguacaaggggguguacgagcuccagacccuggagcugaacauggagacgcucaacaugugcaugccgcuguccugcaccaagaacaacagccaccacuacaucauggucggcaacgagaccggccuggagcucacccugacgaacaccuccaucaucaaccacaaguucugcaaccugagcgacgcccacaagaagaaccucuacgaccacgcccugauguccaucaucagcaccuuccaccuguccauccccaacuucaaccaguacgaggccaugagcugcgacuucaacgggggcaagaucuccgugcaguacaaccucagccacuccuacgccggggacgcggccaaccacugcggcaccguggccaacgggguccugcagacguucaugcggauggccuggggcggcagcuacaucgcgcuggacuccgggcacggcaagugggacugcaucaugaccagcuaccaguaccucaucauccagaacaccaccugggaggaccacugccaguucucccgccccagccccaucggguaccugggccugcucucccagcggacgcgcgacaucuacaucagccggcgccugcugggcaccuucaccuggacccucagcgacuccgaggggaaggacacgccgggcggguacugccugacccgguggaugcugaucgaggccgagcucaagugcuucggcaacaccgccguggccaagugcaacgagaagcacgacgaggaguucugcgacaugcugcgccuguucgacuucugcaagcaggccauccagcggcucaaggcgcccgcccagaugagcauccagcugaucaacaaggccgugaacgcccugaucaacgaccagcucaucaugaagaaccaccuccgcgacaucauggggauccccuacugcaacuacuccaaguacugguaccugaaccacaccacgaccggcaagaccagccugcccaagugcuggcuggucuccaacggcagcuaccugaacgagacccacuucuccgacgacaucgagcagcaggccgacaacaugaucacggagaugcuccagaaggaguacauggagcggcaggggaagaccccgcugggccugguggaccuguucguguucagcaccuccuucuaccucaucagcaucuuccugcaccuggucaagauccccacccaccgccacaucguggggaaguccugccccaagccccaccggcucaaccacaugggcaucugcagcugcgggcuguacaagcagccgggcgugcccguccgcuggaagcggugaggacuaguuauaagacugacuagcccgaugggccucccaacgggcccuccuccccuccuugcaccgagauuaaucaaaggcucuuuucagagccaccaaaaaaaaaaaaaaaaaaaaaaaaaaaaaaaaaaaaaaaaaaaaaaaaaaaaaaaaaaaaaaaaaaaaaaaaaaaaaaaaaaaaaaaaaaaaaaaaaaaaa

SEQ ID NO: 31235 - RNA, 1689 nt, Artificial Sequence
  mRNA product Design i-3 (hSL-A100) comprising derived and/or modified sequence from LASV(Mad39;Clade IV)__ANH09722__GPCmut6 (opt1)
aggagaaagcuuaccaugggccagaucgugaccuucuuccaggaggucccccacgugaucgaggaggugaugaacaucguccugaucgcccucagcauccuggccgugcugaaggggcucuacaacguggcgaccugcggccugaucgggcuggucacguuccuccugcugugcggccgcuccugcaccaccacccucuacaaggggguguacgagcugcaggcccuggagcucaacauggagacgcugaacaugugcaugccgcugagcugcaccaagaacaacucccaccacuacauccgggugggcaacgagaccggccucgagcugacccugacgaacaccagccucaucaaccacaaguucugcaaccuguccgacgcccacaagaagaaccuguacgaccacgcccucaugagcaucaucuccaccuuccaccugagcauccccaacuucaaccaguacgaggccauguccugcgacuucaacgacgggaagaucagcguccaguacaaccugucccacaccuacgcgggcgacacggccaaccacugcgggaccguggccaacggcgugcuccagaccuucaugcgcauggccuggggcgggagcuacaucgcgcuggacuccggccgcgggggcugggacugcaucaugaccagcuaccaguaccugaucauccagaacacgaccugggaggaccacugccaguucucccggcccagccccaucggguaccucggccugcugucccagcggacccgcgacaucuacaucagccggcgccuccugggcaccuucacguggacccuguccgacagcgaggggaaggacaccccgggcggguacugccucacccgguggaugcugaucgaggccgagcugaagugcuucggcaacacggccgucgccaagugcaacgagaagcacgacgaggaguucugcgacaugcuccgccuguucgacuucugcaagcaggccauccagcggcugaaggcgcccgcccagaugagcauccagcucaucaacaaggccgugaacgcccugaucaacgaccagcugaucaugaagaaccaccuccgcgacaucauggggauccccuacugcaacuacuccaaguacugguaccugaaccacaccgugaccggcaagaccagccugcccaagugcuggcucgucuccaacggcagcuaccugaacgagacgcacuucuccgacgacaucgagcagcaggccgacaacaugaucaccgagaugcugcagaaggaguacauggagcggcaggggaagaccccgcugggccucguggaccuguucguguucagcaccuccuucuaccugaucagcaucuuccuccaccuggucaagauccccacgcaccgccacgugguggggaagcccugccccaagccgcaccggcugaaccacaugggcaucugcuccugcggguucuacaagcagcccggcguccccgugcgcuggaagcggugaggacuaguuauaagacugacuagcccgaugggccucccaacgggcccuccuccccuccuugcaccgagauuaaucaaaggcucuuuucagagccaccaaaaaaaaaaaaaaaaaaaaaaaaaaaaaaaaaaaaaaaaaaaaaaaaaaaaaaaaaaaaaaaaaaaaaaaaaaaaaaaaaaaaaaaaaaaaaaaaaaaaa

SEQ ID NO: 31236 - RNA, 1689 nt, Artificial Sequence
  mRNA product Design i-3 (hSL-A100) comprising derived and/or modified sequence from LASV(Z0947-SLE-2011;Clade IV)__AIT17840__GPCmut6 (opt1)
aggagaaagcuuaccaugggccagaucgugaccuucuuccaggaggucccccacgugaucgaggaggugaugaacaucguccugaucgcccucagcauccuggccgugcugaaggggcucuacaacuucgcgaccugcggccugguggggcuggucacguuccuccugcugugcggccgcuccugcaccaucagccucuacaaggggguguacgagcugcagacccuggagcucaacauggagacccugaacaugugcaugccgcuguccugcacgaagaacaacagccaccacuacaucauggugggcaacgagaccggccucgagcugacccugaccaacacguccaucaucaaccacaaguucugcaaccucagcgacgcccacaagaagaaccuguacgaccacgcccugauguccaucaucagcaccuuccaccucuccauccccaacuucaaccaguacgaggccaugagcugcgacuucaacgggggcaagaucuccguccaguacaaccugagccacuccuacgccggggacgcggccaaccacugcggcaccguggccaacggggugcugcagaccuucaugcggauggccuggggcggcagcuacaucgcgcucgacuccgggcgcgaccggugggacugcaucaugacgagcuaccaguaccugaucauccagaacaccaccugggaggaccacugccaguucucccgccccagccccaucggcuaccuggggcuccugucccagcggacccgcgacaucuacaucagccggcgccugcucggcacguucaccuggacccugagcgacuccgagggcaaggacacccccgggggcuacugccugacgcgguggaugcucaucgaggccgagcugaagugcuucgggaacaccgccgucgccaagugcaacgagaagcacgacgaggaguucugcgacaugcugcgccucuucgacuucugcaagcaggccauccagcggcugaaggcgccggcccagaugagcauccagcugaucaacaaggccgugaacgcccucaucaacgaccagcugaucaugaagaaccaccuccgcgacaucaugggcauccccuacugcaacuacuccaaguacugguaccugaaccacaccaccacggggaagaccagccugcccaagugcuggcugguguccaacggcagcuaccucaacgagacccacuucuccgacgacaucgagcagcaggccgacaacaugaucaccgagaugcugcagaaggaguacauggagcggcagggcaagacgccgcuggggcuggucgaccucuucguguucagcaccuccuucuaccugaucagcaucuuccugcaccucgugaagauccccacccaccgccacaucgucggcaagcccugccccaagccgcaccggcugaaccacauggggaucugcuccugcggccuguacaagcagcccggggugcccgugaaguggaagcgcugaggacuaguuauaagacugacuagcccgaugggccucccaacgggcccuccuccccuccuugcaccgagauuaaucaaaggcucuuuucagagccaccaaaaaaaaaaaaaaaaaaaaaaaaaaaaaaaaaaaaaaaaaaaaaaaaaaaaaaaaaaaaaaaaaaaaaaaaaaaaaaaaaaaaaaaaaaaaaaaaaaaaa

SEQ ID NO: 31237 - RNA, 1689 nt, Artificial Sequence
  mRNA product Design i-3 (hSL-A100) comprising derived and/or modified sequence from LASV(Josiah;Clade IV)__NP_694870__GPCmut6 (opt4)
aggagaaagcuuaccaugggccagaucgugaccuucuuccaggaggugccccacgugaucgaggaggugaugaacaucgugcugaucgcccugagcgugcuggccgugcugaagggccuguacaacuucgccaccugcggccuggugggccuggugaccuuccugcugcugugcggcagaagcugcaccaccagccuguacaagggcguguacgagcugcagacccuggagcugaacauggagacccugaacaugugcaugccccugagcugcaccaagaacaacagccaccacuacaucauggugggcaacgagaccggccuggagcugacccugaccaacaccagcaucaucaaccacaaguucugcaaccugagcgacgcccacaagaagaaccuguacgaccacgcccugaugagcaucaucagcaccuuccaccugagcauccccaacuucaaccaguacgaggccaugagcugcgacuucaacggcggcaagaucagcgugcaguacaaccugagccacagcuacgccggcgacgccgccaaccacugcggcaccguggccaacggcgugcugcagaccuucaugagaauggccuggggcggcagcuacaucgcccuggacagcggcagaggcaacugggacugcaucaugaccagcuaccaguaccugaucauccagaacaccaccugggaggaccacugccaguucagcagacccagccccaucggcuaccugggccugcugagccagagaaccagagacaucuacaucagcagaagacugcugggcaccuucaccuggacccugagcgacagcgagggcaaggacacccccggcggcuacugccugaccagauggaugcugaucgaggccgagcugaagugcuucggcaacaccgccguggccaagugcaacgagaagcacgacgaggaguucugcgacaugcugagacuguucgacuucugcaagcaggccauccagagacugaaggcccccgcccagaugagcauccagcugaucaacaaggccgugaacgcccugaucaacgaccagcugaucaugaagaaccaccugagagacaucaugggcauccccuacugcaacuacagcaaguacugguaccugaaccacaccaccaccggcagaaccagccugcccaagugcuggcuggugagcaacggcagcuaccugaacgagacccacuucagcgacgacaucgagcagcaggccgacaacaugaucaccgagaugcugcagaaggaguacauggagagacagggcaagaccccccugggccugguggaccuguucguguucagcaccagcuucuaccugaucagcaucuuccugcaccuggugaagauccccacccacagacacaucgugggcaagagcugccccaagccccacagacugaaccacaugggcaucugcagcugcggccuguacaagcagcccggcgugcccgugaaguggaagagaugaggacuaguuauaagacugacuagcccgaugggccucccaacgggcccuccuccccuccuugcaccgagauuaaucaaaggcucuuuucagagccaccaaaaaaaaaaaaaaaaaaaaaaaaaaaaaaaaaaaaaaaaaaaaaaaaaaaaaaaaaaaaaaaaaaaaaaaaaaaaaaaaaaaaaaaaaaaaaaaaaaaaa

SEQ ID NO: 31238 - RNA, 1686 nt, Artificial Sequence
  mRNA product Design i-3 (hSL-A100) comprising derived and/or modified sequence from LASV(LP;Clade I)__AAF86701__GPCmut6 (opt4)
aggagaaagcuuaccaugggccagaucaucaccuucuuccaggaggugccccacgugaucgaggaggugaugaacaucgugcugaucgcccugagccugcuggccauccugaagggccuguacaacaucgccaccugcggcaucaucggccugguggccuuccuguuccugugcggcaagagcugcagccugacccugaagggcggcuacgagcugcagacccuggagcugaacauggagacccugaacaugugcaugccccugagcugcaccaagaacagcagccaccacuacaucagagugggcaacgagaccggccuggagcugacccugaccaacaccagcaucaucaaccacaaguucugcaaccugagcgacgcccacaagaagaaccuguacgaccacgcccugaugagcaucaucagcaccuuccaccugagcauccccaacuucaaccaguacgaggccaugagcugcgacuucaacggcggcaagaucagcgugcaguacaaccugagccacagcuacgccggcgacgccgccgagcacugcggcaccguggccaacggcgugcugcagaccuucaugagaauggccuggggcggcagauacaucgcccuggacagcggcaagggcaacugggacugcaucaugaccagcuaccaguaccugaucauccagaacaccaccugggaggaccacugccaguucagcagacccagccccaucggcuaccugggccugcugagccagagaaccagagacaucuacaucagcagaagacugcugggcaccuucaccuggacccugagcgacagcgagggcaacgagacccccggcggcuacugccugaccagauggaugcugaucgaggccgagcugaagugcuucggcaacaccgccguggccaagugcaacgagaagcacgacgaggaguucugcgacaugcugagacuguucgacuucugcaagcaggccaucagaagacugaaggcccccgcccagaugagcauccagcugaucaacaaggccgugaacgcccugaucaacgaccagcugaucaugaagaaccaccugagagacaucaugggcauccccuacugcaacuacagcaaguacugguaccugaaccacaccagcagcggcagaaccagccugcccaagugcuggcugaucagcaacggcagcuaccugaacgagacccaguucagcgacgacaucgagcagcaggccgacaacaugaucaccgagaugcugcagaaggaguacaucgagagacagggcaagaccccccugggccugguggacaucuucaucuucagcaccagcuucuaccugaucagcaucuuccugcaccugaucaagauccccacccacagacacaucgugggcaagcccugccccaagccccacagacugaaccacaugggcgugugcagcugcggccuguacaagcaccccggcgugcccaccaaguggaagagaugaggacuaguuauaagacugacuagcccgaugggccucccaacgggcccuccuccccuccuugcaccgagauuaaucaaaggcucuuuucagagccaccaaaaaaaaaaaaaaaaaaaaaaaaaaaaaaaaaaaaaaaaaaaaaaaaaaaaaaaaaaaaaaaaaaaaaaaaaaaaaaaaaaaaaaaaaaaaaaaaaaaaa

SEQ ID NO: 31239 - RNA, 1686 nt, Artificial Sequence
  mRNA product Design i-3 (hSL-A100) comprising derived and/or modified sequence from LASV(803213;Clade II)__AAF86703__GPCmut6 (opt4)
aggagaaagcuuaccaugggccagaucaucaccuucuuccaggaggugccccacgugaucgaggaggugaugaacaucgugcugaucgcccugagccugcuggccauccugaagggcaucuacaacguggccaccugcggccuguucggccugaucagcuuccugcugcugugcggcagaagcugcagcgugaccuacaagggcguguacgagcugcagacccuggagcugaacauggccaaccugaacaugugcaugccccugagcugcaccaagaacaacagccaccacuacaucauggugggcaacgagaccggccuggagcugacccugaccaacaccagcaucaucaaccacaaguucugcaaccugagcgacgcccacaagaagaaccuguacgaccacgcccugaugagcaucaucagcaccuuccaccugagcauccccaacuucaaccaguacgaggccaugagcugcgacuucaacggcggcaagaucagcgugcaguacaaccugagccacagcuucgccguggacgccgccaaccacugcggcaccaucgccaacggcgugcugcagaccuucaugagaauggccuggggcggcagcuacaucgcccuggacagcggcaagggcaacugggacugcaucaugaccagcuaccaguaccugaucauccagaacaccaccugggaggaccacugccaguucagcagacccagccccaucggcuaccugggccugcugagccagagaaccagagacaucuacaucagcagaagacugcugggcaccuucaccuggacccugagcgacagcgagggcaacgaggcccccggcggcuacugccugaccagauggaugcugaucgaggccgagcugaagugcuucggcaacaccgccguggccaagugcaacgagaagcacgacgaggaguucugcgacaugcugagacuguucgacuucugcaagcaggccaucaagagacugaagacccccgcccagaugagcauccagcugaucaacaaggccgugaacgcccugaucaacgaccagcugaucaugaagaaccaccugagagacaucaugggcauccccuacugcaacuacagcagauacugguaccugaaccacaccgugaccggcaagaccagccugcccagaugcuggcuggugagcaacggcagcuaccugaacgagacccacuucagcgacgacaucgagcagcaggccgacaacaugaucaccgagaugcugcagaaggaguacauggacagacagggcaagaccccccugggccugguggaccuguucguguucagcaccagcuucuaccugaucagcaucuuccugcaccuggugaagauccccacccacagacacaucgugggcaagcccugccccaagccccacagacugaaccacaugggcaucugcagcugcggccuguacaagcaccccggcgugcccgugaaguggaagagaugaggacuaguuauaagacugacuagcccgaugggccucccaacgggcccuccuccccuccuugcaccgagauuaaucaaaggcucuuuucagagccaccaaaaaaaaaaaaaaaaaaaaaaaaaaaaaaaaaaaaaaaaaaaaaaaaaaaaaaaaaaaaaaaaaaaaaaaaaaaaaaaaaaaaaaaaaaaaaaaaaaaaa

SEQ ID NO: 31240 - RNA, 1686 nt, Artificial Sequence
  mRNA product Design i-3 (hSL-A100) comprising derived and/or modified sequence from LASV(GA391;Clade III)__CAA36645__GPCmut6 (opt4)
aggagaaagcuuaccaugggccagaucgugaccuucuuccaggaggugccccacgugaucgaggaggugaugaacaucgugcugaucgcccugagcauccuggccauccugaagggccuguacaacguggccaccugcggccugaucggccuggugaccuuccugcugcugagcggcagaagcugcagccugaucuacaagggcaccuacgagcugcagacccuggagcugaacauggagacccugaacaugugcaugccccugagcugcaccaagaacaacagccaccacuacaucagagugggcaacgagaccggccuggagcugacccugaccaacaccagcauccugaaccacaaguucugcaaccugagcgacgcccacaagagaaaccuguacgaccacagccugaugagcaucaucagcaccuuccaccugagcauccccaacuucaaccaguacgaggccaugagcugcgacuucaacggcggcaagaucaccgugcaguacaaccugagccacagcuucgccguggacgccgccggccacugcggcacccuggccaacggcgugcugcagaccuucaugagaauggccuggggcggcagcuacaucgcccuggacagcggcagaggcaacugggacugcaucaugaccagcuaccaguaccugaucauccagaacaccaccugggacgaccacugccaguucagcagacccagccccaucggcuaccugggccugcugagccagagaaccagagacaucuacaucagcagaagacugcugggcaccuucaccuggacccugagcgacagcgagggcaacgagacccccggcggcuacugccugaccagauggaugcugaucgaggccgagcugaagugcuucggcaacaccgccguggccaagugcaacgagaagcacgacgaggaguucugcgacaugcugagacuguucgacuucugcaagcaggccaucagaagacugaagacccccgcccagaugagcauccagcugaucaacaaggccgugaacgcccugaucaacgaccagcugaucaugaagaaccaccugagagacaucaugggcauccccuacugcaacuacagcagauacugguaccugaaccacaccagcaccggcaagaccagccugcccagaugcuggcugaucagcaacggcagcuaccugaacgagaccaaguucagcgacgacaucgagcagcaggccgacaacaugaucaccgagaugcugcagaaggaguacaucgacagacagggcaagaccccccugggccugguggaccuguucguguucagcaccagcuucuaccugaucagcaucuuccugcaccuggugaagauccccacccacagacacaucgugggcaagcccugccccaagccccacagacugaaccacaugggcaucugcagcugcggccuguacaagcagcccggcgugcccgugagauggaagagaugaggacuaguuauaagacugacuagcccgaugggccucccaacgggcccuccuccccuccuugcaccgagauuaaucaaaggcucuuuucagagccaccaaaaaaaaaaaaaaaaaaaaaaaaaaaaaaaaaaaaaaaaaaaaaaaaaaaaaaaaaaaaaaaaaaaaaaaaaaaaaaaaaaaaaaaaaaaaaaaaaaaaa

SEQ ID NO: 31241 - RNA, 1689 nt, Artificial Sequence
  mRNA product Design i-3 (hSL-A100) comprising derived and/or modified sequence from LASV(AV;Clade V)__CCA30314__GPCmut6 (opt4)
aggagaaagcuuaccaugggccagaucgugaccuucuuccaggaggugccccacgugaucgaggaggugaugaacaucgugcugaucgcccugagcauccuggccgugcugaagggccuguacaacaucgccaccugcggccugaucggccugaucaccuuccugcugcugugcggcagaagcugcagcagcaaccuguacaagggcguguacgagcugcagagccuggaccugaacauggagacccugaacaugugcaugccccugagcugcaccaagaacaacagccaccacuacaucagagugggcaacgacaccggccuggagcugacccugaccaacaccagcauccugaaccacaaguucugcaaccugagcgacgcccacaagaaggaccuguacgaccacgcccugaugagcaucaucagcaccuuccaccugagcauccccaacuucaaccaguacgaggccaugagcugcgacuucaacggcggcaagaucagcgugcaguacaaccugagccacagcuacgccaucgacgccgccaaccacugcggcaccguggccaacggcauccugcagaccuucaugagaauggccuggggcggcagcuacaucgcccuggacagcggcagaggcaacugggacugcaucaugaccagcuaccaguaccugaucauccagaacaccaccugggagaaccacugccaguucagcagacccagccccaucggcuaccugggccugcugagccagagaaccagagacaucuacaucagcagaagacugcugggcaccuucaccuggacccugagcgacagcgagggcaacgccacccccggcggcuacugccugaccagauggaugcugaucgaggccgagcugaagugcuucggcaacaccgccguggccaagugcaacgagaagcacgacgaggaguucugcgacaugcugagacuguucgacuucugcaagcaggccaucagcagacugaagagccccgcccagaugagcauccagcugaucaacaaggccgugaacgcccugaucaacgaccagcugaucaugaagaaccaccugagagacaucaugggcauccccuacugcaacuacagcaaguacugguaccugaaccacaccaucaccggcaagaccagccugcccaagugcuggcuggugagcaacggcagcuaccugaacgagacccacuucagcgacgacaucgagcagcaggccgacaacaugaucaccgagaugcugcagaaggaguacauggagagacagggcaagaccccccugggccugguggaccuguucguguucagcaccagcuucuaccugaucagcaucuuccugagacuggugaagauccccacccacagacacaucgugggcaagcccugccccaagccccacagacugaaccacaugggcaucugcagcugcggccuguacaagcagcccggcgugcccgugagauggaagagaugaggacuaguuauaagacugacuagcccgaugggccucccaacgggcccuccuccccuccuugcaccgagauuaaucaaaggcucuuuucagagccaccaaaaaaaaaaaaaaaaaaaaaaaaaaaaaaaaaaaaaaaaaaaaaaaaaaaaaaaaaaaaaaaaaaaaaaaaaaaaaaaaaaaaaaaaaaaaaaaaaaaaa

SEQ ID NO: 31242 - RNA, 1686 nt, Artificial Sequence
  mRNA product Design i-3 (hSL-A100) comprising derived and/or modified sequence from LASV(Togo/2016/7082;Clade VI)__AMR44577__GPCmut6 (opt4)
aggagaaagcuuaccaugggccagaucaucaccuucuuccaggaggugccccacgugaucgaggaggugaugaacaucgugcugaucgcccugagccugcuggccauccugaagggcguguacaacguggccaccugcggcaucaucggccuggugaccuuccuguuccugugcggcagaagcugcagccugaucuacaagggcagcuacgagcugcagacccuggagcugaacauggagacccugaacaugugcaugccccugagcugcaccaagaacagcagccaccacuacaucagagugggcaacgagaccggccuggagcugacccugaccaacaccagcaucaucaaccacaaguucugcaaccugagcgacgcccacaagagaaaccuguacgaccacgcccugaugagcauccugagcaccuuccaccugagcauccccaacuucaaccaguacgaggccaugagcugcgacuucaacggcggcaagaucagcgugcaguacaaccugagccacgccuacgccguggacgccgccgagcacugcggcaccguggccaacggcgugcugcagaccuucaugagaauggccuggggcggcagcuacaucgcccuggacagcggcagaggcaacugggacugcaucaugaccagcuaccaguaccugaucauccagaacaccaccugggaggaccacugccaguucagcagacccagccccaucggcuaccugggccugcugagccagagaaccagagacaucuacaucagcagaagacugcugggcaccuucaccuggacccugagcgacagcgagggcaacgagacccccggcggcuacugccugaccagauggaugcugaucgaggccgagcugaagugcuucggcaacaccgccguggccaagugcaacgagaagcacgacgaggaguucugcgacaugcugagacuguucgacuucugcaagcaggccauccagagacugaagagccccgcccagaugagcauccagcugaucaacaaggccgugaacgcccugaucaacgaccagcugaucaugaagaaccaccugagagacaugaugggcauccccuacugcaacuacagcaaguacugguaccugaaccacaccagcagcggcagaaccagccugcccaagugcuggcuggugagcaacggcagcuaccugaacgagacccacuucagcgacgacaucgagcagcaggccgacaacaugaucaccgagaugcugcagaaggaguacaucgacagacagggcaagaccccccugggccugguggaccuguucguguucagcaccagcuucuaccugaucagcaucuuccugcaccugaucaagauccccacccacagacacaucgugggcaagcccugccccaagccccacagacugaaccacaugggcaucugcagcugcggccuguacaagcagcccggcgugcccaccagauggaagagaugaggacuaguuauaagacugacuagcccgaugggccucccaacgggcccuccuccccuccuugcaccgagauuaaucaaaggcucuuuucagagccaccaaaaaaaaaaaaaaaaaaaaaaaaaaaaaaaaaaaaaaaaaaaaaaaaaaaaaaaaaaaaaaaaaaaaaaaaaaaaaaaaaaaaaaaaaaaaaaaaaaaaa

SEQ ID NO: 31243 - RNA, 1686 nt, Artificial Sequence
  mRNA product Design i-3 (hSL-A100) comprising derived and/or modified sequence from LASV(KAK-428;Clade n.d. (VII))__ANH09740__GPCmut6 (opt4)
aggagaaagcuuaccaugggccagaucgugaccuucuuccaggaggugccccacgugaucgaggaggugaugaacaucgugcugaucgcccugagccugcuggccauccugaagggccuguacaacuucgccaccugcggcgugaucggccugaucaccuuccugcugcugugcggcagaagcugcagcgccaccuacaagggccaguacgagcugcagacccuggagcugaacauggagagccugaacaugugcaugccccugagcugcaccaagaacaacagccaccacuacaucagagccggcaacaacaccggccuggagcugacccugaccaacaccagcaucaucagccacaaguucugcaaccugagcgacgcccacaagaagaaccuguacgaccacacccugaugagcaucaucaccaccuuccaccugagcauccccaacuucaaccaguacgaggccaugagcugcgacuucaacggcggcaagaucagcauccaguacaaccugagccacagcuacgccggcgacgccgcccagcacugcggcaccguggccaacggcgugcugcagaccuucaugagaauggccuggggcggcagcuaccuggcccuggacagcggcagaagaggcugggacugcaucaucagcagcuaccaguaccugaucauccagaacaccaccugggacgaccacugccaguucagcagacccagccccaucggcuaccugggcuucgugagccagaagaccagagacaucuacaucagcagaagacugcugggcaccuucaccuggacccugagcgacagcgagggccacgacaugcccggcggcuacugccugaccagauggaugcugaucgaggccgaccugaagugcuucggcaacaccgccguggccaagugcaacgagaagcacgacgaggaguucugcgacauguggagacuguucgacuucugcaagcaggccauccagagacugaaggcccccgcccagaugaacauccagcugaucaacaaggccgugaacgcccugaucaacgaccagcugaugaugaagaaccaccugagagacaucaugggcauccccuacugcaacuacagcaaguucugguaccugaacaacaccaccaccggcagaaccagccugcccagaugcuggcugaucagcaacggcagcuaccugaacgagacccacuucagcgacgacaucgagcagcaggccgacaacaugaucaccgagaugcugcagaaggaguacauggacagacagggcaagaccccccugggccugguggaccuguucguguucagcaccagcuucuaccugaucaccaucuuccugcaccuggugaagauccccacccacagacacaucgugggcaagcccugccccaagccccacagacugaaccacaugggcaucugcagcugcggccuguacaagcagcccggcgugcccgugagauggaagagaugaggacuaguuauaagacugacuagcccgaugggccucccaacgggcccuccuccccuccuugcaccgagauuaaucaaaggcucuuuucagagccaccaaaaaaaaaaaaaaaaaaaaaaaaaaaaaaaaaaaaaaaaaaaaaaaaaaaaaaaaaaaaaaaaaaaaaaaaaaaaaaaaaaaaaaaaaaaaaaaaaaaaa

SEQ ID NO: 31244 - RNA, 1686 nt, Artificial Sequence; identical to SEQ ID NO: 31238
  mRNA product Design i-3 (hSL-A100) comprising derived and/or modified sequence from LASV(Pinneo-NIG-1969;Clade I)__AIT17836__GPCmut6 (opt4)

SEQ ID NO: 31245 - RNA, 1686 nt, Artificial Sequence
  mRNA product Design i-3 (hSL-A100) comprising derived and/or modified sequence from LASV(ISTH0009-NIG-2011;Clade II)__AIT17404__GPCmut6 (opt4)
aggagaaagcuuaccaugggccagaucaucaccuucuuccaggaggugccccacgugaucgaggaggugaugaacaucgugcugaucgcccugagccugcuggccauccugaagggcaucuacaacguggccaccugcggccuguucggccuggugagcuuccugcugcugugcggcagaagcugcagcaccaccuacaagggcguguacgagcugcagacccuggagcuggacauggccagccugaacaugugcaugccccugagcugcaccaagaacaacagccaccacuacaucauggugggcaacgagaccggccuggagcugacccugaccaacaccagcaucaucaaccacaaguucugcaaccugagcgacgcccacaagaagaaccuguacgaccacgcccugaugagcaucaucagcaccuuccaccugagcauccccaacuucaaccaguacgaggccaugagcugcgacuucaacggcggcaagaucagcgugcaguacaaccugagccacgccuacgccguggacgccgccaaccacugcggcaccaucgccaacggcgugcugcagaccuucaugagaauggccuggggcggcagcuacaucgcccuggacagcggcaagggcagcugggacugcaucaugaccagcuaccaguaccugaucauccagaacaccaccugggaggaccacugccaguucagcagacccagccccaucggcuaccugggccugcugagccagagaaccagagacaucuacaucagcagaagacugcugggcaccuucaccuggacccugagcgacagcgagggcaacgagacccccggcggcuacugccugaccagauggaugcugaucgaggccgagcugaagugcuucggcaacaccgccguggccaagugcaacgagaagcacgacgaggaguucugcgacaugcugagacuguucgacuucugcaagcaggccaucagaagacugaagacccccgcccagaugagcauccagcugaucaacaaggccgugaacgcccugaucaacgaccagcugaucaugaagaaccaccugagagacaucaugggcauccccuacugcaacuacagcaaguacugguaccugaaccacaccgugaccggcaagaccagccugcccagaugcuggcuggugagcaacggcagcuaccugaacgagacccacuucagcgacgacaucgagcagcaggccgacaacaugaucaccgagcugcugcagaaggaguacauggacagacagggcaagaccccccugggccugguggaccuguucguguucagcaccagcuucuaccugaucagcaucuuccugcaccugaucaagauccccacccacagacacaucaccggcaagcccugccccaagccccacagacugaaccacaugggcaucugcagcugcggccuguacaagcaccccggcgugcccgugaaguggaagagaugaggacuaguuauaagacugacuagcccgaugggccucccaacgggcccuccuccccuccuugcaccgagauuaaucaaaggcucuuuucagagccaccaaaaaaaaaaaaaaaaaaaaaaaaaaaaaaaaaaaaaaaaaaaaaaaaaaaaaaaaaaaaaaaaaaaaaaaaaaaaaaaaaaaaaaaaaaaaaaaaaaaaa

SEQ ID NO: 31246 - RNA, 1686 nt, Artificial Sequence
  mRNA product Design i-3 (hSL-A100) comprising derived and/or modified sequence from LASV(ISTH2010-NIG-2012;Clade II)__AIT17482__GPCmut6 (opt4)
aggagaaagcuuaccaugggccagaucaucaccuucuuccaggaggugccccacgugaucgaggaggugaugaacaucgugcugaucgcccugagccugcuggccauccugaagggcaucuacaacguggccaccugcggccuguucggccuggugagcuuccugcugcugugcggcagaagcugcagcaccaccuacaagggcguguacgagcugcagacccuggagcuggacauggccagccugaacaugugcaugccccugagcugcaccaagaacaacagccaccacuacaucauggugggcaacgagaccggccuggagcugacccugaccaacaccagcaucaucaaccacaaguucugcaaccugagcgacgcccacaagaagaaccuguacgaccacgcccugaugagcaucaucagcaccuuccaccugagcauccccaacuucaaccaguacgaggccaugagcugcgacuucaacggcggcaagaucagcgugcaguacaaccugagccacgccuacgccguggacgccgccaaccacugcggcaccaucgccaacggcgugcugcagaccuucaugagaauggccuggggcggcagcuacaucgcccuggacagcggcaagggcagcugggacugcaucaugaccagcuaccaguaccugaucauccagaacaucaccugggaggaccacugccaguucagcagacccagccccaucggcuaccugggccugcugagccagagaaccagagacaucuacaucagcagaagacugcugggcaccuucaccuggacccugagcgacagcgagggcaacgagacccccggcggcuacugccugaccagauggaugcugaucgaggccgagcugaagugcuucggcaacaccgccguggccaagugcaacgagaagcacgacgaggaguucugcgacaugcugagacuguucgacuucugcaagcaggccaucagaagacugaagacccccgcccagaugagcauccagcugaucaacaaggccgugaacgcccugaucaacgaccagcugaucaugaagaaccaccugagagacaucaugggcauccccuacugcaacuacagcaaguacugguaccugaaccacaccgugaccggcaagaccagccugcccagaugcuggcuggugagcaacggcagcuaccugaacgagacccacuucagcgacgacaucgagcagcaggccgacaacaugaucaccgagcugcugcagaaggaguacaucgacagacagggcaagaccccccugggccugguggaccuguucguguucagcaccagcuucuaccugaucagcaucuuccugcaccuggugaagauccccacccacagacacguggugggcaagcccugccccaagccccacagacugaaccacaugggcaucugcagcugcggccuguacaagcaccccggcgugcccgugaaguggaagagaugaggacuaguuauaagacugacuagcccgaugggccucccaacgggcccuccuccccuccuugcaccgagauuaaucaaaggcucuuuucagagccaccaaaaaaaaaaaaaaaaaaaaaaaaaaaaaaaaaaaaaaaaaaaaaaaaaaaaaaaaaaaaaaaaaaaaaaaaaaaaaaaaaaaaaaaaaaaaaaaaaaaaa

SEQ ID NO: 31247 - RNA, 1686 nt, Artificial Sequence
  mRNA product Design i-3 (hSL-A100) comprising derived and/or modified sequence from LASV(Lassa virus/H.sapiens-wt/NGA/2015/ISTH_0543;Clade II)__AVO03639__GPCmut6 (opt4)
aggagaaagcuuaccaugggccagaucaucaccuucuuccaggaggugccccacgugaucgaggaggugaugaacaucgugcugaucgcccugagccugcuggccauccugaagggcaucuacaacguggccaccugcggccuguucggccuggugagcuuccugcugcugugcggcagaagcugcagcaccaccuacaagggcguguacgagcugcagacccuggagcuggacauggccaaccugaacaugugcaugccccugagcugcaccaagaacaacagccaccacuacaucauggugggcaacgagaccggccuggagcugacccugaccaacaccagcaucaucaaccacaaguucugcaaccugagcgacgcccacaagaagaaccuguacgaccacgcccugaugagcaucaucagcaccuuccaccugagcauccccaacuucaaccaguacgaggccaugagcugcgacuucaacggcggcaagaucagcgugcaguacaaccugagccacaccuacgccguggacgccgccaaccacugcggcaccaucgccaacggcgugcugcagaccuucaugagaauggccuggggcggcagcuacaucgcccuggacagcggcaagggcagcugggacugcaucaugaccagcuaccaguaccuggugauccagaacaccaccugggaggaccacugccaguucagcagacccagccccaucggcuaccugggccugcugagccagagaaccagagacaucuacaucagcagaagacugcugggcaccuucaccuggacccugagcgacagcgagggcaacgagacccccggcggcuacugccugaccagauggaugcugaucgaggccgagcugaagugcuucggcaacaccgccguggccaagugcaacgagaagcacgacgaggaguucugcgacaugcugagacuguucgacuucugcaagcaggccaucagaagacugaagacccccgcccagaugagcauccagcugaucaacaaggccgugaacgcccugaucaacgaccagcugaucaugaagaaccaccugagagacaucaugggcauccccuacugcaacuacagcaaguacugguaccugaaccacaccgugaccggcaagaccagccugcccagaugcuggcuggugagcaacggcagcuaccugaacgagacccacuucagcgacgacaucgagcagcaggccgacaacaugaucaccgagcugcugcagaaggaguacaucgacagacagggcaagaccccccugggccugguggaccuguucguguucagcaccagcuucuaccugaucagcaucuuccugcaccuggugaagauccccacccacagacacaucaccggcaagcccugccccaagccccacagacugaaccacaugggcaucugcagcugcggccuguacaagcaccccggcgugcccgugaaguggaagagaugaggacuaguuauaagacugacuagcccgaugggccucccaacgggcccuccuccccuccuugcaccgagauuaaucaaaggcucuuuucagagccaccaaaaaaaaaaaaaaaaaaaaaaaaaaaaaaaaaaaaaaaaaaaaaaaaaaaaaaaaaaaaaaaaaaaaaaaaaaaaaaaaaaaaaaaaaaaaaaaaaaaaa

SEQ ID NO: 31248 - RNA, 1686 nt, Artificial Sequence
  mRNA product Design i-3 (hSL-A100) comprising derived and/or modified sequence from LASV(Lassa virus/H.sapiens-wt/NGA/2016/ISTH_0009;Clade II)__AVO03571__GPCmut6 (opt4)
aggagaaagcuuaccaugggccagaucaucaccuucuuccaggaggugccccacgugaucgaggaggugaugaacaucgugcugaucgcccugagccugcuggccauccugaagggcaucuacaacguggccaccugcggccugcugggccuggugagcuuccugcugcugugcggcagaagcugcagcaccaccuacaagggcguguacgagcugcagacccuggagcuggacauggccagccugaacaugugcaugccccugagcugcaccaagaacaacagccaccacuacaucauggugggcaacgagaccggccuggagcugacccugaccaacaccagcaucaucaaccacaaguucugcaaccugagcgacgcccacaagaagaaccuguacgaccacgcccugaugagcaucaucagcaccuuccaccugagcauccccaacuucaaccaguacgaggccaugagcugcgacuucaacggcggcagaaucagcgugcaguacaaccugagccacagcuacgccguggacgccgccaaccacugcggcaccaucgccaacggcgugcugcagaccuucaugagaauggccuggggcggcagcuacaucgcccuggacagcggcaagggcagcugggacugcaucaugaccagcuaccaguaccugaucauccagaacaccaccugggaggaccacugccaguucagcagacccagccccaucggcuaccugggccugcugagccagagaaccagagacaucuacaucagcagaagacugcugggcaccuucaccuggacccugagcgacagcgagggcaacgagacccccggcggcuacugccugaccagauggaugcugaucgaggccgagcugaagugcuucggcaacaccgccguggccaagugcaacgagaagcacgacgaggaguucugcgacaugcugagacuguucgacuucugcaagcaggccaucagaagacugaagacccccgcccagaugagcauccagcugaucaacaaggccgugaacgcccugaucaacgaccagcugaucaugaagaaccaccugagagacaucaugggcauccccuacugcaacuacagcaaguacugguaccugaaccacaccgugaccggcaagaccagccugcccagaugcuggcuggugagcaacggcagcuaccugaacgagacccacuucagcgacgacaucgagcagcaggccgacaacaugaucaccgagcugcugcagaaggaguacaucgacagacagggcaagaccccccugggccugguggaccuguucguguucagcaccagcuucuaccugaucagcaucuuccugcaccuggugaagauccccacccacagacacaucaccggcaagcccugccccaagccccacagacugaaccacaugggcaucugcagcugcggccuguacaaccaccccggcgugcccgugaaguggaagagaugaggacuaguuauaagacugacuagcccgaugggccucccaacgggcccuccuccccuccuugcaccgagauuaaucaaaggcucuuuucagagccaccaaaaaaaaaaaaaaaaaaaaaaaaaaaaaaaaaaaaaaaaaaaaaaaaaaaaaaaaaaaaaaaaaaaaaaaaaaaaaaaaaaaaaaaaaaaaaaaaaaaaa

SEQ ID NO: 31249 - RNA, 1686 nt, Artificial Sequence
  mRNA product Design i-3 (hSL-A100) comprising derived and/or modified sequence from LASV(Lassa virus/H.sapiens-wt/NGA/2016/ISTH_0017;Clade II)__AVO03567__GPCmut6 (opt4)
aggagaaagcuuaccaugggccagaucaucaccuucuuccaggaggugccccacgugaucgaggaggugaugaacaucgugcugaucgcccugagccugcuggccauccugaagggcaucuacaacguggccaccugcggccuguucggccuggugagcuuccugcugcugugcggcagaagcugcagcaccaccuacaagggcguguacgagcugcagacccuggagcuggacauggccagccugaacaugugcaugccccugagcugcaccaagaacaacagccaccacuacaucauggugggcaacgagaccggccuggagcugacccugaccaacaccagcaucaucaaccacaaguucugcaaccugagcgacgcccacaagaagaaccuguacgaccacgcccugaugagcaucaucagcaccuuccaccugagcauccccaacuucaaccaguacgaggccaugagcugcgacuucaacggcggcaagaucagcgugcaguacaaccugagccacaccuacgccaucgacgccgccaaccacugcggcaccaucgccaacggcgugcugcagaccuucaugagaauggccuggggcggcagcuacaucgcccuggacagcggcaagggcagcugggacugcaucaugaccagcuaccaguaccugaucauccagaacaccaccugggaggaccacugccaguucagcagacccagccccaucggcuaccugggccugcugagccagagaaccagagacaucuacaucagcagaagacugcugggcaccuucaccuggacccugagcgacagcgagggcaacgagacccccggcggcuacugccugaccagauggaugcugaucgaggccgagcugaagugcuucggcaacaccgccguggccaagugcaacgagaagcacgacgaggaguucugcgacaugcugagacuguucgacuucugcaagcaggccaucagaagacugaagacccccgcccagaugagcauccagcugaucaacaaggccgugaacgcccugaucaacgaccagcugaucaugaagaaccaccugagagacaucaugggcauccccuacugcaacuacagcaaguacugguaccugaaccacaccgugaccggcaagaccagccugcccagaugcuggcuggugagcaacggcagcuaccugaacgagacccacuucagcgacgacaucgagcagcaggccgacaacaugaucaccgagcugcugcagaaggaguacauggacagacagggcaagaccccccugggccugguggaccuguucguguucagcaccagcuucuaccugaucagcaucuuccugcaccuggugagaauccccacccacagacacgugaucggcaagcccugccccaagccccacagacugaaccacaugggcaucugcagcugcggccuguacaagcaccccggcgugcccgugaaguggaagagaugaggacuaguuauaagacugacuagcccgaugggccucccaacgggcccuccuccccuccuugcaccgagauuaaucaaaggcucuuuucagagccaccaaaaaaaaaaaaaaaaaaaaaaaaaaaaaaaaaaaaaaaaaaaaaaaaaaaaaaaaaaaaaaaaaaaaaaaaaaaaaaaaaaaaaaaaaaaaaaaaaaaaa

SEQ ID NO: 31250 - RNA, 1686 nt, Artificial Sequence
  mRNA product Design i-3 (hSL-A100) comprising derived and/or modified sequence from LASV(Lassa virus/H.sapiens-wt/NGA/2018/ISTH_0959;Clade II)__AVV65099__GPCmut6 (opt4)
aggagaaagcuuaccaugggccagaucaucaccuucuuccaggaggugccccacgugaucgaggaggugaugaacaucgugcugaucgcccugagccugcuggccauccugaagggcaucuacaacguggugaccugcggccuguucggccuggugagcuuccugcugcugugcggcagaagcugcagcaccaccuacaagggcguguacgagcugcagacccuggagcuggacauggccagccugaacaugugcaugccccugagcugcaccaagaacaacagccaccacuacaucauggugggcaacgagaccggccuggagcugacccugaccaacaccagcaucaucaaccacaaguucugcaaccugagcgacgcccacaagaagaaccuguacgaccacgcccugaugagcaucaucagcaccuuccaccugagcauccccaacuucaaccaguacgaggccaugagcugcgacuucaacggcggcaagaucagcgugcaguacaaccugagccacgccuacgccaucgacgccgccaaccacugcggcaccaucgccaacggcgugcugcagaccuucaugagaauggccuggggcggcagcuacaucgcccuggacagcggcaagggcagcugggacugcaucaugaccagcuaccaguaccugaucauccagaacaccaccugggaggaccacugccaguucagcagacccagccccaucggcuaccugggccugcugagccagagaaccagagacaucuacaucagcagaagacugcugggcaccuucaccuggacccugagcgacagcgagggcaacgagacccccggcggcuacugccugaccagauggaugcugaucgaggccgagcugaagugcuucggcaacaccgccguggccaagugcaacgagaagcacgacgaggaguucugcgacaugcugagacuguucgacuucugcaagcaggccaucagaagacugaagacccccgcccagaugagcauccagcugaucaacaaggccgugaacgcccugaucaacgaccagcugaucaugaagaaccaccugagagacaucaugggcauccccuacugcaacuacagcaaguacugguaccugaaccacaccgugaccggcaagaccagccugcccagaugcuggcuggugagcaacggcagcuaccugaacgagacccacuucagcgacgacaucgagcagcaggccgacaacaugaucaccgagcugcugcagaaggaguacaucgacagacagggcaagaccccccugggccugguggaccuguucguguucagcaccagcuucuaccugaucagcaucuuccugcaccuggugaagauccccacccacagacacgugaucggcaagcccugccccaagccccacagacugaaccacaugggcaucugcagcugcggccuguacaagcaccccggcgugcccgugaaguggaagagaugaggacuaguuauaagacugacuagcccgaugggccucccaacgggcccuccuccccuccuugcaccgagauuaaucaaaggcucuuuucagagccaccaaaaaaaaaaaaaaaaaaaaaaaaaaaaaaaaaaaaaaaaaaaaaaaaaaaaaaaaaaaaaaaaaaaaaaaaaaaaaaaaaaaaaaaaaaaaaaaaaaaaa

SEQ ID NO: 31251 - RNA, 1686 nt, Artificial Sequence
  mRNA product Design i-3 (hSL-A100) comprising derived and/or modified sequence from LASV(LASV003-NIG-2008;Clade II)__AIT17580__GPCmut6 (opt4)
aggagaaagcuuaccaugggccagaucaucaccuucuuccaggaggugccccacgugaucgaggaggugaugaacaucgugcugaucgcccugagccugcuggccauccugaagggcaucuacaacguggccaccugcggccuguucggccuggugagcuuccugcugcugugcggcagaagcugcagcaccaccuacaagggcguguacgagcugcagacccuggagcuggacauggccagccugaacaugugcaugccccugagcugcaccaagaacaacagccaccacuacaucauggugggcaacgagaccggccuggagcugacccugaccaacaccagcaucaucaaccacaaguucugcaaccugagcgacgcccacaagaagaaccuguacgaccacgcccugaugagcaucaucagcaccuuccaccugagcauccccaacuucaaccaguacgaggccaugagcugcgacuucaacggcggcaagaucagcgugcaguacaaccugagccacaccuacgccguggacgccgccaaccacugcggcaccaucgccaacggcgugcugcagaccuucaugagaauggccuggggcggcagcuacaucgcccuggacagcggcaagggcagcugggacugcaucaugaccagcuaccaguaccugaucauccagaacaccaccugggaggaccacugccaguucagcagacccagccccaucggcuaccugggccugcugagccagagaaccagagacaucuacaucagcagaagacugcugggcaccuucaccuggacccugagcgacagcgagagcaacgagacccccggcggcuacugccugaccagauggaugcugaucgaggccgagcugaagugcuucggcaacaccgccguggccaagugcaacgagaagcacgacgaggaguucugcgacaugcugagacuguucgacuucugcaagcaggccaucagaagacugaaggcccccgcccagaugagcauccagcugaucaacaaggccgugaacgcccugaucaacgaccagcugaucaugaagaaccaccugagagacaucaugggcauccccuacugcaacuacagcaaguacugguaccugaaccacaccgugaccggcagaaccagccugcccagaugcuggcuggugagcaacggcagcuaccugaacgagacccacuucagcgacgacaucgagcagcaggccgacaacaugaucaccgagcugcugcagaaggaguacauggacagacagggcaagaccccccugggccugguggaccuguucguguucagcaccagcuucuaccugaucagcaucuuccugcaccuggugaagauccccacccacagacacgugaucggcaagcccugccccaagccccacagacugaaccacaugggcaucugcagcugcggccuguacaagcaccccggcgugcccgugaaguggaagagaugaggacuaguuauaagacugacuagcccgaugggccucccaacgggcccuccuccccuccuugcaccgagauuaaucaaaggcucuuuucagagccaccaaaaaaaaaaaaaaaaaaaaaaaaaaaaaaaaaaaaaaaaaaaaaaaaaaaaaaaaaaaaaaaaaaaaaaaaaaaaaaaaaaaaaaaaaaaaaaaaaaaaa

SEQ ID NO: 31252 - RNA, 1686 nt, Artificial Sequence
  mRNA product Design i-3 (hSL-A100) comprising derived and/or modified sequence from LASV(LASV035-NIG-2009;Clade II)__AIT17588__GPCmut6 (opt4)
aggagaaagcuuaccaugggccagaucaucaccuucuuccaggaggugccccacgugaucgaggaggugaugaacaucgugcugaucgcccugagccugcuggccauccugaagggcaucuacaacguggccaccugcggccuguucggccuggugagcuuccugcugcugugcggcagaagcugcagcaccaccuacaagggcguguacgagcugcagacccuggagcuggacauggccagccugaacaugugcaugccccugagcugcaccaagaacaacagccaccacuacaucauggugggcaacgagaccggccuggagcugacccugaccaacaccagcaucaucaaccacaaguucugcaaccugagcgacgcccacaagaagaaccuguacgaccacgcccugaugagcaucaucagcaccuuccaccugagcauccccaacuucaaccaguacgaggccaugagcugcgacuucaacggcggcaagaucagcgugcaguacaaccugagccacgccuacgccguggacgccgccaaccacugcggcaccaucgccaacggcgugcugcagaccuucaugagaauggccuggggcggcagcuacaucgcccuggacagcggcaagggcagcugggacugcaucaugaccagcuaccaguaccugaucauccagaacaccaccugggaggaccacugccaguucagcagacccagccccaucggcuaccugggccugcugagccagagaaccagagacaucuacaucagcagaagacugcugggcaccuucaccuggacccugagcgacagcgagggcaacgagacccccggcggcuacugccugaccagauggaugcugaucgaggccgagcugaagugcuucggcaacaccgccguggccaagugcaacgagaagcacgacgaggaguucugcgacaugcugagacuguucgacuucugcaagcaggccaucagaagacugaaggcccccgcccagaugagcauccagcugaucaacaaggccgugaacgcccugaucaacgaccagcugaucaugaagaaccaccugagagacaucaugggcauccccuacugcaacuacagcaaguacugguaccugaaccacaccgugaccggcaagaccagccugcccagaugcuggcuggugagcaacggcagcuaccugaacgagacccacuucagcgacgacaucgagcagcaggccgacaacaugaucaccgagcugcugcagaaggaguacaucgacagacagggcaagaccccccugggccugguggaccuguucguguucagcaccagcuucuaccugaucagcaucuuccugcaccuggugaagauccccacccacagacacgugaucggcaagcccugccccaagccccacagacugaaccacaugggcaucugcagcugcggccuguacaagcaccccggcgugcccgugaaguggaagagaugaggacuaguuauaagacugacuagcccgaugggccucccaacgggcccuccuccccuccuugcaccgagauuaaucaaaggcucuuuucagagccaccaaaaaaaaaaaaaaaaaaaaaaaaaaaaaaaaaaaaaaaaaaaaaaaaaaaaaaaaaaaaaaaaaaaaaaaaaaaaaaaaaaaaaaaaaaaaaaaaaaaaa

SEQ ID NO: 31253 - RNA, 1686 nt, Artificial Sequence
  mRNA product Design i-3 (hSL-A100) comprising derived and/or modified sequence from LASV(LASV1000-NIG-2009;Clade II)__AIT17782__GPCmut6 (opt4)
aggagaaagcuuaccaugggccagaucaucaccuucuuccaggaggugccccacgugaucgaggaggugaugaacaucgugcugaucgcccugagccugcuggccauccugaagggcaucuacaacguggccaccugcggccuguucggccuggugagcuuccugcugcugugcggcagaagcugcagcaccaccuacaagggcguguacgagcugcagacccuggagcuggacauggccagccugaacaugugcaugccccugagcugcaccaagaacaacagccaccacuacaucauggugggcaacgagaccggccuggagcugacccugaccaacaccagcaucaucaaccacaaguucugcaaccugagcgacgcccacaagaagaaccuguacgaccacgcccugaugagcaucaucagcaccuuccaccugagcauccccaacuucaaccaguacgaggccaugagcugcgacuucaacggcggcaagaucagcgugcaguacaaccugagccacaccuacgccguggacgccgccaaccacugcggcaccaucgccaacggcgugcugcagaccuucaugagaauggccuggggcggcagcuacaucgcccuggacagcggcaagggcagcugggacugcaucaugaccagcuaccaguaccugaucauccagaacaccaccugggaggaccacugccaguucagcagacccagccccaucggcuaccugggccugcugagccagagaaccagagacaucuacaucagcagaagacugcugggcaccuucaccuggacccugagcgacagcgagggcaacgagacccccggcggcuacugccugaccagauggaugcugaucgaggccgagcugaagugcuucggcaacaccgccguggccaagugcaacgagaagcacgacgaggaguucugcgacaugcugagacuguucgacuucugcaagcaggccaucaagagacugaagacccccgcccagaugagcauccagcugaucaacaaggccgugaacgcccugaucaacgaccagcugaucaugaagaaccaccugagagacaucaugggcauccccuacugcaacuacagcaaguacugguaccugaaccacaccgugaccggcaagaccagccugcccagaugcuggcuggugagcaacggcagcuaccugaacgagacccacuucagcgacgacaucgagcagcaggccgacaacaugaucaccgagcugcugcagaaggaguacaucgacagacagggcaagaccccccugggccugguggaccuguucguguucagcaccagcuucuaccugaucagcaucuuccugcaccuggugaagauccccacccacagacacguggugggcaagcccugccccaagccccacagacugaaccacaugggcaucugcagcugcggccuguacaagcaccccggcgugcccgugaaguggaagagaugaggacuaguuauaagacugacuagcccgaugggccucccaacgggcccuccuccccuccuugcaccgagauuaaucaaaggcucuuuucagagccaccaaaaaaaaaaaaaaaaaaaaaaaaaaaaaaaaaaaaaaaaaaaaaaaaaaaaaaaaaaaaaaaaaaaaaaaaaaaaaaaaaaaaaaaaaaaaaaaaaaaaa

SEQ ID NO: 31254 - RNA, 1686 nt, Artificial Sequence
  mRNA product Design i-3 (hSL-A100) comprising derived and/or modified sequence from LASV(LASV221-NIG-2010;Clade II)__AIT17624__GPCmut6 (opt4)
aggagaaagcuuaccaugggccagaucaucaccuucuuccaggaggugccccacgugaucgaggaggugaugaacaucgugcugaucgcccugagccugcuggccauccugaagggcaucuacaacguggccaccugcggccuguucggccuggugagcuuccugcugcugugcggcagaagcugcagcaccaccuacaagggcguguacgagcugcagacccuggagcuggacauggccagccugaacaugugcaugccccugagcugcaccaagaacaacagccaccacuacaucauggugggcaacgagaccggccuggagcugacccugaccaacaccagcaucaucaaccacaaguucugcaaccugagcgacgcccacaagaagaaccuguacgaccacgcccugaugagcaucaucagcaccuuccaccugagcauccccaacuucaaccaguacgaggccaugagcugcgacuucaacggcggcaagaucagcgugcaguacaaccugagccacaccuacgccaucgacgccgccaaccacugcggcaccaucgccaacggcgugcugcagaccuucaugagaauggccuggggcggcagcuacaucgcccuggacagcggcaagggcagcugggacugcaucaugaccagcuaccaguaccugaucauccagaacaccaccugggaggaccacugccaguucagcagacccagccccaucggcuaccugggccugcugagccagagaaccagagacaucuacaucagcagaagacugcugggcaccuucaccuggacccugagcgacagcgagggcaacgagacccccggcggcuacugccugaccagauggaugcugaucgaggccgagcugaagugcuucggcaacaccgccguggccaagugcaacgagaagcacgacgaggaguucugcgacaugcugagacuguucgacuucugcaagcaggccaucagaagacugaagacccccgcccagaugagcauccagcugaucaacaaggccgugaacgcccugaucaacgaccagcugaucaugaagaaccaccugagagacaucaugggcauccccuacugcaacuacagcaaguacugguaccugaaccacaccgugaccggcaagaccagccugcccagaugcuggcuggugagcaacggcagcuaccugaacgagacccacuucagcgacgacaucgagcagcaggccgacaacaugaucaccgagaugcugcagaaggaguacauggacagacagggcaagaccccccugggccugguggaccuguucguguucagcaccagcuucuaccugaucagcaucuuccugcaccuggugaagauccccacccacagacacgugaucggcaagcccugccccaagccccacagacugaaccacaugggcaucugcagcugcggccuguacaagcaccccggcgugcccgugaaguggaagagaugaggacuaguuauaagacugacuagcccgaugggccucccaacgggcccuccuccccuccuugcaccgagauuaaucaaaggcucuuuucagagccaccaaaaaaaaaaaaaaaaaaaaaaaaaaaaaaaaaaaaaaaaaaaaaaaaaaaaaaaaaaaaaaaaaaaaaaaaaaaaaaaaaaaaaaaaaaaaaaaaaaaaa

SEQ ID NO: 31255 - RNA, 1686 nt, Artificial Sequence
  mRNA product Design i-3 (hSL-A100) comprising derived and/or modified sequence from LASV(LASV237-NIG-2010;Clade II)__AIT17638__GPCmut6 (opt4)
aggagaaagcuuaccaugggccagaucaucaccuucuuccaggaggugccccacgugaucgaggaggugaugaacaucgugcugaucgcccugagccugcuggccauccugaagggcaucuacaacguggccaccugcggccuguucggccuggugagcuuccugcugcugugcggcagaagcugcagcaccaccuacaagggcguguacgagcugcagacccuggagcuggacauggccagccugaacaugugcaugccccugagcugcaccaagaacaacagccaccacuacaucauggugggcaacgagaccggccuggagcugacccugaccaacaccagcaucaucaaccacaaguucugcaaccugagcgacgcccacaagaaggaccuguacgaccacgcccugaugagcaucaucagcaccuuccaccugagcauccccaacuucaaccaguacgaggccaugagcugcgacuucaacggcggcaagaucagcgugcaguacaaccugagccacaccuacgccguggacgccgccaaccacugcggcaccaucgccaacggcgugcugcagaccuucaugagaauggccuggggcggcagcuacaucgcccuggacagcggcaagggcagcugggacugcaucaugaccagcuaccaguaccugaucauccagaacaccaccugggaggaccacugccaguucagcagacccagccccaucggcuaccugggccugcugagccagagaaccagagacaucuacaucagcagaagacugcugggcaccuucaccuggacccugagcgacagcgagggcaacgagacccccggcggcuacugccugaccagauggaugcugaucgaggccgagcugaagugcuucggcaacaccgccguggccaagugcaacgagaagcacgacgaggaguucugcgacaugcugagacuguucgacuucugcaagcaggccaucagaagacugaagacccccgcccagaugagcauccagcugaucaacaaggccgugaacgcccugaucaacgaccagcugaucaugaagaaccaccugagagacaucaugggcauccccuacugcaacuacagcaaguacugguaccugaaccacaccgugaccggcaagaccagccugcccagaugcuggcuggugagcaacggcagcuaccugaacgagacccacuucagcgacgacaucgagcagcaggccgacaacaugaucaccgagcugcugcagaaggaguacauggacagacagggcaagaccccccugggccugguggaccuguucguguucagcaccagcuucuaccugaucagcaucuuccugcaccugaucaagauccccacccacagacacaucaccggcaagcccugccccaagccccacagacugaaccacaugggcaucugcagcugcggccuguacaagcaccccggcgugcccgugaaguggaagagaugaggacuaguuauaagacugacuagcccgaugggccucccaacgggcccuccuccccuccuugcaccgagauuaaucaaaggcucuuuucagagccaccaaaaaaaaaaaaaaaaaaaaaaaaaaaaaaaaaaaaaaaaaaaaaaaaaaaaaaaaaaaaaaaaaaaaaaaaaaaaaaaaaaaaaaaaaaaaaaaaaaaaa

SEQ ID NO: 31256 - RNA, 1686 nt, Artificial Sequence
  mRNA product Design i-3 (hSL-A100) comprising derived and/or modified sequence from LASV(LASV253-NIG-2011;Clade II)__AIT17670__GPCmut6 (opt4)
aggagaaagcuuaccaugggccagaucaucaccuucuuccaggaggugccccacgugaucgaggaggugaugaacaucgugcugaucgcccugagccugcuggccauccugaagggcaucuacaacguggccaccugcggccuguucggccuggugagcuuccugcugcugugcggcagaagcugcagcaccaccuacaagggcguguacgagcugcagacccuggagcuggacauggccagccugaacaugugcaugccccugagcugcaccaagaacaacagccaccacuacaucauggugggcaacgagaccggccuggagcugacccugaccaacaccagcaucaucaaccacaaguucugcaaccugagcgacgcccacaagaagaaccuguacgaccacgcccugaugagcaucaucagcaccuuccaccugagcauccccaacuucaaccaguacgaggccaugagcugcgacuucaacggcggcaagaucagcgugcaguacaaccugagccacaccuacgccguggacgccgccaaccacugcggcaccaucgccaacggcgugcugcagaccuucaugagaauggccuggggcggcagcuacaucgcccuggacagcggcaagggcagcugggacugcaucaugaccagcuaccaguaccugaucauccagaacaccaccugggaggaccacugccaguucagcagacccagccccaucggcuaccugggccugcugagccagagaaccagagacaucuacaucagcagaagacugcugggcaccuucaccuggacccugagcgacagcgagggcaacgagacccccggcggcuacugccugaccagauggaugcugaucgaggccgagcugaagugcuucggcaacaccgccguggccaagugcaacgagaagcacgacgaggaguucugcgacaugcugagacuguucgacuucugcaagcaggccaucagaagacugaaggcccccgcccagaugagcauccagcugaucaacaaggccgugaacgcccugaucaacgaccagcugaucaugaagaaccaccugagagacaucaugggcauccccuacugcaacuacagcaaguacugguaccugaaccacaccgugaccggcagaaccagccugcccagaugcuggcuggugagcaacggcagcuaccugaacgagacccacuucagcgacgacaucgagcagcaggccgacaacaugaucaccgagcugcugcagaaggaguacaucgacagacagggcaagaccccccugggccugguggaccuguucguguucagcaccagcuucuaccugaucagcaucuuccugcaccuggugaagauccccacccacagacacaucaucggcaagcccugccccaagccccacagacugaaccacaugggcaucugcagcugcggccuguacaagcaccccggcgugcccgugaaguggaagagaugaggacuaguuauaagacugacuagcccgaugggccucccaacgggcccuccuccccuccuugcaccgagauuaaucaaaggcucuuuucagagccaccaaaaaaaaaaaaaaaaaaaaaaaaaaaaaaaaaaaaaaaaaaaaaaaaaaaaaaaaaaaaaaaaaaaaaaaaaaaaaaaaaaaaaaaaaaaaaaaaaaaaa

SEQ ID NO: 31257 - RNA, 1686 nt, Artificial Sequence
  mRNA product Design i-3 (hSL-A100) comprising derived and/or modified sequence from LASV(LASV254-NIG-2011;Clade II)__AIT17674__GPCmut6 (opt4)
aggagaaagcuuaccaugggccagaucaucaccuucuuccaggaggugccccacgugaucgaggaggugaugaacaucgugcugaucgcccugagccugcuggccauccugaagggcaucuacaacguggccaccugcggccuguucggccuggugagcuuccugcugcugugcggcagaagcugcagcaccaccuacaagggcguguacgagcugcagacccuggagcuggacaugaccaaccugaacaugugcaugccccugagcugcaccaagaacaacagccaccacuacaucauggugggcaacgagaccggccuggagcugacccugaccaacaccagcaucaucaaccacaaguucugcaaccugagcgacgcccacaagaagaaccuguacaaccacgcccugaugagcaucaucagcaccuuccaccugagcauccccaacuucaaccaguacgaggccaugagcugcgacuucaacggcggcaagaucagcgugcaguacaaccugagccacagcuacgccguggacgccgccaaccacugcggcaccaucgccaacggcgugcugcagaccuucaugagaauggccuggggcggcagcuacaucgcccuggacagcggcaagggcaacugggacugcaucaugaccagcuaccaguaccugaucauccagaacaccaccugggaggaccacugccaguucagcagacccagccccaucggcuaccugggccugcugagccagagaaccagagacaucuacaucagcagaagacugcugggcaccuucaccuggacccugagcgacagcgagggcaacgagacccccggcggcuacugccugaccagauggaugcugaucgaggccgagcugaagugcuucggcaacaccgccguggccaagugcaacgagaagcacgacgaggaguucugcgacaugcugagacuguucgacuucugcaagcaggccaucagaagacugaagacccccgcccaggccaacauccagcugaucaacaaggccgugaacgcccugaucaacgaccagcugaucaugaagaaccaccugagagacaucaugggcauccccuacugcaacuacagcaaguacugguaccugaaccacaccgugaccggcaagaccagccugcccagaugcuggcuggugagcaacggcagcuaccugaacgagacccacuucagcgacgacaucgagcagcaggccgacaacaugaucaccgagcugcugcagaaggaguacauggacagacagggcaagaccccccugggccugguggaccuguucguguucagcaccagcuucuaccugaucagcaucuuccugcaccuggugaagauccccacccacagacacgugaucggcaagcccugccccaagccccacagacugaaccacaugggcaucugcagcugcggccuguacaagcaccccggcgugcccgugaaguggaagagaugaggacuaguuauaagacugacuagcccgaugggccucccaacgggcccuccuccccuccuugcaccgagauuaaucaaaggcucuuuucagagccaccaaaaaaaaaaaaaaaaaaaaaaaaaaaaaaaaaaaaaaaaaaaaaaaaaaaaaaaaaaaaaaaaaaaaaaaaaaaaaaaaaaaaaaaaaaaaaaaaaaaaa

SEQ ID NO: 31258 - RNA, 1686 nt, Artificial Sequence
  mRNA product Design i-3 (hSL-A100) comprising derived and/or modified sequence from LASV(Nig08-A19;Clade III)__ADU56618__GPCmut6 (opt4)
aggagaaagcuuaccaugggccagaucgugaccuucuuccaggaggugccccacgugaucgaggaggugaugaacaucgugcugaucgcccugagcauccuggccauccugaagggccuguacaacaucgccaccugcggccugaucggccuggugaccuuccugcugcugagcggcagaagcugcagcaugaccuacaagggcguguacgagcugcagacccuggagcugaacaugaacacccugaacaugugcaugccccugagcugcaccaagaacaacagccaccacuacaucauggugggcaacgagaccggccuggagcugacccugaccaacaccagccugcugcaccacaaguucugcaaccugagcgacgcccacaagaagaaccuguacgaccacacccugaugagcaucaucagcaccuuccaccugagcauccccaacuucaaccaguacgaggccaugagcugcgacuucaacggcggcaagaucaccgugcaguacaaccugagccacagcuacgccaucgacgccgccaaccacugcggcaccguggccaacggcgugcugcagaccuucaugagaauggccuggggcggcagcuacaucgcccuggacagcggcagaggcaagugggacugcaucaugaccagcuaccaguaccugaucauccagaacaccaccugggaggaccacugccaguucagcagacccagccccaucggcuaccugggccugcugagccagagaaccagagacaucuacaucagcagaagacugcugggcaccuucaccuggacccugagcgacagcgagggcaacgagacccccggcggcuacugccugaccagauggaugcugaucgaggccgagcugaagugcuucggcaacaccgccguggccaagugcaacgagaagcacgacgaggaguucugcgacaugcugagacuguucgacuucugcaagcaggccaucagaagacugaaggcccccgcccagaugagcauccagcugaucaacaaggccgugaacgcccugaucaacgaccagcugaucaugaagaaccaccugagagacaucaugggcauccccuacugcaacuacagcaaguacugguaccugaaccacaccagcaccggcagaaccagccugcccagaugcuggcuggugagcaacggcagcuaccugaacgagacccacuucagcgacgacaucgagcagcaggccgacaacaugaucaccgagaugcugcagaaggaguaccuggacagacagggcaagaccccccugggccugguggaccuguucguguucagcaccagcuucuaccugaucagcaucuuccugcaccuggugaagauccccacccacagacacaucgugggcaagcccugccccaagccccacagacugaaccacaugggcaucugcagcugcggccuguacaagcagcccggcgugcccgugagauggaagagaugaggacuaguuauaagacugacuagcccgaugggccucccaacgggcccuccuccccuccuugcaccgagauuaaucaaaggcucuuuucagagccaccaaaaaaaaaaaaaaaaaaaaaaaaaaaaaaaaaaaaaaaaaaaaaaaaaaaaaaaaaaaaaaaaaaaaaaaaaaaaaaaaaaaaaaaaaaaaaaaaaaaaa

SEQ ID NO: 31259 - RNA, 1689 nt, Artificial Sequence
  mRNA product Design i-3 (hSL-A100) comprising derived and/or modified sequence from LASV(G1180-SLE-2010;Clade IV)__AIT17168__GPCmut6 (opt4)
aggagaaagcuuaccaugggccagaucgugaccuucuuccaggaggugccccacgugaucgaggaggugaugaacaucgugcugaucgcccugagcauccuggccgugcugaagggccuguacaacuucgccaccugcggccuggugggccugcugaccuuccugcugcugugcggcagaagcugcaccgccagcagauacaagggcguguacgagcugcagacccuggagcugaacauggagacccugaacaugugcaugccccugagcugcaccaagaacaacagccaccacuacaucauggugggcaacgagaccggccuggagcugacccugaccaacaccagcaucaucaaccacaaguucugcaaccugagcgacgcccacaagaagaaccuguacgaccacgcccugaugagcaucaucagcaccuuccaccugagcauccccaacuucaaccaguacgaggccaugagcugcgacuucaacggcggcaagaucagcgugcaguacaaccugagccacagcuacgccggcgacgccgccaaccacugcggcaccguggccaacggcgugcugcagaccuucaugagaauggccuggggcggcagcuacaucgcccuggacagcggccacggcagcugggacugcaucaugaccagcuaccaguaccugaucauccagaacaccaccugggaggaccacugccaguucagcagacccagccccaucggcuaccugggccugcugagccagagaaccagagacaucuacaucagcagaagacugcugggcaccuucaccuggacccugagcgacagcgagggcaaggacacccccggcggcuacugccugaccagauggaugcugaucgaggccgagcugaagugcuucggcaacaccgccguggccaagugcaacgagaagcacgacgaggaguucugcgacaugcugagacuguucgacuucugcaagcaggccauccagagacugaaggcccccgcccagaugagcauccagcugaucaacaaggccgugaacgcccugaucaacgaccagcugaucaugaagaaccaccugagagacaucaugggcauccccuacugcaacuacagcaaguacugguaccugaaccacaccaccaccggcaagaccagccugcccaagugcuggcuggugagcaacggcagcuaccugaacgagacccacuucagcgacgacaucgagcagcaggccgacaacaugaucaccgagaugcugcagaaggaguacauggagagacagggcaagaccccccugggccugguggaccuguucguguucagcaccagcuucuaccugaucagcaucuuccugcaccuggugaagauccccacccacagacacaucgugggcaagagcugccccaagccccacagacugaaccacaugggcaucugcagcugcggccuguacaagcagcccggcgugcccgugaaguggaagagaugaggacuaguuauaagacugacuagcccgaugggccucccaacgggcccuccuccccuccuugcaccgagauuaaucaaaggcucuuuucagagccaccaaaaaaaaaaaaaaaaaaaaaaaaaaaaaaaaaaaaaaaaaaaaaaaaaaaaaaaaaaaaaaaaaaaaaaaaaaaaaaaaaaaaaaaaaaaaaaaaaaaaa

SEQ ID NO: 31260 - RNA, 1689 nt, Artificial Sequence
  mRNA product Design i-3 (hSL-A100) comprising derived and/or modified sequence from LASV(G1442-SLE-2011;Clade IV)__AIT17180__GPCmut6 (opt4)
aggagaaagcuuaccaugggccagaucgugaccuucuuccaggaggugccccacgugaucgaggaggugaugaacaucgugcugaucgcccugagcauccuggccgugcugaagggccuguacaacguggccaccugcggccugaucggccuggugaccuuccugcugcugugcggcagaagcugcaccaccacccuguacaagggcguguacgagcugcagacccuggagcugaacauggagacccugaacaugugcaugccccugagcugcaccaagaacaacagccaccacuacaucagagugggcaacgagaccggccuggagcugacccugaccaacaccagcaucaucaaccacaaguucugcaaccugagcgacgcccacaagaagaaccuguacgaccacgcccugaugagcaucaucagcaccuuccaccugagcauccccaacuucaaccaguacgaggccaugagcugcgacuucaacggcggcaagaucagcgugcaguacaaccugagccacagcuacgccggcgacgccgccaaccacugcggcaccguggccaacggcgugcugcagaccuucaugagaauggccuggggcggcagcuacaucgcccuggacagcggcagaggcaacugggacugcaucaugaccagcuaccaguaccugaucauccagaacaccaccugggacgaccacugccaguucagcagacccagccccaucggcuaccugggccugcugagccagagaaccagagacguguacaucagcagaagacugcugggcaccuucaccuggacccugagcgacagcgagggcaaggacacccccggcggcuacugccugaccagauggaugcugaucgaggccgagcugaagugcuucggcaacaccgccguggccaagugcaacgagaagcacgacgaggaguucugcgacaugcugagacuguucgacuucugcaagcaggccauccagagacugaaggcccccgcccagaugagcauccagcugaucaacaaggccgugaacgcccugaucaacgaccagcugaucaugaagaaccaccugagagacaucaugggcauccccuacugcaacuacagcaaguacugguaccugaacaacaccgccaccggcaagaccagccugcccaagugcuggcugaucagcaacggcagcuaccugaacgagacccacuucagcgacgacaucgagcaggaggccgacaacaugaucaccgagaugcugcagaaggaguacauggagagacagggcaagaccccccugggccugguggaccuguucguguucagcaccagcuucuaccugaucagcaucuuccugcaccuggugaagauccccacccacagacacaucgugggcaagagcugccccaagccccacagacugaaccacaugggcaucugcagcugcggccuguacaagcagcccggcgugcccgugagauggaagagaugaggacuaguuauaagacugacuagcccgaugggccucccaacgggcccuccuccccuccuugcaccgagauuaaucaaaggcucuuuucagagccaccaaaaaaaaaaaaaaaaaaaaaaaaaaaaaaaaaaaaaaaaaaaaaaaaaaaaaaaaaaaaaaaaaaaaaaaaaaaaaaaaaaaaaaaaaaaaaaaaaaaaa

SEQ ID NO: 31261 - RNA, 1689 nt, Artificial Sequence
  mRNA product Design i-3 (hSL-A100) comprising derived and/or modified sequence from LASV(G3010-SLE-2013;Clade IV)__AIT17344__GPCmut6 (opt4)
aggagaaagcuuaccaugggccagaucgugaccuucuuccaggaggugccccacgugaucgaggaggugaugaacaucgugcugaucgcccugagcauccuggccgugcugaagggccuguacaacuucgccaccugcggccuggugggccuggugaccuuccugcugcugugcggcagaagcugcaccaccagccuguacaagggcguguacgagcugcagacccuggagcugaacauggagacccugaacaugugcaugccccugagcugcaccaagaacaacagccaccacuacaucauggugggcaacgagaccggccuggagcugacccugaccaacaccagcaucaucaaccacaaguucugcaaccugagcgacgcccacaagaagaaccuguacaaccacgcccugaugagcaucaucagcaccuuccaccugagcauccccaacuucaaccaguacgaggccaugagcugcgacuucaacggcggcaagaucagcgugcaguacaaccugagccacagcuacgccggcgacgccgccagccacugcggcaccguggccaacggcgugcugcagaccuucaugagaauggccuggggcggcagcuacaucgcccuggacagcggcuacggcaagugggacugcaucaugaccagcuaccaguaccugaucauccagaacaccaccugggaggaccacugccaguucagcagacccagccccaucggcuaccugggccugcugagccagagaaccagagacaucuacaucagcagaagacugcugggcaccuucaccuggacccugagcgacagcgagggcaaggacacccccggcggcuacugccugaccagauggaugcugaucgaggccgagcugaagugcuucggcaacaccgccguggccaagugcaacgagaagcacgacgaggaguucugcgacaugcugagacuguucgacuucugcaagcaggccauccagagacugaagacccccgcccagaugagcauccagcugaucaacaaggccgugaacgcccugaucaacgaccagcugaucaugaagaaccaccugagagacaucaugggcauccccuacugcaacuacagcaaguacugguaccugaaccacaccaccaccggcaagaccagccugcccaagugcuggcuggugagcaacggcagcuaccugaacgagacccacuucagcgacgacaucgagcagcaggccgacaacaugaucaccgagaugcugcagaaggaguacauggagagacagggcaagaccccccugggccugguggaccuguucguguucagcaccagcuucuaccugaucagcaucuuccugcaccuggugaagauccccacccacagacacaucgugggcaagagcugccccaagccccacagacugaaccacaugggcaucugcagcugcggccuguacaagcagcccggcgugcccgugagauggaagagaugaggacuaguuauaagacugacuagcccgaugggccucccaacgggcccuccuccccuccuugcaccgagauuaaucaaaggcucuuuucagagccaccaaaaaaaaaaaaaaaaaaaaaaaaaaaaaaaaaaaaaaaaaaaaaaaaaaaaaaaaaaaaaaaaaaaaaaaaaaaaaaaaaaaaaaaaaaaaaaaaaaaaa

SEQ ID NO: 31262 - RNA, 1689 nt, Artificial Sequence
  mRNA product Design i-3 (hSL-A100) comprising derived and/or modified sequence from LASV(G502-SLE-2009;Clade IV)__AIT17126__GPCmut6 (opt4)
aggagaaagcuuaccaugggccagaucgugaccuucuuccaggaggugccccacgugaucgaggaggugaugaacaucgugcugaucgcccugagcauccuggccgugcugaagggccuguacaacuucgccaccugcggccuggugggccugcugaccuuccugcugcugugcggcagaagcugcaccaccggccuguacaagggcguguacgagcugcagacccuggagcugaacauggagacccugaacaugugcaugccccugagcugcaccaagaacaacagccaccacuacaucauggugggcaacgagaccggccuggagcugacccugaccaacaccagcaucaucaaccacaaguucugcaaccugagcgacgcccacaagaagaaccuguacgaccacgcccugaugagcaucaucagcaccuuccaccugagcauccccaacuucaaccaguacgaggccaugagcugcgacuucaacggcggcaagaucagcgugcaguacaaccugagccacagcuacgccggcgacgccgccgaccacugcggcaccguggccaacggcgugcugcagaccuucaugagaauggccuggggcggcagcuacaucgcccuggacagcggcagaggcagaugggacugcaucaugaccagcuaccaguaccugaucauccagaacaccaccugggaggaccacugccaguucagcagacccagccccaucggcuaccugggccugcugagccagagaaccagagacaucuacaucagcagaagacugcugggcaccuucaccuggacccugagcgacagcgagggcaaggacacccccggcggcuacugccugaccagauggaugcugaucgaggccgagcugaagugcuucggcaacaccgccguggccaagugcaacgagaagcacgacgaggaguucugcgacaugcugagacuguucgacuucugcaagcaggccauccagagacugaaggcccccgcccagaugagcauccagcugaucaacaaggccgugaacgcccugaucaacgaccagcuggugaugaagaaccaccugagagacaucaugggcauccccuacugcaacuacagcagauacugguaccugaaccacaccaccaccggcagaaccagccugcccaagugcuggcuggugagcaacggcagcuaccugaacgagacccacuucagcgacgacaucgagcagcaggccgacaacaugaucaccgagaugcugcagaaggaguacauggagagacagggcaagaccccccugggccugguggaccuguucguguucagcaccagcuucuaccugaucagcaucuuccugcaccuggugaagauccccacccacagacacaucgugggcaagagcugccccaagccccacagacugaaccacaugggcaucugcagcugcggccuguacaagcagcccggcgugcccgugaaguggaagagaugaggacuaguuauaagacugacuagcccgaugggccucccaacgggcccuccuccccuccuugcaccgagauuaaucaaaggcucuuuucagagccaccaaaaaaaaaaaaaaaaaaaaaaaaaaaaaaaaaaaaaaaaaaaaaaaaaaaaaaaaaaaaaaaaaaaaaaaaaaaaaaaaaaaaaaaaaaaaaaaaaaaaa

SEQ ID NO: 31263 - RNA, 1689 nt, Artificial Sequence
  mRNA product Design i-3 (hSL-A100) comprising derived and/or modified sequence from LASV(G733-SLE-2010;Clade IV)__AIT17154__GPCmut6 (opt4)
aggagaaagcuuaccaugggccagaucgugaccuucuuccaggaggugccccacgugaucgaggaggugaugaacaucgugcugaucgcccugagcauccuggccgugcugaagggccuguacaacuucgccaccugcggcaucgugggccuggugagcuuccugcugcugugcggcagaagcugcaccaccagccuguacaagggcguguacgagcugcagacccuggagcugaacauggagacccugaacaugugcaugccccugagcugcaccaagaacaacagccaccacuacaucauggugggcaacgagaccggccuggagcugacccugaccaacaccagcaucaucaaccacaaguucugcaaccugagcgacgcccacaagaagaaccuguacgaccacgcccugaugagcaucaucagcaccuuccaccugagcauccccaacuucaaccaguacgaggccaugagcugcgacuucaacggcggcaagaucagcgugcaguacaaccugagccacagcuacgccggcgacgccgccaaccacugcggcaccaucgccaacggcgugcugcagaccuucaugagaauggccuggggcggcagcuacaucgcccuggacagcggcagagacagaugggacugcaucaugaccagcuaccaguaccugaucauccagaacaccaccugggaggaccacugccaguucagcagacccagccccaucggcuaccugggccugcugagccagagaaccagagacaucuacaucagcagaagacugcugggcaccuucaccuggacccugagcgacagcgagggcaaggacacccccggcggcuacugccugaccagauggaugcugaucgaggccgagcugaagugcuucggcaacaccgccguggccaagugcaacgagaagcacgacgaggaguucugcgacaugcugagacuguucgacuucugcaagcaggccauccagagacugaaggcccccgcccagaugagcauccagcugaucaacaaggccgugaacgcccugaucaacgaccagcugaucaugaagaaccaccugagagacaucaugggcauccccuacugcaacuacagcaaguacugguaccugaaccacaccaccaccggcaagaccagccugcccaagugcuggcuggugagcaacggcagcuaccugaacgagacccacuucagcgacgacaucgagcagcaggccgacaacaugaucaccgagaugcugcagaaggaguacauggagagacagggcaagaccccccugggccugguggaccuguucguguucagcaccagcuucuaccugaucagcaucuuccugcaccuggugaagauccccacccacagacacguggugggcaagagcugccccaagccccacagacugaaccacaugggcaucugcagcugcggccuguacggccagcccggcgugcccgugaaguggaagagaugaggacuaguuauaagacugacuagcccgaugggccucccaacgggcccuccuccccuccuugcaccgagauuaaucaaaggcucuuuucagagccaccaaaaaaaaaaaaaaaaaaaaaaaaaaaaaaaaaaaaaaaaaaaaaaaaaaaaaaaaaaaaaaaaaaaaaaaaaaaaaaaaaaaaaaaaaaaaaaaaaaaaa

SEQ ID NO: 31264 - RNA, 1689 nt, Artificial Sequence
  mRNA product Design i-3 (hSL-A100) comprising derived and/or modified sequence from MOPV/LASV reassortant(IGS-1;Clade IV)__AFY05576__GPCmut6 (opt4)
aggagaaagcuuaccaugggccagaucgugaccuucuuccaggaggugccccacgugaucgaggaggugaugaacaucgugcugaucgcccugagcgugcuggccgugcugaagggccuguacaacuucgccaccugcggccuggugggccuggugaccuuccugcugcugugcggcagaagcugcaccaccagccuguacaagggcguguacgagcugcagacccuggagcugaacauggagacccugaacaugugcaugccccugagcugcaccaagaacaacagccaccacuacaucauggugggcaacgagaccggccuggagcugacccugaccaacaccagcaucaucaaccacaaguucugcaaccugagcgacgcccacaagaagaaccuguacgaccacgcccugaugagcaucaucagcaccuuccaccugagcauccccaacuucaaccaguacgaggccaugagcugcgacuucaacggcggcaagaucagcgugcaguacaaccugagccacagcuacgccggcgacgccgccaaccacugcggcaccguggccaacggcgugcugcagaccuucaugagaauggccuggggcggcagcuacaucgcccuggacagcggcagaggcaacugggacugcaucaugaccagcuaccaguaccugaucauccagaacaccaccugggaggaccacugccaguucagcagacccagccccaucggcuaccugggccugcugagccagagaaccagagacaucuacaucagcagaagacugcugggcaccuucaccuggacccugagcgacagcgagggcgaggacacccccggcggcuacugccugaccagauggaugcugaucgaggccgagcugaagugcuucggcaacaccgccguggccaagugcaacgagaagcacgacgaggaguucugcgacaugcugagacuguucgacuucugcaagcaggccauccagagacugaaggcccccgcccagaugagcauccagcugaucaacaaggccgugaacgcccugaucaacgaccagcugaucaugaagaaccaccugagagacaucaugggcauccccuacugcaacuacagcaaguacugguaccugaaccacaccaccaccggcagaaccagccugcccaagugcuggcuggugagcaacggcagcuaccugaacgagacccacuucagcgacgacaucgagcagcaggccgacaacaugaucaccgagaugcugcagaaggaguacauggagagacagggcaagaccccccugggccugguggaccuguucguguucagcaccagcuucuaccugaucagcaucuuccugcaccuggugaagauccccacccacagacacaucgugggcaagagcugccccaagccccacagacugaaccacaugggcaucugcagcugcggccuguacaagcagcccggcgugcccgugaaguggaagagaugaggacuaguuauaagacugacuagcccgaugggccucccaacgggcccuccuccccuccuugcaccgagauuaaucaaaggcucuuuucagagccaccaaaaaaaaaaaaaaaaaaaaaaaaaaaaaaaaaaaaaaaaaaaaaaaaaaaaaaaaaaaaaaaaaaaaaaaaaaaaaaaaaaaaaaaaaaaaaaaaaaaaa

SEQ ID NO: 31265 - RNA, 1689 nt, Artificial Sequence
  mRNA product Design i-3 (hSL-A100) comprising derived and/or modified sequence from LASV(LM765-SLE-2012;Clade IV)__AIT17814__GPCmut6 (opt4)
aggagaaagcuuaccaugggccagaucgugaccuucuuccaggaggugccccacgugaucgaggaggugaugaacaucgugcugaucgcccugagcauccuggccgugcugaagggccuguacaacuucgccaccugcggccuggugggccuggugaccuuccugcugcugugcggcagaagcugcaccaccagccuguacaagggcguguacgagcugcagacccuggagcugaacauggagacccugaacaugugcaugccccugagcugcaccaagaacaacagccaccacuacaucauggugggcaacgagaccggccuggagcugacccugaccaacaccagcaucaucgaccacaaguucugcaaccugagcgacgcccacagaaagaaccuguacgaccacgcccugaugagcaucaucagcaccuuccaccugagcauccccaacuucaaccaguacgaggccaugagcugcgacuucaacggcggcaagaucagcgugcaguacaaccugagccacagcuacgccaaggacgccgccgaccacugcggcaccguggccaacggcgugcugcagaccuucaugagaauggccuggggcggcagcuacaucgcccuggacagcggcagaggcagaugggacugcaucaugaccagcuaccaguaccugaucauccagaacaccaccugggaggaccacugccaguucagcagacccagccccaucggcuaccugggccugcugagccagagaaccagagacaucuacaucagcagaagacugcugggcaccuucaccuggacccugagcgacagcgagggcaaggacacccccggcggcuacugccugaccagauggaugcugaucgaggccgagcugaagugcuucggcaacaccgccguggccaagugcaacgagaagcacgacgaggaguucugcgacaugcugagacuguucgacuucugcaagcaggccauccagagacugaaggcccccgcccagaugagcauccagcugaucaacaaggccgugaacgcccugaucaacgaccagcugaucaugaagaaccaccugagagacaucaugggcauccccuacugcaacuacagcaaguacugguaccugaaccacaccaccaccggcaagaccagccugcccaagugcuggcuggugagcaacggcagcuaccugaacgagacccacuucagcgacgacaucgagcagcaggccgacaacaugaucaccgagaugcugcagaaggaguacauggagagacagggcaagaccccccugggccugguggaccuguucguguucagcaccagcuucuaccugaucagcaucuuccugcaccuggugaagauccccacccacagacacaucgugggcaagcccugccccaagccccacagacugaaccacaugggcaucugcagcugcggccuguacaagcagcccggcgugcccgugaaguggaagagaugaggacuaguuauaagacugacuagcccgaugggccucccaacgggcccuccuccccuccuugcaccgagauuaaucaaaggcucuuuucagagccaccaaaaaaaaaaaaaaaaaaaaaaaaaaaaaaaaaaaaaaaaaaaaaaaaaaaaaaaaaaaaaaaaaaaaaaaaaaaaaaaaaaaaaaaaaaaaaaaaaaaaa

SEQ ID NO: 31266 - RNA, 1689 nt, Artificial Sequence
  mRNA product Design i-3 (hSL-A100) comprising derived and/or modified sequence from LASV(LM776-SLE-2012;Clade IV)__AIT17824__GPCmut6 (opt4)
aggagaaagcuuaccaugggccagaucgugaccuucuuccaggaggugccccacgugaucgaggaggugaugaacaucgugcugaucgcccugagcauccuggccgugcugaagggccuguacaacuucgccaccugcggccuggugggccuggugaccuuccugcugcugugcggcagaagcugcaccaccagcguguacaagggcguguacgagcugcagacccuggagcugaacauggagacccugaacaugugcaugccccugagcugcaccaagaacaacagccaccacuacaucauggugggcaacgagaccggccuggagcugacccugaccaacaccagcaucaucaaccacaaguucugcaaccugagcgacgcccacaagaagaaccuguacgaccacgcccugaugagcaucaucagcaccuuccaccugagcauccccaacuucaaccaguacgaggccaugagcugcgacuucaacggcggcaagaucagcgugcaguacaaccugagccacagcuacgccggcgacgccgccaaccacugcggcaccguggccaacggcgugcugcagaccuucaugagaauggccuggggcggcagcuacaucgcccuggacagcggccacggcaagugggacugcaucaugaccagcuaccaguaccugaucauccagaacaccaccugggaggaccacugccaguucagcagacccagccccaucggcuaccugggccugcugagccagagaaccagagacaucuacaucagcagaagacugcugggcaccuucaccuggacccugagcgacagcgagggcaaggacacccccggcggcuacugccugaccagauggaugcugaucgaggccgagcugaagugcuucggcaacaccgccguggccaagugcaacgagaagcacgacgaggaguucugcgacaugcugagacuguucgacuucugcaagcaggccauccagagacugaaggcccccgcccagaugagcauccagcugaucaacaaggccgugaacgcccugaucaacgaccagcugaucaugaagaaccaccugagagacaucaugggcauccccuacugcaacuacagcaaguacugguaccugaaccacaccaccaccggcaagaccagccugcccaagugcuggcuggugagcaacggcagcuaccugaacgagacccacuucagcgacgacaucgagcagcaggccgacaacaugaucaccgagaugcugcagaaggaguacauggagagacagggcaagaccccccugggccugguggaccuguucguguucagcaccagcuucuaccugaucagcaucuuccugcaccuggugaagauccccacccacagacacaucgugggcaagagcugccccaagccccacagacugaaccacaugggcaucugcagcugcggccuguacaagcagcccggcgugcccgugagauggaagagaugaggacuaguuauaagacugacuagcccgaugggccucccaacgggcccuccuccccuccuugcaccgagauuaaucaaaggcucuuuucagagccaccaaaaaaaaaaaaaaaaaaaaaaaaaaaaaaaaaaaaaaaaaaaaaaaaaaaaaaaaaaaaaaaaaaaaaaaaaaaaaaaaaaaaaaaaaaaaaaaaaaaaa

SEQ ID NO: 31267 - RNA, 1689 nt, Artificial Sequence
  mRNA product Design i-3 (hSL-A100) comprising derived and/or modified sequence from LASV(Mad39;Clade IV)__ANH09722__GPCmut6 (opt4)
aggagaaagcuuaccaugggccagaucgugaccuucuuccaggaggugccccacgugaucgaggaggugaugaacaucgugcugaucgcccugagcauccuggccgugcugaagggccuguacaacguggccaccugcggccugaucggccuggugaccuuccugcugcugugcggcagaagcugcaccaccacccuguacaagggcguguacgagcugcaggcccuggagcugaacauggagacccugaacaugugcaugccccugagcugcaccaagaacaacagccaccacuacaucagagugggcaacgagaccggccuggagcugacccugaccaacaccagccugaucaaccacaaguucugcaaccugagcgacgcccacaagaagaaccuguacgaccacgcccugaugagcaucaucagcaccuuccaccugagcauccccaacuucaaccaguacgaggccaugagcugcgacuucaacgacggcaagaucagcgugcaguacaaccugagccacaccuacgccggcgacaccgccaaccacugcggcaccguggccaacggcgugcugcagaccuucaugagaauggccuggggcggcagcuacaucgcccuggacagcggcagaggcggcugggacugcaucaugaccagcuaccaguaccugaucauccagaacaccaccugggaggaccacugccaguucagcagacccagccccaucggcuaccugggccugcugagccagagaaccagagacaucuacaucagcagaagacugcugggcaccuucaccuggacccugagcgacagcgagggcaaggacacccccggcggcuacugccugaccagauggaugcugaucgaggccgagcugaagugcuucggcaacaccgccguggccaagugcaacgagaagcacgacgaggaguucugcgacaugcugagacuguucgacuucugcaagcaggccauccagagacugaaggcccccgcccagaugagcauccagcugaucaacaaggccgugaacgcccugaucaacgaccagcugaucaugaagaaccaccugagagacaucaugggcauccccuacugcaacuacagcaaguacugguaccugaaccacaccgugaccggcaagaccagccugcccaagugcuggcuggugagcaacggcagcuaccugaacgagacccacuucagcgacgacaucgagcagcaggccgacaacaugaucaccgagaugcugcagaaggaguacauggagagacagggcaagaccccccugggccugguggaccuguucguguucagcaccagcuucuaccugaucagcaucuuccugcaccuggugaagauccccacccacagacacguggugggcaagcccugccccaagccccacagacugaaccacaugggcaucugcagcugcggcuucuacaagcagcccggcgugcccgugagauggaagagaugaggacuaguuauaagacugacuagcccgaugggccucccaacgggcccuccuccccuccuugcaccgagauuaaucaaaggcucuuuucagagccaccaaaaaaaaaaaaaaaaaaaaaaaaaaaaaaaaaaaaaaaaaaaaaaaaaaaaaaaaaaaaaaaaaaaaaaaaaaaaaaaaaaaaaaaaaaaaaaaaaaaaa

SEQ ID NO: 31268 - RNA, 1689 nt, Artificial Sequence
  mRNA product Design i-3 (hSL-A100) comprising derived and/or modified sequence from LASV(Z0947-SLE-2011;Clade IV)__AIT17840__GPCmut6 (opt4)
aggagaaagcuuaccaugggccagaucgugaccuucuuccaggaggugccccacgugaucgaggaggugaugaacaucgugcugaucgcccugagcauccuggccgugcugaagggccuguacaacuucgccaccugcggccuggugggccuggugaccuuccugcugcugugcggcagaagcugcaccaucagccuguacaagggcguguacgagcugcagacccuggagcugaacauggagacccugaacaugugcaugccccugagcugcaccaagaacaacagccaccacuacaucauggugggcaacgagaccggccuggagcugacccugaccaacaccagcaucaucaaccacaaguucugcaaccugagcgacgcccacaagaagaaccuguacgaccacgcccugaugagcaucaucagcaccuuccaccugagcauccccaacuucaaccaguacgaggccaugagcugcgacuucaacggcggcaagaucagcgugcaguacaaccugagccacagcuacgccggcgacgccgccaaccacugcggcaccguggccaacggcgugcugcagaccuucaugagaauggccuggggcggcagcuacaucgcccuggacagcggcagagacagaugggacugcaucaugaccagcuaccaguaccugaucauccagaacaccaccugggaggaccacugccaguucagcagacccagccccaucggcuaccugggccugcugagccagagaaccagagacaucuacaucagcagaagacugcugggcaccuucaccuggacccugagcgacagcgagggcaaggacacccccggcggcuacugccugaccagauggaugcugaucgaggccgagcugaagugcuucggcaacaccgccguggccaagugcaacgagaagcacgacgaggaguucugcgacaugcugagacuguucgacuucugcaagcaggccauccagagacugaaggcccccgcccagaugagcauccagcugaucaacaaggccgugaacgcccugaucaacgaccagcugaucaugaagaaccaccugagagacaucaugggcauccccuacugcaacuacagcaaguacugguaccugaaccacaccaccaccggcaagaccagccugcccaagugcuggcuggugagcaacggcagcuaccugaacgagacccacuucagcgacgacaucgagcagcaggccgacaacaugaucaccgagaugcugcagaaggaguacauggagagacagggcaagaccccccugggccugguggaccuguucguguucagcaccagcuucuaccugaucagcaucuuccugcaccuggugaagauccccacccacagacacaucgugggcaagcccugccccaagccccacagacugaaccacaugggcaucugcagcugcggccuguacaagcagcccggcgugcccgugaaguggaagagaugaggacuaguuauaagacugacuagcccgaugggccucccaacgggcccuccuccccuccuugcaccgagauuaaucaaaggcucuuuucagagccaccaaaaaaaaaaaaaaaaaaaaaaaaaaaaaaaaaaaaaaaaaaaaaaaaaaaaaaaaaaaaaaaaaaaaaaaaaaaaaaaaaaaaaaaaaaaaaaaaaaaaa

SEQ ID NO: 31269 - RNA, 1689 nt, Artificial Sequence
  mRNA product Design i-3 (hSL-A100) comprising derived and/or modified sequence from LASV(Josiah;Clade IV)__NP_694870__GPCmut6 (opt5)
aggagaaagcuuaccaugggccagaucgugaccuucuuucaagaggucccccacguuauugaagaggugaugaacaucgugcugauugcccucagcguccuggcugugcuuaaggggcuguacaauuucgccacaugcggacucguuggccuggugacguuucuucugcucugugggagauccugcaccacaucucuguauaaaggagucuacgaacugcagacccucgagcugaacauggaaacacuuaauauguguaugccucugagcugcaccaagaacaauucccaucacuauaucauggugggcaacgagacagggcucgagcugacccuuacgaauaccucuauuaucaaccauaaauucuguaaucugagcgacgcgcacaagaaaaaccucuacgaucaugcucugauguccaucauuucuacauuucaccugagcaucccgaauuucaaccaguaugaagccauguccugcgacuuuaauggaggcaagauuagcguucaguacaaccucucucacuccuaugccggcgaugcugccaaucauugugggaccguggcuaacggaguccugcaaacauucaugcggauggccuggggcgggagcuacaucgcgcuugacucuggacgcggcaacugggauugcauuaugaccuccuaccaguaucugaucauucagaauacgacaugggaggaccacugucaguuuagcagacccucuccuaucggguaccucggacugcuuucccaacggacccgcgauaucuauauuagcagacggcugcucggcacauucaccuggacccuguccgacucugaaggcaaggauacacccgggggauacugccugacgcgcuggaugcucaucgaggccgagcugaaauguuuuggcaacaccgcuguggccaagugcaaugaaaaacaugacgaggaguucugcgauaugcuuagacuguuugacuucuguaagcaggcuauucagcggcucaaagccccugcgcagaugagcauccaacugauuaacaaggccgugaaugcucuuaucaacgaucagcugaucaugaagaaucaccuccgcgacauuauggggauccccuauugcaacuacuccaaauauugguaccugaaucacacaaccacaggaagaaccagccugccuaaguguuggcucgucucuaacggcuccuaccugaaugaaacgcauuucagcgacgauauugaacagcaagccgacaacaugaucacagagaugcuucagaaagaguauauggaacggcaggggaagaccccgcugggacucguugaucuguuuguguucucuaccagcuuuuaccugauuuccaucuuccuucaccucgugaaaauccccacacaucgccacauugucggcaagucuugcccuaaaccccauagacugaaucacaugggcaucuguagcugcgggcuguauaagcagccuggagugcccguuaaguggaaacggugaggacuaguuauaagacugacuagcccgaugggccucccaacgggcccuccuccccuccuugcaccgagauuaaucaaaggcucuuuucagagccaccaaaaaaaaaaaaaaaaaaaaaaaaaaaaaaaaaaaaaaaaaaaaaaaaaaaaaaaaaaaaaaaaaaaaaaaaaaaaaaaaaaaaaaaaaaaaaaaaaaaaa

SEQ ID NO: 31270 - RNA, 1686 nt, Artificial Sequence
  mRNA product Design i-3 (hSL-A100) comprising derived and/or modified sequence from LASV(LP;Clade I)__AAF86701__GPCmut6 (opt5)
aggagaaagcuuaccaugggccagaucauuaccuucuuucaagaggugccccacgucaucgaagagguuaugaacauugugcugaucgcccucagccugcuugcuauucugaaggggcucuacaauaucgccacaugcggaaucauuggccugguggcguuccuuuuucugugugggaaauccugcucucucacgcugaagggaggcuaugaacugcagacccucgagcugaacauggaaacacuuaauauguguaugccucugagcugcaccaaaaacuccucucaucacuacaucagagucgggaaugagacaggacucgagcugacccuuacaaacaccagcauuaucaaucauaaguucuguaaccuguccgacgcucacaaaaagaaucucuaugaucaugcccugaugucuauuaucagcacguuucaccuguccauuccgaacuucaaucaguacgaagccaugagcugcgacuuuaacggcggcaagaucucugugcaguauaaucucucccacagcuacgcuggggaugccgcugagcauuguggaaccguugccaacggcgugcugcaaacauucaugcggauggcguggggagggcgcuauaucgcccuugacucuggcaaagggaauugggauugcauuaugaccuccuaccaguaccugaucauucagaacacaaccugggaagaccacugucaguuuagcagacccucuccuaucggauaucucggccugcuuucccaacggacgcgcgauauuuacaucagcagacggcugcucggcacauucaccuggacacuguccgacucugaggggaacgagacccccggaggcuauugccugacccgcuggaugcucaucgaagcugagcugaaguguuuugggaauacagccgucgcuaaaugcaacgaaaagcaugaugaggaguucugcgacaugcuuagacuguuugauuucuguaaacaggccauucggcgccucaaggcgccugcccagaugagcauccagcugauuaauaaggcugugaacgcccuuaucaaugaccaacugauuaugaaaaaccaccucagagauaucaugggaauccccuacugcaauuauuccaaguacugguaucugaaccacacgagcucuggccggaccucccugccuaaauguuggcucauuagcaaugggucuuaccugaacgaaacacaguucagcgacgacaucgagcagcaagcugauaauaugauuaccgaaaugcuucagaaggaguacaucgaacgccagggaaaaacaccgcugggccucguugacauuuuuaucuucuccaccucuuuuuaucugauuagcaucuuccugcaucuuaucaagauucccacgcacagacauaucgugggcaaaccuugccccaagccucaccggcucaaccauaugggggucuguuccugcggacuguacaagcaccccggcgugccgacaaaauggaagcgcugaggacuaguuauaagacugacuagcccgaugggccucccaacgggcccuccuccccuccuugcaccgagauuaaucaaaggcucuuuucagagccaccaaaaaaaaaaaaaaaaaaaaaaaaaaaaaaaaaaaaaaaaaaaaaaaaaaaaaaaaaaaaaaaaaaaaaaaaaaaaaaaaaaaaaaaaaaaaaaaaaaaaa

SEQ ID NO: 31271 - RNA, 1686 nt, Artificial Sequence
  mRNA product Design i-3 (hSL-A100) comprising derived and/or modified sequence from LASV(803213;Clade II)__AAF86703__GPCmut6 (opt5)
aggagaaagcuuaccaugggccagaucauuaccuucuuucaagaggugccccacgucaucgaagagguuaugaacauugugcugaucgcccucagccugcuugcuauucugaaggggaucuacaauguggccacaugcggacucuucggccugaucuccuuucuucugcucugugggagaucuugcagcgucacguauaaaggaguguacgaacugcagacccuggagcucaacauggcgaaucugaacauguguaugccucuuuccugcacaaagaauaacucucaucacuauauuaugguuggcaaugaaaccgggcuggagcucacacugaccaacacaagcaucauuaaucauaaauucuguaaccuuuccgacgcucacaagaaaaaucuguacgaucaugcccucaugucuaucauuagcaccuuucaccuguccaucccgaacuucaaucaguaugaggccaugagcugcgacuuuaacggaggcaagauuucugugcaguacaaucugucccacagcuucgcugucgaugccgcuaaccauuguggcacgaucgccaacggggugcuccaaaccuuuaugcggauggcguggggaggcucuuauaucgcccuggacuccgggaagggaaauugggauugcauuaugacaagcuaccaguaccuuaucauucagaacaccacaugggaagaccacugucaguucucucgccccuccccuaucggcuaucuggggcuccugagccaaagaacccgggauauuuacaucucccgcagacuucugggaacguuuacauggacccucucugacagcgagggcaaugaagcucccggcggguauugccugacacgguggaugcugaucgaggccgagcucaaauguuucggaaacaccgcuguugccaagugcaaugaaaaacaugaugaggaauuuugcgacaugcugcgccuuuucgauuucuguaagcaggcgauuaaaagacugaagaccccugcccagauguccauccagcucauuaacaaggcugugaaugcccugaucaacgaccaacuuauuaugaaaaaucaucugcgggauaucaugggcauccccuacugcaacuauagccgcuacugguaucucaaucacacagucacggggaagaccucucugccuagauguuggcugguguccaacggaagcuaccucaaugagacacacuuuucugacgacauugaacagcaggcugauaacaugaucaccgagaugcugcaaaaagaguacauggaccggcagggcaagacaccgcuugggcugguggaucucuucgucuuuagcaccuccuucuaucugauuucuaucuuucugcaccuuguuaaaauucccacgcaucgccacaucgugggaaagccuugccccaaaccucauagacucaaucacaugggcauuuguagcugcggccuguacaagcaccccggggugccggucaaguggaaacggugaggacuaguuauaagacugacuagcccgaugggccucccaacgggcccuccuccccuccuugcaccgagauuaaucaaaggcucuuuucagagccaccaaaaaaaaaaaaaaaaaaaaaaaaaaaaaaaaaaaaaaaaaaaaaaaaaaaaaaaaaaaaaaaaaaaaaaaaaaaaaaaaaaaaaaaaaaaaaaaaaaaaa

SEQ ID NO: 31272 - RNA, 1686 nt, Artificial Sequence
  mRNA product Design i-3 (hSL-A100) comprising derived and/or modified sequence from LASV(GA391;Clade III)__CAA36645__GPCmut6 (opt5)
aggagaaagcuuaccaugggccagaucgugaccuucuuucaagaggucccccacguuauugaagaggugaugaacaucgugcugauugcccucagcauccuggcuauucuuaaggggcuguacaaugucgccacaugcggacucaucggccuggugacguuccuucugcucuccgggagaucuuguagccugaucuauaaaggaaccuacgaacugcagacacucgagcugaacauggaaacccuuaauaugugcaugccucuguccuguacaaagaacaauucucaucacuauauucggguuggcaacgagaccgggcucgagcugacacuuaccaauacgagcauccugaaccauaaauuuugcaaucucuccgacgcgcacaagcgcaaccuguacgaucauucucugaugagcauuaucuccaccuuccaccucagcauuccgaauuuuaaccaguaugaagcuaugucuugugacuucaauggaggcaaaaucacagugcaguacaaccugucccacagcuuugccgucgaugccgcuggccauugcgggacccuugccaauggagugcugcaaacauucaugagaauggcuuggggcgggucuuauauugcccucgacuccggacggggcaacugggauuguaucaugaccagcuaccaguaccugaucauucagaacacgacaugggacgaucacugccaguuuucucgccccuccccuaucggguaucuuggacugcucagccaaagaacccgggacauuuacaucucccgcagacugcugggcacauucaccuggacccucucugauagcgagggcaaugaaacacccgggggauauugucugacgcgguggaugcuuauugaggcggagcugaagugcuuuggcaacaccgccguugcuaaguguaaugaaaaacaugacgaggaguucugcgauaugcuccgccuguuugacuucugcaagcaggccaucagacggcuuaaaaccccugcucagauguccauccagcugauuaacaaggccgugaaugcgcucaucaacgaucaacugauuaugaaaaaucaucugcgcgacaucauggggauucccuacuguaacuauagcagauacugguaucucaaucacacaucuacaggaaagaccucccugccucggugcuggcuuaucagcaacggcucuuaccugaaugaaacgaaguucagcgacgauaucgaacagcaggccgacaacaugauuacagagaugcuccaaaaagaguacaucgaucgccaggggaagaccccgcugggacuggucgaccuuuuuguguucuccaccucuuuuuaucucauuagcaucuuccugcaccuggugaaaauucccacacacagacauaucgucggcaagccuugucccaaaccucaccggcucaaucauaugggcauuugcuccugugggcuguacaagcagcccggaguuccggugagauggaaacgcugaggacuaguuauaagacugacuagcccgaugggccucccaacgggcccuccuccccuccuugcaccgagauuaaucaaaggcucuuuucagagccaccaaaaaaaaaaaaaaaaaaaaaaaaaaaaaaaaaaaaaaaaaaaaaaaaaaaaaaaaaaaaaaaaaaaaaaaaaaaaaaaaaaaaaaaaaaaaaaaaaaaaa

SEQ ID NO: 31273 - RNA, 1689 nt, Artificial Sequence
  mRNA product Design i-3 (hSL-A100) comprising derived and/or modified sequence from LASV(AV;Clade V)__CCA30314__GPCmut6 (opt5)
aggagaaagcuuaccaugggccagaucgugaccuucuuucaagaggucccccacguuauugaagaggugaugaacaucgugcugauugcccucagcauccuggcuguccuuaaggggcuguacaauauugccacaugcggacucaucggccugaucacguuccuucugcucugugggagauccugcucuagcaaccuguauaaaggaguguacgaacugcagucccucgaccugaauauggagacccuuaacauguguaugccucugucuugcacaaagaauaacagccaucacuauauucggguuggcaaugauaccgggcucgaacugacacuuaccaacacauccauccugaaucauaaauuuuguaaccucucugacgcgcacaagaaagaucuguacgaccaugcucugaugagcauuaucuccaccuuccaccucagcauuccgaauuuuaaccaguaugaggccaugucuugcgauuucaauggaggcaagaucuccgugcaguacaaccugagccacucuuaugccauugacgcugccaaucauuguggcacggucgcuaacgggauccuucaaaccuuuaugcgcauggccuggggaggcuccuacaucgcgcuggauagcgggagaggaaacugggacugcauuaugacaucuuaccaguaucucaucauucagaauaccacaugggagaaccacugucaguucucccggcccagcccuaucggcuaccuggggcuucugucccaacgcaccagagauauuuauaucucucggcgccuccugggaacguuuacauggacccugagcgacuccgaaggcaaugccacacccggcggguacugccucaccagauggaugcugaucgaggcugaacuuaaguguuucggaaacaccgccguggcuaaaugcaaugagaagcaugaugaggaauuuugcgacaugcugcgccucuucgauuuuuguaaacaggccauuagccggcugaagucuccugcgcagauguccauccagcuuauuaacaaagccguuaaugcucugaucaacgaccaacucauuaugaagaaucaccugagagacaucaugggcauccccuauugcaacuacagcaaguauugguaccugaaucacacaauuacggggaaaaccucucucccuaaguguuggcuggugagcaacggauccuaccuuaaugagacacauuucucugaugacaucgaacagcaggccgauaacaugauuaccgagaugcugcaaaaagaauauauggagcggcagggcaagacaccgcucgggcuggucgaccuguucguguuuagcaccuccuucuaccuuaucagcauuuuucuccgccuggugaaaauccccacgcacagacauauugucggaaagccuugccccaaaccucaccggcugaaucauaugggcaucuguucuugcggccucuauaagcagcccgggguuccggugcgcuggaagagaugaggacuaguuauaagacugacuagcccgaugggccucccaacgggcccuccuccccuccuugcaccgagauuaaucaaaggcucuuuucagagccaccaaaaaaaaaaaaaaaaaaaaaaaaaaaaaaaaaaaaaaaaaaaaaaaaaaaaaaaaaaaaaaaaaaaaaaaaaaaaaaaaaaaaaaaaaaaaaaaaaaaaa

SEQ ID NO: 31274 - RNA, 1686 nt, Artificial Sequence
  mRNA product Design i-3 (hSL-A100) comprising derived and/or modified sequence from LASV(Togo/2016/7082;Clade VI)__AMR44577__GPCmut6 (opt5)
aggagaaagcuuaccaugggccagaucauuaccuucuuucaagaggugccccacgucaucgaagagguuaugaacauugugcugaucgcccucagccugcuugcuauucugaaggggguguacaaugucgccacaugcggaaucaucggccucgugacguuccuguuucuuugugggagauccugcucucugauuuauaaaggaagcuacgaacuccagacccuggagcugaacauggaaacacucaauauguguaugccucuguccugcaccaagaacucuagccaucacuauauccggguuggcaaugagacagggcuugagcugacccucacaaacaccuccauuaucaaucauaaauucuguaaccugucugacgcgcacaagcgcaaucuuuacgaucaugcucugaugagcauucucuccacguuucaccugagcaucccgaacuucaaucaguaugaagccaugucuugcgacuuuaacggaggcaaaauuuccgugcaguacaaucugagccacgccuaugcugucgaugccgcugagcauuguggcaccguggccaacgggguucuccaaacauucaugagaauggcguggggaggcucuuacaucgcccuggacuccgggcggggaaauugggauugcaucaugaccagcuaccaguaucuuauuauccagaacacaaccugggaagaccacugucaguuuucucgccccuccccuauuggcuaccuggggcuccugagccaaagaacgcgggauaucuauauuucccgcagacuucugggaacauucaccuggacacucucugacagcgagggcaacgagacccccggcggguacugccugacccgguggaugcugaucgaagcugagcucaaguguuuuggaaauacagccguggcuaagugcaacgaaaaacaugaugaggaguucugcgacaugcugcgccuuuuugauuucuguaagcaggccauccagagacugaaauccccugcgcagaugagcauucaacucaucaauaaggccgucaacgcucugauuaaugaccagcuuaucaugaaaaaccaucugcgggauaugaugggcauucccuauugcaauuacucuaaguauugguaccucaaccacacguccagcgggcgcaccucucugccuaaguguuggcuggugagcaauggauccuaccucaacgaaacacacuucucugacgacaucgagcagcaagccgauaauaugaucaccgaaaugcugcagaaagaguauauugacagacagggcaagacaccgcuugggcugguggaucucuuugucuucagcaccuccuuuuaccugaucagcauuuuccugcaccuuaucaaaauucccacgcaucggcacaucguuggaaagccuugccccaaaccucaucgccucaaccacaugggcauuuguucuugcggccuguauaagcagcccggggugccgacaagauggaaacggugaggacuaguuauaagacugacuagcccgaugggccucccaacgggcccuccuccccuccuugcaccgagauuaaucaaaggcucuuuucagagccaccaaaaaaaaaaaaaaaaaaaaaaaaaaaaaaaaaaaaaaaaaaaaaaaaaaaaaaaaaaaaaaaaaaaaaaaaaaaaaaaaaaaaaaaaaaaaaaaaaaaaa

SEQ ID NO: 31275 - RNA, 1686 nt, Artificial Sequence
  mRNA product Design i-3 (hSL-A100) comprising derived and/or modified sequence from LASV(KAK-428;Clade n.d. (VII))__ANH09740__GPCmut6 (opt5)
aggagaaagcuuaccaugggccagaucgugaccuucuuucaagaggucccccacguuauugaagaggugaugaacaucgugcugauugcccucagccugcuugcuauccugaaggggcucuacaauuucgccacaugcggagucauuggccugaucacguuucuucugcucugugggagauccugcucugcgaccuauaaaggacaguacgaacugcagacacuggagcucaacauggaaagccugaauauguguaugccucuuuccugcaccaagaacaauucucaucacuauauccgggcuggcaacaauacagggcuggagcucacccugacaaacaccagcauuaucucccauaaauucuguaaucuuucugacgcccacaagaaaaaccuguacgaucauacgcucaugagcauuaucaccacauuucaccuguccauuccgaauuucaaccaguaugaggccaugagcugcgacuuuaauggaggcaagaucucuauucaauacaaccugucccacagcuaugcuggcgaugccgcucagcauugugggaccguggccaauggaguucuccagacauucaugcgcauggcguggggcgggucuuaccuggcccuugacuccggaagacggggcugggauugcaucaucagcucuuaccaguaucugauuauccaaaacaccacgugggacgaucacugucaguuuucccgccccagcccuauuggguaccucggauucgugucccagaagacaagagacaucuauauuucucggcgccugcuuggcaccuuuacauggacccugagcgauuccgaaggccaugacaugcccgggggauacugccucaccagauggaugcugaucgaggcugaucugaaauguuucggcaacacagccgucgcuaagugcaaugaaaaacacgacgaggaguuuugcgauauguggcgccucuucgacuucuguaagcaggccauccaacggcugaaagcgccugcccagaugaacauucagcuuaucaauaaggcugugaacgcccugauuaaugaccaacucaugaugaagaaccaccugagagauaucauggggauucccuauugcaauuacagcaaauuuugguaucuuaacaauacgaccacaggacggaccucucugccucgcuguuggcucaucuccaacggcagcuaccugaaugaaacacauuucucugacgauaucgagcagcaggcugacaacaugauuaccgaaaugcugcagaaggaguacauggauagacaagggaaaacgccgcucggacugguugaccuuuuuguguucagcacauccuuuuaucugaucaccauuuuccuccaccuggucaagauccccacccaucggcacauugugggcaaaccuugccccaagccucaucgccugaaucacaugggcaucuguucuugcgggcuuuacaaacagcccggagugccggucagauggaagcggugaggacuaguuauaagacugacuagcccgaugggccucccaacgggcccuccuccccuccuugcaccgagauuaaucaaaggcucuuuucagagccaccaaaaaaaaaaaaaaaaaaaaaaaaaaaaaaaaaaaaaaaaaaaaaaaaaaaaaaaaaaaaaaaaaaaaaaaaaaaaaaaaaaaaaaaaaaaaaaaaaaaaa

SEQ ID NO: 31276 - RNA, 1686 nt, Artificial Sequence; identical to SEQ ID NO: 31270
  mRNA product Design i-3 (hSL-A100) comprising derived and/or modified sequence from LASV(Pinneo-NIG-1969;Clade I)__AIT17836__GPCmut6 (opt5)

SEQ ID NO: 31277 - RNA, 1686 nt, Artificial Sequence
  mRNA product Design i-3 (hSL-A100) comprising derived and/or modified sequence from LASV(ISTH0009-NIG-2011;Clade II)__AIT17404__GPCmut6 (opt5)
aggagaaagcuuaccaugggccagaucauuaccuucuuucaagaggugccccacgucaucgaagagguuaugaacauugugcugaucgcccucagccugcuugcuauucugaaggggaucuacaauguggccacaugcggacucuucggccuggucuccuuucuucugcucugugggagaucuugcagcacgaccuauaaaggaguguacgaacugcagacacuggagcucgacauggcgucccugaacauguguaugccucuuucuugcaccaagaauaacagccaucacuauaucaugguuggcaaugaaacagggcuggagcucacccugacaaacaccuccauuaucaaucauaaauucuguaaccuuucugaugcucacaagaaaaaucuguacgaccaugcccucaugagcauuaucuccacguuucaccugagcauuccgaacuucaaucaguaugaggccaugucuugcgauuuuaacggaggcaagaucuccgugcaguacaaucugagccacgcuuaugccgucgacgcugccaaccauuguggcaccauugcgaauggggugcuccaaacauucaugcggauggccuggggaggcucuuacaucgcucuggauuccgggaagggaagcugggacugcaucaugaccucuuaccaguaucuuauuauccagaacacaaccugggaagaucacugucaguuuucccgccccagcccuauuggcuaccuggggcuccugucccaaagaacgcgggacaucuauauuucucgcagacuucugggaacauucaccuggacacucagcgauuccgagggcaacgaaacccccggcggguacugccugacccgguggaugcugaucgaggccgagcucaaauguuuuggaaauacagcuguugccaagugcaacgaaaaacaugacgaggaguucugcgauaugcugcgccuuuuugacuucuguaagcaggcgaucagacggcugaaaacgccugcccagaugagcauucagcucaucaauaaggcugugaacgcccugauuaaugaucaacuuaucaugaagaaccaucugcgcgacauuaugggcauccccuauugcaauuacucuaaauauugguaccucaaccacaccgucacagggaagaccucccugccuagauguuggcuggugagcaauggaucuuaccucaacgaaacacacuucagcgacgauaucgaacagcaggcugacaauaugauuaccgagcugcuucaaaaagaguauauggaucggcagggcaagacgccgcuggggcucguggaccuguuugucuucuccacaucuuuuuaccugaucagcauuuuccuucaccucaucaaaauucccacccaucgccacaucaccggaaagccuugccccaaaccucauagacugaaccacaugggcauuuguuccugcggccuguauaagcaccccgggguuccggugaaguggaaacggugaggacuaguuauaagacugacuagcccgaugggccucccaacgggcccuccuccccuccuugcaccgagauuaaucaaaggcucuuuucagagccaccaaaaaaaaaaaaaaaaaaaaaaaaaaaaaaaaaaaaaaaaaaaaaaaaaaaaaaaaaaaaaaaaaaaaaaaaaaaaaaaaaaaaaaaaaaaaaaaaaaaaa

SEQ ID NO: 31278 - RNA, 1686 nt, Artificial Sequence
  mRNA product Design i-3 (hSL-A100) comprising derived and/or modified sequence from LASV(ISTH2010-NIG-2012;Clade II)__AIT17482__GPCmut6 (opt5)
aggagaaagcuuaccaugggccagaucauuaccuucuuucaagaggugccccacgucaucgaagagguuaugaacauugugcugaucgcccucagccugcuugcuauucugaaggggaucuacaauguggccacaugcggacucuucggccuggucuccuuucuucugcucugugggagaucuugcagcacgaccuauaaaggaguguacgaacugcagacacuggagcucgacauggcgucccugaacauguguaugccucuuucuugcaccaagaauaacagccaucacuauaucaugguuggcaaugaaacagggcuggagcucacccugacaaacaccuccauuaucaaucauaaauucuguaaccuuucugaugcucacaagaaaaaucuguacgaccaugcccucaugagcauuaucuccacguuucaccugagcauuccgaacuucaaucaguaugaggccaugucuugcgauuuuaacggaggcaagaucuccgugcaguacaaucugagccacgcuuaugccgucgacgcugccaaccauuguggcaccauugcgaauggggugcuccaaacauucaugcggauggccuggggaggcucuuacaucgcucuggauuccgggaagggaagcugggacugcaucaugaccucuuaccaguaucuuauuauccagaacauuacaugggaagaucacugucaguuuucccgccccagcccuaucggcuaccuggggcuccugucccaaagaacccgggacauuuauaucucucgcagacuucugggaacguucacauggacccucagcgauuccgagggcaacgaaacacccggcggguacugccugacccgguggaugcugaucgaggccgagcucaaauguuuuggaaauaccgcuguugccaagugcaacgaaaaacaugacgaggaguucugcgauaugcugcgccuuuuugacuucuguaagcaggcgauuagacggcugaaaacgccugcccagaugagcauccagcucauuaauaaggcugugaacgcccugaucaaugaucaacuuauuaugaagaaccaucugcgcgacaucaugggcauccccuauugcaauuacucuaaauauugguaccucaaccacacagucaccgggaagacaucccugccuagauguuggcuggugagcaauggaucuuaccucaacgaaacccacuucagcgacgauauugaacagcaggcugacaauaugaucacagagcugcuucaaaaagaguauauugaucggcagggcaagaccccgcuggggcucguggaccuguuugucuucuccacgucuuuuuaccugaucagcauuuuccuucaccucguuaaaauccccacacaucgccacguggugggaaagccuugccccaaaccucauagacugaaccacaugggcauuuguuccugcggccuguauaagcaccccggggucccggugaaguggaaacggugaggacuaguuauaagacugacuagcccgaugggccucccaacgggcccuccuccccuccuugcaccgagauuaaucaaaggcucuuuucagagccaccaaaaaaaaaaaaaaaaaaaaaaaaaaaaaaaaaaaaaaaaaaaaaaaaaaaaaaaaaaaaaaaaaaaaaaaaaaaaaaaaaaaaaaaaaaaaaaaaaaaaa

SEQ ID NO: 31279 - RNA, 1686 nt, Artificial Sequence
  mRNA product Design i-3 (hSL-A100) comprising derived and/or modified sequence from LASV(Lassa virus/H.sapiens-wt/NGA/2015/ISTH_0543;Clade II)__AVO03639__GPCmut6 (opt5)
aggagaaagcuuaccaugggccagaucauuaccuucuuucaagaggugccccacgucaucgaagagguuaugaacauugugcugaucgcccucagccugcuugcuauucugaaggggaucuacaauguggccacaugcggacucuucggccuggucuccuuucuucugcucugugggagaucuugcagcacgaccuauaaaggaguguacgaacugcagacacuggagcucgacauggcgaaccugaauauguguaugccucuuuccugcaccaagaacaauucucaucacuauaucaugguuggcaacgaaacagggcuggagcucacccugacaaauaccagcauuaucaaccauaaauucuguaaucuuuccgaugcucacaagaaaaaccuguacgaccaugcccucaugucuauuaucagcacguuucaccuguccauuccgaauuucaaccaguaugaggccaugagcugcgauuuuaauggaggcaagaucucugugcaguacaaccugucccacaccuaugcugucgacgccgcuaaucauuguggcacaauugccaacggggugcuccaaaccuucaugcggauggcguggggaggcagcuacaucgcccuggauucugggaagggauccugggacugcaucaugacaagcuaccaguaucuuguuauucagaacaccacgugggaagaucacugucaguuuucucgccccuccccuaucggcuaccuggggcuccugagccaaagaacacgggacauuuauaucucccgcagacuucugggaaccuucacauggacccucucugauagcgagggcaaugaaacccccggcggguacugccugacacgguggaugcugauugaggcugagcucaaauguuuuggaaacacggccguggcuaagugcaaugaaaaacaugacgaggaguucugcgauaugcugcgccuuuuugacuucuguaagcaggccaucagacggcugaaaaccccugcgcagauguccauccagcucauuaacaaggccgucaaugcucugaucaacgaucaacuuauuaugaagaaucaucugcgcgacaucaugggcauucccuauugcaacuacagcaaauauugguaccucaaucacacagugaccgggaagacaucucugccuagauguuggcugguguccaacggaagcuaccucaaugaaacccacuucucugacgauaucgaacagcaggccgacaacaugaucacggagcugcuucaaaaagaguauauugaucggcagggcaagacaccgcuggggcucgucgaccuguuuguuuucagcaccuccuuuuaccugaucucuauuuuccuucaccucgugaaaauccccacccaucgccacauuacaggaaagccuugccccaaaccucauagacugaaucacaugggcaucuguagcugcggccuguauaagcaccccggggugccggucaaguggaaacggugaggacuaguuauaagacugacuagcccgaugggccucccaacgggcccuccuccccuccuugcaccgagauuaaucaaaggcucuuuucagagccaccaaaaaaaaaaaaaaaaaaaaaaaaaaaaaaaaaaaaaaaaaaaaaaaaaaaaaaaaaaaaaaaaaaaaaaaaaaaaaaaaaaaaaaaaaaaaaaaaaaaaa

SEQ ID NO: 31280 - RNA, 1686 nt, Artificial Sequence
  mRNA product Design i-3 (hSL-A100) comprising derived and/or modified sequence from LASV(Lassa virus/H.sapiens-wt/NGA/2016/ISTH_0009;Clade II)__AVO03571__GPCmut6 (opt5)
aggagaaagcuuaccaugggccagaucauuaccuucuuucaagaggugccccacgucaucgaagagguuaugaacauugugcugaucgcccucagccugcuugcuauucugaaggggaucuacaauguggccacaugcggacuccugggccuugucuccuuccugcuccugugugggagaucuugcagcacgaccuauaaaggaguguacgaacugcagacacucgagcuggacauggcgucccuuaacauguguaugccucugucuugcaccaagaauaacagccaucacuauaucaugguuggcaaugaaacagggcucgagcugacccuuacaaacaccuccauuaucaaucauaaauuuuguaaccugucugaugcucacaagaaaaaucucuacgaccaugcccugaugagcauuaucuccacguuccaccugagcauuccgaacuuuaaucaguaugaggccaugucuugcgauuucaacggaggccggaucuccgugcaguacaaucucagccacucuuaugcugucgacgccgcuaaccauuguggcaccauugccaauggggugcugcaaacauuuaugcgcauggcguggggaggcuccuacaucgcccuugauagcgggaagggaucuugggacugcaucaugaccuccuaccaguaucugauuauccagaacacaaccugggaagaucacugucaguucagcagacccuccccuauuggcuaccucgggcugcuuucucaacggacgcgcgacaucuauauuagcagacggcugcucggaacauuuaccuggacacuguccgauagcgagggcaacgaaacccccggcggguacugccugacccgcuggaugcucaucgaggcugagcugaaguguuucggaaauacagccguugcuaaaugcaacgaaaagcaugacgaggaauuuugcgauaugcuuagacuguucgacuuuuguaaacaggccauccggcgccucaagacgccugcgcagaugucuauucagcugaucaauaaagccgugaacgcucuuauuaaugaucaacugaucaugaagaaccaccucagagacauuaugggcauccccuauugcaauuacuccaaguauugguaccugaaccacaccgucacagggaaaaccagccugccucgguguuggcucgugucuaauggaagcuaccugaacgagacacauuucuccgacgauaucgaacagcaggccgacaauaugauuaccgagcuucugcaaaaggaguauaucgaucgccagggcaaaacgccgcucgggcugguggaccuguucgucuuuucuaccagcuucuaccuuauuuccaucuuucuccaccugguuaagauucccacacauagacacaucaccggaaaaccuugccccaagccucaucggcugaaccacaugggcauuuguagcugcggccucuauaaucaccccggggugccggugaaauggaagcgcugaggacuaguuauaagacugacuagcccgaugggccucccaacgggcccuccuccccuccuugcaccgagauuaaucaaaggcucuuuucagagccaccaaaaaaaaaaaaaaaaaaaaaaaaaaaaaaaaaaaaaaaaaaaaaaaaaaaaaaaaaaaaaaaaaaaaaaaaaaaaaaaaaaaaaaaaaaaaaaaaaaaaa

SEQ ID NO: 31281 - RNA, 1686 nt, Artificial Sequence
  mRNA product Design i-3 (hSL-A100) comprising derived and/or modified sequence from LASV(Lassa virus/H.sapiens-wt/NGA/2016/ISTH_0017;Clade II)__AVO03567__GPCmut6 (opt5)
aggagaaagcuuaccaugggccagaucauuaccuucuuucaagaggugccccacgucaucgaagagguuaugaacauugugcugaucgcccucagccugcuugcuauucugaaggggaucuacaauguggccacaugcggacucuucggccuggucuccuuucuucugcucugugggagaucuugcagcacgaccuauaaaggaguguacgaacugcagacacuggagcucgacauggcgucccugaacauguguaugccucuuucuugcaccaagaauaacagccaucacuauaucaugguuggcaaugaaacagggcuggagcucacccugacaaacaccuccauuaucaaucauaaauucuguaaccuuucugaugcucacaagaaaaaucuguacgaccaugcccucaugagcauuaucuccacguuucaccugagcauuccgaacuucaaucaguaugaggccaugucuugcgauuuuaacggaggcaagaucuccgugcaguacaaucugagccacaccuaugcuauugacgccgcuaaccauuguggcacaaucgccaaugggguccuccaaaccuucaugcggauggcguggggaggcucuuacaucgcccuggauuccgggaagggaagcugggacugcauuaugacaucuuaccaguaucuuaucauucagaacaccacgugggaagaucacugucaguuuucccgccccagcccuaucggcuaccuggggcuccugucccaaagaacacgggacauuuauaucucucgcagacuucugggaaccuucacauggacccucagcgauuccgagggcaacgaaacccccggcggguacugccugacacgguggaugcugaucgaggcugagcucaaauguuuuggaaauacggccguggcuaagugcaacgaaaaacaugacgaggaguucugcgauaugcugcgccuuuuugacuucuguaagcaggccauuagacggcugaaaaccccugcgcagaugagcauccagcucauuaauaaggccguuaacgcucugaucaaugaucaacuuauuaugaagaaccaucugcgcgacaucaugggcauccccuauugcaauuacucuaaauauugguaccucaaccacacagugaccgggaagacaucccugccuagauguuggcuggucagcaauggaucuuaccucaacgaaacccacuucagcgacgauauugaacagcaggccgacaauaugaucacggagcugcuucaaaaagaguauauggaucggcagggcaagacaccgcuggggcucguggaccuguuuguguucuccaccucuuuuuaccugauuagcaucuuccuucaccucguccgcauucccacccauagacacguuaucggaaaaccuugccccaagccucaucggcugaaccacaugggcauuuguuccugcggccuguauaaacaccccggggugccggugaaguggaagcgcugaggacuaguuauaagacugacuagcccgaugggccucccaacgggcccuccuccccuccuugcaccgagauuaaucaaaggcucuuuucagagccaccaaaaaaaaaaaaaaaaaaaaaaaaaaaaaaaaaaaaaaaaaaaaaaaaaaaaaaaaaaaaaaaaaaaaaaaaaaaaaaaaaaaaaaaaaaaaaaaaaaaaa

SEQ ID NO: 31282 - RNA, 1686 nt, Artificial Sequence
  mRNA product Design i-3 (hSL-A100) comprising derived and/or modified sequence from LASV(Lassa virus/H.sapiens-wt/NGA/2018/ISTH_0959;Clade II)__AVV65099__GPCmut6 (opt5)
aggagaaagcuuaccaugggccagaucauuaccuucuuucaagaggugccccacgucaucgaagagguuaugaacauugugcugaucgcccucagccugcuugcuauucugaaggggaucuacaauguggucacaugcggacucuucggccugguguccuuucuucugcucugugggagaucuugcagcacgaccuauaaaggaguuuacgaacugcagacacuggagcucgacauggccucccugaacauguguaugccucuuucuugcaccaagaauaacagccaucacuauaucauggugggcaaugaaacagggcuggagcucacccugacaaacaccuccauuaucaaucauaaauucuguaaccuuucugaugcgcacaagaaaaaucuguacgaccaugcucucaugagcauuaucuccacguuucaccugagcauuccgaacuucaaucaguaugaggccaugucuugcgauuuuaacggaggcaagaucuccguccaguacaaucugagccacgccuaugcuauugacgccgcuaaccauuguggcaccaucgccaauggggugcuccaaacauucaugcggauggcguggggaggcucuuacaucgcccuggauuccgggaagggaagcugggacugcauuaugaccucuuaccaguaucuuaucauucagaacacaaccugggaagaucacugucaguuuucccgccccagcccuaucggcuaccuggggcuccugucccaaagaacgcgggacauuuauaucucucgcagacuucugggaacauucaccuggacacucagcgauuccgagggcaacgaaacccccggcggguacugccugacccgguggaugcugaucgaggcugagcucaaauguuuuggaaauacagccguugcuaagugcaacgaaaaacaugacgaggaguucugcgauaugcugcgccuuuuugacuucuguaagcaggccauuagacggcugaaaacgccugcgcagaugagcauccagcucauuaauaaggccgugaacgcucugaucaaugaucaacuuauuaugaagaaccaucugcgcgacaucaugggcauccccuauugcaauuacucuaaauauugguaccucaaccacaccgucacagggaagaccucccugccuagauguuggcuggugagcaauggaucuuaccucaacgaaacacacuucagcgacgauauugaacagcaggccgacaauaugaucaccgagcugcuucaaaaagaguauauugaucggcagggcaagacgccgcuggggcucguggaccuguuugucuucuccacaucuuuuuaccugaucagcauuuuccuucaccucguuaaaauccccacccaucgccacgugauuggaaagccuugccccaaaccucauagacugaaccacaugggcaucuguuccugcggccuguauaagcaccccggggugccggucaaguggaaacggugaggacuaguuauaagacugacuagcccgaugggccucccaacgggcccuccuccccuccuugcaccgagauuaaucaaaggcucuuuucagagccaccaaaaaaaaaaaaaaaaaaaaaaaaaaaaaaaaaaaaaaaaaaaaaaaaaaaaaaaaaaaaaaaaaaaaaaaaaaaaaaaaaaaaaaaaaaaaaaaaaaaaa

SEQ ID NO: 31283 - RNA, 1686 nt, Artificial Sequence
  mRNA product Design i-3 (hSL-A100) comprising derived and/or modified sequence from LASV(LASV003-NIG-2008;Clade II)__AIT17580__GPCmut6 (opt5)
aggagaaagcuuaccaugggccagaucauuaccuucuuucaagaggugccccacgucaucgaagagguuaugaacauugugcugaucgcccucagccugcuugcuauucugaaggggaucuacaauguggccacaugcggacucuucggccuggucuccuuucuucugcucugugggagaucuugcagcacgaccuauaaaggaguguacgaacugcagacacuggagcucgacauggcgucccugaacauguguaugccucuuucuugcaccaagaauaacagccaucacuauaucaugguuggcaaugaaacagggcuggagcucacccugacaaacaccuccauuaucaaucauaaauucuguaaccuuucugaugcucacaagaaaaaucuguacgaccaugcccucaugagcauuaucuccacguuucaccugagcauuccgaacuucaaucaguaugaggccaugucuugcgauuuuaacggaggcaagaucuccgugcaguacaaucugagccacaccuaugcugucgacgccgcuaaccauuguggcacaauugccaauggggugcuccaaaccuucaugcggauggcguggggaggcucuuacaucgcccuggauuccgggaagggaagcugggacugcaucaugacaucuuaccaguaucuuauuauccagaacaccacgugggaagaucacugucaguuuucccgccccagcccuauuggcuaccuggggcuccugucccaaagaacacgggacaucuauauuucucgcagacuucugggaaccuucacauggacccucagcgauuccgagagcaacgaaacccccggcggcuacugccugacacgguggaugcugaucgaggcugagcucaaauguuuugggaauacggccguugcuaagugcaacgaaaaacaugacgaggaguucugcgauaugcugcgccuuuuugacuucuguaagcaggccaucagacggcugaaagcgccugcccagaugucuauucagcucaucaauaaggcugugaacgcccugauuaaugaucaacuuaucaugaagaaccaucugcgcgacauuaugggaauccccuauugcaauuacuccaaauauugguaccucaaccacaccgucacaggcagaaccagccugccucgguguuggcuggugucuaaugggagcuaccucaacgaaacacacuucuccgacgauaucgaacagcaggcugacaauaugauuaccgagcugcuucaaaaggaguauauggaucgccagggaaaaacgccgcugggccucguggaccuguuugucuucucuaccagcuuuuaccugaucuccauuuuccuucaccucguuaagauccccacacauagacacgugauugggaaaccuugccccaagccucaucggcugaaccacaugggaaucuguagcugcggccuguauaaacaccccggcgugccggucaaguggaagcgcugaggacuaguuauaagacugacuagcccgaugggccucccaacgggcccuccuccccuccuugcaccgagauuaaucaaaggcucuuuucagagccaccaaaaaaaaaaaaaaaaaaaaaaaaaaaaaaaaaaaaaaaaaaaaaaaaaaaaaaaaaaaaaaaaaaaaaaaaaaaaaaaaaaaaaaaaaaaaaaaaaaaaa

SEQ ID NO: 31284 - RNA, 1686 nt, Artificial Sequence
  mRNA product Design i-3 (hSL-A100) comprising derived and/or modified sequence from LASV(LASV035-NIG-2009;Clade II)__AIT17588__GPCmut6 (opt5)
aggagaaagcuuaccaugggccagaucauuaccuucuuucaagaggugccccacgucaucgaagagguuaugaacauugugcugaucgcccucagccugcuugcuauucugaaggggaucuacaauguggccacaugcggacucuucggccuggucuccuuucuucugcucugugggagaucuugcagcacgaccuauaaaggaguguacgaacugcagacacuggagcucgacauggcgucccugaacauguguaugccucuuucuugcaccaagaauaacagccaucacuauaucaugguuggcaaugaaacagggcuggagcucacccugacaaacaccuccauuaucaaucauaaauucuguaaccuuucugaugcucacaagaaaaaucuguacgaccaugcccucaugagcauuaucuccacguuucaccugagcauuccgaacuucaaucaguaugaggccaugucuugcgauuuuaacggaggcaagaucuccgugcaguacaaucugagccacgcuuaugccgucgacgcugccaaccauuguggcaccauugcgaauggggugcuccaaacauucaugcggauggccuggggaggcucuuacaucgcucuggauuccgggaagggaagcugggacugcaucaugaccucuuaccaguaucuuauuauccagaacacaaccugggaagaucacugucaguuuucccgccccagcccuauuggcuaccuggggcuccugucccaaagaacgcgggacaucuauauuucucgcagacuucugggaacauucaccuggacacucagcgauuccgagggcaacgaaacccccggcggguacugccugacccgguggaugcugaucgaggccgagcucaaauguuuuggaaauacagcuguugccaagugcaacgaaaaacaugacgaggaguucugcgauaugcugcgccuuuuugacuucuguaagcaggcgaucagacggcugaaagccccugcucagaugagcauucagcucaucaauaaggccgugaacgcucugauuaaugaucaacuuaucaugaagaaccaucugcgcgacauuaugggcauccccuauugcaauuacucuaaauauugguaccucaaccacacggucaccgggaagacaucccugccuagauguuggcuggugagcaauggaucuuaccucaacgaaacccacuucagcgacgauaucgaacagcaggccgacaauaugauuacagagcugcuucaaaaagaguauaucgaucggcagggcaagaccccgcuggggcucguggaccuguuugucuucuccacgucuuuuuaccugauuagcaucuuccuucaccucguuaaaauucccacacaucgccacgugaucggaaagccuugccccaaaccucauagacugaaccacaugggcauuuguuccugcggccuguauaagcaccccggggugccggucaaguggaaacggugaggacuaguuauaagacugacuagcccgaugggccucccaacgggcccuccuccccuccuugcaccgagauuaaucaaaggcucuuuucagagccaccaaaaaaaaaaaaaaaaaaaaaaaaaaaaaaaaaaaaaaaaaaaaaaaaaaaaaaaaaaaaaaaaaaaaaaaaaaaaaaaaaaaaaaaaaaaaaaaaaaaaa

SEQ ID NO: 31285 - RNA, 1686 nt, Artificial Sequence
  mRNA product Design i-3 (hSL-A100) comprising derived and/or modified sequence from LASV(LASV1000-NIG-2009;Clade II)__AIT17782__GPCmut6 (opt5)
aggagaaagcuuaccaugggccagaucauuaccuucuuucaagaggugccccacgucaucgaagagguuaugaacauugugcugaucgcccucagccugcuugcuauucugaaggggaucuacaauguggccacaugcggacucuucggccuggucuccuuucuucugcucugugggagaucuugcagcacgaccuauaaaggaguguacgaacugcagacacuggagcucgacauggcgucccugaacauguguaugccucuuucuugcaccaagaauaacagccaucacuauaucaugguuggcaaugaaacagggcuggagcucacccugacaaacaccuccauuaucaaucauaaauucuguaaccuuucugaugcucacaagaaaaaucuguacgaccaugcccucaugagcauuaucuccacguuucaccugagcauuccgaacuucaaucaguaugaggccaugucuugcgauuuuaacggaggcaagaucuccgugcaguacaaucugagccacaccuaugcugucgacgccgcuaaccauuguggcacaauugccaauggggugcuccaaaccuucaugcggauggcguggggaggcucuuacaucgcccuggauuccgggaagggaagcugggacugcaucaugacaucuuaccaguaucuuauuauccagaacaccacgugggaagaucacugucaguuuucccgccccagcccuauuggcuaccuggggcuccugucccaaagaacacgggacaucuauauuucucgcagacuucugggaaccuucacauggacccucagcgauuccgagggcaacgaaacccccggcggguacugccugacacgguggaugcugaucgaggcugagcucaaauguuuuggaaauacggccguugcuaagugcaacgaaaaacaugacgaggaguucugcgauaugcugcgccuuuuugacuucuguaagcaggccaucaaaagacugaagaccccugcgcagaugagcauucagcucaucaauaaggccgugaacgcucugauuaaugaucaacuuaucaugaaaaaccaucugcgggacauuaugggcauccccuauugcaauuacucuaaguauugguaccucaaccacacagucaccgggaaaacaucccugccucgcuguuggcuggugagcaauggaucuuaccucaacgaaacccacuucagcgacgauaucgaacagcaggccgacaauaugauuacggagcugcuucaaaaggaguauaucgauagacagggcaaaacaccgcuggggcucguggaccuguuugucuucuccaccucuuuuuaccugauuagcaucuuccuucaccucguuaagauucccacccaucggcacguggugggaaaaccuugccccaagccucaucgccugaaccacaugggcaucuguuccugcggccuguauaagcaccccggggucccggugaaauggaagagaugaggacuaguuauaagacugacuagcccgaugggccucccaacgggcccuccuccccuccuugcaccgagauuaaucaaaggcucuuuucagagccaccaaaaaaaaaaaaaaaaaaaaaaaaaaaaaaaaaaaaaaaaaaaaaaaaaaaaaaaaaaaaaaaaaaaaaaaaaaaaaaaaaaaaaaaaaaaaaaaaaaaaa

SEQ ID NO: 31286 - RNA, 1686 nt, Artificial Sequence
  mRNA product Design i-3 (hSL-A100) comprising derived and/or modified sequence from LASV(LASV221-NIG-2010;Clade II)__AIT17624__GPCmut6 (opt5)
aggagaaagcuuaccaugggccagaucauuaccuucuuucaagaggugccccacgucaucgaagagguuaugaacauugugcugaucgcccucagccugcuugcuauucugaaggggaucuacaauguggccacaugcggacucuucggccuggucuccuuucuucugcucugugggagaucuugcagcacgaccuauaaaggaguguacgaacugcagacacuggagcucgacauggcgucccugaacauguguaugccucuuucuugcaccaagaauaacagccaucacuauaucaugguuggcaaugaaacagggcuggagcucacccugacaaacaccuccauuaucaaucauaaauucuguaaccuuucugaugcucacaagaaaaaucuguacgaccaugcccucaugagcauuaucuccacguuucaccugagcauuccgaacuucaaucaguaugaggccaugucuugcgauuuuaacggaggcaagaucuccgugcaguacaaucugagccacaccuaugcuauugacgccgcuaaccauuguggcacaaucgccaaugggguccuccaaaccuucaugcggauggcguggggaggcucuuacaucgcccuggauuccgggaagggaagcugggacugcauuaugacaucuuaccaguaucuuaucauucagaacaccacgugggaagaucacugucaguuuucccgccccagcccuaucggcuaccuggggcuccugucccaaagaacacgggacauuuauaucucucgcagacuucugggaaccuucacauggacccucagcgauuccgagggcaacgaaacccccggcggguacugccugacacgguggaugcugaucgaggcugagcucaaauguuuuggaaauacggccguggcuaagugcaacgaaaaacaugacgaggaguucugcgauaugcugcgccuuuuugacuucuguaagcaggccauuagacggcugaaaaccccugcgcagaugagcauccagcucauuaauaaggccguuaacgcucugaucaaugaucaacuuauuaugaagaaccaucugcgcgacaucaugggcauccccuauugcaauuacucuaaauauugguaccucaaccacacagugaccgggaagacaucccugccuagauguuggcuggucagcaauggaucuuaccucaacgaaacccacuucagcgacgauauugaacagcaggccgacaauaugaucacggagaugcugcaaaaagaguauauggaucggcagggcaagacaccgcuugggcugguggaccucuuuguguucuccaccucuuuuuaccugauuagcaucuuccugcaccuugucaaaauucccacccaucgccacguuaucggaaagccuugccccaaaccucauagacucaaccacaugggcauuuguuccugcggccuguauaagcaccccggggugccggugaaguggaaacggugaggacuaguuauaagacugacuagcccgaugggccucccaacgggcccuccuccccuccuugcaccgagauuaaucaaaggcucuuuucagagccaccaaaaaaaaaaaaaaaaaaaaaaaaaaaaaaaaaaaaaaaaaaaaaaaaaaaaaaaaaaaaaaaaaaaaaaaaaaaaaaaaaaaaaaaaaaaaaaaaaaaaa

SEQ ID NO: 31287 - RNA, 1686 nt, Artificial Sequence
  mRNA product Design i-3 (hSL-A100) comprising derived and/or modified sequence from LASV(LASV237-NIG-2010;Clade II)__AIT17638__GPCmut6 (opt5)
aggagaaagcuuaccaugggccagaucauuaccuucuuucaagaggugccccacgucaucgaagagguuaugaacauugugcugaucgcccucagccugcuugcuauucugaaggggaucuacaauguggccacaugcggacucuucggccuggucuccuuucuucugcucugugggagaucuugcagcacgaccuauaaaggaguguacgaacugcagacacuggagcucgacauggcgucccugaacauguguaugccucuuucuugcaccaagaauaacagccaucacuauaucaugguuggcaaugaaacagggcuggagcucacccugacaaacaccuccauuaucaaucauaaauucuguaaccuuucugaugcucacaagaaagaccuguacgaucaugcccucaugagcauuaucuccacguuucaccugagcauuccgaauuucaaccaguaugaggccaugucuugcgacuuuaauggaggcaagaucuccgugcaguacaaccugagccacaccuaugcugucgaugccgcuaaucauuguggcacaauugccaacggggugcuccaaaccuucaugcggauggcguggggaggcucuuacaucgcccuggacuccgggaagggaagcugggauugcaucaugacaucuuaccaguaucuuauuauccagaauaccacgugggaagaccacugucaguuuucccgccccagcccuauuggcuaccuggggcuccugucccaaagaacacgggauaucuauauuucucgcagacuucugggaaccuucacauggacccucagcgacuccgagggcaacgaaacccccggcggguacugccugacacgguggaugcugaucgaggcugagcucaaauguuuuggaaacacggccguugcuaagugcaaugaaaaacaugaugaggaguucugcgacaugcugcgccuuuuugauuucuguaagcaggccaucagacggcugaaaaccccugcgcagaugagcauucagcucaucaacaaggccgugaaugcucugauuaacgaccaacuuaucaugaagaaucaucugcgcgacauuaugggcauccccuauugcaacuacucuaaauauugguaccucaaucacacagucaccgggaagacaucccugccuagauguuggcuggugagcaacggaucuuaccucaaugaaacccacuucagcgaugacaucgaacagcaggccgauaacaugauuacggagcugcuucaaaaagaguauauggaccggcagggcaagacaccgcuggggcucguggaucuguuugucuucuccaccucuuuuuaccugaucagcauuuuccuucaccucaucaaaauucccacccaucgccacaucacaggaaagccuugccccaaaccucauagacugaaucacaugggcauuuguuccugcggccuguauaagcaccccgggguuccggugaaguggaaacggugaggacuaguuauaagacugacuagcccgaugggccucccaacgggcccuccuccccuccuugcaccgagauuaaucaaaggcucuuuucagagccaccaaaaaaaaaaaaaaaaaaaaaaaaaaaaaaaaaaaaaaaaaaaaaaaaaaaaaaaaaaaaaaaaaaaaaaaaaaaaaaaaaaaaaaaaaaaaaaaaaaaaa

SEQ ID NO: 31288 - RNA, 1686 nt, Artificial Sequence
  mRNA product Design i-3 (hSL-A100) comprising derived and/or modified sequence from LASV(LASV253-NIG-2011;Clade II)__AIT17670__GPCmut6 (opt5)
aggagaaagcuuaccaugggccagaucauuaccuucuuucaagaggugccccacgucaucgaagagguuaugaacauugugcugaucgcccucagccugcuugcuauucugaaggggaucuacaauguggccacaugcggacucuucggccuggucuccuuucuucugcucugugggagaucuugcagcacgaccuauaaaggaguguacgaacugcagacacuggagcucgacauggcgucccugaacauguguaugccucuuucuugcaccaagaauaacagccaucacuauaucaugguuggcaaugaaacagggcuggagcucacccugacaaacaccuccauuaucaaucauaaauucuguaaccuuucugaugcucacaagaaaaaucuguacgaccaugcccucaugagcauuaucuccacguuucaccugagcauuccgaacuucaaucaguaugaggccaugucuugcgauuuuaacggaggcaagaucuccgugcaguacaaucugagccacaccuaugcugucgacgccgcuaaccauuguggcacaauugccaauggggugcuccaaaccuucaugcggauggcguggggaggcucuuacaucgcccuggauuccgggaagggaagcugggacugcaucaugacaucuuaccaguaucuuauuauccagaacaccacgugggaagaucacugucaguuuucccgccccagcccuauuggcuaccuggggcuccugucccaaagaacacgggacaucuauauuucucgcagacuucugggaaccuucacauggacccucagcgauuccgagggcaacgaaacccccggcggguacugccugacacgguggaugcugaucgaggcugagcucaaauguuuuggaaauacggccguugcuaagugcaacgaaaaacaugacgaggaguucugcgauaugcugcgccuuuuugacuucuguaagcaggccaucagacggcugaaagcgccugcccagaugagcauucagcucaucaauaaggcugugaacgcccugauuaaugaucaacuuaucaugaagaaccaucugcgcgacauuaugggcauccccuauugcaauuacucuaaauauugguaccucaaccacaccgucacagggagaaccucccugccucgguguuggcuggugagcaauggaucuuaccucaacgaaacacacuucagcgacgauaucgaacagcaggcugacaauaugauuaccgagcugcuucaaaaggaguauaucgaucgccagggcaaaacgccgcuggggcucguggaccuguuugucuucuccacaucuuuuuaccugauuagcaucuuccuucaccucguuaagauucccacccauagacacaucauuggaaaaccuugccccaagccucaucggcugaaccacaugggcaucuguuccugcggccuguauaaacaccccggggugccggugaaguggaagcgcugaggacuaguuauaagacugacuagcccgaugggccucccaacgggcccuccuccccuccuugcaccgagauuaaucaaaggcucuuuucagagccaccaaaaaaaaaaaaaaaaaaaaaaaaaaaaaaaaaaaaaaaaaaaaaaaaaaaaaaaaaaaaaaaaaaaaaaaaaaaaaaaaaaaaaaaaaaaaaaaaaaaaa

SEQ ID NO: 31289 - RNA, 1686 nt, Artificial Sequence
  mRNA product Design i-3 (hSL-A100) comprising derived and/or modified sequence from LASV(LASV254-NIG-2011;Clade II)__AIT17674__GPCmut6 (opt5)
aggagaaagcuuaccaugggccagaucauuaccuucuuucaagaggugccccacgucaucgaagagguuaugaacauugugcugaucgcccucagccugcuugcuauucugaaggggaucuacaauguggccacaugcggacucuucggccuggucuccuuucuucugcucugugggagaucuugcagcacgaccuauaaaggaguguacgaacugcagacacuggagcucgacaugaccaaccugaauauguguaugccucuuuccugcacaaagaacaauucucaucacuauaucaugguuggcaacgaaaccgggcuggagcucacacugaccaauacgagcauuaucaaccauaaauucuguaaucuuuccgaugcgcacaagaaaaaccuguacaaucaugcucucaugucuauuaucagcaccuuucaccuguccauuccgaacuucaaucaguaugaggccaugagcugcgacuuuaacggaggcaagaucucugugcaguacaaucugucccacagcuaugccgucgaugcugccaaccauuguggcacaauugcuaacggggugcuccaaaccuucaugcggauggccuggggaggcucuuacaucgcgcuggacuccgggaagggaaauugggauugcaucaugacaagcuaccaguaucuuauuauccagaacaccacgugggaagaccacugucaguuuucucgccccuccccuauuggcuaccuggggcuccugagccaaagaacacgggauaucuauauuucccgcagacuucugggaaccuucacauggacccucucugacagcgagggcaaugaaacccccggcggguacugccugacacgguggaugcugaucgaggccgagcucaaauguuuuggaaacacggcuguugccaagugcaaugaaaaacaugaugaggaguucugcgacaugcugcgccuuuuugauuucuguaagcaggcuaucagacggcugaaaaccccugcccaggcgaacauucagcucaucaauaaggccgugaacgcucugauuaaugaccaacuuaucaugaagaaccaucugcgcgauauuaugggcauccccuauugcaauuacuccaaauauugguaccucaaccacacagucaccgggaagacaagccugccuagauguuggcuggugucuaauggauccuaccucaacgaaacccacuucagcgacgacaucgaacagcaggccgauaauaugauuacggagcugcuucaaaaagaguauauggaccggcagggcaagacaccgcuggggcucguggaucuguuugucuucucuaccagcuuuuaccugaucuccauuuuccuucaccucguuaaaauccccacccaucgccacgugauuggaaagccuugccccaaaccucauagacugaaccacaugggcaucuguucuugcggccuguauaagcaccccggggugccggucaaguggaaacggugaggacuaguuauaagacugacuagcccgaugggccucccaacgggcccuccuccccuccuugcaccgagauuaaucaaaggcucuuuucagagccaccaaaaaaaaaaaaaaaaaaaaaaaaaaaaaaaaaaaaaaaaaaaaaaaaaaaaaaaaaaaaaaaaaaaaaaaaaaaaaaaaaaaaaaaaaaaaaaaaaaaaa

SEQ ID NO: 31290 - RNA, 1686 nt, Artificial Sequence
  mRNA product Design i-3 (hSL-A100) comprising derived and/or modified sequence from LASV(Nig08-A19;Clade III)__ADU56618__GPCmut6 (opt5)
aggagaaagcuuaccaugggccagaucgugaccuucuuucaagaggucccccacguuauugaagaggugaugaacaucgugcugauugcccucagcauccuggcuauucuuaaggggcuguacaauaucgccacaugcggacucaucggccuggucacguuccuucugcucuccgggagaucuuguagcaugaccuauaaaggaguguacgaacugcagacacuggagcucaacaugaauacccugaacaugugcaugccucuuuccuguacaaagaauaacucucaucacuauauuaugguuggcaaugaaaccgggcuggagcucacacugaccaacacgagccuucugcaucacaaauuuugcaaucucuccgacgcgcauaagaaaaaccuguacgaucacacccugaugucuaucauuagcacauuccaccucuccaucccgaauuuuaaccaguaugaggcuaugagcugugacuucaauggaggcaagauuaccgugcaguacaaccugucucauuccuaugccaucgaugccgcuaaucacugcggcacagucgccaacggggugcuucaaaccuuuaugcggauggcuuggggaggcagcuacauugcccuggacucugggcgcggaaagugggauuguaucaugacguccuaccaguaucucaucauucagaacacaaccugggaagaccauugccaguucagcagacccucuccuaucggcuaccuggggcuucugucccaacggacacgcgauauuuauaucagcagacggcuccugggaaccuuuaccuggacacuguccgacucugagggcaaugaaacgcccggcggguacugucucacccgcuggaugcugauugaggcggagcuuaaaugcuucggaaacacagccguugcuaaguguaaugaaaaacacgaugaggaauuuugcgacaugcugagacucuucgauuuuugcaagcaggccauccggcgccugaaagcuccugcccagaugagcauccagcuuauuaacaaggcggugaaugcccugaucaacgaccaacucauuaugaagaaucaccugagagauaucaugggcauucccuauuguaacuacuccaaauauugguaccugaaucauaccagcacagggcggaccucucucccucgcugcuggcuggucuccaacggaagcuaccuuaaugagacgcacuucucugacgacaucgaacagcaggcugauaacaugaucacagagaugcugcaaaaggaguaucucgacagacagggcaaaaccccgcuggggcugguggaucuuuucguguuuagcaccuccuucuaccucauuucuaucuuucugcaucuggucaagauucccacacaccggcauaucguuggaaaaccuugucccaagccucaccgccucaaucacaugggcauuugcagcuguggccuguauaaacagcccggggugccggugagauggaagcggugaggacuaguuauaagacugacuagcccgaugggccucccaacgggcccuccuccccuccuugcaccgagauuaaucaaaggcucuuuucagagccaccaaaaaaaaaaaaaaaaaaaaaaaaaaaaaaaaaaaaaaaaaaaaaaaaaaaaaaaaaaaaaaaaaaaaaaaaaaaaaaaaaaaaaaaaaaaaaaaaaaaaa

SEQ ID NO: 31291 - RNA, 1689 nt, Artificial Sequence
  mRNA product Design i-3 (hSL-A100) comprising derived and/or modified sequence from LASV(G1180-SLE-2010;Clade IV)__AIT17168__GPCmut6 (opt5)
aggagaaagcuuaccaugggccagaucgugaccuucuuucaagaggucccccacguuauugaagaggugaugaacaucgugcugauugcccucagcauccuggcuguccuuaaggggcuguacaauuucgccacaugcggacucgugggccugcuuacguuucugcuccugugugggagauccugcaccgcgucucgguauaaaggaguuuacgaacugcagacacucgagcugaacauggaaacccuuaauauguguaugccucugagcugcacaaagaacaauucccaucacuauauuauggugggcaacgagaccgggcucgagcugacacuuaccaauacgucuaucaucaaccauaaauucuguaaucugagcgacgcucacaagaaaaaccucuacgaucaugcccugauguccauuaucucuaccuuucaccugagcauuccgaauuucaaccaguaugaagccauguccugcgacuuuaauggaggcaagaucagcguccaguacaaccucucucacuccuaugcuggcgaugccgcuaaucauugugggacaguggccaacggaguucugcaaaccuucaugcgcauggcguggggcgggagcuacauugcccuugacucuggacacggcuccugggauugcaucaugacaagcuaccaguaucugauuauccagaacaccacgugggaggaccauugucaguuuucuagacccuccccuaucggguaccucggacugcuuagccaacggacacgcgauauuuauaucuccagacggcugcucggcaccuucacauggacccugucugacagcgaaggcaaggauacccccgggggauacugccugacacgcuggaugcucauugaggcugagcugaaauguuuuggcaauacggccguggcuaagugcaacgaaaaacacgacgaggaguucugcgauaugcuuagacuguuugacuucuguaagcaggccauccagcggcucaaagcgccugcccagauguccauucaacugaucaauaaggcugucaacgcccuuaucaaugaucagcugauuaugaagaaccaccuccgcgacaucauggggauucccuauugcaauuacagcaaauauugguaccugaaccauaccacaaccggaaagacaucucugccuaaauguuggcucguguccaauggcagcuaccugaacgaaacccacuucucugacgauaucgaacagcaagcugacaauaugauuacggagaugcuucagaaggaguauauggaaagacaggggaaaacaccgcugggacucguggaucuguuugucuucagcaccuccuuuuaccugaucucuaucuuccuucaucucguuaagauucccacccaccggcauaucgugggcaaaagcugcccuaagccccaccgccugaaccacaugggcauuuguuccugcgggcuguauaagcagccuggagugcccgucaaauggaagagaugaggacuaguuauaagacugacuagcccgaugggccucccaacgggcccuccuccccuccuugcaccgagauuaaucaaaggcucuuuucagagccaccaaaaaaaaaaaaaaaaaaaaaaaaaaaaaaaaaaaaaaaaaaaaaaaaaaaaaaaaaaaaaaaaaaaaaaaaaaaaaaaaaaaaaaaaaaaaaaaaaaaaa

SEQ ID NO: 31292 - RNA, 1689 nt, Artificial Sequence
  mRNA product Design i-3 (hSL-A100) comprising derived and/or modified sequence from LASV(G1442-SLE-2011;Clade IV)__AIT17180__GPCmut6 (opt5)
aggagaaagcuuaccaugggccagaucgugaccuucuuucaagaggucccccacguuauugaagaggugaugaacaucgugcugauugcccucagcauccuggcuguccuuaaggggcuguacaauguggccacaugcggacucauuggccugguuacguuccuucugcucugugggagauccugcaccacaacccuguauaaaggaguguacgaacugcagacacucgagcugaacauggaaacccuuaauauguguaugccucugucuugcacaaagaacaauagccaucacuauauccgggucggcaacgagaccgggcucgagcugacgcuuaccaauacauccaucauuaaccauaaauuuuguaaucugucugacgcgcacaagaaaaaccucuacgaucaugcucugaugagcaucauuuccaccuuccaccugucuaucccgaauuuuaaccaguaugaagccaugagcugcgacuucaauggaggcaagauuuccgugcaguacaaccucagccacucuuaugccggcgaugcugccaaucauugugggacaguugcuaacggagugcugcaaaccuuuaugcgcauggccuggggcggguccuacaucgcgcuugacagcggaagaggcaacugggauugcauuaugacgucuuaccaguaucugaucauccagaauacaaccugggacgaucacugucaguucucccggcccagcccuauuggguaccucggacugcuuucucaacgcacaagagacgucuauaucucccggcgccugcucggcaccuuuaccuggacacugagcgauuccgagggcaaggacacgcccgggggauacugccugaccagauggaugcucauugaagccgagcugaaauguuucggcaacacagcuguggccaagugcaaugagaaacaugaugaagaguuuugcgacaugcuucggcuguucgauuuuuguaagcaggcuauccagcgccucaaagccccugcgcagaugucuauucaacugaucaacaaggccgugaaugcucuuaucaacgaccagcugauuaugaagaaucaccucagagacaucauggggauucccuauugcaacuacagcaaauauugguaccugaauaacaccgccacaggaaagaccucccugccuaaauguuggcucaucagcaauggcucuuaccugaacgaaacgcacuucuccgaugacauugagcaggaagcugauaauaugaucacagagaugcuucaaaaggaguauauggaacggcaggggaaaaccccgcugggacucgucgaccuguucguuuuuagcaccucuuucuaccugaucagcauuuuucuucaucucgugaagauccccacacaccgccauauugugggcaaauccugcccuaagccccacagacugaaccauaugggcaucuguucuugcgggcuguauaagcagccuggaguccccgugcgguggaaacgcugaggacuaguuauaagacugacuagcccgaugggccucccaacgggcccuccuccccuccuugcaccgagauuaaucaaaggcucuuuucagagccaccaaaaaaaaaaaaaaaaaaaaaaaaaaaaaaaaaaaaaaaaaaaaaaaaaaaaaaaaaaaaaaaaaaaaaaaaaaaaaaaaaaaaaaaaaaaaaaaaaaaaa

SEQ ID NO: 31293 - RNA, 1689 nt, Artificial Sequence
  mRNA product Design i-3 (hSL-A100) comprising derived and/or modified sequence from LASV(G3010-SLE-2013;Clade IV)__AIT17344__GPCmut6 (opt5)
aggagaaagcuuaccaugggccagaucgugaccuucuuucaagaggucccccacguuauugaagaggugaugaacaucgugcugauugcccucagcauccuggcuguccuuaaggggcuguacaauuucgccacaugcggacucgugggccugguuacguuucuucugcucugugggagauccugcaccacaucucuguauaaaggaguguacgaacugcagacccucgagcugaacauggaaacacuuaauauguguaugccucugagcugcaccaagaacaauucccaucacuauauuauggucggcaacgagacagggcucgagcugacccuuacgaauaccucuaucaucaaccauaaauucuguaaucugagcgacgcgcacaagaaaaaccucuacaaucaugcucugauguccauuaucucuacauuucaccugagcauuccgaacuucaaucaguaugaagccauguccugcgauuuuaacggaggcaagaucagcgugcaguacaaucucucucacuccuaugccggcgacgcugccagccauugugggaccguugcuaacggagugcugcaaacauucaugcggauggccuggggcgggucuuacauugcgcuugauuccggauacggcaagugggacugcaucaugaccagcuaucaguaccugauuauccagaacacgacaugggaggaucacugucaguuuucucgccccuccccuaucggguaucucggacugcuuagccaaagaacccgggacauuuacaucucccgcagacugcucggcacauucaccuggacccugucugauagcgaaggcaaagacacacccgggggauauugccugacgcgguggaugcucauugaggccgagcugaaguguuuuggcaauaccgcugucgccaaaugcaacgaaaagcaugaugaggaguucugcgacaugcuucgccuguuugauuucuguaaacaggcuauccagagacucaagaccccugcccagauguccauucaacugaucaauaaggcggugaacgcccuuaucaaugaccagcugauuaugaaaaaccaccuccgggauaucauggggauucccuacugcaauuauagcaaguacugguaccugaaccacacaacaaccggaaaaacgucucugccuaaguguuggcucguguccaauggcagcuaucugaacgaaacacauuucucugacgacaucgaacagcaagcugauaauaugauuaccgagaugcuucagaaagaguacauggaacgccaggggaagaccccgcugggacucgucgaccuguuuguuuucagcacauccuuuuaucugaucucuaucuuccuucaccucgugaaaauucccacccauagacacaucgugggcaagagcugcccuaagccccaucggcugaaccacaugggcauuuguuccugcgggcuguacaaacagccuggaguccccgugcgcuggaagagaugaggacuaguuauaagacugacuagcccgaugggccucccaacgggcccuccuccccuccuugcaccgagauuaaucaaaggcucuuuucagagccaccaaaaaaaaaaaaaaaaaaaaaaaaaaaaaaaaaaaaaaaaaaaaaaaaaaaaaaaaaaaaaaaaaaaaaaaaaaaaaaaaaaaaaaaaaaaaaaaaaaaaa

SEQ ID NO: 31294 - RNA, 1689 nt, Artificial Sequence
  mRNA product Design i-3 (hSL-A100) comprising derived and/or modified sequence from LASV(G502-SLE-2009;Clade IV)__AIT17126__GPCmut6 (opt5)
aggagaaagcuuaccaugggccagaucgugaccuucuuucaagaggucccccacguuauugaagaggugaugaacaucgugcugauugcccucagcauccuggcuguccuuaaggggcuguacaauuucgccacaugcggacucgugggccugcuuacguuucugcuccugugugggagauccugcaccacaggacuguauaaaggcguuuacgaacuccagacccuggagcuuaacauggaaacacugaauauguguaugccucucucuugcaccaagaacaauagccaucacuauauuaugguggggaacgagacaggacuggagcuuacccugacgaauaccuccaucaucaaccauaaauucuguaaucucucugacgcgcacaagaaaaaccuguacgaucaugcucugaugagcauuaucuccacauuucaccucucuauuccgaauuucaaccaguaugaagccaugagcugcgacuuuaauggcggcaagaucuccguccaguacaaccugagccacucuuaugccggggaugcugccgaccauuguggaaccguggcuaauggcguucuucaaacauucaugcggauggccuggggaggguccuacauugcgcuggauagcggccgcgggagaugggacugcaucaugaccucuuaccaguaucucauuauccagaacacgacaugggaggaucacugucaguuuucccggcccagcccuaucggauaccugggccuucugucucaacgcaccagagacauuuauaucucccggcgccuccugggcacauucaccuggacccugagcgauuccgaagggaaggacacacccggaggcuacugccucacgagauggaugcugauugaggccgagcuuaaauguuuugggaacaccgcuguggccaagugcaaugaaaaacaugaugaggaguucugcgacaugcugcggcucuuugauuucuguaagcaggcuauccagcgccugaaagccccugcgcagaugucuauucaacuuaucaacaaggccgucaaugcucugaucaacgaccagcucgugaugaagaaucaccugagagacauuaugggaauccccuauugcaacuacagccgguauugguaccugaaucacacaaccacaggccgcaccucccucccuaaauguuggcuggugagcaacgggucuuaccuuaaugaaacgcauuucuccgaugacauugaacagcaagccgauaacaugaucacagagaugcugcagaaggaguauauggaaagacagggaaaaaccccgcucggccuggucgaccuguuuguuuucagcaccucuuuuuaccuuauuagcaucuuccuccaccuggugaagauccccacacaucggcacauugugggcaaauccugcccuaagccccaucgccugaaucacauggggaucuguucuugcggacucuauaaacagccuggcguccccgugaaguggaagagaugaggacuaguuauaagacugacuagcccgaugggccucccaacgggcccuccuccccuccuugcaccgagauuaaucaaaggcucuuuucagagccaccaaaaaaaaaaaaaaaaaaaaaaaaaaaaaaaaaaaaaaaaaaaaaaaaaaaaaaaaaaaaaaaaaaaaaaaaaaaaaaaaaaaaaaaaaaaaaaaaaaaaa

SEQ ID NO: 31295 - RNA, 1689 nt, Artificial Sequence
  mRNA product Design i-3 (hSL-A100) comprising derived and/or modified sequence from LASV(G733-SLE-2010;Clade IV)__AIT17154__GPCmut6 (opt5)
aggagaaagcuuaccaugggccagaucgugaccuucuuucaagaggucccccacguuauugaagaggugaugaacaucgugcugauugcccucagcauccuggcuguccuuaaggggcuguacaauuucgccacaugcggaauugugggccucguuuccuuucugcuucugugugggagaucuugcacgaccagccucuauaaaggaguguacgaacugcagacacuggagcucaacauggaaacccugaauauguguaugccucuuuccugcacaaagaacaauucucaucacuauaucauggucggcaacgagaccgggcuggagcucacacugaccaauacgagcaucauuaaccauaaauucuguaaucuuuccgacgcgcacaagaaaaaccuguacgaucaugcucucaugucuaucauuagcaccuuucaccuguccaucccgaauuucaaccaguaugaagccaugagcugcgacuuuaauggaggcaagauuucugugcaguacaaccugucccacagcuaugccggcgaugcugccaaucauugugggacaaucgcuaacggaguucuccaaaccuucaugcggauggccuggggcgggucuuacauugcgcuggacuccggacgcgauagaugggacugcaucaugacaagcuaccaguaucuuaucauucagaacaccacgugggaggaucacugucaguuuucucggcccuccccuaucggcuaccuggggcuccugagccaacgcacaagagacauuuauaucucccggcgccuucugggaaccuucacauggacccucucugauagcgaaggcaaggacacccccggcggguacugccugacaagauggaugcugauugaggccgagcucaaauguuuuggaaauacggcuguggccaagugcaacgaaaaacaugaugaggaguucugcgacaugcugcggcuuuuugauuucuguaagcaggcuauccagcgccugaaagccccugcgcagauguccauccaacucauuaauaaggccgucaacgcucugaucaaugaccagcuuauuaugaagaaccaccugagagacaucaugggcauucccuauugcaauuacagcaaauauugguaccucaaccacaccacaaccgggaagacaucucugccuaaauguuggcugguguccaauggaagcuaccucaacgaaacccauuucucugaugacaucgaacagcaagccgauaauaugaucacggagaugcugcagaaggaguauauggaacggcagggcaaaacaccgcuugggcugguggaccucuuugucuucagcaccuccuuuuaccugauuucuaucuuccugcaccuuguuaagauucccacccaucgccacguggugggaaaaagcugcccuaagccccauagacucaaccacaugggcaucuguuccugcggccuguaugggcagccuggaguccccgugaaguggaaacggugaggacuaguuauaagacugacuagcccgaugggccucccaacgggcccuccuccccuccuugcaccgagauuaaucaaaggcucuuuucagagccaccaaaaaaaaaaaaaaaaaaaaaaaaaaaaaaaaaaaaaaaaaaaaaaaaaaaaaaaaaaaaaaaaaaaaaaaaaaaaaaaaaaaaaaaaaaaaaaaaaaaaa

SEQ ID NO: 31296 - RNA, 1689 nt, Artificial Sequence
  mRNA product Design i-3 (hSL-A100) comprising derived and/or modified sequence from MOPV/LASV reassortant(IGS-1;Clade IV)__AFY05576__GPCmut6 (opt5)
aggagaaagcuuaccaugggccagaucgugaccuucuuucaagaggucccccacguuauugaagaggugaugaacaucgugcugauugcccucagcguccuggcugugcuuaaggggcuguacaauuucgccacaugcggacucguuggccuggugacguuucuucugcucugugggagauccugcaccacaucucuguauaaaggagucuacgaacugcagacccucgagcugaacauggaaacacuuaauauguguaugccucugagcugcaccaagaacaauucccaucacuauaucauggugggcaacgagacagggcucgagcugacccuuacgaauaccucuauuaucaaccauaaauucuguaaucugagcgacgcgcacaagaaaaaccucuacgaucaugcucugauguccaucauuucuacauuucaccugagcaucccgaauuucaaccaguaugaagccauguccugcgacuuuaauggaggcaagauuagcguucaguacaaccucucucacuccuaugccggcgaugcugccaaucauugugggaccguggcuaacggaguccugcaaacauucaugcggauggccuggggcgggagcuacaucgcgcuugacucuggacgcggcaacugggauugcauuaugaccuccuaccaguaucugaucauucagaauacgacaugggaggaccacugucaguuuagcagacccucuccuaucggguaccucggacugcuuucccaacggacccgcgauaucuauauuagcagacggcugcucggcacauucaccuggacccuguccgacucugaaggcgaggauacacccgggggauacugccugacgcgcuggaugcucaucgaggccgaacugaaguguuuuggcaacaccgcuguggccaaaugcaaugagaagcaugacgaagaguucugcgauaugcuuagacuguuugacuucuguaaacaggcuauucagcggcucaaggccccugcgcagaugagcauccaacugauuaacaaagccgugaaugcucuuaucaacgaucagcugaucaugaagaaucaccuccgcgacauuauggggauccccuauugcaacuacuccaaguauugguaccugaaucacacaaccacaggaagaaccagccugccuaaauguuggcucgucucuaacggcuccuaccugaaugaaacgcauuucagcgacgauauugagcagcaagccgacaacaugaucacagagaugcuucagaaggaauauauggagcggcaggggaaaaccccgcugggacucguugaucuguuuguguucucuaccagcuuuuaccugauuuccaucuuccuucaccucgugaagauccccacacaucgccacauugucggcaaaucuugcccuaagccccauagacugaaucacaugggcaucuguagcugcgggcuguauaaacagccuggagugcccguuaaguggaagcggugaggacuaguuauaagacugacuagcccgaugggccucccaacgggcccuccuccccuccuugcaccgagauuaaucaaaggcucuuuucagagccaccaaaaaaaaaaaaaaaaaaaaaaaaaaaaaaaaaaaaaaaaaaaaaaaaaaaaaaaaaaaaaaaaaaaaaaaaaaaaaaaaaaaaaaaaaaaaaaaaaaaaa

SEQ ID NO: 31297 - RNA, 1689 nt, Artificial Sequence
  mRNA product Design i-3 (hSL-A100) comprising derived and/or modified sequence from LASV(LM765-SLE-2012;Clade IV)__AIT17814__GPCmut6 (opt5)
aggagaaagcuuaccaugggccagaucgugaccuucuuucaagaggucccccacguuauugaagaggugaugaacaucgugcugauugcccucagcauccuggcuguccuuaaggggcuguacaauuucgccacaugcggacucgugggccugguuacguuucuucugcucugugggagauccugcaccacaucucuguauaaaggaguguacgaacugcagacccucgagcugaacauggaaacacuuaauauguguaugccucugagcugcaccaagaacaauucccaucacuauauuauggucggcaacgagacagggcucgagcugacccuuacgaauaccucuaucaucgaccauaaauucuguaaccugagcgaugcgcaccggaagaaucucuacgaccaugcucugauguccauuaucucuacauuucaccugagcauuccgaacuucaaucaguaugaagccauguccugcgauuuuaacggaggcaaaaucagcgugcaguacaaucucucucacuccuaugccaaggacgcugccgaucauuguggcaccguugcuaacggggugcugcaaacauucaugcgcauggccuggggaggcagcuacauugcgcuugacucugggagaggacggugggauugcaucaugaccuccuaccaguaucugauuauccagaauacgacaugggaggaccacugucaguuuagccgccccucuccuaucggcuaccucgggcugcuuucccaaagaacccgggauauuuauaucagccgcagacugcucggaacauucaccuggacccuguccgacucugaaggcaaggauacacccggcggguacugccugacgcgguggaugcucauugaggccgagcugaaauguuuuggaaacaccgcugucgccaagugcaacgaaaaacaugacgaggaguucugcgauaugcuucgccuguuugacuucuguaagcaggcuauccagagacucaaagccccugcgcagaugagcauucaacugaucaauaaggccgugaacgcucuuaucaaugaccagcugauuaugaagaaccaccuccgggauaucaugggcauucccuauugcaauuacuccaaauauugguaccugaaccacacaaccacagggaagaccagccugccuaaauguuggcucgugucuaauggauccuaccugaacgaaacgcauuucagcgacgauaucgaacagcaagccgacaauaugauuacagagaugcuucagaaggaguauauggaacgccagggcaaaaccccgcuggggcucgucgaucuguuuguuuucucuaccagcuuuuaccugaucuccaucuuccuucaccucgugaagauucccacacauagacacaucgugggaaaaccuugccccaagccucaucggcugaaccacaugggcauuuguucuugcggccuguauaagcagcccggggucccggugaaauggaagcgcugaggacuaguuauaagacugacuagcccgaugggccucccaacgggcccuccuccccuccuugcaccgagauuaaucaaaggcucuuuucagagccaccaaaaaaaaaaaaaaaaaaaaaaaaaaaaaaaaaaaaaaaaaaaaaaaaaaaaaaaaaaaaaaaaaaaaaaaaaaaaaaaaaaaaaaaaaaaaaaaaaaaaa

SEQ ID NO: 31298 - RNA, 1689 nt, Artificial Sequence
  mRNA product Design i-3 (hSL-A100) comprising derived and/or modified sequence from LASV(LM776-SLE-2012;Clade IV)__AIT17824__GPCmut6 (opt5)
aggagaaagcuuaccaugggccagaucgugaccuucuuucaagaggucccccacguuauugaagaggugaugaacaucgugcugauugcccucagcauccuggcuguccuuaaggggcuguacaauuucgccacaugcggacucgugggccugguuacguuucuucugcucugugggagauccugcaccacaucuguguauaaaggagucuacgaacugcagacccuggagcucaacauggaaacacugaauauguguaugccucuuagcugcaccaagaacaauucccaucacuauauuauggugggcaacgagacagggcuggagcucacccugacgaauaccucuaucaucaaccauaaauucuguaaucuuagcgacgcgcacaagaaaaaccuguacgaucaugcucucauguccauuaucucuacauuucaccugagcauuccgaauuucaaccaguaugaagccauguccugcgacuuuaauggaggcaagaucagcguucaguacaaccugucucacuccuaugccggcgaugcugccaaucauugugggaccguggcuaacggaguccuccaaacauucaugcggauggccuggggcgggagcuacauugcgcuggacucuggacacggcaagugggauugcaucaugaccuccuaccaguaucuuauuauccagaacacgacaugggaggaccauugucaguuuagccgccccucuccuaucggguaccugggacuccugucccaaagaacccgggauauuuauaucagccgcagacuucugggcacauucaccuggacccucuccgacucugaaggcaaagauacacccgggggauacugccugacgcgguggaugcugauugaggccgagcucaaguguuuuggcaauaccgcuguggccaaaugcaacgaaaagcacgacgaggaguucugcgauaugcugcgccuuuuugacuucuguaaacaggcuauccagagacugaaggccccugcgcagaugagcauucaacucaucaauaaggccgugaacgcucugaucaaugaucagcuuauuaugaaaaaccaucugcgggacaucauggggauucccuauugcaauuacuccaaguauugguaccucaaccacacaaccacaggaaaaaccagccugccuaaguguuggcuggucucuaauggcuccuaccucaacgaaacgcacuucagcgacgauaucgaacagcaagccgacaauaugauuacagagaugcugcagaaagaguauauggaacgccaggggaagaccccgcuuggacugguugaucucuuuguguucucuaccagcuuuuaccugaucuccaucuuccugcaucuugugaaaauucccacacacagacauaucgucggcaagucuugcccuaagccccaccggcucaaccacaugggcauuuguagcugcgggcuguauaaacagccuggagugcccguucgcuggaagagaugaggacuaguuauaagacugacuagcccgaugggccucccaacgggcccuccuccccuccuugcaccgagauuaaucaaaggcucuuuucagagccaccaaaaaaaaaaaaaaaaaaaaaaaaaaaaaaaaaaaaaaaaaaaaaaaaaaaaaaaaaaaaaaaaaaaaaaaaaaaaaaaaaaaaaaaaaaaaaaaaaaaaa

SEQ ID NO: 31299 - RNA, 1689 nt, Artificial Sequence
  mRNA product Design i-3 (hSL-A100) comprising derived and/or modified sequence from LASV(Mad39;Clade IV)__ANH09722__GPCmut6 (opt5)
aggagaaagcuuaccaugggccagaucgugaccuucuuucaagaggucccccacguuauugaagaggugaugaacaucgugcugauugcccucagcauccuggcuguccuuaaggggcuguacaauguggccacaugcggacucauuggccugguuacguuccuucugcucugugggagauccugcaccacaacccuguauaaaggaguguacgaacugcaggcgcucgagcugaacauggaaacacuuaauauguguaugccucugucuugcaccaagaacaauagccaucacuauauccgggucggcaacgagacagggcucgagcugacccuuacgaauaccucccugaucaaccauaaauuuuguaaucucucugacgcucacaagaaaaaccuguacgaucaugcccugaugagcauuaucuccacauuccaccucucuauuccgaauuuuaaccaguaugaagccaugagcugcgacuucaaugauggaaagaucuccgugcaguacaaccugagccacaccuaugcuggcgacacagccaaucauuguggcaccguugcuaacggggugcuucaaacguuuaugcgcauggccuggggaggcucuuacauugcgcuggauuccgggagaggaggcugggacugcaucaugacaagcuaccaguaucucauuauccagaacaccacaugggaggaucacugucaguucucucggcccuccccuaucggguaccugggacuucugagccaacgcaccagagacauuuauaucucucggcgccuccugggcaccuuuacauggacgcuguccgauagcgaaggcaaggacacccccgggggauacugccucacaagauggaugcugauugaggccgagcuuaaauguuucggcaauaccgcugucgccaagugcaacgaaaaacaugaugaggaauuuugcgacaugcugcgccucuucgauuuuuguaagcaggcuauccagcggcugaaagccccugcgcagauguccauucaacuuaucaauaaggccgugaacgcucugaucaaugaccagcucauuaugaagaaccaccugagagacaucauggggauucccuauugcaauuacucuaaauauugguaccugaaccacacagugaccggaaagacgagccucccuaaauguuggcuggucuccaauggcagcuaccuuaacgagacacauuucucugaugacaucgaacagcaagccgauaauaugauuaccgagaugcugcagaaggaguauauggaacggcaggggaaaaccccgcucggacugguugaccuguucguguuuuccaccagcuucuaccuuaucucuaucuuucuccaccuggugaagauucccacacaucgccacgucgugggcaaaccuugccccaagccucauagacugaaccacaugggcaucuguagcugcggguucuauaagcagcccggaguuccggugcgguggaaacgcugaggacuaguuauaagacugacuagcccgaugggccucccaacgggcccuccuccccuccuugcaccgagauuaaucaaaggcucuuuucagagccaccaaaaaaaaaaaaaaaaaaaaaaaaaaaaaaaaaaaaaaaaaaaaaaaaaaaaaaaaaaaaaaaaaaaaaaaaaaaaaaaaaaaaaaaaaaaaaaaaaaaaa

SEQ ID NO: 31300 - RNA, 1689 nt, Artificial Sequence
  mRNA product Design i-3 (hSL-A100) comprising derived and/or modified sequence from LASV(Z0947-SLE-2011;Clade IV)__AIT17840__GPCmut6 (opt5)
aggagaaagcuuaccaugggccagaucgugaccuucuuucaagaggucccccacguuauugaagaggugaugaacaucgugcugauugcccucagcauccuggcuguccuuaaggggcuguacaauuucgccacaugcggacucgugggccugguuacguuucuucugcucugugggagauccugcaccauuucucuguauaaaggaguguacgaacugcagacacucgagcugaacauggaaacccuuaauauguguaugccucugagcugcacaaagaacaauucccaucacuauaucauggucggcaacgagaccgggcucgagcugacacuuaccaauacgucuaucauuaaccauaaauucuguaaucugagcgacgcgcacaagaaaaaccucuacgaucaugcucugauguccaucauuucuaccuuucaccugagcaucccgaauuucaaccaguaugaagccauguccugcgacuuuaauggaggcaagauuagcgugcaguacaaccucucucacuccuaugccggcgaugcugccaaucauugugggacaguugcuaacggagugcugcaaaccuucaugcggauggccuggggcgggagcuacaucgcgcuugacucuggacgcgauagaugggacugcauuaugacauccuaccaguaucugaucauccagaacaccacgugggaggaucacugucaguuuagccggcccucuccuauuggcuaccucgggcugcuuucccaacgcacaagagacaucuauauuagccggcgccugcucggaaccuucacauggacccuguccgauucugaaggcaaggacacccccggcggguacugccugacaagauggaugcucaucgaggccgagcugaaauguuuuggaaauacggcugucgccaagugcaacgaaaaacaugaugaggaguucugcgacaugcuucggcuguuugauuucuguaagcaggcuauucagcgccucaaagccccugcgcagaugagcauccaacugaucaauaaggccgugaacgcucuuauuaaugaccagcugaucaugaagaaccaccucagagacauuaugggcauccccuauugcaauuacuccaaauauugguaccugaaccacaccacaaccgggaagacaagccugccuaaauguuggcucgugucuaauggauccuaccugaacgaaacccauuucagcgaugacauugaacagcaagccgauaauaugaucacggagaugcuucagaaggaguauauggaacggcagggcaaaacaccgcuggggcucgucgaccuguuuguuuucucuaccagcuuuuaccugaucuccauuuuccuucaccucgugaagauccccacccaucgccacauugugggaaaaccuugccccaagccucauagacugaaccacaugggcaucuguucuugcggccuguauaagcagcccggggucccggugaaauggaagcggugaggacuaguuauaagacugacuagcccgaugggccucccaacgggcccuccuccccuccuugcaccgagauuaaucaaaggcucuuuucagagccaccaaaaaaaaaaaaaaaaaaaaaaaaaaaaaaaaaaaaaaaaaaaaaaaaaaaaaaaaaaaaaaaaaaaaaaaaaaaaaaaaaaaaaaaaaaaaaaaaaaaaa

SEQ ID NO: 31301 - RNA, 1665 nt, Artificial Sequence
  mRNA product Design i-3 (A100) comprising derived and/or modified sequence from LASV(Josiah;Clade IV)__NP_694870__GPCmut6 (opt1)
aggagaaagcuuaccaugggccagaucgugaccuucuuccaggaggucccccacgugaucgaggaggugaugaacaucguccugaucgcccucagcgugcuggccgugcugaaggggcucuacaacuucgcgaccugcggccuggucgggcuggugacguuccuccugcugugcggccgcuccugcaccaccagccucuacaaggggguguacgagcugcagacccuggagcucaacauggagacgcugaacaugugcaugccgcuguccugcaccaagaacaacagccaccacuacaucauggucggcaacgagaccggccucgagcugacgcugaccaacaccuccaucaucaaccacaaguucugcaaccucagcgacgcccacaagaagaaccuguacgaccacgcccugauguccaucaucagcaccuuccaccucuccauccccaacuucaaccaguacgaggccaugagcugcgacuucaacgggggcaagaucuccgugcaguacaaccugagccacuccuacgccggggacgcggccaaccacugcggcacgguggccaacgggguccugcagaccuucaugcggauggccuggggcggcagcuacaucgcgcucgacuccgggcgcggcaacugggacugcaucaugaccagcuaccaguaccugaucauccagaacaccacgugggaggaccacugccaguucucccggcccagccccaucggguaccugggccuccugucccagcgcacccgggacaucuacaucagccgccggcugcucggcaccuucaccuggacgcugagcgacuccgaggggaaggacaccccgggcggguacugccugacccgcuggaugcucaucgaggccgagcugaagugcuucggcaacaccgccguggccaagugcaacgagaagcacgacgaggaguucugcgacaugcugcggcuguucgacuucugcaagcaggccauccagcgccugaaggcgcccgcccagaugagcauccagcugaucaacaaggccgugaacgcccucaucaacgaccagcugaucaugaagaaccaccuccgggacaucauggggauccccuacugcaacuacuccaaguacugguaccucaaccacacgaccaccggccgcaccagccugcccaagugcuggcuggucuccaacggcagcuaccucaacgagacgcacuucuccgacgacaucgagcagcaggccgacaacaugaucaccgagaugcugcagaaggaguacauggagcggcaggggaagacgccccugggccucguggaccuguucguguucagcaccuccuucuaccugaucagcaucuuccugcaccucgucaagaucccgacccaccgccacaucguggggaaguccugccccaagccccaccggcugaaccacaugggcaucugcagcugcgggcuguacaagcagcccggcgugccggucaaguggaagcgcugaggacuaguuauaagacugacuagcccgaugggccucccaacgggcccuccuccccuccuugcaccgagauuaauaaaaaaaaaaaaaaaaaaaaaaaaaaaaaaaaaaaaaaaaaaaaaaaaaaaaaaaaaaaaaaaaaaaaaaaaaaaaaaaaaaaaaaaaaaaaaaaaaaaa

SEQ ID NO: 31302 - RNA, 1662 nt, Artificial Sequence
  mRNA product Design i-3 (A100) comprising derived and/or modified sequence from LASV(LP;Clade I)__AAF86701__GPCmut6 (opt1)
aggagaaagcuuaccaugggccagaucaucaccuucuuccaggaggugccccacgucaucgaggaggugaugaacaucgugcugaucgcccucagccugcuggccauccucaaggggcuguacaacaucgcgaccugcggcaucaucgggcuggucgccuuccucuuccugugcggcaaguccugcagccugacgcucaagggcggguacgagcugcagacccuggagcucaacauggagacccugaacaugugcaugccgcuguccugcacgaagaacagcucccaccacuacauccgcgugggcaacgagaccgggcucgagcugacccugaccaacacgagcaucaucaaccacaaguucugcaaccucuccgacgcccacaagaagaaccuguacgaccacgcccugaugagcaucaucuccaccuuccaccucagcauccccaacuucaaccaguacgaggccauguccugcgacuucaacggcgggaagaucagcgugcaguacaaccugucccacagcuacgcgggcgacgccgccgagcacugcgggaccgucgccaacggcgugcugcagaccuucaugcggauggcguggggcgggcgcuacaucgcccucgacuccggcaaggggaacugggacugcaucaugacgagcuaccaguaccugaucauccagaacaccaccugggaggaccacugccaguucucccggcccagccccaucggcuaccugggccuccugucccagcgcacccgggacaucuacaucagccgccggcugcucgggacguucaccuggacccugagcgacuccgagggcaacgagacccccgggggcuacugccugacgcgcuggaugcucaucgaggccgagcugaagugcuucgggaacaccgccguggccaagugcaacgagaagcacgacgaggaguucugcgacaugcugcggcuguucgacuucugcaagcaggcgauccgccggcugaaggcccccgcccagaugagcauccagcugaucaacaaggccgucaacgcccucaucaacgaccagcugaucaugaagaaccaccuccgcgacaucaugggcauccccuacugcaacuacuccaaguacugguaccucaaccacaccagcuccggccggaccagccugcccaagugcuggcugaucuccaacgggagcuaccucaacgagacgcaguucuccgacgacaucgagcagcaggcggacaacaugaucaccgagaugcugcagaaggaguacaucgagcgccagggcaagaccccgcuggggcucguggacaucuucaucuucagcaccuccuucuaccugaucagcaucuuccugcaccugaucaagaucccgacgcaccggcacaucgugggcaagcccugccccaagccccaccgccucaaccacaugggggucugcuccugcggccuguacaagcacccgggcgugcccaccaaguggaagcggugaggacuaguuauaagacugacuagcccgaugggccucccaacgggcccuccuccccuccuugcaccgagauuaauaaaaaaaaaaaaaaaaaaaaaaaaaaaaaaaaaaaaaaaaaaaaaaaaaaaaaaaaaaaaaaaaaaaaaaaaaaaaaaaaaaaaaaaaaaaaaaaaaaaa

SEQ ID NO: 31303 - RNA, 1662 nt, Artificial Sequence
  mRNA product Design i-3 (A100) comprising derived and/or modified sequence from LASV(803213;Clade II)__AAF86703__GPCmut6 (opt1)
aggagaaagcuuaccaugggccagaucaucaccuucuuccaggaggugccccacgucaucgaggaggugaugaacaucgugcugaucgcccucagccugcuggccauccucaaggggaucuacaacgucgcgaccugcggccuguucgggcugaucuccuuccuccugcugugcggccgcagcugcuccgugacguacaaggggguguacgagcuccagacccuggagcugaacauggccaaccucaacaugugcaugccgcugagcugcaccaagaacaacucccaccacuacaucauggucggcaacgagacgggccuggagcucacccugaccaacaccagcaucaucaaccacaaguucugcaaccuguccgacgcccacaagaagaaccucuacgaccacgcccugaugagcaucaucuccacguuccaccugagcauccccaacuucaaccaguacgaggccauguccugcgacuucaacgggggcaagaucagcgugcaguacaaccucucccacagcuucgcgguggacgccgccaaccacugcgggaccaucgccaacggcguccugcagaccuucaugcggauggcguggggcggguccuacaucgcccuggacagcggcaaggggaacugggacugcaucaugaccuccuaccaguaccucaucauccagaacacgaccugggaggaccacugccaguucagccgccccucccccaucggcuaccuggggcugcucagccagcggacccgcgacaucuacaucagccggcgccugcugggcaccuucacguggacccucuccgacagcgagggcaacgaggcccccgggggcuacugccugacccgguggaugcugaucgaggccgagcucaagugcuucgggaacaccgccguggcgaagugcaacgagaagcacgacgaggaguucugcgacaugcugcgccuguucgacuucugcaagcaggccaucaagcggcucaagacgcccgcccagauguccauccagcugaucaacaaggccgugaacgcccugaucaacgaccagcucaucaugaagaaccaccuccgcgacaucaugggcauccccuacugcaacuacagccgguacugguaccugaaccacaccgucaccgggaagaccucccugccccgcugcuggcuggugagcaacggcuccuaccugaacgagacgcacuucagcgacgacaucgagcagcaggcggacaacaugaucaccgagaugcuccagaaggaguacauggaccggcagggcaagaccccgcuggggcugguggaccucuucgucuucuccaccagcuucuaccugaucuccaucuuccugcaccuggugaagaucccgacgcaccgccacaucgugggcaagcccugccccaagccccaccggcucaaccacauggggaucugcagcugcggccuguacaagcacccggggguccccgugaaguggaagcgcugaggacuaguuauaagacugacuagcccgaugggccucccaacgggcccuccuccccuccuugcaccgagauuaauaaaaaaaaaaaaaaaaaaaaaaaaaaaaaaaaaaaaaaaaaaaaaaaaaaaaaaaaaaaaaaaaaaaaaaaaaaaaaaaaaaaaaaaaaaaaaaaaaaaa

SEQ ID NO: 31304 - RNA, 1662 nt, Artificial Sequence
  mRNA product Design i-3 (A100) comprising derived and/or modified sequence from LASV(GA391;Clade III)__CAA36645__GPCmut6 (opt1)
aggagaaagcuuaccaugggccagaucgugaccuucuuccaggaggucccccacgugaucgaggaggugaugaacaucguccugaucgcccucagcauccuggccauccugaaggggcucuacaacguggcgaccugcggccugaucgggcuggugacguuccuccugcuguccggccgcagcugcucccucaucuacaaggggaccuacgagcugcagacccuggagcucaacauggagacccugaacaugugcaugccgcugagcugcaccaagaacaacucccaccacuacauccgggucggcaacgagaccggccucgagcugacccugacgaacaccagcauccucaaccacaaguucugcaaccuguccgacgcccacaagcgcaaccuguacgaccacagccucauguccaucaucagcaccuuccaccuguccauccccaacuucaaccaguacgaggccaugagcugcgacuucaacgggggcaagaucaccgugcaguacaaccugucccacagcuucgccguggacgccgcggggcacugcggcacgcucgccaacgggguccugcagaccuucaugcggauggccuggggcggcuccuacaucgcccuggacagcgggcgcggcaacugggacugcaucaugaccuccuaccaguaccucaucauccagaacaccacgugggacgaccacugccaguucagccggcccucccccaucggguaccugggccugcucagccagcgcacccgggacaucuacaucagccgccggcugcugggcaccuucaccuggacgcucuccgacagcgaggggaacgagaccccgggcggguacugccugacccgcuggaugcugaucgaggcggagcucaagugcuucggcaacaccgccguggccaagugcaacgagaagcacgacgaggaguucugcgacaugcugcggcuguucgacuucugcaagcaggccauccgccggcucaagacgcccgcccagauguccauccagcugaucaacaaggcggugaacgcccugaucaacgaccagcucaucaugaagaaccaccuccgcgacaucauggggauccccuacugcaacuacagccgguacugguaccugaaccacaccuccaccggcaagaccagccugccccgcugcuggcugaucuccaacggcagcuaccugaacgagacgaaguucuccgacgacaucgagcagcaggccgacaacaugaucaccgagaugcuccagaaggaguacaucgaccggcaggggaagacgccccugggccuggucgaccuguucguguucagcaccuccuucuaccucaucagcaucuuccugcaccuggugaagaucccgacccaccgccacaucgucgggaagcccugccccaagccccaccggcucaaccacaugggcaucugcuccugcgggcuguacaagcagccgggcgugcccgugcgcuggaagcggugaggacuaguuauaagacugacuagcccgaugggccucccaacgggcccuccuccccuccuugcaccgagauuaauaaaaaaaaaaaaaaaaaaaaaaaaaaaaaaaaaaaaaaaaaaaaaaaaaaaaaaaaaaaaaaaaaaaaaaaaaaaaaaaaaaaaaaaaaaaaaaaaaaaa

SEQ ID NO: 31305 - RNA, 1665 nt, Artificial Sequence
  mRNA product Design i-3 (A100) comprising derived and/or modified sequence from LASV(AV;Clade V)__CCA30314__GPCmut6 (opt1)
aggagaaagcuuaccaugggccagaucgugaccuucuuccaggaggucccccacgugaucgaggaggugaugaacaucguccugaucgcccucagcauccuggccgugcugaaggggcucuacaacaucgcgaccugcggccugaucgggcugaucacguuccuccugcugugcggccgcuccugcagcuccaaccucuacaaggggguguacgagcugcagagccuggaccucaacauggagacccugaacaugugcaugccgcuguccugcaccaagaacaacagccaccacuacauccgggucggcaacgacacgggccucgagcugacccugaccaacaccuccauccucaaccacaaguucugcaaccugagcgacgcccacaagaaggaccuguacgaccacgcccucauguccaucaucagcacguuccaccuguccauccccaacuucaaccaguacgaggccaugagcugcgacuucaacgggggcaagaucuccgugcaguacaaccugagccacuccuacgccaucgacgcggccaaccacugcgggaccguggccaacggcauccuccagaccuucaugcgcauggccuggggcgggagcuacaucgcgcuggacuccggccgggggaacugggacugcaucaugaccagcuaccaguaccugaucauccagaacacgaccugggagaaccacugccaguucucccgccccagccccaucggcuaccucgggcugcugagccagcggacccgcgacaucuacaucucccggcgccuccugggcaccuucacguggacccugagcgacuccgagggcaacgccacccccgggggcuacugccucacccgguggaugcugaucgaggccgagcugaagugcuucgggaacacggccgucgccaagugcaacgagaagcacgacgaggaguucugcgacaugcuccgccuguucgacuucugcaagcaggcgaucagccggcugaagucccccgcccagaugagcauccagcucaucaacaaggccgugaacgcccugaucaacgaccagcugaucaugaagaaccaccuccgcgacaucaugggcauccccuacugcaacuacuccaaguacugguaccugaaccacaccaucaccgggaagaccagccugcccaagugcuggcucguguccaacggcagcuaccugaacgagacgcacuucuccgacgacaucgagcagcaggccgacaacaugaucaccgagaugcugcagaaggaguacauggagcggcagggcaagaccccgcucgggcuggucgaccuguucguguucagcaccuccuucuaccugaucagcaucuuccuccgccuggugaagaucccgacgcaccggcacaucgucggcaagcccugccccaagccccaccgccugaaccacauggggaucugcuccugcggccucuacaagcagccgggggugcccgugcgguggaagcgcugaggacuaguuauaagacugacuagcccgaugggccucccaacgggcccuccuccccuccuugcaccgagauuaauaaaaaaaaaaaaaaaaaaaaaaaaaaaaaaaaaaaaaaaaaaaaaaaaaaaaaaaaaaaaaaaaaaaaaaaaaaaaaaaaaaaaaaaaaaaaaaaaaaaa

SEQ ID NO: 31306 - RNA, 1662 nt, Artificial Sequence
  mRNA product Design i-3 (A100) comprising derived and/or modified sequence from LASV(Togo/2016/7082;Clade VI)__AMR44577__GPCmut6 (opt1)
aggagaaagcuuaccaugggccagaucaucaccuucuuccaggaggugccccacgucaucgaggaggugaugaacaucgugcugaucgcccucagccugcuggccauccucaagggggucuacaacguggcgaccugcggcaucaucgggcuggugacguuccuguuccucugcggccgcuccugcagccugaucuacaagggguccuacgagcugcagacccucgagcugaacauggagacccugaacaugugcaugccgcucagcugcacgaagaacuccagccaccacuacauccgggucggcaacgagaccggccuggagcugacccucaccaacacguccaucaucaaccacaaguucugcaaccugagcgacgcccacaagcgcaaccuguacgaccacgcccucauguccauccugagcaccuuccaccuguccauccccaacuucaaccaguacgaggccaugagcugcgacuucaacgggggcaagaucuccgugcaguacaaccucagccacgccuacgcgguggacgccgccgagcacugcgggaccgucgccaacggcgugcugcagaccuucaugcggauggcguggggcggguccuacaucgcccuggacagcggccgcgggaacugggacugcaucaugacguccuaccaguaccucaucauccagaacaccaccugggaggaccacugccaguucagccggcccucccccaucggcuaccuggggcugcucagccagcgcacccgggacaucuacaucagccgccggcugcugggcacguucaccuggacccucuccgacagcgagggcaacgagacccccgggggcuacugccugacgcgcuggaugcugaucgaggccgagcucaagugcuucgggaacaccgccguggccaagugcaacgagaagcacgacgaggaguucugcgacaugcugcggcuguucgacuucugcaagcaggcgauccagcgccucaagucccccgcccagaugagcauccagcugaucaacaaggccgucaacgcccugaucaacgaccagcucaucaugaagaaccaccuccgggacaugaugggcauccccuacugcaacuacuccaaguacugguaccugaaccacaccagcuccgggcgcaccagccugcccaagugcuggcugguguccaacggcagcuaccugaacgagacgcacuucuccgacgacaucgagcagcaggccgacaacaugaucaccgagaugcuccagaaggaguacaucgaccggcagggcaagaccccgcuggggcugguggaccucuucgucuucagcaccuccuucuaccugaucagcaucuuccugcaccugaucaagaucccgacgcaccgccacaucgugggcaagcccugccccaagccccaccggcucaaccacauggggaucugcuccugcggccuguacaagcagccgggggugcccacccgcuggaagcggugaggacuaguuauaagacugacuagcccgaugggccucccaacgggcccuccuccccuccuugcaccgagauuaauaaaaaaaaaaaaaaaaaaaaaaaaaaaaaaaaaaaaaaaaaaaaaaaaaaaaaaaaaaaaaaaaaaaaaaaaaaaaaaaaaaaaaaaaaaaaaaaaaaaa

SEQ ID NO: 31307 - RNA, 1662 nt, Artificial Sequence
  mRNA product Design i-3 (A100) comprising derived and/or modified sequence from LASV(KAK-428;Clade n.d. (VII))__ANH09740__GPCmut6 (opt1)
aggagaaagcuuaccaugggccagaucgugaccuucuuccaggaggucccccacgugaucgaggaggugaugaacaucguccugaucgcccucagccugcuggccauccucaaggggcuguacaacuucgcgaccugcggcgugaucgggcugaucacguuccuccugcugugcggccgcuccugcagcgccaccuacaaggggcaguacgagcuccagacccuggagcugaacauggagucccucaacaugugcaugccgcugagcugcacgaagaacaacucccaccacuacauccgggccggcaacaacaccggccuggagcucacccugaccaacacgagcaucaucucccacaaguucugcaaccugagcgacgcccacaagaagaaccucuacgaccacacccugauguccaucaucaccaccuuccaccugagcauccccaacuucaaccaguacgaggccauguccugcgacuucaacgggggcaagaucagcauccaguacaaccucucccacagcuacgcgggggacgccgcccagcacugcggcacgguggccaacgggguccugcagaccuucaugcgcauggcguggggcggcuccuaccuggcccucgacagcgggcggcgcggcugggacugcaucaucuccagcuaccaguaccugaucauccagaacaccaccugggacgaccacugccaguucucccggcccagccccaucggguaccugggcuucgugagccagaagacgcgcgacaucuacaucucccggcgccuccugggcaccuucaccuggacccugagcgacuccgaggggcacgacaugccgggcggguacugccucacgcgguggaugcugaucgaggccgaccugaagugcuucggcaacaccgccguggccaagugcaacgagaagcacgacgaggaguucugcgacauguggcgccucuucgacuucugcaagcaggcgauccagcggcugaaggcccccgcccagaugaacauccagcugaucaacaaggccgucaacgcccucaucaacgaccagcugaugaugaagaaccaccuccgcgacaucauggggauccccuacugcaacuacagcaaguucugguaccugaacaacaccaccacgggccggaccucccugccccgcugcuggcugaucagcaacggcuccuaccucaacgagacccacuucagcgacgacaucgagcagcaggcggacaacaugaucaccgagaugcugcagaaggaguacauggaccggcaggggaagacgccccugggccucguggaccuguucguguucuccaccagcuucuaccugaucaccaucuuccuccaccuggucaagaucccgacccaccgccacaucguggggaagcccugccccaagccccaccggcugaaccacaugggcaucugcuccugcgggcuguacaagcagccgggcgugcccguccgcuggaagcggugaggacuaguuauaagacugacuagcccgaugggccucccaacgggcccuccuccccuccuugcaccgagauuaauaaaaaaaaaaaaaaaaaaaaaaaaaaaaaaaaaaaaaaaaaaaaaaaaaaaaaaaaaaaaaaaaaaaaaaaaaaaaaaaaaaaaaaaaaaaaaaaaaaaa

SEQ ID NO: 31308 - RNA, 1662 nt, Artificial Sequence; identical to SEQ ID NO: 31302
  mRNA product Design i-3 (A100) comprising derived and/or modified sequence from LASV(Pinneo-NIG-1969;Clade I)__AIT17836__GPCmut6 (opt1)

SEQ ID NO: 31309 - RNA, 1662 nt, Artificial Sequence
  mRNA product Design i-3 (A100) comprising derived and/or modified sequence from LASV(ISTH0009-NIG-2011;Clade II)__AIT17404__GPCmut6 (opt1)
aggagaaagcuuaccaugggccagaucaucaccuucuuccaggaggugccccacgucaucgaggaggugaugaacaucgugcugaucgcccucagccugcuggccauccucaaggggaucuacaacgucgcgaccugcggccuguucgggcugguguccuuccuccugcugugcggccgcagcugcuccacgaccuacaaggggguguacgagcuccagacccuggagcuggacauggccagccucaacaugugcaugccgcuguccugcacgaagaacaacagccaccacuacaucauggucggcaacgagaccggccuggagcucacccugaccaacacguccaucaucaaccacaaguucugcaaccugagcgacgcccacaagaagaaccucuacgaccacgcccugauguccaucaucagcaccuuccaccuguccauccccaacuucaaccaguacgaggccaugagcugcgacuucaacgggggcaagaucuccgugcaguacaaccucagccacgcguacgccguggacgccgccaaccacugcgggaccaucgcgaacggcguccugcagaccuucaugcggauggccuggggcggguccuacaucgcccuggacagcggcaagggguccugggacugcaucaugacgagcuaccaguaccucaucauccagaacaccaccugggaggaccacugccaguucucccgccccagccccaucggcuaccuggggcugcucagccagcggacccgcgacaucuacaucucccggcgccugcugggcacguucaccuggacccucagcgacuccgagggcaacgagacccccgggggcuacugccugacgcgguggaugcugaucgaggccgagcucaagugcuucgggaacaccgccguggcgaagugcaacgagaagcacgacgaggaguucugcgacaugcugcgccuguucgacuucugcaagcaggccauccggcgccucaagacccccgcccagaugagcauccagcugaucaacaaggccgugaacgcccugaucaacgaccagcucaucaugaagaaccaccuccgggacaucaugggcaucccguacugcaacuacuccaaguacugguaccugaaccacaccgucacggggaagaccagccugccccgcugcuggcugguguccaacggcagcuaccugaacgagacccacuucuccgacgacaucgagcagcaggcggacaacaugaucaccgagcuccugcagaaggaguacauggaccggcagggcaagacgccccuggggcucguggaccuguucgucuucagcaccuccuucuaccugaucagcaucuuccugcaccucaucaagaucccgacccaccgccacaucaccggcaagcccugccccaagccccaccggcugaaccacauggggaucugcuccugcggccuguacaagcacccgggggugcccgugaaguggaagcgcugaggacuaguuauaagacugacuagcccgaugggccucccaacgggcccuccuccccuccuugcaccgagauuaauaaaaaaaaaaaaaaaaaaaaaaaaaaaaaaaaaaaaaaaaaaaaaaaaaaaaaaaaaaaaaaaaaaaaaaaaaaaaaaaaaaaaaaaaaaaaaaaaaaaa

SEQ ID NO: 31310 - RNA, 1662 nt, Artificial Sequence
  mRNA product Design i-3 (A100) comprising derived and/or modified sequence from LASV(ISTH2010-NIG-2012;Clade II)__AIT17482__GPCmut6 (opt1)
aggagaaagcuuaccaugggccagaucaucaccuucuuccaggaggugccccacgucaucgaggaggugaugaacaucgugcugaucgcccucagccugcuggccauccucaaggggaucuacaacgucgcgaccugcggccuguucgggcugguguccuuccuccugcugugcggccgcagcugcuccacgaccuacaaggggguguacgagcuccagacccuggagcuggacauggccagccucaacaugugcaugccgcuguccugcacgaagaacaacagccaccacuacaucauggucggcaacgagaccggccuggagcucacccugaccaacacguccaucaucaaccacaaguucugcaaccugagcgacgcccacaagaagaaccucuacgaccacgcccugauguccaucaucagcaccuuccaccuguccauccccaacuucaaccaguacgaggccaugagcugcgacuucaacgggggcaagaucuccgugcaguacaaccucagccacgcguacgccguggacgccgccaaccacugcgggaccaucgcgaacggcguccugcagaccuucaugcggauggccuggggcggguccuacaucgcccuggacagcggcaagggguccugggacugcaucaugacgagcuaccaguaccucaucauccagaacaucaccugggaggaccacugccaguucucccgccccagccccaucggcuaccuggggcugcucagccagcggacccgcgacaucuacaucucccggcgccugcugggcaccuucacguggacccucagcgacuccgagggcaacgagacccccgggggcuacugccugacccgguggaugcugaucgaggccgagcucaagugcuucgggaacacggccguggcgaagugcaacgagaagcacgacgaggaguucugcgacaugcugcgccuguucgacuucugcaagcaggccauccggcgccucaagacccccgcccagaugagcauccagcugaucaacaaggccgugaacgcccugaucaacgaccagcucaucaugaagaaccaccuccgggacaucaugggcauccccuacugcaacuacuccaaguacugguaccugaaccacaccgucaccgggaagacgagccugccccgcugcuggcugguguccaacggcagcuaccugaacgagacccacuucuccgacgacaucgagcagcaggcggacaacaugaucaccgagcuccugcagaaggaguacaucgaccggcagggcaagaccccgcuggggcucguggaccuguucgucuucagcacguccuucuaccugaucagcaucuuccugcaccucgugaagaucccgacccaccgccacguggucggcaagcccugccccaagccccaccggcugaaccacauggggaucugcuccugcggccuguacaagcacccgggggugcccgugaaguggaagcgcugaggacuaguuauaagacugacuagcccgaugggccucccaacgggcccuccuccccuccuugcaccgagauuaauaaaaaaaaaaaaaaaaaaaaaaaaaaaaaaaaaaaaaaaaaaaaaaaaaaaaaaaaaaaaaaaaaaaaaaaaaaaaaaaaaaaaaaaaaaaaaaaaaaaa

SEQ ID NO: 31311 - RNA, 1662 nt, Artificial Sequence
  mRNA product Design i-3 (A100) comprising derived and/or modified sequence from LASV(Lassa virus/H.sapiens-wt/NGA/2015/ISTH_0543;Clade II)__AVO03639__GPCmut6 (opt1)
aggagaaagcuuaccaugggccagaucaucaccuucuuccaggaggugccccacgucaucgaggaggugaugaacaucgugcugaucgcccucagccugcuggccauccucaaggggaucuacaacgucgcgaccugcggccuguucgggcugguguccuuccuccugcugugcggccgcagcugcuccacgaccuacaaggggguguacgagcuccagacccuggagcuggacauggccaaccucaacaugugcaugccgcugagcugcacgaagaacaacucccaccacuacaucauggucggcaacgagaccggccuggagcucacccugaccaacacgagcaucaucaaccacaaguucugcaaccuguccgacgcccacaagaagaaccucuacgaccacgcccugaugagcaucaucuccaccuuccaccugagcauccccaacuucaaccaguacgaggccauguccugcgacuucaacgggggcaagaucagcgugcaguacaaccucucccacaccuacgcgguggacgccgccaaccacugcgggaccaucgccaacggcguccugcagacguucaugcggauggcguggggcgggagcuacaucgcccuggacuccggcaaggggagcugggacugcaucaugaccuccuaccaguaccucgugauccagaacaccaccugggaggaccacugccaguucagccgccccucccccaucggcuaccuggggcugcucagccagcggacgcgcgacaucuacaucagccggcgccugcugggcaccuucaccuggacccucuccgacagcgagggcaacgagacgcccgggggcuacugccugacccgguggaugcugaucgaggccgagcucaagugcuucgggaacaccgccguggccaagugcaacgagaagcacgacgaggaguucugcgacaugcugcgccuguucgacuucugcaagcaggcgauccggcgccucaagacccccgcccagauguccauccagcugaucaacaaggccgucaacgcccugaucaacgaccagcucaucaugaagaaccaccuccgggacaucaugggcauccccuacugcaacuacagcaaguacugguaccugaaccacacggugaccgggaagaccucccugccccgcugcuggcuggugagcaacggcuccuaccugaacgagacccacuucagcgacgacaucgagcagcaggccgacaacaugaucacggagcuccugcagaaggaguacaucgaccggcagggcaagaccccgcuggggcucgucgaccuguucguguucuccaccagcuucuaccugaucuccaucuuccugcaccucgugaagaucccgacccaccgccacaucacgggcaagcccugccccaagccccaccggcugaaccacauggggaucugcagcugcggccuguacaagcacccggggguccccgugaaguggaagcgcugaggacuaguuauaagacugacuagcccgaugggccucccaacgggcccuccuccccuccuugcaccgagauuaauaaaaaaaaaaaaaaaaaaaaaaaaaaaaaaaaaaaaaaaaaaaaaaaaaaaaaaaaaaaaaaaaaaaaaaaaaaaaaaaaaaaaaaaaaaaaaaaaaaaa

SEQ ID NO: 31312 - RNA, 1662 nt, Artificial Sequence
  mRNA product Design i-3 (A100) comprising derived and/or modified sequence from LASV(Lassa virus/H.sapiens-wt/NGA/2016/ISTH_0009;Clade II)__AVO03571__GPCmut6 (opt1)
aggagaaagcuuaccaugggccagaucaucaccuucuuccaggaggugccccacgucaucgaggaggugaugaacaucgugcugaucgcccucagccugcuggccauccucaaggggaucuacaacgucgcgaccugcggccugcuggggcucguguccuuccugcugcucugcggccgcagcugcuccacgaccuacaaggggguguacgagcugcagacccuggagcucgacauggccagccugaacaugugcaugccgcuguccugcacgaagaacaacagccaccacuacaucauggucggcaacgagaccggccucgagcugacccugaccaacacguccaucaucaaccacaaguucugcaaccucagcgacgcccacaagaagaaccuguacgaccacgcccugauguccaucaucagcaccuuccaccucuccauccccaacuucaaccaguacgaggccaugagcugcgacuucaacgggggccggaucuccgugcaguacaaccugagccacuccuacgcgguggacgccgccaaccacugcgggaccaucgccaacggcguccugcagaccuucaugcgcauggcguggggcgggagcuacaucgcccucgacuccggcaaggggagcugggacugcaucaugacguccuaccaguaccugaucauccagaacaccaccugggaggaccacugccaguucagccggcccagccccaucggcuaccuggggcuccugucccagcgcacccgggacaucuacaucagccgccggcugcucggcacguucaccuggacccuguccgacagcgagggcaacgagacccccgggggcuacugccugacgcgcuggaugcucaucgaggccgagcugaagugcuucgggaacaccgccguggccaagugcaacgagaagcacgacgaggaguucugcgacaugcugcggcuguucgacuucugcaagcaggcgauccgccggcugaagacccccgcccagauguccauccagcugaucaacaaggccgugaacgcccucaucaacgaccagcugaucaugaagaaccaccuccgcgacaucaugggcaucccguacugcaacuacagcaaguacugguaccucaaccacaccgucacggggaagaccucccugccccggugcuggcuggugagcaacggcuccuaccucaacgagacccacuucagcgacgacaucgagcagcaggccgacaacaugaucaccgagcugcugcagaaggaguacaucgaccgccagggcaagacgccccucgggcugguggaccuguucgucuucuccaccagcuucuaccugaucuccaucuuccuccaccuggugaagaucccgacccaccggcacaucaccggcaagcccugccccaagccccaccgccugaaccacauggggaucugcagcugcggccucuacaaccacccgggggugcccgucaaguggaagcggugaggacuaguuauaagacugacuagcccgaugggccucccaacgggcccuccuccccuccuugcaccgagauuaauaaaaaaaaaaaaaaaaaaaaaaaaaaaaaaaaaaaaaaaaaaaaaaaaaaaaaaaaaaaaaaaaaaaaaaaaaaaaaaaaaaaaaaaaaaaaaaaaaaaa

SEQ ID NO: 31313 - RNA, 1662 nt, Artificial Sequence
  mRNA product Design i-3 (A100) comprising derived and/or modified sequence from LASV(Lassa virus/H.sapiens-wt/NGA/2016/ISTH_0017;Clade II)__AVO03567__GPCmut6 (opt1)
aggagaaagcuuaccaugggccagaucaucaccuucuuccaggaggugccccacgucaucgaggaggugaugaacaucgugcugaucgcccucagccugcuggccauccucaaggggaucuacaacgucgcgaccugcggccuguucgggcugguguccuuccuccugcugugcggccgcagcugcuccacgaccuacaaggggguguacgagcuccagacccuggagcuggacauggccagccucaacaugugcaugccgcuguccugcacgaagaacaacagccaccacuacaucauggucggcaacgagaccggccuggagcucacccugaccaacacguccaucaucaaccacaaguucugcaaccugagcgacgcccacaagaagaaccucuacgaccacgcccugauguccaucaucagcaccuuccaccuguccauccccaacuucaaccaguacgaggccaugagcugcgacuucaacgggggcaagaucuccgugcaguacaaccucagccacaccuacgcgaucgacgccgccaaccacugcgggaccaucgccaacggcgugcugcagacguucaugcggauggcguggggcggguccuacaucgcccuggacagcggcaagggguccugggacugcaucaugaccagcuaccaguaccucaucauccagaacaccaccugggaggaccacugccaguucucccgccccagccccaucggcuaccuggggcugcucagccagcggacgcgcgacaucuacaucucccggcgccugcugggcaccuucaccuggacccucagcgacuccgagggcaacgagacgcccgggggcuacugccugacccgguggaugcugaucgaggccgagcucaagugcuucgggaacaccgccgucgccaagugcaacgagaagcacgacgaggaguucugcgacaugcugcgccuguucgacuucugcaagcaggcgauccggcgccucaagacccccgcccagaugagcauccagcugaucaacaaggccgugaacgcccugaucaacgaccagcucaucaugaagaaccaccuccgggacaucaugggcauccccuacugcaacuacuccaaguacugguaccugaaccacacggugaccgggaagaccagccugccccgcugcuggcuggucuccaacggcagcuaccugaacgagacccacuucuccgacgacaucgagcagcaggccgacaacaugaucacggagcuccugcagaaggaguacauggaccggcagggcaagaccccgcuggggcucguggaccuguucguguucagcaccuccuucuaccugaucagcaucuuccugcaccucguccgcaucccgacccaccggcacgugaucggcaagcccugccccaagccccaccgccugaaccacauggggaucugcuccugcggccuguacaagcacccgggggugcccgucaaguggaagcggugaggacuaguuauaagacugacuagcccgaugggccucccaacgggcccuccuccccuccuugcaccgagauuaauaaaaaaaaaaaaaaaaaaaaaaaaaaaaaaaaaaaaaaaaaaaaaaaaaaaaaaaaaaaaaaaaaaaaaaaaaaaaaaaaaaaaaaaaaaaaaaaaaaaa

SEQ ID NO: 31314 - RNA, 1662 nt, Artificial Sequence
  mRNA product Design i-3 (A100) comprising derived and/or modified sequence from LASV(Lassa virus/H.sapiens-wt/NGA/2018/ISTH_0959;Clade II)__AVV65099__GPCmut6 (opt1)
aggagaaagcuuaccaugggccagaucaucaccuucuuccaggaggugccccacgucaucgaggaggugaugaacaucgugcugaucgcccucagccugcuggccauccucaaggggaucuacaacgucgugaccugcggccuguucgggcugguguccuuccuccugcugugcggccgcagcugcuccacgaccuacaagggggucuacgagcuccagacccuggagcuggacauggcgagccucaacaugugcaugccgcuguccugcacgaagaacaacagccaccacuacaucauggugggcaacgagaccggccuggagcucacccugaccaacacguccaucaucaaccacaaguucugcaaccugagcgacgcccacaagaagaaccucuacgaccacgcccugauguccaucaucagcaccuuccaccuguccauccccaacuucaaccaguacgaggccaugagcugcgacuucaacgggggcaagaucuccgugcaguacaaccucagccacgccuacgcgaucgacgccgccaaccacugcgggaccaucgccaacggcguccugcagaccuucaugcggauggcguggggcggguccuacaucgcccuggacagcggcaagggguccugggacugcaucaugacgagcuaccaguaccucaucauccagaacaccaccugggaggaccacugccaguucucccgccccagccccaucggcuaccuggggcugcucagccagcggacccgcgacaucuacaucucccggcgccugcugggcacguucaccuggacccucagcgacuccgagggcaacgagacccccgggggcuacugccugacgcgguggaugcugaucgaggccgagcucaagugcuucgggaacaccgccguggccaagugcaacgagaagcacgacgaggaguucugcgacaugcugcgccuguucgacuucugcaagcaggcgauccggcgccucaagacccccgcccagaugagcauccagcugaucaacaaggccgugaacgcccugaucaacgaccagcucaucaugaagaaccaccuccgggacaucaugggcaucccguacugcaacuacuccaaguacugguaccugaaccacaccgucacggggaagaccagccugccccgcugcuggcugguguccaacggcagcuaccugaacgagacccacuucuccgacgacaucgagcagcaggccgacaacaugaucaccgagcuccugcagaaggaguacaucgaccggcagggcaagacgccccuggggcucguggaccuguucgucuucagcaccuccuucuaccugaucagcaucuuccugcaccucgugaagaucccgacccaccgccacgugaucggcaagcccugccccaagccccaccggcugaaccacauggggaucugcuccugcggccuguacaagcacccggggguccccgugaaguggaagcgcugaggacuaguuauaagacugacuagcccgaugggccucccaacgggcccuccuccccuccuugcaccgagauuaauaaaaaaaaaaaaaaaaaaaaaaaaaaaaaaaaaaaaaaaaaaaaaaaaaaaaaaaaaaaaaaaaaaaaaaaaaaaaaaaaaaaaaaaaaaaaaaaaaaaa

SEQ ID NO: 31315 - RNA, 1662 nt, Artificial Sequence
  mRNA product Design i-3 (A100) comprising derived and/or modified sequence from LASV(LASV003-NIG-2008;Clade II)__AIT17580__GPCmut6 (opt1)
aggagaaagcuuaccaugggccagaucaucaccuucuuccaggaggugccccacgucaucgaggaggugaugaacaucgugcugaucgcccucagccugcuggccauccucaaggggaucuacaacgucgcgaccugcggccuguucgggcugguguccuuccuccugcugugcggccgcagcugcuccacgaccuacaaggggguguacgagcuccagacccuggagcuggacauggccagccucaacaugugcaugccgcuguccugcacgaagaacaacagccaccacuacaucauggucggcaacgagaccggccuggagcucacccugaccaacacguccaucaucaaccacaaguucugcaaccugagcgacgcccacaagaagaaccucuacgaccacgcccugauguccaucaucagcaccuuccaccuguccauccccaacuucaaccaguacgaggccaugagcugcgacuucaacgggggcaagaucuccgugcaguacaaccucagccacaccuacgcgguggacgccgccaaccacugcgggaccaucgccaacggcguccugcagacguucaugcggauggcguggggcggguccuacaucgcccuggacagcggcaagggguccugggacugcaucaugaccagcuaccaguaccucaucauccagaacaccaccugggaggaccacugccaguucucccgccccagccccaucggcuaccuggggcugcucagccagcggacgcgcgacaucuacaucucccggcgccugcugggcaccuucaccuggacccucagcgacuccgagagcaacgagacgccgggcggguacugccugacccgguggaugcugaucgaggccgagcucaagugcuucggcaacaccgccguggccaagugcaacgagaagcacgacgaggaguucugcgacaugcugcgccuguucgacuucugcaagcaggcgauccggcgccucaaggcccccgcccagauguccauccagcugaucaacaaggccgugaacgcccugaucaacgaccagcucaucaugaagaaccaccuccgggacaucauggggauccccuacugcaacuacagcaaguacugguaccugaaccacaccgucacgggccgcaccucccugccccggugcuggcuggugagcaacggguccuaccugaacgagacccacuucagcgacgacaucgagcagcaggcggacaacaugaucaccgagcuccugcagaaggaguacauggaccgccagggcaagacgccccugggccucguggaccuguucgucuucuccaccagcuucuaccugaucuccaucuuccugcaccucgugaagaucccgacccaccggcacgugaucgggaagcccugccccaagccccaccgccugaaccacaugggcaucugcagcugcgggcuguacaagcacccgggcguccccgugaaguggaagcggugaggacuaguuauaagacugacuagcccgaugggccucccaacgggcccuccuccccuccuugcaccgagauuaauaaaaaaaaaaaaaaaaaaaaaaaaaaaaaaaaaaaaaaaaaaaaaaaaaaaaaaaaaaaaaaaaaaaaaaaaaaaaaaaaaaaaaaaaaaaaaaaaaaaa

SEQ ID NO: 31316 - RNA, 1662 nt, Artificial Sequence
  mRNA product Design i-3 (A100) comprising derived and/or modified sequence from LASV(LASV035-NIG-2009;Clade II)__AIT17588__GPCmut6 (opt1)
aggagaaagcuuaccaugggccagaucaucaccuucuuccaggaggugccccacgucaucgaggaggugaugaacaucgugcugaucgcccucagccugcuggccauccucaaggggaucuacaacgucgcgaccugcggccuguucgggcugguguccuuccuccugcugugcggccgcagcugcuccacgaccuacaaggggguguacgagcuccagacccuggagcuggacauggccagccucaacaugugcaugccgcuguccugcacgaagaacaacagccaccacuacaucauggucggcaacgagaccggccuggagcucacccugaccaacacguccaucaucaaccacaaguucugcaaccugagcgacgcccacaagaagaaccucuacgaccacgcccugauguccaucaucagcaccuuccaccuguccauccccaacuucaaccaguacgaggccaugagcugcgacuucaacgggggcaagaucuccgugcaguacaaccucagccacgcguacgccguggacgccgccaaccacugcgggaccaucgcgaacggcguccugcagaccuucaugcggauggccuggggcggguccuacaucgcccuggacagcggcaagggguccugggacugcaucaugacgagcuaccaguaccucaucauccagaacaccaccugggaggaccacugccaguucucccgccccagccccaucggcuaccuggggcugcucagccagcggacccgcgacaucuacaucucccggcgccugcugggcacguucaccuggacccucagcgacuccgagggcaacgagacccccgggggcuacugccugacgcgguggaugcugaucgaggccgagcucaagugcuucgggaacaccgccguggcgaagugcaacgagaagcacgacgaggaguucugcgacaugcugcgccuguucgacuucugcaagcaggccauccggcgccucaaggcccccgcccagaugagcauccagcugaucaacaaggccgugaacgcgcugaucaacgaccagcucaucaugaagaaccaccuccgggacaucaugggcauccccuacugcaacuacuccaaguacugguaccugaaccacaccgucaccgggaagacgagccugccccgcugcuggcugguguccaacggcagcuaccugaacgagacccacuucuccgacgacaucgagcagcaggccgacaacaugaucaccgagcuccugcagaaggaguacaucgaccggcagggcaagaccccgcuggggcucguggaccuguucgucuucagcacguccuucuaccugaucagcaucuuccugcaccucgugaagaucccgacccaccgccacgugaucggcaagcccugccccaagccccaccggcugaaccacauggggaucugcuccugcggccuguacaagcacccggggguccccgugaaguggaagcgcugaggacuaguuauaagacugacuagcccgaugggccucccaacgggcccuccuccccuccuugcaccgagauuaauaaaaaaaaaaaaaaaaaaaaaaaaaaaaaaaaaaaaaaaaaaaaaaaaaaaaaaaaaaaaaaaaaaaaaaaaaaaaaaaaaaaaaaaaaaaaaaaaaaaa

SEQ ID NO: 31317 - RNA, 1662 nt, Artificial Sequence
  mRNA product Design i-3 (A100) comprising derived and/or modified sequence from LASV(LASV1000-NIG-2009;Clade II)__AIT17782__GPCmut6 (opt1)
aggagaaagcuuaccaugggccagaucaucaccuucuuccaggaggugccccacgucaucgaggaggugaugaacaucgugcugaucgcccucagccugcuggccauccucaaggggaucuacaacgucgcgaccugcggccuguucgggcugguguccuuccuccugcugugcggccgcagcugcuccacgaccuacaaggggguguacgagcuccagacccuggagcuggacauggccagccucaacaugugcaugccgcuguccugcacgaagaacaacagccaccacuacaucauggucggcaacgagaccggccuggagcucacccugaccaacacguccaucaucaaccacaaguucugcaaccugagcgacgcccacaagaagaaccucuacgaccacgcccugauguccaucaucagcaccuuccaccuguccauccccaacuucaaccaguacgaggccaugagcugcgacuucaacgggggcaagaucuccgugcaguacaaccucagccacaccuacgcgguggacgccgccaaccacugcgggaccaucgccaacggcguccugcagacguucaugcggauggcguggggcggguccuacaucgcccuggacagcggcaagggguccugggacugcaucaugaccagcuaccaguaccucaucauccagaacaccaccugggaggaccacugccaguucucccgccccagccccaucggcuaccuggggcugcucagccagcggacgcgcgacaucuacaucucccggcgccugcugggcaccuucaccuggacccucagcgacuccgagggcaacgagacgcccgggggcuacugccugacccgguggaugcugaucgaggccgagcucaagugcuucgggaacaccgccguggccaagugcaacgagaagcacgacgaggaguucugcgacaugcugcgccuguucgacuucugcaagcaggcgaucaagcggcucaagacccccgcccagaugagcauccagcugaucaacaaggccgugaacgcccugaucaacgaccagcucaucaugaagaaccaccuccgcgacaucaugggcauccccuacugcaacuacuccaaguacugguaccugaaccacacggucaccgggaagaccagccugccccggugcuggcugguguccaacggcagcuaccugaacgagacccacuucuccgacgacaucgagcagcaggccgacaacaugaucacggagcuccugcagaaggaguacaucgaccgccagggcaagaccccgcuggggcucguggaccuguucgucuucagcaccuccuucuaccugaucagcaucuuccugcaccucgugaagaucccgacccaccggcacguggucggcaagcccugccccaagccccaccgccugaaccacauggggaucugcuccugcggccuguacaagcacccgggggugcccgugaaguggaagcggugaggacuaguuauaagacugacuagcccgaugggccucccaacgggcccuccuccccuccuugcaccgagauuaauaaaaaaaaaaaaaaaaaaaaaaaaaaaaaaaaaaaaaaaaaaaaaaaaaaaaaaaaaaaaaaaaaaaaaaaaaaaaaaaaaaaaaaaaaaaaaaaaaaaa

SEQ ID NO: 31318 - RNA, 1662 nt, Artificial Sequence
  mRNA product Design i-3 (A100) comprising derived and/or modified sequence from LASV(LASV221-NIG-2010;Clade II)__AIT17624__GPCmut6 (opt1)
aggagaaagcuuaccaugggccagaucaucaccuucuuccaggaggugccccacgucaucgaggaggugaugaacaucgugcugaucgcccucagccugcuggccauccucaaggggaucuacaacgucgcgaccugcggccuguucgggcugguguccuuccuccugcugugcggccgcagcugcuccacgaccuacaaggggguguacgagcuccagacccuggagcuggacauggccagccucaacaugugcaugccgcuguccugcacgaagaacaacagccaccacuacaucauggucggcaacgagaccggccuggagcucacccugaccaacacguccaucaucaaccacaaguucugcaaccugagcgacgcccacaagaagaaccucuacgaccacgcccugauguccaucaucagcaccuuccaccuguccauccccaacuucaaccaguacgaggccaugagcugcgacuucaacgggggcaagaucuccgugcaguacaaccucagccacaccuacgcgaucgacgccgccaaccacugcgggaccaucgccaacggcgugcugcagacguucaugcggauggcguggggcggguccuacaucgcccuggacagcggcaagggguccugggacugcaucaugaccagcuaccaguaccucaucauccagaacaccaccugggaggaccacugccaguucucccgccccagccccaucggcuaccuggggcugcucagccagcggacgcgcgacaucuacaucucccggcgccugcugggcaccuucaccuggacccucagcgacuccgagggcaacgagacgcccgggggcuacugccugacccgguggaugcugaucgaggccgagcucaagugcuucgggaacaccgccgucgccaagugcaacgagaagcacgacgaggaguucugcgacaugcugcgccuguucgacuucugcaagcaggcgauccggcgccucaagacccccgcccagaugagcauccagcugaucaacaaggccgugaacgcccugaucaacgaccagcucaucaugaagaaccaccuccgggacaucaugggcauccccuacugcaacuacuccaaguacugguaccugaaccacacggugaccgggaagaccagccugccccgcugcuggcuggucuccaacggcagcuaccugaacgagacccacuucuccgacgacaucgagcagcaggccgacaacaugaucacggagaugcuccagaaggaguacauggaccggcagggcaagaccccgcuggggcugguggaccucuucguguucagcaccuccuucuaccugaucagcaucuuccugcaccuggucaagaucccgacccaccgccacgugaucggcaagcccugccccaagccccaccggcucaaccacauggggaucugcuccugcggccuguacaagcacccgggggugcccgucaaguggaagcgcugaggacuaguuauaagacugacuagcccgaugggccucccaacgggcccuccuccccuccuugcaccgagauuaauaaaaaaaaaaaaaaaaaaaaaaaaaaaaaaaaaaaaaaaaaaaaaaaaaaaaaaaaaaaaaaaaaaaaaaaaaaaaaaaaaaaaaaaaaaaaaaaaaaaa

SEQ ID NO: 31319 - RNA, 1662 nt, Artificial Sequence
  mRNA product Design i-3 (A100) comprising derived and/or modified sequence from LASV(LASV237-NIG-2010;Clade II)__AIT17638__GPCmut6 (opt1)
aggagaaagcuuaccaugggccagaucaucaccuucuuccaggaggugccccacgucaucgaggaggugaugaacaucgugcugaucgcccucagccugcuggccauccucaaggggaucuacaacgucgcgaccugcggccuguucgggcugguguccuuccuccugcugugcggccgcagcugcuccacgaccuacaaggggguguacgagcuccagacccuggagcuggacauggccagccucaacaugugcaugccgcuguccugcacgaagaacaacagccaccacuacaucauggucggcaacgagaccggccuggagcucacccugaccaacacguccaucaucaaccacaaguucugcaaccugagcgacgcccacaagaaggaccucuacgaccacgcccugauguccaucaucagcaccuuccaccuguccauccccaacuucaaccaguacgaggccaugagcugcgacuucaacgggggcaagaucuccgugcaguacaaccucagccacaccuacgcgguggacgccgccaaccacugcgggaccaucgccaacggcguccugcagacguucaugcggauggcguggggcggguccuacaucgcccuggacagcggcaagggguccugggacugcaucaugaccagcuaccaguaccucaucauccagaacaccaccugggaggaccacugccaguucucccgccccagccccaucggcuaccuggggcugcucagccagcggacgcgcgacaucuacaucucccggcgccugcugggcaccuucaccuggacccucagcgacuccgagggcaacgagacgcccgggggcuacugccugacccgguggaugcugaucgaggccgagcucaagugcuucgggaacaccgccguggccaagugcaacgagaagcacgacgaggaguucugcgacaugcugcgccuguucgacuucugcaagcaggcgauccggcgccucaagacccccgcccagaugagcauccagcugaucaacaaggccgugaacgcccugaucaacgaccagcucaucaugaagaaccaccuccgggacaucaugggcauccccuacugcaacuacuccaaguacugguaccugaaccacacggucaccgggaagaccagccugccccgcugcuggcugguguccaacggcagcuaccugaacgagacccacuucuccgacgacaucgagcagcaggccgacaacaugaucacggagcuccugcagaaggaguacauggaccggcagggcaagaccccgcuggggcucguggaccuguucgucuucagcaccuccuucuaccugaucagcaucuuccugcaccucaucaagaucccgacccaccgccacaucacgggcaagcccugccccaagccccaccggcugaaccacauggggaucugcuccugcggccuguacaagcacccgggggugcccgugaaguggaagcgcugaggacuaguuauaagacugacuagcccgaugggccucccaacgggcccuccuccccuccuugcaccgagauuaauaaaaaaaaaaaaaaaaaaaaaaaaaaaaaaaaaaaaaaaaaaaaaaaaaaaaaaaaaaaaaaaaaaaaaaaaaaaaaaaaaaaaaaaaaaaaaaaaaaaa

SEQ ID NO: 31320 - RNA, 1662 nt, Artificial Sequence
  mRNA product Design i-3 (A100) comprising derived and/or modified sequence from LASV(LASV253-NIG-2011;Clade II)__AIT17670__GPCmut6 (opt1)
aggagaaagcuuaccaugggccagaucaucaccuucuuccaggaggugccccacgucaucgaggaggugaugaacaucgugcugaucgcccucagccugcuggccauccucaaggggaucuacaacgucgcgaccugcggccuguucgggcugguguccuuccuccugcugugcggccgcagcugcuccacgaccuacaaggggguguacgagcuccagacccuggagcuggacauggccagccucaacaugugcaugccgcuguccugcacgaagaacaacagccaccacuacaucauggucggcaacgagaccggccuggagcucacccugaccaacacguccaucaucaaccacaaguucugcaaccugagcgacgcccacaagaagaaccucuacgaccacgcccugauguccaucaucagcaccuuccaccuguccauccccaacuucaaccaguacgaggccaugagcugcgacuucaacgggggcaagaucuccgugcaguacaaccucagccacaccuacgcgguggacgccgccaaccacugcgggaccaucgccaacggcguccugcagacguucaugcggauggcguggggcggguccuacaucgcccuggacagcggcaagggguccugggacugcaucaugaccagcuaccaguaccucaucauccagaacaccaccugggaggaccacugccaguucucccgccccagccccaucggcuaccuggggcugcucagccagcggacgcgcgacaucuacaucucccggcgccugcugggcaccuucaccuggacccucagcgacuccgagggcaacgagacgcccgggggcuacugccugacccgguggaugcugaucgaggccgagcucaagugcuucgggaacaccgccguggccaagugcaacgagaagcacgacgaggaguucugcgacaugcugcgccuguucgacuucugcaagcaggcgauccggcgccucaaggcccccgcccagaugagcauccagcugaucaacaaggccgugaacgcccugaucaacgaccagcucaucaugaagaaccaccuccgggacaucaugggcaucccguacugcaacuacuccaaguacugguaccugaaccacaccgucacggggcgcaccagccugccccggugcuggcugguguccaacggcagcuaccugaacgagacccacuucuccgacgacaucgagcagcaggcggacaacaugaucaccgagcuccugcagaaggaguacaucgaccgccagggcaagacgccccuggggcucguggaccuguucgucuucagcaccuccuucuaccugaucagcaucuuccugcaccucgugaagaucccgacccaccggcacaucaucggcaagcccugccccaagccccaccgccugaaccacauggggaucugcuccugcggccuguacaagcacccgggggugcccgucaaguggaagcggugaggacuaguuauaagacugacuagcccgaugggccucccaacgggcccuccuccccuccuugcaccgagauuaauaaaaaaaaaaaaaaaaaaaaaaaaaaaaaaaaaaaaaaaaaaaaaaaaaaaaaaaaaaaaaaaaaaaaaaaaaaaaaaaaaaaaaaaaaaaaaaaaaaaa

SEQ ID NO: 31321 - RNA, 1662 nt, Artificial Sequence
  mRNA product Design i-3 (A100) comprising derived and/or modified sequence from LASV(LASV254-NIG-2011;Clade II)__AIT17674__GPCmut6 (opt1)
aggagaaagcuuaccaugggccagaucaucaccuucuuccaggaggugccccacgucaucgaggaggugaugaacaucgugcugaucgcccucagccugcuggccauccucaaggggaucuacaacgucgcgaccugcggccuguucgggcugguguccuuccuccugcugugcggccgcagcugcuccacgaccuacaaggggguguacgagcuccagacccuggagcuggacaugaccaaccucaacaugugcaugccgcugagcugcaccaagaacaacucccaccacuacaucauggucggcaacgagaccggccuggagcucacccugacgaacaccagcaucaucaaccacaaguucugcaaccuguccgacgcccacaagaagaaccucuacaaccacgcccugaugagcaucaucuccaccuuccaccugagcauccccaacuucaaccaguacgaggccauguccugcgacuucaacgggggcaagaucagcgugcaguacaaccucucccacagcuacgccguggacgcggccaaccacugcgggaccaucgccaacggcguccugcagacguucaugcggauggccuggggcggguccuacaucgcgcuggacagcggcaaggggaacugggacugcaucaugaccuccuaccaguaccucaucauccagaacaccaccugggaggaccacugccaguucagccgccccucccccaucggcuaccuggggcugcucagccagcggacgcgcgacaucuacaucagccggcgccugcugggcaccuucaccuggacccucuccgacagcgagggcaacgagacgcccgggggcuacugccugacccgguggaugcugaucgaggccgagcucaagugcuucgggaacaccgccguggccaagugcaacgagaagcacgacgaggaguucugcgacaugcugcgccuguucgacuucugcaagcaggccauccggcgccucaagacccccgcgcaggccaacauccagcugaucaacaaggccgugaacgcccugaucaacgaccagcucaucaugaagaaccaccuccgggacaucaugggcauccccuacugcaacuacuccaaguacugguaccugaaccacacggucaccgggaagaccagccugccccgcugcuggcugguguccaacggcagcuaccugaacgagacccacuucuccgacgacaucgagcagcaggccgacaacaugaucacggagcuccugcagaaggaguacauggaccggcagggcaagaccccgcuggggcucguggaccuguucgucuucagcaccuccuucuaccugaucagcaucuuccugcaccucgugaagaucccgacccaccgccacgugaucggcaagcccugccccaagccccaccggcugaaccacauggggaucugcuccugcggccuguacaagcacccggggguccccgugaaguggaagcgcugaggacuaguuauaagacugacuagcccgaugggccucccaacgggcccuccuccccuccuugcaccgagauuaauaaaaaaaaaaaaaaaaaaaaaaaaaaaaaaaaaaaaaaaaaaaaaaaaaaaaaaaaaaaaaaaaaaaaaaaaaaaaaaaaaaaaaaaaaaaaaaaaaaaa

SEQ ID NO: 31322 - RNA, 1662 nt, Artificial Sequence
  mRNA product Design i-3 (A100) comprising derived and/or modified sequence from LASV(Nig08-A19;Clade III)__ADU56618__GPCmut6 (opt1)
aggagaaagcuuaccaugggccagaucgugaccuucuuccaggaggucccccacgugaucgaggaggugaugaacaucguccugaucgcccucagcauccuggccauccugaaggggcucuacaacaucgcgaccugcggccugaucgggcuggugacguuccuccugcuguccggccgcagcugcuccaugaccuacaaggggguguacgagcuccagacccuggagcugaacaugaacacccucaacaugugcaugccgcugagcugcaccaagaacaacucccaccacuacaucauggucggcaacgagaccggccuggagcucacccugacgaacaccagccugcuccaccacaaguucugcaaccuguccgacgcccacaagaagaaccuguacgaccacacccucaugagcaucaucuccaccuuccaccugagcauccccaacuucaaccaguacgaggccauguccugcgacuucaacgggggcaagaucacggugcaguacaaccugagccacuccuacgccaucgacgccgcgaaccacugcgggaccguggccaacggcguccuccagaccuucaugcggauggccuggggcgggagcuacaucgcccuggacuccggccgcgggaagugggacugcaucaugaccagcuaccaguaccugaucauccagaacacgaccugggaggaccacugccaguucucccggcccagccccaucggcuaccucgggcugcugucccagcgcacccgggacaucuacaucagccgccggcuccugggcaccuucacguggacccugagcgacuccgagggcaacgagacccccgggggcuacugccucacccgcuggaugcugaucgaggcggagcugaagugcuucgggaacacggccguggccaagugcaacgagaagcacgacgaggaguucugcgacaugcuccggcuguucgacuucugcaagcaggccauccgccggcugaaggcccccgcgcagaugagcauccagcucaucaacaaggccgugaacgcccugaucaacgaccagcugaucaugaagaaccaccuccgcgacaucaugggcauccccuacugcaacuacuccaaguacugguaccugaaccacaccagcaccgggcggaccucccugccccgcugcuggcucgucagcaacggcuccuaccugaacgagacgcacuucagcgacgacaucgagcagcaggccgacaacaugaucaccgagaugcugcagaaggaguaccucgaccggcagggcaagaccccgcuggggcugguggaccuguucguguucuccaccagcuucuaccucaucuccaucuuccugcaccuggucaagaucccgacgcaccgccacaucgugggcaagcccugccccaagccccaccggcucaaccacauggggaucugcagcugcggccuguacaagcagccgggggugcccguccgcuggaagcggugaggacuaguuauaagacugacuagcccgaugggccucccaacgggcccuccuccccuccuugcaccgagauuaauaaaaaaaaaaaaaaaaaaaaaaaaaaaaaaaaaaaaaaaaaaaaaaaaaaaaaaaaaaaaaaaaaaaaaaaaaaaaaaaaaaaaaaaaaaaaaaaaaaaa

SEQ ID NO: 31323 - RNA, 1665 nt, Artificial Sequence
  mRNA product Design i-3 (A100) comprising derived and/or modified sequence from LASV(G1180-SLE-2010;Clade IV)__AIT17168__GPCmut6 (opt1)
aggagaaagcuuaccaugggccagaucgugaccuucuuccaggaggucccccacgugaucgaggaggugaugaacaucguccugaucgcccucagcauccuggccgugcugaaggggcucuacaacuucgcgaccugcggccugguggggcugcucaccuuccugcugcucugcggccgcuccugcaccgccagccgguacaagggggucuacgagcugcagacccuggagcucaacauggagacccugaacaugugcaugccgcuguccugcaccaagaacaacagccaccacuacaucauggugggcaacgagaccggccucgagcugacccugacgaacaccuccaucaucaaccacaaguucugcaaccucagcgacgcccacaagaagaaccuguacgaccacgcccugauguccaucaucagcaccuuccaccucuccauccccaacuucaaccaguacgaggccaugagcugcgacuucaacgggggcaagaucuccgugcaguacaaccugagccacuccuacgcgggggacgccgccaaccacugcggcaccgucgccaacggggugcugcagacguucaugcgcauggcguggggcggcagcuacaucgcccucgacuccgggcacggcagcugggacugcaucaugaccuccuaccaguaccugaucauccagaacaccaccugggaggaccacugccaguucagccggcccucccccaucggguaccugggccuccugagccagcgcacgcgggacaucuacaucagccgccggcugcucggcaccuucaccuggacccuguccgacagcgaggggaaggacacgccgggcggguacugccugacccgcuggaugcucaucgaggccgagcugaagugcuucggcaacaccgccguggccaagugcaacgagaagcacgacgaggaguucugcgacaugcugcggcuguucgacuucugcaagcaggcgauccagcgccugaaggcccccgcccagauguccauccagcugaucaacaaggccgucaacgcccucaucaacgaccagcugaucaugaagaaccaccuccgggacaucauggggauccccuacugcaacuacagcaaguacugguaccucaaccacaccacgaccggcaagaccucccugcccaagugcuggcuggugagcaacggcuccuaccucaacgagacccacuucagcgacgacaucgagcagcaggcggacaacaugaucacggagaugcugcagaaggaguacauggagcgccaggggaagacgccccugggccucguggaccuguucgucuucuccaccagcuucuaccugaucuccaucuuccugcaccucgugaagaucccgacccaccggcacaucgugggcaagagcugccccaagccccaccgccugaaccacauggggaucugcuccugcgggcuguacaagcagcccggcgucccggugaaguggaagcggugaggacuaguuauaagacugacuagcccgaugggccucccaacgggcccuccuccccuccuugcaccgagauuaauaaaaaaaaaaaaaaaaaaaaaaaaaaaaaaaaaaaaaaaaaaaaaaaaaaaaaaaaaaaaaaaaaaaaaaaaaaaaaaaaaaaaaaaaaaaaaaaaaaaa

SEQ ID NO: 31324 - RNA, 1665 nt, Artificial Sequence
  mRNA product Design i-3 (A100) comprising derived and/or modified sequence from LASV(G1442-SLE-2011;Clade IV)__AIT17180__GPCmut6 (opt1)
aggagaaagcuuaccaugggccagaucgugaccuucuuccaggaggucccccacgugaucgaggaggugaugaacaucguccugaucgcccucagcauccuggccgugcugaaggggcucuacaacguggcgaccugcggccugaucgggcuggucacguuccuccugcugugcggccgcuccugcaccaccacccucuacaaggggguguacgagcugcagacgcuggagcucaacauggagacccugaacaugugcaugccgcugagcugcaccaagaacaacucccaccacuacauccgggugggcaacgagacgggccucgagcugacccugaccaacaccagcaucaucaaccacaaguucugcaaccucuccgacgcccacaagaagaaccuguacgaccacgcccugaugagcaucaucuccacguuccaccucagcauccccaacuucaaccaguacgaggccauguccugcgacuucaacgggggcaagaucagcguccaguacaaccugucccacagcuacgccggggacgcggccaaccacugcggcaccguggccaacggggugcugcagaccuucaugcgcauggccuggggcggcuccuacaucgcgcucgacagcgggcggggcaacugggacugcaucaugaccuccuaccaguaccugaucauccagaacacgaccugggacgaccacugccaguucagccgccccucccccaucggguaccugggccuccugagccagcggacccgcgacgucuacaucucccggcgccugcucggcaccuucacguggacccugagcgacagcgaggggaaggacaccccgggcggguacugccugacccgguggaugcucaucgaggccgagcugaagugcuucggcaacacggccguggccaagugcaacgagaagcacgacgaggaguucugcgacaugcugcgccucuucgacuucugcaagcaggccauccagcggcugaaggcgcccgcccagauguccauccagcugaucaacaaggccgugaacgcccucaucaacgaccagcugaucaugaagaaccaccuccgcgacaucauggggauccccuacugcaacuacagcaaguacugguaccugaacaacaccgccaccggcaagaccucccugcccaagugcuggcugaucagcaacggcuccuaccucaacgagacgcacuucagcgacgacaucgagcaggaggcggacaacaugaucaccgagaugcugcagaaggaguacauggagcggcaggggaagacgccccugggccucgucgaccuguucguguucuccaccagcuucuaccugaucuccaucuuccugcaccucgugaagaucccgacccaccgccacaucgucggcaagagcugccccaagccccaccggcugaaccacauggggaucugcuccugcgggcuguacaagcagcccggcgugccggugcgcuggaagcggugaggacuaguuauaagacugacuagcccgaugggccucccaacgggcccuccuccccuccuugcaccgagauuaauaaaaaaaaaaaaaaaaaaaaaaaaaaaaaaaaaaaaaaaaaaaaaaaaaaaaaaaaaaaaaaaaaaaaaaaaaaaaaaaaaaaaaaaaaaaaaaaaaaaa

SEQ ID NO: 31325 - RNA, 1665 nt, Artificial Sequence
  mRNA product Design i-3 (A100) comprising derived and/or modified sequence from LASV(G3010-SLE-2013;Clade IV)__AIT17344__GPCmut6 (opt1)
aggagaaagcuuaccaugggccagaucgugaccuucuuccaggaggucccccacgugaucgaggaggugaugaacaucguccugaucgcccucagcauccuggccgugcugaaggggcucuacaacuucgcgaccugcggccugguggggcuggucacguuccuccugcugugcggccgcuccugcaccaccagccucuacaaggggguguacgagcugcagacccuggagcucaacauggagacgcugaacaugugcaugccgcuguccugcaccaagaacaacagccaccacuacaucauggugggcaacgagaccggccucgagcugacgcugaccaacaccuccaucaucaaccacaaguucugcaaccucagcgacgcccacaagaagaaccuguacaaccacgcccugauguccaucaucagcaccuuccaccucuccauccccaacuucaaccaguacgaggccaugagcugcgacuucaacgggggcaagaucuccguccaguacaaccugagccacuccuacgccggggacgcggccagccacugcggcacgguggccaacggggugcugcagaccuucaugcggauggccuggggcggcuccuacaucgcgcucgacagcggguacggcaagugggacugcaucaugaccuccuaccaguaccugaucauccagaacaccacgugggaggaccacugccaguucagccgccccucccccaucggguaccugggccuccugagccagcggacccgcgacaucuacaucagccggcgccugcucggcaccuucaccuggacgcuguccgacagcgaggggaaggacaccccgggcggguacugccugacccgguggaugcucaucgaggccgagcugaagugcuucggcaacaccgccgucgccaagugcaacgagaagcacgacgaggaguucugcgacaugcugcgccucuucgacuucugcaagcaggccauccagcggcugaagacgcccgcgcagauguccauccagcugaucaacaaggccgugaacgcccucaucaacgaccagcugaucaugaagaaccaccuccgcgacaucauggggauccccuacugcaacuacagcaaguacugguaccugaaccacaccaccaccggcaagacgucccugcccaagugcuggcuggugagcaacggcuccuaccucaacgagacccacuucagcgacgacaucgagcagcaggccgacaacaugaucaccgagaugcugcagaaggaguacauggagcggcaggggaagacgccccugggccucgucgaccuguucguguucuccaccagcuucuaccugaucuccaucuuccugcaccucgugaagaucccgacccaccgccacaucgucggcaagagcugccccaagccccaccggcugaaccacauggggaucugcuccugcgggcuguacaagcagcccggcgugccggugcgcuggaagcggugaggacuaguuauaagacugacuagcccgaugggccucccaacgggcccuccuccccuccuugcaccgagauuaauaaaaaaaaaaaaaaaaaaaaaaaaaaaaaaaaaaaaaaaaaaaaaaaaaaaaaaaaaaaaaaaaaaaaaaaaaaaaaaaaaaaaaaaaaaaaaaaaaaaa

SEQ ID NO: 31326 - RNA, 1665 nt, Artificial Sequence
  mRNA product Design i-3 (A100) comprising derived and/or modified sequence from LASV(G502-SLE-2009;Clade IV)__AIT17126__GPCmut6 (opt1)
aggagaaagcuuaccaugggccagaucgugaccuucuuccaggaggucccccacgugaucgaggaggugaugaacaucguccugaucgcccucagcauccuggccgugcugaaggggcucuacaacuucgcgaccugcggccugguggggcugcucacguuccugcugcucugcggccgcuccugcaccaccgggcuguacaagggcgucuacgagcugcagacccucgagcugaacauggagacgcugaacaugugcaugccgcucagcugcaccaagaacaacucccaccacuacaucauggugggcaacgagaccgggcuggagcugacgcucaccaacaccagcaucaucaaccacaaguucugcaaccuguccgacgcccacaagaagaaccuguacgaccacgcccucaugagcaucaucuccaccuuccaccugagcauccccaacuucaaccaguacgaggccauguccugcgacuucaacggcgggaagaucagcgugcaguacaaccugucccacagcuacgccggcgacgcggccgaccacugcgggacggucgccaacggcgugcuccagaccuucaugcggauggccuggggcggguccuacaucgcgcuggacagcggccgcgggcggugggacugcaucaugaccuccuaccaguaccugaucauccagaacaccacgugggaggaccacugccaguucagccgccccucccccaucggcuaccucggccugcugagccagcggacccgcgacaucuacaucucccggcgccuccuggggaccuucaccuggacgcugagcgacagcgagggcaaggacacccccgggggcuacugccucacccgguggaugcugaucgaggccgagcugaagugcuucgggaacaccgccguggccaagugcaacgagaagcacgacgaggaguucugcgacaugcuccgccuguucgacuucugcaagcaggccauccagcggcugaaggcgcccgcccagauguccauccagcucaucaacaaggccgucaacgcccugaucaacgaccagcuggugaugaagaaccaccuccgcgacaucaugggcauccccuacugcaacuacagccgguacugguaccugaaccacacgaccaccggccgcaccucccugcccaagugcuggcucgugagcaacggguccuaccugaacgagacgcacuucagcgacgacaucgagcagcaggccgacaacaugaucaccgagaugcugcagaaggaguacauggagcggcagggcaagaccccgcucgggcuggucgaccuguucguguucuccaccagcuucuaccugaucuccaucuuccuccaccuggugaagaucccgacgcaccgccacaucgucggcaagagcugccccaagccccaccggcugaaccacauggggaucugcuccugcggccucuacaagcagcccggcgugccggugaaguggaagcgcugaggacuaguuauaagacugacuagcccgaugggccucccaacgggcccuccuccccuccuugcaccgagauuaauaaaaaaaaaaaaaaaaaaaaaaaaaaaaaaaaaaaaaaaaaaaaaaaaaaaaaaaaaaaaaaaaaaaaaaaaaaaaaaaaaaaaaaaaaaaaaaaaaaaa

SEQ ID NO: 31327 - RNA, 1665 nt, Artificial Sequence
  mRNA product Design i-3 (A100) comprising derived and/or modified sequence from LASV(G733-SLE-2010;Clade IV)__AIT17154__GPCmut6 (opt1)
aggagaaagcuuaccaugggccagaucgugaccuucuuccaggaggucccccacgugaucgaggaggugaugaacaucguccugaucgcccucagcauccuggccgugcugaaggggcucuacaacuucgcgaccugcggcaucguggggcuggucuccuuccugcuccugugcggccgcagcugcacgaccucccuguacaaggggguguacgagcuccagacccuggagcugaacauggagacccucaacaugugcaugccgcugagcugcaccaagaacaacucccaccacuacaucauggugggcaacgagaccggccuggagcucacccugacgaacaccagcaucaucaaccacaaguucugcaaccuguccgacgcccacaagaagaaccucuacgaccacgcccugaugagcaucaucuccaccuuccaccugagcauccccaacuucaaccaguacgaggccauguccugcgacuucaacgggggcaagaucagcguccaguacaaccucucccacagcuacgccggggacgcggccaaccacugcggcaccaucgccaacggggugcugcagacguucaugcggauggccuggggcggcuccuacaucgcgcuggacagcgggcgcgaccggugggacugcaucaugaccuccuaccaguaccucaucauccagaacaccaccugggaggaccacugccaguucagccgccccucccccaucggcuaccuggggcugcucagccagcggacgcgcgacaucuacaucagccggcgccugcugggcaccuucaccuggacccucuccgacagcgagggcaaggacacgcccgggggcuacugccugacccgguggaugcugaucgaggccgagcucaagugcuucgggaacaccgccguggccaagugcaacgagaagcacgacgaggaguucugcgacaugcugcgccuguucgacuucugcaagcaggccauccagcggcucaaggcgcccgcccagauguccauccagcugaucaacaaggccgucaacgcccugaucaacgaccagcucaucaugaagaaccaccuccgcgacaucaugggcauccccuacugcaacuacagcaaguacugguaccugaaccacaccacgaccgggaagaccucccugcccaagugcuggcuggugagcaacggcuccuaccugaacgagacccacuucagcgacgacaucgagcagcaggccgacaacaugaucacggagaugcuccagaaggaguacauggagcggcagggcaagaccccgcuggggcugguggaccucuucgucuucuccaccagcuucuaccugaucuccaucuuccugcaccuggugaagaucccgacccaccgccacguggucggcaagagcugccccaagccccaccggcucaaccacauggggaucugcuccugcggccuguacgggcagcccggcgugccggugaaguggaagcgcugaggacuaguuauaagacugacuagcccgaugggccucccaacgggcccuccuccccuccuugcaccgagauuaauaaaaaaaaaaaaaaaaaaaaaaaaaaaaaaaaaaaaaaaaaaaaaaaaaaaaaaaaaaaaaaaaaaaaaaaaaaaaaaaaaaaaaaaaaaaaaaaaaaaa

SEQ ID NO: 31328 - RNA, 1665 nt, Artificial Sequence
  mRNA product Design i-3 (A100) comprising derived and/or modified sequence from MOPV/LASV reassortant(IGS-1;Clade IV)__AFY05576__GPCmut6 (opt1)
aggagaaagcuuaccaugggccagaucgugaccuucuuccaggaggucccccacgugaucgaggaggugaugaacaucguccugaucgcccucagcgugcuggccgugcugaaggggcucuacaacuucgcgaccugcggccuggucgggcuggugacguuccuccugcugugcggccgcuccugcaccaccagccucuacaaggggguguacgagcugcagacccuggagcucaacauggagacgcugaacaugugcaugccgcuguccugcaccaagaacaacagccaccacuacaucauggucggcaacgagaccggccucgagcugacgcugaccaacaccuccaucaucaaccacaaguucugcaaccucagcgacgcccacaagaagaaccuguacgaccacgcccugauguccaucaucagcaccuuccaccucuccauccccaacuucaaccaguacgaggccaugagcugcgacuucaacgggggcaagaucuccgugcaguacaaccugagccacuccuacgccggggacgcggccaaccacugcggcacgguggccaacgggguccugcagaccuucaugcggauggccuggggcggcagcuacaucgcgcucgacuccgggcgcggcaacugggacugcaucaugaccagcuaccaguaccugaucauccagaacaccacgugggaggaccacugccaguucucccggcccagccccaucggguaccugggccuccugucccagcgcacccgggacaucuacaucagccgccggcugcucggcaccuucaccuggacgcugagcgacuccgagggggaggacaccccgggcggguacugccugacccgcuggaugcucaucgaggccgagcugaagugcuucggcaacaccgccguggccaagugcaacgagaagcacgacgaggaguucugcgacaugcugcggcuguucgacuucugcaagcaggccauccagcgccugaaggcgcccgcccagaugagcauccagcugaucaacaaggccgugaacgcccucaucaacgaccagcugaucaugaagaaccaccuccgggacaucauggggauccccuacugcaacuacuccaaguacugguaccucaaccacacgaccaccggccgcaccagccugcccaagugcuggcuggucuccaacggcagcuaccucaacgagacgcacuucuccgacgacaucgagcagcaggccgacaacaugaucaccgagaugcugcagaaggaguacauggagcggcaggggaagacgccccugggccucguggaccuguucguguucagcaccuccuucuaccugaucagcaucuuccugcaccucgucaagaucccgacccaccgccacaucguggggaaguccugccccaagccccaccggcugaaccacaugggcaucugcagcugcgggcuguacaagcagcccggcgugccggucaaguggaagcgcugaggacuaguuauaagacugacuagcccgaugggccucccaacgggcccuccuccccuccuugcaccgagauuaauaaaaaaaaaaaaaaaaaaaaaaaaaaaaaaaaaaaaaaaaaaaaaaaaaaaaaaaaaaaaaaaaaaaaaaaaaaaaaaaaaaaaaaaaaaaaaaaaaaaa

SEQ ID NO: 31329 - RNA, 1665 nt, Artificial Sequence
  mRNA product Design i-3 (A100) comprising derived and/or modified sequence from LASV(LM765-SLE-2012;Clade IV)__AIT17814__GPCmut6 (opt1)
aggagaaagcuuaccaugggccagaucgugaccuucuuccaggaggucccccacgugaucgaggaggugaugaacaucguccugaucgcccucagcauccuggccgugcugaaggggcucuacaacuucgcgaccugcggccugguggggcuggucacguuccuccugcugugcggccgcuccugcaccaccagccucuacaaggggguguacgagcugcagacccuggagcucaacauggagacgcugaacaugugcaugccgcuguccugcaccaagaacaacagccaccacuacaucauggugggcaacgagaccggccucgagcugacgcugaccaacaccuccaucaucgaccacaaguucugcaaccucagcgacgcccaccggaagaaccuguacgaccacgcccugauguccaucaucagcaccuuccaccucuccauccccaacuucaaccaguacgaggccaugagcugcgacuucaacgggggcaagaucuccguccaguacaaccugagccacuccuacgccaaggacgcggccgaccacugcgggacgguggccaacggcgugcugcagaccuucaugcgcauggccuggggcgggagcuacaucgcgcucgacuccggccgggggcgcugggacugcaucaugaccagcuaccaguaccugaucauccagaacaccacgugggaggaccacugccaguucucccggcccagccccaucggcuaccuggggcuccugucccagcgcacccgggacaucuacaucagccgccggcugcucggcaccuucaccuggacgcugagcgacuccgagggcaaggacacccccgggggcuacugccugacccgcuggaugcucaucgaggccgagcugaagugcuucgggaacaccgccgucgccaagugcaacgagaagcacgacgaggaguucugcgacaugcugcggcuguucgacuucugcaagcaggccauccagcgccugaaggcgcccgcccagaugagcauccagcugaucaacaaggccgugaacgcccucaucaacgaccagcugaucaugaagaaccaccuccgggacaucaugggcauccccuacugcaacuacuccaaguacugguaccucaaccacacgaccaccgggaagaccagccugcccaagugcuggcugguguccaacggcagcuaccucaacgagacgcacuucuccgacgacaucgagcagcaggccgacaacaugaucaccgagaugcugcagaaggaguacauggagcgccagggcaagaccccgcuggggcucgucgaccuguucguguucagcaccuccuucuaccugaucagcaucuuccugcaccucgugaagaucccgacgcaccggcacaucgucggcaagcccugccccaagccccaccgccugaaccacauggggaucugcuccugcggccuguacaagcagccgggggugcccgugaaguggaagcggugaggacuaguuauaagacugacuagcccgaugggccucccaacgggcccuccuccccuccuugcaccgagauuaauaaaaaaaaaaaaaaaaaaaaaaaaaaaaaaaaaaaaaaaaaaaaaaaaaaaaaaaaaaaaaaaaaaaaaaaaaaaaaaaaaaaaaaaaaaaaaaaaaaaa

SEQ ID NO: 31330 - RNA, 1665 nt, Artificial Sequence
  mRNA product Design i-3 (A100) comprising derived and/or modified sequence from LASV(LM776-SLE-2012;Clade IV)__AIT17824__GPCmut6 (opt1)
aggagaaagcuuaccaugggccagaucgugaccuucuuccaggaggucccccacgugaucgaggaggugaugaacaucguccugaucgcccucagcauccuggccgugcugaaggggcucuacaacuucgcgaccugcggccugguggggcuggucacguuccuccugcugugcggccgcuccugcaccaccagcguguacaaggggguguacgagcuccagacccuggagcugaacauggagacgcucaacaugugcaugccgcuguccugcaccaagaacaacagccaccacuacaucauggucggcaacgagaccggccuggagcucacgcugaccaacaccuccaucaucaaccacaaguucugcaaccugagcgacgcccacaagaagaaccucuacgaccacgcccugauguccaucaucagcaccuuccaccuguccauccccaacuucaaccaguacgaggccaugagcugcgacuucaacgggggcaagaucuccgugcaguacaaccucagccacuccuacgccggggacgcggccaaccacugcggcacgguggccaacgggguccugcagaccuucaugcggauggccuggggcggcagcuacaucgcgcuggacuccgggcacggcaagugggacugcaucaugaccagcuaccaguaccucaucauccagaacaccacgugggaggaccacugccaguucucccgccccagccccaucggguaccugggccugcucucccagcggacccgcgacaucuacaucagccggcgccugcugggcaccuucaccuggacgcucagcgacuccgaggggaaggacaccccgggcggguacugccugacccgguggaugcugaucgaggccgagcucaagugcuucggcaacaccgccguggccaagugcaacgagaagcacgacgaggaguucugcgacaugcugcgccuguucgacuucugcaagcaggccauccagcggcucaaggcgcccgcccagaugagcauccagcugaucaacaaggccgugaacgcccugaucaacgaccagcucaucaugaagaaccaccuccgcgacaucauggggauccccuacugcaacuacuccaaguacugguaccugaaccacacgaccaccggcaagaccagccugcccaagugcuggcuggucuccaacggcagcuaccugaacgagacgcacuucuccgacgacaucgagcagcaggccgacaacaugaucaccgagaugcuccagaaggaguacauggagcggcaggggaagacgccccugggccugguggaccucuucguguucagcaccuccuucuaccugaucagcaucuuccugcaccuggucaagaucccgacccaccgccacaucguggggaaguccugccccaagccccaccggcucaaccacaugggcaucugcagcugcgggcuguacaagcagcccggcgugccgguccgcuggaagcggugaggacuaguuauaagacugacuagcccgaugggccucccaacgggcccuccuccccuccuugcaccgagauuaauaaaaaaaaaaaaaaaaaaaaaaaaaaaaaaaaaaaaaaaaaaaaaaaaaaaaaaaaaaaaaaaaaaaaaaaaaaaaaaaaaaaaaaaaaaaaaaaaaaaa

SEQ ID NO: 31331 - RNA, 1665 nt, Artificial Sequence
  mRNA product Design i-3 (A100) comprising derived and/or modified sequence from LASV(Mad39;Clade IV)__ANH09722__GPCmut6 (opt1)
aggagaaagcuuaccaugggccagaucgugaccuucuuccaggaggucccccacgugaucgaggaggugaugaacaucguccugaucgcccucagcauccuggccgugcugaaggggcucuacaacguggcgaccugcggccugaucgggcuggucacguuccuccugcugugcggccgcuccugcaccaccacccucuacaaggggguguacgagcugcaggcccuggagcucaacauggagacgcugaacaugugcaugccgcugagcugcaccaagaacaacucccaccacuacauccgggugggcaacgagaccggccucgagcugacgcugaccaacaccagccucaucaaccacaaguucugcaaccuguccgacgcccacaagaagaaccuguacgaccacgcccucaugagcaucaucuccaccuuccaccugagcauccccaacuucaaccaguacgaggccauguccugcgacuucaacgacgggaagaucagcguccaguacaaccugucccacacguacgcgggcgacaccgccaaccacugcgggaccguggccaacggcgugcuccagaccuucaugcgcauggccuggggcgggagcuacaucgcgcuggacuccggccgcgggggcugggacugcaucaugacgagcuaccaguaccugaucauccagaacaccaccugggaggaccacugccaguucucccggcccagccccaucggguaccucggccugcugucccagcggacccgcgacaucuacaucagccggcgccuccugggcacguucaccuggacccuguccgacagcgaggggaaggacaccccgggcggguacugccucacgcgguggaugcugaucgaggccgagcugaagugcuucggcaacaccgccgucgccaagugcaacgagaagcacgacgaggaguucugcgacaugcuccgccuguucgacuucugcaagcaggccauccagcggcugaaggcgcccgcccagaugagcauccagcucaucaacaaggccgugaacgcccugaucaacgaccagcugaucaugaagaaccaccuccgcgacaucauggggauccccuacugcaacuacuccaaguacugguaccugaaccacaccgugaccggcaagacgagccugcccaagugcuggcucgucuccaacggcagcuaccugaacgagacccacuucuccgacgacaucgagcagcaggccgacaacaugaucaccgagaugcugcagaaggaguacauggagcggcaggggaagacgccccucggccugguggaccuguucguguucagcaccuccuucuaccugaucagcaucuuccuccaccuggucaagaucccgacccaccgccacgugguggggaagcccugccccaagccccaccggcugaaccacaugggcaucugcuccugcggguucuacaagcagccgggcguccccgugcgcuggaagcggugaggacuaguuauaagacugacuagcccgaugggccucccaacgggcccuccuccccuccuugcaccgagauuaauaaaaaaaaaaaaaaaaaaaaaaaaaaaaaaaaaaaaaaaaaaaaaaaaaaaaaaaaaaaaaaaaaaaaaaaaaaaaaaaaaaaaaaaaaaaaaaaaaaaa

SEQ ID NO: 31332 - RNA, 1665 nt, Artificial Sequence
  mRNA product Design i-3 (A100) comprising derived and/or modified sequence from LASV(Z0947-SLE-2011;Clade IV)__AIT17840__GPCmut6 (opt1)
aggagaaagcuuaccaugggccagaucgugaccuucuuccaggaggucccccacgugaucgaggaggugaugaacaucguccugaucgcccucagcauccuggccgugcugaaggggcucuacaacuucgcgaccugcggccugguggggcuggucacguuccuccugcugugcggccgcuccugcaccaucagccucuacaaggggguguacgagcugcagacccuggagcucaacauggagacccugaacaugugcaugccgcuguccugcaccaagaacaacagccaccacuacaucauggugggcaacgagaccggccucgagcugacccugacgaacaccuccaucaucaaccacaaguucugcaaccucagcgacgcccacaagaagaaccuguacgaccacgcccugauguccaucaucagcaccuuccaccucuccauccccaacuucaaccaguacgaggccaugagcugcgacuucaacgggggcaagaucuccguccaguacaaccugagccacuccuacgccggggacgcggccaaccacugcggcaccguggccaacggggugcugcagacguucaugcggauggccuggggcggcagcuacaucgcgcucgacuccgggcgcgaccggugggacugcaucaugaccagcuaccaguaccugaucauccagaacaccaccugggaggaccacugccaguucucccgccccagccccaucggcuaccuggggcuccugucccagcggacgcgcgacaucuacaucagccggcgccugcucggcaccuucaccuggacccugagcgacuccgagggcaaggacacgcccgggggcuacugccugacccgguggaugcucaucgaggccgagcugaagugcuucgggaacaccgccgucgccaagugcaacgagaagcacgacgaggaguucugcgacaugcugcgccucuucgacuucugcaagcaggccauccagcggcugaaggcgcccgcccagaugagcauccagcugaucaacaaggccgugaacgcccucaucaacgaccagcugaucaugaagaaccaccuccgcgacaucaugggcauccccuacugcaacuacuccaaguacugguaccugaaccacaccacgaccgggaagaccagccugcccaagugcuggcugguguccaacggcagcuaccucaacgagacccacuucuccgacgacaucgagcagcaggccgacaacaugaucacggagaugcugcagaaggaguacauggagcggcagggcaagaccccgcuggggcucgucgaccuguucguguucagcaccuccuucuaccugaucagcaucuuccugcaccucgugaagaucccgacccaccgccacaucgucggcaagcccugccccaagccccaccggcugaaccacauggggaucugcuccugcggccuguacaagcagccgggggugcccgugaaguggaagcgcugaggacuaguuauaagacugacuagcccgaugggccucccaacgggcccuccuccccuccuugcaccgagauuaauaaaaaaaaaaaaaaaaaaaaaaaaaaaaaaaaaaaaaaaaaaaaaaaaaaaaaaaaaaaaaaaaaaaaaaaaaaaaaaaaaaaaaaaaaaaaaaaaaaaa

SEQ ID NO: 31333 - RNA, 1665 nt, Artificial Sequence
  mRNA product Design i-3 (A100) comprising derived and/or modified sequence from LASV(Josiah;Clade IV)__NP_694870__GPCmut6 (opt1)
aggagaaagcuuaccaugggccagaucgugaccuucuuccaggaggucccccacgugaucgaggaggugaugaacaucguccugaucgcccucagcgugcuggccgugcugaaggggcucuacaacuucgcgaccugcggccuggucgggcuggugacguuccuccugcugugcggccgcuccugcaccaccagccucuacaaggggguguacgagcugcagacccuggagcucaacauggagacgcugaacaugugcaugccgcuguccugcaccaagaacaacagccaccacuacaucauggucggcaacgagaccggccucgagcugacccugacgaacaccuccaucaucaaccacaaguucugcaaccucagcgacgcccacaagaagaaccuguacgaccacgcccugauguccaucaucagcaccuuccaccucuccauccccaacuucaaccaguacgaggccaugagcugcgacuucaacgggggcaagaucuccgugcaguacaaccugagccacuccuacgccggggacgcggccaaccacugcggcaccguggccaacgggguccugcagacguucaugcggauggccuggggcggcagcuacaucgcgcucgacuccgggcgcggcaacugggacugcaucaugaccagcuaccaguaccugaucauccagaacaccaccugggaggaccacugccaguucucccggcccagccccaucggguaccugggccuccugucccagcgcacgcgggacaucuacaucagccgccggcugcucggcaccuucaccuggacccugagcgacuccgaggggaaggacacgccgggcggguacugccugacccgcuggaugcucaucgaggccgagcugaagugcuucggcaacaccgccguggccaagugcaacgagaagcacgacgaggaguucugcgacaugcugcggcuguucgacuucugcaagcaggccauccagcgccugaaggcgcccgcccagaugagcauccagcugaucaacaaggccgugaacgcccucaucaacgaccagcugaucaugaagaaccaccuccgggacaucauggggauccccuacugcaacuacuccaaguacugguaccucaaccacaccacgaccggccgcaccagccugcccaagugcuggcuggucuccaacggcagcuaccucaacgagacccacuucuccgacgacaucgagcagcaggccgacaacaugaucacggagaugcugcagaaggaguacauggagcggcaggggaagaccccgcugggccugguggaccucuucguguucagcaccuccuucuaccugaucagcaucuuccugcaccucgucaagauccccacccaccgccacaucguggggaaguccugccccaagccccaccggcugaaccacaugggcaucugcagcugcgggcuguacaagcagccgggcgugcccgucaaguggaagcgcugaggacuaguuauaagacugacuagcccgaugggccucccaacgggcccuccuccccuccuugcaccgagauuaauaaaaaaaaaaaaaaaaaaaaaaaaaaaaaaaaaaaaaaaaaaaaaaaaaaaaaaaaaaaaaaaaaaaaaaaaaaaaaaaaaaaaaaaaaaaaaaaaaaaa

SEQ ID NO: 31334 - RNA, 1662 nt, Artificial Sequence
  mRNA product Design i-3 (A100) comprising derived and/or modified sequence from LASV(LP;Clade I)__AAF86701__GPCmut6 (opt1)
aggagaaagcuuaccaugggccagaucaucaccuucuuccaggaggugccccacgucaucgaggaggugaugaacaucgugcugaucgcccucagccugcuggccauccucaaggggcuguacaacaucgcgaccugcggcaucaucgggcuggucgccuuccucuuccugugcggcaaguccugcagccugacgcucaagggcggguacgagcugcagacccuggagcucaacauggagacccugaacaugugcaugccgcuguccugcaccaagaacagcucccaccacuacauccgcgugggcaacgagacggggcucgagcugacccugaccaacaccagcaucaucaaccacaaguucugcaaccucuccgacgcccacaagaagaaccuguacgaccacgcccugaugagcaucaucuccacguuccaccucagcauccccaacuucaaccaguacgaggccauguccugcgacuucaacggcgggaagaucagcgugcaguacaaccugucccacagcuacgcgggcgacgccgccgagcacugcgggaccgucgccaacggcgugcugcagaccuucaugcggauggcguggggcgggcgcuacaucgcccucgacuccggcaaggggaacugggacugcaucaugaccagcuaccaguaccugaucauccagaacacgaccugggaggaccacugccaguucucccggcccagccccaucggcuaccugggccuccugucccagcgcacccgggacaucuacaucagccgccggcugcucgggaccuucacguggacccugagcgacuccgagggcaacgagacccccgggggcuacugccugacccgcuggaugcucaucgaggccgagcugaagugcuucgggaacacggccguggccaagugcaacgagaagcacgacgaggaguucugcgacaugcugcggcuguucgacuucugcaagcaggcgauccgccggcugaaggccccggcccagaugagcauccagcugaucaacaaggccgucaacgcccucaucaacgaccagcugaucaugaagaaccaccuccgcgacaucaugggcauccccuacugcaacuacuccaaguacugguaccucaaccacaccagcuccggccggaccagccugcccaagugcuggcugaucuccaacgggagcuaccucaacgagacccaguucuccgacgacaucgagcagcaggcggacaacaugaucacggagaugcugcagaaggaguacaucgagcgccagggcaagaccccgcuggggcugguggacaucuucaucuucagcaccuccuucuaccucaucagcaucuuccugcaccugaucaagauccccacccaccggcacaucgugggcaagcccugccccaagccgcaccgccucaaccacaugggggucugcuccugcggccuguacaagcaccccggcgugcccacgaaguggaagcggugaggacuaguuauaagacugacuagcccgaugggccucccaacgggcccuccuccccuccuugcaccgagauuaauaaaaaaaaaaaaaaaaaaaaaaaaaaaaaaaaaaaaaaaaaaaaaaaaaaaaaaaaaaaaaaaaaaaaaaaaaaaaaaaaaaaaaaaaaaaaaaaaaaaa

SEQ ID NO: 31335 - RNA, 1662 nt, Artificial Sequence
  mRNA product Design i-3 (A100) comprising derived and/or modified sequence from LASV(803213;Clade II)__AAF86703__GPCmut6 (opt1)
aggagaaagcuuaccaugggccagaucaucaccuucuuccaggaggugccccacgucaucgaggaggugaugaacaucgugcugaucgcccucagccugcuggccauccucaaggggaucuacaacgucgcgaccugcggccuguucgggcugaucuccuuccuccugcugugcggccgcagcugcuccgugacguacaaggggguguacgagcuccagacccuggagcugaacauggccaaccucaacaugugcaugccgcugagcugcaccaagaacaacucccaccacuacaucauggucggcaacgagaccggccuggagcucacgcugaccaacaccagcaucaucaaccacaaguucugcaaccuguccgacgcccacaagaagaaccucuacgaccacgcccugaugagcaucaucuccaccuuccaccugagcauccccaacuucaaccaguacgaggccauguccugcgacuucaacgggggcaagaucagcgugcaguacaaccucucccacagcuucgcgguggacgccgccaaccacugcgggacgaucgccaacggcguccugcagaccuucaugcggauggcguggggcggguccuacaucgcccuggacagcggcaaggggaacugggacugcaucaugaccuccuaccaguaccucaucauccagaacaccacgugggaggaccacugccaguucagccgccccucccccaucggcuaccuggggcugcucagccagcggacccgcgacaucuacaucagccggcgccugcugggcaccuucaccuggacgcucuccgacagcgagggcaacgaggcccccgggggcuacugccugacccgguggaugcugaucgaggccgagcucaagugcuucgggaacaccgccguggcgaagugcaacgagaagcacgacgaggaguucugcgacaugcugcgccuguucgacuucugcaagcaggccaucaagcggcucaagaccccggcccagauguccauccagcugaucaacaaggccgugaacgcccugaucaacgaccagcucaucaugaagaaccaccuccgcgacaucaugggcauccccuacugcaacuacagccgguacugguaccugaaccacacggucaccgggaagaccucccugccccgcugcuggcuggugagcaacggcuccuaccugaacgagacccacuucagcgacgacaucgagcagcaggcggacaacaugaucacggagaugcuccagaaggaguacauggaccggcagggcaagaccccgcuggggcugguggaccuguucgucuucuccaccagcuucuaccucaucuccaucuuccugcaccuggugaagauccccacccaccgccacaucgugggcaagcccugccccaagccgcaccggcucaaccacauggggaucugcagcugcggccuguacaagcaccccgggguccccgugaaguggaagcgcugaggacuaguuauaagacugacuagcccgaugggccucccaacgggcccuccuccccuccuugcaccgagauuaauaaaaaaaaaaaaaaaaaaaaaaaaaaaaaaaaaaaaaaaaaaaaaaaaaaaaaaaaaaaaaaaaaaaaaaaaaaaaaaaaaaaaaaaaaaaaaaaaaaaa

SEQ ID NO: 31336 - RNA, 1662 nt, Artificial Sequence
  mRNA product Design i-3 (A100) comprising derived and/or modified sequence from LASV(GA391;Clade III)__CAA36645__GPCmut6 (opt1)
aggagaaagcuuaccaugggccagaucgugaccuucuuccaggaggucccccacgugaucgaggaggugaugaacaucguccugaucgcccucagcauccuggccauccugaaggggcucuacaacguggcgaccugcggccugaucgggcuggugacguuccuccugcuguccggccgcagcugcucccucaucuacaaggggaccuacgagcugcagacccuggagcucaacauggagacccugaacaugugcaugccgcugagcugcacgaagaacaacucccaccacuacauccgggucggcaacgagaccggccucgagcugacccugaccaacacgagcauccucaaccacaaguucugcaaccuguccgacgcccacaagcgcaaccuguacgaccacagccucauguccaucaucagcaccuuccaccuguccauccccaacuucaaccaguacgaggccaugagcugcgacuucaacgggggcaagaucaccgugcaguacaaccugucccacagcuucgccguggacgccgcggggcacugcggcacccucgccaacgggguccugcagacguucaugcggauggccuggggcggcuccuacaucgcccuggacagcgggcgcggcaacugggacugcaucaugaccuccuaccaguaccucaucauccagaacaccaccugggacgaccacugccaguucagccggcccucccccaucggguaccugggccugcucagccagcgcacgcgggacaucuacaucagccgccggcugcugggcaccuucaccuggacccucuccgacagcgaggggaacgagacgccgggcggguacugccugacccgcuggaugcugaucgaggcggagcucaagugcuucggcaacaccgccguggccaagugcaacgagaagcacgacgaggaguucugcgacaugcugcggcuguucgacuucugcaagcaggccauccgccggcucaagacccccgcccagauguccauccagcugaucaacaaggcggugaacgcccugaucaacgaccagcucaucaugaagaaccaccuccgcgacaucauggggauccccuacugcaacuacagccgguacugguaccugaaccacacguccaccggcaagaccagccugccccgcugcuggcugaucuccaacggcagcuaccugaacgagaccaaguucuccgacgacaucgagcagcaggccgacaacaugaucacggagaugcugcagaaggaguacaucgaccggcaggggaagaccccgcucggccuggucgaccuguucguguucagcaccuccuucuaccucaucagcaucuuccugcaccuggugaagauccccacccaccgccacaucgucgggaagcccugccccaagccgcaccggcucaaccacaugggcaucugcuccugcgggcuguacaagcagcccggcgugcccgugcgcuggaagcggugaggacuaguuauaagacugacuagcccgaugggccucccaacgggcccuccuccccuccuugcaccgagauuaauaaaaaaaaaaaaaaaaaaaaaaaaaaaaaaaaaaaaaaaaaaaaaaaaaaaaaaaaaaaaaaaaaaaaaaaaaaaaaaaaaaaaaaaaaaaaaaaaaaaa

SEQ ID NO: 31337 - RNA, 1665 nt, Artificial Sequence
  mRNA product Design i-3 (A100) comprising derived and/or modified sequence from LASV(AV;Clade V)__CCA30314__GPCmut6 (opt1)
aggagaaagcuuaccaugggccagaucgugaccuucuuccaggaggucccccacgugaucgaggaggugaugaacaucguccugaucgcccucagcauccuggccgugcugaaggggcucuacaacaucgcgaccugcggccugaucgggcugaucacguuccuccugcugugcggccgcuccugcagcuccaaccucuacaaggggguguacgagcugcagagccuggaccucaacauggagacccugaacaugugcaugccgcuguccugcaccaagaacaacagccaccacuacauccgggucggcaacgacaccggccucgagcugacgcugaccaacaccuccauccucaaccacaaguucugcaaccugagcgacgcccacaagaaggaccuguacgaccacgcccucauguccaucaucagcaccuuccaccuguccauccccaacuucaaccaguacgaggccaugagcugcgacuucaacgggggcaagaucuccgugcaguacaaccugagccacuccuacgccaucgacgcggccaaccacugcgggacgguggccaacggcauccuccagaccuucaugcgcauggccuggggcgggagcuacaucgcgcuggacuccggccgggggaacugggacugcaucaugaccagcuaccaguaccugaucauccagaacaccacgugggagaaccacugccaguucucccgccccagccccaucggcuaccucgggcugcugagccagcggacccgcgacaucuacaucucccggcgccuccugggcaccuucaccuggacgcugagcgacuccgagggcaacgccacccccgggggcuacugccucacccgguggaugcugaucgaggccgagcugaagugcuucgggaacaccgccgucgccaagugcaacgagaagcacgacgaggaguucugcgacaugcuccgccuguucgacuucugcaagcaggcgaucagccggcugaaguccccggcccagaugagcauccagcucaucaacaaggccgugaacgcccugaucaacgaccagcugaucaugaagaaccaccuccgcgacaucaugggcauccccuacugcaacuacuccaaguacugguaccugaaccacacgaucaccgggaagaccagccugcccaagugcuggcucguguccaacggcagcuaccugaacgagacccacuucuccgacgacaucgagcagcaggccgacaacaugaucacggagaugcugcagaaggaguacauggagcggcagggcaagaccccgcuggggcucgucgaccuguucguguucagcaccuccuucuaccugaucagcaucuuccuccgccuggugaagauccccacccaccggcacaucgucggcaagcccugccccaagccgcaccgccugaaccacauggggaucugcuccugcggccucuacaagcagcccggggugcccgugcgguggaagcgcugaggacuaguuauaagacugacuagcccgaugggccucccaacgggcccuccuccccuccuugcaccgagauuaauaaaaaaaaaaaaaaaaaaaaaaaaaaaaaaaaaaaaaaaaaaaaaaaaaaaaaaaaaaaaaaaaaaaaaaaaaaaaaaaaaaaaaaaaaaaaaaaaaaaa

SEQ ID NO: 31338 - RNA, 1662 nt, Artificial Sequence
  mRNA product Design i-3 (A100) comprising derived and/or modified sequence from LASV(Togo/2016/7082;Clade VI)__AMR44577__GPCmut6 (opt1)
aggagaaagcuuaccaugggccagaucaucaccuucuuccaggaggugccccacgucaucgaggaggugaugaacaucgugcugaucgcccucagccugcuggccauccucaagggggucuacaacguggcgaccugcggcaucaucgggcuggugacguuccuguuccucugcggccgcuccugcagccugaucuacaagggguccuacgagcugcagacccucgagcugaacauggagacccugaacaugugcaugccgcucagcugcaccaagaacuccagccaccacuacauccgggucggcaacgagacgggccuggagcugacccucaccaacaccuccaucaucaaccacaaguucugcaaccugagcgacgcccacaagcgcaaccuguacgaccacgcccucauguccauccugagcacguuccaccuguccauccccaacuucaaccaguacgaggccaugagcugcgacuucaacgggggcaagaucuccgugcaguacaaccucagccacgccuacgcgguggacgccgccgagcacugcgggaccgucgccaacggcgugcugcagaccuucaugcggauggcguggggcggguccuacaucgcccuggacagcggccgcgggaacugggacugcaucaugaccuccuaccaguaccucaucauccagaacacgaccugggaggaccacugccaguucagccggcccucccccaucggcuaccuggggcugcucagccagcgcacccgggacaucuacaucagccgccggcugcugggcaccuucacguggacccucuccgacagcgagggcaacgagacccccgggggcuacugccugacccgcuggaugcugaucgaggccgagcucaagugcuucgggaacacggccguggccaagugcaacgagaagcacgacgaggaguucugcgacaugcugcggcuguucgacuucugcaagcaggcgauccagcgccucaaguccccggcccagaugagcauccagcugaucaacaaggccgucaacgcccugaucaacgaccagcucaucaugaagaaccaccuccgggacaugaugggcauccccuacugcaacuacuccaaguacugguaccugaaccacaccagcuccgggcgcaccagccugcccaagugcuggcugguguccaacggcagcuaccugaacgagacccacuucuccgacgacaucgagcagcaggccgacaacaugaucacggagaugcuccagaaggaguacaucgaccggcagggcaagaccccgcuggggcugguggaccuguucgucuucagcaccuccuucuaccucaucagcaucuuccugcaccugaucaagauccccacccaccgccacaucgugggcaagcccugccccaagccgcaccggcucaaccacauggggaucugcuccugcggccuguacaagcagcccggggugcccacgcgcuggaagcggugaggacuaguuauaagacugacuagcccgaugggccucccaacgggcccuccuccccuccuugcaccgagauuaauaaaaaaaaaaaaaaaaaaaaaaaaaaaaaaaaaaaaaaaaaaaaaaaaaaaaaaaaaaaaaaaaaaaaaaaaaaaaaaaaaaaaaaaaaaaaaaaaaaaa

SEQ ID NO: 31339 - RNA, 1662 nt, Artificial Sequence
  mRNA product Design i-3 (A100) comprising derived and/or modified sequence from LASV(KAK-428;Clade n.d. (VII))__ANH09740__GPCmut6 (opt1)
aggagaaagcuuaccaugggccagaucgugaccuucuuccaggaggucccccacgugaucgaggaggugaugaacaucguccugaucgcccucagccugcuggccauccucaaggggcuguacaacuucgcgaccugcggcgugaucgggcugaucacguuccuccugcugugcggccgcuccugcagcgccaccuacaaggggcaguacgagcuccagacccuggagcugaacauggagucccucaacaugugcaugccgcugagcugcaccaagaacaacucccaccacuacauccgggccggcaacaacacgggccuggagcucacccugaccaacaccagcaucaucucccacaaguucugcaaccugagcgacgcccacaagaagaaccucuacgaccacacgcugauguccaucaucaccaccuuccaccugagcauccccaacuucaaccaguacgaggccauguccugcgacuucaacgggggcaagaucagcauccaguacaaccucucccacagcuacgcgggggacgccgcccagcacugcggcaccguggccaacgggguccugcagacguucaugcgcauggcguggggcggcuccuaccuggcccucgacagcgggcggcgcggcugggacugcaucaucuccagcuaccaguaccugaucauccagaacaccaccugggacgaccacugccaguucucccggcccagccccaucggguaccugggcuucgugagccagaagacccgcgacaucuacaucucccggcgccuccugggcacguucaccuggacccugagcgacuccgaggggcacgacaugccgggcggguacugccucacccgguggaugcugaucgaggccgaccugaagugcuucggcaacacggccguggccaagugcaacgagaagcacgacgaggaguucugcgacauguggcgccucuucgacuucugcaagcaggcgauccagcggcugaaggcccccgcccagaugaacauccagcugaucaacaaggccgucaacgcccucaucaacgaccagcugaugaugaagaaccaccuccgcgacaucauggggauccccuacugcaacuacagcaaguucugguaccugaacaacaccaccaccggccggacgucccugccccgcugcuggcugaucagcaacggcuccuaccucaacgagacccacuucagcgacgacaucgagcagcaggcggacaacaugaucaccgagaugcugcagaaggaguacauggaccggcaggggaagaccccgcugggccucguggaccuguucguguucuccacgagcuucuaccugaucaccaucuuccugcaccucgucaagauccccacccaccgccacaucguggggaagcccugccccaagccgcaccggcugaaccacaugggcaucugcuccugcgggcuguacaagcagcccggcgugcccguccgcuggaagcggugaggacuaguuauaagacugacuagcccgaugggccucccaacgggcccuccuccccuccuugcaccgagauuaauaaaaaaaaaaaaaaaaaaaaaaaaaaaaaaaaaaaaaaaaaaaaaaaaaaaaaaaaaaaaaaaaaaaaaaaaaaaaaaaaaaaaaaaaaaaaaaaaaaaa

SEQ ID NO: 31340 - RNA, 1662 nt, Artificial Sequence; identical to SEQ ID NO: 31334
  mRNA product Design i-3 (A100) comprising derived and/or modified sequence from LASV(Pinneo-NIG-1969;Clade I)__AIT17836__GPCmut6 (opt1)

SEQ ID NO: 31341 - RNA, 1662 nt, Artificial Sequence
  mRNA product Design i-3 (A100) comprising derived and/or modified sequence from LASV(ISTH0009-NIG-2011;Clade II)__AIT17404__GPCmut6 (opt1)
aggagaaagcuuaccaugggccagaucaucaccuucuuccaggaggugccccacgucaucgaggaggugaugaacaucgugcugaucgcccucagccugcuggccauccucaaggggaucuacaacgucgcgaccugcggccuguucgggcugguguccuuccuccugcugugcggccgcagcugcuccacgaccuacaaggggguguacgagcuccagacccuggagcuggacauggccagccucaacaugugcaugccgcuguccugcaccaagaacaacagccaccacuacaucauggucggcaacgagacgggccuggagcucacccugaccaacaccuccaucaucaaccacaaguucugcaaccugagcgacgcccacaagaagaaccucuacgaccacgcccugauguccaucaucagcacguuccaccuguccauccccaacuucaaccaguacgaggccaugagcugcgacuucaacgggggcaagaucuccgugcaguacaaccucagccacgcguacgccguggacgccgccaaccacugcgggaccaucgcgaacggcguccugcagaccuucaugcggauggccuggggcggguccuacaucgcccuggacagcggcaagggguccugggacugcaucaugaccagcuaccaguaccucaucauccagaacacgaccugggaggaccacugccaguucucccgccccagccccaucggcuaccuggggcugcucagccagcggacccgcgacaucuacaucucccggcgccugcugggcaccuucacguggacccucagcgacuccgagggcaacgagacccccgggggcuacugccugacccgguggaugcugaucgaggccgagcucaagugcuucgggaacacggccguggcgaagugcaacgagaagcacgacgaggaguucugcgacaugcugcgccuguucgacuucugcaagcaggccauccggcgccucaagaccccggcccagaugagcauccagcugaucaacaaggccgugaacgcccugaucaacgaccagcucaucaugaagaaccaccuccgggacaucaugggcauccccuacugcaacuacuccaaguacugguaccugaaccacaccgucaccgggaagacgagccugccccgcugcuggcugguguccaacggcagcuaccugaacgagacccacuucuccgacgacaucgagcagcaggcggacaacaugaucaccgagcuccugcagaaggaguacauggaccggcagggcaagaccccgcuggggcugguggaccucuucgucuucagcacguccuucuaccugaucagcaucuuccugcaccucaucaagauccccacccaccgccacaucaccggcaagcccugccccaagccgcaccggcugaaccacauggggaucugcuccugcggccuguacaagcaccccggggugcccgugaaguggaagcgcugaggacuaguuauaagacugacuagcccgaugggccucccaacgggcccuccuccccuccuugcaccgagauuaauaaaaaaaaaaaaaaaaaaaaaaaaaaaaaaaaaaaaaaaaaaaaaaaaaaaaaaaaaaaaaaaaaaaaaaaaaaaaaaaaaaaaaaaaaaaaaaaaaaaa

SEQ ID NO: 31342 - RNA, 1662 nt, Artificial Sequence
  mRNA product Design i-3 (A100) comprising derived and/or modified sequence from LASV(ISTH2010-NIG-2012;Clade II)__AIT17482__GPCmut6 (opt1)
aggagaaagcuuaccaugggccagaucaucaccuucuuccaggaggugccccacgucaucgaggaggugaugaacaucgugcugaucgcccucagccugcuggccauccucaaggggaucuacaacgucgcgaccugcggccuguucgggcugguguccuuccuccugcugugcggccgcagcugcuccacgaccuacaaggggguguacgagcuccagacccuggagcuggacauggccagccucaacaugugcaugccgcuguccugcaccaagaacaacagccaccacuacaucauggucggcaacgagacgggccuggagcucacccugaccaacaccuccaucaucaaccacaaguucugcaaccugagcgacgcccacaagaagaaccucuacgaccacgcccugauguccaucaucagcacguuccaccuguccauccccaacuucaaccaguacgaggccaugagcugcgacuucaacgggggcaagaucuccgugcaguacaaccucagccacgcguacgccguggacgccgccaaccacugcgggaccaucgcgaacggcguccugcagaccuucaugcggauggccuggggcggguccuacaucgcccuggacagcggcaagggguccugggacugcaucaugaccagcuaccaguaccucaucauccagaacaucacgugggaggaccacugccaguucucccgccccagccccaucggcuaccuggggcugcucagccagcggacccgcgacaucuacaucucccggcgccugcugggcaccuucaccuggacgcucagcgacuccgagggcaacgagacccccgggggcuacugccugacccgguggaugcugaucgaggccgagcucaagugcuucgggaacaccgccguggcgaagugcaacgagaagcacgacgaggaguucugcgacaugcugcgccuguucgacuucugcaagcaggccauccggcgccucaagacgccggcccagaugagcauccagcugaucaacaaggccgugaacgcccugaucaacgaccagcucaucaugaagaaccaccuccgggacaucaugggcauccccuacugcaacuacuccaaguacugguaccugaaccacaccgucaccgggaagaccagccugccccgcugcuggcugguguccaacggcagcuaccugaacgagacgcacuucuccgacgacaucgagcagcaggcggacaacaugaucaccgagcuccugcagaaggaguacaucgaccggcagggcaagaccccgcuggggcugguggaccucuucgucuucagcaccuccuucuaccugaucagcaucuuccugcaccucgugaagauccccacgcaccgccacguggucggcaagcccugccccaagccgcaccggcugaaccacauggggaucugcuccugcggccuguacaagcaccccggggugcccgugaaguggaagcgcugaggacuaguuauaagacugacuagcccgaugggccucccaacgggcccuccuccccuccuugcaccgagauuaauaaaaaaaaaaaaaaaaaaaaaaaaaaaaaaaaaaaaaaaaaaaaaaaaaaaaaaaaaaaaaaaaaaaaaaaaaaaaaaaaaaaaaaaaaaaaaaaaaaaa

SEQ ID NO: 31343 - RNA, 1662 nt, Artificial Sequence
  mRNA product Design i-3 (A100) comprising derived and/or modified sequence from LASV(Lassa virus/H.sapiens-wt/NGA/2015/ISTH_0543;Clade II)__AVO03639__GPCmut6 (opt1)
aggagaaagcuuaccaugggccagaucaucaccuucuuccaggaggugccccacgucaucgaggaggugaugaacaucgugcugaucgcccucagccugcuggccauccucaaggggaucuacaacgucgcgaccugcggccuguucgggcugguguccuuccuccugcugugcggccgcagcugcuccacgaccuacaaggggguguacgagcuccagacccuggagcuggacauggccaaccucaacaugugcaugccgcugagcugcaccaagaacaacucccaccacuacaucauggucggcaacgagacgggccuggagcucacccugaccaacaccagcaucaucaaccacaaguucugcaaccuguccgacgcccacaagaagaaccucuacgaccacgcccugaugagcaucaucuccacguuccaccugagcauccccaacuucaaccaguacgaggccauguccugcgacuucaacgggggcaagaucagcgugcaguacaaccucucccacaccuacgcgguggacgccgccaaccacugcgggaccaucgccaacggcguccugcagaccuucaugcggauggcguggggcgggagcuacaucgcccuggacuccggcaaggggagcugggacugcaucaugacguccuaccaguaccucgugauccagaacaccaccugggaggaccacugccaguucagccgccccucccccaucggcuaccuggggcugcucagccagcggacccgcgacaucuacaucagccggcgccugcugggcacguucaccuggacccucuccgacagcgagggcaacgagacccccgggggcuacugccugacgcgguggaugcugaucgaggccgagcucaagugcuucgggaacaccgccguggccaagugcaacgagaagcacgacgaggaguucugcgacaugcugcgccuguucgacuucugcaagcaggcgauccggcgccucaagaccccggcccagauguccauccagcugaucaacaaggccgucaacgcccugaucaacgaccagcucaucaugaagaaccaccuccgggacaucaugggcauccccuacugcaacuacagcaaguacugguaccugaaccacaccgugacggggaagaccucccugccccgcugcuggcuggugagcaacggcuccuaccugaacgagacccacuucagcgacgacaucgagcagcaggccgacaacaugaucaccgagcuccugcagaaggaguacaucgaccggcagggcaagacgccgcuggggcuggucgaccucuucguguucuccaccagcuucuaccugaucuccaucuuccugcaccucgugaagauccccacccaccgccacaucaccggcaagcccugccccaagccgcaccggcugaaccacauggggaucugcagcugcggccuguacaagcaccccgggguccccgugaaguggaagcgcugaggacuaguuauaagacugacuagcccgaugggccucccaacgggcccuccuccccuccuugcaccgagauuaauaaaaaaaaaaaaaaaaaaaaaaaaaaaaaaaaaaaaaaaaaaaaaaaaaaaaaaaaaaaaaaaaaaaaaaaaaaaaaaaaaaaaaaaaaaaaaaaaaaaa

SEQ ID NO: 31344 - RNA, 1662 nt, Artificial Sequence
  mRNA product Design i-3 (A100) comprising derived and/or modified sequence from LASV(Lassa virus/H.sapiens-wt/NGA/2016/ISTH_0009;Clade II)__AVO03571__GPCmut6 (opt1)
aggagaaagcuuaccaugggccagaucaucaccuucuuccaggaggugccccacgucaucgaggaggugaugaacaucgugcugaucgcccucagccugcuggccauccucaaggggaucuacaacgucgcgaccugcggccugcuggggcucguguccuuccugcugcucugcggccgcagcugcuccacgaccuacaaggggguguacgagcugcagacccuggagcucgacauggccagccugaacaugugcaugccgcuguccugcaccaagaacaacagccaccacuacaucauggucggcaacgagacgggccucgagcugacccugaccaacaccuccaucaucaaccacaaguucugcaaccucagcgacgcccacaagaagaaccuguacgaccacgcccugauguccaucaucagcacguuccaccucuccauccccaacuucaaccaguacgaggccaugagcugcgacuucaacgggggccggaucuccgugcaguacaaccugagccacuccuacgcgguggacgccgccaaccacugcgggaccaucgccaacggcguccugcagaccuucaugcgcauggcguggggcgggagcuacaucgcccucgacuccggcaaggggagcugggacugcaucaugaccuccuaccaguaccugaucauccagaacacgaccugggaggaccacugccaguucagccggcccagccccaucggcuaccuggggcuccugucccagcgcacccgggacaucuacaucagccgccggcugcucggcaccuucacguggacccuguccgacagcgagggcaacgagacccccgggggcuacugccugacccgcuggaugcucaucgaggccgagcugaagugcuucgggaacacggccguggccaagugcaacgagaagcacgacgaggaguucugcgacaugcugcggcuguucgacuucugcaagcaggcgauccgccggcugaagaccccggcccagauguccauccagcugaucaacaaggccgugaacgcccucaucaacgaccagcugaucaugaagaaccaccuccgcgacaucaugggcauccccuacugcaacuacagcaaguacugguaccucaaccacaccgucaccgggaagacgucccugccccggugcuggcuggugagcaacggcuccuaccucaacgagacccacuucagcgacgacaucgagcagcaggccgacaacaugaucaccgagcugcugcagaaggaguacaucgaccgccagggcaagaccccgcuggggcucguggaccuguucgucuucuccacgagcuucuaccugaucuccaucuuccuccaccuggugaagauccccacccaccggcacaucaccggcaagcccugccccaagccgcaccgccugaaccacauggggaucugcagcugcggccucuacaaccaccccggggugcccgucaaguggaagcggugaggacuaguuauaagacugacuagcccgaugggccucccaacgggcccuccuccccuccuugcaccgagauuaauaaaaaaaaaaaaaaaaaaaaaaaaaaaaaaaaaaaaaaaaaaaaaaaaaaaaaaaaaaaaaaaaaaaaaaaaaaaaaaaaaaaaaaaaaaaaaaaaaaaa

SEQ ID NO: 31345 - RNA, 1662 nt, Artificial Sequence
  mRNA product Design i-3 (A100) comprising derived and/or modified sequence from LASV(Lassa virus/H.sapiens-wt/NGA/2016/ISTH_0017;Clade II)__AVO03567__GPCmut6 (opt1)
aggagaaagcuuaccaugggccagaucaucaccuucuuccaggaggugccccacgucaucgaggaggugaugaacaucgugcugaucgcccucagccugcuggccauccucaaggggaucuacaacgucgcgaccugcggccuguucgggcugguguccuuccuccugcugugcggccgcagcugcuccacgaccuacaaggggguguacgagcuccagacccuggagcuggacauggccagccucaacaugugcaugccgcuguccugcaccaagaacaacagccaccacuacaucauggucggcaacgagacgggccuggagcucacccugaccaacaccuccaucaucaaccacaaguucugcaaccugagcgacgcccacaagaagaaccucuacgaccacgcccugauguccaucaucagcacguuccaccuguccauccccaacuucaaccaguacgaggccaugagcugcgacuucaacgggggcaagaucuccgugcaguacaaccucagccacaccuacgcgaucgacgccgccaaccacugcgggaccaucgccaacggcgugcugcagaccuucaugcggauggcguggggcggguccuacaucgcccuggacagcggcaagggguccugggacugcaucaugacgagcuaccaguaccucaucauccagaacaccaccugggaggaccacugccaguucucccgccccagccccaucggcuaccuggggcugcucagccagcggacccgcgacaucuacaucucccggcgccugcugggcacguucaccuggacccucagcgacuccgagggcaacgagacccccgggggcuacugccugacgcgguggaugcugaucgaggccgagcucaagugcuucgggaacaccgccgucgccaagugcaacgagaagcacgacgaggaguucugcgacaugcugcgccuguucgacuucugcaagcaggcgauccggcgccucaagaccccggcccagaugagcauccagcugaucaacaaggccgugaacgcccugaucaacgaccagcucaucaugaagaaccaccuccgggacaucaugggcauccccuacugcaacuacuccaaguacugguaccugaaccacaccgugacggggaagaccagccugccccgcugcuggcuggucuccaacggcagcuaccugaacgagacccacuucuccgacgacaucgagcagcaggccgacaacaugaucaccgagcuccugcagaaggaguacauggaccggcagggcaagacgccgcuggggcugguggaccucuucguguucagcaccuccuucuaccugaucagcaucuuccugcaccucguccgcauccccacccaccggcacgugaucggcaagcccugccccaagccgcaccgccugaaccacauggggaucugcuccugcggccuguacaagcaccccggggugcccgucaaguggaagcggugaggacuaguuauaagacugacuagcccgaugggccucccaacgggcccuccuccccuccuugcaccgagauuaauaaaaaaaaaaaaaaaaaaaaaaaaaaaaaaaaaaaaaaaaaaaaaaaaaaaaaaaaaaaaaaaaaaaaaaaaaaaaaaaaaaaaaaaaaaaaaaaaaaaa

SEQ ID NO: 31346 - RNA, 1662 nt, Artificial Sequence
  mRNA product Design i-3 (A100) comprising derived and/or modified sequence from LASV(Lassa virus/H.sapiens-wt/NGA/2018/ISTH_0959;Clade II)__AVV65099__GPCmut6 (opt1)
aggagaaagcuuaccaugggccagaucaucaccuucuuccaggaggugccccacgucaucgaggaggugaugaacaucgugcugaucgcccucagccugcuggccauccucaaggggaucuacaacgucgugaccugcggccuguucgggcugguguccuuccuccugcugugcggccgcagcugcuccacgaccuacaagggggucuacgagcuccagacccuggagcuggacauggcgagccucaacaugugcaugccgcuguccugcaccaagaacaacagccaccacuacaucauggugggcaacgagacgggccuggagcucacccugaccaacaccuccaucaucaaccacaaguucugcaaccugagcgacgcccacaagaagaaccucuacgaccacgcccugauguccaucaucagcacguuccaccuguccauccccaacuucaaccaguacgaggccaugagcugcgacuucaacgggggcaagaucuccgugcaguacaaccucagccacgccuacgcgaucgacgccgccaaccacugcgggaccaucgccaacggcguccugcagaccuucaugcggauggcguggggcggguccuacaucgcccuggacagcggcaagggguccugggacugcaucaugaccagcuaccaguaccucaucauccagaacacgaccugggaggaccacugccaguucucccgccccagccccaucggcuaccuggggcugcucagccagcggacccgcgacaucuacaucucccggcgccugcugggcaccuucacguggacccucagcgacuccgagggcaacgagacccccgggggcuacugccugacccgguggaugcugaucgaggccgagcucaagugcuucgggaacacggccguggccaagugcaacgagaagcacgacgaggaguucugcgacaugcugcgccuguucgacuucugcaagcaggcgauccggcgccucaagaccccggcccagaugagcauccagcugaucaacaaggccgugaacgcccugaucaacgaccagcucaucaugaagaaccaccuccgggacaucaugggcauccccuacugcaacuacuccaaguacugguaccugaaccacaccgucaccgggaagacgagccugccccgcugcuggcugguguccaacggcagcuaccugaacgagacccacuucuccgacgacaucgagcagcaggccgacaacaugaucaccgagcuccugcagaaggaguacaucgaccggcagggcaagaccccgcuggggcugguggaccucuucgucuucagcacguccuucuaccugaucagcaucuuccugcaccucgugaagauccccacccaccgccacgugaucggcaagcccugccccaagccgcaccggcugaaccacauggggaucugcuccugcggccuguacaagcaccccgggguccccgugaaguggaagcgcugaggacuaguuauaagacugacuagcccgaugggccucccaacgggcccuccuccccuccuugcaccgagauuaauaaaaaaaaaaaaaaaaaaaaaaaaaaaaaaaaaaaaaaaaaaaaaaaaaaaaaaaaaaaaaaaaaaaaaaaaaaaaaaaaaaaaaaaaaaaaaaaaaaaa

SEQ ID NO: 31347 - RNA, 1662 nt, Artificial Sequence
  mRNA product Design i-3 (A100) comprising derived and/or modified sequence from LASV(LASV003-NIG-2008;Clade II)__AIT17580__GPCmut6 (opt1)
aggagaaagcuuaccaugggccagaucaucaccuucuuccaggaggugccccacgucaucgaggaggugaugaacaucgugcugaucgcccucagccugcuggccauccucaaggggaucuacaacgucgcgaccugcggccuguucgggcugguguccuuccuccugcugugcggccgcagcugcuccacgaccuacaaggggguguacgagcuccagacccuggagcuggacauggccagccucaacaugugcaugccgcuguccugcaccaagaacaacagccaccacuacaucauggucggcaacgagacgggccuggagcucacccugaccaacaccuccaucaucaaccacaaguucugcaaccugagcgacgcccacaagaagaaccucuacgaccacgcccugauguccaucaucagcacguuccaccuguccauccccaacuucaaccaguacgaggccaugagcugcgacuucaacgggggcaagaucuccgugcaguacaaccucagccacaccuacgcgguggacgccgccaaccacugcgggaccaucgccaacggcguccugcagaccuucaugcggauggcguggggcggguccuacaucgcccuggacagcggcaagggguccugggacugcaucaugacgagcuaccaguaccucaucauccagaacaccaccugggaggaccacugccaguucucccgccccagccccaucggcuaccuggggcugcucagccagcggacccgcgacaucuacaucucccggcgccugcugggcacguucaccuggacccucagcgacuccgagagcaacgagaccccgggcggguacugccugacgcgguggaugcugaucgaggccgagcucaagugcuucggcaacaccgccguggccaagugcaacgagaagcacgacgaggaguucugcgacaugcugcgccuguucgacuucugcaagcaggcgauccggcgccucaaggcccccgcccagauguccauccagcugaucaacaaggccgugaacgcccugaucaacgaccagcucaucaugaagaaccaccuccgggacaucauggggauccccuacugcaacuacagcaaguacugguaccugaaccacaccgucaccggccgcacgucccugccccggugcuggcuggugagcaacggguccuaccugaacgagacccacuucagcgacgacaucgagcagcaggcggacaacaugaucaccgagcuccugcagaaggaguacauggaccgccagggcaagaccccgcugggccugguggaccucuucgucuucuccacgagcuucuaccugaucuccaucuuccugcaccucgugaagauccccacccaccggcacgugaucgggaagcccugccccaagccgcaccgccugaaccacaugggcaucugcagcugcgggcuguacaagcaccccggcguccccgugaaguggaagcggugaggacuaguuauaagacugacuagcccgaugggccucccaacgggcccuccuccccuccuugcaccgagauuaauaaaaaaaaaaaaaaaaaaaaaaaaaaaaaaaaaaaaaaaaaaaaaaaaaaaaaaaaaaaaaaaaaaaaaaaaaaaaaaaaaaaaaaaaaaaaaaaaaaaa

SEQ ID NO: 31348 - RNA, 1662 nt, Artificial Sequence
  mRNA product Design i-3 (A100) comprising derived and/or modified sequence from LASV(LASV035-NIG-2009;Clade II)__AIT17588__GPCmut6 (opt1)
aggagaaagcuuaccaugggccagaucaucaccuucuuccaggaggugccccacgucaucgaggaggugaugaacaucgugcugaucgcccucagccugcuggccauccucaaggggaucuacaacgucgcgaccugcggccuguucgggcugguguccuuccuccugcugugcggccgcagcugcuccacgaccuacaaggggguguacgagcuccagacccuggagcuggacauggccagccucaacaugugcaugccgcuguccugcaccaagaacaacagccaccacuacaucauggucggcaacgagacgggccuggagcucacccugaccaacaccuccaucaucaaccacaaguucugcaaccugagcgacgcccacaagaagaaccucuacgaccacgcccugauguccaucaucagcacguuccaccuguccauccccaacuucaaccaguacgaggccaugagcugcgacuucaacgggggcaagaucuccgugcaguacaaccucagccacgcguacgccguggacgccgccaaccacugcgggaccaucgcgaacggcguccugcagaccuucaugcggauggccuggggcggguccuacaucgcccuggacagcggcaagggguccugggacugcaucaugaccagcuaccaguaccucaucauccagaacacgaccugggaggaccacugccaguucucccgccccagccccaucggcuaccuggggcugcucagccagcggacccgcgacaucuacaucucccggcgccugcugggcaccuucacguggacccucagcgacuccgagggcaacgagacccccgggggcuacugccugacccgguggaugcugaucgaggccgagcucaagugcuucgggaacacggccguggcgaagugcaacgagaagcacgacgaggaguucugcgacaugcugcgccuguucgacuucugcaagcaggccauccggcgccucaaggccccggcccagaugagcauccagcugaucaacaaggccgugaacgcgcugaucaacgaccagcucaucaugaagaaccaccuccgggacaucaugggcauccccuacugcaacuacuccaaguacugguaccugaaccacaccgucaccgggaagaccagccugccccgcugcuggcugguguccaacggcagcuaccugaacgagacgcacuucuccgacgacaucgagcagcaggccgacaacaugaucaccgagcuccugcagaaggaguacaucgaccggcagggcaagaccccgcuggggcugguggaccucuucgucuucagcaccuccuucuaccugaucagcaucuuccugcaccucgugaagauccccacgcaccgccacgugaucggcaagcccugccccaagccgcaccggcugaaccacauggggaucugcuccugcggccuguacaagcaccccgggguccccgugaaguggaagcgcugaggacuaguuauaagacugacuagcccgaugggccucccaacgggcccuccuccccuccuugcaccgagauuaauaaaaaaaaaaaaaaaaaaaaaaaaaaaaaaaaaaaaaaaaaaaaaaaaaaaaaaaaaaaaaaaaaaaaaaaaaaaaaaaaaaaaaaaaaaaaaaaaaaaa

SEQ ID NO: 31349 - RNA, 1662 nt, Artificial Sequence
  mRNA product Design i-3 (A100) comprising derived and/or modified sequence from LASV(LASV1000-NIG-2009;Clade II)__AIT17782__GPCmut6 (opt1)
aggagaaagcuuaccaugggccagaucaucaccuucuuccaggaggugccccacgucaucgaggaggugaugaacaucgugcugaucgcccucagccugcuggccauccucaaggggaucuacaacgucgcgaccugcggccuguucgggcugguguccuuccuccugcugugcggccgcagcugcuccacgaccuacaaggggguguacgagcuccagacccuggagcuggacauggccagccucaacaugugcaugccgcuguccugcaccaagaacaacagccaccacuacaucauggucggcaacgagacgggccuggagcucacccugaccaacaccuccaucaucaaccacaaguucugcaaccugagcgacgcccacaagaagaaccucuacgaccacgcccugauguccaucaucagcacguuccaccuguccauccccaacuucaaccaguacgaggccaugagcugcgacuucaacgggggcaagaucuccgugcaguacaaccucagccacaccuacgcgguggacgccgccaaccacugcgggaccaucgccaacggcguccugcagaccuucaugcggauggcguggggcggguccuacaucgcccuggacagcggcaagggguccugggacugcaucaugacgagcuaccaguaccucaucauccagaacaccaccugggaggaccacugccaguucucccgccccagccccaucggcuaccuggggcugcucagccagcggacccgcgacaucuacaucucccggcgccugcugggcacguucaccuggacccucagcgacuccgagggcaacgagacccccgggggcuacugccugacgcgguggaugcugaucgaggccgagcucaagugcuucgggaacaccgccguggccaagugcaacgagaagcacgacgaggaguucugcgacaugcugcgccuguucgacuucugcaagcaggcgaucaagcggcucaagaccccggcccagaugagcauccagcugaucaacaaggccgugaacgcccugaucaacgaccagcucaucaugaagaaccaccuccgcgacaucaugggcauccccuacugcaacuacuccaaguacugguaccugaaccacaccgucacggggaagaccagccugccccggugcuggcugguguccaacggcagcuaccugaacgagacccacuucuccgacgacaucgagcagcaggccgacaacaugaucaccgagcuccugcagaaggaguacaucgaccgccagggcaagacgccgcuggggcugguggaccucuucgucuucagcaccuccuucuaccugaucagcaucuuccugcaccucgugaagauccccacccaccggcacguggucggcaagcccugccccaagccgcaccgccugaaccacauggggaucugcuccugcggccuguacaagcaccccggggugcccgugaaguggaagcggugaggacuaguuauaagacugacuagcccgaugggccucccaacgggcccuccuccccuccuugcaccgagauuaauaaaaaaaaaaaaaaaaaaaaaaaaaaaaaaaaaaaaaaaaaaaaaaaaaaaaaaaaaaaaaaaaaaaaaaaaaaaaaaaaaaaaaaaaaaaaaaaaaaaa

SEQ ID NO: 31350 - RNA, 1662 nt, Artificial Sequence
  mRNA product Design i-3 (A100) comprising derived and/or modified sequence from LASV(LASV221-NIG-2010;Clade II)__AIT17624__GPCmut6 (opt1)
aggagaaagcuuaccaugggccagaucaucaccuucuuccaggaggugccccacgucaucgaggaggugaugaacaucgugcugaucgcccucagccugcuggccauccucaaggggaucuacaacgucgcgaccugcggccuguucgggcugguguccuuccuccugcugugcggccgcagcugcuccacgaccuacaaggggguguacgagcuccagacccuggagcuggacauggccagccucaacaugugcaugccgcuguccugcaccaagaacaacagccaccacuacaucauggucggcaacgagacgggccuggagcucacccugaccaacaccuccaucaucaaccacaaguucugcaaccugagcgacgcccacaagaagaaccucuacgaccacgcccugauguccaucaucagcacguuccaccuguccauccccaacuucaaccaguacgaggccaugagcugcgacuucaacgggggcaagaucuccgugcaguacaaccucagccacaccuacgcgaucgacgccgccaaccacugcgggaccaucgccaacggcgugcugcagaccuucaugcggauggcguggggcggguccuacaucgcccuggacagcggcaagggguccugggacugcaucaugacgagcuaccaguaccucaucauccagaacaccaccugggaggaccacugccaguucucccgccccagccccaucggcuaccuggggcugcucagccagcggacccgcgacaucuacaucucccggcgccugcugggcacguucaccuggacccucagcgacuccgagggcaacgagacccccgggggcuacugccugacgcgguggaugcugaucgaggccgagcucaagugcuucgggaacaccgccgucgccaagugcaacgagaagcacgacgaggaguucugcgacaugcugcgccuguucgacuucugcaagcaggcgauccggcgccucaagaccccggcccagaugagcauccagcugaucaacaaggccgugaacgcccugaucaacgaccagcucaucaugaagaaccaccuccgggacaucaugggcauccccuacugcaacuacuccaaguacugguaccugaaccacaccgugacggggaagaccagccugccccgcugcuggcuggucuccaacggcagcuaccugaacgagacccacuucuccgacgacaucgagcagcaggccgacaacaugaucaccgagaugcuccagaaggaguacauggaccggcagggcaagacgccgcuggggcugguggaccuguucguguucagcaccuccuucuaccucaucagcaucuuccugcaccuggucaagauccccacccaccgccacgugaucggcaagcccugccccaagccgcaccggcucaaccacauggggaucugcuccugcggccuguacaagcaccccggggugcccgucaaguggaagcgcugaggacuaguuauaagacugacuagcccgaugggccucccaacgggcccuccuccccuccuugcaccgagauuaauaaaaaaaaaaaaaaaaaaaaaaaaaaaaaaaaaaaaaaaaaaaaaaaaaaaaaaaaaaaaaaaaaaaaaaaaaaaaaaaaaaaaaaaaaaaaaaaaaaaa

SEQ ID NO: 31351 - RNA, 1662 nt, Artificial Sequence
  mRNA product Design i-3 (A100) comprising derived and/or modified sequence from LASV(LASV237-NIG-2010;Clade II)__AIT17638__GPCmut6 (opt1)
aggagaaagcuuaccaugggccagaucaucaccuucuuccaggaggugccccacgucaucgaggaggugaugaacaucgugcugaucgcccucagccugcuggccauccucaaggggaucuacaacgucgcgaccugcggccuguucgggcugguguccuuccuccugcugugcggccgcagcugcuccacgaccuacaaggggguguacgagcuccagacccuggagcuggacauggccagccucaacaugugcaugccgcuguccugcaccaagaacaacagccaccacuacaucauggucggcaacgagacgggccuggagcucacccugaccaacaccuccaucaucaaccacaaguucugcaaccugagcgacgcccacaagaaggaccucuacgaccacgcccugauguccaucaucagcacguuccaccuguccauccccaacuucaaccaguacgaggccaugagcugcgacuucaacgggggcaagaucuccgugcaguacaaccucagccacaccuacgcgguggacgccgccaaccacugcgggaccaucgccaacggcguccugcagaccuucaugcggauggcguggggcggguccuacaucgcccuggacagcggcaagggguccugggacugcaucaugacgagcuaccaguaccucaucauccagaacaccaccugggaggaccacugccaguucucccgccccagccccaucggcuaccuggggcugcucagccagcggacccgcgacaucuacaucucccggcgccugcugggcacguucaccuggacccucagcgacuccgagggcaacgagacccccgggggcuacugccugacgcgguggaugcugaucgaggccgagcucaagugcuucgggaacaccgccguggccaagugcaacgagaagcacgacgaggaguucugcgacaugcugcgccuguucgacuucugcaagcaggcgauccggcgccucaagaccccggcccagaugagcauccagcugaucaacaaggccgugaacgcccugaucaacgaccagcucaucaugaagaaccaccuccgggacaucaugggcauccccuacugcaacuacuccaaguacugguaccugaaccacaccgucacggggaagaccagccugccccgcugcuggcugguguccaacggcagcuaccugaacgagacccacuucuccgacgacaucgagcagcaggccgacaacaugaucaccgagcuccugcagaaggaguacauggaccggcagggcaagacgccgcuggggcugguggaccucuucgucuucagcaccuccuucuaccugaucagcaucuuccugcaccucaucaagauccccacccaccgccacaucaccggcaagcccugccccaagccgcaccggcugaaccacauggggaucugcuccugcggccuguacaagcaccccggggugcccgugaaguggaagcgcugaggacuaguuauaagacugacuagcccgaugggccucccaacgggcccuccuccccuccuugcaccgagauuaauaaaaaaaaaaaaaaaaaaaaaaaaaaaaaaaaaaaaaaaaaaaaaaaaaaaaaaaaaaaaaaaaaaaaaaaaaaaaaaaaaaaaaaaaaaaaaaaaaaaa

SEQ ID NO: 31352 - RNA, 1662 nt, Artificial Sequence
  mRNA product Design i-3 (A100) comprising derived and/or modified sequence from LASV(LASV253-NIG-2011;Clade II)__AIT17670__GPCmut6 (opt1)
aggagaaagcuuaccaugggccagaucaucaccuucuuccaggaggugccccacgucaucgaggaggugaugaacaucgugcugaucgcccucagccugcuggccauccucaaggggaucuacaacgucgcgaccugcggccuguucgggcugguguccuuccuccugcugugcggccgcagcugcuccacgaccuacaaggggguguacgagcuccagacccuggagcuggacauggccagccucaacaugugcaugccgcuguccugcaccaagaacaacagccaccacuacaucauggucggcaacgagacgggccuggagcucacccugaccaacaccuccaucaucaaccacaaguucugcaaccugagcgacgcccacaagaagaaccucuacgaccacgcccugauguccaucaucagcacguuccaccuguccauccccaacuucaaccaguacgaggccaugagcugcgacuucaacgggggcaagaucuccgugcaguacaaccucagccacaccuacgcgguggacgccgccaaccacugcgggaccaucgccaacggcguccugcagaccuucaugcggauggcguggggcggguccuacaucgcccuggacagcggcaagggguccugggacugcaucaugacgagcuaccaguaccucaucauccagaacaccaccugggaggaccacugccaguucucccgccccagccccaucggcuaccuggggcugcucagccagcggacccgcgacaucuacaucucccggcgccugcugggcacguucaccuggacccucagcgacuccgagggcaacgagacccccgggggcuacugccugacgcgguggaugcugaucgaggccgagcucaagugcuucgggaacaccgccguggccaagugcaacgagaagcacgacgaggaguucugcgacaugcugcgccuguucgacuucugcaagcaggcgauccggcgccucaaggccccggcccagaugagcauccagcugaucaacaaggccgugaacgcccugaucaacgaccagcucaucaugaagaaccaccuccgggacaucaugggcauccccuacugcaacuacuccaaguacugguaccugaaccacaccgucaccgggcgcacgagccugccccggugcuggcugguguccaacggcagcuaccugaacgagacccacuucuccgacgacaucgagcagcaggcggacaacaugaucaccgagcuccugcagaaggaguacaucgaccgccagggcaagaccccgcuggggcugguggaccucuucgucuucagcacguccuucuaccugaucagcaucuuccugcaccucgugaagauccccacccaccggcacaucaucggcaagcccugccccaagccgcaccgccugaaccacauggggaucugcuccugcggccuguacaagcaccccggggugcccgucaaguggaagcggugaggacuaguuauaagacugacuagcccgaugggccucccaacgggcccuccuccccuccuugcaccgagauuaauaaaaaaaaaaaaaaaaaaaaaaaaaaaaaaaaaaaaaaaaaaaaaaaaaaaaaaaaaaaaaaaaaaaaaaaaaaaaaaaaaaaaaaaaaaaaaaaaaaaa

SEQ ID NO: 31353 - RNA, 1662 nt, Artificial Sequence
  mRNA product Design i-3 (A100) comprising derived and/or modified sequence from LASV(LASV254-NIG-2011;Clade II)__AIT17674__GPCmut6 (opt1)
aggagaaagcuuaccaugggccagaucaucaccuucuuccaggaggugccccacgucaucgaggaggugaugaacaucgugcugaucgcccucagccugcuggccauccucaaggggaucuacaacgucgcgaccugcggccuguucgggcugguguccuuccuccugcugugcggccgcagcugcuccacgaccuacaaggggguguacgagcuccagacccuggagcuggacaugaccaaccucaacaugugcaugccgcugagcugcacgaagaacaacucccaccacuacaucauggucggcaacgagaccggccuggagcucacccugaccaacacgagcaucaucaaccacaaguucugcaaccuguccgacgcccacaagaagaaccucuacaaccacgcccugaugagcaucaucuccaccuuccaccugagcauccccaacuucaaccaguacgaggccauguccugcgacuucaacgggggcaagaucagcgugcaguacaaccucucccacagcuacgccguggacgcggccaaccacugcgggaccaucgccaacggcguccugcagaccuucaugcggauggccuggggcggguccuacaucgcgcuggacagcggcaaggggaacugggacugcaucaugacguccuaccaguaccucaucauccagaacaccaccugggaggaccacugccaguucagccgccccucccccaucggcuaccuggggcugcucagccagcggacccgcgacaucuacaucagccggcgccugcugggcacguucaccuggacccucuccgacagcgagggcaacgagacccccgggggcuacugccugacgcgguggaugcugaucgaggccgagcucaagugcuucgggaacaccgccguggccaagugcaacgagaagcacgacgaggaguucugcgacaugcugcgccuguucgacuucugcaagcaggccauccggcgccucaagaccccggcgcaggccaacauccagcugaucaacaaggccgugaacgcccugaucaacgaccagcucaucaugaagaaccaccuccgggacaucaugggcauccccuacugcaacuacuccaaguacugguaccugaaccacaccgucacggggaagaccagccugccccgcugcuggcugguguccaacggcagcuaccugaacgagacccacuucuccgacgacaucgagcagcaggccgacaacaugaucaccgagcuccugcagaaggaguacauggaccggcagggcaagacgccgcuggggcugguggaccucuucgucuucagcaccuccuucuaccugaucagcaucuuccugcaccucgugaagauccccacccaccgccacgugaucggcaagcccugccccaagccgcaccggcugaaccacauggggaucugcuccugcggccuguacaagcaccccgggguccccgugaaguggaagcgcugaggacuaguuauaagacugacuagcccgaugggccucccaacgggcccuccuccccuccuugcaccgagauuaauaaaaaaaaaaaaaaaaaaaaaaaaaaaaaaaaaaaaaaaaaaaaaaaaaaaaaaaaaaaaaaaaaaaaaaaaaaaaaaaaaaaaaaaaaaaaaaaaaaaa

SEQ ID NO: 31354 - RNA, 1662 nt, Artificial Sequence
  mRNA product Design i-3 (A100) comprising derived and/or modified sequence from LASV(Nig08-A19;Clade III)__ADU56618__GPCmut6 (opt1)
aggagaaagcuuaccaugggccagaucgugaccuucuuccaggaggucccccacgugaucgaggaggugaugaacaucguccugaucgcccucagcauccuggccauccugaaggggcucuacaacaucgcgaccugcggccugaucgggcuggugacguuccuccugcuguccggccgcagcugcuccaugaccuacaaggggguguacgagcuccagacccuggagcugaacaugaacacccucaacaugugcaugccgcugagcugcacgaagaacaacucccaccacuacaucauggucggcaacgagaccggccuggagcucacccugaccaacacgagccugcuccaccacaaguucugcaaccuguccgacgcccacaagaagaaccuguacgaccacacccucaugagcaucaucuccaccuuccaccugagcauccccaacuucaaccaguacgaggccauguccugcgacuucaacgggggcaagaucaccgugcaguacaaccugagccacuccuacgccaucgacgccgcgaaccacugcgggacgguggccaacggcguccuccagaccuucaugcggauggccuggggcgggagcuacaucgcccuggacuccggccgcgggaagugggacugcaucaugaccagcuaccaguaccugaucauccagaacaccacgugggaggaccacugccaguucucccggcccagccccaucggcuaccucgggcugcugucccagcgcacccgggacaucuacaucagccgccggcuccugggcaccuucaccuggacgcugagcgacuccgagggcaacgagacccccgggggcuacugccucacccgcuggaugcugaucgaggcggagcugaagugcuucgggaacaccgccguggccaagugcaacgagaagcacgacgaggaguucugcgacaugcuccggcuguucgacuucugcaagcaggccauccgccggcugaaggccccggcgcagaugagcauccagcucaucaacaaggccgugaacgcccugaucaacgaccagcugaucaugaagaaccaccuccgcgacaucaugggcauccccuacugcaacuacuccaaguacugguaccugaaccacacgagcaccgggcggaccucccugccccgcugcuggcucgucagcaacggcuccuaccugaacgagacccacuucagcgacgacaucgagcagcaggccgacaacaugaucacggagaugcugcagaaggaguaccuggaccggcagggcaagaccccgcucgggcugguggaccuguucguguucuccaccagcuucuaccucaucuccaucuuccugcaccuggucaagauccccacccaccgccacaucgugggcaagcccugccccaagccgcaccggcucaaccacauggggaucugcagcugcggccuguacaagcagcccggggugcccguccgcuggaagcggugaggacuaguuauaagacugacuagcccgaugggccucccaacgggcccuccuccccuccuugcaccgagauuaauaaaaaaaaaaaaaaaaaaaaaaaaaaaaaaaaaaaaaaaaaaaaaaaaaaaaaaaaaaaaaaaaaaaaaaaaaaaaaaaaaaaaaaaaaaaaaaaaaaaa
